United States Patent Application Publication US 2004/0123343 A1 - sequence listing, part 45

SEQ ID NO: 150063 - protein, 472 aa, Oryza sativa
  Clone ID: PAT_MRT4530_50334C.1.pep
MTSGNEFNGITTQYIRTDQGAMRGNVPLPQVVISPKSCYSTIPDAYNDVARGYPPDTRQGQYNHIAPQQPPLRPSNTPPDLHRPKNMKELISDIIRATFGVEAKDRARENQKPYPYFYDAVPYPPNYKIPEFTKFSGVDSRTTYEHVDQFLAQCGRASSMDTSESNVGPDYLANLDNNATIIIAEPSDGSDCVTSLDNDGIAEPSNGLDCVASLESNIIENIAELSNGSNCIISESEIALSPKTESQIGHVDIGKDDDNVLRDSGEIESKVAMHTYQRPYPEHVDSIPYPQGFKVPNFTKFTDENAMTTMEHIGRFIDQCGKAGSDDLLKLKLFPLSLSNFASTWYSLLAPNSISTWLQMKHEFHDYVKDASLIEQRPIDTSSVTCETISVTSMPKTGIVSNPLPISPIDVNKKKGKSVIIGDPRPKTRINNAKAEDHKVAKDESSSFQRTKKPKLTFEMLIAKYEKGLAGQ

SEQ ID NO: 150064 - protein, 560 aa, Oryza sativa
  unsure (1)..(560): unsure at all Xaa locations
  Clone ID: PAT_MRT4530_50335C.1.pep
MAGQTVYYAGQTMPTIAGQTVPYPGQIAPPVAGLTAPLTTAELSDGSDYITSESEIALAPKTESQIGHVDVGKDNDNVLRDSIEIESKVDMHTYQRSYPEHVDSVPYPQGFEVPNFTKFTGEDARTTMEXIGQFIEQCGKVXLAPNSIFTWSQMEHEFHGYFKDASLMERRPVDDSSVTCETISVTSMPKTGIVSDPLPVSSIDVDKKKGKSVIIGDPRPKNSIKNAKAEDHKVAKDESSSFQMTKKPKLTFEMLMAKKRFGQISKQSEPSTIPTPYKPPVVMPWYPYPMSLYGYPFMYYMPWMPQPPMPHYQEWKESPRIVPNHSSDSRQDRFPQKNRSGRSKVKKVKKVWVRKEAKALEVVAAKEESQDVHVPTGDTVETTQAKEIEADAVTANIGGLTETAGRSNRQSTAGLTDLTGRSDQRLVAVEVNLSSLRYFKQDALSVEDYKTLMGSNFEDAIDKRLKTLKEMKTLQDSVFREQLMGDSLKKYFPSIWQGGMCLHSNLAPMDEIGKNCQSLESAGFPSLEPVRPQFLSRVGHGEGPIEGKTNPYLRDKAGSL

SEQ ID NO: 150065 - protein, 74 aa, Oryza sativa
  Clone ID: PAT_MRT4530_50336C.1.pep
MAGGDEAGIEELLEMGKMAGAGGTSCSLFREEKVGLAGEVGRQWRRQCGSRAGERKRRDDVLGGGRRKRVLEIC

SEQ ID NO: 150066 - protein, 325 aa, Oryza sativa
  Clone ID: PAT_MRT4530_50337C.1.pep
MASHVLLIRQDIATPWWFILRAFVGAAYVGFVALRLLAYLWLCLPRMPKGDLRRRYGEWAVVTGPTSGIGRAMALELARHGLNLVLVGRDPAILRQISDTIASLSELIVVNNAGVAEPGAVYLHEADVEAWARMVRVNVSAVTEVTAAVLPGMVARGRGGAVVNIGSAASESIPSLPLYTMYSSTKRYVAQFSRSLHVEYASKGIHVQCQILIKSGKYVHANRESNRSMYGSYVCACMQAPFLVDTRLMFRFEEAAGGVSLFTVTPDAYARAAVAWIGRGGALCTPGVRHQLLRRMAAAVPDSVHDWILLHLTTWNRKRRFSGSE

SEQ ID NO: 150067 - protein, 62 aa, Oryza sativa
  Clone ID: PAT_MRT4530_50338C.1.pep
VTIRPLPPSCGLILLICPFLHVVSPFKMELYMQFFAVWTVMRMIADIPLVFKPPCYRCSAVS

SEQ ID NO: 150068 - protein, 1363 aa, Oryza sativa
  Clone ID: PAT_MRT4530_50339C.1.pep
MAKNSDNNQLILDGRIGLVSSLCQVEPILRNPERKRKAVVLDQQFKGVFCAGQSSQSTSHVPDVCAGDFISTFHLPSRRTIRRRLSFASDNVPIPTGDGLSSGSPTLRAVETVCGLPHPPRCVAAKSRKKRKVAMICRREERLYADTLSLSSRSVRRRKIPNDNIVHQPHHTQLRQHNPTSAAQPGGDDHRQPFPGRHRRTIFSPLYLGGPDQTCRYCGALFWYEERARGQGQVTSPVYNKCCRGGSVRLPPYRPPPEPLLSLLTGQNHALSAHFFDNIRCYNSIFAMTSMGVNIIRSINDGGGPYVFKISGQLCHRIGSLIPRHGAWPEYCQLYIFDTENEVQNRMGVASVRGSFQPNEDVIRSFMRMLDMNNPIVQVFRTARDRLANQSEDHYFVRLFAVPNQHGSVYSAPIASEVVGLVVNDLGTTDQGRDLIVQDHASHLQRIKESHCKFMTMQYPLLFPYGEDGFHKDLKYCQCQRSGAIKRYYVTMVEFFAYRLHDRVGDFNTPLRCKKLTQSYEVDGFCCVEDGRLSHYRIDSFQKKYRASPYNSLVQAVSTGMTQGSTAGQKIVLPASFTGSPRYYYQNYQDCVALCRRFGCPHLFITFTCNALWLEIVEALAPISGQYSSDRPDIVDRVFHMKLRIFMDDIVKNQFFGPISGDPSVDRVGYEAVSRFMIHGPCGSSNKSSACMNDGKCSKFYPKEFTEKTIVLPNGRIIYARPNNKITTNKSGVDVDNGYVVPHNVDLLVKYQAHINVEIVNRDDMEKYLFKYTTKGPDCAKVGIRDGGNEIQQCLDCRCIAPNEAAWRLLQFDIHHTDPSVERLPVHLPLENNVVFFEDDYLDQVIENPLSTITKLTAWFDANRIYPHARQHTYVEFPEFWTWHGDGKYWKQRSKSHKGKHTPGIHQTILQDHIRLSTLDELDKLLRDAGYSLDHFQLPQLSHHAFPPLEYRLIMDELAYGTNSVTELLNQLNPYQRHVYTAIESSVLNNSRQTFFVYGYGGTGKTFLWNTLLNSIRNRGKIALTVASSGIASLLLPVNHDSVNMQFGGITVVLGGDFRQTLPVIPNARKQQILNASITRSRLWQNCNGNVHDSAPADRPDTTWVEIPSYLLLPDEERNLTCLISFVYGSRPHISQLPAYLCERAILAPTNEIAAGINAQIISHIATEEMSYYSFDDIDDATPNYCNVQSLYPTEFLNTIHMSGLPDNHLQLKIGVPIMLLMNLDTPKGLCNGTRLIVTQLTHRITEAEIIIGKSRGSKPYIPRIVTTSTDSKWPFKIKRRQFPVRVSYAMTINKSQGQTLSKVGVYLPNPVFSHGQLYVAFSRVTSPQGLRVLIENSLPGYESKTHNVVYSEIFSDIANQRG

SEQ ID NO: 150069 - protein, 863 aa, Oryza sativa
  Clone ID: PAT_MRT4530_5033C.1.pep
MADNEKGNKVRSQDIGTSSSRVNEAPDTSCVTLVQHLINQNRLLIEILQQHQTPILNLSQIQAQVQLEAVQSLTPQVSMPPASQKTHGGVPHVDSKEASIICFMCDEQGHYARECPQQKRKTPMRTEDKVRKMIITSTEWPPPGMTKRQGRNTFRGAPQLTEHLLANGGRVSDSEDSDQVSSDDEDEMERKACSRCGEIGHVASSCATTCVHCEEDHPPDRCPTSRITCFFCEGTDHVPKDCQFSFLLTKKMANQPASSNGEKHQGNTNPSQDYSFSLTPVPGQRNQNEKRKCRVREDICCFNCQGRGHFADKCPKPRNIAASTSVHATPCNQKLAPQRIVIHASRSSPIVPVATASTPASALPQGVNAQFQPQPPVDKIEASIGIVPLDVPAQQPRNQNWNNPAGATNVQVPTVQQQCKLSEFLKTEPPTFAIAVDPMEASDWLRTVEKKLGLIQCTDQERVVFATHQLVGLASEWWDSYEASRPEGHTITWDEFSSVFKRSHVPAGMITLRKREFRYLKQEDLTVTEYLHEFHRLAHYAPEDVENDEDKQEKFLQGLKDEIAVQLLLEEYEDFEKLVDKAIQLESEHNRMKNCKRRIVSIPVFPCGNQRQRTEPLQITGSSVAHQEFPPQEDGHNADNNISNTNDDDTTNNHAFCPISDHSNQACNVNIIHQGVDDSINDGTQNDNPSNCDSEKDSNGDSNYGTTDANVSKDFQPPIPTPSQNDHPQTDSSAKKTLICYNCKEPGHYSRDCLQPRQSRPPHYRQFTRSRHPNRIVVTGANAVPATTVSLAFDEPLEGSLKGSRLKYHFVTRSIHNSRSEEYLVDKVQKVIDRRYQQRCLSPGKEVGRKVIDKRNLKRTHQG

SEQ ID NO: 150070 - protein, 155 aa, Oryza sativa
  Clone ID: PAT_MRT4530_50340C.1.pep
VGYWMRLDPIRLTVLSVLGNMVPVPFIILYLKKLAAFLSQRSASATRIMDLLFERARQKAAPVEEFQWLGLMLFVAVPFPGTGAWTGAIISSVLGMPFWSGFSANFVGVVLAGLLVNLLMNLGLKYAIITGLVLFFLSTVMWGVLRSLKKSLNAK

SEQ ID NO: 150071 - protein, 133 aa, Oryza sativa
  unsure (1)..(133): unsure at all Xaa locations
  Clone ID: PAT_MRT4530_50341C.1.pep
CNXHXYFKRFQIXFXRXRXGKTDXRAXIXLTXXXXNKFXXPKXRXVVRFXNXXIXXXXVYAXIAGDXVMAAAYXXQLPRXGXEIXLXDYXALTXLGLXLAXRVXPLPRVRDXXXSLGXXERPRGRXYYXSYLF

SEQ ID NO: 150072 - protein, 87 aa, Oryza sativa
  Clone ID: PAT_MRT4530_50342C.1.pep
FALDPASQFRFDNQYYRNILAMNGLLSSDEVLLTKSRETMELVHRYAASNELFFAQFAKSMVKMGSISPLTGHNGEIRMNCRRVNHF

SEQ ID NO: 150073 - protein, 297 aa, Oryza sativa
  Clone ID: PAT_MRT4530_50343C.1.pep
MKCTLYIHVARIIHGYISTIIYEQGVRISGEQALTNSAMVSSSFPAEIIHPARLGCMLRLHVVEHPTGDAAAVAFQCDGCMLPGEGTRYTSVVDNHPTHLALHTSCALATPTLQHALVKGTMELRHEAPAGGAGVCSACFETVRGFHYYGSRKTGKGEHPKLHPCCARLPVSIAVRGGLTFELRAEVSHRCTGCRAMEWYYRPWCYRSTNSPDHRVYLHVKCIREIMESPGGGGGGGAGDEDDRVVARLLERADQSSKLERRVCKILVILVRVVVRMLIGDPTALLTEGVSAIVSPW

SEQ ID NO: 150074 - protein, 179 aa, Oryza sativa
  unsure (1)..(179): unsure at all Xaa locations
  Clone ID: PAT_MRT4530_50344C.1.pep
GASRTGIPGRGIGTRISSSRPRPLFPIHPIQAAPPTTPSSTTPPQPSPSPSPXPPPPPXSPPPPXPPPPPPPPPPPXPSPPPVSGASRSGEPARGHWCSKRRRRGVGGRVRRQRSRTTTMRRMRRRSKGGRAAMPRGGAGRATRMIRRRVPVPGRGGGRGGRGRASGSYAIFPAAATST

SEQ ID NO: 150075 - protein, 691 aa, Oryza sativa
  Clone ID: PAT_MRT4530_50345C.1.pep
MIIVLVYAGGEIIYEEKAGASYSIPPKITFPAIKSTTLEDVKNEIFRGLDFSEVAYSLVIKVRNVVQTNVEEEAYVGEETDNEGNIDEDEDQEDVEEGSEDEENMNDSIALVNSAKSQPLMGRSGKHPTRADDCFFGSKRHFESPLAKGRIFYSKQHLQFAVNEFHISNNMEVRVSTSNKSRLDFKCKDSTCKWKLYAKTTKIGSSWKIQTCQFPHTCRAPADRFDHAQLTAAVIADVIRDDLKENLELSILSIRQLVRQRYKNVKPKYNKLWRGRELAIVQLFGSWEESYALVTPLLEAMKASNPGTKYQLLSNPTSPEGHQSFKCLAWAFGPCIESVPYLRPVISVDASFLSGRYRGRLLIACGYDAENRLLPLAFAIVEKEDSDNWGWFMRWLRKEAIKWVFKQPHIGWNEIGGECVHRFCSQHIAENLYKRCKNDDVIKTFKWAVKKKKPRRFVEGMDAITQSCPNAIDYLKSVGKYRQEDKDEPEKPERCFNAWMVVTVGYSRRLPVTAIVEETFNKCLEWFADRRKSALELADSEKMWSHRVENLLVKRGNKAGSMHVTSYGDEGGEYEVKVDRERVAVVQGNHTAYVRRDFKYKVIIHNDTPPMCECLKPNLTGIPCAHALAVCKDRNFNENQFIHPYYSSSTLASTWAGQFHPYGNQNEWPPYIGPVIVPDKRCIIKRTALTE

SEQ ID NO: 150076 - protein, 44 aa, Oryza sativa
  Clone ID: PAT_MRT4530_50346C.1.pep
ISFLPLHYSWLKHVHVPESLLFLSSFTRPCLLEVINRTVGLKKQ

SEQ ID NO: 150077 - protein, 84 aa, Oryza sativa
  unsure (1)..(84): unsure at all Xaa locations
  Clone ID: PAT_MRT4530_50347C.1.pep
MPLHHRRALHSNDCDDGGXYGCSXWPLSPTXXPSVILTTLXASPSPAPWACPPXFPAPSPSPLHGXAAGGKRDQGGXHGSPTGG

SEQ ID NO: 150078 - protein, 1014 aa, Oryza sativa
  unsure (1)..(1014): unsure at all Xaa locations
  Clone ID: PAT_MRT4530_50348C.1.pep
MERGEMEREEEDEGVFDEMPMQKVLLYQFNHNMENNREWMYTGWKRGRAPTDEWVQQTKDFLDYAFSMPNVVVSGKIKCPCSLCRNYVSHRRQMVEMHLCREGFKENYMNWSEHGECSIGQEDQATTSAENEKFDELDRMDDMLVDIAGDYELSEEEPTASAQAFYRMVASADEKVHSQTTHSCLSTTSRLLAIKSQYNMPAACYDDVMQLIHELLPSRSKLDDNFYRSKKTLAGLGMPYEKLMLQRLYSNEKIAVLMRWHKEHPPHKPNVMMHPLDGEAWAQFDRDFSNFAQDPRNVRLDLAIDGFTPFNMNAATYSCWPVFMVPYKLPPGICMKPENIMLALVIPGPQHPGKNLSSLLEPLVDQLLDIWVGVTTWDASKKKNFTMKAAYLWSVHDFRAYGDFVGWSTNGXLACPXCLCESKAFRLIMEGKLXWFDCHRCFLPTDHEFRNQSNAFRKDTTIHHGRPSQLSEXQVQAQMNASITDSDNYGKKHNWRHISCFWRLPYFSKLMLRHNIDVMHNEKNVAEAIWNTCFDIADKTNDNVKARQDLEEICHRPWLHLELKANGKWHKPKASYCIDKNDKVTILKWFKELKFPDGYAANISRGVNLAQKKIFGMKSHDYHIFMERLLPAAFRGFLPESIWVTLAELSFFYRQLCARELNKENVYRLEQNIPILICKLEKIFPPGFFNSMQHLMMHLPYEARLGGPVQFRWMFPLERNFEQQEWKGRGRPTQKQIDDLRLNGWKGCMGPSNVDSALCQMSYGFRRRVTSYGCYDINGYRFRSEKYEGKRAALTTINTGVCVSSVDENNNTLEYYGVIEDIIKVSWEGSLQLELVLFDCRWFDPTPSGVRRSEHTGLVEVKQTSRLSNFDPFVMANQVKQVYYVPYACSSRTDLHDWCIVYHVTPRDRLPALEVIPDSNDQDGTTNEMPFFQESVLDSTFIVDLGADLEASTAVVDCSDEITDPKELELLRKQQKKATTAPHHQSQNIEEDDSEEENENDDQTNHEIYDPNEF

SEQ ID NO: 150079 - protein, 47 aa, Oryza sativa
  Clone ID: PAT_MRT4530_50349C.1.pep
IEHVRLTVSDYIYWHSLYERAPHIRIKCLVHRIKNIVPADYYMYHIL

SEQ ID NO: 150080 - protein, 69 aa, Oryza sativa
  Clone ID: PAT_MRT4530_5034C.1.pep
SRPEDSKAPHHSGHARSRARPPPPHNPSGSGLCICKGRAHATFLHPVQSQSHCEVSFRARSCGPGGSEQ

SEQ ID NO: 150081 - protein, 69 aa, Oryza sativa
  unsure (1)..(69): unsure at all Xaa locations
  Clone ID: PAT_MRT4530_50350C.1.pep
SLTIKPAMAERDRKSRPGVAEGDRRDQRNSAMDGXPDARGYRGSVVAGRLAAEGRSRRAWRGAADVQGR

SEQ ID NO: 150082 - protein, 187 aa, Oryza sativa
  unsure (1)..(187): unsure at all Xaa locations
  Clone ID: PAT_MRT4530_50351C.1.pep
MRFLFPYSSTSGGILDRAIDAENRKHGGFFRLDHVERISGVGCKXQSFFVKSLSRLAAECYIKVDVDLHVNIGVRTTALAKHWSKPRAYIGCMKSGPVLAQKGVRYYPEPEYWQFGEXGNKYFRHATVQFYAISKDLVSYISINHYLHHKFVFYXNSYPSLGAWFNGLDVXHIDDCSICCPLPVLCS

SEQ ID NO: 150083 - protein, 494 aa, Oryza sativa
  Clone ID: PAT_MRT4530_50352C.1.pep
MGWLLGCFRVAGYSGEGRRERERDQLVSSPSVSPPVDAPKVGERKRPPSKNALSAVFLREDEGSRVEHSTSLGANGITERTKVDQEHKNEVRLLIHRDALVETTNEIIKGPENTDQSQTHLTCLPAISDDLQFMEGLKAEACQTPSGSHQSSILPDAMSSSWKECDASNQNDSEAVCKSIEVEVVGNDDSAINCGNKLTALDSPSFTCRDDINLVESKSLPISTPSEATAEIQTPATTHAPDQEELRNENNTRTCSEHTYEAVSSVEASGSCEKLRLESCQPNISDEDFKYAKNDSLVSVELSISNECSLFQSSEGSVSSCNKRRENSSTESVEKCLKSEPLVHSSRKKVLKGNDSEVEFPSLSQWLKPPNPKVFRDEPLTSDRSHSAKSSEEDRPIIGLVAAHWRDTEPDTFTPKWWDGNGIPNSTNKYKEDQKVSWHATPFEERLEKALSDEKLLSQRKCSSGNTSQLSGLEGEENDTAASTSNYLCVAAIT

SEQ ID NO: 150084 - protein, 150 aa, Oryza sativa
  unsure (1)..(150): unsure at all Xaa locations
  Clone ID: PAT_MRT4530_50353C.1.pep
PILRVDGEKIGVPNSREEGKPGRKTLPSGEAWRQNLTPILGHPGKGFLNKKNSGALNCSGVKLGKKIKSPFKPKGFWEKGPNFGLLAFPXPPRGXPPSFPSXXPPXXQKXGFGXXPXPFFXPPKXPGXGAPXVXFXNPXPXKXFPPPFPP

SEQ ID NO: 150085 - protein, 604 aa, Oryza sativa
  Clone ID: PAT_MRT4530_50354C.1.pep
MATEFRGVGTLRDAHTLEEAKYILAKCGGIPEVIMALARYVASEQEDIRQRKLSHLKDNFMHELETNPEFVSLRDLFSWMHFSFEALPHSIKPCILYLAVFQVKRIRRSHFVRRWIAEGYSKCTDSKTMEDYTGELFDRLAKETDTMPEWRFNSFFHEYINSRLMEERVVFFPLVVSVLDGSRSLTTEVMGQHLVIGSSWKRDEEYVYYEDLDVSHLQSLTVYGAWKSLFVPYKMKSVRVLDLEGTTHVGFGDDELKRILELLPRLRFLSLRGHREITHLPDSLSGLKYLQTLDIRHTSVVYIALQTLHELQYIRAGTTAPWMDGGKGLAYEASSISSCASVASSYLPKFLRRGGPVGPCQGVKMPRDGIHHLKALHTLGAVHINSSSGQAILADIYRLKQMRKLEVSGINRKNSKHLCHAIINHKNLESLSLQLDKEKHVVCWDDISPPSSVRSLKLYGHVEMLSARRFKNLRNLRKLCLEMNTTLFTQNVLLLGSVSSLRTLRLHVKQNQDGVLQFRAHLFSKLQHLEIVCRSNLHVIFDEEAMQKLELLKIHCHDGSLLQLSGLKHPVSLNQVRVLGTFDDALMESWRQQLAEHLRNPALV

SEQ ID NO: 150086 - protein, 639 aa, Oryza sativa
  Clone ID: PAT_MRT4530_50355C.1.pep
MEVFGKSVIAEPSNVIYLSSILNTEGPIPSHKCDKNCQNEHVFGNMYRCKLTGTTHICDKNCNQRILYDNHSSLCRVSGQLFPLSPLEQQAVRGIRRKHEVDSNEGCSFKRRRGAQLHPSPFERLFSYTALINYLHRTTWILLQPNLITTSRAEQHDFQFQVDEEAAAAVIYTRSKHCRGGAVSACELGCIALAAAAGGGKRSGGRARPQRASGSARRRAAGAGGGAAARLERGGEAAGTAALVMLQLFTADVIVVLVDLLHERGRRSSGGRVRRSGGPSRRAAGGKYGCGAAASGQRQPLRLCGAPPPLPPASSQPLMLPFFFFFGREGIEGVEGSHAAAAAAALLPVKKSRRTAAAVQGDPAGDERAEEAALDVKSFSHELNMRGPLLHRLQQRKPRGCVNSPEEFIGAIRTKFIRLKEEVDAELGVFAGDLVGALDKADGGEERVVLEDLLVVAQRDLKKYRCQIKGPPVSVEELGAGEGSPLDLAALDGTWRLCYTSASDVRVLFEAAERLPLLQIEVGQIYQKFECKDRSDGGVVRNVVRWSIENLLEEQEGATLMVSAKFAVMSKRNIFLQFEEVVVENIKISEQLQALIAPAILPRSFFSLQILQFLKTFRAQVPVNGPERITRSIPFEGGN

SEQ ID NO: 150087 - protein, 158 aa, Oryza sativa
  Clone ID: PAT_MRT4530_50356C.1.pep
MEVFGKSVIAEPSNVIYLSSILNTEGPIPSHKCDKNCQNEHVFGNMYRCKLTGTTHICDKNCNQRILYDNHSSLCRVSGQLFPLSPLEQQAVRGIRRKHEVDSNEGCSFKRRRGAQLHPSSFERSYTAVSPIPSQPNLITTSRAEQHDFQFQIMTQKT

SEQ ID NO: 150088 - protein, 120 aa, Oryza sativa
  unsure (1)..(120): unsure at all Xaa locations
  Clone ID: PAT_MRT4530_50357C.1.pep
SSSPSCPSSPRQRSYGGYGDVGEYCRVGKAVSRNPVPSXRNYIXRXXASPGXAXXRQAAAXAVLEPCCRELAAXPMQXRCDALSXLVRGVVTEEGDRVVXMNLAARGARVRLANDRRDAR

SEQ ID NO: 150089 - protein, 64 aa, Oryza sativa
  Clone ID: PAT_MRT4530_50358C.1.pep
KCHASVEGGKKKKKKKKKKKKKEKKKKKKKKKKKKKKKKKKKKKKKKKKKKKKKKKKKKRGGPF

SEQ ID NO: 150090 - protein, 96 aa, Oryza sativa
  Clone ID: PAT_MRT4530_50359C.1.pep
MAVGIKKGHDQVAAAAAALLMVFLVAATFHFQALHARPVDASGTLHPSSHDDNTGASPPPPTAAAAAGGRGLPKRSSSPSGCTNYGPGGGTVCPPR

SEQ ID NO: 150091 - protein, 37 aa, Oryza sativa
  Clone ID: PAT_MRT4530_5035C.1.pep
MASIRSAHLSDICVDLFFVHASFVHGEQETSISYPRA

SEQ ID NO: 150092 - protein, 117 aa, Oryza sativa
  Clone ID: PAT_MRT4530_50360C.1.pep
MCRAEKYAHFSWQNLNREASQFSVNQRRTNLVVHNYYASRDVTVVVATHYPTFVFGPQMLFTGLSKVSDGLISLWATCCGLQITMARIIFLMNQACSNHRFVSYQTTEKNSEHKTVK

SEQ ID NO: 150093 - protein, 54 aa, Oryza sativa
  Clone ID: PAT_MRT4530_50361C.1.pep
LETKKIRASAPVSSTCIVACYLAGASACYLWKLLPGYYICSFLKIKCNKKSFIP

SEQ ID NO: 150094 - protein, 497 aa, Oryza sativa
  Clone ID: PAT_MRT4530_50362C.1.pep
MEFLVSAVASDLIGRFISSLAQNYNNHTCKEDDRRRLERILLRMHSVVEEAERRHITNQGMLLQLKGLIEGFYLGYYMLDKIKFQPSEEESIEDEVSHEIQSFALSACNSRKRFRFADAIRKRTPVAFGSKSKTNLKDVVDGLETKIADMREFVILLGSQTRLPRQPYSTYLYIDNCMFGRRIEKEQVINFLLCNDPHDPYVSILPIIGPQRIGKKTFVQHACLDERVRNCFSHIFFFKEDNLKTGELSLNSKASQGKYLFVIEFIWDVDEAAWTKFQSYLQNMPGTGIKVVVIGTTEDILKFGTAQPIRLKRLSEEEYWYYFKALAFGSMDPDEHPKLASLGMQLATEMRGGFLGATVVGGLLRANPSTQFWQSMLLCIREVAQKHLSSFGVHPEDLLERNAPLDFTRVAFVGAQVQGCLVYDVRVAGPGSELPKLTSQDLKLGADIPAEDKFDVLVWKSRIPPYSNYIVTYEKQKRRYKVGRRNHQALREIKLKS

SEQ ID NO: 150095 - protein, 98 aa, Oryza sativa
  unsure (1)..(98): unsure at all Xaa locations
  Clone ID: PAT_MRT4530_50363C.1.pep
MSTDAAGVADQSWCLATVTPRSRATVVVSLASPXPCCCSCSSNRSNLPAPFRPRLMRNTPVYDAPVAPAAMDAAVDRLMDGCAKIKTRVYDKKPELFE

SEQ ID NO: 150096 - protein, 914 aa, Oryza sativa
  Clone ID: PAT_MRT4530_50364C.1.pep
MEEDEVEDENIPDWAQYGGFEENTMGEAELDVEGNDGADELGQILRDLQEDCESEKEVQKLKRMLADHRTALYPGCEKGYKKLSTILEFLQWKVKNGVSDKAFGELLKLVKNILPEGNELPESTYEAKKTVCPLGLEVQKIYACPNDYILYRGEYENLEACPVCKALRYKIRRDDPGEVDGQPLKKRIPAKVMWYFPIIPRLKRFFRNKSQARMIRWHAEERKQDGMLRHPADGSQWRNIDRTFKDFGEDAQNMRFGLSTDGMNPFGEMSSGHSTWPVTMCIYNLPPWLCMKRKYIMMPIIIQGPKQPGNDIDVYLRPLVEDLKVLWRKEGVPVWDEDKQEQFNIRALLFVTINDWPALSNLSRQSNKGYNACTHCLDETESTYLKHCRKVVYMGHRRLLAANHPVRKKGKHFEQKAYHRTKPKHRNGKAVFEMVKDLKVVFGKGPGSQPIESEDGHAAMWKKNSIFWELPYWEVLDVHHAIDVMHLTKNLCVNLLGFLGVYGKSKDTLEARNDLKHMEQREGFHPEPNEKGSHYLSPASYTLSKEEKESMFQCLESIKVPSEYSSNVKRIISTKDKKLQNLKSHDCHVLMTQLLPVIIRGILPDNVRVTITKLCAFMNAISQKVIDPESLAALQHDVVQCLVSFELIFPPSFFNIMTHLLCHLVKEIGILGPVYLHNMFPFERYMGVLKKYVRNRSRPEASIAKGYGTEEVIEFCVDFIEDLEPIGVPESIHEGRLRGKGTLGRRAIMTVDNDLFRKGHFTVLQQSSLVAPYIDEHLAIVRSENSGKSDAWITRHHIDTFPAWLREHLLGNETIDRQLAFLARGPSGSNMDSKPKKGKGPDEPRRHVVLPGKRKIVGVEDKTDENYDLFEGQPPFAVTVDPSIILSKEDTPYSCNDHSEGTIVRRKYVRKTVT

SEQ ID NO: 150097 - protein, 951 aa, Oryza sativa
  Clone ID: PAT_MRT4530_50365C.1.pep
MDRQWMYADWWSKEFIDGVHYFLGGANDNKRNGFISCPCDKCKNQKEYSTTRTIHAHLFQWGFMRSYNCWTSHGEVGVAMEEDEVEDENIPDWAQYGGFEENTMGEAELDVEGNAGADELGQILRDLQEDCESEKEVQKLERMLADHRTTLYPGCEKGYKKLSTILEFLQWKAKNGVSDKAFGELLKLVKNILPEGNELPESTYEAKKIVCPLGLEVQKIHARPNDYILYRSEYENLEACPICKALRYKIRRDDLGEVDGQPLKKRIPAKVMWYFPIIPRLKRFFRNKSHARMMRWHAEERPKQPGNDIDVYLRLLVEDLKVLWRKEGVPVWDEDKQEQFNLRALLFVTINDWPALSNLSGQSNKGYNACTHCLDETESTYLKHCRKVVYMGHRRFLAANHPVRKKGKHFEQKADHRTKPKHRNGKAVFEMVKDLKVVSGKGPGSQPIESEDGHAAMWKKNSIFWEVPYWEVLDIRHAIDVMHLTKNLCINLLGFLGVYGKSKDTLEARNDLKHMEQREGLHPEPNDKGIHYLSPASYTLSKEEKESMFQCLESIKVPSGYSSNVKRIISTKDKKFTKLKSHDCHVLMTQLLPVIIRGILPDNVRATITKLCAFMNAISQKVIDLESLAALQHDVVQCLVSFELIFPPSFFNIMTHLLCHLVKEIGILGPMYLHNMFPFERYMGVLKKYVRNRSRPEASIAKGYGTEEVIEFCVDFIEDLEPIGVPESIHEGRLRGKGTLGRRAIMTVDNDLFRKTHFTHLAIVRSENSGKSEAWITRHHIDTFPAWLQEHLLGNETTDRQLAFLARGPSGSVTTFQGHDGPTSTYYGVIDNIWELEYGPLKVPLFRCQWVRLTGGGVTIDDSGMTTVDLNKVGYSDEPFVLANDVIQVFYVKDMDSKPKKGKGPDEPRRHVVLPGKRKIVGVEDKTDENYDLFEGQPPFAVMVDPSIILS

SEQ ID NO: 150098 - protein, 811 aa, Oryza sativa
  Clone ID: PAT_MRT4530_50366C.1.pep
MEEDEVEDENIPDWAQYCGFEENTMGEAELDVEGNDGADELGQILRDLQEDCESKKEVQKLEHMLADHRTVLYPGCDKGYKKLSTILEFLQWKAKNGVSDKAFGELLKLVKNILPEGNELPESTYEAKKTVCPLGLEVQKIHACPNYCILYREEHKQDGMLRHPADGSQWRNIDRTFKDFGEDARNVRFGLSTDGMNPFGEMSSGRSTWPVTMCIYNLPPWLCMNQKYIMMPIIIQGPKQPGNDIDVYLRPLVEDLKVLWRKESVPVWDEDKQEQFNLRALLFVTINDWPALSNLSGQSNKGYNACTHYLDETESTYLKHCRKVVYMGHRRFLAANHPLPYWEVLDVRHAIDVMHLTKNLCVNLLGFLSVYGKSKDTLEARNDLKHMEQREGLHPEPNEKGSHYLSPASYTLSKEEKESMFQCLKSIKLLPVIICGILPDNVRVTITKLCAFMNAISQKVIDPESLAALQHDVVQCLVSFELIFPPSFFNIMTHLLCHLVKEIGILGPVYLHNMFPFERYMGVLKKYVRNRSRPEANIAKGYGTEEVIEFCVDFIEDLEPIGVPESFHEGRLRGKGTLITRHHIDTFPAWLREHLLGNETIDRQLAFLARGPSGSVTTFQGYEINGYTFYTRAQEKKSTNQNSGVRIDAIGHDGPTSTYYGVIDNIWELEYGPLKVPLFLCQWVRLTGGGVTIDDSGMITVDLNKVGYSDEPFILANDVTQVFYVKDMDSKPKKGKGPDEPRRHVVLPGKRKIVGVEDKTDKNYDLFEGQPPFAVTVDPSIILSKEDTPYSRNDHSEGTIVRRKYVRKTVT

SEQ ID NO: 150099 - protein, 69 aa, Oryza sativa
  Clone ID: PAT_MRT4530_50368C.1.pep
LFFCFFFFFFFFFFFFFSKFLWIDMCIHSDSSTFHIPMTSNFSTPNKPELVIVSLLWKRSHCHSFSFLY

SEQ ID NO: 150100 - protein, 170 aa, Oryza sativa
  Clone ID: PAT_MRT4530_50369C.1.pep
HESKCSADATHGAAENGKPDSEEISAPMDTDAKVEPLIKNVKKIDVPVSGLVYGALGSEELVKASENEYEMALQDRVMEETKEKKNAVEAYVYDMRNKLYDKYNDFVMSEYKEGFIAKLQEVEDWLYEDGEDETKGVYIAKLEELKKVGDPIEIRYKEWAERSSSINQLV

SEQ ID NO: 150101 - protein, 272 aa, Oryza sativa
  unsure (1)..(272): unsure at all Xaa locations
  Clone ID: PAT_MRT4530_5036C.1.pep
GHRRRPSARRSSARESGEEGESEGTVHGSPRDNXTTRTAPGAEEGGGAARDNDDGGAPTVGERNEGADEVDGDAAMPREVAPSREEDRSDGGGEPERRKATARFGMPRATVLRQSAGEAERRTGSATTRRSRRRWRRVGRRTGATSAANRRRAGKAGCGGFSGGGGARARAGGGRGGRKAMTDGIFSAPDLSLVEPLADFDWVAALEDGDSVPELCIVHIFGVNLIQVTHFMSCVEISSSLLRYHACHLLLTRHQLPHISFPGLRVIATSAI

SEQ ID NO: 150102 - protein, 99 aa, Oryza sativa
  Clone ID: PAT_MRT4530_50370C.1.pep
FPSAPDKNGYGYLSDRIILGYFIYGYEYEYFLPDTNTNMVSGFPSDTDNNSDIRKICFRIRVRSYSILIRIQDNPYLFPYSSYPYSFSYPIKNMKTNMV

SEQ ID NO: 150103 - protein, 156 aa, Oryza sativa
  unsure (1)..(156): unsure at all Xaa locations
  Clone ID: PAT_MRT4530_50371C.1.pep
GMKTEQIVSVRSGXKRIRIPFGSDNSRIVRIRIFSLGYEYEYGIXFPSDTDNNSDIRKNCFRIRVRSYSILIRIRDSPYLFPYSSYPYSFPYPAKNMKTNMVXALSVRIRSDHPRLPLAAEPRRRPRADHGDRRQRPPPRRRRLDGLTCTVTPDMS

SEQ ID NO: 150104 - protein, 156 aa, Oryza sativa
  unsure (1)..(156): unsure at all Xaa locations
  Clone ID: PAT_MRT4530_50372C.1.pep
YLQEDAPVAHFELQETTMITTQDSYISCIRFTMVALALDTEGTKGTLRRHCNXKDPTFLREAPRGFDKADINSIALSXSAHWPAVARDTANCASTLQSTQRELQAKMIRMNLTTNLCPRLNHPNYAVLPNLHSANSGSHTSAAFSFMKGILSKYCR

SEQ ID NO: 150105 - protein, 249 aa, Oryza sativa
  unsure (1)..(249): unsure at all Xaa locations
  Clone ID: PAT_MRT4530_50373C.1.pep
SANGFQVTAAALQAAHDEAAAAGMRVRGVLITNPSNPLGTTARREALEGILGFVARNDIHLVSDEIYSGSVFAAPDLVSVAELVESSSSRARHRGEDDDGDVGVADRVHVVYSLSKDLGLPGFRXGLFVWMDMRRLLLGDGGDAATFAGELRLWDRLLREVKLNVSPGSSCHCSEPGWFRVCRAATSLRLRPPRRLAVSLLPLTKCPGRRGRRRSRRRGRGGCGRSRRRRGRRRRWGSPGGAPAARTGR

SEQ ID NO: 150106 - protein, 87 aa, Oryza sativa
  Clone ID: PAT_MRT4530_50374C.1.pep
MSSDALSIFSLFGCPSRCGAEDDKVRYRGVRRSDVVRPAPPCPQPRGPPAETKSLAESLVRCTMGCSESGAEKTSLVKGQRDAQDKG

SEQ ID NO: 150107 - protein, 127 aa, Oryza sativa
  unsure (1)..(127): unsure at all Xaa locations
  Clone ID: PAT_MRT4530_50375C.1.pep
YLTNNDLDGGSPFPLFNSSSLGMKTERIVSVRSGXKRIWIPLGSDNSRIVRIRIRIRIFSLGNEYEYGIRVPSDMDNNSDIRKICFRIHVRSYSILIRIRDSPYLFPYSSYPYSFPYPAKNMKTNMI

SEQ ID NO: 150108 - protein, 68 aa, Oryza sativa
  Clone ID: PAT_MRT4530_50376C.1.pep
NGHYYHAIILYKKEQTTVQLDILFSFSFARCKLHKDIWINRIQDTKILETTVSDPHASSYNILACTCI

SEQ ID NO: 150109 - protein, 142 aa, Oryza sativa
  unsure (1)..(142): unsure at all Xaa locations
  Clone ID: PAT_MRT4530_50377C.1.pep
SSNLEDGGTLQKHSREYFPSALDKNGYGYLSNRIILGXFGYGYEYGYFLPDTNTNMVPDFPSDTDNNSDIRKICFRICVRSYSILIRIRDNPYLFPYSSYPYSFSYPVKNMKTNMYEHYPSISAPFSSLPATGRARLRLSSL

SEQ ID NO: 150110 - protein, 99 aa, Oryza sativa
  unsure (1)..(99): unsure at all Xaa locations
  Clone ID: PAT_MRT4530_50378C.1.pep
FPSAPAKNEYGYLSDRIILGXFGYRYEYGYFLPDTDTNMVSGFPSDTDNNSDIRKNCFRIRVRSYSILIRIRDNPYLFPYSSYLYSFSYPVKNMKTNTV

SEQ ID NO: 150111 - protein, 73 aa, Oryza sativa
  Clone ID: PAT_MRT4530_50379C.1.pep
EFINVAMNTCFTWTLWCSLPHPHHAEVEPYSNGGRHRDRCRPCQRSVFLTEITSLLKTNQEGTVLLSPVYLTA

SEQ ID NO: 150112 - protein, 350 aa, Oryza sativa
  Clone ID: PAT_MRT4530_5037C.1.pep
MDPGRVVFDSGVARRACPGGAQMLLFGGGGSANSGGFFRGVPAAVLGMDESRSSSSAAGAGAKRPFFTTHEELLEEEYYDEQAPEKKRRLTAEQVQMLERSFEEENKLEPERKTELARRLGMAPRQVAVWFQNRRARWKTKQLEHDFDRLKAAYDALAADHHALLSDNDRLRAQVISLTEKLQDKETSPSSATITTAAQEVDQPDEHTEAASTTGFATVDGALAAPPPGHQQPPHKDDLVSSGGTNDDGDGGGAAVVVFDVTEGANDRLSCESAYFADAAEAYERDCAGHYALSSEEEDGGAVSDEGCSFDLPDAAAAAAAMFGAAGVVHHDAADDEEAQLGSWTAWFWS

SEQ ID NO: 150113 - protein, 468 aa, Oryza sativa
  Clone ID: PAT_MRT4530_50380C.1.pep
MEPKPSTPTAAATPRFKLGKQSSMAPDRGGAGESSEEGSSEAVGVMGFQLMYMAHEGDVEGIQELLDAGADPNFRDSDGRTAMHIAACEGQAEVVELLLQRGADAVAEDQWGSTPLADALHYQNHDVIKILEKHGSKLKIAPMHVKNVREVPEYEISPNELDFTNGNGISKGTFRKATWRGILVAVKKLDDDLIMDENKVQAFRDELDVLQLIRHPNVVQFLGAVTQSSPMMIVMEFMPKGDLRKHLSRKGALEPSYAVKLALDIARGMNYLHEHKPQAIIHRDLEPSNILRDDTGHLKVADFDLCKMLKWRRKVREEKAVTSPGNACRYVAPEVLRNEEYDTKVDVFSFALILQEMIEGCLPFYDKKNNEIEKAHNSKERPPFRAPPKHYAYGLRELIEQCWSENPASRPDFRTIIEQLSYIQNEISQRNRWKVKPLKCFLSFEGMWKKDRNEGSTTRSSRSSRSYF

SEQ ID NO: 150114 - protein, 72 aa, Oryza sativa
  Clone ID: PAT_MRT4530_50381C.1.pep
SRGSPECSPIPSPRMTSPGPSSRVHSGSVSPLHPRAGGMARGGRATRDVARGSPHHHWAQRRRATRPHFRRA

SEQ ID NO: 150115 - protein, 587 aa, Oryza sativa
  Clone ID: PAT_MRT4530_50382C.1.pep
MDDRRYARVAAAGGGVSVTVYVRTCLILSHPGIGCRCLAGYVNPVSVANEVHIGMKTERIVSVRSGQKRIRIPFGSDNSRIFRIRIRIWIFSLGYEYEYEVELVFVFREKFVSVFVSDHIRFLFVFEIIRICFRIRAIRIRVIRIRFCIRVLLHGEILRGLALHVGNHELTRLSVLLLKHLEGIARSSRQCRENSSTGDDGRDNASAEQQAVDCKISPVYLSNIWTASILDPPIACTSTSSEHLLVVEEGCALEHTPRTKCQPQTHATERGAEHRTGRRYARPIATGPTTPPRREDSKTTPSGRSRRQKTPSSSVPKTEQGFHPELLAKGGGVPQPCPQEGYHTRKRPESVVTVGPKVGLSFRSVPPTAMVRCPIRNHHLNIGGTWLPPHPTDAPPPAGFQSCQRQDCHSTNHLRQPPRRIRPMGPDREQPRLGNLSLSEAPHKEGEELFEHSDRLANHGKDDPAASALHTAAKPNGGLAEANAPPPPRRPPTATQAAQRRCRATASDRAGEGWCPVHVAPRRGTPRRREASPPPSLHAAGELRQRRGEGEGVEAWAARVFGPPSRPRESDAGSFSEVLGALIATAM

SEQ ID NO: 150116 - protein, 434 aa, Oryza sativa
  unsure (1)..(434): unsure at all Xaa locations
  Clone ID: PAT_MRT4530_50383C.1.pep
MLAQLFWQPSRGSPECSPIPSPRMTSPGPSSRVHSGSVSPLHPRAGGMAPSHHIKQNMGLFGWCHILPLLSRLLERDHEKLPKNGVGYDYEAKIPGFILLLVYSYVLRTVGCRSDGGVQLVDPADFVHTWRPRDAGRGAGKPPPPLGPTPQGNASTLPPRIAFTGNLNQHSGLGGKEDFTHTGLTAIKREGPPSTMPSRTAPFISRLRLLRTAAALSPFSSSAPPRHSPRILRAIPVGAPHPPRVSAAVSPLVRPVAAGFALFSMATAASSAASVHDFTVKDASGKDVDLSTFKGKVLLIVNVASQCGLTNSNYTELSQLYEKYKDQGFXEIPAFPCNQFXGQEPGTNEEIVQFACTRFKAEYPIFDKVDVNGDNTAPIYKFLKSSKGGLFGDNIKWNFSKFLVDKEGRVVERYAPTTSPLSMEKDIKKLLGSS

SEQ ID NO: 150117 - protein, 191 aa, Oryza sativa
  Clone ID: PAT_MRT4530_50384C.1.pep
MKALAGLRRINLDGLRWRVFDAKGQVLGRLASQIAVVLQGKDKPTYAPHVENGDMCVVLNAKDISVTGRKMTDKIYYWHTGYIGHLKERRLKDQMEKDPTEAIRKAVMRMLPRNRLRDDRDRKLRIFSGNEHPFHDRPLEPFMMPRRQVREMRPRARRALLRAQKKEQDRAAAASTKDEENAKNAKSEITA

SEQ ID NO: 150118 - protein, 112 aa, Oryza sativa
  unsure (1)..(112): unsure at all Xaa locations
  Clone ID: PAT_MRT4530_50385C.1.pep
YILFIYFIYFLFLILLFIFYIIFKTSITLLIIIFIIYVFNSNYIFEFKILIIYIYIFHHLILFLFFLXIFSFIIFFLITFFILYFFFYYFRISYXSINIKCYYNSNQAIDFF

SEQ ID NO: 150119 - protein, 49 aa, Oryza sativa
  unsure (1)..(49): unsure at all Xaa locations
  Clone ID: PAT_MRT4530_50386C.1.pep
EKDKTAKRXSQTKMKKKXHMPNPXCTICYSIIHIYHXLXYLLSVWNLPF

SEQ ID NO: 150120 - protein, 638 aa, Oryza sativa
  Clone ID: PAT_MRT4530_50387C.1.pep
MVEHVGGWCRRSSVYRCMAGGQGGFQIAMQFQLRLVRRQNQTGPQFSAFVRRAFIRRYTVHADELGAKLEADVRRSKDTNIKRRSFRAVGEWRRARRPCSLESPVLLRRAAAMDGGGGDAVDGEASGARFEWDEDSQLYYHASTGFYHDPVAGWYYSGRDGQYYIYDNGNYVPWTPDAGNEPKTHNPCDESNQDFLEPSSGLEQDIPDNQNETQRPPSEWLLHKNSMLLFDEFSFYGDSSETAENKPGNFASENAPSSPCDASLHQTEDELQNENSTAVHESLSEEEEKWLAQYGQVEQEIDDQPLFPSIDLWDWDMVKESVSKGQPMARLVGRLVKGSSKPHPSLPARGGLLRTAPVHEVHLDLVRVSSGKIYRLRNPSRKYLASLSSYDSSNPTKDWGFPNIYANSDNDLDKQSSAQCQSEVMDVFSMKGVSAASAKEHKINAYRDRAAERRILHRGIGIGPGQKQSSSTNFYEHEETSEGMDLMGGASVDMNFRSSGLNSAKKMMENMGWKERLKLLIVSKNLRNCGKLVTEEREKIVNIPDGNGYGYLSDRIILGYFGYGYEYGYFLPDTNTNMVSGFPSDTDNNSDIRKICFRIRVRSYSILIRIRDNPYLFPYSSYPYSFSYPVKNMKTNMV

SEQ ID NO: 150121 - protein, 181 aa, Oryza sativa
  unsure (1)..(181): unsure at all Xaa locations
  Clone ID: PAT_MRT4530_50388C.1.pep
MGLTFTKLFSRLFSKKEMRILMVGLDAAGKTTILYKLKLGEIVTTIPTIGFNVETVEYKNISFTVWDVGGQDKIRPLWRHYFQNTQGLIFVVDSNDRDRVVEARDELHRMLNEDELRDAVLLVFANKQDLPNAMNAAEITDKLGLHSLRQRHWXIQSTCATTGEGLYEGLDWLSSNIANKA

SEQ ID NO: 150122 - protein, 502 aa, Oryza sativa
  unsure (1)..(502): unsure at all Xaa locations
  Clone ID: PAT_MRT4530_50389C.1.pep
PRSRFVVWLHGLGDTGRANEFLADSFPTTAAFADARWAFPTAPTAPVTCNRGEVITAWFAIPEVPITARTARDEKEVLKAVERVHEMLDGEVAAGTSPSNIFVCGLSQGGALAIASVLLYPMTLGGCVVFSGSLPLSKTFAESIPSEARKVTELQIYLQTPVLWFHGMADGVVLFEAGHAGCAFLQEIGMHCEFKAYPALGHTLVDEELQYFRQWIKDRLSQGTGVPVPSLSXQDGSPVAACFFRTKXAGILGPNFYSSFLFLMWIFXSNSPASSPRPWRRRXARNRSFVLWLHGLGDSGPANEPIRNFFSAPEFRLTKWAFPSAPNSPVSCNHGAVMPSWFDIHELPMSSGSPQDDSGVLKAVENVHAMIDKEVADGIPPENIFVCGFSQGGALTLASVLLYPKTLGGGAVFSGWLPFGSSVTERISPEARKTPILWSHGIADNVVLFEAGQAGPPFLQNAGFSCEFKAYPGLGHSISKEELYSLESWIKNHLKASQEKEN

SEQ ID NO: 150123 - protein, 69 aa, Oryza sativa
  Clone ID: PAT_MRT4530_5038C.1.pep
SFSLSASVAKCLRFISVWSCYSLPQPLSVDSSVIYCSNPSSDTRRSARAGFSDINEIGRLQLPVLLLLQ

SEQ ID NO: 150124 - protein, 173 aa, Oryza sativa
  unsure (1)..(173): unsure at all Xaa locations
  Clone ID: PAT_MRT4530_50390C.1.pep
RPGSHRNPNLRLCLPLAADSIRSDPIQGEAEALAMKRSVGTLGEADLRGKKAFVRADLNVPLDDAQKITDDTRIRASVPTVKLLLEKGAKVILVSHLGRPXGVTPNYSLXPLVPRLCELLGVDVEMPTDCIDEEGEKLYAALAEGGVLLLENVRFYKEEEGTDXEFAKRFAVV

SEQ ID NO: 150125 - protein, 414 aa, Oryza sativa
  Clone ID: PAT_MRT4530_50391C.1.pep
MAAAASYFSGTALMPSQRSGAPAPEYSAAGTGAAAAPSPSKPRDPRFSGCVPATVLHISRSFAAALAADGGGDPVFSIDGVETTNVRVLGRVVSVVSRDTDVCFTLDDSTGKIPLVRWITDQSDTRDTSYIQEGVYVKVQVNLMGFQAKKQGLARSIRPINNFNEVVLHFIECMHVHLESVQSKMQRQLPPSVQTNEYTHVPSSGGVRDYQVHFTPQVNQGLPPAVQTNTSTYVPLLGGVRDHQAHFAQVNQGQFSPAVQANTSTHLPFSGGVGEHQIHFTPKVNQGQFPPSVQTNTSAHVPYSGGFREHQVHFTPPVNQGQFPPAVQTNLYNHAASSGGVREQVHLTQANQIFYFPAQFSAYSSTGGLQHDPQRMVLEALQQPDILGVVKHLAAAGFVYWTIDDNHVKSMCNG

SEQ ID NO: 150126 - protein, 183 aa, Oryza sativa
  unsure (1)..(183): unsure at all Xaa locations
  Clone ID: PAT_MRT4530_50392C.1.pep
PPRQAASPSPSAPPSTSGVPTGGVWRGGGSARIWPPMAGAARARRRRAERHPVARGEGLQPGIGESESIRPRWGWPRPNNLRWFPPPKLSKVGLFKGSYGRHPTFASLPAGNSGGCPHRSHPLNKGPTLIPNDXSLCQRVIVEDVLITHEAVAVLGGAGGCRENSSRLDAGDSKSAMAVFVGS

SEQ ID NO: 150127 - protein, 48 aa, Oryza sativa
  Clone ID: PAT_MRT4530_50393C.1.pep
SSMGSPLMKIAIFFLILLSNCNLMGSSDAVRPYTVNHTRTLVHLYDLI

SEQ ID NO: 150128 - protein, 235 aa, Oryza sativa
  Clone ID: PAT_MRT4530_50394C.1.pep
HEGARRAGAPCAGLRPALLQLLFLVGHLLPSVVVSRLRPELVHWFPLHCRLVLGSVLSIYGCYQYSYKNGDNRSGADHGTYIIAPAGESVYDQSIKNPCYSKMHGGKEIAGFWGYLFQIMFQSNAGAVMITDLVFWFILYPFLAYNQYDMNFLLIGTHSINVVFMIGDTAMNSLRFPWFRIAYFLLWTGAFVNVQWLIHASISIWWPYPFLDLAFPKAPVWYLVVAVMHFPCYAL

SEQ ID NO: 150129 - protein, 122 aa, Oryza sativa
  Clone ID: PAT_MRT4530_50395C.1.pep
NKIPPPGAKKNTGGYYEPWKNNIRGKNLRKRTGGFFFCPKPKKSLGLKGKGDLGPLPRPNQFKMLPRVVLNPAPYFIHRLFGYQNRPNKLQKIERLKSENGSPGETSPSQFFQTGKTPWPAP

SEQ ID NO: 150130 - protein, 2015 aa, Oryza sativa
  Clone ID: PAT_MRT4530_50396C.1.pep
MAEQGKAHDLSPSVSGDDGEPNPRRRARTPPPPPRQSPKQGEALERVDKSVASPVAGDAGERRDGERRLLVYGDGSTPQGALQAAGALLRHPPVVHDPESPAQRWLEDVANLVMTAQQRLGAGGRSATTKTSGAATTGSVSSRRRARRAAAAARHSAATPSSTPPTREDQHGEPDARIDIERRRNNRRTPRATEGASSSRVSPRHGREDQPSVPPAGGVGCRAFVASLRNVRWPPRFRPTITEKYDGSVNPTEFLQVYTTGIEAAGGDDRVMANFFPMALKGQARGWLMNLPPALVHSWEDLCQQFTMNFQGTYPRPGEEADLHAVQRGDDESLRSYIQRFCQVRNTIPCIPAHAVIYAFRGGVRHNRMLEKIASKEPQTTAELFQLADRVARKEEAWTWNSSGSGVAASAAPGSAAQTGRRDRRRKKRSDRSGDEGHVLAVEGAPRATRKGRPASDKKKEAGTPSRERPAGRWCSVHNTSLHDLADCRAVKNLAERTRKWEEDRRQERREGKSPAVPSGKRRSEAKQKAPAVDIDDGDDDLGFQEPGATIATVDGGACAHVSRRSFKAMKRELLAMAPTHEAMRRARWSEVALTFDQTDHPPCIARGGQVAMVVSPTICNVKLGRVLIDGGAALNILSPAAFDAIKAPGMVLRPSQPIIGVTPGHTWPLGHIDLPVTFGGPANFRTERVSFDVADLSLPYNAVLGRPALVKFMAAVHYAYLQMKMPGPGGPISVHGDLKVALACMEQRADHLAAATKPEGGDERLGTSAPTAPRQRIATCDEVPEDALVSFLRANADVFAWRPADMPGVPREVIEHRLAVRPDARPIRQKVRRQAPERQAFIREEVARLLEAGFIREVIHPEWLANPVVVPKANGKLRMCIDYTDLNKACPKDPYPLPRIDQIVDSTAGCDLLCFLDAYSGYHQIRMAREDEEKTAFITPVGTYCYTSMPFGLKNAGPTFQRTTRISLGSQIGRNVEAYVDDLVVKTRNQETLLSDLAETFENLRSARIKLNPDKCVFGVPAGKLLGFLVSARGIEANPEKIRAIERMRPPSKLRDVQCVTGCMAALSRFISRLGEKALPFFKLLKRSGPFTWTEEAEHALTQLKAYLSSPPVLVAPEPNEPLLLYLAATPQTILIPRTPHPVPTWPGSKQGGEAPESNGGLRPLTTGDGPLPACQTVLSAPDPQEGPEATAGRPHLSPFGPEANPVLTRPGREQGEEAPEPNGGLTPLTTGVGPLPACPTTPGVPDPQDGPEATVGRPLLSSSDPEVIGTEDKCPPRGHLDEERPGDTAPSEGDRPRRKVQRPVYFVSEALRDAKTRYPQAQKMLYAILMASRKLRHYFQAHRVTVVTSYPLGQILRNREGTGRVVKWAIELSEFDLHFEPRHAIKSQALADFVAEWTPAPETVSIPEASTDPSQLPQTAHWVMQFDGSLSLQGAGAGVTLTSPNGDVLRYLVRLDFRATNNMAEYEGLLAGLRVAAGLGIRRLLVLGDSQLVVNQVCKEYRCSDPQMDAYVRQVRRMERHFDGIELRHVPRRDNIVADELSRLASSRAQTPPGAFEERLTQPSARPDPIGETDAPDRPPRPVGVQASGPEGSAPSSLRLIAWISEIQTYLTDMTLPEDREGSERVQRISKRYVLVEGTLYRRAANGILLKCIPQEQGVELLADIHEGECGAHSASRTLVGKAFRQGFYWPTALNDAVDLVRRCRVCQFHAKQIHQPAQALQIIPLSWPFAVWGLDILGPFKRALGGFEYLYVAIDKFTKWPEAYPVVKIDKHSALKFIKGITARFGVPNRIITDNGTQFTSELFGNYCEDMGIKLCFASPAHPRSNGQVERANAEILKGLKTKTFNILKKHGDSWIEELPAVLWANRTTPSRATGETPFFLVYGAEAVLPSELTLRSPRATMYCEADQDQLRRDDLDYLEERRRRAALRAARYQQSLRRYHQRHVRARSLCVDDLVLRRVQTRAGLSKLSPMWEGPYRVIGVPRPGSVRLATGDGTELPNPWNIEHLRRFYP

SEQ ID NO: 150131 - protein, 110 aa, Oryza sativa
  unsure (1)..(110): unsure at all Xaa locations
  Clone ID: PAT_MRT4530_50397C.1.pep
FVCPGRYNFDGYVEFMDMALSTGQRFIRTTLHQCGGYGGDSVIMLFRWXEEEDMEKDNDTVXYIDQWGRRNCEYNSLGCHSILVLKGRTFVEGYTDFMRALGEHFTSLLP

SEQ ID NO: 150132 - protein, 1558 aa, Oryza sativa
  Clone ID: PAT_MRT4530_50398C.1.pep
MAEQGKAHDLSPSVSGDDGEPNPRRRARTPPLPPRQSPKQGEALERVDKSVASPVAGDAGERRDGERRLLVYGDGSTPQGALQAAGALLRHPPVVHDPESPAQRWLEDVANLVMTAQQRLGAGGRAFVASLGNVRWPPRFRPTITEKYDGSVNPTEFLQVYTTGIEAAGGDDRVMANFFPMALKGQARGWLMNLPPALVHSWEDLCQQFTMNFQGTYPRPGEEADLHAVQRGDDESLRSYIQRFCQVRNTIPCIPAHAVIYAFRGGVRHNRMLEKIASKEPQTTAELFQLADRVARKEEAWTWNSSGSGVAASAAPGSAAQTGRRDRRRKKRSDRSGDEGHVLAVEGAPRATRKGRPASDKKKEAGTPSRERPAGRWCSVHNTSLHDLADCRAVKNLAERTRKWEEDRRQERREGKSPAVPSGKRRSEAKQKAPAVDIDDGPGDGAPTVQPIIGVTPGHTWPLGHIDLPVTFGGPANFRTERVSFDVADLSLPYNAVLGMPALVKFMAAVHYAYLQMKMPGPGGPISVHGDLKVALACMEQRADHLAAATKPEGGDERLGTSAPTAPRQRIATCDEVPEDALVSFLRANADVFAWRPADMPGVPREVIEHRLAVRPDARPIRQKVRRQAPERQAFIREEVARLLEAGFIREVIHPEWLANPVVVPKANGKLRMCIDYTDLNKACPKDPYPLPRIDQIVDSTAGCDLLCFLDAYSGYHQIRMAREDEEKTAFITPVGTYCYTSMPFGLKNAGPTFQRTTRISLGSQIGRNVEAYVDDLVVKTRNQETLLSDLAETFENLRSARIKLNPDKCVFGVPAGKLLGFLVSARGIEANPEKIRAIERMRPPSKLRDVQCVTGCMAALSRFISRLGEKALPLFKLLKRSGPFTWTEEAEHALTQLKAYLSSPPVLVAPEPNEPLLLYLAATPQVVSAALVVERDEDNPHSAHPHPVPTWPGSKQGGEAPESNGGLRPLTTGDGPLPACQTVLSAPDPQEGPEATAGRPHLSPFGPEANPVLTRPGREQGEEAPEPNGGLTPLTTGVGPLPACPTTPGVPDPQDGPEATVGRPLLSSSDPEVIGTEDKCPPRGHLDEERPGDTAPSEGDRPRRKVQRPVYFVSEALRDAKTRYPQAQKMLYAILMASRKLRHYFQAHRVTVVTSYPLGQILRNREGTGRVVKWAIELSEFDLHFEPRHAIKSQALADFVAEWTPAPETVSIPEASTDPSQLPQTAHWVMQFDGSLSLQGAVDLVRRCRVCQFHAKQIHQPAQALQIIPLSWPFAVWGLDILGPFKRALGGFEYLYVAIDKFTKWPEAYPVVKIDKHSALKFIKGITARFGVPNRIITDNGTQFTSELFGNYCEDMGIKLCFASPAHPRSNGPGERANAEILKGLKTKTLNILKKHGDSWIEELPAVLWANRTTPSRATGETPFFLVYGAEAVLPSELTLRSPRATMYCEADQDQLRRDDLDYLEERRRRAALRAARYQQSLRRYHQRHVRARSLCVDDLVLRRVQTRAGLSKLSPMWEGPYRVIGVPRPGSVRLATGDGTELPNPWNIEHLRRFYP

SEQ ID NO: 150133 - protein, 550 aa, Oryza sativa
  unsure (1)..(550): unsure at all Xaa locations
  Clone ID: PAT_MRT4530_50399C.1.pep
MAEQGKAHDLSPSVSGDDGEPNPRRRARTPPPPPRQSPKQGEALERVDKSVASPVAGDAGERRDGERRLLVYGDGSTPQGALQAAGALLRHPPVVHDPESPAQRWLEDVANLVMTAQQRLGAGGRSATTKTSGAATTGSVSSRRRARRAAAVARHSAATPSSTPPTREDQHGEPDACIDIERRRNNRRTPRATEGASSSRVSPRHGREDQPSVPPAGGVGCRAFVASLRNVRWPPRFRPTITEKYDGSVNPTEFLQVYTTGIEAAGGDDRVMANFFPMALKGQARGWLMNLPPASVHSWEDLCQQFTMNFQGTYPRPGEEADLHAVQRGDDESLRSYIQRFCQVRNTIPCIPAHAVIYAFRGXACGTTACSKRSLPKSPRLPRSFFSSRTEWLVRRKRGHGTPPVPEWQLRPPPDPPPRQGGVTGGGRRGRXRGPPERGGLRATKRKRPTLPDLGYLEERRRRAALRAARYQQSLRRYHQRHVRARSLCVDDLVLRRVQTRAGLSKLSPVWEGPYRVIGVPRPGSVRLATGDGTELPNLWNIEHLRRFYP

SEQ ID NO: 150134 - protein, 286 aa, Oryza sativa
  unsure (1)..(286): unsure at all Xaa locations
  Clone ID: PAT_MRT4530_5039C.1.pep
LPPRDEAWERQRRTGAAETAGNKEDERRGDDFGGDPWTKARRGRHEAXRRGAEDEDDDGXATGAGEEATRAAGSGCTETRMAWNTPLRCRRRRQRRETTSRRGXTVKRTTDTGGVRPKGKRCRGRRCGVPREGTAAPADARAWRKGLLEEMPTRRKERPARXDGVPAKFGRRRGLAGKEDGAPVPGEVMATSAGAQGTQQRRPEAEQWRQRHCRRRGGTSGGLRGKQRAGRRRGGGCDAGGGDGTASRRANAAAGAAEDGRRHGREGTTAGRWLGTTGDRGRGLKR

SEQ ID NO: 150135 - protein, 117 aa, Oryza sativa
  Clone ID: PAT_MRT4530_503C.1.pep
RSPSSPRSATSTPCSTSSSKTSRRSTPPLRHLPRRQPSRRRRRRRRRRRRRWRRNATTPPSRRPARRRWRRRPTTTPPARPRRPRPLRRAARRRRRHRWRRPTTTPAPAPPRRSPRQ

SEQ ID NO: 150136 - protein, 86 aa, Oryza sativa
  Clone ID: PAT_MRT4530_50400C.1.pep
GTVCTVFIRYFFVVLCVITISFFFVSLKTLVYIVACGYVLTYLYMFRPHACIYVYGTLQQKERILLMAYIYLTSNSKCVLCVTFKR

SEQ ID NO: 150137 - protein, 1751 aa, Oryza sativa
  Clone ID: PAT_MRT4530_50401C.1.pep
MAEQAKAHDLSPSVSGDDGEPNPRRRARTPPPPPRQSPKQGEALERVDKSVASPVAGDAGERRDGERRLLVYGDGSTPQGALQAAGALLRHPPVVHDPESPAQRWLEDVANLVMTAQQRLGAGGRSATTKTSGAATTGSVSSRRRARRAAAAARHSAATPSSTPSTREDQHGEPDARLNIERRRNSRRTPRATEGASSSRVSPRHGREDQPSVPPAGGVGCRAFVASLRNVRWPPRFRPTITEKYDGSVNPTEFLQVYTTGIEAAGGDDRVMANFFPMALKGQARGWLMNLPPASVHSWEDLCQQFTMNFQGTYPRPGEEADLHAVQRGDDESLRSYIQRFCQVRNTIPCIPAHAVIYAFRGGVRHNRMLEKIASKEPQTTAELFQLADRVARKEEAWTWNSSGSGVAASAAPGSAAQTGRRDRRRKKRPDRSGDEGHVLAVEGAPRATRKGRPASDKKNEAGTPSRERLAGRWCSVHNTSLHDLADCRAVKNLAERTRKWEEDRRQERREGKSPAVPSGKRRSEAKQKAPAVDVDDGDDDLGFQEPGATIATVDGGACAHVSRRSFKAMKRELLAMAPTHEAMRRARWSEVALTFDQTDHPPCIARGGQVAMVVSPTICNVKLGRVLVDGGAALNILSPAAFDAIKAPGMVLRPSQPIIGVTPGHTWPLGHIDLPVTFGGPANFRTERVNFDVADLSLPYNAVLGRPALVKFMAAVHYAYLQMKIPGPGGPISVRGDLKVALACMEQRADHLAAASKPEGGDERLGPSAPTAPRQRIATCDEVPEDALVSFLRANADVFAWKPADMPGVPREVIEHRLAVRPGARPVRQKVRRQAPERQAFIREEVARLLEAGFIREVIHPEWLANPVVVPKANGKLRMCIDYTDLNKACPKDPYPLPRIDQIVDSTAGCDLLCFLDAYSGYHQIRMAREDEEKTAFITPVGTYCYTSMPFGLKNAGPTFQRTTRISLGSQIGRNVEAYVDDLVVKTRDQETLLSDLAETFENLRSARIKLNPDKCVFGVPAGKLLGFLVSARGIEANPEKIRAIERMRPPSKLRDVQCVTGCMAALSRFISRLGEKALPLFKLLKRSGPFTWTEEAEHALTQLKAYLSSPPVLVAPEPNESLLLYLAATPQVVSAALVVERDEDNPHSAHPHSMPTWPGSRQGGEAPESNGGLRPPTTGVGPLPACQTVPGAPDPQEGPEATVGRPHLPPFDPEATPVLIQPGREQGEEAPEPNGGLRPLTTGAGPLPACLTTPGAPDPQDGPEATVGRPHLSSSDPEVISTGDECAPRGHLDKEHPGDTAPSEEDRPRRRVQRPVYFVSEALRDAKTRYPQAQKMLYAIRVTVVTSYPLGQILHNREGTRRVVKWAIELSEFDLHFEPRHAIKSQALADFVAEWTPAPETVSIPEASTNPSQLPHTTYWVMQFDGSLSLQGAVDLVRRCRACQFHAKQIHQPAQALQIIPLSWPFAVWGLDILGPFKRAPGGFEYLYVAIDKFTKWPEAYPVIKIDKHSALKFIKGITARFGVPNRIITDNGTQFTSELFGDYCEDMGIKLCFASPAHPRSNGQVERANAEILKGLKTKTFNILKKHGDSWIEELPAVLWANRTTPSRATGETPFFLVYGAEAVLPSELTLRSPRATMYCEADQDQLRRDDLDYLEERRRRAALRAARYQQSLRRYHQRHVRARSLCVDDLVLRRVQTRAGLSKLSPMWEGPYRVIGVPRPGSVRLATGDGTELPNPWNIEHLRRFYP

SEQ ID NO: 150138 - protein, 264 aa, Oryza sativa
  Clone ID: PAT_MRT4530_50402C.1.pep
MARRSTANHRCSDFGFGYGGRVGCGELAGAKARFIGEGGAKGGRVEHLSRHVRQEHGGSGESRQLCRRALSVGHGISRAARRLARGAAAAGRLRLAEAGARRRGDVSLAVSASALQSGDRGGRASRVSSFRVEGQCWFATANGEVSGDLDRASGTAASALQARVSGFAGLARSGGQGFWPRRVVNGSLCSSRSLHAKCLLKCLQGGREKGRWGRDGALVRLACGVQGSWAHRSERRRRKRGEAIFLKILVKTESVIEFSGYATV

SEQ ID NO: 150139 - protein, 46 aa, Oryza sativa
  Clone ID: PAT_MRT4530_50403C.1.pep
PTHDVSRTAWTDSCVYTGSTIEGEWAVAIFFHIQIRLHVIMMKTTI

SEQ ID NO: 150140 - protein, 1765 aa, Oryza sativa
  Clone ID: PAT_MRT4530_50404C.1.pep
MAEQGKAHDLSPSVSGDDGEPNPRRRARTPPPPPRQSPKQGEALERVDKSVASPVAGDAGERRDGERRLLVYGDGSTPQGALQAAGALLRHPPVVHDPESPAQRWLEDVANLVMTAQQRLGAGGRSATTKTSGAATTGSVSSRRRARRAAAAARHSAATPSSTPPTREDQHGEPDARIDIERRRNNRRTPRATEGASSSRVSPRHGREDQPSVPPAGGVGCRAFVASLRNVRWPPRFRPTITEKYDGSVNPTEFLQVYTTGIEAAGGDDRVMANFFPMALKGQARGWLMNLPPASVHSWEDLCQQFTMNFQGTYPRPGEEADLHAVQRGDDESLRSYIQRFCQVRNTIPCIPAHAVIYAFRGGVRHNRMLEKIASKEPQTTAELFQLADRVARKEEAWTWNSSGSGVAASAAPGSAAQTGRRDRRRKKRSDRSGDEGHVLAVEGAPRATRKGRPASDKKKEAGTPSRERPAGRWCSVHNTSLHDLADCRAVKNLAERTRKWEKDRRQERREGKSPAVPSGKRRSEAKQKAPAVDIDDGDDDLGFQEPGATIATVDGGACAHVSRRSFKAMKRELLAMAPTHEAMRRARWSEVALTFDQTDHPPCIARGGQVAMVVSPTICNVKLGRVLIDGGAALNILSPAAFDAIKAPGMVLRPSQPIIGVTPGHTWPLGHIDLPVTFGGPANFRTERVSFDVADLSLPYNAVLGRPALVKFMAAVHYAYLQMKMPGPGGPISVHGDLKVALACIEQRADHLAAATKPEGGDERLGTSAPTAPRQRIATCDEVPEDALVSFLRANADVFAWRPADMPGVPREVIEHRLAVRPGARPVRQKVRRQAPERQAFIREEVARLLEAGFIREVIHPEWLANPVVVPKANGKLRMCIDYTDLNKACPKDPYPLPRIDQIVDSTAGCDLLCFLDAYSGYHQIRMAREDEEKTAFITPVGTYCYTSMPFGLKNAGPTFQRTTRISLGSQIGRNVEAYVDDLVVKTRNQETLLSDLAETFENLRSARIKLNPDKCVFGVPAGKLLGFLVSARGIEANPEKIRAIERMRPPSKLRDVQCVTGCMAALSRFISRLGEKALPLFKLLKRSGPFTWTEEAEHALTQLKAYLSSPPVLVAPEPNEPLLLYLAATPQVVSAALVVERDEDNPHSAHPHPVPTWPGSKQGGEAPESNGGLRPLTTGDGPLPACQTVLSAPDPQEGPEATAGRPHLSPFGPEANPVLTRPGREQGEEAPEPKGGLRPLTTGAGPLPACPMTPGAPDPQDGPEATVGRPLLSSSDPEVIGTEDECAPRGHLDEERPGGTAPSEEDRPRRKVQRPVYFVSEALRDAKTRYPQAQKMLYAILMASRKLRHYFQAHRVTVVTSYPLGQILRNREGTGRVVKWAIELSEFDLHFEPRHAIKSQALADFVAEWTPAPETVSIPEASTDPSQLPQTTHWVMQFDGSLSLQGAVDLVRRCRACQFHAKQIHQPAQALQIIPLSWPFAVWGLDILGPFKRAPGGFEYLYVAIDKFTKWPEAYPVVKIDKHSALKFIKGITARFGVPNRIITDNGTQFTSELFGNYCEDMGIKLCFASPAHPRSNGQVERANAEILKGLKTKTFNILKKHGDSWIEELPAVLWANRTTPSRATGETPFFLVYGAEAVLPSELTLRSPRATMYCEADQDQLRRDDLDYLEERRRRAALRAARYQQSLRRYHQRHVRARSLCVDDLVLRRVQTRAGLSKLSPMWEGPYRVIGVPRPGSVRLATGDGTKLPNPWNIEHLRRFYP

SEQ ID NO: 150141 - protein, 279 aa, Oryza sativa
  Clone ID: PAT_MRT4530_50405C.1.pep
MARRSTANHRCSDFGFGYGGRVGCGELAGAKARFIGEGGAKGGRVEHLSRHVRQEHGGSGESRQLCRRALSVGHGISRAARRLARGAAGGRHGRAERCRVRVPAAGRLRLAEAGARRRGDVSLAVSASALQSGDRGGRASRVSSFRVEGQCWFATANGEVSGDLDRASGTAASALQARVSGFAGLARSGGQGFWPRRVVNGSLCSSRSLHAKCLLKCLQGGREKGRWGRDGALVRLACGVQGSWAHRSERRRRKRGEAIFLKILVKTESVIEFSGYATV

SEQ ID NO: 150142 - protein, 1989 aa, Oryza sativa
  Clone ID: PAT_MRT4530_50406C.1.pep
MAEQGKAHDLSPSVSGDDGEPNPRRRARTPPPPPRQSPKQGEALERVDKSVASPVAGDAGERRDGERRLLVYGDGSTPQGALQAAGALLRHPPVVHDPESPAQRWLEDVANLVMTAQQRLGAGGRSATTKTSGAATTGSASSRRRARRAAAAARHSATTPSSAPPTREDQHEEPDARLDIERRRSDRRTPRATEGASSSRVSPRHGREDQPSVPPVGGVGCRAFVASLRNVRWPPRFRPTITEKYDGSVNPTEFLQVYTTGIEAAGGDDRVMANFFPMALKGQARGWLMNLPPASVHSWEDLCQQFTMNFQGTYPRPGEEADLHAVQRGDDESLRSYIQRFCQVRNTIPCIPAHAVIYAFRGGVRHNRMLEKIASKEPQTTAELFQLADRVARKEEAWTWNPSGSGVAASAAPGSAAQTGRRDRRRKKRSVHSGDEGHVLAVEGAPRATRKGRPASDKKKEAGTPSRERPASKWCSVHNTSLHDLADCRAVKNLAERTRKWEEDRRQERREGKSAAVPSGKRRSEAKQKAPAADIDDGDDDLGFQEPGATIATVDGGACAHVSRRSFKAMRRELLAAAPTHEATRRARWSEVALTFDQTDHPPCVARGGQIAMVVSPTICNVKLGRVLIDGGAALNILSPAAFDAIKAPGMVLQPSQPIIGVTPGHTWPLGHIDLPVTFGGSANFRTERVNFDVADLSLPYNAVLGRPALVKFMAAVHYAYLQMKMPGPGGPISVRGDLKVALACMEQRADHLAAATKPEGGDERLGTSAPTAPRQRIATCDEVPVKEVALGDGPSKTTRIGAFIREEVARLLEAGFIREVIHPEWLANPVVVPKANGKLRMCIDYTDLNKACPKDPYPLPRIDQIVDSTAGCDLLCFLDAYSGYHQIRMAREDEEKTAFITPVGTYCYTSMPFGLKNAGPTFQRTTRISLGSQIGRNVEAYVDDLVVKTRNQETLLLDLAETFENLRSARIKLNPDKCVFGVPAGKLLGFLVSARGIEANPEKIRAIERMRPPSKLRDVQCVTGCMAALSRFISRLGEKALPLFKLLKRSGPFTWTEEAEHALTQLKAYLSSPPVLVAPEPNESLLLYLAATPQVVSAALVVERDEDNPHSAHPHSVPTWPGSRQGGEAPESNGGLRPPTTGVGSLPACQTVLGAPDPQEGPEATAGRPHLPPFDPEANPVLIRPGREQGEEAPEPNGGLRPLTTGAGPLPACLTTPGAPDPQGGPEATVGRPHLSSSDPEVISAGDECAPRGHWDEEHPGDTALSEEDRPRRKVQRPVYFVSEALRDAKTRYPQAQKMLYAILMASRKLRHYFQAHRVTVVTSYPLGQILHNREGTGRVVKWAIELSEFDLHFEPRHAIKSQALADFVAEWTPAPETVSIPEASADPSQLPHAAHWVMQFDGSLSLQGAGAGVTLTSPNGDVLRYLVRLDFRATNNMAEYEGLLAGLRVAAGLGIRRLLVLGDSQLVVNQVCKEYRCSDPQMDAYVRQVRRMERHFDGIELRHVPRRDNVVADELSRLASSRAQTPPGAFEERLTQPSARPDPLGETDTPDRPPRPVGVQVSGPEGSASSSLRLIAWISEIQAYLTDKTLPEDREGSERVQRISKRYVLVEGTLYRRAANGILLKCIPQEQGVELLVDIHEGECGAHSASRTLVGKAFRQGFYWPTALNDAVDLVRRCRACQFHAKQIHQPAQALQIIPLSWPFAVWGLDILGPFKRAPGGFEYLYVAIDKFTKWPEAYPVVKIDKHSALKFIKGITARFGVPNRIITDNGTQFTSELFGDYCEDMGIKLCFASPAHPRSNGQVERANAEILKGLKTKTFNILKKHGDSWIEELPAVLWANRTTPSRATGETPFFLVYGAEAVLPSELTLRSPRATMYCEADQDQLRRDDLDYLEERRRRAALRAARYQQSLRRYHQRHVRARSLCVDDLVLRRVQTRAGLSKLSPMWEGPYRVIGVPRPGSVRLATGDGTELPNPWNIEHLRRFYP

SEQ ID NO: 150143 - protein, 2027 aa, Oryza sativa
  Clone ID: PAT_MRT4530_50407C.1.pep
MAEQAKAHDLSPSVSGDDGEPNPRRRARTPPPPPRQSPKQGEALERVDKSAASPVVGDAGERRDGERRLLVYGDGSTPQGALQAAGALLRHPPVVHDPESPAQRWLEDVANLVMTAQQRLGAGGRSATTKTSGAATTGSVSSRRRARRAAAAARHSAATPSSTPPTREDQHGEPDARLDIERRRNNRRTPRATEGASSSRVSPRHGREDQPSVPPVGGVGCRAFVASLRNVRWPPRFRPTITEKYDGSVNPTEFLQVYTTGIEAAGGDDRVMANFFPMALKGQARGWLMNLPPASVHSWEDLCQQFAMNFQGTYPRPGEEADLHAVQRGDDESLRSYIQRFCQVRNTIPCIPAHAVIYAFRGGVRHNRMLEKIASKEPQTTAELFQLADRVARKEEAWTWNSSGSGVAASAAPGSAAQTGRRDRRRKKRSDRSGDESHVLAVEGAPRATRKGRPASDKKKEAGTPSRERPAGRWCSVHNTSLHDLADCRAVKNLAERTRKWEEDRRQERREGKSPAVPSGKRRSEAKQKAPAVDIDDGDDDLGFQEPGATIATVDGGACAHVSRRSFKAMKRELLAMAPTHEAMRRARWSEVALIFDQTDHPPCIARGGQVAMVVSPTICNVKLGRVLIDGGAALNILSPAAFDAIKAPGMVLRPSQPIIGVTPGHTWPLGHIDLPVTFGGPANFRTERVSFDVADLSLPYNAVLGRPALVKFMAAVHYAYLQMKMPGPGGPISVRGDLKVALACMEQRADHLAAATKPEGGDERLGTSAPTAPRQRIATCDEVPEDALVSFLRANADVFAWRPADMPGVPREVIEHRLAVRPGARPVRQKVRRQAPERQAFIREEVARLLEAGFIREVIHPEWLANPVVVPKANGKLRMCIDYTDLNKACPKDPYPLPRIDQIVDSTAGCDLLCFLDAYSGYHQIRMAREDEEKTAFITPVGTYCYTSMPFGLKNAGPTFQRTTRISLGSQIGRNVEAYVDDLVVKTRNQETLLSDLAETFENLRSARIKLNPDKCVFGVPAGKLLGFLVSARGIEANPEKIRAIERMRPPGKLRDVQCVTGCMAALSRFISRLGEKALPLFKLLKRSGPFTWTEEAEHALTQLKAYLSSPPVLVAPEPNEPLLLYLAATPQVVSAALVVERDEDNPHSAHPHSVPTRPGSRQGGEAPESNGGLRPPTTGVGPLPACQTVPDAPDPQEGPEATAGRPHLPPFDPEANPVLIRPGRGQGEEAPEPNGGLRPLTTGAGPLPACLTTPGAPDPQDGPEATVGRPLLSSSDPEVIGTEDECAPRGHLDEERPGGTALSEEDRPRRKVQRPVYFVSEALRDAKTRYPQAQKMLYAILMASRKLRHYFQAHRVTVVTSYPLGQILHNREGTGRVVKWAIELSGFDLHFEPRHAIKSQALADFVAEWTPAPETVSIPEASTNPSQLPHTAHWVMQFDGSLSLQGAGAGVTLTSPSGDILRYLVRLDFRATNNMAEYEGLLAGLRVAAGLGIRRLLVLGDSQLVVNQVCKEYRCSDPQMDAYVRQVRRMERHFDGIELRHVPRRDNMIADELSRLASSRAQTPPGAFEERLTQPSARPDPLGETDAPDRPPRPVGVQASGPEGSAPSSLRLIAWISEIQTYLTDKTLPEDREGSERVQRISKRYVLVEGTLYRRAANGILLKCIPQEQGVELLADIHEGECGAHSASRTLVGKAFRQGFYWPTALNDAVDLVRRCRACQFHAKQIHQPAQALQIIPLSWPFAVWGLDILGPFKRAPGGFEYLYVAIDKFTKWPEAYPVVKIDKHSALKFIKGITARFGVPNRIITDNGTQFTSELFGDYCEDMGIKLCFASPAHPRSNGQVERANAEILKGLKTKTFNILKKHGDSWIEELPAVLWANRTTPSRATGETPFFLVYGAEAVLPSELTLRSPRATMYCEADQDQLRRDDLDYLEERRRRAALRAARYQQSLRRYHQRHVRARSLCVDDLVLRRVQTRAGLSKLSPMREGPYRVIGVPRPGSVRLATGDGTELPNPWNIEHLRRFYP

SEQ ID NO: 150144 - protein, 109 aa, Oryza sativa
  Clone ID: PAT_MRT4530_50408C.1.pep
FFAFFFFFGAHKKEFQYIITIAFPLWQDSSCVQFLPFSNFHRPLLKFMQFRGHICFKAIRAELAQGNQSIGPFRLVSVKYSSSDRSHLMMKFLNFHSVSPYIYIHHDDG

SEQ ID NO: 150145 - protein, 88 aa, Oryza sativa
  Clone ID: PAT_MRT4530_50409C.1.pep
MASAERRIRMWWRTARRPKHLWGRRSMLYMGHSRIYTDHYYDPIELHGQPPPLLGVPQSVNGEETEGIGRRRGGSNDGRRHGEMAPET

SEQ ID NO: 150146 - protein, 287 aa, Oryza sativa
  unsure (1)..(287): unsure at all Xaa locations
  Clone ID: PAT_MRT4530_5040C.1.pep
MTSPPAAAARWLGRLGRRTLAGERRRFGTNGGHQQVADGTANSPATKATAEDQGTATATRLKRRRSSAXRRRRCSGGLRRWRSGGRGRRRLGDHDGGLPERRQXLERRRRTTGATAATAALGHTALERYGRREAKARVAAGRGDTGEAYKGARRRRRRPTVAGDEKESLGFGGERXNRFELDSNDFQNELADVSKREKVDEIEKIISPLSIRPETERSGRIXKGDGGGAALXGFGRRRRDEDDGSDKRAPPVSDRTRARAAADWAGLGRGERERFWADFRPKAKRRL

SEQ ID NO: 150147 - protein, 136 aa, Oryza sativa
  Clone ID: PAT_MRT4530_50410C.1.pep
VAIDLVISSHRIYLISTSNLIEMLPHTGRLTNAKQPESPIKYFAYPIASPLWQDSSCVQFLPFSNFHRPLLKFMQFRGHICFRAIRAELAQGNQSIGPFRLVSVKYSSSDRSHLMMKFLNFHSVSPYISDAWADAW

SEQ ID NO: 150148 - protein, 1765 aa, Oryza sativa
  Clone ID: PAT_MRT4530_50411C.1.pep
MAEQGKAHDLSPSVSGDDGEPNPRRRARTPPPPPRQSPKQGEALERVDKSVASPVAGDAGERRDGERRLLVYGDGSTPQGALQAAGALLRHPPVVHDPESPAQRWLEDVANLVMTAQQRLGAGGRSATTKTSGAATTGSVSSRRRARRAAAAARHSAATPSSTPSTREDQHGEPDARLNIERRRNSRRTPRATEGASSSRMSPRHGREDQPSVPPAGGVGCRAFVASLRNVRWPPRFRPTITEKYDGSVNPTEFLQVYTTGIEAAGGDDRVMANFFPMALKGQARGWLMNLPPASVHSWEDLCQQFTMNFQGTYPRPGEEADLHAVQRGDDESLRSYIQRFCQVRNTIPCIPAHAVIYAFRGGVRHNRMLEKIASKEPQTTAELFQLADRVARKEEAWTWNPSGSGVAASAAPGSAAQTGRRDRRRKKRSAHSGDEGHVLAVEGAPRATRKGRPASDKKKEAGTPNRERPASKWCSVHNTSLHDLADCRAVKNLAERTRKWEEDRRQERREGKSAAVPSGRRRSEARQKAPAVDPDDGDDDLGFQEPGATIATVDGGACAHVSRRSFKAMKRELLAAAPTHEATRRARWSEVALTFDQTDHPPCVARGGQIAMVVSPTICNVKLGRVLIDGGAALNILSPTAFDAIKAPGMVLQPSQPIIGVTPGHTWPLGHIDLPVTFGGSANFRTERVNFDVADLSLPYNAVLGRPALVKFMAAVHYAYLQMKMPGPGGPISVRGDLKVALACMEQRADHLAAATKPEGGDERLGTSAPTAPRQRIATCDEVPEDALVSFLRANADVFAWRPADMPGVPREVIEHRLAVRPGARPVRQKVRRQAPERQAFIREEVARLLEAGFIREVIHPEWLANPVVVPKANGKLRMCIDYTDLNKACPKDPYPLPRIDQIVDSTAGCDLLCFLDAYSGYHQIRMAREDEEKTAFITPVGTYCYTSMPFGLKNAGPTFQRTTRISLGSQIGRNVEAYVDDLVVKTRNQETLLSDLAETFENLRSARIKLNPDKCVFGVPAGKLLGFLVSARGIEANPEKIRAIERMRPPSKLRDVQCVTGCMAALSRFISRLGEKALPLFKLLKRSGPFTWTEEAEHALTQLKAYLSSPPVLVAPEPNESLLLYLAATPQVVSAALVVERDEDNPHSAHPHSVPTWPGSRQGGEAPESNGGLRPPTTGVGPLPACQTVLGAPDPQEGPEATEGRPHLSPFGPEANPVLTRPGREQGEEAPEPKGGLRPLTTGAGPLPACPMTPGAPDPQDGPEATVGRPLLSSSDPEVIGTEDECTPRGHLDEERPGDTAPSEGDRPRRKVQRPVYFVSEALRDAKTRYPQAQKMLYAILMASRKLRHYFQAHRVTVVTSYPLGQILHNREGTGRVVKWAIELSEFDLHFEPRHAIKSQALADFVVEWTPAPETVSIPEASTNPSQLPHTTYWVMQFDGSLSLQGAVDLVRRCRACQFHAKQIHQPAQALQIIPLSWPFAVWGLDILGPFKRAPGGFEYLYVAIDKFTKWPEAYPVVKIDKHSALKFIKGITARFGVPNRIITDNGTQFTSELFGDYCEDMGIKLCFASPAHPRSNGQVERANAEILKGLKTKTFNILKKHGDSWIEELPAVLWANRTTPSRATGETPFFLVYGAEAVLPSELTLRSPRATMYCEADQDQLRRDDLYYLEERRRRAALRAARYQQSLRRYHQRHVRARSLCVDDLVLRRVQTRAGLSKLSPMWEGPYRVIGVPRPGSVRLATGDGTELPNPWNIEHLRRFYP

SEQ ID NO: 150149 - protein, 2009 aa, Oryza sativa
  Clone ID: PAT_MRT4530_50412C.1.pep
MGEKRARLSTTHYTQQVIPEEEGEALERVEKSAASPVAGGAGERRDGERRLLVYGDGSTPQGALQAVGALLRHPPVVPDPESPAQRWLDDVANLVMTAQQRLGAGGRSATTKTSGAATTGSVSSRRRARRAAAAARHSAATPSSTPPTREDQHGEPDARIDIERRRNNRRTPRATEGASSSRVSPRHGREDQPSVPPAGGVGCRAFVASLRNVRWPPRFRPTITEKYDGSVNPTEFLQVYTTGIEAAGGDDRVMANFFPMALKGQARGWLMNLPPASVHSWEDLCQQFTMNFQGTYPRPGEEADLHAVQRGDDESLRSYIQRFCQVRNTIPCIPAHAVIYAFRGGVRHNRMLEKIASKEPQTTAELFQLADRVARKEEAWTWNSSGSGVTASAAPGSAAQTGRRDRRRKKRSDRSGDEGHVLAVEGAPRATRKGRPASDKKKEAGTPSRERPAGRWCSVHNTSLHDLADCRAVKNLAERTRKWEEDRRQERREGKSPAVPSGKRRSEAKQKAPAVDIDDGDDDLGFQEPGATIATVDGGACAHVSRRSFKAMKRELLAMAPTHEAMRRARWSEVALTFDQTDHPPCIARGGQVAMVVSPTICNVKLGRVLIDGGAALNILSPAAFDAIKAPGMVLRPSQPIIGVTPGHTWPLGHIDLPVTFGGPANFRTERVNFDVVDLSLPYNAVLGRPALVKFMAAVHYAYLQMKMPGPGGPISVRGDLKVTLACMEQRADHLAAATKPEGGDERLGTSAPTAPRQRIATCDEVPEDALVSFLRANADVFAWRPADMPGVPREVIEHRLAVRPGARPVRQKVRRQAPERQAFIREEVARLLEAGFIREVIHPEWLANPVVVPKANGKLRMCIDYTDLNKACPKDPYPLPRIDQTVDSTAGCDLLCFLDAYSGYHQIRMAREDEEKTAFITPVGTYCYTSMPFGLKNAGPTFQRTTRISLGSQIGRNVEAYVDDLVVKTRNQETLLSDLAETFENLRSARIKLNPDKCAFGVPAGKLLGFLVSARGIEANPEKIRAIERMRPPSKLRDVQCVTGCMAALSRFISRLGEKALPLFKLLKRSGPFTWTEEAEHALTQLKAYLSSPPVLVAPEPNEPLLLYLAATPQVVSAALVVERDEDNPHFAHPRPVLTWPGSEQGGEAPESNGGLRPLTTGVGPLPACQTVLGAPDPQEGPEATAGRPHLSPFGPEANPVLTRPGRKQGEEAPEPNGGLRPLTTGVGPLPACPTTPGAPDPQDGPEATVGRPLLSSSDPEDIGTEDECAPRGHLDEERPGDAAPSKEGRPRRKVQRPVYFVSEALRDAKTRYPQAQKMLYAILMASRKLRHYFQAHRVTVVTSYPLGQILHNREGTGRVVKWAIELSEFDLHFEPRHAIKSQALADFVAEWTPAPETVSIPEASTDPSQLPHTAHWVMQFDGSLSLQGAGAGVTLTSPNGDVLRYLVRLDFRATNNMAEYEGLLAGLRVAAGLGIRRLLVLGDSQLVVNQVCKEYRCSDPQMDAYVRQVRRMERHFDGIELRHVPRRDNMIADELSRLASSRAQTPPGAFEERLTQPSARPDPLGETDAPDRPPRPVGVQVSGPEGSAPSSLRLIAWISEIQAYLTDKTLPEDREGSERVQRISKRYVLIEGTLYRRAANGILLKCIPQERGVELLADIHEGECGAHSASRTLVGKAFRQGFYWPTALNDAVDMVRRCRACQFHAKQIHQPAQALQIIPLSWPFAVWGLDILGPFKRAPGGFEYLYVAIDKFTKWPEAYPVVKIDKHSALKFIKGITARFGVPNRIITDNGTQFTSELFGDYCEDMGIKLCFASPAHPRSNGQVERANAEILKGLKTKTFNILKKHGDSWIEELPAVLWANRTTPSRATGETPFFLVYGAEAVLPSELTLRSPRATMYCEADQDQLRRDDLDYLEERRRRAALRAARYQQSLRRYHQRHVRARSLCVDDLVLRRVQTRAGLSKLSPMWEGPYRVIGVPRPGSVRLATGDGTELPNPWNIEHLRRFYP

SEQ ID NO: 150150 - protein, 134 aa, Oryza sativa
  Clone ID: PAT_MRT4530_50413C.1.pep
IRSLYSCVQVPAGHVMRYVRGCLKSLAVLTLSYKPLTVSWTPGMLQPTRVLVIHSTIHIQVQKLERTNNLTKLVLTSDGAFNHRELLLPKEKKCLCSWGGYVTCRREPCVNTGASRTGALPWPRVTLLAYGAEA

SEQ ID NO: 150151 - protein, 89 aa, Oryza sativa
  Clone ID: PAT_MRT4530_50414C.1.pep
RIAPIHPHKRLPGLGQGTYAVRQRSSERRVPTDKGYNYCSCGPCHYCYVEVTADNTAMDSCKTCFFQVLTVTPKYPGHSGKLSWPGQAQ

SEQ ID NO: 150152 - protein, 79 aa, Oryza sativa
  Clone ID: PAT_MRT4530_50415C.1.pep
PSHIPSGPLPPKKKPVAFYQRFFPAMCVFLPSPKPVFFFPSLKWPPSFFSWPKFPGPVSVRILVLINELLLTCALCFVT

SEQ ID NO: 150153 - protein, 106 aa, Oryza sativa
  Clone ID: PAT_MRT4530_50416C.1.pep
PRGLTHQGNRGVQDPLQFIMVSPTRGPPNNRRCNRGGEIIGLSIYLSIYPVFWVFPFHEIKIELFSWLSIKTRTMLFGIQARRYKPPLGFKLFKGGLFKWGIYPPG

SEQ ID NO: 150154 - protein, 94 aa, Oryza sativa
  unsure (1)..(94): unsure at all Xaa locations
  Clone ID: PAT_MRT4530_50417C.1.pep
REVLPKFLTIFFVLIYKFEVSKRLMDRXRMYADRRSKEFIDGVHYFLGVANDKKCNGFISCPCNKXQNQKEYSTARSIHGNLFQWGFMCSYNCD

SEQ ID NO: 150155 - protein, 179 aa, Oryza sativa
  Clone ID: PAT_MRT4530_50418C.1.pep
MERRENGRPRWSSLSLPLDVAFRRRPPQSSFASAKGVGAGGEGSRHGGNTATTSTDSGHHLATEPTNSSTPVKDSCPSSAGMAPSPPPPPRPASLSSEDRCHFIASIYSADPVVRRPTLAVVPSWDPPSAGPGLWRVSVAPVEHVSAAGLPGSGWHLLLRPPPTGSSSPPLPSRPGEHS

SEQ ID NO: 150156 - protein, 158 aa, Oryza sativa
  unsure (1)..(158): unsure at all Xaa locations
  Clone ID: PAT_MRT4530_50419C.1.pep
VGEESSSRWGRRWRPGRGSTSPDPARHRLEEGSETGLAQRGAANGSGGRLGARGVSGGDGGQLDARGTADGGRPDWRERHVQWRRPAXRERRGWRWRRQPRCEEDLPMGVARSSAHEGWPXGGAGAGVPHVGRAXVVEEHRCVEISYVFLCWSSGGAE

SEQ ID NO: 150157 - protein, 172 aa, Oryza sativa
  Clone ID: PAT_MRT4530_5041C.1.pep
YKNVARALLLRFRRSPLALAVGIVLAPCSSLSAVAVDRRFAAAVAPLFLPARRPLLRHRRIAADPVRRSASSADRRSTVVVVIPSRAATFFLSVRRSRRRRCLGVSRRPPFAFPLPSSLSGATPPRRWSPAATIGALVRAAPVGRAGEAALGRALAAAKWARPSAARARGCG

SEQ ID NO: 150158 - protein, 106 aa, Oryza sativa
  unsure (1)..(106): unsure at all Xaa locations
  Clone ID: PAT_MRT4530_50420C.1.pep
IQPNFPLXLAQITSPCSKSRFDPAAAVGFVARLECSCRIRAVXLGAPRVAAICGDXIRRRAAGVVVVSVGSGSGGKSYVDXGVAXLSXRGGVTGGGGGGGGGXGVR

SEQ ID NO: 150159 - protein, 158 aa, Oryza sativa
  Clone ID: PAT_MRT4530_50421C.1.pep
MSSLPGPRLPASEVLSGAGFLLHGSRVPATAAAAARGRESERMSGSAFNAFKSRVAVAWSPKLYITLVRGLPGTRRLHRRTLEAMRLRRCHRTVEHRTTPSLLGMLTQVKRLVVVETQEMYAARRQAEDDRRAPRPPLVVSHRPPAAATPTPTPTAGH

SEQ ID NO: 150160 - protein, 79 aa, Oryza sativa
  unsure (1)..(79): unsure at all Xaa locations
  Clone ID: PAT_MRT4530_50422C.1.pep
KKKEVKKKQSFEXPRPSSAAHSSPPPPPPPPSPPPPPPSXPPAXISGDVDTHXLYSPXPXXXXSRLPXXLPVTTPRSLF

SEQ ID NO: 150161 - protein, 351 aa, Oryza sativa
  Clone ID: PAT_MRT4530_50423C.1.pep
MESRARLLGFCGWLTLIPAIREEEDQVRQRGAPGPPRRCVDWFSWTESTVHGPAATNLPGPRPTTSSAQPKQDATCDLGCLLCLAMPPKGLRVQICRYTIDKLQTTFHRWEKTPSNTGEHVHLTKELHTSCESIEWQEEAAVAFNILELLIGISVFFFLHSCSGITGVFLCWKVDELEKTILVASRDPAYYGLDEVELSRRRNWIGSARNQVAAVRRSVEKGKSNSTFSAHQDMGTSRSNHYTAQDNDDFIASESDRQLLLMRQQDEELDELSESVQRIGGVGLTIHEELSGQERILNDLSLEMETTSNRLDFVQKRVAMVMKKAGIKGQIMLILFLVVLFIILFVLVFLT

SEQ ID NO: 150162 - protein, 138 aa, Oryza sativa
  Clone ID: PAT_MRT4530_50424C.1.pep
MGPASFSPSSLPLIAGGTGEVRHMASLTVADRGRRRQGKEMRRSAMDEREAASIEEGSGCTRERRVGEPGMLVRQHRRHADGSRRSPPSPTRSAEAEGPPSSGVHGKKPAGGTVVGKAVGGEADVDEVRRESAGSKRR

SEQ ID NO: 150163 - protein, 480 aa, Oryza sativa
  Clone ID: PAT_MRT4530_50425C.1.pep
MAAGAIPMAYQTTPSSPDWLNKGDNAWQMTSATLVGLQSMPGLVILYGSIVKKKWAINSAFMALYAFAAVWICWVVWAYNMSFGDRLLPFWGKARPALGQSFLVAQSELTATAIRYHNGSAEAPMLKPLYPVATMVYFQCMFASITIIILAGSLLGRMNIKAWMAFVPLWITFSYTVCAFSLWGGGFLFQWGVIDYSGGYVIHLSSGIAGLTAAYWVGPRSASDRERFPPNNILLVLAGAGLLWLGWTGFNGGDPYSANIDSSMAVLNTHICASTSLLVWTILDVFFFGKPSVIGAVQGMITGLVCITPGAGLVQGWAAIVMGILSGSIPWYTMMVLHKKWSFMQRIDDTLGVFHTHAVAGFLGGATTGLFAEPILCSLFLSIPDSKGAFYGGPGGSQFGKQIAGALFVTAWNIVITSIICVIISLILPLRIADQELLIGDDAVHGEEAYAIWAEGELNDMTHHNESTHSGVSVGVTQNV

SEQ ID NO: 150164 - protein, 114 aa, Oryza sativa
  Clone ID: PAT_MRT4530_50426C.1.pep
ASSATHPPPICSFALAPLLLERGSGYPSVSKCLTPLTFWGVSIVLEKKAFVVELFDKYVKTLGSGIDVLAPLVDHIAYVHSLKEEAIPIPDQSAITKDNVSIQIDGVLCVKVIT

SEQ ID NO: 150165 - protein, 64 aa, Oryza sativa
  Clone ID: PAT_MRT4530_50427C.1.pep
SYSSTVHLKKKVQWQKKTEVYTIGSLIKAIYSFLHVELNHWPVLFSSAIGKSFSLIYPLTVVGK

SEQ ID NO: 150166 - protein, 191 aa, Oryza sativa
  Clone ID: PAT_MRT4530_50428C.1.pep
FTNSYPNEEADDVKFDIFAGMKCCNRPGSSSHCQDQSDGETSWIWSSWWLGWSRSGRAGGEGVRRSSRRRRRKGSRWRPRAKNGARRCGAGFQIRPGAAGSGVAEGDDVMEVGDVAATANKVDCRRRKSSSTPAPAYTAEPILMSEEAARGVGGRRSRPPPPVPSPPLPSVKRERRGGKSKGKLNVSYPNR

SEQ ID NO: 150167 - protein, 425 aa, Oryza sativa
  Clone ID: PAT_MRT4530_50429C.1.pep
RPPRPGRACRRGPAFEEYVKEWKAKKAALGVPAGRCELPFLTGTPKAVECRLCSKIIHPGEEIKCSVSRCGELFHLTCAAEDTTNFIAESFKCPQHGCMVCKQKMFFWRCGRCTVAAHTKCAPWPVIHLKDDQGSAICWRHPSDWLLQNEVYPFTLKIDEVFCRLPVPYVNEDFKIDSTIRDFTAAVCKPPHFTFIRRNVYLIKKKRPDSRAEAGCTNCSADSTCKDDCECRGLYMSCSKNCHCSDMCTNKPFRKDKKIKAVKTKRCGWGAISLEPLEKGDFIIEYVGEVINDATCEQRLWDMKRRGDKNFYMCEISKDFTIDATFKGNTSRFLNHSCDPNCKLEKWQVDGETRVGVFASRSIQVGEHLTYDYRFVHFGEKVKCYCGAQNCQGYLGNQIKNPTQRALAIAALENEWLESLKIQQD

SEQ ID NO: 150168 - protein, 134 aa, Oryza sativa
  unsure (1)..(134): unsure at all Xaa locations
  Clone ID: PAT_MRT4530_5042C.1.pep
FAGPRVGNARFKERFEGELGVKALRVVNVHDGVARMPGILLNEGAPAALRRVAEGILRVPWCYAHVGVELALDHKRSPFLKDTLDPACFHNLEAHXHXLDGYHGRGERFVLASGRDPALVNKACDFLKDHHCVP

SEQ ID NO: 150169 - protein, 174 aa, Oryza sativa
  Clone ID: PAT_MRT4530_50430C.1.pep
HATCHFTKTTIKFSPSALSASPSPSRRASCHSSAPASRHRRGARLVAPPPPTTPLPRDTPGRTSPSPASSPSSVCSLPFSLTSPPRPTSNPWSPARGGAAAPTNPMFQSPPQKSPVFKLSGEMSPSKRAHLSMASSSSPSGGGAAWWTARPRRRRQRIVARNWDGSATAGQRRR

SEQ ID NO: 150170 - protein, 450 aa, Oryza sativa
  Clone ID: PAT_MRT4530_50431C.1.pep
PPLPTCGGDSLLGSPPPLPATTTTATPPPCAGDDDNRDAGSGHVNPLLRLGRRLAATGLLVTFTTVRLAAGGGRLRDVPEDGACADVGLGRLRFEYLRDDDDDGDERCQQLAPNDVLSHVTAVGPSALAEFIDGQADAGRPVTFVVNNIFVPWALDVAAGMGIPCAMLWIQPCSVLSIYYHFYESPEAFPTAADPDVPVELPGLPVMAMVELPFMVRPEYAQCLWGDTLRAQVGAIKRTVSWVLVNSFYELERSAVDALRAHTTVKLAPIGPLLEHGHGAEDNDRCVAWLDAQPPRSVVYVAFGSLVNIGRDETAAVAEGLVATGRPFLWVVRDDSRDLVPEAVLAACRGDKAGKITAWCPQGRVLAHGAVGCFVTHCGWNSIMEALAAGVPVVGYPWWSDQFANAKFLVEDYKVGVRLPVRRPRDERAGGGGDPEEGDALEARSGGGGC

SEQ ID NO: 150171 - protein, 123 aa, Oryza sativa
  unsure (1)..(123): unsure at all Xaa locations
  Clone ID: PAT_MRT4530_50432C.1.pep
PPPPRDHPRVGSPEEFLAQVDFLLGKQAYXSGKTNSKGGFXSDPVATAXILENSAPVVGGKQFFSVTVLTRTADGDKGGKHQLIPAPVNDGKLYIFKGQAGDKRWFKGPRKFFESATSSFRVA

SEQ ID NO: 150172 - protein, 490 aa, Oryza sativa
  Clone ID: PAT_MRT4530_50433C.1.pep
MEPHVLLVSFPMQGHVNPLLRLGRRLAATGLLVTFTTVRLAAGGGRLRDVPEDGACADVGLGRLRFEYLRDDDDDGDERCQQLAPNDVLSHVTAVGPSALAEFIDGQADAGRPVTFVVNNIFVPWALDVAAGMGIPCAMLWIQPCSVLSIYYHFYESPEAFPTAADPDVPVELPGLPVMAMVELPFMVRPEYAQCLWGDTLRAQVGAIKRTVSWVLVNSFYELERSAVDALRAHTTVKLAPIGPLLEHGHDNGGGDDGAPAPALGAEDNDRCVAWLDAQPPRSVVYVAFGSLVNIGRDETAAVAEGLVATGRPFLWVVRDDSRDLVPEAVLAACRGDKAGKITAWCPQGRVLAHGAVGCFVTHCGWNSIMEALAAGVPVVGYPWWSDQFANAKFLVEDYKVGVRLPAPVTGGELRACVDRVMSGPEAAVIRKRAMHWKREAAAAVADGGSSDRSLQDFVDHVRRSKGPEELARLAQDIQIMNGPVNPVLV

SEQ ID NO: 150173 - protein, 244 aa, Oryza sativa
  Clone ID: PAT_MRT4530_50434C.1.pep
MRKLLVIELTSIRRVQSFAYARAAEVARLVDTLAASPAGVPVDLSSALYTFSDGVIGTVAFGKVYGSAAWSSWEWGASFQEAMDETMQVLGSFSFEDFFPSSALARWADALTGAAGRRRRVFHRIDGFFDAVIDKHLEPERLSAGVQEDMVDAMVMVWREQKDEAFGLTRDHIKAILLGLKIDKAVLGQFPFSFYFLPNQVGWVVRERGGRCGGRGGVPAGLHGAVLRVWVGWRGLGRGQCHAW

SEQ ID NO: 150174 - protein, 170 aa, Oryza sativa
  Clone ID: PAT_MRT4530_50435C.1.pep
MAAVRRPSPHRSLAAVLLSLRALTGKPGSSGREEGCREGEGRKAMGGSTVAARRDMRNFGPKLFRHIGIARYKGRKRESEPWLEVGKRVKTEEASKRRKKDDIMVATVWKPTKTKARASSSLNDYNECKKERVVCLAKCIKHFCCILNYNSWNSLAKDFWSLSSKDSTLC

SEQ ID NO: 150175 - protein, 93 aa, Oryza sativa
  Clone ID: PAT_MRT4530_50436C.1.pep
ITYRHDMIIATIDATVAHIIAQLGDIKIKPHEFWNLIRPPATLLTSNGRQICIQPLFSACDYLMERSRSPLSKGSNLILKFHLSHPPKVLCHL

SEQ ID NO: 150176 - protein, 314 aa, Oryza sativa
  unsure (1)..(314): unsure at all Xaa locations
  Clone ID: PAT_MRT4530_50437C.1.pep
PGNGSPTPTPNTHRSTPPLTGDRPTAHAGPSHHRPQSPTGPAPHSPTTSIHAVPPPKHTPARXRPAGPPVRPRTTPHGQTPHANRPPQTHPHAWHCPRPSPRHPTHTLSTAPCNPAGTPPRPPHRPPRSRTTPARHPPQPRTPPSGPLPPAHIPDNLYLTPTASXPRHTQAERAPQALTQNHQKRNRTXKNNIPPPPPPPLPPPPPPSTPSPSRRPCPPAPHPPPPPRRTGEGVGPPRQRRRREEVLEAEAAEHLHRLVHRLLERRAPLPRRPRRRTVHLPEGHRADDPPENVLGRLRRMDHHRADAAELHLHH

SEQ ID NO: 150177 - protein, 64 aa, Oryza sativa
  unsure (1)..(64): unsure at all Xaa locations
  Clone ID: PAT_MRT4530_50438C.1.pep
AHRLPCSLRNSSPAVHDRWHKRLLLALPIGASIXLCRGAARCEGEEREDDKDLHGYVMDARELL

SEQ ID NO: 150178 - protein, 62 aa, Oryza sativa
  Clone ID: PAT_MRT4530_50439C.1.pep
EHVTKVINDCKWDSEDLYFQSGIKMHNVMGSQIGYSLLEEPEGEKRGYDEYIRFVRPPADPR

SEQ ID NO: 150179 - protein, 61 aa, Oryza sativa
  Clone ID: PAT_MRT4530_5043C.1.pep
RASPPAYATTPPRRNGRSRPGRQLNSPPPACYSPAHTSSSTISTNKIGSIAYKLTDVSLSK

SEQ ID NO: 150180 - protein, 82 aa, Oryza sativa
  Clone ID: PAT_MRT4530_50440C.1.pep
RDHVGRGLLHGGQRHEERLAVLLLVSGPQRLDVRSGNVFVWTYRLLPILIISPGVLGNYKRRIRHVNHCKFGDCQKMVSLLP

SEQ ID NO: 150181 - protein, 99 aa, Oryza sativa
  Clone ID: PAT_MRT4530_50441C.1.pep
MVESAMDLQGQSVTWPHRLLPLALLVPTALVLLLRGSPSDHLRTASYDDGGFPSLATGKSATGFAQVKVVPAHFVFSGEPLSRKAVFFLISGETFSRGS

SEQ ID NO: 150182 - protein, 70 aa, Oryza sativa
  Clone ID: PAT_MRT4530_50442C.1.pep
MQMQMQQLQLQPLQGLQLQRSLPRNGRSSEAAARAGEAVMMRAVMVSKAKAGHSGCTYDPNTTIGRRCRP

SEQ ID NO: 150183 - protein, 109 aa, Oryza sativa
  Clone ID: PAT_MRT4530_50443C.1.pep
VVVRAALAFLPHDLLERQRRPDGALRGRGKEHPPPPRQGARQPPTATPRQRRRHRNAPLWTQIALEPPPPPLPSGGSPAWRSGPGRLQHQPCGRAARDETHGLVGEAPH

SEQ ID NO: 150184 - protein, 128 aa, Oryza sativa
  Clone ID: PAT_MRT4530_50444C.1.pep
MALTSTMTSSPAATRHLVLAGERRRGGANEGTSGFEVVLLVLITAQPAIIPISDTEKKNILLWVHERLAEGDIEGVTDPRIRADYDLNSVWKLETSWRSMRGSSTGTLGDAESVGVPESEHIGETSAR

SEQ ID NO: 150185 - protein, 749 aa, Oryza sativa
  Clone ID: PAT_MRT4530_50445C.1.pep
MATPPPAAAVALADLLESGTFAPPSPPRPPAPTTILSAWSHLRNPTSPAAADALAALETLHLHRRSLRLSSAHVALLLPLLPLHPRLVSPLLATSPHLLPPSLPASLPVSPRLLLLGALASSRSAKSLSSHANSGSTAAENLGGGGGESGDGHDSDPVVAVARILDDMEKGSESCHDLDHLALAGIGCVLASADELQFRRIIGSLLTICGRIGSLSVGVRMLKLVEWLLLGFIESRKMRKVQVLFEMISPESCQSQGYVMSPVVMVACGALRALRVASARYRLDFDPRLKEAPERTIRFAAEKAVLEGKHVDDRRLLLQCVALGLTQCGQVTPHESVLRCVCMALLEELLPLPDLLKMSVQCPDGNSPEIVKNRVKQHLDSVLFKEAGPVAGILCNQYSFASDKAKTSVETCVWEYAQVLYCHLRAAVILHQGKQDDLITDIEKIAEAAFLMVVVFSAEVTKHRLNAKSSEGFQPDVAVKILVSFSCLEHLRRLRLPEYTEAVRRAVLVNQENAAVAALFIESIPSYAELTNLLTLDGTRYIWHGDVVQTSRILFYLRIFDIKKKCPYHKIVRYIQHSNEKVTRASHSVVVSFLSSGNDTDPDDRMALKEQLAFYYIKRTLEAYPGVTPFEGLASGVAALARHLPAGSPATLFCIHNLVVKAKDLCHTSMVEDKSLWRSWEGSTEPCKKILDLLLRLIFLVDIQSFPYLLKELAEFVSLLPKEGQDVLLDDMHAHVAESDDVTRKPKSY

SEQ ID NO: 150186 - protein, 416 aa, Oryza sativa
  Clone ID: PAT_MRT4530_50446C.1.pep
MALPPLPFALAAALLLTIISGHLAAPATADGYVGGLAIYWGRHADADEGTLRQACDTGRYTTVIITFYNVFGYHPGNYNLDISGHDVTAVGADIIHCQKSRNVTILLAIGGYGGGYSLPTSQSAADVADNLWNAFLAGRRAGVSRPFGHEAAVDGVDFFIDQGGADHYDELARRLHGYGAGVIWTATTRCSYPDHRLEKALATKVFDRIHVRMYGAGEIERRCVISSRYSWEKWAAAYPGSKVYIGLVASPEQDEAWVFQKDLYYEYLQFVTKLPNYGGLAVYDRYYDKKANYTDSGTPTDSASPSVPVELPLIERHEVSSCKLSLIPSATSVIFGRSRPARLVQSEIGHLPYRVEIIICSYPRVSDALDVSFCEPLMHPQQDVLFFRVADGDDCWLSCDEHQENDFKAVYIALFA

SEQ ID NO: 150187 - protein, 1525 aa, Oryza sativa
  Clone ID: PAT_MRT4530_50447C.1.pep
MSAPTPRVLRSPRRQSRSPPLRRGRRRPGDAWDMVLLRRVVKEVGGSANYPIITKTNYSDWSLLMRVMLQARGLWEAVETGDVDFQEDRMALEAVLKAVPANLLPVLAVKETAKDAWDAIKTMRVGVDRVRKSKEHELRKQFNAIEFKEGESMEEFSVRLSGLINNLAVLGIQLEESKVCEKFLHVVPEHLEQIALSIETLLDLDTLSLEELTGHLRNAKEHRPKKKSGDEGGKLYLTEEQWIARAKERQSSEGSSSKKAGNNRRRRGGRKKSEAAADGERGVHDTRDQGHDKCKNCGHLEEDDEPALLMAHAIELAPPPSPSPPSTEPLDLLEPKVFAHLHREEHVDAGVWHLDTGATNHMTGVRDVFAEPDTAVCGKVRFGDGSVVAIEGQGKIIFECRNGEHRALTGVYYIPKVNANLISLGQLDENGCDVCIFHGVCTIRDAVRQLLAHVRRTRNRLYLIKITVARSVCLSARTQEAAWLWHAHFGHLHFDALRQLARQDMVRGLPPIDQVEQLCDCCVVSKQRRSLFPGRSLFRVEDRLELVHGDLCGPISPATPGGKKHFLLLVDDASRNMWLTLLQNKGEAAAAIKRFQACSEAESRCRLKLLRTDNGGEFTSAEFAAHCAKSGIKRQLTAPYSPQQNGVVERRNQMILVMVQSLLKAKSVPACYWGEAVTTAVFLLNRALTKCHDNKIPYEAWFGRKPAVGHLRTFGCLAYVKDVRPHITKLQDRGKPMVFLGYVDGSKAYKVFDPKSGRVHVSRDVVFDEGAGWDWDATAGIMSPPPPSDFTVEYVVTQETAREESPAPTTTAASPGHGAATPSAMPPTPSPTSLLNAGSPGFVSPPQDGDDNLDADANDCSPRYRSIDGILGEAYTPGLAARDLADGELYLLAAEEPATFGEAEHHQEWRHAMLEEISSIEDNKTWRLVDLPPGHRANGLKWVYKIKKDAHGMITKHKARLVAKGYVQQPGVDFDEVFASVARLESVRMLLTRAAQAGWPVHHMDVKSAFLNGELTEEVYVKQPPRFVVDGREHQVLHLDKALYGLRQAPRAWNAKLDASMLSLGFRRNDCEHAVYGRGSGDSRLLVGVYVDDLIITGNVAMEIDRFKAEMMSLFKMSDLGPLSFYLGIEVEQVADGIHLSQKSYAQHILERARMQECNSCSTPMEPRLKLTKTSTAALVDATQYRSIVGCLRYLVHTRPDLAFSVGYVSRFMEAPTTEHDTAVKRILRYVAGTVDYGCYYKRMETPPEPVGYCDADMAGDVDTRKSTSRVVFFLGANPVSWQSIKQKVVVLSSCEAEYIAATTAACQGIWLAQLLAEIEQEEPQSFKLLVDNKSAIALSKNPVFHNRSKHIATRYHFIHECVEDGRAQVEFIGTDGEVADILTKALGRVRFQELRARIGVVELRAWSGIPGGGCGRCWSSAVANGVLGLVFGVVTTLVVDMAFLIQANTYEELSEQLEQIAITSAWPESSESEAPAIRHLDYLVQLVGCLPASHRLQTCSRSIVGEANGRPAGAGDKEKARPEK

SEQ ID NO: 150188 - protein, 414 aa, Oryza sativa
  Clone ID: PAT_MRT4530_50448C.1.pep
MPVTEHQGSSSSPSTLSFGRSLLSLRRDHVAMPTGEEAVLEAIQRHFAASLGELLPGEVEGGGGGGGGGGGGGGEEILSVAWIRRLLEAFILCQEEFRVFVAQARRRGALPAAGEKLVVEFHERAVKALDVCNAARDGVDQVRRWERLADIAASVLLAPGEIHEGQLRRARKALSDLSVLLVDDTAASGSGGVASFLASHRNRSFGRARASPSRASFAGATSSSHFRSLSWSVSRAWSASRQLQAIGAGLAAPRAHEAGLAAPVYAMGCVLHLVAWALVAAVPCPDRSTALQAHHLPAAPARAAFPWAPPLLTLQERLAEEGKRKDRRNSCGLLKEIHVLEKSTQKLTDAIDAAPIPLFGDREADVREAAAELAAVCAAMRDGLEPLERQVREVFHRIVRSRVEGLDSSMRNAD

SEQ ID NO: 150189 - protein, 92 aa, Oryza sativa
  Clone ID: PAT_MRT4530_50449C.1.pep
MVAASIAARGCARTGSSTSYHWPLCGTIGLVLIARFGTGPPLVYQVKSGLELYDVPNIEGYMGRIRLSPRTAYLTFRGVHNNKDNFKPKHHA

SEQ ID NO: 150190 - protein, 209 aa, Oryza sativa
  Clone ID: PAT_MRT4530_5044C.1.pep
FRFRRSPMALAVGIVLAPCSSLSAVAAKISSAAAAAQDLLPTRRHLRPLRRVAADPVRRSASSADCRSTVALVIPTRAAAFLRSGRRSRRRRCPGVSRVPPFAFPLPSSLSGAAPPRRWSPAVTIGARARHSRRPRRRGRPRARPRGRGTHGADRRQPRAPGPPWTVGLTRGPHFPWTRSARPLRCSFGRSALRGSRSRRLGKRARQDT

SEQ ID NO: 150191 - protein, 78 aa, Oryza sativa
  Clone ID: PAT_MRT4530_50450C.1.pep
PGGLPRGFTLVGNSPPFQKLFPRVKNQFRPLFRRRGFFPWSPGKGMAKMGFPQGGGTMSALVSGSPRFRGPPPPKAGS

SEQ ID NO: 150192 - protein, 194 aa, Oryza sativa
  Clone ID: PAT_MRT4530_50451C.1.pep
MQSEGKLLSHPATWLYSLALTPCLVSHRSSRGASGCHVTPLGPSRYLASRPSPNCHVAGGASGEETQAEPPLMRTAPQLSLTAFNTTVTALSPVTSDWTDGRAPTFASVSDEVEAGLSPVLGGERRWVPLKDGLLLSFRAKARIMVRSRLNVSGEKTCSLVVTRASVAPEVLGDVPVDSEAPVATYPSTARRLW

SEQ ID NO: 150193 - protein, 254 aa, Oryza sativa
  Clone ID: PAT_MRT4530_50452C.1.pep
MSAPVSTQASMCLGERRVLELKQSVSRMVRSGKRTSRRVTGAVVGGGGGDAVEEEQVGRRGGVEAAGEDLEKGGLWRRRWGRRWRGARWGGRGRRHCGCLNVRCDRVKKFRVGSKHGLRTSTITDYKLAINTSECDKRALEKSKSTRNGKNKRRATRVVRDATRWWWRGGDAPRGETGGRSGGRRDATRVPGRARVPAKPVKKQKAARLQEGASHLGVRLAGFLGMWPMWPLSPSRFQLDKTPEFLAVIPSVSQ

SEQ ID NO: 150194 - protein, 99 aa, Oryza sativa
  unsure (1)..(99): unsure at all Xaa locations
  Clone ID: PAT_MRT4530_50453C.1.pep
LFFEFKREFIPSFKLSLRYMFDLVKWSFMYKHKSSKYVXWRGGYEYVIRFEWVFFLVGDVGGMKKKVCMKIKVQFXCKVSQDNVSEXVIMFNVNKRWDL

SEQ ID NO: 150195 - protein, 224 aa, Oryza sativa
  unsure (1)..(224): unsure at all Xaa locations
  Clone ID: PAT_MRT4530_50454C.1.pep
MKSSSVAPRLKQERQDDCKFQEGDVNSLELRLGISSDNDQISGGGAASPWLGVLVHPWSLAARQGKAALEQAHQRPNECAVQRENRAASSAQLVGWPPVRAFRKNLSTPKPADADDLMNKVKLCSDEGHGSRCAAQERRSSSTMFVKVNLEGYAVGRKIDLKAHRSYDSLSQALQSMFHGFLSDGIATXDNELQQMEEGSKKRYVLVYEDNEGDRMLVGDVPWE

SEQ ID NO: 150196 - protein, 194 aa, Oryza sativa
  Clone ID: PAT_MRT4530_50455C.1.pep
MVQDPDDPSQTLYDTMIRHHPPIDRVAGAGTVRAAFLQYIGVPSLDMSYGTMEDYPVYHSLYDDYVWMERFGDPLFHRHVALASVWGLIALRLADDEILPLNYVSYASELEKCTKLVEGGCTGCPVSFAPLHKSIDQLRKAANKIHKEKMMLQAENWSLKTRAYTVKVRDINDRLMMAERGFINREGLDGRPWY

SEQ ID NO: 150197 - protein, 79 aa, Oryza sativa
  Clone ID: PAT_MRT4530_50456C.1.pep
KKNFLMSQKDKKKGFFNFRRLKKKSAPSPPINLFQKILRSKKNFIIKTGPQTGGFKKRRKFLFPLFGKNKKFFFVPQGY

SEQ ID NO: 150198 - protein, 759 aa, Oryza sativa
  Clone ID: PAT_MRT4530_50457C.1.pep
MSRHGKPQQRQPLILPDAAPMGGGDGGRGDAATRRRRFVAFLAISVALVASYHHLAPAPASRYHALFLSLGNNDTAAAHLRALTLRPHVAGTEANAVAAEYVRAALSSFSFPTRVTPYSVLLSYPIHRSLSLSVPGRAAAFNFALVQETYPGDPYSEAAAEVIPTYFAYSASGSVAAEVVYANYGNTKDYEYLASRGVDVAGKVALVRYGNLHCEDMVRNARAAGAAAAIVYTDAKDFGGAGAKGKRKWFPDARWLPPTGVQVGTLYYGNGDPTTPLWPSCAAGEDCERLSQGELDGSAAMPSIPALPVSARDGETILKAMGGDAAPTEWQGGEGAPMYRLGPGPAVLNLTYIGNDTLATIENVFAVIEGKEEPDRYVIIGNHRDAWTFGAVDPNSGTAAMLEIAERLSKLEKKGWRPRRTIIVCSWDAEEFALIGSTEWVEDNMDMLASRAIAYLNVDITVFGPGGFRPRATPQLDQLIKEASKMVQDPDDPSQTLYDTMIRHHPPIDRVAGAGTDFAAFLQYIGVPSLDMSYGTISAAVTPLASTNIIALAVEDYPVYHSLYDDYVWMERFGDPLFHRHVALASVWGLIALRLADDEILPLNYVSYASELEKCTKLVEGGCTGCPVSFAPLHKSIDQLRKAANKIHKEKMMLQAENWSLKTRAYTVKVRDINDRLMMAERGFINREGLDGRPWYKHMIYASSDQDDWGTKAFPGIVSAIDKANKLNTTESWQLLQHEIYRAARAVSKASAVLDGRLT

SEQ ID NO: 150199 - protein, 298 aa, Oryza sativa
  Clone ID: PAT_MRT4530_50458C.1.pep
MAAETPAAGRSGVLKHIVLARFKEEVTPERLDHLIRGFGGLVNLVPSMKAFNCGCAPSVRWLCGCPVSVASVTRGRTIGFLWIFNMFVTHEIVFALCKRNGKYPMIRGLMFPNGNHILLHKQAWPGVERTQEANMAGDGQGNNNGVARSPEAGETDMADGTTSGKSSVANDMSVGEASGGVGDVQLHRRQTLTAGNGDGRDVEHDVIASQRHPYFLSMELLPAMANPSGHGELCWGTDVSIENMHHGFTHVFECTFESTEGVKEYIEHPAHLEFAKEILLAMEKTLIIDYMPTAVNNS

SEQ ID NO: 150200 - protein, 123 aa, Oryza sativa
  unsure (1)..(123): unsure at all Xaa locations
  Clone ID: PAT_MRT4530_50459C.1.pep
EIEIYYANYMTQRLQKHYPVXIRDSERTYLHRLIIQXGRFKTTAVLEPDDIAYYQTDYGCHAHTMTGPTPDTLNTEPIAHSMXGRLYRVCGALMHVRNSHSMHRMQQSRCETYSHLRVLSHKT

SEQ ID NO: 150201 - protein, 603 aa, Oryza sativa
  Clone ID: PAT_MRT4530_5045C.1.pep
MAPISCRELSPHLSSLPRAAATTTAHTHLSFRRAPPPCRLLTGTASDDGDRLRLLPSAATRDDALASLVGQLEHDVVVRHGQAAEEEEEEEEDEELYHHDSQDLGAARRRHHRQHHQDGHELAARWREIHGRDDWAGLLDPMDPLLRSELIRYGEFAQACYDAFDYDPSSRYCGSCKYPRRAFFDRLGMPAAARGYTVTRYLYATSNFRFPNFFSQSRAGAKIWSQRANWIGYVAVSTDEETARLGRRDIAIAWRGTVTRLEWVSDLMDFLRPVADEGIPCPDREVKVESGFVDLYTDKDPTCRFCKYSAREQVLTEVRRLVTRYAALGEDVSVTVTGHSLGSALAMISAYDIAESGAASAAHGGGKEAAAAVCVYSFAGPRVGNARFKERFEGELGVKALRVVNVHDGVARMPGILLNEGAPAALRRVAEGILRVPWCYAHVGVELALDHKRSPFLKDTLDPACFHNLEAHLHLLDGYLSYEALLYLQKANMNTCVVQRIEDRYHGRGERFVLASGRDPALVNKACDFLKDHHCVPPCWRQDENKGMVRAPDGRWVQPDRHSWHLDDHDDHHGEGQHGHDGAVDGAHHRHSSHIRLVRRQPN

SEQ ID NO: 150202 - protein, 200 aa, Oryza sativa
  Clone ID: PAT_MRT4530_50460C.1.pep
HEGKTGGLEEIAVEKNGEPVAAAAATVASTSVFDNESHTRTPDLGVGLSLVFLLAKTSDEFNKMAKVRAEIETLLREIKEQVRQSSSGGVGDDDASKPRCNLESAASSCLTDTNENERASARMMEDQATSSSNHMEEEEVSCEKSAEEYECCFPRMDVLEEEFHAELDLLQVNYRSDVQLFLPEEHDAEQPDEITECREE

SEQ ID NO: 150203 - protein, 138 aa, Oryza sativa
  Clone ID: PAT_MRT4530_50461C.1.pep
MADQAIVAPAVADPAIATGRLFLIGDDSDVRQGSGFSRLLLVASLSSAAVPLLAASSSSSAVAAPGGDENDTTPSRLLVVGGGATLSRLPPCRAAAQPPTATSSRSYERRGEEEREERKNNTRREKGRERIGGENFLK

SEQ ID NO: 150204 - protein, 1430 aa, Oryza sativa
  unsure (1)..(1430): unsure at all Xaa locations
  Clone ID: PAT_MRT4530_50462C.1.pep
MELKLVFFLVFLFCISGASSISHYFTSIFSLGDSYIDTGNFVIMAPSGLPLRYDKLPYGMTFFGHPTGRMSDGRVIVDFIAEEFELPLLPASMANSSSVSNGVNFAVGGALATGIDYFERNNIVSFKLLNTSLDVQLGWFEQLKPSICNTTTEQANDCFGKSLFFVGEFGVNDYDFLWMAGKSKQEVESYVPQVVRKITMGVEMLINQGAIYVVVAGNPPNGCAPALLTVLMSPNRTDYDGLGCLGALNGVAKRHNMMLRVALGRLRGKYPHAKIIFADFYQPIIQVMRNPSHFGMLHSKLSACCGTGGTYNFNVSSACALPGVVACKDPSASISWDGIHYTEAINRFVAKGWLYGPYADPVFSWRLXIDTGNFVIMATPVAPVWNDKPPYGMSFFGHPTGRVSDGRVIIDFIAEEFGLPFLPASLANSSSVSHGVNFAVGGAPATGIDYFQRNNIVAFKLLNSSLDVQLGWFEELKPSICNTTKEDANNCFSKSLFIVGEFGGAVYVVVPGNPPTGCAPAXTQRVSPNRTDYDGLGCLRAINSVAKRHNTLLRAALVRLRRKYPHAKIIFADFYQPIIRVTQEPRRFGTYYGVLKACCGTGGVYNWNASATCAMPGVVACKNPTASVSWDGIHYTEAVYRYVAKGWLYGPYADPAFLFCLSRVSSTSQFFTSMFSLGDSYIDTGNFVIMASPVVPVWNDKLPYGMTFFDHPTGRMSDGRVIIDFIAEEFGLPFLPASLANSSSVSHGVNFAVGGAPATGVEYFENNNIVPFKLLNNSLDVQLGWFEELKPSICNSTDETNGNCFGKTLFIVGEFGVNDYNFMWMAGKPKQEVDSYVPQVVKKITTAVERLITQGAAYVVVPGNPPTGCAPALLTSRMSPNKTDYDGLGCLRFINDVVERHNTMLRAALGVLRGKYPHAKIILADFYNPIIRVLQNPSHFGIADGVLKACCGTGGAYNWNASAICAMPGVVACQDPSAAVSWDGVHYTEAINSYIAQGWLHGPLSSALHISSRLGSIMELKLVFSITFLYCLSGVSSTSHYFTSMFSFGNSYIDTGNFVIMATPVMPVWIDKPPYGMTFFGHPTGRVCNGRVIVDFIAEEFGLPFLPAFMANSSSISHGVNFAVGTAPAIDSAFFKRNNIADKLLNNSLDVQLGWLEHLKPSICNSTDEGFKNYFSKSLFIVGEFGVNDYNFMWTAKKTEKEVKSLVPQVVEKITTAVERLINQGAVYXVVPGNPPXGCSPIVLTLFMSPNTTDYDGLGCLRAVNRMSKRHNAMLRAALDGLRGKYPHAKIIFADFYRPIIQVLXDPVRFGIAGGILKACCGGGGPYNWNGNAICGMAGAVACEDPSASVHWDGGHYTEAIYRYIAKGWLSTALTLIRQFWLLSPTDLLKGLIKTYGRIIIQADCVASLYTVCNRSICGLTIDIQIMLKK

SEQ ID NO: 150205 - protein, 36 aa, Oryza sativa
  unsure (1)..(36): unsure at all Xaa locations
  Clone ID: PAT_MRT4530_50463C.1.pep
GGRRHRADRGVHVGGXVGGXGSEXRSGEVSLGEKLV

SEQ ID NO: 150206 - protein, 474 aa, Oryza sativa
  Clone ID: PAT_MRT4530_50464C.1.pep
MMMRRRGRRPAPRMPSRWTARGRRRRPPRVRRTAVSGNKRLPDLDGGVEQERPGEPDERRDAQHGGDHQHVRERRAGRGAEPAPERLEARRELVGGAGERGEEAGVEALDEGPQAVEPEADVGGGVGGRGLEPLPERLEWLDELMSCASERGEDAGEEGPGVLPKAVEAEADASGGVGGRGLEPLPERLEWLDELVSCAGEHGHDAGEEGPDVLPKAVETEADAGACVGDGCLDPLPKRLKRVDEVDEPVGHADERRDGVGEEALYAMPHAVEAMADAGGGRLDPPPERLERQHKQVRGAPEPSHDAGEEPLYSLPHALESMADAGDGRLEPAPQHLERQDEQVRQAPEPSHDAGEEHLDGVPQGLESMADAGDGRLDPAPQHLERHHKQVHQAPEPRDDAGEEPLDGMPQGLEDVGDGPGERLEREEKQVDEAAEEASDELPQAVEAEAHADGGVAGEGAGSADGAMKELPCC

SEQ ID NO: 150207 - protein, 474 aa, Oryza sativa; identical to SEQ ID NO: 150206
  Clone ID: PAT_MRT4530_50465C.1.pep

SEQ ID NO: 150208 - protein, 408 aa, Oryza sativa
  Clone ID: PAT_MRT4530_50466C.1.pep
MAVQVQRTPLPRSTYTGHRVYLLRAPPAVTRCTVDRAFPRSHGPPLPPLLYKTSRPDASSSNSTSRHFPRRSKDCCCFAVRSIPDGIMGETIAKDVTELIGNTPLVYLNRVTDGCVGRVAAKLESMEPCSSVKDRIGYSMITDAEEKGLITPGKSVLIEPTSGNTGIGLAFMAAAKGYRLVLTMPASMSMERRIILKAFGAELILTDPLLGMKGAVQKAEELAAKTNNSFILQQFENPANPKIHYETTGPEIWKGTGGKVDGLVSGIGTGGTITGAGRYLREQNPDIKIYGVEPVESAVLSGGKPGPHKIQGIGAGFVPGVLDVDLINETVQVSSDEAIEMAKALALKEGLLVGISSGAAAAAAVRLAQRPENEGKLFVVVFPSFGERYLSSVLFQSIKKEAENMVVE

SEQ ID NO: 150209 - protein, 69 aa, Oryza sativa
  unsure (1)..(69): unsure at all Xaa locations
  Clone ID: PAT_MRT4530_50467C.1.pep
MGKDEVMESGGPRLALAAMDYTDAEPVPVEEAPAVDRSYEVVAVEDELSGPALXKNLPQPLPGGSATKR

SEQ ID NO: 150210 - protein, 72 aa, Oryza sativa
  Clone ID: PAT_MRT4530_50468C.1.pep
GEEGEEQPWRRRWQRRRARSWGRGWRTRRRRAGGSWRGSGSAATGKGPLNNWATHLSDPLHTTIFDTFSSSS

SEQ ID NO: 150211 - protein, 74 aa, Oryza sativa
  Clone ID: PAT_MRT4530_50469C.1.pep
PGGPYFDPLGLASDPEKKERLQLAEIKHARLAMVAFLGFAVQAAATGKGPLNNWATHLSDPLHTTIFDTFSSSS

SEQ ID NO: 150212 - protein, 95 aa, Oryza sativa
  Clone ID: PAT_MRT4530_5046C.1.pep
RRPPPFWAPTLFLKFFFQRGENPPPFGDRGTDLTHMQAGDPPKRGAPGMGWGKFKGGPTIQMEGGPGGKLKLGLGGNGRGPGTHPVAVVLGGLDP

SEQ ID NO: 150213 - protein, 290 aa, Oryza sativa
  Clone ID: PAT_MRT4530_50470C.1.pep
MASSVAAAASTFLGTRLADPAPQSGRIVARFGFGGGKKAAAKKAARPSAPTTDRPLWFPGAVAPDYLDGSLVGDYGFDPFGLGKPAEYLQFELDSLDQNLAKNNAGEIIGTRFETGEVKSTPFQPYTEVFGLQRFRECELIHGRWAMLATLGALSVEWLTGVTWQDAGKVELVDGSSYLGQPLPFSISTLIWIEVLVIGYIEFQRNAELDPEKRLYPGGSYFDPLGLASDPEKKERLQLAEIKHARLAMVAFLGFAVQAAATGKGPLNNWATHLSDPLHTTIFDTFSSSS

SEQ ID NO: 150214 - protein, 169 aa, Oryza sativa
  Clone ID: PAT_MRT4530_50471C.1.pep
HASVLAEVESLNADGQTHKLRDAQLQKLKTLEAQILDLKKKQENQVQLLKEKQKSDEAAKKLQEEIHSIKAQKVQLQHKIKQEAEQFRQWKATREKELLQLRKEGRRNEYERHKLQALNQRQKLVLQRKTEEAAMATKRLKELLEARKSSGRDNSGMNGTSPGSHMTEK

SEQ ID NO: 150215 - protein, 760 aa, Oryza sativa
  Clone ID: PAT_MRT4530_50472C.1.pep
MPWVTPDNRGGREKKKKKKKKKLGGGEEWGKMFGSLLNSKFYNKCKHAFKCIRTRLALIRRKKQAMIRFMKKDIADLLTNGLDTHAFGRMDGLIIEMNHASCYDMIEQFCEYIGKQLNSLQKQGDCPQETREAVSTLIFAAARFPDLPELCDLRHIFTERYGHFLEPFVSLEFVQKLDNKVFTNEEKIQAMQSVSEELLVDFDIKAFKIKLWATPETKHDLPAKDSKKQVELAVPLSSKKGDDAAPSGRKSEAATLGHKNKLEASLKQQKDVHPVADGIDRLRENTRRQHADKSDGKGHVEKPVSDSEMKRRNIQKEVQKANKKDVRPCEKELMEAVELDLNGLPKKEFGSLKVPEAESKKTFALNVKPKKDNDLEKENESNLGHHHRSHIPCAADHADSGLRTLGLDKQGLQSVNPLNGNTKNRMPPYSKLDGSTGKKCSEKEENTGCLNARPHHLADKGNPVQDRQPVPERAAYVRPPYIKPKLNMETVNDDPAERAASDYSKRAIPEQTDHLSDKDPLRPVSVRSKYAKPPAPAAVYDEAPANEKVSSRTPSSHRRHTSRQNAVNDGSARRDGSRQPHGGKGMDDVNGENVQRTPSSRPRHSGRRNGALYTEDYDGFMQRHKSEEDEAAIDFGNLLPRTGNGHRRHKSRNTDARSGVDEEERMMDKLLRHYSKKGLDAEINPAPTNKAEEQSEQKGSMHPPGRAISLPGESVCRDEDVKFPARSTSLQPDCPKTVHVHPKMPDFDELAARVRALRKA

SEQ ID NO: 150216 - protein, 77 aa, Oryza sativa
  Clone ID: PAT_MRT4530_50473C.1.pep
AVRLLPLRQQPLRQLVRPQELVYSVVIRRATSATLGRSWRRLGSSERQRADGEEEEEEDAERPLNGPGSGAAAAGMG

SEQ ID NO: 150217 - protein, 1045 aa, Oryza sativa
  Clone ID: PAT_MRT4530_50474C.1.pep
MTMEHGEDCCVKVAVHVRPLIGDEKLQGCKDCVSVVSGKPQVQIGSHSFTFDHVYGSSGTPSAAMFEECVAPLVDGLFQGYNATVLAYGQTGSGKTYTMGTACKEGSHIGIIPRAMATLFDKIDKLKNQVEFQLRVSFIEILKEEVRDLLDPATAAVGKLENGNGHATKLSVPGKPPVQIREASNGVITLAGSTEVHVTTQKEMTACLEQGSLSRATGSTNMNNQSSRSHAIFTITLEQMRKADPIMTLDGMPIEEMNEDYLCAKLHLVDLAGSERAKRTGSDGLRFKEGVHINRGLLALGNVISALGDEKKRKEGAHVPYRDSKLTRLLQDSLGGNSKTVMIACISPADINAEETLNTLKYANRARNIQNKPIVNRNPVADEMKRMRQQIEYLQAELVSARGGVVLDDVQGLRERISMLEQKNEDLCRELYDLRNHGYTDPCEPELQKIGTGYTKGEGLKRSLQSTEPFDVPMTDSVRGSPKDIDDEVAKEWEHTMLQDSMGKELNELNRQLEQKESEMKMYGSDTVALKQHFGKKLLELEEEKRAVQQERDRLLAEVESLNADGQTHKLRDAQLQKLKTLEAQYMLVIQDLDLQILDLKKKQENQVQLLKEKQKSDEAAKKLQEEIHSIKAQKVQLQHKIKQEAEQFRQWKATREKELLQLRKEGRRNEYERHKLQALNQRQKLVLQRKTEEAAMATKRLKELLEARKSSGRDNSGMNGTSPGSHMTEKSLQKWLEQDLEVMVHVHEVRNEYEKQSQLRAALGEELAILKQEDVMSGAASPPRGKNGNSRANTLSPNARQARIASLESMVTISSNTLVAMASQLSEAEERERAFSGRGRWNQLRSMAEAKSLLQYIFNVAADARCQVREKEMEIKEMKEQMTELVTILRHSESRRRETEKQLKQREQAAVTATTSPGNGNGSVKHSADDSNTPLSPVAVPAQKQLKYSAGIVNSPSKGVPAFNKQHLKMVPMAQLPVGKKVSIAGQSGKLWRWKRSHHQWLLQFKWKWQKPWKLSEMIRHSDETMTRTRPRPQLLPHRPQRVM

SEQ ID NO: 150218 - protein, 139 aa, Oryza sativa
  Clone ID: PAT_MRT4530_50475C.1.pep
MATTVDGDGGDGEWQGGDGKAAEAARIHAAPPESMSPLVGTEATEVGRRWIQMTATATSGTTGDGAHDDDSGWRPRQRWWRSGVGSRCSSSCSPPPAPQQPRHGPLLAGGSGPVPAVEELRRTILEMQAAHRSCGLPFL

SEQ ID NO: 150219 - protein, 347 aa, Oryza sativa
  Clone ID: PAT_MRT4530_50476C.1.pep
MAAPRWIGPLLLLLLHFVAAVAGKSYYDVLQVPKGASEDQIKRSYRKLALKYHPDKNPNNEEANKRFAEINNAYEILTDQEKRKIYDRYGEEGLKQFQAQGGRGGGGGMNIQDIFSSFFGGGGGGMEEEEEQIIKGDDVIVELDASLEDLYMGGSLKVWREKNVIKPAPGKRRCNCRNEVYHRQIGPGMYQQMTEQVCDQCANVKYVREGDFLTVDIEKGMQDGQEVSFFEEGEPKIDGEPGDLKFRIRTAPHERFRREGNDLHTTVTISLLQALVGFEKTIKHLDNHMVEIGTKGITKPKEVRKFKGEGMPLYQSNKKGDLYVTFEVLFPKTLTDDQKSKLKSILT

SEQ ID NO: 150220 - protein, 60 aa, Oryza sativa
  unsure (1)..(60): unsure at all Xaa locations
  Clone ID: PAT_MRT4530_50477C.1.pep
MNSASLVTLTLXALVLDGIHIALDDDTRNRNIRVLTDGGDEWTSPAWDCCDKLKQSPLRI

SEQ ID NO: 150221 - protein, 49 aa, Oryza sativa
  Clone ID: PAT_MRT4530_50478C.1.pep
MPFSMLFLCFLFQYNGAGSHSNHHYRGRGRGRSSAFSQSVTNFTEEIDF

SEQ ID NO: 150222 - protein, 154 aa, Oryza sativa
  unsure (1)..(154): unsure at all Xaa locations
  Clone ID: PAT_MRT4530_50479C.1.pep
MSSRSSLHGGAAVLTTKFGNLSIGDEDRSGXDARWKSFRKQSKDRLKXNRLRPGLAESELDKVSRLSQIQQYDMFRQKSAARTYGILEFVRDKSRVQHGHILIKSTGTLTNLKASFWTCTEVKQISHASCFYINRQPPSNSFSLCYIRLHYICL

SEQ ID NO: 150223 - protein, 498 aa, Oryza sativa
  unsure (1)..(498): unsure at all Xaa locations
  Clone ID: PAT_MRT4530_5047C.1.pep
MEMDEVGGRWTFSRTNEGYTSCGPVVEMSWHRVGALLLGXSVLPACPGGSGRRXGIGSVLLSMARMGWKLCHSFRLYTVVMFNREKGKNVSGYDSSNSSFQLNLPLASRELTRAHPWSIPSMLLSSQLPLVGSQDQNQYVFDRAFATQVNELPMPEEQVPFCHDCREQGHYALNCPWVYVKEAPSLGLAGRTSLNQPPHTKSSLQPSVQSRELNGENPLNPGKCFPPSLSYHVGSHTKQAKGKKSKNQKRKAPMRTEEEVRKMTITSTEWPPAGITIPRRQRGNTFRGARQLTQHLLSRGGRVSDSEGSDQVSSDEEDESPRHLGEEEMESKACPRCGEIGHVASMCLTLCPHCEEDHPPGECPTRKVTCFLCEGTNHVPKDCQLSVLLTKTAEIQRTTLRLSHQLVSSNSNIDDIIHSTNAPPAAPDSAINHSDNTFSTNHSLHRQPQQRIVIDGRSCVSPRPTPGRAKGNQPPEGDTKQKTVIRLNQQPEGNFSCE

SEQ ID NO: 150224 - protein, 72 aa, Oryza sativa
  Clone ID: PAT_MRT4530_50480C.1.pep
NETDLLKIKSCTSDTLIHLAAKPALGCEADKFSSLQITKLRVTNKPYVISQSPDCMQTPVIIQKKIQLLHCL

SEQ ID NO: 150225 - protein, 259 aa, Oryza sativa
  Clone ID: PAT_MRT4530_50481C.1.pep
MQEAKKDSIFGGLASGAPVGADRFPFDPREYSPAMSSDSRELLGIDPPELIFPFELKKQISCSLHLTNKTDEYVTFKVKTTSPKKYCVRPNNGIVAPQSTSNVLVTMQAQREAPPDMQCKDKFLVQSAIVTQELTPKDITGDMFTKESGNVVDEVKLKVVYTQPHPTSLNGGSEEGLGSLSYQEATKGSRESETVTSEPLALISKLKEEKSSAIQQNMKLREELDLLRRQMGSQHGGFSLVFVLVIAILGILLGFLIKR

SEQ ID NO: 150226 - protein, 116 aa, Oryza sativa
  Clone ID: PAT_MRT4530_50482C.1.pep
MAAFNKEMTRRGARVDGGRSDWRSNRWVGHFGRVARTFRLMAFNRMSERVDPIGCFGGVDSGARFRWRYEEAQEVRVAAVCAFCVEAELAAEIRVMPRRSGLSQDVQGSVVVGFVM

SEQ ID NO: 150227 - protein, 130 aa, Oryza sativa
  Clone ID: PAT_MRT4530_50483C.1.pep
MALALEAAARRTGGGRFALSYIFVTEFRPKFLFVYKFGPSMAMACLVACTSVRARLNSCKSHPGARLGGNADIDLRYSARLRSCRRGCGDACADASAGQGAAYAIWFLVIYLVKVTSPCKIEETIGWEPQ

SEQ ID NO: 150228 - protein, 582 aa, Oryza sativa
  Clone ID: PAT_MRT4530_50484C.1.pep
MVLFSVTKKATTPFDGQKPGTSGLRKKVTVFQQPHYLQNFVQSTFNALPADKVKGATIVVSGDGRYFSKDAVQIITKMAAANGVRRVWVGQNSLMSTPAVSAVIRERVGADGSKATGAFILTASHNPGGPTEDFGIKYNMENGGPAPESVTDKIFSNTTTITEYLIAEDLPDVDISVVGVTTFSGPEGPFDVDVFDSTIDYIKLMKTIFDFESIKKLLASPKFTFCYDALHGVAGTYATRIFVEELGAAESSLLNCVPKEDFGGGHPDPNLTYAKELVDRMGLGKSSNAEPPEFGAAADGDADRNMILGKRFFVTPSDSVAIIAANAVQSIPYFSSGLKGVARSMPTSAALDVVAKNLNLKFFEVPTGWKFFGNLMDAGMCSICGEESFGTGSDHIREKDGIWAVLAWLSILAFKNKDNLGGDKLVTVEDIVRQHWGTYGRHYYTRYDYENVDAGAAKELMANLVSMQSSLSDVNKLIKEIRSDVSDVVAADEFEYKDPVDGSVSKHQGVRYLFGDGSRLVFRLSGTGSVGATIRVYIEQYEKDSSKTGRDSQDALAPLVDVALKLSKMQEYTGRSAPTVIT

SEQ ID NO: 150229 - protein, 951 aa, Oryza sativa
  Clone ID: PAT_MRT4530_50485C.1.pep
MVLFSVTKKATTPFDGQKPGTSGLRKKVTVFQQPHYLQNFVQSTFNALPADKVKGATIVVSGDGRYFSKDAVQIITKMAAANGVRRVWVGQNSLMSTPAVSAVIRERVGADGSKATGAFILTASHNPGGPTEDFGIKYNMENGGPAPESVTDKIFSNTTTITEYLIAEDLPDVDISVVGVTTFSGPEGPFDVDVFDSTIDYIKLMKTIFDFESIKKLLASPKFTFCYDALHGVAGTYATRIFVEELGAAESSLLNCVPKEDFGGGHPDPNLTYAKELVDRMGLGKSSNAEPPEFGAAADGDADRNMILGKRFFVTPSDSVAIIAANAVQSIPYFSSGLKGVASCHWSRIQESEQKLDVSFDRGIDVSIHLLSDIMSICKNNVILIHQRSMPTSAALDVVAKNLNLKFFEVPTGWKFFGNLMDAGMCSICGEESFGTGSDHIREKDGIWAVLAWLSILAFKNKDNLGGDKLVTVEDIVRQHWGTYGRHYYTRYDYENVDAGAAKELMANLVSMQSSLSDVNKLIKEIRSDVSDVVAADEFEYKDPVDGSVSKHQGVRYLFGDGSRLVFRLSGTGSVGATIRVYIEQYEKDSSKTGRDSQDALAPLVRTGGVTLEIGRSDRMDEPRVAPVPCLALKHGADSDKPVLFSISDATAIDNNGGVDIPGLTNGNAWVTPQGWILVRSASDASTFLQNPQDPDGKISLPHLPRELPSTCSCRLSGKPNGSESCIVLLVETEEDVTVLWYCRFGGGGGGGEGEGWVRHEYDVGTQWDIRPGKEGQREKVPIRSIAACRGKFYFNATPESVGVLEFTPTPTTPVFGSIAIADPLPGGYGVLGAALGFLVEAEDDLYMVRLLLDRDFETVYDLIVYKMDFSEQQWHEVDDIGGRAFLLAPAYFGASRAADECGLEKDSVYVPYAHKKCFEVCKVEEKGDIDVVNLIEAPDAKIGMWIMPTD

SEQ ID NO: 150230 - protein, 75 aa, Oryza sativa
  Clone ID: PAT_MRT4530_50486C.1.pep
PTRPEKRSSLLRNYMPFGGGIRLCLGADFSKLFIALFLHILVTEYRWKEIEGGEVLRISEIMFPQGYHIQLIPRT

SEQ ID NO: 150231 - protein, 277 aa, Oryza sativa
  Clone ID: PAT_MRT4530_50487C.1.pep
MASITTTAAAAAASSFLHRRRVAASASPPPRATATATLRHHQRVVGCRAAEVSGAEPSAAAGEASGDGNWVPVVPLAALPRGERRVIVQDGEEILLLWYKEQVYAVENRSPAEGAYTEGLLNAKLTQDGCIVCPTTDSTFDLRTGEIKEWYPNNPVLRALTPALRKLFVYPVKIDGENIYISIKGAVTSGGSAEIIFSGKAQPGFTASDVNIEEVRMVIDEDVGGFGFTNKNELINGKAAIIGFLLLIDFELLTGKGLLKGTGLLDFIYAISRAFSS

SEQ ID NO: 150232 - protein, 1059 aa, Oryza sativa
  Clone ID: PAT_MRT4530_50488C.1.pep
MAMPVGVAPVLLLLLLPLAAATAAAESDDRDALMAFKAGVTSDPTGVLRSWNETVHFCRWPGVNCTAGRVTSLDVSMGRLAGELSPAVANLTRLVVLNLTSNAFSGSIPGGLGRLRRMRYLSLCDNAFAGEIPDALRNCTALAVAYLNNNNLVGGVPRWLGALPNLAVLRLSHNSLSGRIPPSLANLTKIFRLELDQNLLEGSIPDGLSRLPALGMLALSQNSLAGEIPVGFFNMTSLRGLALADNAFRGELPGDAGARTPNLQYLFLGGNLLAGPISASLSNATALVALSLANNSFAGQVPGEIGTLCPLSLELSNNQLTATDDAGGGWEFMDNLTNCSALAEILLDGNKFAGVMPPSVVRLSPQLEALNLAGNRISGVIPPEIESLVGLQTLCLQSNLFSGEIPEAIGKLKNLRELLLEQNELAGPVPSAIGDLTQLLKLDLSGNSLNGSIPPSLGNLHQLTLLNLSGNELTGHVPSELFTLSSLSLLMDLSDNQLDGPIPPDVGQLTKLAFMALSGNRFSGEVPTELESCQSLEFLDLARNVFVGSIPPSLSGLKGLRRLNLTGNRLSGSIPPELGGMPGLQELYLSRNDLSGGIPASLETMSSLMELDVSYNRLAGQVPVHGVFANTTGLRIAGNTALCGGAARLRLPPCPAPGNSTRRAHLFLKIALPVVAAALCFAVMFALLRWRRKIRSSRTGNAAARSVLNGNYYPRVTYAELAKATDDFADANLVGAGKYGSVYRGTLSLKTKGEFAREDAVVAVKVLDLRQVGASKTFMAECEALRSVKHRNLINIVTCCSSIDMEGNEFRALVFDFMPNYSLDRWLHRAKHTETGKWCGGAGGLGVIQRLDVAVDIADALNYLHNSCNPPIIHCDLKPSNVLLGEDMTACIGDFGLAKLLLDPASHGAAAANTESTIGIRGTIGYVAPEYGTTGMVTASGDVYSFGITLLEIFSGKAPTDGELRDGLTLPEFVAGAFPDNIEEILDVALLLQAEELDGAASSTTSEEESEARVTVRDCLASAIRVGLSCSRRAPYERMAMSVAADEMRLIRDACLRAC

SEQ ID NO: 150233 - protein, 63 aa, Oryza sativa
  Clone ID: PAT_MRT4530_50489C.1.pep
MAGPSTPPDPMGGEAVIQWEGRRQHGRALPSARSSRRGDGDPVAVRRGGPAAGGGMRQWERAG

SEQ ID NO: 150234 - protein, 394 aa, Oryza sativa
  unsure (1)..(394): unsure at all Xaa locations
  Clone ID: PAT_MRT4530_5048C.1.pep
CDLPCSERTAFRTFGDDHEPRFGNLRNDESGADNRTTGMGDTERTRTGQRGRXEPYHHATRRGNDNDERARRRQTGTTEANGEGTASAAILGRRRDAAGARLDDAEARTKTMTGAAATLTKRGRRTRTAXRRDERPDDRERREDEDDDDRGRRGGYEGSQQRLHGGEDGVEHAATMTMTEAAPRDDEPGDRRDVDGENDRRXDDGRQQRLRGXRGQRGTRRCDVGEGGGAAGRRADEEEGEAGAETTAFRRSSGEEEVMPGMRAASWSRGRWWRRRPALRGRGRGGQRRRSGGDATXAGEGASPVISPRNGGLTEGEGAAARPREKTARPGGARARRGRRLEVAGARERGGRRRERASGGHRAKRRVGRGRGGGCDAGGGDGAAGRRSGEAGEA

SEQ ID NO: 150235 - protein, 66 aa, Oryza sativa
  Clone ID: PAT_MRT4530_50490C.1.pep
TCNLPNPTHGVARRLLTHRTSRTSTPRALLLLLSSAPYVPLILYLTVPPAGIMRLKLLLQNGHTAP

SEQ ID NO: 150236 - protein, 416 aa, Oryza sativa
  Clone ID: PAT_MRT4530_50491C.1.pep
MDLDKSTSSNASLKKLQKEGTLPGHGTMEREPGGTEPEPVLGRMVAIEDYILCGFLPPPSEFFLLVLNFYGLSLLHLNSNSIAFLSIFSHLCEAYIGVEPFLDLFRFYYKLRWMEPKKCIPPDLSKLGSRSAGLSSATVEHRVAQALPLTDIIGPLVDHQTAASLKEGVAQEASDAAVAAAAATTSGGKVPKKGRKFSSVLGNRRKTPAPSASDASRPPLRRQRLVTLGKKAQAKAAQDGSGANSSASPAVASTEVVVMPRSREVREDLQKMRELVAGNKRQRQGLEHRMSDVKNNLSKIRGSLQVTYTGLHQLVGECGVTTTISANPDEFSLMTSLAELATVMEAIPSKHAGRIREETSNGIYTGACHVLACVRLAHPELDLHKILDQGAASDARKDVMEEVGDLGESVLPLFEE

SEQ ID NO: 150237 - protein, 55 aa, Oryza sativa
  Clone ID: PAT_MRT4530_50492C.1.pep
GLPISSTSPVDVANNASSHHHTRRGLSRLKAITEEHEFGAFTPSRYKKLIQDVYK

SEQ ID NO: 150238 - protein, 65 aa, Oryza sativa
  Clone ID: PAT_MRT4530_50493C.1.pep
FSIPPPLANATFCLLLGRREKGFRFLRDFPADSSPHRPDRARARPPRIRFIPLTCPRLRSMDKDH

SEQ ID NO: 150239 - protein, 96 aa, Oryza sativa
  Clone ID: PAT_MRT4530_50494C.1.pep
MVFGDYFRRRITPLQEQSRGAWEYTRGRSRRGASGGGGGDGTGSNGATTGGSRTGGSGRGGGSRGPGFIVSEFYLETKATYGIKGTLPEGLGIIKS

SEQ ID NO: 150240 - protein, 80 aa, Oryza sativa
  Clone ID: PAT_MRT4530_50495C.1.pep
METQCNSKTMLDNQSGDRRRGKGFRGIWEENVVVKKIPAVEKDPAGLRENGSWRRRRLEGFGGARDEDGAGHPSAILRSD

SEQ ID NO: 150241 - protein, 96 aa, Oryza sativa
  Clone ID: PAT_MRT4530_50496C.1.pep
PPGAPFPLGVPPQSPKPLPPKPGLPGNWMPPPPWVPNVPFFLNRREPIPLIYFPFNLVKWFPSIPDIFPGVIMGPLSSISFLLNSCPGNFPPPCKL

SEQ ID NO: 150242 - protein, 82 aa, Oryza sativa
  Clone ID: PAT_MRT4530_50497C.1.pep
PPIKYRPGALLPMIIVCSFGVDIVHHVSRHNMLQCVVLLFGSVHALWRLLFLHMYLSLVSLSGRFYCKSTTFIVGCDLLKQS

SEQ ID NO: 150243 - protein, 89 aa, Oryza sativa
  Clone ID: PAT_MRT4530_50498C.1.pep
MPARRLSFQPPRHLDGENRNGGNDSEKLAVRSYWWSTVDEEGGEGIGVRRNELCRLQSMHEAPCCTKSPERGRQTGALVMVREEKGGTD

SEQ ID NO: 150244 - protein, 178 aa, Oryza sativa
  unsure (1)..(178): unsure at all Xaa locations
  Clone ID: PAT_MRT4530_50499C.1.pep
HEDTVTSQPQLPQNSPAPHLHCRYATRGSSKGQPRVARGAXGMSAAEDGAAAYWLRWQVLVCGALIVLPTAAAAALLPRLRRAAAPLRGTDLWVPCWARLHPGWLLGYRAFALAAAVALLVRLLLAHGVDVFFFYTQWTFLLVTIYFAFAAAISAHGCWVYSNKNLKKADESHEFLSD

SEQ ID NO: 150245 - protein, 399 aa, Oryza sativa
  Clone ID: PAT_MRT4530_5049C.1.pep
MKPPASSAAAAGDKGGGVDPSLPRFKCQECQRALVVVGVESFTDKLPAHAVSGMNVSSVQGSVMGASRMDNSYVVLSKQNRSHSHGIPPRPPSAGIPRAEPNQPTRAMEGSYIVLPPAAASIYKTSASEGGGAQLSPTSMNPGSPLPGNNFHSSVTVLKRAFEIATSQTQIEQPLCLDCMRLLSDKMEKEIEDVNTDNKAYEACLQRLEQETYNILSETDFQKERQKVIEEEEKKLKAAIEEAEKQYSEICSEMKCLETKSKQFEELEERYCHDLNSFQFQWISHQEERDAVLAKIEVSQVHLELLKRTNVLNDAFYISHDGVIGTINNFRLGRLPNVQVEWDEINAAWGQAALLLHTMAQYFFPKFEYPLYSDIIFATVYLLVILLRSNSYMAFTSIN

SEQ ID NO: 150246 - protein, 58 aa, Oryza sativa
  Clone ID: PAT_MRT4530_504C.1.pep
CFFVNLGSLITVTELDYAQDDHWRPWGNGGCTAYIKEGSGQDIDHATSRVTYNDDADD

SEQ ID NO: 150247 - protein, 154 aa, Oryza sativa
  Clone ID: PAT_MRT4530_50500C.1.pep
AHASYPAATCCLRDGLPPKLHSHGHHGRLPPPPPLIPAVSHHPPRSGRGGVDLDGAPLPSPPYSPPGVATATTAPAASHSPARSSQTRPGSSHHRRCPRQPPPAAERGMGETRLRLRHPSWPRGFADARSGGGEARRGGRRGGRWRRGVAARAA

SEQ ID NO: 150248 - protein, 98 aa, Oryza sativa
  Clone ID: PAT_MRT4530_50501C.1.pep
MVMEVDGGLGQRRPRGCHQKHPRRSPPEKENMVTEKLDGPFSNIVGMKNTWRKTKPVGPWEDIKKRNGNLSRGVRGWWVNMLFISLSLLVGECDIYDA

SEQ ID NO: 150249 - protein, 348 aa, Oryza sativa
  unsure (1)..(348): unsure at all Xaa locations
  Clone ID: PAT_MRT4530_50502C.1.pep
MSLEIQDSEVDIVIAALQPNLTTFFEAWRPFFSRFHIIVVKDPDMAEELQIPTGFDLKVYTKSDMGVLGATSIDFSGHSCRYFGYLVSRKKYVISIDDNCLPAKDNGGLTVDAVAQHMSNLKTPATPFFFNTLYDPFRKGADFVRGYPFSLREGXVECMLSCGLWLHNADYDPMTHVVKRNQRNTTYVDAVMTVPLGAMMPVSGINVAFNREVLGPVMFPALRLRKEGKHRWDTLEDVWNGLCAKVVCDRLRYGVKTGLPYVMRSDAEAGKALESLKEWEGVKVMDVVLPFFESLKLSSTSVTVEDCVKELTSIVKEKLGPQNAIFAKAADAMEEWTKLWKSHGAQSA

SEQ ID NO: 150250 - protein, 97 aa, Oryza sativa
  Clone ID: PAT_MRT4530_50503C.1.pep
LNDGASPVFIFLGVFGKPKFFLISPQPIVFFPVFFVVPPTFGFFPKEFPIYFSRGNFLINFFNSFFQKKKKKKKKKKKKKMKKKKKKKKTKKIKKTK

SEQ ID NO: 150251 - protein, 164 aa, Oryza sativa
  Clone ID: PAT_MRT4530_50504C.1.pep
MNVDKLKKMAGAVRTGGKGSVRRKKKAVHKTTTTDDKRLQSTLKRVGVNTIPGIEEVNIFKDDVVIQFLNPKVQASIGANTWVVSGTPQTKKLQDLLPSIINQLGPDNLDNLRRLAEQFQKQAPGASGEEAGASAGAAQGDDDDVPELVPGETFEEAAEEKKES

SEQ ID NO: 150252 - protein, 109 aa, Oryza sativa
  Clone ID: PAT_MRT4530_50505C.1.pep
MGLWDALYRVVMRRNAVYVTFVVAGAFAGERAVDYGVHKVWEMNNIGEYACVMAMALRCKANGMHMEIIGGLDCDLRRTKLKLIALMEQTPCCETTQDNFATSNRTTGV

SEQ ID NO: 150253 - protein, 349 aa, Oryza sativa
  Clone ID: PAT_MRT4530_50506C.1.pep
MLATAARRGDATPSTKEDPDSNVSAFCLHRVASASTVPPPPLPSASTIPTLPFRLHCGGAASTSAASPSASTAPPPLSALHAPPVCLHRATSAGRQPVLDLHHAGAASVGPSSTSIVQTPPPPVRPPRTRLCLNATTTSPPSPARLRPNAHPYLPVPKPQRSVLEHDEPSTYGEQEEPKESAGRQQDGYFLYLNVQHIGDGSMAGIVLDAKAAEFASSDLKADKLTSRKLMGAANAPAPAPLGMCPVRFDEMKGPFTELGKKCKAASVTECCDAFKEIACPHNTLLNDLNNGCGDDMFYFIHTYGRLPPGTIFKKCVEGPYGMNALATKKPHRFRPGTVALRETRRARS

SEQ ID NO: 150254 - protein, 84 aa, Oryza sativa
  Clone ID: PAT_MRT4530_50507C.1.pep
SFYPRQAPSHRGGSFWPSQASLTSELMHTGKPAVRATTADIRLLDHTPWDSLGYFKHTQVELICPNGGRGLSALVICWFGFRTR

SEQ ID NO: 150255 - protein, 170 aa, Oryza sativa
  Clone ID: PAT_MRT4530_50508C.1.pep
MSKQNQEQANSTPLPSITDGIVQKDQTSIFKPSFQKFCILSYQDGSDLLLLLLNWEIVRRRRKKREKVSRREISNRKKQLEKCQEPHMMTALTSALVRVQSLANSCRVLGCKMSHQTKNQENSTSRLNVGKPQPSSGGTDEAEEQWNYCTVRLLASGNSAAVAQKGQQIV

SEQ ID NO: 150256 - protein, 222 aa, Oryza sativa
  unsure (1)..(222): unsure at all Xaa locations
  Clone ID: PAT_MRT4530_50509C.1.pep
SCSPLPIIPNARKQQILNASITRSHLWXNCVVLQLTENMRLNCPTFSCPTFSHQDRSELELFATWLLSLGDGAVHDSAPADRPDTSXVEIPSYLLLPAEERNFAGLISFVYGSIPHVSXLPSYLCERAILAPTNEIAAAINAQIINQIATXEMSYYSFDSIDDATPNYCNVXSLYPPEFLNTVHMSGLPDHHLQLKISVSMMLLRNLDPPKGLCNGTRLIVT

SEQ ID NO: 150257 - protein, 54 aa, Oryza sativa
  Clone ID: PAT_MRT4530_5050C.1.pep
MGMAYRSIGLPVTRKGWFFPYNPYPSKAKGTELACPERMDCYPWRANGTGLIAH

SEQ ID NO: 150258 - protein, 264 aa, Oryza sativa
  Clone ID: PAT_MRT4530_50510C.1.pep
MNNAKKFYNMKRRKYKISFRNDGVQDRSCLIKDLFGGQLLECTPSASIKVNLRLDVTHYNDSGQMYVQIRSSNRDDTPRIYQLKFSGDRSTSVYSNCDQKPDITHHELSIPDELPPSTQSRAVLSYVAYAWQPSQHFLFLKDAGAHLSYTLSSLPLLALSLSLSRRGHSAAATGRRRRAGHGGRGGGGGVGRAGGGEGRGGRGGAGHGGCVDGGPSMCPPRDGRSLRPRRPPAMCPPACTTTALAATPPYRGALAREKEENEQK

SEQ ID NO: 150259 - protein, 106 aa, Oryza sativa
  Clone ID: PAT_MRT4530_50511C.1.pep
SSPLYSQSIIGVSTGPAITLKGQNLMSLPTEAPPNLFPIKRCASKQRIMGSRHHSRMIVCRITLLEVSHICLSHGGGLERPVGDYPDPFPVKALPARRATAYPESS

SEQ ID NO: 150260 - protein, 107 aa, Oryza sativa
  Clone ID: PAT_MRT4530_50512C.1.pep
FPSIKAQCSANFKETACVRIFKKGCAPKGFPPLPGKGFGPFNLNPPPPPKAPIFPCSLGPPPIVGNPPPRFRPRLGFGPWVCFGPPLFCPVVTLNMWTTFPPPVEVP

SEQ ID NO: 150261 - protein, 50 aa, Oryza sativa
  Clone ID: PAT_MRT4530_50513C.1.pep
LIKQLHKVKPLGAQFINLYTVILLYAYTPHVKIPQKIRNRGDKVFIFLSD

SEQ ID NO: 150262 - protein, 53 aa, Oryza sativa
  Clone ID: PAT_MRT4530_50514C.1.pep
QCVTKANYHSVLSSATFKHQRFTFRPTVSSEQHTAVTPPLPPDAWADAWADAW

SEQ ID NO: 150263 - protein, 168 aa, Oryza sativa
  Clone ID: PAT_MRT4530_50515C.1.pep
GRRWGRPPRRRRRRRRLGARRGGAAGSNAGTPRSTSDTTPRTSAPTRSPRPPRPRLRPGRRRSPAPRRAPSTSRASGSAGAATGAGTCSCSAPASASPASTTSPSPSLTGRRTRPAAPPSPPPPPPPSRARNPPRGTLLSAARLPPRRSRPPCPPPPLLPCSRRRKRP

SEQ ID NO: 150264 - protein, 139 aa, Oryza sativa
  unsure (1)..(139): unsure at all Xaa locations
  Clone ID: PAT_MRT4530_50516C.1.pep
VAVANSPCSHCLASFAPRTADNLELRTSRTPANPNKXTEWACKFFMWETQYEQLLKDMQAGNRQAGRLVLNHDGGKPWMGPVVPDFRVGERVLVYLGVLQALLLLLILVVVIMRRRAAPTGYIVARCPCTFHPVNSVTH

SEQ ID NO: 150265 - protein, 513 aa, Oryza sativa
  Clone ID: PAT_MRT4530_50517C.1.pep
MSASRPDHRRHHPPFLRDLSSPISSAVRLPPASLRRETQGSTTPPPPPPALLFLDDLSHHSPSPRPATPPQAAAMSPSPPPPHRGGLFSSTPLRSNGSPSPAAWWSSSREEMAREGSPVDGVVQPQQQPSPTTASGQQSQQQKVTLITLPPPREVARPEMPKDSTPSAGRVDEEEWVTVFGFLPGDTNLVLREFEKCGIVLRHVPGPRDANWMHILYQSRHDAQKALTKHGQQLNSVLIIGVKQVDPWQRQYLNEKTNENFQVGATDPFPSQHVAPSSFTTRNALAPLPSNSMPNGIGNGSGRGASGAIASPTKSVLSKVMDLIICIVPSLRSSGCHTGISPGRSGASVDGVSLIKSDCLVKRKKNILDLCLKLHQYCRVAMRSVRIHASYVYSRPESRRITSMCHHFLAVDEHCHRNNPLLSLNQFLPLDQTYTLLSDCEVRAIFSSKPDVAVVLPIRFREEIKDEPHAATHIITPILIKAKWPCALSVLNQAKLRLITPHVRHPGRQLIII

SEQ ID NO: 150266 - protein, 100 aa, Oryza sativa
  unsure (1)..(100): unsure at all Xaa locations
  Clone ID: PAT_MRT4530_50518C.1.pep
QHHLAEQKELVKKNDVLGMRLREKENVLSEMVRSASEAKKKMAHLEKTIXEKEEEISARVQEKREAIKQLSNAIIYHKNNSDDLIRYIRNHNRRRLPFCL

SEQ ID NO: 150267 - protein, 35 aa, Oryza sativa
  Clone ID: PAT_MRT4530_50519C.1.pep
MVRKHKCDWFGLPRSSNVLAQVCIICDVNAMQGRS

SEQ ID NO: 150268 - protein, 47 aa, Oryza sativa
  Clone ID: PAT_MRT4530_5051C.1.pep
HIALICLLFDHCHHSVQWVYLLNSSSQHAKSCLCAKNKQDLKGETSL

SEQ ID NO: 150269 - protein, 757 aa, Oryza sativa
  Clone ID: PAT_MRT4530_50520C.1.pep
MGEGAERDAVRDHIGGGGWESVCDVRGARLQGHLTGATKKPQAQIVVTSSDGKTTEKKNNPEFDDWEASDQQVLGYLLSSLSRDVLMQVATCETAAEAWTIIEQMFSTQTRARCINTRFALSNTKKGNLSLPEFFGKMRALGDEMATASGKRYDKDYIPDSKNIAAVATSSYGVDTNWYINTRATDHITGELEKLTVNDKYNGGEQIHTASEAGRIYISRDVVFDETVFPFSELHANAGARLRSEILLFPSLFTSGDDNVLHHLTNPINPAANEFADANIEIDTAHSVATEDPAGIDFDADSAEQEPDTFLSPGSVHTHSPGPHHSGADTRQHQETHAGDRIILPGTARQEAQGEQRSSPSADLSSADPSSSLSEALKDKNWKNAMESEYDALIRNNTWHLVPPQRGKNVIGYYEDTFSLVVKAATIRIILSIAVSRGWSLRQLDVQNAFLHGHLEEEVYMDQPPGFEDVTKPHYICKLDKSLYGLKQAPRAWFARLSNKLIDLGFSASKADTSLFFLHKGDIAIFILVYVDDIIVVSSSERATTALLQDLKVEFALKDLGELHYFLGIEVNKTHNGIVLTQDKYATDLLKKVGMLNCKPATTPLSVSEKLSLHEGSLLGPNDATQYISIVGALQYLTLTRPDIAFSVNKCTSMGLNIDRSGSTLVSGFSDADWAGSVDDRKSTGGFAVFIGSNLVSWNARKQATVSRSSTESEYKAIANATAEIMWVIKLQMGLLNRCQFDYWRILKAILTLNGYD

SEQ ID NO: 150270 - protein, 113 aa, Oryza sativa
  Clone ID: PAT_MRT4530_50521C.1.pep
ENFQVGATDPFPSQHVAPSSFTTRNALAPLPSNSMPNGIGNGSGRGASGAIASPTKSVLSKVMDLIICIVPSLRSSGCHTGISPGRSGASVDGVSLVSIQWIIQYQTIWKLCP

SEQ ID NO: 150271 - protein, 163 aa, Oryza sativa
  Clone ID: PAT_MRT4530_50522C.1.pep
DKYATDLLKKVGMLNCKPATTPLSVSEKLSLHEGSLLGPNDATQYISIVGALQYLTLTRPDIAFSVNKCTSMGLNIDRSGSTLVSGFSDADWAGSVDDRKSTGGFAVFIGSNLVSWNARKQATVSRSSTESEYKAIANATAEIMWVQTLLAELGIKSPRAAKI

SEQ ID NO: 150272 - protein, 329 aa, Oryza sativa
  unsure (1)..(329): unsure at all Xaa locations
  Clone ID: PAT_MRT4530_50523C.1.pep
NVLMQVATCETAAEAWTIIEQMFSTQTRARCINTRFALSNTKKGNLSLPEFFGKMRALGDEMATASGXAVDDEELIQYIITGLGEDXSEVISAVCARLEPMTVGDLYNQVLNFEARRSLYRGTQENTVNVANKGGGRGSFPGRGGGAPRGGRAFPSRGTSNGARGRGRAQSGADRRPICQVCFKRGHTAVDCWYRYDKDYIPDSKNIAAVATSSYGVDTNWYINTRATDHITGELEKLTVNDKYNGGEQIHTASEAGMDLSHIGNTIVHTPSNRDIHLKNVLYVPQAKRNLISVHRLVDDNSAFLELHRDYFFLKDLATKRTFLKEHHT

SEQ ID NO: 150273 - protein, 334 aa, Oryza sativa
  Clone ID: PAT_MRT4530_50524C.1.pep
IIGLDSHRKEKINENMSTSERSYGSKDGYYSEEEDSFLDMLVAALKAKLCVRAARWVSQQSGMEWVMETMENPSQCQAIFRLMPDQIHALFGLLTNRYNLHGSIEVCPMEALGIFLYIMAVGNSNRATNNRMMAADKNKPVDPNFERVHYRVVNEEEFLPFADAGWPGSVHDQRVLTEAVRSYPFAFPRLPWGKYFLVDSGYASRIDSSDTHFLTQNPLYNGYPIISDAPPLRGCASASEQLLSSLSNISTDGLTNTSDETGATSISESGTTSMARASEASGSAMTASAMRAAAASSGGELDASSGVERDASGQRGAGSTTELGGCGGLVGGGT

SEQ ID NO: 150274 - protein, 44 aa, Oryza sativa
  Clone ID: PAT_MRT4530_50525C.1.pep
FFFHRCHSIKLGKVAPPYHIIYNVAVQPINMEFLATEFILNNLK

SEQ ID NO: 150275 - protein, 69 aa, Oryza sativa
  unsure (1)..(69): unsure at all Xaa locations
  Clone ID: PAT_MRT4530_50526C.1.pep
VEGGRPVFGFDVPAHLDGVXPHVLDIKSTWSHPEKYDEQAKKLAKMFIENFKKYEGKGSVDYTSFGPHV

SEQ ID NO: 150276 - protein, 394 aa, Oryza sativa
  unsure (1)..(394): unsure at all Xaa locations
  Clone ID: PAT_MRT4530_50527C.1.pep
MAPGTTLAPKRRKAEASPSPSPSPMGDSSDGGYSDSDLHDAEESFYSARSGSEDDRQVSSSNDDDDSEEEEQEEREMDEEEDEEDDDDEEMNEEDDEDEGEEMNELEKEYRTLQTNQQNILETLKQHRDDNVSKDQAVKNQKEPIRSMFCDHNQEIEQAYLDLLNSSKQTLGSMMELQEALLERNRATKDVTDTDNSSELNGVDDEWSDLQKLQKRITPFIYSEIEAGXRETQGRSGGAALKGKLLPCNQNISDQVTSYMRDPSRMINRMHLRKSTLGVFGEEVGEHENNKEENNTEGDPELVDDSEFYQQLLKEFLESCDAGASESAFYALKKQQHKKRKLVDRRASKSRKIRYHVHEKIANFMAPVPMVIPPMAPKLFENLFGMGNQKSTTA

SEQ ID NO: 150277 - protein, 125 aa, Oryza sativa
  Clone ID: PAT_MRT4530_50528C.1.pep
MARRAGSAGGGGAAAFGWDGAAGSAERGRCGDAATHCGGAGRNSGAGCGRQHPAGAAGERHARAPFGASSEVLPAVCGGPCRSGRNFLPAPPWRPVRGKAGERSRFPRCREERVLKSIAFVGGCV

SEQ ID NO: 150278 - protein, 317 aa, Oryza sativa
  unsure (1)..(317): unsure at all Xaa locations
  Clone ID: PAT_MRT4530_50529C.1.pep
RFNECRNTIPEITDASVIHAFKSGVRDRYTTXELATRRITTTRRLFEIVERCAHVDDALGRMNDKPKTGGEKKPTTDTTLEFQGKKEKIRRTRKGSSAEYSSRICYPXQRQTPGSDXREAWGPIPKLKKKFFWEKWPLVFKKNGGRKIFFPRGGGGPPKKKGFKKKKIFLGKKTFKKGGFSPEPFFLGGEPPIGNIKLGGVFMDGGSSIXLLLASTLDAMGIPRSELTPTDQPFHRITPXSSSKPMGKITLPVTFGQANNFRTEQITFDVAEFDTAYNAIIGRTALAKFMASSHYAYQVLKMPGPKGTITIQGNAKL

SEQ ID NO: 150279 - protein, 105 aa, Oryza sativa
  unsure (1)..(105): unsure at all Xaa locations
  Clone ID: PAT_MRT4530_5052C.1.pep
FTVYKLXITQVCFTTSCSASPHQCMHSHPGSTHVSFRVHQIHITWSGWVTTHIXCGCISNIHXMVLFPNNQHSHRIRSLPQTDHAVSHIXSSRHTDSAGLAGPSR

SEQ ID NO: 150280 - protein, 255 aa, Oryza sativa
  Clone ID: PAT_MRT4530_50530C.1.pep
MAAEAGSAAAGAAYEEERRKRVLENLKHLEDLGIKKMSKSLLEAARLQKSTRASPKPRKKFEVGATEVRRSSRARNSVSYKENFDELNSFLCRRRGSRIRSTEQGRDYTGRVASYEQQQRAFKKAERLQNSLDPENPSFVKTMVRSHVSSCFWLGLPTRFCKLHLPPKEYKMVLEDEEGGEFDSVYIGNRTGLSGGWRGFAMHHNLEDGDSLVFELAEPDRFKYLVLERQVDSNKISVILRTRQRQRFWVPIFDP

SEQ ID NO: 150281 - protein, 111 aa, Oryza sativa
  Clone ID: PAT_MRT4530_50531C.1.pep
NRVGANFDQRRLHSPNHQQSPDLRKEGTTTSKYEAEVSRTNSGSGSGRRAGLDSMDVTGSQMGSPAHAGRKRESSRSTDRQRAVAEAKTWGENSRERKWPNARGSFDSTNE

SEQ ID NO: 150282 - protein, 64 aa, Oryza sativa
  Clone ID: PAT_MRT4530_50532C.1.pep
GSISAVRSREPPPCTRSTIPTFPESPFSQEKNLKSFKASKASHPDPKQPFEQEEFYNDADGVED

SEQ ID NO: 150283 - protein, 253 aa, Oryza sativa
  unsure (1)..(253): unsure at all Xaa locations
  Clone ID: PAT_MRT4530_50533C.1.pep
AGTLGCQIGSLPFTYLGLPMGHAKPXIVDYAPLLDRVERRMSPIGTFLNYGQRLTLVNSVLSSFPTYYMCTLRLSKKVISHIDKARRHCLWRKSSNITEKSQSLASWNLVCKPKDKGGLGIIDLEYQNIALLTKHLDKFYNKHNLPWVKLIWRKYYLNADLPPHAHTEKXSFWWKDIFRLIPLFRAITITKINSGDTTVFWKDDWNGTGNSLAERFTTLFSFSRNEDISVFGFLNDQSLQKLFHLPLCASNVR

SEQ ID NO: 150284 - protein, 61 aa, Oryza sativa
  Clone ID: PAT_MRT4530_50534C.1.pep
MADATSSTLLGINYAASATTISNERARVARTRQVDVPSPPRATSRVLEYDLLEPTYADVAS

SEQ ID NO: 150285 - protein, 43 aa, Oryza sativa
  Clone ID: PAT_MRT4530_50535C.1.pep
QSQLDFYEAKAVHAIFATACITVRSLHSYSTSGWPSHEDTAAF

SEQ ID NO: 150286 - protein, 66 aa, Oryza sativa
  unsure (1)..(66): unsure at all Xaa locations
  Clone ID: PAT_MRT4530_50536C.1.pep
VLAAPXARPNPRRXLRMAXCRRPSRAAPRCIRMAAPPFPGRRPAPPPSVADRXTPSAAPTWKGTIG

SEQ ID NO: 150287 - protein, 119 aa, Oryza sativa
  Clone ID: PAT_MRT4530_50537C.1.pep
MPGRLTVPRHRPKHGLTIETARHSANTSRAVPDINFHLADIAAPLIPVTGERLFHLHCSCCHPRPHCINVLDLYLSLTTIQEGRPRSVLSWVPSVPTIEVFDSILMLRYFMDLCMTLFN

SEQ ID NO: 150288 - protein, 40 aa, Oryza sativa
  Clone ID: PAT_MRT4530_50538C.1.pep
GITPFCIHNIQRLITADPAYLGHHPEVNHKSKLSPPCIHR

SEQ ID NO: 150289 - protein, 164 aa, Oryza sativa
  unsure (1)..(164): unsure at all Xaa locations
  Clone ID: PAT_MRT4530_50539C.1.pep
PAPEEAELSNKSRLHKLILDCDIKRLTKDSLQEEHILESLKPHSNLRELHINGRGGTTCPSWLGVNLSIKGLQTLRLDGVDWNKFPPLGKLLLINEHGEESLVLYNKRGAFPNLKGLELVGIQRLAKWVGNDSCFVFSLLKVLIIXDCPGLXXLPFSHSTPRSQ

SEQ ID NO: 150290 - protein, 276 aa, Oryza sativa
  unsure (1)..(276): unsure at all Xaa locations
  Clone ID: PAT_MRT4530_5053C.1.pep
MAQAPARAASVVRLFDAHCHLQDPRVLSVAPSLIRAATAAGVARFAVNGTSEXSLRRFFAETPEAAVGEIGLDKGSHGKTIDFGEQVEVFQQQLELAKELNKPLSVHCVRAFGDLLEILKRTGPFPAGVLLHSYLGSAEMVSSLEILGCYFSLSGFLTGMKSTKAKKMLKSMPLDRILLETDAPDALPKLDDISLLAVPVDSSSADNGESKKDSNSRASTTSNESLNHPSNIHIVMKYVASLLEISEIELAEVTYKNATKLFSYHGSKVHNEVEAV

SEQ ID NO: 150291 - protein, 70 aa, Oryza sativa
  Clone ID: PAT_MRT4530_50540C.1.pep
GPPTCTTVVKTAGFLMWGVTQTGSRAGGATFLPKLSGLPSNYSPKPRICVKLLPVGRKFFWECPKPFRLG

SEQ ID NO: 150292 - protein, 133 aa, Oryza sativa
  Clone ID: PAT_MRT4530_50541C.1.pep
RATWMCSQMGSLLALVLLRHFLPNLIFLLSLLLSGLPQSDRGERDDPRQAARGIGNTLTWTCSGRRSDAPSLLEYLWNPDEDLDYLGKNLHGPGCADRCTWILQSCYTPQDAFLTSCPTYYWWTRSSVLPTTE

SEQ ID NO: 150293 - protein, 173 aa, Oryza sativa
  unsure (1)..(173): unsure at all Xaa locations
  Clone ID: PAT_MRT4530_50543C.1.pep
ASKEGXMAEENMXGICFEVCDVVLHADAIHRGGGQVIPTARRVIYASQLTAKPRLLEPVYLVEIQAPENALGGIYGVLNQKRGHVFEEMQRPGTPLYNIKAYLPVIESFGFSSQLRAATSGQAFPQCVFDHWDMMTSDPLEVSSQANQLVLDIRKRKGLKEQMTPLSDFEDKL

SEQ ID NO: 150294 - protein, 55 aa, Oryza sativa
  unsure (1)..(55): unsure at all Xaa locations
  Clone ID: PAT_MRT4530_50544C.1.pep
MXRAQLVLVXLVAAALLLAGPHTTMAVISCGQVNSAVXXCLSYXXXAPARRRPAE

SEQ ID NO: 150295 - protein, 552 aa, Oryza sativa
  Clone ID: PAT_MRT4530_50545C.1.pep
MRRSGAPPQENYSESRVRLVQINLAYSAFIPTDWNNLETAESRPKSTGLNKVRAFEEPMRRACSAAPSGFQKTSLRIPSPSTHEAPTGAQQKTRKLKPGAENNQSYPVGVRLYKLELETKKNQISKENDSEDIMNTKKIKLHDCHFGSPLCDPSPAPHLLSSAAAAGLSFHPGLVSSAAQHQQHGAGGWLHEEYYAPRSSPPSSLLAQTCVGSNATAFYAAENLPQFDFPALGTAAAAAAKAPFRSSESELYRPVDPLLLRADHSVRTYYVRPQKRDSGERTPLPPPSQQQHQDRIHGLFAGAPTTRLLSGEPKIHSFPPQVAAKPILPAMDAPSLQNQMENQLTRNCIGAATPVTPTGNLAGSGAPSKTRIRWTQDLHERFVDCVNQLGGADKATPKGILKLMNSDGLTIYHIKSHLQKYRIAKYMPASSEGKQLEKRATGNDMQNLDPKTGMQITEALRVQLDVQRRLHEQLEIQRNLQLRIEEQGKRLQKMFEDQLKASRSVMEPQELDDVVAFAAGDGDDDAFDDVDVQLLAVAGSGYDDAGFQSKIS

SEQ ID NO: 150296 - protein, 81 aa, Oryza sativa
  Clone ID: PAT_MRT4530_50546C.1.pep
IVQQGEMNMLIPIHVSYQPLISVHRISASIVLDPSINHVSTCHPKQAGGENEAERSLIGLHSHTRYNGTTDRVQLDLFHAR

SEQ ID NO: 150297 - protein, 67 aa, Oryza sativa
  Clone ID: PAT_MRT4530_50547C.1.pep
GATQWQAGYRQADSRQGTGGTDWWVPIVPSYHLAIQCQNHLIIESDVSYQCPVVLSSREALYPSIQC

SEQ ID NO: 150298 - protein, 58 aa, Oryza sativa
  Clone ID: PAT_MRT4530_50548C.1.pep
MDAPLLRSLPSLGWALLSLSPAPARMLSTAASDALVEIKPGEISMVSDIPKEHLRRKG

SEQ ID NO: 150299 - protein, 327 aa, Oryza sativa
  Clone ID: PAT_MRT4530_50549C.1.pep
MAPRRRARSSGCDQVAVVDLVDSDDECKNKRPRRTIKPAARNVSKSALPSGLDALNPNRRTLRTASSNRDKKNKDKLDTEIFELYLEDLWKDIDEEKRSAYAYFDSLWFHMYTSGHNKSNVLKWIKAKKVFSRQYVFVPIVIWGHWNLLVLCNFGETDYLGTDKGPRMLLLDSLKTTNPTRLRSNIKRFIADIFKTEEREENEQFINKICLEFPEVPQQNGDECGIYVLYFIYCFLQNKALGEDFSQLFDDPEEWENFRKGVHSFREIQQQITCSSSWWHNLKKFEDCQEFVCHTVHAVKRKMAISQIQSSISVNLALSRSFVDPGY

SEQ ID NO: 150300 - protein, 128 aa, Oryza sativa
  unsure (1)..(128): unsure at all Xaa locations
  Clone ID: PAT_MRT4530_5054C.1.pep
MGAFRFHQYQVVXRGLPXPTDEHPKIYRMKLWATNEXYFLRKLKKVKKSNGQILAINEIFEKNPTTIKNYGIWLRYQSRTGYHNMYKEYRDTTLNGAVEQMYTEMASRHRVRFPCIQIIKTATVHFKL

SEQ ID NO: 150301 - protein, 44 aa, Oryza sativa
  Clone ID: PAT_MRT4530_50550C.1.pep
SDLLRIDCTRHIDWCCCLPGVPPQPLSRQYLRSNVTCSPYCHES

SEQ ID NO: 150302 - protein, 226 aa, Oryza sativa
  unsure (1)..(226): unsure at all Xaa locations
  Clone ID: PAT_MRT4530_50551C.1.pep
VCTIVVKPAAXAPLSALYYAHLAKLAGVPDGVINVVPGFGPTAGAALSSHMDVDSVAFTGSAEIGRAIMESAARSNLKNVSLELGGKSPMIVFDDADVDMAVSLSSLAVFFNKGEICVAGSRVYVQEGIYDEFVKKAVEAAKNWKVGDPFDAATNMGPQVDKVQFERVLKYIEIGKNEGATLLTGGKPTGDKGYYIEPTIFVDVKEEMTIAQEEIFGPVMSLMKFK

SEQ ID NO: 150303 - protein, 117 aa, Oryza sativa
  Clone ID: PAT_MRT4530_50552C.1.pep
WIPGLQVEPCGTSQRRLETGLKGDPSEEFSFSSFFPEFLRPVLDPIASIFHRLLCGRSERADARGQTLDTTPLPGSDSIEANRRRERGQRALEQRLAEKLAAVKSSEGTSQDASDKV

SEQ ID NO: 150304 - protein, 319 aa, Oryza sativa
  Clone ID: PAT_MRT4530_50553C.1.pep
MTARAGQLQPIRYIVVSTSRSRSSMEVATGSALTTRELAAAAGLHVASTRHGQPISCNAADGRTPAGSYRPPPFLRRHRHHRSSLNCHRHCCWALASGRMRNRFGARAVGFGAATTKRRRHSPLPSASRRHHFPSRKKAQATAPSNPAFSTADGVASKDLSTPPPHPNSSLSINIFLLTLSPRLHICPRRAIVVVWISIAIVIVVGGGVASKDLHINPAQLLPRQPLGPSSSVAGWMKDSVAACIRVRRPPPASSALVGRRCRFRTRRLPPAVGHLRRSSAPCATRTTPSIAPPLAQPLFRLRRPSDQPSSSPSSRHRR

SEQ ID NO: 150305 - protein, 216 aa, Oryza sativa
  unsure (1)..(216): unsure at all Xaa locations
  Clone ID: PAT_MRT4530_50554C.1.pep
MWGQKRKTKKKKKGKGRRETKPPPKKKGGGGAKPGPKQKGNPKKGQTKKTKGGRAPPPTGERGNPQRATPKTGNPSSGKRRPSPGGRTRGGGSPAPGGGKVPSGSGASXPSRASPAWGAQHPSKILSARGGGGTPPLGKPGTWGKNPPWGPALSGGPKGKRGGGPAKRPRGTXFYFVGGXEXGGRGPSRGGCLGPFCRKTLGGARPGGGGGXRGGG

SEQ ID NO: 150306 - protein, 196 aa, Oryza sativa
  Clone ID: PAT_MRT4530_50555C.1.pep
MAATTTATATRSTRGYHQRLIRRGRVARGVGGSRRHYQIHPQLPYSCYRLQSSCRTLLPPPSWGNIGDAGCRYLLAIVHHVTGFVRSRREKWVSRSHYSLVTVHRVADYYSSLVAIHHAVGYSVSLACRCCLGTAVRHRARPWPLLAALQIAGGVLGDKTKQAEAAAATTTEWSSGSKMENELALRTIAQDRADPV

SEQ ID NO: 150307 - protein, 70 aa, Oryza sativa
  unsure (1)..(70): unsure at all Xaa locations
  Clone ID: PAT_MRT4530_50556C.1.pep
IWHLLELVHCTVLFDKNNQQILLSSGVNLICVEGXDTVWYDGGDAVAATSVHAXGGPTAXKLQSDKSSRW

SEQ ID NO: 150308 - protein, 218 aa, Oryza sativa
  Clone ID: PAT_MRT4530_50557C.1.pep
MADHFAVMAGRLLTESTVQSAIDEASAAAMPSSVIASEHNDVQDEREKSGVLVECRICQEEDDQTYMETPCSCRGSLKYAHRKCIQRWCDEKGDTICEICLQQYTPNYTAPAKLFQHGRNSIFFRTPGYIQAQVMQNTDRSAAASTSYDPELPNPKGVIYCRIVALTFNAAEQSMQLVSHCNLTVRKCNCQISDAAAAVNINQQAPQSPRRQHVISIQ

SEQ ID NO: 150309 - protein, 528 aa, Oryza sativa
  Clone ID: PAT_MRT4530_50558C.1.pep
MVLGAWLMSPASVPWSLLAYGVLGLVLLWQAGRLLHSLWWRPRRLELALRAQGLRGTRYRFLTGDLGEHGRLNREAWARPLPLRCHDIAPRVAPFLHNAVREHGSACFTWFGPTPKVTITDPDLAKGVLSNKFGHFEKPKFPTLTKLFSDSLANHEGEKWVKHRRILNPAFHLEKLKLMLPAFSACCEELVSKWMESLGSDGSYEVDVWPEMQILTGDVISRTAFGSSYLEGRRIFQLQAEQTERLLKCMQKIVIPGYMSLPTKNNRKMHQIKKETDSILRGLVDKRMQAMKEGECTKDDLLGLLLESNMRHTEEDGQSNHGLTIEEVIEECKLFYFAGMETTSVLLTWTILLLSMHPEWQDRAREEILGLFGKNKPEYEGLSRLKIVTMILYEVLRLYPPAVTFTRKSYKQMEIGGVTYPAGVIVELPVLLIHHDPNIWGSDAHEFKPDRFAEGISKASKNPGAFLPFGWGPRICIGQNFALLEAKMALCMIFQCLEFELAPTYTHAPHTMITLHPMHGAQIKIRAI

SEQ ID NO: 150310 - protein, 78 aa, Oryza sativa
  Clone ID: PAT_MRT4530_50559C.1.pep
STMASFIAYSFMLHNKWYSSDDHSLPLRNMRTSQGYEPRLGNWSETQLIYELTRNGKTSSVVGRIREWSDISAITFHL

SEQ ID NO: 150311 - protein, 159 aa, Oryza sativa
  unsure (1)..(159): unsure at all Xaa locations
  Clone ID: PAT_MRT4530_5055C.1.pep
YPNRQKYPYFYPSSTSVGDQRRRDSWSAAGAARGRVFVTGGVRAGYDPAVTRSGALWDPAASPPTAAWEPILPLRDGRFSRXEAVCSGGKVCMVNLRSRNAKERLVFDLRADRWKDMPPRMLAGWKGPAAASPLDNGETIYVLDEERGALTAYDWGTAR

SEQ ID NO: 150312 - protein, 80 aa, Oryza sativa
  Clone ID: PAT_MRT4530_50560C.1.pep
ARDHYKMRGNILSYNLGGMGCSAGIIAVDLARDILQSNPGNYAVVVSTEMVGFNWYHGKERSMLIPNCFFRMGCSALLIS

SEQ ID NO: 150313 - protein, 62 aa, Oryza sativa
  unsure (1)..(62): unsure at all Xaa locations
  Clone ID: PAT_MRT4530_50561C.1.pep
KNKMRCLKHWQLVSYILFMMSKNNLKGYLAIFIHWTFIXXMTVSEILMNLKTDDKGLFILSI

SEQ ID NO: 150314 - protein, 172 aa, Oryza sativa
  Clone ID: PAT_MRT4530_50562C.1.pep
SLYTQDFPRPRRWRDGDGDGEEGPTTAGGGGGVGCRCRSCAAVMLADCIALGCCPCALVSMLSLALVKAPLAVGRRCVGRLRSRRRTLLHNKRVRDVAATSAAAAGEKKAIAKPEEELEAADIVANDDDTASAAAATAGAGAPTDEDLAWLEEMYQMGHWGFGRVSISGKTP

SEQ ID NO: 150315 - protein, 63 aa, Oryza sativa
  Clone ID: PAT_MRT4530_50563C.1.pep
PFNFVPITLSFCLFFLFFLADQIVSCVSKILPLESLGCSLLLQSLCFRLFYGTSDIWYIIKKN

SEQ ID NO: 150316 - protein, 373 aa, Oryza sativa
  Clone ID: PAT_MRT4530_50564C.1.pep
MAKNYPFTDHEMALFPIEYQRFKLKQRSRWQFHDWKFESLTGFRFLFDEVRNLIFQKGLGRFVRGNCLEMEGPGCDSIVEGSSILDTDASGCGSSDCVMKEVFARILDFITDSFGKISLLVSDSNQSGGEDISVPFGLPISAEIYSKIFSPESVSNHSDGGVILQQLGSVSTEELEGYLSSPGIDSRHTEITDYDGSNYDDDFNTFNNLEDIGDNLEDNYTPLFFGVFMADNETEKQHHEQQERERPEKEAEERRLRTLASGRRAQDDETNPTVLTLEPNDERRRPATRSSRGAASVDGGDGAPVTGDSGEGAAELAHTSAHLTAVTETDGNGGGDGATRPKFGRRRRRTWRRRRRGYGARETTGEGQTKEED

SEQ ID NO: 150317 - protein, 149 aa, Oryza sativa
  unsure (1)..(149): unsure at all Xaa locations
  Clone ID: PAT_MRT4530_50565C.1.pep
GIIKLKRPKQGWVKLNTDAAFREDTKQGATACVIRDELGGFQSXKLLGMTVYDACSMEARACLDGLKFAACLGLSKVAVETDCLQFVPLWMKRESQRSIIAGLLTEIQEVCRASQEFSISYISRSCNKIAHVLAKQVSSSHRTETWLET

SEQ ID NO: 150318 - protein, 312 aa, Oryza sativa
  Clone ID: PAT_MRT4530_50566C.1.pep
MGDGGELAAEKHVRYIVTVEKRKDSFESLVMEHIRLNGAYWGLTTLDLLHKLRAVEADEVIEWIMSCYHPESGGFGGNVGHDAHVLYTLSAVQVLCLFDRLDALDVDKVADYIAGLQNEDGSFSGDIWGEVDTRFSYIAICTLSLLHRLEKINVQKAVDYIVSCKNLDGGFGAMPGVFCCVGALAITGSLHHIDRDLLGWWLCERQCKEGGLNGRPEKLADVCYSWWVLSSLIMIDRVHWIDKDKLAKFILNCQDKENGGISDRPDNAVDIYHTYFGVAGLSLMEYPGVKPMDPAYALPLDVVNRIFLRKEH

SEQ ID NO: 150319 - protein, 201 aa, Oryza sativa
  Clone ID: PAT_MRT4530_50567C.1.pep
MAAASSGCSSGCQSGWTTYLDDHSSYSCGTARFHGKAQQPYYHCDYSEDAEEDDLSMISDASSGPRQQCSTGNDDGAAAAAAHANAARRRGRRMEPTARRQSKTAAGASLLEDTASSPAFFKYTNASAEGNGYGYGGVASPVMEMGNAADFSCAFSATTGFESPLNGIPLSGYLQMQYSTTHVKAIPARQARRGGVEKKRR

SEQ ID NO: 150320 - protein, 72 aa, Oryza sativa
  Clone ID: PAT_MRT4530_50568C.1.pep
PSTDSHPYQIPARSITAKIQLTLPLLISAGEGRRSVDGWIGVERSVRRCRWWGGEKATTQQPPRWAGCTPRA

SEQ ID NO: 150321 - protein, 81 aa, Oryza sativa
  Clone ID: PAT_MRT4530_50569C.1.pep
SLVISVKGSVARNNPTRPETTAHQAISPTTQQITTEFVQHSESQFQEYNSQMDGRVRIVESGMKRSRSFGGGCSSSVEISS

SEQ ID NO: 150322 - protein, 178 aa, Oryza sativa
  Clone ID: PAT_MRT4530_5056C.1.pep
MGAFRFHQYQVVGRGLPTPTDEHPKIYRMKLWATNEVRAKSKFWYFLRKLKKVKKSNGQILAINEIFEKNPTTIKNYGIWLRYQSRTGYHNMYKEYRDTTLNGAVEQMYTEMASRHRVRFPCIQIIKTATVHFKLCKRDNTKQFHKSDIKFPLVYRKVRPPTRKLKTTFKASRPNLFM

SEQ ID NO: 150323 - protein, 234 aa, Oryza sativa
  Clone ID: PAT_MRT4530_50570C.1.pep
RNSRVDPRVRGAVKLPASVLESKVEYRPYAHAVGNFSECRSAALTLLQKGREECRYHECRMGAAFVPDLDGKFLATENFYHTSKFFRLRSKSFLSDLMLAGEKFCRGDWSKIKKEYRSFNEGELLLFCFSSAYIVALLHDTLKVPLDDKRIDVANQIGGVPVDWALGAFIVQKASNQTDMLHPEGEKISPEDGIRHGERPVHHNQGETMSLARRRWDLVELLRWGASDRVCKFS

SEQ ID NO: 150324 - protein, 508 aa, Oryza sativa
  Clone ID: PAT_MRT4530_50571C.1.pep
QWHASTCVFTMFRIFFMFQLLFLCFSMLVPRSPRRRPHEYGVVIDAGSTGSRVHVIAYRSSSSSPASALPRIDWARTASMKAAPGLSSFASDPGGAGRSLAPLLEFARRRVPPESWAETDVRLMATAGLRLLDAAVAEAVLDSCRVLLRGSGFQFQDDWATVISGAEEGMYAWIAANYALGTLGDDSQDTTGIIELGGASVQVTFVTDKPLPPEFSHTLKFGDATYNLYSHSFLQLGQNVAYESLHDMLSTPGHKSMATHLISQAKYRDPCTPRGFSPMEGAVKLPASVLESKVEYRPYAHAVGNFSECRSAALTLLQKGREECRYHECRMGAAFVPDLDGKFLATENFYHTSKFFRLRSKSFLSDLMLAGEKFCRGDWSKIKKEYRSFNEGELLLFCFSSAYIVALLHDTLKVPLDDKRIDVANQIGGVPVDWALGAFIVQKASNQTEYSDSSVPYLNSYYYSGLVPLLFISAVVLFTACSILRGRRSRLKTVYDMEKGRYIITRVR

SEQ ID NO: 150325 - protein, 93 aa, Oryza sativa
  Clone ID: PAT_MRT4530_50572C.1.pep
MRRRQAAPTAATGEKTAVADDAGGRRRGRRCIAATRMWGAAARVRGRKEEGVLTEGFGQPGERRRRTAATSDRETATSGERTPGGPKEPNEGD

SEQ ID NO: 150326 - protein, 678 aa, Oryza sativa
  Clone ID: PAT_MRT4530_50573C.1.pep
MAASSAQLIFLLLLAVLAAASSRNDEEARALMALKESLDPAGRVLGSWARSGEPCGGSFVGVTCDSGGRVTAISLQGRGLSGTLPPAIAGLRRLTGLYLHYNGIKGAIPREIGSLSELTDLYLDVNHLTGPLPVEIAAMENLQVLQLGYNQLTGSIPPQLGKLNKLAVLALQSNQLTGAIPATLGDLTQLARLDLSFNSLFGSIPSKIAEVPLLEVFDVRNNSLSGSVPAGLRRLNGGFQYVNNKGLCGVGFSLLDLCLSSEDGLKPSKPEPFGPDGTVKTRQVPQSANTDNHCEGSGCSKSSNASVGVLVVGVVAVVIGAAFCGIFAFSYYRRQKQKIGSSLEVSDSRLSTDHYQQKEVCRRSASPLISVEYSNGWDPLSGGGVGSSGEVGDSFRFNLEEVECATQYFSEVNLLGKSGFAATYKGILRDGSVVAVKSLNKTSCKQEESDFLRGLKMLTVLRHENLVGLRGFCCSRGRGECFLVYDYMVNGCLSQYLDVKEGSGANVLDWPTRVSIIRGIAKGVEYMHSKKANKPSVVHQNISAEKILLDHHLTPRLSVPGLHKLLADDVVFSTLKASAAMGYLAPEYATTGRFTEKSDVFAFGIVVLQVITGRRAVSQLKVSTVANDLDSLIDENLNGVFSRTEAAKLAAIAALCTSETASQRPTMEAVVQQLSNCH

SEQ ID NO: 150327 - protein, 58 aa, Oryza sativa
  Clone ID: PAT_MRT4530_50574C.1.pep
FCKISISNIEPQKNMVVVQHPAPLKSVKHHYLPSLISKQIYYPIYFPKYKLSIIRTRG

SEQ ID NO: 150328 - protein, 300 aa, Oryza sativa
  Clone ID: PAT_MRT4530_50575C.1.pep
MQWAALSSPPAPAAPAAVWMGRRARTARLPSPGPRRVVLAAAASSSSPSPDANSSSNSNSPGSGGGGEEVEEEREDAARMEKAAAFLMRSQKYAMLKQQLAVAAQFEDYKEAARLRDSLKSFEEEEPVLRLRRSLKKAVEEERFEDAAKYRDELKILAPHALLKCSSDATTLGIRVQVRSVYIESRSQPLKGQFFFAYRIRITNNSQRPVQLLRRHWIVTDANGRTENIWGVGVVGEQPVIFPRTGFEYSSACPLNTPNGRMEGDFEMKHIDKAGSSTFNVAIAPFSLSILGDDNDDVLL

SEQ ID NO: 150329 - protein, 148 aa, Oryza sativa
  Clone ID: PAT_MRT4530_50576C.1.pep
MAVSSTTASAWPLPSSPPKWQAPPPLASHNFLATARRRVPPPPLAESRKAEKAELGVGRSSPDADKQTDTKLELEDATRSGKQTEAAATASPGGGGCGYGLARRQRLRPKATVAPGGCDTQPGPSSSDTEDGDDDATMRSSDSVSYCL

SEQ ID NO: 150330 - protein, 112 aa, Oryza sativa
  Clone ID: PAT_MRT4530_50577C.1.pep
MASWKVPYMSAKTKKPSRREEAVDELVVWATRFFGRRSRLASAAWSAWRWARPAGRYGRVGEPEENCCDDGMEVGEQRVGATKEVVRVAKELRGSDRAAADEVAEEEARVVC

SEQ ID NO: 150331 - protein, 47 aa, Oryza sativa
  unsure (1)..(47): unsure at all Xaa locations
  Clone ID: PAT_MRT4530_50578C.1.pep
YPCPKPSPNLLPASSDRAPPPVATPPPXPPDPPPRPCPSPSPPGRRI

SEQ ID NO: 150332 - protein, 60 aa, Oryza sativa
  Clone ID: PAT_MRT4530_50579C.1.pep
IASRAKSRGSHLCPRPPRTAPLQPDQQHRHCRREQHPRPNRRQTTRWASSLPHEPWRGAA

SEQ ID NO: 150333 - protein, 423 aa, Oryza sativa
  Clone ID: PAT_MRT4530_5057C.1.pep
MAIAARLLSTAPCRSPSSWPLPPSKPYLRFPSAPLLLLLRSPAAASVIHLSPPPVTPLAVACDDRHALPDSDEPRNRNPPDHPAPLLAAAAAAAAAVASPHAALALSGGSMGGCSDTSSSYSSSFSSSSSSDSFSSWSSSSDSWRSSSSSSSSPPKKKKVVVVESADLETHESVGTAASPPPPPPVALTPWEKFWISVAVVLGVGGLVFGLIFLIKRSIPPPRTISVVKLQIALGGVAAAKSFQKDLNRIAERVQGSSRRWYKFILSDLFKKYYYQVIAFFAEINLFVHRTQFSIKVMVDIKDSDSWNGHFKKISLEERGKFDEETLSNLEGVKRNKEYSTKMDGSKNEYIVLTILVATDGTMDFPKLITNAADLKVALTKLYSTPETGLEGIHVLWAPQDKDDILSKERMQKDYPYLKPLSV

SEQ ID NO: 150334 - protein, 1444 aa, Oryza sativa
  Clone ID: PAT_MRT4530_50580C.1.pep
MATEEEAREATDGQEVQVEAATDLQAQLDSKLSSIKEIKGEAQTMGSTEGILKIPEDEVLVEAPSETKIPSEHSLNGTASSLNGHVNKEENISNEQPHEINQESQEQVETSSDGTSTYPSNKSNEEEMTDSLSHGESASEDTTILKCENAEAKDHGQQDVEGHVTNDTMVQEEICKTDDAIEQTVDAQDLDSSKESKEAQPAIMTDIPADEVLAEAPAGIQSPLEPNVGDSDTVPGNKETDDPAKEDDTAYLDHKESFPEDKVIAEHADEEVKAEDQQSKQADDMDAEVLQEEIPESKESDLPETEQAEEASVDDQEALNQQPALETNDSLSVKAEETCHQSNVATCGEKTPEDDATTREPTVDTKEEQNQGSVEEMKDAEAVDTEETVQQSSVAFDEAIQDHAATTNPSSDIQSIEPEETKGPSDVKAEEVSSQSNVAFAEDAVQDKVIPSEPPEDIRPVKKLEQEETKEADEASNETNSAIFSDLNQEDSIVASKQLETELAEEAAAFSNLDQEGGIADSESQVADLEEAKEIEATETEEITHQPPAAVSTELPKEDNSTRSEPHNDDIQHSLEQDSIEVKDTEAAEIQEISQERTIATSKEDAVEDDGTAEGPTCVSQEVQDVESEEVKDTEPDNVVEASDVVTVDDEGQENNVLTSENIAELQLQGLESEEIKSPEPIETEAGFHTSHAAPSNDPVEVNTTACETQDTESAEEIKETEGTKTESIPQESNISVSEESNPEDSITASETISNTQELTIAGSIEASEDNIDTKTGEITDQSNEVFAGEAAQGDNIPESVSTADTQSMQELESEEMKKPELVDLSGTFHQKDDAISQKQNQEDNPTTCETNEIGSTEVSSVEASEDQAIAHQSNITQCEEQATEESITESEPQILEIESVQDMEDTEATEPELVSEQNIVSTSEESVPEENATTEEPAFHDREIQNDGAELTEQHDSVKAEELPNQSSGAIVEETAQEADLVAGEPIDDVQEKDLEPEEISNTVDGETGEASHQTHAAVEDNWTGEVESSVEASEDQAIAHQSNITQCEEQATEESLTESEPQILEMESVQDIKDTEATESETIFQKNIVPTSEESVPEENATAKEPAFDDREIQNDGAELTKEHDGVKDEEIPDQSSGAIVEETAQEANLLASEPTDDVQVKELEPEEISNTVDGETEEASCQTHEVEMTESSEQMKDTEPPVPEPESSEEMRDTAPTVPEPTLQDSRVASVEEIETHNNATIEQNVGYQQLQEQESVEFKETEVLEPQGVIPSHNVSSSEEFNPQETVTKEEPGSDTQAEESPVVIEDTEDVNNSAALSEKIAPEEHVLATETTVDTPPVQETELEERQNIESVEAEDNIAASGLPGEEIDTEAIEIESVPHESTTTSVKELNEDVKSNVALAEEAASEEHILETEVTVDKSSAQEPQLEEIQTRGPLNRT

SEQ ID NO: 150335 - protein, 72 aa, Oryza sativa
  Clone ID: PAT_MRT4530_50581C.1.pep
MVDNQGCSPALEPVPTPPNPDPSSISPEAWDPLEAAAGAVVARIQPNPPSEDRRAAVIAYVQRLLRCTVGCQ

SEQ ID NO: 150336 - protein, 105 aa, Oryza sativa
  Clone ID: PAT_MRT4530_50582C.1.pep
MGDGYEVRTQSSSSSSASQRDAGSGWASPPSSRHGGIGVPVAKAATVARKWLDGQGLAGGHPTFVKEGIGRPLMSFELSPCTATLQKGRRPIEEAGLSFPSSTYR

SEQ ID NO: 150337 - protein, 178 aa, Oryza sativa
  Clone ID: PAT_MRT4530_50583C.1.pep
MVGFDAQFPKIYAMAQCSPDLSPAQCGLCLGAMVARWWQTFEPNTQGARSVGARCNMRVELYSLTTSLPCCSCKPRPSRRRHRRRRRRQGSHLLCRALQEGSLPHGEEIAVKRLSQSSVQGMGELKNELVLVAKLQHKNLVRLVGVCLEEHERMLVYEYMPNRSLDTILFGAFPLRAF

SEQ ID NO: 150338 - protein, 556 aa, Oryza sativa
  Clone ID: PAT_MRT4530_50584C.1.pep
MEVSDRMLHASPAAAAAAPATADDARETEIAGGIASASAAVEDPPASAPPASEAAGEGVIAVEHERAAAHPVSETKMDVDEVGTADAYPAVAPAAGEVKAEVNGGSIPDKEQDAAACTPIQVKTEVYENGVQEQVHTVAAVASEVKMEGCEGGVVDQKPTTTPADGCQMKEEGECLVGRYISRSVAGHGRILLGKVASYDGSTGIYSVVFEDGQGEDLELAQLQSQLVGEENGAFGMKVSCRKRKLDLLVSSGGATEVKGPPITRQRVNESEVSTRPDESQESGSGSDASEDVESSSNSSNCTKELPVEHYPPVQVLELPPSSGDIAVPEEAISYLFSVYNFLRSFSVQLFLSPFGLDDFVSSVNCTTQNTLLDAVHVSLLRALRRHLETKSSEGLKLASNCLKYLDWTLLDSLTWPAFLLEYLYVMGIIKDLGGRRFGRSVLAIEYYKLPVTLKLRILQLLCDHVIDSEELKTELEEREGYSEEMEYEMDSSTFAEVGSRSVLTRGSKAPACKKLDALQNLETAQNGNNPESASTHASQDGNSDDCRICGMDGTL

SEQ ID NO: 150339 - protein, 937 aa, Oryza sativa
  Clone ID: PAT_MRT4530_50585C.1.pep
MPNHDMVIESAKKICRCFVATALNPWTHCAYSVTVFQDLRQAFEWMMNMDMAAAVLLEVEMYRPQWWSMFTSDTPNLKKFVLRLVDEANFTYATKDKDHGVPSSQRTNVTREGDNSNNSFTHHNIAIAYPISLAVDEKHSGLGDLLNSSAVFRVLNKTRDDVSQTLKMDIQCAYKTIPKLLIILLLHGCMSGKSPSGILNCTHCSVLLHKSRLPCKYRGYSAKPCGFSVTALLRGYGSPHPNGCIMLYRLLEYNISASLKLSLKFLLYWTKALNDDVWQEAQLALCSAMCRGSVLLLRVHAALLLLAALPALIAGQPWEICGENGNYTANSTYQANLKQLAAALHKNVSSGTGGGRLFASGAVGAVPDAVYALALCRGDINASACADCVGTIFQDAQQLCPYRKEVSIVYDSCYLRFSNLDFLSSADNSGVVDLYNTGTVSGDVGRYDRAVTGLLNATARYAAGNTNASSRLFATGVMVGFDAQFPKIYAMAQCSPDLSPAQCGLCLGAMVARWWQTFEPNTQGARSVGARCNMRVELYSFYNVPSMLQLQAEAVAPSPSPAPAPAGKPPAVPGTTGAASRSEDFESIESLFLDLSTLRIATDNFSENNKLGEGGFGVVYKGSLPHGEEIAVKRLSQSSVQGMGELKNELVLVAKLQHKNLVRLVGVCLEEHERMLVYEYMPNRSLDTILFDAEKSSLLDWGRRLKIINGVARGMQYLHEDSQLKIVHRDLKASNVLLDSDYNPKISDFGLARLFGGDQTQDVTNRVVGTYGYMAPEYAMRGHYSVKSDVFSFGVLVLEIVTGRRNSGSYYSEQSGDLLSIIWEHWTMGTIMEMVDRSMGERAAGGEIARCIHVGLLCVQENPASRPAMSAVNVMLSSGTVSLKAPSRPAFYIRKGGGDDGGGTGSYSGSFVGTLPSSGRSAPMSPNEVSITELEPR

SEQ ID NO: 150340 - protein, 92 aa, Oryza sativa
  unsure (1)..(92): unsure at all Xaa locations
  Clone ID: PAT_MRT4530_50586C.1.pep
VVKXRCYQPGFRXDFQAFDGLFHTPFLHLNLFLLSCVVYAGQSWWKCNCEDCAFARNTKAILFRFQWLRLRSCLTKRKREKEKIKKKKKKKK

SEQ ID NO: 150341 - protein, 40 aa, Oryza sativa
  Clone ID: PAT_MRT4530_50587C.1.pep
NLPCDGTSSFFKWFTLKNFLFYGLWVYLRFTLINMIDCFP

SEQ ID NO: 150342 - protein, 713 aa, Oryza sativa
  Clone ID: PAT_MRT4530_50588C.1.pep
MVVGAAAATYSLSLSLSHAHALDCRGGGTCARRLAAETEHDRAAGVGGGLATIAACHATPPRHRPTRMPQLCTAAPRSTAATLLLGSAPLPVLLPTPARRATRRQPKLRPRRSYRRLEHTPSHAPSPPLPLPTGSPSHPPPCCRAPAAAGGHLHRLNLLLPGKEQQDVAAAKRALPPRAAVRLLCSSISCVAAVDAATDTRAPRPQSPPTLPAASTVAARPPRRAHRAPSGKERGGELFPFLVDVFLASLPYGLGCVRSPRSPWCMYLAKPPIGACHDAMRGQRHRAAKITAALNGACLGRDETIWAVGCLRGAISGVHVSLSVQLYCSAPCLYSPRSCFDARINLEEPATGFQLCALAGGQSELWSSDRRRRAFVDLLARCRPIHTAPEPFLCILVVTAVHVALLLLASLFYFVPEESLVLFLSSFDSVLGTLPSTENIVSMEPVVRSDSLMKLIHQQNTDDNSMLRYRQQHKTKVSTEESSTPSSEYRCSHRELKKHRLGCEVGNCGAFEYSAPPTLRDGGAPGNKAHGTQRNISKTSTKQIEARTKTVQIARACTSPSSISSATLPNLSIDVPLVPPPTPDWPVVSSKTPSMEPPPPPWSHRAVLTILAVSVPSSPSSLPSWRSRARGLFDLASAALRLLLHLTGEERPHCTGERAGEAPAAAQGRGRGASRSEERGISTGRRAREKERRWCSARGRGRGAGIAVEGAPV

SEQ ID NO: 150343 - protein, 544 aa, Oryza sativa
  unsure (1)..(544): unsure at all Xaa locations
  Clone ID: PAT_MRT4530_50589C.1.pep
MLHHAEPEVVAGSARGLDNFNALQKASKELFYDDAKGCGKDFTLLRTVLELLRLKSRNNLSDSSFNDLLVLLKELLPKPNSMPTSTYEAKKLICLLSLGVQKIHACVNHCILFRKEYEDLDSCPTCKSSRYKTSRSQSEGQDVVLDNLXRVRSMQRQQQKEDSPADARQWKEFDTKYHKFAEDPRNXYLKGSKKLVYMRHRRFLRKKHPYRSKAEYFDGTVEEGDAPEPWKGDKVFRMTKNLKVVFGKVKKKEMNKRKRNDAEVPVSSSMPFKKHSIFFKYLSYWKDLDIRHSIDVMHLEKNVFDSTIGTILDIPTKSKDRLKSRKDLVDMQITIKLHPVDEVFLAIAIRAVEPVHVKLVITKLCYFFNSISQKVIDPEELGPLRAFAIQTVCDLEMCFPPSFFDMMQHLIVHIVPQIIALGPLYLHQMWPFERYMSILKSYVWNRAHPEGSMIEGYTTEEVVECCIDYLKYGKAIGLPVPRHEGRLSRKGTKGKKRIHDNDYKKVKDAHFTVLQQLALVEPYIXQHLQELQATNVGRSNRWIM

SEQ ID NO: 150344 - protein, 235 aa, Oryza sativa
  Clone ID: PAT_MRT4530_5058C.1.pep
MPPPPPPRRAPPPPATPPPPPRRAPPPPSPPIRPPPPPTPRPYAPPPPSHPLAPPPPHISPPAPVPPPPSPPPHIVIIVVFVSFGGLLLLACLAALFCWHKKRRETERKAEVHNLSGHVHVHKATESGPSGAKATVLSIDEDLKFQEVAGESSSAAGAGSHHTPWSWHRRQQEGKAENKAELINVTEHIHVDEKIVSGPQGQKIEILSEDEDIRFEEEGRKEKGDQRSKTRITKT

SEQ ID NO: 150345 - protein, 548 aa, Oryza sativa
  unsure (1)..(548): unsure at all Xaa locations
  Clone ID: PAT_MRT4530_50590C.1.pep
MVVAEEEEVHAVEPVDDDDIVGDNSQHNTVDDAGDGNVSVDDGNFADLEEMLRHAECEVVAGSARGLYNFDALKKAAKDLLYDEAKGCEKDFTLLRMVLELMRLKTRNSWSDISFNDLLVLLKKLFPQPNSLPTSTYEAKKLICSLSLGKRKYILLAILLQGPRQPGNDMDVFLEPLLEDMHDLWKHGIRVWDEFLQEYFTLYAVIFVTVNDLPALFSLSGQINXKTGRVICVDGTVHXNISTALLRMVMHQNHGRVIKCQNDKKNVKVVFGKAKKKETNKRKRNDAEVPTSHSGTFKKHSIFSNYLPYWRDLEVRHSVDFMHLEKNVFDSTIRIILDIPTTTKDGLKSLFLAIAIRAIEPVHVKMVITKLCYFFNAISQKVIDPEELGPLRAFAIETVCELEMCFPPSFFDMMQHLIVYIVPQIIALGPLCLHQMWPFERYMSILKGYVRNRAHPEGSMIEGYTTEEVVECCIDYLKDGKAIGLQVPRYEGRLCREGTKGKKRIRDNDYKKVKDAHFTVLQQLAIVEPYIKQHLHELQATNVGRSNA

SEQ ID NO: 150346 - protein, 84 aa, Oryza sativa
  Clone ID: PAT_MRT4530_50591C.1.pep
AFDCIRHTDFCRKKSLCQKLMQAWGDLIHPIHPCHIAVDDITFVKTVSKNGLCFIVTNGTYGGAKLTAHSNVHSTTDYAMVSLT

SEQ ID NO: 150347 - protein, 118 aa, Oryza sativa
  unsure (1)..(118): unsure at all Xaa locations
  Clone ID: PAT_MRT4530_50592C.1.pep
MADACVCVCAGRRGGGGVVSVPFLALIEYXXXXXVEGVIPGAKVENNKFCLSVHFRRVDERRWGAXADQVRAVLLFYPRXRXTQARRVFFFMPAFXWDKGEAXRXXLFXLGFFAAGVV

SEQ ID NO: 150348 - protein, 80 aa, Oryza sativa
  Clone ID: PAT_MRT4530_50593C.1.pep
QATVHDEVLSWDEDVIVVAKEEEEEEEEEEEEEKVHAVEPVDDDDVVGGNGQHSTVDDADDGNVSVDVSNFAYLPEMLRH

SEQ ID NO: 150349 - protein, 109 aa, Oryza sativa
  unsure (1)..(109): unsure at all Xaa locations
  Clone ID: PAT_MRT4530_50594C.1.pep
ERDFFFFALDLGGTNFCVLRVQLGGRNSXVIKQDXKGPIPQHLMSSSSHQLLDFVAAALAIFVASEGEDCHLHEGNQRELGFTFSFPVKQKSLASGTLIKWMKSFAIDE

SEQ ID NO: 150350 - protein, 378 aa, Oryza sativa
  Clone ID: PAT_MRT4530_50595C.1.pep
MVKDLARPRPPLPPRLMSRLTPRKGGRDRAPEAKSGKASAWEFRSRPLDPLPRKWKPTPDPAWPDSLREAVVEGDVCVTGTRYPPALPRCLPWLMAVARLAVACAGSGGLHYAAGACAGQWWLLVKTPSLSSTSSPLRLPRRVSPAPATVRRLRLRAMSKYGTIPTSSSSDGPPPGSSSSSPLDFISRAKARGATALAERRPWRELADPRAASVPRGLGGAYRRARANLGHFSMNYAIVVLAVVFLSLLWHPVSLIVFLACMVAWLFLYFLRDEPLALCGRAVGEGAVLAVLSVLTLVLLLLTGATVNILTSLLVGVVIVLLHAVFHRPADSIDEEAGRYYTPVPPQPSYYGSPGNATSRPGFTVVLAPPLSIMPNSE

SEQ ID NO: 150351 - protein, 1002 aa, Oryza sativa
  Clone ID: PAT_MRT4530_50596C.1.pep
MACLGVLSSGIVWLCLSIIFMILPIAISDEHENDRQALLCFKSQLSGPPGVLASWSNASQEFCNWHGVTCSTPSPRRVTAIDLASEGISGSISPCIANLTSLTMLQLSNNSFNGSIPSVLGLLGQLNNLNLSMNSLEGNIPSELSSCSQLEILDLSNNFIQGEIPASLSQCNRLKKIHLSKNKLQGRIPYAFGNLPKLEKVVLASNRLTGDIPASLGSSLSLTYVNLESNALTGSIPQSLLNSSSLKVLVLTRNTLTGEIPKPLFTSSTLTDIYLDENNFVGSIPHVTATPLPLQYLYLGGNKLSGTIPSSLGNLSSLLDLSLTRNNLTGSIPDSLGHIPTLELLNLNVNKLTGHVPSSIFNLSSLKSLAMANNSLTGELPSNLGYTLPNIKTLILSNNRFKGPIPPTLVNASNLKSLYLRNNSLTGLIPFFGSLLNLEEVMLSYNKLEAADWSFISSLSNCSKLTKLLIDGNNLKGNIPPAIGNLNNLVVLAMAQNNLSGQIPDTIGNLVKLTDLKLSGNIPSSLGKCVALESLEMQSNLLVGSIPKSFEKLVGIWNMDISQNNLTGKIPDFLSNFSLLYDLNLSFNNFEGEVPAGGIFRNASVVSIEGNNGLCARTSMGGIPLCSVQVHRNRRHKSLVLVLMIVIPIVSITIILLSFAAFFWRKRMQVTPKLPQCNEHVFKNITYENIAKATNKFSSDNLIGSGSFAMVYKGNLELQEDEVAIKIFNLGTYGAHRGFIAECETLRNVRHRNLVKIITLCSSVDATGADFKALVFQYMQNGNLDTWLHPKSQELSQGKVLTISQRVNIALDVAFALDYLHNQCATPLIHCDLKPSNILLDLDMVAYVSDFGLARFVYNRLTAHEDTSTSLACLKGSIGYIPPEYGMRKDISTKGDVYSFGILLLEIIIGSRPTDEKFNGSTTLHEFVHGAFPNNIYEVVDPTMLQNDLVATDVMENCIIPLVKIGLCCSVPLPNERPEMGQVATMILEIKHAASNRHVRLS

SEQ ID NO: 150352 - protein, 70 aa, Oryza sativa
  Clone ID: PAT_MRT4530_50597C.1.pep
SPKNRPGPYPNVPDLFLLSPFAFCIASCWLPDFSLLVIPLYLSLLIYKWYVHSGSPYPQPGAPFLFVLHS

SEQ ID NO: 150353 - protein, 445 aa, Oryza sativa
  Clone ID: PAT_MRT4530_50598C.1.pep
MEDLALPAAPPAPTLSFTLLAAAAAVAEAMEEALGAALPPLTAPVPAPGDDSACGSPCSVASDCSSVASADFEGFAELGTSLLAGPAVLFDDLTAASVAVAEAAEPRAVGATARSVFAMDCVPLWGLESICGRRPEMEDDYAVVPRFFDLPLWMVAGDAAVDGLDRASFRLPAHFFAVYDGHGGVQVANYCRKRIHAVLTEELRRAEDDACGSDLSGLESKKLWEKAFVDCFSRVDAEVGGNAASGAPPVAPDTVGSTAVVAVVCSSHVIVANCGDSRAVLCRGKQPLPLSLDHKPNREDEYARIEALGGKVIQWNGYRVLGVLAMSRSIGDKYLKPYIIPVPEVTVVARAKDDDCLILASDGLWDVMSNEEVCDAARKRILLWHKKNAATASTSSAQISGDSSDPAAQAAADYLSKLALQKGSKDNITVVVIDLKAHRKFKSKA

SEQ ID NO: 150354 - protein, 81 aa, Oryza sativa
  Clone ID: PAT_MRT4530_50599C.1.pep
MPAKTFGQIPMPVPMPDGHGHARRPFIGRKFRSALPENRIDAFSPELRYFTVRILKIMGNAVNTPISVCSAIARMAVGKAA

SEQ ID NO: 150355 - protein, 73 aa, Oryza sativa
  unsure (1)..(73): unsure at all Xaa locations
  Clone ID: PAT_MRT4530_5059C.1.pep
VEKKAAEKKPAEETADEKAPANAKKPKAKKRVPTCMAENGGENNNERSMEHAKKSVXTYKIYILMVLKQVHTD

SEQ ID NO: 150356 - protein, 50 aa, Oryza sativa
  Clone ID: PAT_MRT4530_505C.1.pep
QTYRLLATDICCKCVLQELNSRTKTTYMQYLWPSIRGKALYLDYKRSSGR

SEQ ID NO: 150357 - protein, 76 aa, Oryza sativa
  unsure (1)..(76): unsure at all Xaa locations
  Clone ID: PAT_MRT4530_50600C.1.pep
MPPPAALLPGADAAGRGRRRPRRSSPAPTWPXDATARATPPQRRCRQGCHRPRRSSPAPLLSSSSYRVEPARHPPL

SEQ ID NO: 150358 - protein, 172 aa, Oryza sativa
  Clone ID: PAT_MRT4530_50601C.1.pep
MEGDRAAEQEQVQARLYSRSTPSWRARRELRIRSTSSVCSSPGRGRAIIPATTTSTYLPFCGEPTGQACSAAHARSYPTVAGSRQAVHAAFPTAMRAIALQTEIGVFTAFPIIFRMRTVKLCGIQWIPVGHARARQAWARAWGFARKSWRAWVGCERVGLGSGMESLCPCPT

SEQ ID NO: 150359 - protein, 43 aa, Oryza sativa
  Clone ID: PAT_MRT4530_50602C.1.pep
GLPPAQQRLIFAGKQLEDGRTLAGCNIQKESALPLVLRLRGGR

SEQ ID NO: 150360 - protein, 79 aa, Oryza sativa
  Clone ID: PAT_MRT4530_50603C.1.pep
TRPRAEFGTRANGVSSISISKGGAVVRRYTHGACGPDEEGIARLVKQDHRDEKQLTRSYGSLSGSLRRQIPICMLAEWQ

SEQ ID NO: 150361 - protein, 75 aa, Oryza sativa
  Clone ID: PAT_MRT4530_50604C.1.pep
MGAHDVFMTPQHNIVVPKALVNTIDLPENPVLNSSWPRCRSTPYPDREDLRALEGCHHLYTHLKRVNDIQSKRAG

SEQ ID NO: 150362 - protein, 191 aa, Oryza sativa
  Clone ID: PAT_MRT4530_50605C.1.pep
ARGRPFSRFETILAHVWRTMTRARGLGNPLQSSTIRISVDGRQRLSAPAGYFGNLVLWAFPRAAVGDLLGRPLKHAAQVIHDAVARADAAYFRSFVDFASSGAVEGEGLAPTAVLKDVLCPDLEVDSWLTFPFYELDFGGGCPTYFMPSYFPTEGMLFLVPSYLGDGSVDAFVPVFDHSLEAFKQSCYSIE

SEQ ID NO: 150363 - protein, 75 aa, Oryza sativa
  Clone ID: PAT_MRT4530_50606C.1.pep
TRPQIPFIGGLAHIRRLIRFIGCRLCITTNFSIALRPTDLLLTRIYSQVNWINRSSGHPEKSGISPGTMAFKEAC

SEQ ID NO: 150364 - protein, 80 aa, Oryza sativa
  Clone ID: PAT_MRT4530_50607C.1.pep
MIKNGAASLMVRLLHLPRAASAPTYPRRRHHLALLPSLRLRVPAPAAAVAMSSAAAAQEVADQKRALRSEVRRALRAFTS

SEQ ID NO: 150365 - protein, 228 aa, Oryza sativa
  Clone ID: PAT_MRT4530_50608C.1.pep
MGGGPARTKTCEDEEGRGTAAGLRPRARAWEEDLLGGVGTGQIRAAQPDLAVDQPTAGLSGVAAMSGGGGSGVEALAAAKETTGSAPGRRLAGRWPAAASGGRDGDDGKGSEGMASLDDGDKVREDGEMAAGMEGQQWLWLWRWRWRGDGVGEANLATPVADPALEESGGRDDGGDEFAATVARATMVGGLRRVLSKLDDGEKGREDGEMAAGMEGQQRLWWWRPSQR

SEQ ID NO: 150366 - protein, 276 aa, Oryza sativa
  Clone ID: PAT_MRT4530_50609C.1.pep
MASTAAASSPFDCVLFDLDDTLYPGSAGIGLATKRNIDEFLMARCGVTAERAAALRVELFRSYGSSLAGLIALGYDVHPDEYHSYVHGRLPYDRIAADPQLAGLLRSIPQRKILFTNSDRAHMRKALQRLSVDEGCFDAVVCFETMNPHLFGEAPCASGDDRPGVILKPSPDAIVAALRIAGTNPHRTLFLDDSERNIAAGKALGLRTALVGKRVRSKEADYALESIGSLRRAIPEIWGGVAVAAAGEQLDHGAAEKTKGMRSDLDSIIQPTSVLA

SEQ ID NO: 150367 - protein, 44 aa, Oryza sativa
  Clone ID: PAT_MRT4530_50610C.1.pep
LMPLGKSGYDGMFVLGPCHPYFPCFIKDIPFFQIGAFIMVLTFS

SEQ ID NO: 150368 - protein, 104 aa, Oryza sativa
  Clone ID: PAT_MRT4530_50611C.1.pep
MASHLTLRVTGPMVPGGYAPPLAFRVSTPWERRLSGAGQQGNGPARPWSGTVAVARFRFRGLLPCIRYPGRWSARSTRLHVLALHHHCRQHGPVAPTRGKHIFL

SEQ ID NO: 150369 - protein, 49 aa, Oryza sativa
  Clone ID: PAT_MRT4530_50612C.1.pep
MGVLHGDGINTGDNGQQMALHFGVVHGAIVVVDVLLEKGVRLELNHGHA

SEQ ID NO: 150370 - protein, 53 aa, Oryza sativa
  Clone ID: PAT_MRT4530_50613C.1.pep
MAKVREVAAAGAHGRPLLVSVPVAMTELSRSTIGYWVGINQRFAHQVKDAPFD

SEQ ID NO: 150371 - protein, 195 aa, Oryza sativa
  Clone ID: PAT_MRT4530_50614C.1.pep
ANLQKLEKRRRRLLLGTKLTRQVANEVFGPGFHPEKSLEVELNEGSSSNTFEKVNGAQRGRSGSGQEEPDPAALLTTNAGRHQEERRRTLVAAAGCLHALPTAGHRWIRGLHNRCPIAVAIPAAITHNSTRNSPRPPPSPVPAANHSTRSGRNGADLAVTAVAALGSSLDRPSTRRRGEPRRRRRCGRAALPAAA

SEQ ID NO: 150372 - protein, 56 aa, Oryza sativa
  Clone ID: PAT_MRT4530_50615C.1.pep
ALPIIYLHYFVLVRRVCISVKLIVRAFDFALTANSLQLFHINFAFDLLKRKNAYYY

SEQ ID NO: 150373 - protein, 59 aa, Oryza sativa
  unsure (1)..(59): unsure at all Xaa locations
  Clone ID: PAT_MRT4530_50616C.1.pep
RDXHAXXHXXTXXRRVGHRXTGHRGTXXASXPGXXTAXQGTXPRXXLPCGRXPCGPPGG

SEQ ID NO: 150374 - protein, 133 aa, Oryza sativa
  Clone ID: PAT_MRT4530_50617C.1.pep
MPPEHKKTRRAPPSPSLRPRGFAGSRLGDGEAEKGGGGEGRPGRRLPSRPWRGDVRGSLTVRVIPCKLLSFTLLSLATVLCLCAGAAFLLLSPTATNLCASSPDPASCQAIVADAVLASPHSHPSRPAHVLRA

SEQ ID NO: 150375 - protein, 725 aa, Oryza sativa
  Clone ID: PAT_MRT4530_50618C.1.pep
MEGLHKAPRVDERLSAGAPNCFHPEKSLEVELNEGSSSNTFEKTRSTPIFTPIHPVPTRGRSGSGQEEPDPAALLTTNAGRHQEERRRTLVAAAGCLHALPTAGHRWIRGLHNRCPIAVAIPAAITHNSTRNSPRPPPSPVPAANHSTRSGRNGADLAATVRRRREVGERGGRVVASRAAPGGATNAYPCKLLSFTLLSLATVLCLCAGAAFLLLSPTATNLCASSPDPASCQAIVADAVLASPHSHPSRPAHVLRAILATSLDRHDAAAEAVAGMRRRASDPRHRAALEDCVQLMGLARDRLADAAGAPDVDVDVDDARTWLSAVLTDHVTCLDGLDDGPLRDSVGAHLEPLKSLASASLAVLSAAGRGARDVLAEAVDRFPSWLTARDRTLLDAGAGAVQADVVVAKDGSGKYTTIKEAVDAAPDGGKSRYVIYVKKGVYKENLEVGKTKRVLMIVGDGMDQTVITGSRNVVDGSTTFNSATLGQKAVKASIALSGDGIILQDLKVENTAGAEKQQAVALRVSADRAVINRCRLDGYQDTLYAHQLRQFYRDCAVSGTVDFVFGNAAAVLQGCVLTARRPAQAQKNAVTAQGRTDPNQNTGTSIHRCRVVPAPDLAPAAKQFPTFLGRPWKEYSRTVYMLSYLDSHVDPRGWLEWNGADFALKTLFYGEYQNQGPGASTAGRVNWPGYHVITDQSVAMQFTVGQFIQGGNWLKATGVNYNEGL

SEQ ID NO: 150376 - protein, 1103 aa, Oryza sativa
  Clone ID: PAT_MRT4530_50619C.1.pep
MDDITASLAPELLSEILLRLPPDEPGHLFRAALVCKEWLRAICDPGFLRRYRAFHGSPPLLGLLHRRQVLQGDPVRHLARTTAVPLFPDPTFRRALDCHHGRALLHASDDGWYLIVWDPVTGEQHRVPEPGIPWLMYTAAVFCAVSGCPFRVVFVATDDEDELVKASVYSSETGAWSKPAILDYGYQTWQERLQAITRGESYRTPYVQPRRGALVGDEIYFTLRNENAIIKYNWGMNCFSKIDPPIREVYDIALMEMENGSLGYACIQGSSLYMDRIEVDALEDCNVDSESSSDSELDDLILRMHRKEVVHEIKRHLKKSYDFHTSKCTLIIKPKFPTCIYNFYIALMFELSCFLCPNSSLTPSTKYLTVFEDIENLRNYDWSKFIYDWTMTFLKKFFKSNNLGGCLFYWAALYLDHVDFGKKNPGNSTPRIAVWTKNMIQTYSDLDKVDDDNFGLRPLRDFKSVCYYQPHPTAERRISFKEKLDSALGSVLPLSMKEKLCSLMEHHCSEVHAAGSHTCEDVLIDALVLVAEDSVTPSDKVQNDVDDTNTEGCNAVPSRFDDNADVDASIPDDVVVCTPIENDPCVNSFVANGDDVIASGHAAALISSSNRDFDYELLTPKSAFVKKFKYCADHNLAGSASATIAASIHNVAKKFKTRFPELLNQNARDNIIDFSRPSFKLLDSEDDVSSSNDDANNQLNEEDNQAHGDITPPSSLLCKSFRSVPDSIDVIDHNNIRSNENSAGINQISSIFSNRVFQDVTNSPDVVFLGENKFPQTVKESCVKTEEIYNATNNLSRYTHGMSSSGGKLPAHGPRRIIVPSRHASDPFVPAMKRRFLVSDQENRYYIALCRLADSSKWQSYDAVDIDNVRAKFSSFGHSLKKTGVVLPFVMSVFCRFLFQNNHPSKSKKHYFFPSIGAQLILDPDFVDQEKVKKSFLGAASARPLHLCDMLFFPILHGQHWFVLVVDIKDRMLVFLDSLHQPDDEFFEPILPLLLKNLQIVWDKYERTPMNFSTFKIKFPPVPRQEYSFDSGIFSMKFMEIWSPRIILSNQFTGQNINNIRVQYANQMFFHPNNKMLQTEVENVGVNWFDSARFPSNHRAIDA

SEQ ID NO: 150377 - protein, 288 aa, Oryza sativa
  unsure (1)..(288): unsure at all Xaa locations
  Clone ID: PAT_MRT4530_5061C.1.pep
DEHAEPTFTFICLDTLGTVIQRYKIVLPNNGELGTSSTKDVEPKDNKQEGSPEEFKNLQDQIGYVVRHALINXSGVLVNTLTNMIKYVVDGTIVEHQAKGPVFLPEGVFPQYKTLSSDKHRPISGLAPEQPIVSVLAPGKHGASTSAPGQPGFNPHVLVKQQPQHIGQNIPRITPDQVDQPVGSQFVPDQHIHMVHQSPXHHMGGNVNFXYQPHSPXVQYRLGGSPLPQYLPHYNXLDQVQQQFQGVPQQKPLADMIADMMRDQFGLYSDDSSSPHHHHIPHVFIKTG

SEQ ID NO: 150378 - protein, 50 aa, Oryza sativa
  unsure (1)..(50): unsure at all Xaa locations
  Clone ID: PAT_MRT4530_50620C.1.pep
LLQQFGNLNLDRNLAQAQALLALNLPSTKGIXSWSKRAPESKTXLGGVLN

SEQ ID NO: 150379 - protein, 59 aa, Oryza sativa
  Clone ID: PAT_MRT4530_50621C.1.pep
IIMFRWNLLHGISITLMELTKLLFQHSNIKISNNLTSFSVLRSKQSQFQSHTKSAFMYP

SEQ ID NO: 150380 - protein, 159 aa, Oryza sativa
  Clone ID: PAT_MRT4530_50622C.1.pep
MASLGNGAPSFRPPRAPVSAGRLYRCPVCPGPVILYSCQDLRNHLCIIHPNEAVELVTPFMRYIEASRRGRVGLPPRPPTSAPVVPQARMPTPTVQNSFVPLPPNLAFWEEYRKGGSRPVEIDFFVPVIVVSALELVAPAMVSGSNLSDSESSELDILV

SEQ ID NO: 150381 - protein, 63 aa, Oryza sativa
  Clone ID: PAT_MRT4530_50623C.1.pep
PKGFGGPKVKGLKNGPLPMFPMLGFLVQAMVPGKGPLKNLADPLPDPVNNNAWGYPPNFVPGN

SEQ ID NO: 150382 - protein, 71 aa, Oryza sativa
  unsure (1)..(71): unsure at all Xaa locations
  Clone ID: PAT_MRT4530_50624C.1.pep
HQSQLHITPXQGMTTSPEQPSTTEEGSNDSAELPLSHLPLEEGQRRRQQRCKHGRRSGGVDGDACMDGPTT

SEQ ID NO: 150383 - protein, 350 aa, Oryza sativa
  Clone ID: PAT_MRT4530_50625C.1.pep
MAPKCKASFFLCSLLYLLLLVLALYVVALAVSPFYSGSSCLEESLGSGAVAHLTAAGHAGNRRNASSLPVARLKPMPADDAASIGLGHIVFGIGASSELWKSRREYIRTWWWPALMRGFLWLDKPVYEFYGRTGEIDQYPALYGSDDHIRTCMAELGMLQTAALRRLFEGPARLGWCGAAVGVHLSVSGDGELRVHAVEEHAQQLAQRRRGDEAIQTRCNQRRSGLSSTRSEGILFQYGKGTQIVDESHDQDTTDLHKCVAFITENSAIPNKSNLCIFALGALGGRKFYTDNTSSNFRSFVVLYSGNSTLATHAKENIQKQHRLPAAASDLVISPLAAAPCRHKIAKFVG

SEQ ID NO: 150384 - protein, 193 aa, Oryza sativa
  unsure (1)..(193): unsure at all Xaa locations
  Clone ID: PAT_MRT4530_50626C.1.pep
LAGXFFRGNXKXPVGXXXXPGXSXXXTPCRYSSHXKACGSCLXTXLPXICVXLVXPRKQNSXQSNXKSQNLXLSMXVCPTIXCPKGXRLSPLGPKXPXQXXELFESPSTPFSWPXAELPSEGWGLDSALTNPVFRPPFGLAXLVTIGVFLHPPSWFFQKPFNWGSEQGVFGGGAVSPVPKXPQKGTGPEFQKF

SEQ ID NO: 150385 - protein, 134 aa, Oryza sativa
  unsure (1)..(134): unsure at all Xaa locations
  Clone ID: PAT_MRT4530_50627C.1.pep
KTRKXLFRGXDAGTXETSTHVSLYVFQSSDLSLTNWTRNTDPESSVVFQVQMFNVAXXQGGRWFCVRQLQHFVXDQSPRPEEHTKASKTLGRAAXTTFCXGISYSDAWGLHPRGTFAETGTPLPGGYASIYAYQ

SEQ ID NO: 150386 - protein, 143 aa, Oryza sativa
  unsure (1)..(143): unsure at all Xaa locations
  Clone ID: PAT_MRT4530_50628C.1.pep
METIRTTRIVSILVSLVLLGHGDIYGYKYMTPXEEREQNNTQIDIQVRIDTTCRQTSTSEISLDNPIWCIQXADKRDLAPSLISMSSYSGRKITLSSTMCWLSMPPSRQQLDRLSQILYFLAYSLVPTVSIPCNNRSRDLKRR

SEQ ID NO: 150387 - protein, 129 aa, Oryza sativa
  Clone ID: PAT_MRT4530_50629C.1.pep
MASNKVVISALLVVVVSVLAATTTMADHHQEQVVYTPGQLCQPGIGYPTYPLPRCRAFVKRQCDALNHMLRIIYRESGAADAGHPMAEVFRGCRRGDIERAAASLPAFCNVDIPNGVGAVEINFNIAFS

SEQ ID NO: 150388 - protein, 62 aa, Oryza sativa
  Clone ID: PAT_MRT4530_5062C.1.pep
KNSRFPKKLKLNKIFPSGATCHVSYLGLIFGPEITPINQPNFFPLFPIPHWNNYAKGFSPWA

SEQ ID NO: 150389 - protein, 178 aa, Oryza sativa
  unsure (1)..(178): unsure at all Xaa locations
  Clone ID: PAT_MRT4530_50630C.1.pep
MGELLSLSYKLTIKNFCKQKKMASNKVVISALLVVVVSVLAATTTMADHHQEQVVYTPGQLCQPGIGYPTYPLPRCRAFVKRQCVAPGTXDEQVRRGCCRQLAAIDSSWCRCDALNHMLRIIYRESGAADAGHPMAEVFRGCRRGDIERAAASLPAFCNVDIPNGVGGVCYWLPGTGY

SEQ ID NO: 150390 - protein, 246 aa, Oryza sativa
  unsure (1)..(246): unsure at all Xaa locations
  Clone ID: PAT_MRT4530_50631C.1.pep
SRXXAGAAAXRMRAVAXNVTAAGEGCASYITASPLPRVELDRCLGLGSRRSTELGSSRSSRRRRPAGRMGTGTGSDRRERRGAETGGGQWGGRPTSGGRRGEGRRTSPSRPPPSFPPSPRPRTSSRSSSARHGHAPAAATLSPPLLPPPHVSPRRRRASRVEEHGHRHRHRPPPSAAFRSSPRGRRSMPALPQTHRRPWSSLRLPPLHCRCRTAAPGCAAPSSLAGSRPPRAAASPSPGERRGEID

SEQ ID NO: 150391 - protein, 288 aa, Oryza sativa
  Clone ID: PAT_MRT4530_50632C.1.pep
MGGEQGQRVVSASGVDRRPVSRWCSMMAMAKSAQHGIRIVAQQQEAATGGENGHGDGQRPTGEKGRRDRWRPMGRTTDERRQAGRRAAHLTIAAPALVSTVSTATHLVAFELRPPRPRTSSCNAVSSSTTAAACFPSAKAGLTGGGAWPPPPPQAPSLRGIQPRGASSLPPPTPMDAAAAAAPRGVTEWRPSSSSASGGPLGDGAPWSGGEKGGAPLHSHRHAESAGAQSSTAAPASPAAASPRVALPHHAGPSSRSPPSPAILSIPTAAGLLFSTPPRRPSQSTAAP

SEQ ID NO: 150392 - protein, 210 aa, Oryza sativa
  Clone ID: PAT_MRT4530_50633C.1.pep
MGGGGFGEGLAAAGMVVRSARGGTGRSARRQQQRPGAAARQCAARRWRRGRNRGGAGQRREGRGASRGGGGLGRPAWWCGEEEADGCGDGEDGQRRWGWRGWTGVVGKGATRRGYRGRRRRRCARLSVGRLRVAVGMERCADLLPTVPWRAIASRAAEGGGARAPPGDAAWGGGGRRVHWRQRRKGRGPARLRPARRWRWARSSAREAMT

SEQ ID NO: 150393 - protein, 192 aa, Oryza sativa
  Clone ID: PAT_MRT4530_50634C.1.pep
SAGWNGEVGAASTASAGRGGSAVRGQEVAYGGGIGGGAGQRREGRGASRGGGGLGRPARRCGEEEADGCGDGEDGRRRWGWRGWTGVVGKGDTRRGCRGRRRRSRARLSIGRLRVAVGMERCAALLPAAPWRAIALRAAEGGGARAPPGDAAWCGGGGRVHWRQRRKGRGPARLRPARRWRRACSSAREAMT

SEQ ID NO: 150394 - protein, 206 aa, Oryza sativa
  unsure (1)..(206): unsure at all Xaa locations
  Clone ID: PAT_MRT4530_50635C.1.pep
MSVQLTLLFFLLSPRLPSSSISPLLSPGDGEAAARGGRLPAGEEGAAQPGAACGGGLARRRGTGNEGEEGEGSSMGGGGFGEGLAAAGNSVVAGMEVRSARGGTGRSARRQQHRPGAVARQCAARKWHRGEEXGAAPGRGGREGELHGAAVDWEGRRGGVEKRRLAAVGMERMAGEGGDGEDGPAWWGRATRGEAAAGDAGAAVLG

SEQ ID NO: 150395 - protein, 71 aa, Oryza sativa
  Clone ID: PAT_MRT4530_50636C.1.pep
HEAPGQSPPHPESRPPTTPSRCGLRHRQSVAAASPFSPSLPRGISIYKRKKIEVGQKELATCLKRTDHLSA

SEQ ID NO: 150396 - protein, 142 aa, Oryza sativa
  Clone ID: PAT_MRT4530_50637C.1.pep
TPESTNINHRHHTTNIEIKIKEITDITAAHRQRLPDPPPLPPSLGFHGTPPTVGPPGSRGRRTYAVWATASTPSTTSAPPFPLDLAEGRHRRNSHPCQASAATAALPPAGSGEGWAPLGGCHSLCRRCRTLPLPPGEKEKRM

SEQ ID NO: 150397 - protein, 74 aa, Oryza sativa
  Clone ID: PAT_MRT4530_50638C.1.pep
STRGFPFGGVSSLHLCFYLTRSTPFFFWLPNLLWSLLSILICCMLLLCNEANKKSKAELCFRDSKFSYFSYCNM

SEQ ID NO: 150398 - protein, 147 aa, Oryza sativa
  Clone ID: PAT_MRT4530_50639C.1.pep
MDMLLCFVEIFSILCCCIIYYYHLQTKKASASEPTEWPVLGHLFGMFANIHRFHDWATDILAGGWHNFEARAGLTGIRFFITCDPSNVRHIFTSNFANYPKGDEYAEIFDVLGNGIFNADGESWRIQRAKVQMLMAGARFRAFAARS

SEQ ID NO: 150399 - protein, 84 aa, Oryza sativa
  Clone ID: PAT_MRT4530_5063C.1.pep
TFQDGCGLILEVPGKLLFSVWFPKSWFLGLLVSCSLLRVSCCLSAQSLARFNCELCFPCFCHPCVEDTKMFAGNPSRKMPIWLF

SEQ ID NO: 150400 - protein, 136 aa, Oryza sativa
  Clone ID: PAT_MRT4530_50640C.1.pep
MQAVRTLVLRHLRLACRRAPPSAAACGGARPAVYRVVGVAPGHRGMAASAGQEGGPPRDFSEGAVRARVVELVKKFDRIDADKVTETADSLWDLSLDSLDRVELVMAFEQEFSVEIPDDKADKLSCCADVAKYIIS

SEQ ID NO: 150401 - protein, 72 aa, Oryza sativa
  Clone ID: PAT_MRT4530_50641C.1.pep
RPPRDARLPLATPSTTRRSFQIMHHSTPSHQQHIALHHQQHTGNITSTPSSASLCNLFVCQSLCTPQQHTIT

SEQ ID NO: 150402 - protein, 89 aa, Oryza sativa
  Clone ID: PAT_MRT4530_50642C.1.pep
MADGLTKYYLCCNIYASRLALCYNDLVHFRNRGSMSNVSFSKRCKDSSTTRYHVDPTDPRKNVNLAAAAIVQLHAHKDTSHLGADVTIR

SEQ ID NO: 150403 - protein, 407 aa, Oryza sativa
  Clone ID: PAT_MRT4530_50643C.1.pep
MGSKRRVILLPTLGVVVLAIAAAVLLHAGEAADVANGQFARASGTRFTVGGRPFYSNGFNAYWLMYMASDPGDRSKAAGVLQQAASLRATLVRTWAFSDGGYRPLQKSPGVYNEDMFMGLDFVIAEAKKRGLYLILSLVNNWDGFGGKKQYVQWARDQGHNLGSDDDFFRSDVTKQFYKNHAVLTRVNKITGVAYKDDPTIFAWELINEPRCQSDLSGKTLQAWVTEMAGYVKSVDPNHMVEIGLEGFYGESMHKNFNPGYTVGTDFIANNLVPAVDFATIHSYPDQWVSGASSDEQVAFMRKWMADHIRDSAAVLRKPLLVTEFGWSARSNGYTVAARDAYFRTVYDAVYASAREGGACAGGLFWQVMAPGMESWTDGYEVVLERSKSTADVVAHQCARIAGLSPA

SEQ ID NO: 150404 - protein, 203 aa, Oryza sativa
  unsure (1)..(203): unsure at all Xaa locations
  Clone ID: PAT_MRT4530_50644C.1.pep
NCSFISGIKNRRTLSTNRPLTAKTAYDLSFLGLXDDLFAKPIWDNHAQVKCKIFLCTTHKRRIFTNERQARCGLVASARCPFCSSVKDVEHLFLRCTGVATIWHTFGLDEQQIASLPQLEGVWDIPPPRQPATPRVWRSILLAVMWNIWKRHNNKVFNSLDEPAKLVLRRCASDIDIWSHRCKNVKSKQXLRKWALYLFVINS

SEQ ID NO: 150405 - protein, 91 aa, Oryza sativa
  Clone ID: PAT_MRT4530_50645C.1.pep
CLEKDKKRTTNIPITSNNIDKLHVFSHCRSMCFFFCQSEPEEVGAQHTRQHDTIQPRQLIAKVSREQTSGDYVALGHVNSDHNILILEHFI

SEQ ID NO: 150406 - protein, 173 aa, Oryza sativa
  unsure (1)..(173): unsure at all Xaa locations
  Clone ID: PAT_MRT4530_50646C.1.pep
IPIYLLVAINAPKWVTKGIHKVRXGFLWAGKANAHGGCCCVAWAKVCAPKEYGGLGVPDLERMGIALRSRWAWLQRTSLDKPWQGLNIPISPKERSFVAASTVCIEDNXLEGYSVRSFAPAVYNCVPEVXHFKRRKTIVEALQGRRWVRDIYGAGSSRICMTDLLEHKSNPAE

SEQ ID NO: 150407 - protein, 407 aa, Oryza sativa
  Clone ID: PAT_MRT4530_50647C.1.pep
MTSSGGAGCSRSHSFSGISSAAATGGAGAGADVFVRAADNEMYVRADKIDLKNLDVQFEKTRSKVWLEQHRSSSAASPLPLLEWEIDLAKLDIQNQVAHGTFGVVYRGTYDGHDVAVKVLDWGQEGQESTAKHREAFEKEVAVWQKLDHPNVTKFVGASMGTSHLKVPSAKAESRSSSVGGGSAGGGGGQRCVVVVEYQHGGTLKTLLYKHRDKKLPYKKVVQLALDMARGLRYLHGEKIVHRDVKAENMLLDRKKTLKIADFGVARVEAGADGDDMTGQTGTIGYMAPEVLQGRAYDHKCDVYSFGVLLWETYCCAMAYPNYSLADISYHVDKLGIRPDIPRCCPKAMADIMARCWDANPDNRPEMSEVVALLEKIDTSRGKGGMTPVPEHASQGCSCFGFSRGSA

SEQ ID NO: 150408 - protein, 115 aa, Oryza sativa
  Clone ID: PAT_MRT4530_50648C.1.pep
MAAAANLEDVPSMDLMNELLRRMKCSSKPDKRLILVGPYASSGLPSSSFPPFSFFLLPRSKICDMEKPLIVIRVNQVEVRVDLVPRVELFRSSRFLAVVLMDYFGNECLFDGLIF

SEQ ID NO: 150409 - protein, 91 aa, Oryza sativa
  Clone ID: PAT_MRT4530_50649C.1.pep
LQIRNTQVIWAPNWVHPVNQLVCYVQPTVQILPNSFVEQKYNFWQSNEDTLTNQNALASPVWNRPMTLLITCSSKQKYKSCSVDRSERRGR

SEQ ID NO: 150410 - protein, 239 aa, Oryza sativa
  Clone ID: PAT_MRT4530_5064C.1.pep
MAAEISAPVSISSGRFPSLPTLFNPPPCLSPPFPPLAARSLRRIRARAVLLSLRRRRRAPVCRRRRSGLPPDSASPPSASPRPRRPRPRLRFTRRPPEHRRPRRPEPRRRLPPLRPSFPPPSSSRGEPWTAPLASPFPPLSRVPLRRAVGRRRRPSGRGRVPSRRPCRRGRLRARPAAAMWGPAVSRPRLRVRLTRGTHGAGRRQPRAPGPPWTERLTRGPHSRGPGPRALSPGLFTLE

SEQ ID NO: 150411 - protein, 329 aa, Oryza sativa
  Clone ID: PAT_MRT4530_50650C.1.pep
MSSPVASSRVAAGAGAARRSSPSPGPRPAAGSSVVRDKDATTMMRRRLYQQQHPPSSSGAREPGVPSMLLRRAAGGGGGGPRSLNVSCASEASNDSFCSRASTGRIGRRPVIPDHDIVTDPCYAAFHDHEWGVPVHDDKKLFEMLVLSGALAEMTWPAILSKRETFKEVFMDFDPLLVAKLSERKILGPCSPARSLLSEHRLRIIIENAQEVLKVIEEFGSFDNYCWGFLNNQLLAVRLSKPRKVPMQTPKADAINQNQLRRGFHCVGSSVIYDSLQFVGLANGNLVTRFGFGGALSESSWTETPATAAMDGDDNNSKSIVKVPEVSMI

SEQ ID NO: 150412 - protein, 141 aa, Oryza sativa
  Clone ID: PAT_MRT4530_50651C.1.pep
MEGTRRHLEKDLEPWMIIEDVQVKVEGQTKSTLVGRLHSTGILDGSDETNLSETAPTRKNFNSSWAIPSCATVNPTAGQPDTPVDPTPLRPSSPPVPRKGSSYTTSQAVTRFRLWKFCGMLMTTAISKEAIAQCFFVDSFL

SEQ ID NO: 150413 - protein, 59 aa, Oryza sativa
  unsure (1)..(59): unsure at all Xaa locations
  Clone ID: PAT_MRT4530_50652C.1.pep
VELYQNRRPLQLEKRATRALLNGQSSLDTASHENGYNAVDVXSTAEKRASPKDGPSIDC

SEQ ID NO: 150414 - protein, 52 aa, Oryza sativa
  Clone ID: PAT_MRT4530_50653C.1.pep
FTYIYSRIMVNHKNSFSFIIHNSVENAYRCAILQALQKQYYLPRAQRVYINA

SEQ ID NO: 150415 - protein, 637 aa, Oryza sativa
  Clone ID: PAT_MRT4530_50654C.1.pep
MDGRIWHPGVQIQRALDGFAEAGIDGEGWLQRRRRGGCSGGDGAVEARVGAPPPLPRVGVVFFPPQPAPLASAASPESKPPPPLSRSHRTAPILSLLLSPPFYSPRKGGGRMWSSSQASTRGVIEVGRVEAGPSHFPKRPAPRNSSRVNLSRTYAIKSCSVSSRTGLCLGQCYHKKSSACKCKLGWSSQPLSSLRHHLRVHSSASEAVLTSQSDFTKLLVGNEKIGVLLLNLGGPETLDDVQPFLFNLFADPDIIRLPRLFRFLQKPLAQFISVVRAPKSKEGYASIGGGSPLRQITDAQAEALRKALCDKDIPAKVYVGMRYWHPFTEEAIEQIKRDGITKLVVLPLYPQFSISTSGSSLRLLEGIFREDEYLVNMQHTVIPSWYQREGYIKAMATLIEKELRTFSEPQKVMIFFSAHGVPLAYVEEAGDPYKAEMEECVDLIMEELEKRGITNSCTLAYQSRVGPVEWLRPYTDETIIELGQKGVKSLLAVPISFVSEHIETLEEIDVEYKELALESGIKHWGRVPALGCEPTFITDLADAVIESLPYVGAMAVSNLEARQPLVPLGSVEELLAAYDSKRDELPPPVTVWEWGWTKSAETWNGRAAMLAVLALLVLEVTTGEGFLHQWGILPLFH

SEQ ID NO: 150416 - protein, 107 aa, Oryza sativa
  Clone ID: PAT_MRT4530_50655C.1.pep
MTTQLTNIETCRGNQGGGVGLSVLAGRSQRLTILSRASIDAIAFTYIRADGKEHLPRPCRGRRGNPTTITLPSQQLLKGNSGTFTNGLTNLKLDTNGTTYNYRQGGR

SEQ ID NO: 150417 - protein, 94 aa, Oryza sativa
  Clone ID: PAT_MRT4530_50656C.1.pep
MWVDAVPQAGARAQCVGGGRGGTGDPSWRVRERGAEEVDGARRVTHRGPNHRQRVAGDGKYGGGLGFVVATGFRWDSVPKKWRPSYGVQRRSRR

SEQ ID NO: 150418 - protein, 171 aa, Oryza sativa
  Clone ID: PAT_MRT4530_50657C.1.pep
MVEPWEDKRNRGQYSGVLVYCYDAGRGLVHAQTRAAGEGEASPPSSAKNKATSMMAFAVSRALETSNRNNYQGGKAGWARGGSKCMHADAGAAPRHRRGPRVRQLVQVQAQLVAARTRRTQQRPAPRRPSDGESQQPSSGPRCLCILLRATPSTVQVNTRACKCTHGVGIL

SEQ ID NO: 150419 - protein, 71 aa, Oryza sativa
  Clone ID: PAT_MRT4530_50658C.1.pep
NKKNKLNEGIKKKNNRPSKEKIINLKCKNNILFIIFLVYTTPTRSTSRRTKTILHNPKTTNSMATNPSNRN

SEQ ID NO: 150420 - protein, 172 aa, Oryza sativa
  unsure (1)..(172): unsure at all Xaa locations
  Clone ID: PAT_MRT4530_50659C.1.pep
MMTSIAWXRCVVYGLRRLGDDAXVPGNSDEMAYDVAGASDALRAPSSGTPAGVLLEQPADEFEEDGNVDESERTSVMSRRGGCDREGDNVQRLGDITRRRGIEVAAGEARTSWQQRSLFSMIPSVLRRPISFPSWNDTEGSFSSYSRIYAQSVHGEASIRNQLPANDLIIAL

SEQ ID NO: 150421 - protein, 2053 aa, Oryza sativa
  unsure (1)..(2053): unsure at all Xaa locations
  Clone ID: PAT_MRT4530_5065C.1.pep
RPTDPWYKRDPPGGPXGIESHCQHNHHSLRNPRTSVPXYPLYSVYGYPPSTVARQVGVLGAQGSTTISSSFVDNSVNPGINQGVPTSTMLVWTQVGEIVFPVYTTVPISTGPSMTGNENTVVTTLGDSMSKDPPAEVENGTSTTSESEKDPSAAKSCPSDKNHEPTRTTSEATRFWCPIHKTKKHTLQACWVFLDVQAEIRACKERGIQRTSSTRDVYCPIHKTKNHDLSSCKVLLSAMRTSLPKVQQSQISLRDADKERGVTVISDRFVGVIDIDPHELSVLHLLEDQGSSSTSTPRDVFAIDGTRTFARANVEAEDQVTTPAQHIGAINAILRETPYDPVLNDDLARWTERLRESVANLSNAFKEAAAEAQPEQPPAGEPPEQRTSRXQATPPPRGTSDLRDHLNGRREARRARDNENRSRHRISSXRRGNGDNRHSRHERDDREQRMPGDTGRGRRHNDDDDGDQHRDNNGERRQDSREPGRHPRNRTPESSDSSSSSSSSSSSSSDRHSRRTYDRRQPTAPGGGCRAFSRALRDVRWPERFRPGAIKKYDGSTDPEEFLQVYFTVLYAAGADDNALANYLPAALKRSARSWLVHLPPYSISSWADMWQQFVANFQGTYKRHAIEDDLHTLTQNPGESLRDYVRRFNECRNMIPKITHASVIHAFKTGIRDRYTTQELATRRITTARKLFEIVDRCTHADDALRRKNDKLKTGGEKKPAKDAPESSKKKSRKSGKRKAQKEVLAAKYADPPKHPDPQGNDTKKIWCPIHKSDRHSLEDCFLFXKSLAKQLALEKGKQVRVVEKAAEAATQDSDSAYPDSDLHVSHIFXVLRRRYPIVVEPTIRNIKVXRVLIDGGSSINLLFASTLDAMGIPRSELTPTYQPFHGITPQSSSKPLGKITLPMTFGXANYFXTKQITFDVAEFDTTCNAIIGRTTLAKFMAASHYAYQVLKMPGPNGTITVQGNTKLAVQCDKRSLNMVEHTPNPPATAEPPKKVSKTNKTPKPDGAIKIVPLSSANPDKTELALITFLRDNTDVFAWQPSDMPGVPRXVIEHKLIVRPDAKPVKQKLRRFAPDRKHAIREELDKLLKAGFIREVLHLEWLANPVMVWKVNGKWRMCVDFTDLNKEYPKDHFPLPXIDQLVDSTAGCELLSFLDTYSGYYQISMXEEDEEKTTFITLFGVFCYVKMPFGLITAENTFQRTVQGALNNQLGNNVEAYVDDIVVKTKTSDSLIDDLRETFDNLRRYRLMLNPEKCTFGVPSGKLLGFLVSGRGIEANPEKIKAIENMKSPTRLKEVQKLTGCMAALSKFVARMGERVQTFFALLKKQDKFVWTQEAEEAFIALKRYLSNPPVLVAPQPNEELFLYIAATQYSVSTIIVVEREKVQRPIYYVSEALHDAKTRYPQIQKLLYAVIMTSRKLSHCFQAHRVTVVSFFPLGEVVRNKDVVSRIAKWVVELSQFDVYFVPRTTIKSQVLADFVADWTMPQNRSNSQTEDETWTMAFDGALNSQGAGAGFILTSPSGDQFKHAIHLNFRATNNTAEYEGLLVGIRAAAALGVKRLIVKGDSELVAKQVQKDYKCYSPELFKYLAEVRKLKKRFDGIEIXHVYRKNNIEPDDLARRMSRREPLEPSTFLDILTKPSVKEANGEDSTVVPDISSGAIEAEHVVADIETTXTXRTPLIKFLSSDELPEDDAEAEKITRQAKIXCMIGNDLYKKAPNGVLLKCVSFDDGKHLLIDIQEGICGSHAAGRTLVGKAFRQGFFWLTALKEACDMETRKATSASAPDYLSYFLVLGARHTRTIPTRTGRLQVPIXVAIDKFTKWIEATLTGEIKADNAIKFIKGIFCRYGLPHRIITDNGSQFISADFQDYCIGLGVKICFASVSHPQSNGQVERANGIVLQGIKTVLWAVRTTPTTSNKETPFFLMYGSEAMLPTELRHQSTRVQKYSDEDQKEQRNDDVNLLEEHRERVAVRAASYQQALRXYHEKRIRARTLSIGDYVLXRVQSQAWRNKLSPKWEGPYTITQVLRPGAFKIAYGDGRELVNSWNIDQLRNVIM

SEQ ID NO: 150422 - protein, 135 aa, Oryza sativa
  Clone ID: PAT_MRT4530_50660C.1.pep
MDTLRGREVWFNSYLKSCCTAMAEVCKELRVPCGDPEESVAGYISWMKGACAQLDGIGKRINEALKQECRRASRYAGGHVLACIRDHRPQLNLEFLREGFSSSRRTPAEIDGLAQSMAPLAEKVYRSMDWRWPSW

SEQ ID NO: 150423 - protein, 101 aa, Oryza sativa
  Clone ID: PAT_MRT4530_50661C.1.pep
CTMWVSAPPPLVASVTRRPSMWFSPSQECSLSLDLLLPATLLTLAAITSCIAWVHMERCAPLKSDIDDDSSRLLFRDTVWDLSLSFLFMFGTRCLSRGSLV

SEQ ID NO: 150424 - protein, 109 aa, Oryza sativa
  Clone ID: PAT_MRT4530_50662C.1.pep
NSFLNPPLLYMGGLFSSIWGGILSHVDLFYIKKIPLKRIHDEMRTSPANNLDGMRFILHSSTNLSDLSKTTYGIKTVTDKREEIIAHILLSTTGRTPNSHRLNLESARV

SEQ ID NO: 150425 - protein, 84 aa, Oryza sativa
  unsure (1)..(84): unsure at all Xaa locations
  Clone ID: PAT_MRT4530_50663C.1.pep
SSHRMLTXYEEGIADDVGRLTIFPSELKLVTSCADGFELLVCFXFLYKGLLYCGRVTNVRLRDVMYSVHRCKLPGRSYYLGMKI

SEQ ID NO: 150426 - protein, 241 aa, Oryza sativa
  Clone ID: PAT_MRT4530_50664C.1.pep
LAYSGLLEYLKEKLDGHTFLDVSQLLQKALTQESRVKEAKISQKVKSDCAHVNIVDQQESLNKETVDVYIHKWVLNSNSKPSVCSALKLVDELPFPIQTVELQEKEIPDGKEKTTLKTSILSVKWARGIIRTGFRAVTTCRLPLTNPWDTQQTKVLTVRYYDLRTVNTISIELDRPVTGHRRRDGGSAPTFRPVSGGVGAGDSMSRESIYGDGPGVGLGIRRRPLWSEIMRDTKARVDARG

SEQ ID NO: 150427 - protein, 512 aa, Oryza sativa
  unsure (1)..(512): unsure at all Xaa locations
  Clone ID: PAT_MRT4530_50665C.1.pep
SAEHAAGRRRSSATVPLGAAITVSCTATTTVRRQWRRLGVRLGFRSLGFLHIYQKLYSDHYDNVPYHQGFRLPXMCKFIGEDGQSTIEDIDQFIIQCEEASASILKLSLFALSLFGDAFTWFISLAPXIHDWSKLEXKFRDYFFSGETELNLSYLTLVKQKYNEPAFEYIRRFRYTRNRCYSLTLSDKDLVDLAYSGLLEYLKEKLDGHTFLDVSQLLQKALTQESRVKEAKISQKVKSDCAHVNIVDQQESLNKETVDVYIHKWVLNSNSKPSVCSALKLVSRKNQQEEIKFTFDVAKCNRIFEXLLVKEXIKLSHGHAIPSLEXIERRAYYKCHNSNSHATNDCNVFHRQVQSAIDEXRLTFTKMQVDELPFPIQTVELQEKEIPDGKEKTTLKTSILSVKWARGIIRTGFRAVTTCRLPLTNPWDTQQTKVLTVRYYDLRTVNTISIELDRPVTGHRRRDGGSAPTFRPVSGGVGAGDSMSRESIYGDGPGVGLGIRRRPLWSEIMRDT

SEQ ID NO: 150428 - protein, 66 aa, Oryza sativa
  unsure (1)..(66): unsure at all Xaa locations
  Clone ID: PAT_MRT4530_50666C.1.pep
SRSRTRLAAAAAMATSGLRELSDVGVPSPHGQPGANNSLXHXKKCTPFTGICIATEPMSSHTPIIN

SEQ ID NO: 150429 - protein, 55 aa, Oryza sativa
  Clone ID: PAT_MRT4530_50667C.1.pep
MAKNDGGCAWASEVATGRASFSPLDLPPLFVFLDVDGGFVPVVAADAEDDTRAVR

SEQ ID NO: 150430 - protein, 245 aa, Oryza sativa
  Clone ID: PAT_MRT4530_50668C.1.pep
MFGPARGAVGRGSRLACVRARAYVCFGTIAMAKIRGNAKAKPSRGHRLSGRRTFTSVAVAAPAPMSESKTMFDAPRWMSRTTIYTGKTSSLLVQLPQSFHCDYGSMPYTDSLDAVAACLRPREMPCYYYSRLIINQLGCVGENGRNGSDQIHEPCGMRKKPAEGNGLLTLSQASAFWSIDVRFQRSVLRAPCFVLGPPKPKLTCFIRTHSGMILVAGFWSPEFSSFRTLFPQLYSVENFLLGNLH

SEQ ID NO: 150431 - protein, 109 aa, Oryza sativa
  Clone ID: PAT_MRT4530_50669C.1.pep
AAGIRHEATDLKNKFATPRRSFIEDSGGTEVDDLDIIPNEEMLLILSEKGYVKRMKPNTFNLQNRGTIGKSVGKMRGNDNTSDFIVCQTHDHVLYFSDNGIVYSARAYK

SEQ ID NO: 150432 - protein, 333 aa, Oryza sativa
  unsure (1)..(333): unsure at all Xaa locations
  Clone ID: PAT_MRT4530_5066C.1.pep
LFPPPPSFLGRLGPVPPSLSLFPRGPSASPRARAADRRARPPLSLTGGTHLSSPSSRRVLRRARAPRDPLSRFPRFPLSLSLGSVRIHPVILAGDIYGARDPRAXFPSSPAAFSPSRCYIIAPRAPLFRFRRSPLALAVGIVLAPCSSLSAVAAELRSAAAAAPVFLLTRRHLHPLRRVVADPVRRSASPADRRSTVVIVIPSHAAAFLHSGRRSRRRRCPGVSRGPPFAFPLPSSLSGAAPPRRWSPAVTIGARARRSRRPRRRGRPRARPRGCQVDPAVSRPRPRVRLTRGTHGADRRQPRAPGPPWTVGLTRGPHFPWTRSARPLPRLTQ

SEQ ID NO: 150433 - protein, 56 aa, Oryza sativa
  Clone ID: PAT_MRT4530_50670C.1.pep
IYKGYLHQLVTERGKAETVLQNFTKNSLNFWGVKRELMARKKIEPCLPSALYPKKG

SEQ ID NO: 150434 - protein, 50 aa, Oryza sativa
  unsure (1)..(50): unsure at all Xaa locations
  Clone ID: PAT_MRT4530_50671C.1.pep
SRFFWRTPAIMRAWKKHNPINSDDPEREPGTPGCGPTLQWPXRXREAQIP

SEQ ID NO: 150435 - protein, 70 aa, Oryza sativa
  Clone ID: PAT_MRT4530_50672C.1.pep
LSQQCTRGGVTHSLSVDHLLSCPPLSVLRPVSATSLEAFCMHSAGSCLSQSLAYMKTPRRRTSSVTSKSS

SEQ ID NO: 150436 - protein, 105 aa, Oryza sativa
  unsure (1)..(105): unsure at all Xaa locations
  Clone ID: PAT_MRT4530_50673C.1.pep
SRIEYLLRSKWCPWLRVQQVRDCVFTRENHRSRGYLRRRYWXTMWNLXMFRVTDATQVLKEXLEEAKKAYPDAFVRIIGFDNVRQVQLISFIAYKPPGCEESGGN

SEQ ID NO: 150437 - protein, 149 aa, Oryza sativa
  unsure (1)..(149): unsure at all Xaa locations
  Clone ID: PAT_MRT4530_50674C.1.pep
AAPPTSGFGNCHQCRKDQVISLPIEAIKKFETLSYXPPLTVEDLLXQIEYLLRSKWVPCLEFSKVGFVYRENHRSPGYYDGRYWTMWKLPMFGCTDATQVLKELEEAXKAYPDAFVRIIGFXTNVRQVXQLISFIAYKPPQVARSLVAN

SEQ ID NO: 150438 - protein, 150 aa, Oryza sativa
  unsure (1)..(150): unsure at all Xaa locations
  Clone ID: PAT_MRT4530_50675C.1.pep
MAPSVMASSATTVAPFQGLKSTAGMPVARRSGXNSSFGNVSNGGRXIRCMQVWPIEGIKKXFETLSYLPPLTVEDLLKQIEXYLLRSKWVXPCLEFSKVGFVYRENHRSPGILRTAGTGTMWKXLPMFGCTDATQVLKELEGGPGTQFAL

SEQ ID NO: 150439 - protein, 875 aa, Oryza sativa
  Clone ID: PAT_MRT4530_50676C.1.pep
MGSACEAGTDEPSRDDVKGTGNGILENGHSHKPEEEEWRNGMGEDLPNGHSTPPEPQQTDEQKEHQVQIVRWERFLPVKTLRVLLVENDDSTRQVVSALLRKCCYEDSRGFCASRFPSAVIPAENGLHAWQCLEDLQNHIDLVLTEVVMPRLSGIGLLSKITSHKICKDIPVIMMSSNDSMGTVFKCLSKGAVDFLVKPIRKNELKNLWQHVWRRCHSSSGSGSESGIRTQKCTKPKVDDEYENNSGSNNDNEDDDDNDEDDDDLSVGHNARDGSDNGSGTQFSLNVGQLCQCILMPSACFKTQSSWTKRAVEIDSPQQMSPDQPSDLPDSTCAQVIHPTSEICSNRWLPTANKRSGKKHKENNDDSMGKYLEIGAPRNSSMEYQSSPREMSVNPTEKQHETLMPQSKTTRETDSRNTQNEPTTQTVDLISSIARSTDDKQVVRINNAPDCSSKVPDGNDKNRDSLIDMTSEELGLKRLKTTGSATEIHDERNILKRSDLSAFTRYHTTVASNQGGAGFGGSCSPQDNSSEALKTDSNCKVKSNSDAAEIKQGSNGSSNNNDMGSSTKNAITKPSSNRGKVISPSAVKATQHTSAFHPVQRQTSPANVVGKDKVDEGIANGVNVGHPVDVQNSFMQHHHHVHYYVHVMTQQQQQPSIERGSSDAQCGSSNVFDPPIEGHAANYSVNGSFSGGHNGNNGQRGPSTAPNVGRPNMETVNGIVAPFLGLKSTAGLPVSRRSTNSGFGNVSNGGRIKCMQVWPIEGIKKFETLSYLPPLTVEDLLKQIEYLLRSKWVPCLEFSKVGFVYRENHRSPGYYDGRYWTMWKLPMFGCTDATQVLKELEEAKKAYPDALVGIIGLENVRQVKLISFIAYKPPG

SEQ ID NO: 150440 - protein, 104 aa, Oryza sativa
  unsure (1)..(104): unsure at all Xaa locations
  Clone ID: PAT_MRT4530_50677C.1.pep
QNRQWRIQDFKVGYSRLSAEPLAAPAPRGRRPPNRPDRLSLAEWRAPAAALHGSTVQLPLPVTSSPRRRLGXGERREGAEPGRDGSRRESERGPSRRVVAKWVN

SEQ ID NO: 150441 - protein, 135 aa, Oryza sativa
  unsure (1)..(135): unsure at all Xaa locations
  Clone ID: PAT_MRT4530_50678C.1.pep
MAPSVMASSATTVAPFQGLKSTAGMPVARRSGNSSFGNVSXNGGRIRCMQVWPIEGIKKFETLSYLPPLTVEDLLKQIEYLLRSKWVPCLEFSKVGFVXVRTTDSPXYYDGRYXWTMLEACPCFGCTXATQVLKE

SEQ ID NO: 150442 - protein, 142 aa, Oryza sativa
  unsure (1)..(142): unsure at all Xaa locations
  Clone ID: PAT_MRT4530_50679C.1.pep
SHAARIRSIQVCRLRAIKKFETLSYLPPLXTVGGPLCKQIEYYLRSQXWCPCLEFSKVGFVYRENHRSPGYYDGRYWTMWKLPMFGCTDXATQVLKELEEAKKAYPDAFVRIIGFXDNVRQVXQLISFIAYKPPGCEESGGN

SEQ ID NO: 150443 - protein, 353 aa, Oryza sativa
  unsure (1)..(353): unsure at all Xaa locations
  Clone ID: PAT_MRT4530_5067C.1.pep
SCSPDALSRKGYCNATEGRQLPLELCKEFERINLGMVRRGFVAALEAKPTLIDQVREAQINDPDIQEIKKNMRRGKAIGFLEDEQGTVWLGERICVPDNKDLKDAILKEAHDTLYSIHPGSTKMYQDLKERFWWASMKREIAEHVAVCDVCQRVKAEHQKPAGLLQPLKIPEWKWEEIGMDFITGLPRTSSGHDSIWVIVDRLTKVAHFIPVKTTYSGSRLAELYMARIVCLHGVPKKIVSDRGSQFTXKFWKKLQEEMGSKLNFSTAYHPQTDGQTKRVNQILEDMLRACALDFGGSWDKNLPYAEFSYNNSYQASLQMAPYEVLYGRKCRTPLLWDQTGERQVFGMDIRRS

SEQ ID NO: 150444 - protein, 176 aa, Oryza sativa
  unsure (1)..(176): unsure at all Xaa locations
  Clone ID: PAT_MRT4530_50680C.1.pep
MAPTVMASSGTSVAPFQGLKSTAGLPVSRRSTNSGFGNVSNGGRIKCMQVCPIEGIKKFETLSYLPPLTVEDLLNQIEYLLRSKWVPCXLEFSKVGFVYRENHRSPGYYDXRYWTMWKLPMFGCTDATQVLKELEEAKKAYPDAFVRIIGFDNVRQVTLISFIAYKPPGCEESGGN

SEQ ID NO: 150445 - protein, 175 aa, Oryza sativa
  Clone ID: PAT_MRT4530_50681C.1.pep
MAIVDNENLLSQNMRGYSLDKNKRGLRNSVRLSTCTGRRQSSFWERDCSASVLHGIVFFLYIDSLLCFVYFHYFNISIGGGAGGGGGKDTGEGENVNINGGNNTNNASSSTKAFSGTPFQLVTILFFKQRSPLACPVPMEDLDFQRNSKLPNELYVIVVTYNKGEWRIGRVYDPL

SEQ ID NO: 150446 - protein, 123 aa, Oryza sativa
  unsure (1)..(123): unsure at all Xaa locations
  Clone ID: PAT_MRT4530_50682C.1.pep
PGXXGIKLTFTPXPGGLRRNGTFRSKGGPPLEFTKVDFLPGGTKIPGNKVXEMDKGEVPKLGGXEPTQVSRESEGAQEGVTLEHSSVSSVSTKSGRCSSSAFIGQQAPGLRGVWWQLSRHRHI

SEQ ID NO: 150447 - protein, 86 aa, Oryza sativa
  Clone ID: PAT_MRT4530_50683C.1.pep
APVWVQISFLFFNQRCFFPLIQTLRFLYLLLSDLSFAAFQSYKCIPFILSFFVPFFSTFLVFFFAKKLNRDRWVILHQFSTQSLSY

SEQ ID NO: 150448 - protein, 175 aa, Oryza sativa
  Clone ID: PAT_MRT4530_50684C.1.pep
MAPTVMASSATSVAPFQGLKSTAGLPVSRRSTNSGFGNVSNGGRIKCMQVWPIEGIKKFETLSYLPPLTVEDLLKQIEYLLRSKWVPCLEFSKVGFVYRENHRSPGYYDGRYWTMWKLPMFGCTDATQVLKELEEAKKAYPDAFVRIIGFDNVRQVQLISFIAYKPPGCEESGGN

SEQ ID NO: 150449 - protein, 214 aa, Oryza sativa
  Clone ID: PAT_MRT4530_50685C.1.pep
TFPKLHYMNWKNAENKNGTQIGMLARQSGKLQSIGGRLILFNSSLSNVPLYMISFYRLPQGVRERLDFYRRRFLWQEDQGIRKYHLVQWPVVCSPKDQGGLGILDLETMNKALLGKWIWRLENEEGWWQSFLTSKYMGCKPISLLKFKNGESHFWHGLMEIKNIFLKFCSRVIGNGEKTLFWEDSWIGGKPLNEQFPNLYNITLTKHINCGKLK

SEQ ID NO: 150450 - protein, 318 aa, Oryza sativa
  Clone ID: PAT_MRT4530_50686C.1.pep
MDALSAQPAWALALAGVGLMVAATASARLARWLYAAFLRPGKPLRRRYGEWAVVTGATDGIGRALAFRFAGAGMSLVLVGRSPDKLAAVSGEIRGKHPRAEVRTFVLDFAAEGLAAKVAALGDSIRGLDVGVLVNSAGMSYPYARYFHEVDEELMRNLIRLNVEALTRVTHAVLPGMVERKRGAIVNIGSGASSILPSYPLYSVYAATKAYVDQFSRCLYVEYKNKGIDVQCQVPLYAATKMASIKKASFFAPSPETYARAAVRYIGYEPRCTPYWPHAVLWFLISAFPEPIVDRLLLNMSVGIRKRGMAKDARKKTQ

SEQ ID NO: 150451 - protein, 93 aa, Oryza sativa
  unsure (1)..(93): unsure at all Xaa locations
  Clone ID: PAT_MRT4530_50687C.1.pep
PPVQLPGRDPAARAAAPPPPGDRPRRSPPATPPPVPLLLRPVTVAPLLCPXPPPAPPVLHPQATAVAPPLVSRRRDAAPCAPRELLLGFLDAH

SEQ ID NO: 150452 - protein, 730 aa, Oryza sativa
  Clone ID: PAT_MRT4530_50688C.1.pep
RCLLVLRRLGQCRFVTHMLVGIFLGPSVLGRNPHLRTALFSERGTYILESVSLVALILFLFSMAVKTDLTLLRRPTARALAVGLAGSLVPLAVTLPVFHALSPSLPADLRGSSLITELAVRLSLSSFPVVADALAELDLLNSELGRVALNASLITDAKSPLFTAKVLASFAAFVLFVFFVARPAGRYIARKRTPPGDLLSEGSFVLVVIAALLSALVTDVIGFKFMIGPMMLGLALPGGMPIGATLTERLDSFFIALFLPVYMALAGYRTDLAELSLIGVSAEHEEKFCALELFVALCVAGKMVGCVAAGLFFSMPFREATVLALMLNIRGIVEVAAINNWGDTMKATAEHYSTLTLSMVVITAVATPLIKLLYDPSGRFARAKRRTMEESRPNAELRVMACLFSEDHAAPLLDLIEASGSSRDAPVSLIVLHLTELVGHAASVLKPHRKSRSSCGNPTPSDRIVNAFRYFEQQAPLGAVTVSPYVVASPYSSMQHDVCLLAHSRKANLILLPFHKSSDGARSTANNAIRGINRSVMQYAPCSVGILIDHGVAAGSACATASNSTLQRVALYFLGGADDREALAYVARMAECGLVAVTVVRLKLRDWVGMGGRDEMRDEEALQEFWQRYSCAGAERVAYVEKTVEDGEGTASVVRAMSDKFDLLVVGRREGGGDGAEGSSAAALTSGLSEWSEFPELGVLGDMLASADFAAKVSILVVQQQAATRNDADY

SEQ ID NO: 150453 - protein, 194 aa, Oryza sativa
  unsure (1)..(194): unsure at all Xaa locations
  Clone ID: PAT_MRT4530_50689C.1.pep
REALEKYQLRSEAKNSKTSMADDEAKKAKQAEIDRKRAEVRKRMEEASKAKKAKKGFMXPLTRKKKLRLRLRKKAAEELKKEQERKAAERRRIIEERCGKPKNIDDANEGQLKSICQDYYKRICDLESKKWDIEYEIKKKDMEIADLNSQVNDLRGKFVKPTLKKVSKYENKFAKLQKKAAEFNFRNQLKVVKK

SEQ ID NO: 150454 - protein, 285 aa, Oryza sativa
  Clone ID: PAT_MRT4530_5068C.1.pep
MGRQPCSDKLGVKRGPWTAEEDKKLMSFILTNGHCCWRAVPKLAGLLRCGKSCRLRWTNYLRPDLKRGLLTDAEEQLVIDLHAKLGNRWSKIAAKLPGRTDNEIKNHWNTHIKKKLIKMGIDPVTHEPLDRKQESPATTSQSTVTAESSKSGEATRQQSRQLDDAVVRDMSVSAGGDSPPESSTNTASTAGGSSSSSSSHHQDPLVKWLLEEDLLPTGDEPWLNFTASNDVDEFSSIAATGATPALPWDVGMTTDWLLDYQDFGMGDSSLVVDASMVNSSNGSNF

SEQ ID NO: 150455 - protein, 123 aa, Oryza sativa
  Clone ID: PAT_MRT4530_50690C.1.pep
PVLLGKAASPSMSPPPAPLAEATSVTQNQNTCNPSATRSPASCSASRTSKAPSGAPCSPGAATLASSPAPMPATGRLTAMSSPCSARTVTVEPSTCGGSSCKPSPLPLPWQINMYIEAVEFVG

SEQ ID NO: 150456 - protein, 96 aa, Oryza sativa
  Clone ID: PAT_MRT4530_50691C.1.pep
MAARDVDMAGAWRKGGRHAARHLRHHPALPWQVWRGREVEGGADCRDEEASGERWRSRTGRRRSLGLELVAMEEMARTAGVATVALAAREIEDGGS

SEQ ID NO: 150457 - protein, 117 aa, Oryza sativa
  Clone ID: PAT_MRT4530_50692C.1.pep
TPVKLSSYADQSASIFPLHHMLGLKRCMQNLIPACKIRSSSSLLDCTLLPPYVLPVLNSLDQSHIGNQTDFLTFQWPILCHGSIISIGYHSFLPSKQGNSFARKESLPLIIHVASCR

SEQ ID NO: 150458 - protein, 42 aa, Oryza sativa
  Clone ID: PAT_MRT4530_50693C.1.pep
TCIGKHGLTGYNYPRNRSSTQHTAFKTALRYCTTPCGSDNKA

SEQ ID NO: 150459 - protein, 147 aa, Oryza sativa
  unsure (1)..(147): unsure at all Xaa locations
  Clone ID: PAT_MRT4530_50694C.1.pep
MKGYTNCRVLIFFSKVHRRSLNLYRCLIPVPKLANRPFRSLNLFDCIILVPKLVDHSFSSXSNLFSCVTPVSKLGFEYHLSQIGRDRGDTTEQVGGPKXVICKFRDRDDSTARTGETVLPWTSSGQKLSTTLFQSVSFVTGYSYHSS

SEQ ID NO: 150460 - protein, 414 aa, Oryza sativa
  unsure (1)..(414): unsure at all Xaa locations
  Clone ID: PAT_MRT4530_50695C.1.pep
MAAMMAVTTMVTRNNAVGGGAVAVVDRKGWFVPEVSFPWSSVEGERINSSSKRLEFPRRTAAPPLFASVGLSLPSAAKGRDNCDVARQLAAAEAEEAAGKKRQGRKMKGGGGLLSLRKVRVKIGNPHLRRLVSGAIAGAVSRTFVAPLETIRTHLMVGSCGAGSMAEVFRWIMRTEGWTGLFRGNAVNAFXYDTAKKYLTPEDGEPAKIPIPVPLVAGALAGVASTLCTYPMELVKTRLTIEKDVYDNVLHAFVKIVREGGPGELYRGLAPSLIGVVPYAATNFYAYETLRRLYRRATGRADVGPAATLLIGSAAGAIASTATFPLEVARKQMQVGAVGGRQVYRHVLHAMYCILRGEGAAGLYRGLGPSCIKLMPAAGISFMCYEALKKVLVEEEAAPELEAECAEEIKEKVA

SEQ ID NO: 150461 - protein, 233 aa, Oryza sativa
  unsure (1)..(233): unsure at all Xaa locations
  Clone ID: PAT_MRT4530_50696C.1.pep
MAAMMAVTTMVTRNNAAVRQRRAQLAVCGEGPGQLRRRAAARRRGGRGGGGEEEAGQEDEGRRRAAVAEEGEGEDREPAPXRLVSGAIAGAVSRTFVAPLETIRTHLMVGSCGAGSMAEVFRWIMRTEGWTGLFRGNAVNVLRVAPSKAIEHFTYDTAKKYLTPEDGEPAKIPIPVPLVAGALXGVASTLCTYPMELVKTRLTIEKDVYDNVLHAFVKIVREGGPXELYRGLA

SEQ ID NO: 150462 - protein, 282 aa, Oryza sativa
  Clone ID: PAT_MRT4530_50697C.1.pep
MAIGAAPASNQPHDTSNILENVWASIMTSSSSPAVSSSVAVSSSAVTGQEENSAILQRLPSLGRWISMGAEEWDELLLSGAALASESSGELQLVAASPGDHNQVVGGGGGANYRTTATAAARRSYRGVRRRPWGKFAAEIRDTRRRGARVWLGTFATADEAALAYDMAALRMRGHRAHLNFPLATVQKHLERDLAGGRSSSDQTSTRARRRRRPRANTTTDAAARSVVFSGVQTATNCDHMVSFASEKDQVSMQECSKSDAGVIDFEEIGGEYWDYLFPPLV

SEQ ID NO: 150463 - protein, 231 aa, Oryza sativa
  unsure (1)..(231): unsure at all Xaa locations
  Clone ID: PAT_MRT4530_50698C.1.pep
SFPWSSVEGECINSSSKRLEFPRRTAAPPLFASVGLSLPSAAKGRDNCDVARQLAAXGGRGGGGEEEAGQEDEGRRRAAVAEEGEGEDREPAPXRLVSGAIAGAVSRTFVAPLETIRTHLMVGSCGAGSMAEVFRWIMRTEGWTGLFRGNAVNVLRVAPSKAIEHFTYDTAKKYLTPEDGEPAKIPIPVPLVAGALXAGVASTLCTYPMELVKTRLTIEKDVYDNVLHAFV

SEQ ID NO: 150464 - protein, 149 aa, Oryza sativa
  unsure (1)..(149): unsure at all Xaa locations
  Clone ID: PAT_MRT4530_50699C.1.pep
SLGLLRSLLPIVAVHIHWSAVKRIIRYLNHHIXGLSDKKETTKLISAITDAAXSRCLNDTCSTGRFAAFPGKNLVSWSSRNQHTVARSXSLLVEIGVYLNRTPCLWRDNLDATYISLSNNSTLEPKHVEVDYHYVRERVAHKLLDIRFT

SEQ ID NO: 150465 - protein, 588 aa, Oryza sativa
  Clone ID: PAT_MRT4530_5069C.1.pep
MSTSASPSGASSAEYAEHLSNLIAVPSLSHENHYFLGPIGNPDPTEFIIGETNRIPFRLANPNLGHWKNTFKSWSSLEKTSPEKSWTTCCGPTTNWQFVAEALESKRQLPLGKILLGYLYQTLNNASTKIAVGSVVGAGGPWWLLQSWLNLMVMKFVNRPYVTEAEFPRLESIIEDDGEERTHRRCTSYGEYASTPADARAKLSAELLKDWFCSFYEGFQKDARIWFPYEDSTLLEHPSDFRFEDINHERFQKSREIFSAAISPCILPVGIHQGRNIQISYEFYHPMSSASIENIELATFRSRAFDRWWGEWKLHLFHQSASMYMTDLFPDIIPQTTESSPPHQSNSGRDIEYAPGLIPNGGGPSPPVIGYHAPKTSTLLQGLIREPANAGKKKKTRASGVDPSAPAPKKKAKSKKTKLTDDLPALDPSIEQALDEQEIKEDVDKAAVEKKRIAVKKKSATTTLKPAPPVLADLFSFDIKDYLDVLDEETEVDTTSMALAPLSDDVKKTLEDISRRLETSSLDSLVVDCGSIRTRLHEVQALIPEELADVLTPAAYLEQHQFKLGKAKQRLAERRERKEIEATIQANR

SEQ ID NO: 150466 - protein, 385 aa, Oryza sativa
  Clone ID: PAT_MRT4530_506C.1.pep
MGRVKLKIKKLENSSGRHVTYSKRRSGILKKAKELSILCDIPLILLMFSPNDKPTICVGDHSSIEDVITKYAQQTPQERAKRKLESLEALKKTFKKLDHDVNIQDFLGSGGQTVEMLIKSIVWQELSSHLGALQCQMADVEKRLSYWSDPEKVENIDHIRAMEQSLKESLNRIRIHKENFAKQHLMSLQCAAAQFQNDMKLPLGLTGDPNTSSWFHGGGGAEAQQPMMLPEDPSLLHQRDIGCSASTSLQSYPGYFSMGKQSTDNAGGGEQHHHAAVQQQPEFSQADCLTSLQLGAQFPYPSAFDNAGLLSDRLFDNAAAAAAAMDFGGHYDLPRPGDEASFQNWASAACGATMYDHQQQQQQQQQPAQIMTESLTPISSLQQQL

SEQ ID NO: 150467 - protein, 87 aa, Oryza sativa
  Clone ID: PAT_MRT4530_50700C.1.pep
MALFIACAPNQLHVVVGPRQRHEQHEFAAVELQPPPPPSSYRHRLPWPYMARRVRGVAAGGGSVELRHAPPPLKAISNESQAGSGEE

SEQ ID NO: 150468 - protein, 61 aa, Oryza sativa
  unsure (1)..(61): unsure at all Xaa locations
  Clone ID: PAT_MRT4530_50701C.1.pep
KTXNYSLIVWITISCNAPQHRGDPTSYEASQLSLVLAGGKNAELLGLNPAHQRQLPRVLAS

SEQ ID NO: 150469 - protein, 177 aa, Oryza sativa
  Clone ID: PAT_MRT4530_50702C.1.pep
MAAPASSTSSLLLVLVILLAAALISHSSANAWPASSSGSGGGGGGLSAGFYDETCPSAQDVVRRVIQDARVADPRIPASLIRLHFHDCFVNGCDASILLDEDLPSGIHTEKRVPANDNSARGFDVVDDIKCELDKACPGVVSCADILAIAAQVSVDLVGVNLFIEHTSLLSNSLYYS

SEQ ID NO: 150470 - protein, 110 aa, Oryza sativa
  Clone ID: PAT_MRT4530_50703C.1.pep
MIHPSIRFAPYLAVFPRSGGYPCRLLAAYPAAPCPPRLQEPPYHNQCVVAFALQFGGVARAPCIWLDGATVTVEFEGQPASSQLLAKSLVCVHSDVAEMFHMVHRWTDAP

SEQ ID NO: 150471 - protein, 80 aa, Oryza sativa
  unsure (1)..(80): unsure at all Xaa locations
  Clone ID: PAT_MRT4530_50704C.1.pep
AGSPXTPEIGKCRRLXASXRPRLLGXAAAGSXGVXDGVLATSARIVTPTNQAXKQRAPLARRRRPXQPQRAEXSSAXLAS

SEQ ID NO: 150472 - protein, 39 aa, Oryza sativa
  Clone ID: PAT_MRT4530_50705C.1.pep
MKRRERINRFASEKNNGVGKALRRGVGRRGCIYGRARES

SEQ ID NO: 150473 - protein, 80 aa, Oryza sativa
  unsure (1)..(80): unsure at all Xaa locations
  Clone ID: PAT_MRT4530_50706C.1.pep
MPPPLEARXYIGLAASPASSSSSCCASTPXAEVVGAHXALRLGLPGSESPARXEAEAVVVXXAXTLGPAPPXRGXAKRGF

SEQ ID NO: 150474 - protein, 791 aa, Oryza sativa
  unsure (1)..(791): unsure at all Xaa locations
  Clone ID: PAT_MRT4530_50707C.1.pep
MSMSFALNAEPNTVWYNNRSLLQNTFSDDNFLMRIFLPHDIAVPSINDSIVPSFACGFFCAGSATSCDAYIFSIFFGYVSTDFSQRLRWPEIVWFANRDHPVGENATVQFTELGDLVLYDADGTLVWSTHTANKSVVSMNLTGSGNLVLLDRTNVEVWRSFDHPTDTLVISQTLQMGQKLVARTSSTNWTEGKLYLTESPSSLMASYVALKNGSLEVFTSFQETKAPDYHIQLPENSFGLEFARLDWDGHMRLYQWINYSAWVPSDIFDITDPCAYPLACGEYGICSHGQCSCPDVAIGQSGLFELVDAKGVNHGCFLTSSLTCGSARKTRFLAVPNVTHFNFVYNWTTNEDHCKLSCMDDCSCRASFFQHKDISSGFCFLAFNIFSMINFSAQSYSSNFSSSAFLKIQDSTHKSLLSKEKRAIVLVAGSLSFVTSVIVAVLIVLRRKRDEPLEDEYFIDQLPGLPTRFSFVDLKSATGDFSRKIGAGGFGSVFEGQIGDKHVAVKRLDSIGQGKREFLAEVQTIGSINHIHLVRLIGFCVEKTHRLLVYEYMPNGSLDKWIFQNHQADPLDWKTRLKIISDVAKALAYLHSDCRQTIAHLDIKPENILLDEVFTAKISDFGLAKLIDREQSSVMTRLRGRLGYLAPEWLTSVITEKVDVYSFGVVIMEILCSRRNLDYSQPEESCHLISMLQEKAKNNQLMDLIDPCFFDMELHMDDVLXMMNLAMWCLQVDNNRRPSMSMVVKILEGTMDVETELDFDLVNIDPMVVAHRAAQRSSITLQVDCVLSGPR

SEQ ID NO: 150475 - protein, 92 aa, Oryza sativa
  unsure (1)..(92): unsure at all Xaa locations
  Clone ID: PAT_MRT4530_50708C.1.pep
GELPLWKCPRLXRTPYACRFFMWESQYEQYLADGRVGVGHQSGRESHVEAMASMGFGVSELKGCNAVGQILVYIRVLQALLLLLILVIVISK

SEQ ID NO: 150476 - protein, 41 aa, Oryza sativa
  Clone ID: PAT_MRT4530_50709C.1.pep
GSCPLNFSRSFIAHNSSAVFNIPAFCTLLCLVNSLPFKKTQ

SEQ ID NO: 150477 - protein, 246 aa, Oryza sativa
  unsure (1)..(246): unsure at all Xaa locations
  Clone ID: PAT_MRT4530_5070C.1.pep
GTLSQKYFFMPFKTSNKGWHANXFYVQNPEPALPEYSCLPPXYQDTWNSLPMGXQALALMDRMLKLKEQGLQGEQITRHFIKSRLAPIKERSRTAFEFDGKHDPNREDPDSLDFKVMKERMYKIFSNAIMVSYSHLLPVVPYNAFNPPPPTEPQTKPYPLDMWKYGSALQQRPELNPYSGRGATSHNWHAPKPHRKQVLGVLKEEEMMCLALLVFPIDGFDFHEERIFRSCSGYTTNGKEKGFNTR

SEQ ID NO: 150478 - protein, 159 aa, Oryza sativa
  unsure (1)..(159): unsure at all Xaa locations
  Clone ID: PAT_MRT4530_50710C.1.pep
LLAKHFKVSLKGSKPKDPIVTRSIHNSRSEEYLVDKVDAKDMNYEKFXTEVPSSSAIIQSKSARGATREKSGEEKIPSAPPSSLSLPGCLSLPLPSRPARPRPPLPPLFLGRPPAQAAPAPEPFPFRTCRARARADAVARPRGARASGGRCLSSLVRVL

SEQ ID NO: 150479 - protein, 342 aa, Oryza sativa
  Clone ID: PAT_MRT4530_50711C.1.pep
MARGSMAACLPLMMRWLAMDALHAVTREHNKIAKHMHAQTCRQRHAQLAGTLGTPRLFVSSPRPLVSSLLPCRHPSRPPECRAAARKAAAGLRRDLRRTVGLGLGFAPRSGGALVRETAGPWAAVAGQYLVAHGSRGGQENSAAAGGGRCGGRWRQVRRRMVAADAAEDGGDLSVNGQPSAGRRQIRRRWFRSCTIKICILPVFDKNVLTLWWSSGTGGPAAKLSRADQDDGARVRQTATTFIPANIRYTCSTQRPILSMLYQLAAIILLDYKKNKLAKLDAGVQQRAQCSYGDGGGGSWARHVLADLAAPAPPPPLLPWEPIAVSSNFHLLLRRRRGKMNM

SEQ ID NO: 150480 - protein, 94 aa, Oryza sativa
  Clone ID: PAT_MRT4530_50712C.1.pep
PPVCCPHAPPEHRSLLPSRAPQSRHHPAARSRAAEPPSGPAAPPRAVASLLPARATEPPSGPASPPRSRRFAACARRRAAAGAPVRPPPPQLQL

SEQ ID NO: 150481 - protein, 387 aa, Oryza sativa
  Clone ID: PAT_MRT4530_50713C.1.pep
MEVTAEFGGAYYGGAAGREKKALQQGCGDHFAVDDLLVLPYGEEDETTREGEATGGKEEAAGFGNASADSSTITALDSCSNSFGLADGDFPGELCEPYDQLAELEWLSNYMNEGDDAFATEDLQKLQLISGIPSGGFSTASVPSAQAQAASAAASMAVQPGGFLPEAPVPAKARSKRSRAAPGNWSSRLLVLPPPPASPPSPASMAISPAESGVSAHAFPIKKPSKPAKKKDAPAPPAQAQLSSVPVHSGGSAPAAAAGEGRRCLHCETDKTPQWRTGPMGPKTLCNACGVRYKSGRLVPEYRPAASPTFMVSKHSNSHRKVLELRRQKEMHQQTPHHHQPQVAAAGGVGSLMHMQSSMLFDGVSPVVSGDDFLIHHHLRTDFRPPI

SEQ ID NO: 150482 - protein, 1130 aa, Oryza sativa
  Clone ID: PAT_MRT4530_50715C.1.pep
MPTPVAAARQCLSPAAVPALDAAVASARRRAHAQTTSLHLISSLLAPPAPPLLRDALARARSAAYSPRVQLKALDLCFAVSLDRLPSVSASSSSGAADEPPVSNSLMAAIKRSQANQRRNPDTFHFYHQAATAQTPAAVKVELSHLVLAILDDPVVSRVFAEAGFRSGDIKLAILRPAPPMPLLGRLPTRTRPPPLFLCSFAAADDADVPSPAGNLAGAGEENCRRIAEILSRGRNPMLVGVGAASAADDFAAASPYRIIHVDPNTIDRSDLGVAAAMASATSGLIISIGDLKQLVPDEDAEAQENGRRVVAEVTRVLEAHSKVGRVWVMGWSATYETYLAFLSKFPLVDKDWDLQLLPITAVHAAPAAAGPAAAGGLMPPATTVAAFSKPAASLMDSFVPFGGFLCDNYEENSLTANSCPQALRCQQCNDKYEQEVATIISASGITAEDHHQGGLPSLLQNGSMMGPNNGFDPVKVRDDRMVLNSKILNLQKKWNEYCLRLHQDCQRINRDPYKPFPRYIGVPADKERSANPSKGSESIGVQKDVIKPCAVSAVHSSSTARPISSPSVTNKRNEDLVLNLQARHSKSDENLQERGMQSQHGTLSNADNPDDHASPSSAAPVETDLVLCTPRDCSSKGSSSTCSKRVEDSERSVHLVPKKVDDLNLKHPQLSVQPNSCSWSSINVGKTSHSTLHSVASGGFSAFGQWQKRSPLAAQNSDLSNYKLLVERLFKVVGRQEEAVSAICESIVRCRSTESRRGPSRNDIWLCFHGSDSMAKKRIAVALAELMHGSKENLIYLDLNLQDWDDSSFRGKTGIDCIVEQLSKKRRSVLFLDNIDRADCLVQDSLSDAIKSGRFQDMRGKVVDINDSIVVLSRSMIHGSKNGLEEGLSFSEEKILATRGHRLKILVEPGRAITSGCPSGKVVVSPRHFLTKIQASLCSGSISKRKLSMSDDQEKLQESPSSLKRLHRTSSIPFDLNLPVDEDEPLDADDDSSSHENSYGNTEKSIDALLHSVDGSINFKPFDFDKLADDMLQEFSNILRKNLGSECMLEIDVGAMEQILAAAWKSEEDRKPVPTWLEQVFARSLDELKLKRKHVSSSTLRLVACEDTVPAVKGDGLGVLLPPRIILDC

SEQ ID NO: 150483 - protein, 205 aa, Oryza sativa
  Clone ID: PAT_MRT4530_50716C.1.pep
MSKTKESGGGHEAASGVTSPEAPPAPQQTRDANPVLSSVENLTQWKDAKARAATATAAPNASDKENRTTANLLPEPAIPAKKREWQVVCSDYSPSTPSKQEVSVDASLSTWLGSSGTPESNSVRSFSPISREDRPILGALTVEDIKISSANSSPRRSRSPSPSPDDMPILGTVGAYWNCSSKAGDPVTRGGFMRTRTRFGQNFAG

SEQ ID NO: 150484 - protein, 123 aa, Oryza sativa
  unsure (1)..(123): unsure at all Xaa locations
  Clone ID: PAT_MRT4530_50717C.1.pep
MDPGVSRLDGGGCPPMPRGPPPRGVRPQVTMYGGLSVCLQVPTYSHLWRPEXSRHAAFNAVCNALNRSVTGRMTDGTGVVRPSLGMEPPEGHTASLTKPSNLTRCPRPNSQRGASRSPDGGVH

SEQ ID NO: 150485 - protein, 33 aa, Oryza sativa
  Clone ID: PAT_MRT4530_50718C.1.pep
IWVVFNDTGTEHHHYLKNVVMILTGIQILPPTK

SEQ ID NO: 150486 - protein, 122 aa, Oryza sativa
  Clone ID: PAT_MRT4530_50719C.1.pep
MEMEAVPALAVVDARFVAGDAAALSVAKTLSLSGSDFTVTDAATGAVVLRVDGVLFSLRRRCLLADADRRPVLTVQESIDRRFSVASALLGKNAYSVTVNAGIEYAFIVALVVVLDEMHFQP

SEQ ID NO: 150487 - protein, 326 aa, Oryza sativa
  Clone ID: PAT_MRT4530_5071C.1.pep
MGRQPCCDKLGVKRGPWTAEEDKKLMSFILTNGHCCWRAVPKLAGLLRCGKSCRLRWTNYLRPDLKRGLLTDAEEQLVIDLHAKLGNRALAPTSLISVAKRTLHVDSEIESILLGPVASLENGRKLFKKWSKIAAKLPGRTDNEIKNHWNTHIKKKLIKMGIDPVTHEPLDRKQESPATTSQSTVTAESSKSGEATRQQSRQLDDAVVRDMSVSAGGDSPPESSTNTASTAGGSSSSSSSHHQDPLVKWLLEEDLLPTGDEPWLNFTASNDVDEFSSIAATGATPALPWDVGMTTDWLLDYQDFGMGDSSLVVDASMVNSSNGSNF

SEQ ID NO: 150488 - protein, 95 aa, Oryza sativa
  unsure (1)..(95): unsure at all Xaa locations
  Clone ID: PAT_MRT4530_50720C.1.pep
DXXXXXFFFFFXWXQNYIXFSKQIEATTNINIIIFQGTPSNMXFTKVQXCTIWILNFTKTTXYNAHITGYARKHNTXTLXXWXTEHLXLTXYIYL

SEQ ID NO: 150489 - protein, 268 aa, Oryza sativa
  Clone ID: PAT_MRT4530_50721C.1.pep
MEMEAVPALAVVDARFVAGDAAALSVAKTLSLSGSDFTVTDAATGAVVLRVDGVLFSLRRRCLLADADRRPVLTVQESVRATLDSPPLLSSLLPHRANLIGGGELRWVQAMVMNRRWKVFRGESTSRRDLLFTVVKPSAIQLWGSTKVSVFLASNDAEQASDFRVTGSYHDGACAVSLGDSDTVIAKASKATPLSPPCSNHFRHFIEHLVGVLLDLTQKLFRAQIDRRFSVASALLGKNAYSVTVNAGIDYAFIVALVVVLDEMHFQP

SEQ ID NO: 150490 - protein, 191 aa, Oryza sativa
  Clone ID: PAT_MRT4530_50722C.1.pep
MKLRFVRKNNHKRRDRINQKMKTLQKLVPNSSKTDKASMLDEVIDYLKQLQAQVQVMSRMGSMMMPMGMAMPQLQMSVMAQMAQMAQIGLSMMNMGQAGGYAPMHMHTPPFLPVSWDAAASSSSAAAADRPPQPTGAATSDAFSAFLASQAAQQNAQQPNGMEAYNRMMAMYQKLNHQQQQQQDQPSNSRQ

SEQ ID NO: 150491 - protein, 115 aa, Oryza sativa
  unsure (1)..(115): unsure at all Xaa locations
  Clone ID: PAT_MRT4530_50723C.1.pep
EPRYSLAASPETRCSPGFRSSSPAGLPRRRPPAAPEPTPTPVHPRRGWAPPLGILWVGLVVAXVGEARVAAGLACGVCAPLLVAVVAPRLRAVACVVVWAGSPLPPKIPVRALRA

SEQ ID NO: 150492 - protein, 217 aa, Oryza sativa
  Clone ID: PAT_MRT4530_50724C.1.pep
MDSKDKEKEHEQTASGRNPDVNDVEEEEEDEEGNKRAVVLGPQVPLKEQLELDKDDESLRRWKEQLLGQVDTEQLGETAEPEVKVLNLTILSPDRPDLVLPIPFVPDEKGYAFALKDGSTYSFRFSFIVSNNIVSGLKYTNTVWKTGVRVENQKVMLGTFSPQLEPYTYEGEEETTPAGMFARGSYSAKLKFVDDDGKCYLEMSYYFEIRKEWPTIQ

SEQ ID NO: 150493 - protein, 67 aa, Oryza sativa
  Clone ID: PAT_MRT4530_50725C.1.pep
HFDLEYFVVVCRDVDVEDVQQREKPELPVIVPALAFEPLVPGGDVDQSSPVGTSLATTPLGRLSLFS

SEQ ID NO: 150494 - protein, 94 aa, Oryza sativa
  unsure (1)..(94): unsure at all Xaa locations
  Clone ID: PAT_MRT4530_50726C.1.pep
LDTQPKNRNLPGLTTSTIGXFPQTAHLRTARRVYNANKGLXEEYSSAIKVENSKVCKFQEEXDIHATVHGKSPRNDTAELFGEQVSAFAFTANS

SEQ ID NO: 150495 - protein, 89 aa, Oryza sativa
  Clone ID: PAT_MRT4530_50727C.1.pep
MPDRIAEGDEIEQKIARSLDDRHSRRKMLYSRNPRSTDTSPPAPASAALEARRAVASRRQESWSTRAAGEARREEVVVALAKSIRDDKW

SEQ ID NO: 150496 - protein, 136 aa, Oryza sativa
  Clone ID: PAT_MRT4530_50728C.1.pep
YEAVYARDIPEIITGDAFLEKYGDHNDAVTTVDPKRSYCVKAPTRHPIYENFRVEAFKALLTAAKTVEQLSALGELMYQCHYSYNACGLGSDGTDRLCNMIQKRYKAATGYLPIVFEGSSPGAGKFGYLKIRRRST

SEQ ID NO: 150497 - protein, 137 aa, Oryza sativa
  unsure (1)..(137): unsure at all Xaa locations
  Clone ID: PAT_MRT4530_50729C.1.pep
LDFTSDSSVSTHYSYHAAAAAADDEEEMWRSSVARALLLLRSVIHRPLPPSSSTLRALTRAPPATRPLSRFLSSSPEPLPDAGGGAAYESSDSTDAGEDGLVSDPTEAFXDILFFFWEEELWDSDYVFFVVFFPDPL

SEQ ID NO: 150498 - protein, 57 aa, Oryza sativa
  unsure (1)..(57): unsure at all Xaa locations
  Clone ID: PAT_MRT4530_5072C.1.pep
YYQQQQQMYQQQQQPEQPVLNSIIAAXXTVSLADPQQQQNMTQQHDVLTRNEQHDEM

SEQ ID NO: 150499 - protein, 1520 aa, Oryza sativa
  unsure (1)..(1520): unsure at all Xaa locations
  Clone ID: PAT_MRT4530_50730C.1.pep
WGSTYCPTKEVFSNMRYKRDPWGEAKIIAFHRQHTHQSLRNPCSNVRQYPILSVREYHSSTVARQVGALGAYGYASMTSGLPDNSLITSANQGVSTSTPLVWTQVGSIVFPVYIVTTISTGPIVIGSEKGTATTERNDAPPIIPPTPVENGTSTAPTPGRYPQAAEFHSPCERSKPTRTTTLRPRTWCPVHKTTKHALEDCPVIFHVQAELYACWERGIQCTSPTSTTYFPIHRSKVYDLTNCRIFLRTLKPAHHRVQQPRVQTPCVAKEPVAAPDRFVGFIGANEPSVLHLLEGYESSLQSPREVNVVDNTETSMFVAARTLAHQLRNVDAILRESPLYLVTNPDASRWAKXLRETVTNLNTTFAEAAGGPEPNMNEERPTGDAEEENLDGRHATGNRSPPRRDPTPPRREDGDLREHLNGHRRNRRERNENERHHHCSPSRHDRGNTPNEDQDRRTRDDRSDDNNRDRKNHHQRQERDNGXDXDRNSQSAHPSRDRGRDHRSRSRAPDPCDPSSSSSSSSSNWPPRRRRDHGPHDVPGNGRRAFTPALHNVRWPDKFRPGSIEKYDGSTNPEEFLQVYPTILXAAGADYNALANYLPAALKGSAHSWFVHLPPNSISSWEDLWQQFVDNFQGTYKRHTIEDDLHTLTQNPGESLRGCIRRLNECRNTIPEITDASVIXAFKSGVRDRYTTQELATHXITSGRKLFEIIDRCAHADDALRRNEGKSKMGDEKKKLADKDAPESSKKRSHKSGKRKSSGEVLATEQAKPSRHSNPQGDDSRKPWCPIHKTSKHALEDYYVVKKELARQLAIERGKQVRVVETAEEAATNNSDSALPEYDLHVSHIIVTTPGRYPIVVEPTIRNIKVARVLIDGGSSVNLLFASTLDTMRITRSKLTPTDQPFHGITPESSSKPLGKITLPVTFGHAKNFQTEQITFDVAEFDTAYNAIIGRAAVAKFMVASHYAYQVLKMLGPKGTITIQGNAKLAVXCDKRSLDMIEHTPNLPATTENPNKVSKPKKTPKPDGTIKIIPLSSANPDKTELALITFLXDNVDVFAWXPSDMPRVPREVIEHKLMVRPDAKPVKQKLRRFGPDQKQAIREELDKLLKAGFIREVLHPEWLANPVMVRKANGNXRMCVDFTDLNKACPKDNFPFPXIDQLVDSTAGYELLSFLDAYSGYHQISMAKEDEEKTAFITPFGVFCYTKMPFGLISAGNTYQRGIQGALGTQLGQNVEAYVDDIVVKTKNIDSLIDDLREMFDNLRRYQMKLNPEKCTFRVPSGKLLGFLVSGRGIEANPEKIKAIENIKLPTRLKEIQRLTGCMASLSRFVAKMGERGQPFFALLKKQDKFKWNQEAENAFIALKCYLSNPPVLVGPQINEELFLYIAATPYFVSTVIIVEREKXVQRPVYYVSEALHDAKTRYPQIQKLLYTVVMTSRKLRHYFQAHKVTVVSSIPLGEVVRNKDMVGQIAKWVVELSQFNVHFVPKTAVKSQVLADFVAAWTIPEDRQSNMKCKCTWACHKQG

SEQ ID NO: 150500 - protein, 685 aa, Oryza sativa
  unsure (1)..(685): unsure at all Xaa locations
  Clone ID: PAT_MRT4530_50731C.1.pep
MLQAAGAAPAPGLLRAACLRSHSHPLQCKALELCFNVALNRLPASAGASPLLGHGHGVGVYYPPSLSNALVAAFKRAQAHQRRGSVETQQQPVLAVKIELEQLVISILDDPSVSRVMREAGFSSTQVKANVEQAVSSSMEAATTKPQNPNPSSSSPPPAAHQEAKPSRCIDQVVVREEDVAAILDCLATRSKKRVMVVAECAAAAEAAARAAVDRIRRGEARXHAQAQGVTLAVSRFRGAPREEAERRLAELRGAMAAAAVNHQSAKGANGSTSPSPCLSLLDAAAAGGACSSGQLAVMAAAVSGAYCGGDCAAATKALLPQSVVFMPPSATTTTTTIPPWLHHCRDQEPAAHMKKWMSAHGGSPSRRTALNISSTAVSPCSSVSSYEQYTRLHQPYQPWLVADDDDEAEETKHPYIAGDGGAGRLVPAAAKVVIKSDDSSASNGSVEVEWRRPRFKEGSAENLKVLCGALEKEVPWQKVIVPEIASTVLRCRSGMAAPAMARRSSSCSSSKEHTWMLFLGGDADGKFRDHLEALYDAVRDNPRRVILMERVDRADARCHDGIRDAIERGVVRSRGGGGEEAFLGDAIVVLSCESLNPSSTTPAKKAKTEYSVEKLDQDGDDHHGKEAVAAAASPSCFDLNMSMDDDDEAAEERCTGEEEEAGHHHHQLLLKAVDRVLFFRSIGE

SEQ ID NO: 150501 - protein, 874 aa, Oryza sativa
  Clone ID: PAT_MRT4530_50732C.1.pep
MLQAAGAAPAPGLLRAACLRSHSHPLQCKALELCFNVALNRLPASAGASPLLGHGHGVGVYYPPSLSNALVAAFKRAQAHQRRGSVETQQQPVLAVKIELEQLVISILDDPSVSRVMREAGFSSTQVKANVEQAVSSSMEAATTKPQNPNPSSSSPPPAAHQEAKPSRCIDQVVVREEDVAAILDCLATRSKKRVMVVAECAAAAEAAARAAVDRIRRGEARQHAQAQVVTLAVSRFRGAPREEAERRLAELRCAVRGGGGRAVVLVVEDLAWAAEFWAGRRPPPSSCGAGAGGYYYCAVEHAVAEVRALACGGGGGGGGVWLVGHGTYQTNIRCRTGHPSLETLWGLHTLAVPAGSLALSLTCADADAAADDDDSGAMAAAAVNHQSAKGANGSTSPSPCLSLLDAAAAGGACSSGQLAVMAAAVSGAYCGGDCAAATKALLPQSVVFMPPSATTTTTTIPPWLHHCRDQEPAAHMKKWMSAHGGSPSRRTALNISSTAVSPCSSVSSYEQYTRLHQPYQPWLVADDDDEAEETKHPYIAGDGGAGRLVPAAAKVVIKSDDSSASNGSVEVEWRRPRFKEVSAENLKVLCGALEKEVPWQKVIVPEIASTVLRCRSGMAAPAMARRSSSCSSSKEHTWMLFLGGDADGKLRVARELASLVFGSSKSFVSIGGAANASPPPSSSSSSPARSSGSTEQPHRSKRPWAETTTTTTSGRDQDHLEALYDAVRDNPRRVILMERVDRADARCHDGIRDAIERGVVRSRGGGGEEAFLGDAIVVLSCESLNPSSTTPAKKAKTEYSVEKLDQDGDDHHGKEAVAAAASPSCFDLNMSMDDDDEAAEERCTGEEEEAGHHHHQLLLKAVDRVLFFRSIGE

SEQ ID NO: 150502 - protein, 40 aa, Oryza sativa
  Clone ID: PAT_MRT4530_50733C.1.pep
MLGRAGRLYAYQDMWSGAVQVRDILQDKGLMKPRGRSIIG

SEQ ID NO: 150503 - protein, 77 aa, Oryza sativa
  unsure (1)..(77): unsure at all Xaa locations
  Clone ID: PAT_MRT4530_50734C.1.pep
TDFGPPDELXDSCSRPSPPTPVTSSSSPAPATPYXVKILGWEGVGGGGEGEEFAGLEGXPGEEAAQQWAARSGGWRG

SEQ ID NO: 150504 - protein, 128 aa, Oryza sativa
  Clone ID: PAT_MRT4530_50735C.1.pep
GCRNSARGPNLRRCCSTVADIPFSAARSRRRIFHHRRATVAATGSSAPTAANPSISRAEQGRGGAPWSCCISIWMRRVLLFRFVRSPQKSKFDRSLLGLNKIQFNTKHVQNYSEAQALTLPSHVVLVV

SEQ ID NO: 150505 - protein, 151 aa, Oryza sativa
  unsure (1)..(151): unsure at all Xaa locations
  Clone ID: PAT_MRT4530_50736C.1.pep
FVTTVWETPAQLKQRFMGWLILHQKTLIEENLLIRHWXCDWIFSLCREAFEDVDHLYRDCAYTRQVWNTLTIFLDPPLSVAAQAQNIIDWVIQITNSATKAQSRQRTGALLTTWWHIXLQRNSRIFQGEFKEADNKLNHRRPRTKRTCVYA

SEQ ID NO: 150506 - protein, 117 aa, Oryza sativa
  Clone ID: PAT_MRT4530_50737C.1.pep
PRVRETGGDERDGFPLRRAAVLRRAVSFAAPSPAVRRAARLPIAPRRPFSQPSAASGDQPPKSALDKLNPLFEEVMRKGVCSMDQYMTLCSMDQYMTLEIVKSIQHARIEFNRKEND

SEQ ID NO: 150507 - protein, 146 aa, Oryza sativa
  Clone ID: PAT_MRT4530_50738C.1.pep
MPESEIGEGEPATVFARRRPPLLPCCIVGRGDSRAADARGATITALAGCLTYITPGSPKARPAKDCCAGVKSTLGSPAAVACLCGALGLDFGIKINYTRVAALPAACGGNFSALSKCNSQYNQLTPICFFVSVFLQKFFRFVLLFG

SEQ ID NO: 150508 - protein, 395 aa, Oryza sativa
  unsure (1)..(395): unsure at all Xaa locations
  Clone ID: PAT_MRT4530_50739C.1.pep
MGAVTSTVAARFAFFPPSPPSYGAEAPPPPAAAGAGVGVEKDGGGGGVVVELTDVPRRGNVEARRLRTKRGTEVVAMYVRQAGARLTLLYSHGNAADLGQMFELFVELSAHLNVNLMGIRIRRLYDYSGYGQSSGKPSEHNTYADIEAVYRCLVETYGASEENIILYGQSVGSGPTLDLASRLPHLRAVVLHSPILSGLRVMYPVKHTYWFDIYKNIDKIPLVRCPVLVIHGTADEVVDCSHGRALWELSIVKYEPLWVKGGNHCNLELYPEYIKHLKKFVXAIEKSPPLYDESPESSGPSDNTQTNPEGTEESRKSTDCREKTRPSIDHRQSTDRRDKSRGSTDRRDKNRKSVDQPRASVDQPDRPRKSVDRFGGVMKSVRYIDCFRVTTASGS

SEQ ID NO: 150509 - protein, 2083 aa, Oryza sativa
  unsure (1)..(2083): unsure at all Xaa locations
  Clone ID: PAT_MRT4530_5073C.1.pep
RLANELNVHDDPCPLGHLRIVLGLVCSSPTRRAPDLRYKRDPPGRAXIIESQCQHNPHSLRNPCTSVPQYPLYPVYGYHPSTVARQVGGLGTQGSTTMPSSFVDNNINTSSSQALSTSTMLVWTHVGEIVFPVYTMTPISTGPPMTENENVVATNQDGSMSKNPPVETENGLPTTSKLETDSDAAKSCPSDINHGPTKMTXWCPIHKTKKHTLQDCWVFINVRAEIRAYKERGIQCISPTRDVYCPIHKTKNHDLSSCKVLLGAMKTLSPKSYVPARDNGKEQGATPASDRFVGVIDLDPHEPSVLHLLEDYGSSTTSAPWEVLVIDDVGTSAQANAEAANQSTTPAQHIRAIQAILRETPYDPVLNDDLERWTERLRESVTNLSNAFEEAATAAHQDQPPTGDANGEDPERRELPRQATPPPRGTSDLRDQINNRREARRTRDDANRSRRHVSSRRHDRGNRPNEDPECNDRERRGPNNTGHGRRRNDDDEGDRRRDNSERQRQDSRDPGRHPRNRTPEPSDPSSSSSSASSSSSDRHPRRSCDRRQPTAPSAGCRAFGRSQRDVRWPERFRPGAIEKYDGSTDPEEFLQVYSIVFYAARADDNALANYLPTALKGSVRTWLMHLPPYSISSWADLWQQFVANFQGTYKRHAIEDDLHALTQNSGESLREYVRRFNECRNTIPEITDASVTRAFKSSXGVRDRYTTQELVTRRITTTRRLFEIVERCAHVDDALRRKNDKPKTGGEKKPAADASESNKKKNRKNGKRKAXAEVLAAEYANPPKRPDPQGSDTKKSWCPIHKTDRHSLEDCLVFKKSLEKHMAFQKSKRVRVVEKNEETPPHESDPAYPGSDLHVSHIXAAPQRRYPIVVEPTIRNVKVARVLIDGGSSINLLFASTLDAMGIPQSELTPTDQPFHGITPQSSSRPLGKITLPVTFDQANNFRTEQITFDVAEFDTAYNAIIGRTALAKFMAASHYAYQVLKMPGPKGTITIQGNAKLAVQCDRRSLDMVEQTPTPPATSEPPKKVSKPNKTPKPDGAIKIIPLNXANPDKTELALITFLRDNVDVFAWRPSDMPGVPREVIEHKLMVRHDAKPVKXRLRRFAPDXKXAIREELDKLLKAGFIREVLHPEWLANPIMVRKANGKWRMCVDFTDLNKACPKDHFPLPRIDQLVDSTAGCELLSFLNAYFGYHQISMAKKDEEKTAFITPFGVFCYVKMPFGLITAGNTFQRTVQGALSNQLGNNVEAYVDDIIVKTKTSDSLIDDLRETFDNLRRYRLMLNPEKCTFGVPSGKLLGFLVSGRGIEANPEKIKAIENMKSPTRLKEVQKLTGCMAALSRFVARIGERGQPFFSLLKKQDKFVWTQEAEEEFIALKRYLSNPPVLVAPQPNEELFLYIAATPYSVSTVIVVEREKVQRPVYYVSEALHDAKTRYPQIQKLLYAVIMTSRKLRHYFQAHRVTVVPSFPLGEVVRNKDVVGRIAKWVVELSQFDIHFVPRTAIKSHVLTDFMADWTMPDNKSDNQGDNETWIMAFDGALNSQGAGAGFILTSPSEDQFKHAIHLNFRATNNKAEYEGLLAGIRAAAALGAKRLIVKGDSELVANQVHNDYKCSNPELSKYLAEVRKLEKRFDGIEVRHVYRKDNVEPDDLAXCASRREPLDTGTFLDVLMKPSVKEVNGESGPSTPDISSKDTEAERAVADIETTDDWRTPLIKFISSEELPEDDTETEKITRKAKIYCMVGNDLYKKAPNGILLKYVSTDDGRQLLLDIHEGICGSHAASRTLVGKAFRQGFFWPTALKDACDMQAHKATCTSAPDNPSDLAVLVLGARYTWAIPTRTGWLXFLFVAIDKFTKWIEALPTGEIKADNAIKFXRGIFCRYGLPHRIITDNGSQFISADFQDYCIGLGVKICFASVSHPQSNGQVERANGIVLQGIKTLLWVVRTTPTTSNKETPFFLVYGSEAMLPSELRHQSTRVQKHFDENQEEQRDIDVNLLEEHRERVAVRAASYQQALCRYHEKRIRARILSIGDYVLRRVQSQAGRNKLSPKWEGPYTITQVLRPGAFKIADGDGRELANLWNIDQLRKFYV

SEQ ID NO: 150510 - protein, 700 aa, Oryza sativa
  Clone ID: PAT_MRT4530_50740C.1.pep
MASSVAAAAAPTAGGPPGKRQASGGREGDQLIITPLGAGNEVGRSCVYMSFKGRTVLFDCGIHPAYSGMAALPYFDEIDPSTIDVLLITHFHLDHAASLPYFLEKTTFKGRVFMTHATKAIYRLLLSDYVKVSKVSVEDMLFDEQDILRSMDKIEVIDFHQTLEVNGIRFWCYTAGHVLGAAMFMVDIAGVRVLYTGDYSREEDRHLKAAELPQFSPDICIIESTYGVQQHQPRHVREKRFTDVIHTTVSQGGRVLIPAFALGRAQELLLILDEYWANHPELHKIPIYYASPLAKKCMAVYQTYINSMNERIRNQFAQSNPFHFKHIESLNSIDNFHDVGPSVVMASPGGLQSGLSRQLFDKWCTDKKNSCVIPGYVVEGTLAKTIINEPREVTLANGLTAPLHMQVHYISFSAHADFPQTSTFLDELQPPNIVLVHGEANEMSRLKQKLISQFDGTNIKVVNPKNCQSVEMYFSSEKMAKTIGRLAEKVPEAGESVNGLLVKKGFTYQIMAPEDLRVYTQLSTANITQRIAVPYSGSFEVIKYRLKQIYESVESSTEESDVPTLIVHERVTIRLESESYVTLQWSSDPISDMVSDSVVAMVLNIGREGPKVVPVEEAVKTQEETERVAQKVVYALMVSLFGDVKVAEEGKLVISVDGQVAHLDGRSGGVECENATLRERIKTAFRRIQGAVRPIPLISS

SEQ ID NO: 150511 - protein, 137 aa, Oryza sativa
  Clone ID: PAT_MRT4530_50742C.1.pep
PVASRDLFPRLPQACPFDPRPPGCPRAMGIPFGDIPPWWGSGVAAWGGEARRPVIDRDAARQRERLPVEKTVEKFIPGRTYFYLFFVLIETLTNPVMGWSNVSSARRVVLRVYVYTYVHARKLPLAAIRMYIQPTYV

SEQ ID NO: 150512 - protein, 220 aa, Oryza sativa
  Clone ID: PAT_MRT4530_50743C.1.pep
MASTACFAIVSKNDIPIYEAEVGSAPKKEDLAYQHQFILHAALDVVQDLAWSTNAMFLKSVDRFNDLVVSVYFYLYNNIVFFNLMTHARFMLLHDSRSEDGIKSFFQEVHELYIKIFLNPLYLPGSRITSSHFDTKVRALARSSLPVNSNLININSDRCVCGVMVRTANISRQLIGGRRRSRERFWEHTSSDEPIAACQVNQEMRCYTTKHTLARLITVT

SEQ ID NO: 150513 - protein, 76 aa, Oryza sativa
  Clone ID: PAT_MRT4530_50744C.1.pep
STTRTMHEEQGLVQKEHLLSASTAPVTLTGVASSETLELIKEQSSVKAVLVADYIWIIDKTECILHLVYQQESPAF

SEQ ID NO: 150514 - protein, 40 aa, Oryza sativa
  Clone ID: PAT_MRT4530_50745C.1.pep
LFFSEWLMFITIFRVIRACALSFDLTGRDKILFLFHLISL

SEQ ID NO: 150515 - protein, 49 aa, Oryza sativa
  unsure (1)..(49): unsure at all Xaa locations
  Clone ID: PAT_MRT4530_50746C.1.pep
FCXSLFSGXLGITPTVFSVAKXLVXSFLYKXSXDAFXXXXDXNXXTLLS

SEQ ID NO: 150516 - protein, 83 aa, Oryza sativa
  Clone ID: PAT_MRT4530_50747C.1.pep
LIFGDATAVFQHCDIVARFPLRGQQNTITAQSRATGFSFQDCSIYADTDLLRGAPAGSSVETYLGRPWHPIPSSSPFSDTVEN

SEQ ID NO: 150517 - protein, 67 aa, Oryza sativa
  Clone ID: PAT_MRT4530_50748C.1.pep
LHFACTLCQVWCSEQLVPTCQPPFSSPVGDLLEGGSTLGSTMTDAIVGTLSSRTWVLVSKSQLPAFV

SEQ ID NO: 150518 - protein, 60 aa, Oryza sativa
  Clone ID: PAT_MRT4530_50749C.1.pep
SRIQHHYAVQFLLGVPTATRFTGKSARLLHLFLCWVLIRDEQRNFELTELYVHDSSSTKA

SEQ ID NO: 150519 - protein, 987 aa, Oryza sativa
  unsure (1)..(987): unsure at all Xaa locations
  Clone ID: PAT_MRT4530_5074C.1.pep
SDMPGVPREVIEHRLAVRPDAXPVRQKVWRQAPERHAFIREEVARLLEADFIRKVIHPEWLANPVVVLKANGKLRMCIDYTDLNKACPKDPFPLPHIDQIVDSTAGCDLLCFLDAYSGYHQIRMAREDEEKTAFITPVGTFCYTTMPFGLKNACPTFQRMTRITLSNQIGRNVEAYVDDLVVKMRHQDTLLQDLAETFNSLRSTRVRLNPDKCVFGVPAGKLLGFLVSSRGVEANPEKMRAIERMRPPASLVMCXCVTGCMAALSRFISRLGEWALHLFKLLKRSGPFVWTEEAEQALNELKAYLTXPPILVAPGPEEPLLLYLAATPYVVSAALVVEREESEREAPLARDGPSSPEGLVPKAPSPREDPEAPEGRGEALVSGPEAYDPEVTRDPPGAPEQGRPGSSAPDNTNRPCRKAHRVSVVISYPLGQILHNREGTGRVVKWAIELAEFDLYFEPRHAIKSQVLADFIVEWXPVDEPVSSXPSPPGEEEDPNADIRGGHWIMHFDGSLNLQGAGAGLTLTSPSGDVLKYVVXFNFRATNNMAEYEGLLAGLRAAAGMGIHRLLVLGDSQLVVNQVSKEYQCTDPQMDAYVREVRRMERHFDGLKLRHVPQRDNTVADELSRVASARAPLPLGTFEERLAQPSARPNPLRDPNDTPSVPTPGDPHPSGPEGVDPDPPRXVVWMTDIRAYLDGNTLPEHRAEVEKFARISKWYVLVEGTLYRRAANGILLKCISREXGIELIADTHXGECGAHSASRSLVGKAFQQGFYWPTALQDAQEWVRRCKTCQFHAKQTHQPTQALQVIPLSWPFAVWGLDILGSFKAARGGYQHLYVAIDKFTKWPEAYPVVKIDKHSALKFIRGITSRFGVPNRIITDNGTXFTSELFADYCDDMGIKLCFASPAHPKSNGQVERANAKILKGLKTKTYNVLKKHGDSWLEELPAVLWANQTTPSHATGETLSPLPRGPIGLLPARVPLTGGPARHPR

SEQ ID NO: 150520 - protein, 144 aa, Oryza sativa
  Clone ID: PAT_MRT4530_50750C.1.pep
MATATAASRLAVAGAEPARARRHRPTTVAVCGGARPRSRPAAVVAAAGAADTSPATGGVAPVPPSPRGSIIKRHTLSVLVGDESGMINRIAGVFARRGYNIESLAGGLNKDKALFTIVVSGTEKILKQVVEQLNKLANVIQVDD

SEQ ID NO: 150521 - protein, 630 aa, Oryza sativa
  Clone ID: PAT_MRT4530_50751C.1.pep
MGRWQICGCVTSILDLGELGGLFLEVVLGSILIMWVGSIGDAEEWWVSVGFNAAAGLLNMSMQNSESSSANISSHELPSQTRKRAKVWEHFEQELVMIDGLPKAQCKYCGLMLSATRKSGTSHLINHICESCPLVDGEVRNRFISTVRKQPVENFVFDPKKTKELMIKYFIHAEIPFHKIEDPYLDDWMASMQPTFKLVGRQSIRDKIYNYYNRLKQELHAELENLDSRVCLTSDMWTSNQNLGYMVVTAHYVDAEFKMKKKIISLKPVKYPHTSFAIEEAMMRCLTEWGLSSKLFTLTLDNASNNTAACQELVKTLKDELVLEGKHFHVRCCAHILNLLVQDGMRVIRAAIDKIREILKYIEHSPSRIQAFNSIASSKSLPPKSGFTLDVPTRWNSTFKMIREILPYKAILNSYASENCELLPTDEEWLHAESICEFLKAFEEATRDPRRKRDYLDFFYEKVSPHGSNVESKVDSIIEEMKSYFHVYEGIARRRGVSYMSQSSERVSVVGSPVLGKRKLEHEFILFKSNRKVARTQKSEIDTYLEEVCEDDSEDFDVLAWWKKNSKKFPVLAIMARDFLAIPLSTVPSESAFSSGGRILGDTRSSLTPEMLEALVCAKDWLHRAKKQGD

SEQ ID NO: 150522 - protein, 1037 aa, Oryza sativa
  Clone ID: PAT_MRT4530_50752C.1.pep
MAWSRIARGSQLTQPLSRILAEGNAAATPAAYALRNAAALGQRASSASASSSFHSLALAGLADKYAAGAAGRLQPSRGISTTSPALRPAAEAAARVVECSDAADEAAAAAAVPDLGPTRPGEKPRVVVLGTGWAACRFLKDVDTRAYDVVCISPRNHMVFTPLLASTCVGTLEFRSVVEPVSRIQSALATRPGSYFFLASCTGIDTGRHEVHCTAADGDGLPANPYNFKVSYDKLVIASGSEPLTFGIKGVAENAIFLREVSHAQEIRRKLLTNLMLSENPGLSEEEKKRLLHCVVVGGGPTGVEFSGELSDFITRDVRERYAHVKDYVKVTLIEANEILSSFDVGLRQYATDHLSKYGVNLVRGVVKEVKPREIELSDGSRVPYGVLVWSTGVGPSEFVRSLPLPKSPGGRIGVDEWLRVPSVEDVFALGDCAGFLEGTGRAVLPALAQVAEREGRYLARVMSRIAAQDGGRAGRAVGSAELGEPFVYKHIGSMASVGRYKALVDLRENKDARGVSMAGFVSWLMWRSAYLTRVGRWQICGCVTSILDLGELGGLFLEVVPGSILIMWVGSIGDAEEWWVSVGFNAAAGLLNMSMQNSESSSANSSSHELPSQTRKRAKVWEHFEQELVMIDGLPKAQCKYCGLMLSATRKSGTSHLINHICESCPLVDGEVRNRFISTVRKQPVENFVFDPKKTEELMIKYFIHAEIPFHKIEDPYLDDWMASMQPTFKLVGRQSIRDKIYNYYNRLKQELHAELENLDSRVCLTSDMWTSNQNLGYMVVTAHYVDAEFKMKKKIISLKPVKYPHTSFAIEEAMMSDLLKRLAAPMHTKFAKYWDEKLANNFNLALVITTVLDPRRKRDYLDFFYEKVSPHGSNVESKVDSIIEEMKSYFHVYEGIARRRGVSYMSQSSERVSVVGSPVLGKRKLEHEFTLFKSNRKVARTQKSEIDTYLEEVCEDDSEDFDVLAWWKKNSKKFPVLAIMARDFLAIPLSTVPSESAFSSGGRILGDTRSSLTPEMLEALVCAKDWLHRAKKQGD

SEQ ID NO: 150523 - protein, 775 aa, Oryza sativa
  Clone ID: PAT_MRT4530_50753C.1.pep
MERFAQHQRRCVGGSGPNPWQGMTAVGGDAACVWQQRPYQYGEVLQADPEELEVGGDYFPVGAGTPGPAGVGWIFGPMGRWQICGCVTSILDLGELGGLFLEVVLGSILIMWVGSIGDAEEWWVSVGFNAAAGLLNMSMQNSESSSANSSSHELPSQTRKRAKVWEHFEQELVMIDGLPKAQCKYCGLMLSATRKSGTSHLINHICESCPLVDGEVRNRFISTVRKQPVENFVFDPKKTEELMIKYFIHAEIPFHKIEDPYLDDWMASMQPTFKLVGRQSIRDKIYNYYNRLKQELHAELENLDSRVCLTSDMWTSNQNLGYMVVTAHYVDAEFKMKKKIISLKPVKYPHTSFAIEEAMMRCLTEWGLSSKLFTLTLDNASNNTAACQELVKTLKDELVLEGKHFHVRCCAHILNLLVQDGMRVIRAAIDKIREILKYIEHSPSRIQAFNSIASSKSLPPKSGFTLDVPTRWNSTFKMIREILPYKAILNSYASENCELLPTDEEWLHAESICEFLKAFEEATRGVSAHRTPTAHTFLPHVLCIRHALSDPDWQTSDLLKRLAAPMHTKFAKYWDEKLANNFNLALVITTVLDPRRKRDYLDFFYEKVSPHGSNVESKVDSIIEEMKSYFHVYEGIARRRGVSYMSQSSERVSVVGSPVLGKRKLEHEFTLFKSNRKVARTQKSEIDTYLEEVCEDDSEDFDVLAWWKKNSKKFPVLAIMARDFLAIPLSTVPSESAFSSGGRILGDTRSSLTPEMLEALVCAKDWLHRAKKQGD

SEQ ID NO: 150524 - protein, 76 aa, Oryza sativa
  unsure (1)..(76): unsure at all Xaa locations
  Clone ID: PAT_MRT4530_50754C.1.pep
PAPAWIGPARSGGLCVWDRTPTRSPPGRIVATELRSPARMCGRDRVXRSSYLSELSMMYRYRAFSFLMSQICFFFI

SEQ ID NO: 150525 - protein, 100 aa, Oryza sativa
  Clone ID: PAT_MRT4530_50755C.1.pep
SLKVGEIVSSAIVTETVNKIISGMIDNYEQKLSADELMERLEMAQIKLELALETSSKWQITSEPLLRWQKKLKRATEECDDTLRKCRQHVQKKKEKKPAA

SEQ ID NO: 150526 - protein, 105 aa, Oryza sativa
  unsure (1)..(105): unsure at all Xaa locations
  Clone ID: PAT_MRT4530_50756C.1.pep
MSINMYTRGYCKLSYRSIXLLPVHRHPLYRCFYLSSGGTWHLTRGCSGFRSPAKGXVLRSAGLGNCTGYIGVVQGCIALISWIALIRLIYLPTXNLSYILVNLVW

SEQ ID NO: 150527 - protein, 108 aa, Oryza sativa
  Clone ID: PAT_MRT4530_50757C.1.pep
VRPPYPCSRSARASASPPSSAAPSGTPGPAPSPLAPAPPPVQAALLPSSPQSPPVVPCRRLPPPPASSSASAAAPPWRALWGLSWRVVRYGGVRRGGVRKTINSVLAS

SEQ ID NO: 150528 - protein, 642 aa, Oryza sativa
  Clone ID: PAT_MRT4530_50758C.1.pep
MAIAGGTGCRRGLLLPPLLFAAALLLSAASPARAFYLPGVAPRDFQKDDELQVKVNKLSSTKTQLPYDYYFLDYCKPEAIKNSAENLGEVLRGDRIENSVYNFKMRRDETCKVVCRSKLSPEAAKNFKEKIDDEYRVNMILDNLPVVVPRQTREGSQTPSFEHGYRVGYKLKDDKYYINNHLSFKVLYHEDPNSPDARIVGFHVIPSSIKHEYSAWDDKNPTVQTCNANNKITPGSHTPQDVVPEAYVVFSYDVTFEASEIIWASRWDVYLLSSDSQIHWFSIINSLMIVLFLSGMVAMIMMRTLYKDIANYNQLDNQDEAQEETGWKLVHGDVFRPPVHSGLLCVYVGTGVQFFGMTLVTMMFALLGFLSPANRGGLMTAMVLLWVFMGVLAGYTSSRLYKMFKGTEWKKITLKTAFMFPGIIFALFFFLNALIWGEKSSGAVPFGTMFALFLLWFGISVPLVFVGSFLGFKQPAIEDPVKTNKIPRQIPEQAWYLQPAFSILAGGILPFGAVFIELFFILTSIWLNQFYYIFGFLFIVFIILIVTCAEITIVLCYFQLCSEDYHWWWRAYLTAGSSALYLFAYAIFYFFNKLEITKLVSGILYFGYMLIISYAFFVLTGTIGFYACFWFVRKIYASVKID

SEQ ID NO: 150529 - protein, 907 aa, Oryza sativa
  Clone ID: PAT_MRT4530_50759C.1.pep
MKPSECPPWIDPGNAVRVVVKCASYVANLEYGLLSMSEQEHDWWVDKCKGYSLDKFCDDMTSKVIWGPSQEIVVWGLDFDSGTEWKVTNNEQFEKWFQSGWKEKVVYLGVEVVTKKGYKPAESYVDRVESTTQVVTSVLSVDLGVPSIAEGSVISAKPTGQSIARCGVINSDSIDICSPVQMTNEEDTGDTCNHAPNVEDSAALVDWSKLAIILDGLDGDAHALLDEDELFDAMGFKKTDERAAATAIQEEAALPVIPIEIQQDMIDAAIVVSDEVPADPELVWDRDDPPMEVGTKYPSMNEFRMAVKQHAIVSEFELETEKSDPDRFRGKCSANGCPWKIRAKTQADKSVRIQINEEDHHCASRSRVLGKMASQAWVAERAIPFLKKKKDMGAKELQGKLQETYKTTIGYQTTWYGLQRAKDKLFGKFDDSFDWLYRFKAEIEMRSPGSVVEIDIVRVGDKRPKDNWVWFMEQLGNSIGPVENLVVHTDACKGLETAVKKVFPWAEQRECFRHLMENMKKLFHGNIYGKKMWPAARTYMPQKHQMWMDEVFEYSSDVKPWLDEHHNLLWARSKFSCQSKCEYINNNLAESWNAWIKGLKDLPIDALADAIREKTLILFEKRRRISTALNGVILPVVIHQLNAASKGLGHLKVTKGDPYQAEVTEIHNDEELTRHVVYLDKCTCTCREWQVTGKPCQHALAVITTVRQPNMEKYVDKAFSVLRFQAAYASTIPNITDKKQWPQVEKEFKLLAPVSKKRKVGRQRKNRIPSALEKGKGKATRQIKCPECGVFGHRKGSARCELTGTKKRKRNKKTTTKVGRKKSKGVSDEQVTTPRTRAVTAREGAAETQVQPSQTSSPGPVTRRRLALELDQSSQVAPAIVEPPKKLTPRKKLASKKKSATPPKLLD

SEQ ID NO: 150530 - protein, 1886 aa, Oryza sativa
  unsure (1)..(1886): unsure at all Xaa locations
  Clone ID: PAT_MRT4530_5075C.1.pep
SNQLDYDLVGISVPQYPLYPVYGYHLSTVARQVGALGTQGSTTMSSSFVDNNVNTSLSQAFPASTMLVWTQVGEIVFPVYTTTPISTGPPMTGNENAVATNQGDSMSKNPPVETENRSSTTSKLGKDSDMAKPCPSDMNHEPAKMTSEATRSWCPIHHTKKHTLQDCWVFLNVRAEIRAYKERGIQHYGSSTTSVPREVLAIDDVGTSMQANAEAANQSTTPAQHIRAVQAILRETPYDPVLNDDLERWTERLRESVTNLSNAFEEAATAAHQDQPPTGDANGEDPERRESPQRATPPPRGAGDLRDQINGRREARRIRDNVNHSRRHVSSRRHDNGNRGDRSNEDQDHDNHHDRNDRERRGPDNAGHGRRRNDDDNGDRCRDNSERQRQDSRDPGCHPRNHASEPSDPSSSSSSASSSSSDRHPRRTHDRRQPTAPNAGCRAFGRSLRDVRWPERFRPGAIEKYDGSTDLEEFLQVYSTVLYAAGADDNALANYLPTALKGSARSWLMHLPPYSISSWADLWQQFVANFQGTNTIPEITDASVIRAFKSGVRDRYTTQELATRRITTTRRLFEIVERCAHMDDALRRKNDKPKTGGEKKSATDASESSKKKNRKNGKRKAQAEVLAAECANPPKRLDPQGSDTKKSWCPIHKTDGHSLEDCLVFKKSLEKHMAFEKGKRVRVVEKNEETAPHESDSAYSDSDLHVSHIFGGSTTYSFKREYKKVEREVCSTWRGAAPKMKCTLDAMGIPQSELTPTDQPFHGITPQSSSRPLGKITLHVTFGQANNFRTEQITFDVAEFDTTYNAIIGRTALTKFMAASHYAYQVLKMPGPKGTITIQRNAKLAVQCDKRSLDIVEQTPSPPATTEPPKKPSDMPGVPREVIEHKLMVRPDAKPVKQRMRRFAPDRKQAIREELDKLLKAGFIREVLYAEWLANPVMVRKANGKWRMCVDFTDLNKACPKDHFPLPRIDQLVDSTASCELLSFLDAYSGYHQISMAKEDEEKTAFITPFGVFCYVKMSFGLITAGNTFQRTVQGALSNQLGNNVEAYVDDIVVKTKTSDSLINDLRETFNNLRRYRLMLNPEKCTFGVPSGKLLGFLVSGRRIEANPEKTKAIENMKSPTRLKEVQKLTGCMAALSRFVARMGERGQPFFALLKKQDKFIWTLEAEEAFIALKRYLSNPPVLAAPQLNEELFLYIAATPYSVSTVIVVEREKVQRPVYYVSEALHDAKTRYPQIQKLLYTVIMTSRKLRHYFQAHRVTVVSSFPLGEVVRNKDVVGRIAKWVVLADFVADWTMPDNKSDNQGDNETWTMAFDGALNSQGAGAGFILTSPSGDQFKHAIHLNFRATNNTAEYEGLLAGIRAVAALGAKRLIVKGDSELVANQXHKDYKCSNPXELSKYLAEVRKLEKRFDGIEVRHVYRKDNVEPDDLARCPSRREPLEPSTFLDILTKPSVKEVSGEVSPNTPDISSEVTEAERAVADIETTDDWHIPLIKFISSEELPEDDTEAEKITRKAKIYCMVGNDLYKKALNGVLLKCVSTDDGRHLLLDIHEGIYGSHAASRTLVGKSFRQGFFWPTALKDACDMVQRCEACQFQSXTHKATRASAPDYPSDLAVLVLGARYTWAIPTRTGWLQIPIXVAIDKFTKWIEAVPMGEIKADNAIKFITGIFCRYGLPHRIITDNGSQFISADFQDYCIGLGVKICFASVSHPQSNGQVERANDIVLQGMKTSVYDRLMSQDKKWVEELPSVLWAVRTTPTTSNKETPFFLVYGSEAMLPGELRHQSTRVQKYSDENQEEHRDNDVNLLEKHRERVVVRAASYQQSLRRYHEKRIRARILSIGDYVLRRVQTQAGRNKLSPKWEGPYTITQVLRSGAFKIADGDGRELANS

SEQ ID NO: 150531 - protein, 151 aa, Oryza sativa
  unsure (1)..(151): unsure at all Xaa locations
  Clone ID: PAT_MRT4530_50760C.1.pep
KRKVGSQRKNRIPSALERAKGKAQSQIKCPECGVFGPRKESARCELTGTKKRKRNKKXPXKVGRKKSKGVSDEQVTTPRTRAVTAREGAAETQVQPSQTSSPGPVTRRRLALELDQSSQVAPAIVEPPKKLTPRKKLASKKKSATPPKLLD

SEQ ID NO: 150532 - protein, 62 aa, Oryza sativa
  Clone ID: PAT_MRT4530_50761C.1.pep
RKIKLVAVKPLGGRGPAKLIRKAIPFLQLGSLRILVTKKLATKKLTQSLIYIFWGDPELPIW

SEQ ID NO: 150533 - protein, 198 aa, Oryza sativa
  unsure (1)..(198): unsure at all Xaa locations
  Clone ID: PAT_MRT4530_50762C.1.pep
MVGCEHMVLKVVLMTIKDQFASHCFCVPRLIPGRGFYAQISSEITSEFPGVTSKKRKVGRQRKNRMPSALEKGKGKATRQIKCPECGVFGHWKGSARCELTGTKXRKRNKKTTTKVGRKKSKGVSDEQXLALELDQSSQVQPSQTSSSPGPVTRRRFALELDQSSQVAPAIVEPPKKLTPRKKLASKKKSATPPRLLD

SEQ ID NO: 150534 - protein, 88 aa, Oryza sativa
  Clone ID: PAT_MRT4530_50763C.1.pep
AILNKNGICGFKAGLPGMGNLIKFNRENANVNLHRRPNWDQQRAFQERTFQLRATEKGKVVKGTNPNLRLALIMEGTFVGPGDTFITL

SEQ ID NO: 150535 - protein, 101 aa, Oryza sativa
  Clone ID: PAT_MRT4530_50764C.1.pep
MDSHTGDSDTTSSSSSLTLFSISVQDSSKAAASVQDSKYPAGRCPVVGGEELGDDRDVTKLDCREEVGIGTFVPVSPPRLCSGEMGKRMCPWVLTEGAQKQ

SEQ ID NO: 150536 - protein, 592 aa, Oryza sativa
  Clone ID: PAT_MRT4530_50765C.1.pep
MKPSECPPWIDPGNAVRVVVKCASYVANLEYGLLSMSEQEHDWWVDKCKGYSLDKFCDDMTSKVIWGPSQEIVVWGLDFDSGTEWKVTNNEQFEKWFQSGWKEKVVYLGVEVVTKKGYKTAESYVDRVESTTQVVTSVLSVDLDVPSIAEGGVISAKPTGQSIARCGVINSDSIDICSPVQMTNEEDTGDTCNHAPNVEDSAALVDWSKLAIILDGLDGDAHALLDEDELFDAMGFKNTDERAAATAIQEEAALPVIPIEIQQDMIDAVIVVSDEVPADPELVWDRDDPPMEVGTKYPSMNEFRMAVKQHAIVSEFELETEKSDPDRFRGKCSANGCPWKIRAKTQADKSVRIQINEEDHHCASRSRVLGKMASQAWVAERAIPFLKKKKDMGAKELQGKLQETYKTTIGYQTTWYGLQRAKDKLFGKFDDSFDWLYRFKAEIEMRSPGSVVEIDIVRVGDKVHFNRFFCAFKACIDGFLEGCRPYISIDSTALNGMWNGHMPAANAIDGHNWMFPLAFGLFDSETKDNWVWFMEQLGNAIGPVENLVVHTDACKGLETAVKKVFPWAEQRECFRHLMENMNKLFHGNISTL

SEQ ID NO: 150537 - protein, 168 aa, Oryza sativa
  unsure (1)..(168): unsure at all Xaa locations
  Clone ID: PAT_MRT4530_50766C.1.pep
RPDPSVLGELVYSIPGAKNVLEMKCDGFVLGLAINHCMFNGVGVMQFVNSXGVPLSVPPALDRALLRARDPPQVAFLHHEFTQIDDGDDGGSPAQNGAEPFLHRSFRFTSESIAHVKALVSVDCGGGGRAPTAFEALGMGHAWRSKLLFAVDGRPQFTSPPLPLFYLS

SEQ ID NO: 150538 - protein, 164 aa, Oryza sativa
  unsure (1)..(164): unsure at all Xaa locations
  Clone ID: PAT_MRT4530_50767C.1.pep
LKCDGFVLGLAINHCMFNGVGVMQFVNSXGVPLSVPPALDRALLRARDPPQVAFLHHEFTQIDDGDDGGSPAQNGAEPFLHRSFRFTSESIAHVKALVSVDGGGGGRAPTAFEALGMGHAWRSKLLFAVDGRPQFTSPPPARRRRAQPRARGRCPPAGLPRGEK

SEQ ID NO: 150539 - protein, 713 aa, Oryza sativa
  unsure (1)..(713): unsure at all Xaa locations
  Clone ID: PAT_MRT4530_50768C.1.pep
MEAPAGGGYLLGGQPARCSGGHSTGSNGEGFGGHPATSPPSSSWVSLXSEEMRTPNAFFGLGTNSGEDIEMGDGDSDSEQVGPVDEHVNPVIQALTRKFRSEAWKEFVPILIDNEVGAGKCKHCDTEIRAKRGAGTSSLRKHLTRCKKRISALKIVGNLDSTLMSPNSVRLKNWSFDPEVSRKELMRMIVLHELPFQFVEYDGFRSFAASLNPYFKIISRTTIRNDCIAAFKEQKLAMKDMFKGANCRFSLTADMWTSNQTMGYMCVTCHFIDTDWRVQKRIIKFFGVKTPHTGVQMFNAMLSCIQDWNIADKIFSVTLDYASANDSMAKLLKCNLKAKKTIPAGGKLLHNRCATHVINLIAKDGLKVIDSIVCNIRESVKYRDNSLSRKEKFEEIIAQEGITCELHPTVDVCTRWNSTYLMLNAAFPFMRAYASLAVQDKNYKYAPSPDQWERSTIVSGILKVLYDATMVVSGSLYPTSNLYFHEMWKIKLVLDKEHSNNDTEVASMVQKMKDKFDKYWLKSYKYLCIPVIFDPRFKFNFVEFRLGQAFGENAKERIDKVKKRMNMLFKEYSDKLKDSNANPLRQAEHVMAISENDPMADWEFGNKFDILNWWKTNHSKYPTLACIAQDVLAWPASTVASESAFSTGSRVISDFRCSLTMDSVEALICLQDWFRASAGPNINVSSVNEINYSDNFVNLDLEDSMDGQDGGSL

SEQ ID NO: 150540 - protein, 78 aa, Oryza sativa
  Clone ID: PAT_MRT4530_50769C.1.pep
ILDSSNDLLHVLCKVIAASLTGTRRIKVLLRIKYIDQYLSSFVTVYSCYCYGIQVFNLNTKPVHHQVTKETDQSNMSE

SEQ ID NO: 150541 - protein, 192 aa, Oryza sativa
  Clone ID: PAT_MRT4530_5076C.1.pep
MTKPQLACLRRSAYVTSRQSIPTPRSQLMGAGAGDWPVFVDGGGSSYKTSWSGAAAVIVCLCAVAAVFLIMAGITQLCKRVFPAAPPAPPPQRRRDDDDDDGIVVAVGIDEATLQALPLVLYGEARTAQTSCAVCLESYGGGDVLRALPECGHLFHRDCIFTWLRRRPTCPVCRAPPSPAPPADVLGLQLSV

SEQ ID NO: 150542 - protein, 688 aa, Oryza sativa
  Clone ID: PAT_MRT4530_50770C.1.pep
MRTPNAFFGLGTNSGEDIEMGDDDSDSEQVGPVDEHVNPVIQALTRKFRYEAWKEFVPILIDNEVGAGKCKHCDTEIRAKRGAGTSSLRKHLTRCKKRISALKIVGNLDFTLMSPNSVRLKNWSFDPEVSRKELMRMIVLHELPFQFVEYDGFRSFAASLNPYFKIISRTTIRNDCIAAFKEQKLAMKDMFKGANCRFSLTADMWTSNQTMGYMCVTCHFIDTDWRVQKRIIKFFGVKTPHTGVQMFNAMLSCIQDWNIADKIFSVTLDNASANDSMAKLLKCNLKAKKTIPAGGKLLHNRCVAHVINLIAKDGLKVIDSIVCNIRESVKYMDNSPSRKEKFEEIIAQEGITCELHPTVDVCTHWNSTYLMLNAAFPFMRAYASLVVQEKNYKYAPSPDQWERATIVSGILKVLYDATMVVSGSLYPTSNLYFHEMWKIKLVLDKERSNNDTEVASMVKKMKDKFDKYWLKSYKYLCIPVIFDPRFKFKFVEFRLGQAFGENAKERIDKVKKRMNMLFKEYSDKLKDSNANPLRQAEHVMSISENDPMADWVQHISEQLSEQVDTELDIYLKENPIQEFGNKFDILNWWKTNRSKYPTLACIAQDVVAWPASTVASESAFSTRSRVISDFRCSLTMDSVEALICLQDWFRASAGPNINVSSVNEINYSDNFVNLDLEDSMDGQDGGSL

SEQ ID NO: 150543 - protein, 38 aa, Oryza sativa
  Clone ID: PAT_MRT4530_50771C.1.pep
PDHPAHAEQPRLETCLARDLELDPRNPRTAGLRALKLH

SEQ ID NO: 150544 - protein, 69 aa, Oryza sativa
  unsure (1)..(69): unsure at all Xaa locations
  Clone ID: PAT_MRT4530_50772C.1.pep
IEMWHYTFDTYIFVDKLKMTVXVQSMAXIPDYSHRQLSRSLKIKSTGADELNIPSKHXLLXNQEXLKWN

SEQ ID NO: 150545 - protein, 52 aa, Oryza sativa
  Clone ID: PAT_MRT4530_50773C.1.pep
TTNLLLWGTTINYMLQHQLNQQHSCDAGVAENGVEAGYTKWPKHYANYGANY

SEQ ID NO: 150546 - protein, 57 aa, Oryza sativa
  Clone ID: PAT_MRT4530_50774C.1.pep
MEVENPSLKTLQCVAQVRPLAEKEETRRPGRGRMASWGAGSGGKANGERTEEGGATG

SEQ ID NO: 150547 - protein, 128 aa, Oryza sativa
  Clone ID: PAT_MRT4530_50775C.1.pep
MAQLGSVWAVHGRRCCRQRYSRRTNLEDRMLFKQCFAPTNAIDDKSRSKNVRRCVVYTSMMNRPLTWSWHDKPMLRRKWKESYMYKQDNHMHVKKRTIILPSIELALAKAIVSSPVSAVRIWREERQP

SEQ ID NO: 150548 - protein, 88 aa, Oryza sativa
  Clone ID: PAT_MRT4530_50776C.1.pep
MDAPDAFLMAPIICLVSLDEPEEDLTIYVPLDSIPLEYSRSIPVKLFSTKEQLLFELSAPRGEFYEPPPSSGSIYITGYEIRPELISM

SEQ ID NO: 150549 - protein, 638 aa, Oryza sativa
  unsure (1)..(638): unsure at all Xaa locations
  Clone ID: PAT_MRT4530_50777C.1.pep
MARRWPPLVVGLALLLLLSVAASSVVAKTDQPDVAALNVMFESMNKPSELLGWKASGGDPCEQQLXSGLGLSGTLGYQLSSLKSVTKFTXDVSKNNLNGEIPYQLPPNVVQLNLGKNQLSGQLTDMFSQLPKLTTMDLSFNSFSGNLPPSFQYLKNLKTLDVESNQFSGHINVLAKLSLEDLNVKNNKFTGWIPSKLKSIDNLETGGNSWSSGPAPPGMEKESSAGSSNGRDDSGINGFAIGAMVIAVLLAALILLSVLRRNHSSPVSSHYYTDESGRRNSSAVNMKSLEHSPSMGCKTPPAVPRKSMSDNEFENKLNHSRRSTDPISLMNHSSSDLQAATGNFSSNRQLGQGTTGCVFRAKYADGRVLAVKKFDPLSFSGSSDFMDTVNGIAKLRHTNISELVGYCSEPGHYMLVYDYHMNGSLYDFLHLSDDYSRPLTWDTRVRIAACTAHALEYLHEVCSPPVLHKNIKSSNVLLDADLNPHLSDCGLSFFYEDASENLGPGYSAPECSRPSAYVMKSDVYSFGVIMLELLTGRKPYDSSKPRTEQCLVKYVAPQLHDSDALGSLADPALRGLYPPKALSRFADCIALCVQADPEFRPSMSEVVQSLLRCVQRTISNRGMAGYLSNSQRSDISDW

SEQ ID NO: 150550 - protein, 123 aa, Oryza sativa
  Clone ID: PAT_MRT4530_50778C.1.pep
RSRYLCCLKRRLRSQRRGAVVQVGGEGDDVADRRGDGVDLATSVVAMAGRRKDDAEVAGAGHQQDEVLADADQRPDDVHERRLLRSRARESPDHDGRAPLPADQEPRLVLRAADALPLHRLPA

SEQ ID NO: 150551 - protein, 115 aa, Oryza sativa
  unsure (1)..(115): unsure at all Xaa locations
  Clone ID: PAT_MRT4530_50779C.1.pep
MVGCEHMILKVVLMTIKDRFASYCCETLTVPTTXQRGQRLYLLYSMVHYGVPDXEAARSPWGSLGSPXPLVIEGVIMIQGVLSQPLFGYFPVSRYMVNMMLRLCLVGTVVHLWPE

SEQ ID NO: 150552 - protein, 104 aa, Oryza sativa
  Clone ID: PAT_MRT4530_5077C.1.pep
MDISRANEGYTSCGPVVEMSWHRAGVLLLGAQSCLPVLEVPAVGGVGSVLLSMAGMGWKLCHVFRPYAVVLKCEMVGLGWLGTSWDLGSGYQFGLNHRRPWVKA

SEQ ID NO: 150553 - protein, 233 aa, Oryza sativa
  unsure (1)..(233): unsure at all Xaa locations
  Clone ID: PAT_MRT4530_50780C.1.pep
QPKKSNLPPSTLFIFYLXSRTETEWARFFPSKSDLFSCVFLKLVEGKYFLYPPLSFPPTIGLYPEEINAESNSFSSLSLQLTLGFSGSNPLKPPPSPADAQPRRAVDSVVAAASPRRRXVRTEVRNLGRPLPAVAGRRRPVAAVDRTAAAAQARRRPSSVVRRVGEYRXDRVVVLYADYDPGMVHCGELCCAGGIVTASIRVLSGIATHGRHDVEAVSCGYSGTSLARVKLFE

SEQ ID NO: 150554 - protein, 400 aa, Oryza sativa
  Clone ID: PAT_MRT4530_50781C.1.pep
MAMDGGAAAVLREAHRLTGHTDRVWSLAWNPSPGAGAGPVLASCGGDKAVRIWKRAADGAWQCSDVLEDTHNRTVRSCAWSPDGKLLATASFDSTTAIWEYSGGDFECVATLEGHENEVKSVSWSASGSLLATCSRDKSVWIWEMQPGNEYECVSVQQGHTQDVKMVQWHPILDVLVSVSYDNSIRCSSVIMADFKFSVAKVWADDGDDEWHCVQTLTEANNCGHSSTVWALSFNQKGDRMASYGMWGFPGFLSIVKFLRSKQVTRKVTNVIQLLFSDDHTLKIWDTSADLSQPKTSDNQESWRHLSTLTGYHNRTIFSAHWSSEDIIASGAGDDAICLFAEDKSSMVEGPSYRLILKKEKAHDMDINCVRWCPQDPRMLASASDDGTVKLWELRGNALD

SEQ ID NO: 150555 - protein, 102 aa, Oryza sativa
  Clone ID: PAT_MRT4530_50782C.1.pep
MVGCEHMVLKVVLMTIKDRFASYCCETLIVPTTSQRGQRLYLLYSMVYCGAPNCEVARSPWGSCVMQRVLSQPLFGYFPVSRRMVDMMLRLCLVGTVFVYLG

SEQ ID NO: 150556 - protein, 627 aa, Oryza sativa
  Clone ID: PAT_MRT4530_50783C.1.pep
MGMEVVGTEAAPAEVKVTDGEVNLFQENESKATAKEREEAVLFGSDNSTATANGAANGADLAPPKDAEEDWPEARKTHSFFFVKIRLLEDPKLKMKIDQAEKDFQKKIQARSQIFEAIKAKKNERFGIISELKPLAAENKQYNEAVSEKLKAIEPLRNRLGKFRDENNAIRAQGAGICSSIEELEKSIKRLNDRISHESIPLDEEKRLIKQIRELEKTRPKVISTSANRAQIQDTVVERDAIQDQVKIIGEGIDGVKKERQAVRSKIKVLEDELKAIDMEMGSLQEDLTAANARKDKAHESLVQLRHARDAYNASFHQNRQLLSKARDLASRSELAQVQELYKTQVDKFVAEWCNSKAFREDYEKRILSSLNSRQLSRDGRMRNPDEKPIFIETEAAAPPVEQEPIQSKMPAKQAKEAPAPQAEVSPKDESRVKAIAKPSKAKSSLDADDDYEAESPKEKPKPKEVDVAKLKEIKRQEEMEKNRLALERKKKLAEKQAAKAAARAQKEAEKKLKREEMRARRRAGAADTEASTESDNRSDGAAEAQAEDDSAPASAPVMREQRESVRYSRNVVTKSKAPLPKAILRRKKAQSYWSWAGPAAAVAAALVALLAVLGYYQYYLPASASN

SEQ ID NO: 150557 - protein, 188 aa, Oryza sativa
  Clone ID: PAT_MRT4530_50784C.1.pep
METEEDDHRLHPRTRTIADLLNQLDQIHSTSATRTTGGGGGVAPASDEAIEALKDVTGDIDQLPAECAICLHGGLDAAAAPAGWKEMPCGHRFHGGCLEKWLRAHGTCPMCRHQMPTTTAPPPPAAEQEDYLDGDEEEDAGDDDEVEAGVGPLPLELRVVVAHSSGGYGGVAASASTTRRLLAWSTTI

SEQ ID NO: 150558 - protein, 84 aa, Oryza sativa
  Clone ID: PAT_MRT4530_50785C.1.pep
MAAAAGEGGDSGKFRFVLTVRLWGMKAQSVKNVARGLCGRRRDDGGLGALSCDSRGGVAGGGAAWLRGGRVATRHYVAGMVWCS

SEQ ID NO: 150559 - protein, 846 aa, Oryza sativa
  Clone ID: PAT_MRT4530_50786C.1.pep
MHLASWHQAGVHPGRWENAELEIQEGSLTLHAITNYLLTQKPPDAGTASCMLLIATPPGRWRRGKNCRQRFSFHKLLVGRDDPSPSPVHDHSATALSPRFRIPIATERAVGEEGASCSSPWADGLIGERMRGDRRYALQKGKIGIILNADWFVPLSQSKSSSDAARRALDFMLGWFMDPLIRGDYPLSMRELVGNRLPEFSKEQSGMVKGAFDFIGLNYYTSSYADNDPPSHGHNNSYNTDAHAKITGSRNGIPIGPQENYGNPTIYITENGVDEVNNKTMPLEEALKDDTRIEYYHKHLLALLSAMRDGANVKGYFAWSLLDNFEWAEGYTVRFGINFVDYDDGMKRYPKNSARWFKKFLQKSNRDGNKRLVASHRCHELEAVKKIQVMAVAGAMVMSGGVLLLLLAFTCAAYNDAGELPPISRRSFPKGFIFGTSSSSYQFEGAAAKDKITDKSNGDGACNSYHLYKEDVRIMKEMGMDAYRFSISWSRILPNGSLSGGVNREGINYYNNLINELLSKEVQPFATLFHFDTPQALEDKYKGFLSPNIINDYKDYAEICFKEFGDRVKHWITFNEPWNFCSMGYASGTMAPGRCSSWEKGKCRVGDSGREPYTACHHQLLAHAETVRLYKEKYQFTEEAIRQSPFIRDNNLNRRSAKFMDPLIRGDYPLSMRELVGNRLPEFSKEQSEMVKGAFDFIGLNYYASSYADNDPPSYGHNNSYNTDSHAKITGSRNGIPIGPQENYGNPTIYITENGVDEINNKTMRLKEALKDDIRIEYYHKHLLALLSAMRDGANVKGYFAWSLLDNFEWSEGYTVRFGINFVDYDNGMKRYPKNSARWFKKFLRK

SEQ ID NO: 150560 - protein, 172 aa, Oryza sativa
  unsure (1)..(172): unsure at all Xaa locations
  Clone ID: PAT_MRT4530_50787C.1.pep
MAVAGAMVMSGGVLLLLLAFTCAAYNDAGELPPISRRSFPKGFIFGTSSSSYQFEGAAAKGGRGPSIWDTFTHQYPDKITDKSNGDGACNSYHLYKEDVRIMKEMGMDAYRFSISWSRILPNGSLSGGVNREGINYYNNLINELLSKEVQPFATLFHFDTPQALXDKYKDFL

SEQ ID NO: 150561 - protein, 133 aa, Oryza sativa
  unsure (1)..(133): unsure at all Xaa locations
  Clone ID: PAT_MRT4530_50788C.1.pep
VFGGGAHSPTGRADRTRRNISTPTLLAPEPLPSPTCSIRLNLPSEYYCNYQTDSPTETADDAEDQSTHTITDPSDRHTRSGQSVITALLQSKSNERTVDARVIRLTLKMXDLFVSSIDKIPYDTSGHQHQTDE

SEQ ID NO: 150562 - protein, 49 aa, Oryza sativa
  unsure (1)..(49): unsure at all Xaa locations
  Clone ID: PAT_MRT4530_50789C.1.pep
VXQAPFQPQGVFCLELRRTQAIIYSDGAXNKLQHTGNKHPLKSQXXPSL

SEQ ID NO: 150563 - protein, 85 aa, Oryza sativa
  unsure (1)..(85): unsure at all Xaa locations
  Clone ID: PAT_MRT4530_5078C.1.pep
AXMHAPRHPPPPPPPHARAATQARSRGRWWWVSPAAAPPALEMPLPIPDRSRRHRPKNGPPLQSNLPRPTKRKANHSIRKTKQKK

SEQ ID NO: 150564 - protein, 368 aa, Oryza sativa
  Clone ID: PAT_MRT4530_50790C.1.pep
MAPPELTDDVVEEILLRLPPDDPSCSARASAVCKPWRRLLSDPVFLRRHRAFHRRRAPPLLGFIHHVSDEPARRVPSFAQFVPTTAFRPAELEHKNCWPLDCRHGRALFQSSNVELTIWDPMTGDVRRQREPYGTLCTFATAAVLCAVPGCDHHDCHGGPFVLVFVGNDEDDDGEEIASASSYSSETGTWTAASTVHHDDSLELESKPSVLAGDAVHFLTYFGKAILRYDLTKLELSVILPPVAYGDGDALLMTAEDGELGLALFDGEASIHLWARVAGAGWVRRNVIDLYAVLPFFDPVHSLSLVGFAEGTDIIFLHTIHGDYRMELKSLQISKLWEKDRCFNIFPYMSFFVPGRDRTNCHRQQLQQ

SEQ ID NO: 150565 - protein, 114 aa, Oryza sativa
  Clone ID: PAT_MRT4530_50791C.1.pep
MPPPPDECPPGHPMYESTIIMAHGKVGNSRSTNNNNKQRHQSAGGHIHRDREGRAGTHSGCPEHYVVVHAVLEPYAPVGWGPAQRRVGGSGSSNRQAQRPRLLVMFCWVPRKYS

SEQ ID NO: 150566 - protein, 116 aa, Oryza sativa
  unsure (1)..(116): unsure at all Xaa locations
  Clone ID: PAT_MRT4530_50792C.1.pep
RCRRADANKIRQRIAATIRLVEVVGGEESRXPKAKTKPATHKVDSIALVVRKLGXTPTWRANCRNMNSAIIKRGSARDLKVDGCGDKGFRQVQALSMRGNTLLLFGDLNPPGVVLI

SEQ ID NO: 150567 - protein, 132 aa, Oryza sativa
  Clone ID: PAT_MRT4530_50793C.1.pep
CWVFLSRPSSPARAPSKTSPTPWPTPSTTTPGPTPPILSPASERPRPRVSMATHRLQLTKLGFRQWGSFQKNVRVCTRSSKCTYVSRINVGIRVARVDGCTSFGKKVRSVPEVCIFVQVLTLINKIGCCELI

SEQ ID NO: 150568 - protein, 50 aa, Oryza sativa
  Clone ID: PAT_MRT4530_50794C.1.pep
MAHGGGAHGTGRRIGCVAGRGNAAGCGGAPVCRLAAPGIPVCSGLGEARD

SEQ ID NO: 150569 - protein, 77 aa, Oryza sativa
  Clone ID: PAT_MRT4530_50795C.1.pep
GIHRHRLAAPSNWWSSRRGVSICVYDSIRFAYFGEKDSMSLISEPDYGISVFRLALSASEWQAFILLIISMTEILDL

SEQ ID NO: 150570 - protein, 79 aa, Oryza sativa
  Clone ID: PAT_MRT4530_50796C.1.pep
MIEHVIKCELMHNTIRCFTIHCKTSMWNRRQCTLHAFELQLERCNASMQRACVKYVKMCVWILNPCDFATIIYFNILHT

SEQ ID NO: 150571 - protein, 583 aa, Oryza sativa
  Clone ID: PAT_MRT4530_50797C.1.pep
MTTPAAAAAAAASSSSASSPPNPPPPSLSLMPSRLHALLCIYLPHPRPLARLLHYSAAGPPSQQQQLPPSSSPPSPSHASAELWIAKALASAALLRPRHLPGFRRIDPSPLAAAAALRLAPCASSALAVFTALHCSPLSITPSAHSCQQIIVVLCRSGRQADALQLFDQMTTHYGYSPDARFLSFLVSSCTCANLLDASATLLSKASEFGCRVEAYAYNKLMSSLIGRGRVHDVVALFERWIQDRVYSPDVWSFNVVIKGVCRVGQVQKALELVERMNEFGCSPDTVTHNILVDGLCRTNEVSRGHEVLRRLQRDGVCMPNVVTFTSVISGYCKAGKLEDAMAVYNDMVASGIMPNTVTYNVLINGYGKVGDLGSAVEVYQQMTRLRCPPDVVTFSSLIDGYCRCGQLDDALRIWSDMAQHRIQPNVYTFSIIIHSLCKQNRSDEAIGLLNELNLRPDIAPQAFIYNPVIDVLCKCGKVDEANLIRKGMEEKGCRPDKYTYTILIIGYCMKSRISEAIMFFHEMVEAGCSPDSITVNCFISCLLKAGMPNEVDHVMRLASGGASSIQEVPSPVRQRLDISVAL

SEQ ID NO: 150572 - protein, 120 aa, Oryza sativa
  Clone ID: PAT_MRT4530_50798C.1.pep
MERGGPCDGLCRFRIHLGTRGDCPLPAGDGAKNEKVSSESSFREDQEEFSRSSPKPNPSLKVKVSGSVQDNKLPAESEHHTLSYAGPRSLDGILRDTGEARSTAQLREAASGTVAVQTKD

SEQ ID NO: 150573 - protein, 90 aa, Oryza sativa
  Clone ID: PAT_MRT4530_50799C.1.pep
GRAGGYHGGLTWPMVVAPHGSRAMPAVLPHLPQTRRIIYADLDCSCAPRNPNHRRVLTPRRNGRPPPTSGPGRRLIAGTYEASSPRWQRY

SEQ ID NO: 150574 - protein, 172 aa, Oryza sativa
  unsure (1)..(172): unsure at all Xaa locations
  Clone ID: PAT_MRT4530_5079C.1.pep
XPXFTXSNXXXSFPXXLXFXXXVXNRXXVFXSXXSPFXXXIXXXLXXXIPXXXLLLXLXXXAXGGKXXXXXXACARRXXASLQPVTDARGXXXXALSXAXAYARRPXPLXSPCLPXTGXGCKXXXXXRPAAXLPPPSCLAAAKEEGXXEXDGRMGXXRVRVRGRMGGCGXVG

SEQ ID NO: 150575 - protein, 70 aa, Oryza sativa
  Clone ID: PAT_MRT4530_507C.1.pep
MTIFSIQKLVSFFRSVTQQKLWQKLMNTLCKTDNKSNRNNHGLSDMLCTFYGNHGIPFRLRDHCSNFATG

SEQ ID NO: 150576 - protein, 168 aa, Oryza sativa
  Clone ID: PAT_MRT4530_50800C.1.pep
MEPARQLDGGGIAMEIVEEEDAGATRLGRLSLSLDLNGGGGGAFRPSTLLDEYERLAIEAQLDRAVLRRSYSEPSPSRLAVVAPQDKQEAPPGAAGRRAKEEEKPGAGRAPARRSWLLEALKRLLCWLGIGGAWGGGRRRGEEPAAPCPPAPPPRMQLLDYLTTTSTT

SEQ ID NO: 150577 - protein, 161 aa, Oryza sativa
  unsure (1)..(161): unsure at all Xaa locations
  Clone ID: PAT_MRT4530_50801C.1.pep
ASGAAAASVMAYAADGRAARLMRYRXKRKNRRVEKTIRYASRMAYSETRPRVKGRFAKRADYHYRLAPASYFMLVFIIYCVVSTFYSLDIDLSLLSEIISFFYIFLFFLYFFVFLKYFFLEGVCGVFFIFFLFLFISVLLIFLIFFIFLIFFYFFYIFLFF

SEQ ID NO: 150578 - protein, 85 aa, Oryza sativa
  unsure (1)..(85): unsure at all Xaa locations
  Clone ID: PAT_MRT4530_50802C.1.pep
MPSPTTSATATLTYTSAFGAASLGGGREQMSIVVSFKXPKLINXDLNQLQLPFNTALKKLNPLINCSXLNVFHSLPRTASINFMR

SEQ ID NO: 150579 - protein, 239 aa, Oryza sativa
  Clone ID: PAT_MRT4530_50803C.1.pep
MDGPDRAKPIGQLRGVVAGHGHSQGWPDRPQRAAARRRPDNRRRRRRNAALAREAAGKEEKEEGGGSPRGAATEGAAAEGGGGAPWVDDAEGRTAVDGEGEEADEVQHTTTKPTKVTASGDRGYGGDDCRPETVVSVVARERKTVAELGLVATKPAVATEQCCGGSSDGRRQPALTKAMAARVGSGGGSPVVDWGSVAVDDVRRGVVMPTAWVARRGGGASSDEVRLEATNGSAASGAR

SEQ ID NO: 150580 - protein, 63 aa, Oryza sativa
  Clone ID: PAT_MRT4530_50804C.1.pep
MEKYIKGKTNVRELESSSAGLEVGTESEPAIVIVLASLSSRARIASASLGLCSGFWPVQFFME

SEQ ID NO: 150581 - protein, 604 aa, Oryza sativa
  Clone ID: PAT_MRT4530_50805C.1.pep
MVGCEHMVLKVVLMAIKDRGEKSVGVAGESIASGFERKIMIQERCTVQGAPAPTGEPHTSAGQGARCTVDRDHKDGPPPVHGMDGLDRLKPIGRLRRVVAGHGHSQGWPDRPQRAAARRRPDNRRRRRCNAALGREAAGEEEKEEGGGSPRGAATEGAAAEGGGGAPWVDDAEGLTAVDGEGEEADEVQHTTTKPTKVTASGDRGYGGDDCRPETVVSVVARERKTVAELGLVATKPAVATEQCCGGSSDGRRQPALTKAMAARVGSGGGSPVVDWGSVAVDDVRRGVVMPTAWVARRGGGASSDEVRLEATNGSAASGGVGPEGDVFALLFVSPRGLGRFRLGPEGWGAPTPCGFCAAYSHVSTSRLLPAEVETRSLESHPGPPAELAKGGLRGLPAPKTAFVEATARRRHHRADHEPLIGAPPAGTSYGAQAVEAKASTAGRRGVGGWGKLGPPPDAIVTSATVASAASLRHRYLCCQSPPRLPCAPTSCAGCRQPPSRHTPPPPPHIVTARERLALARSGVEASDPPTRKPDPAAAASDALPPPHVIGLSFARRPAFHAQRRGAIESWPRRRHPGWPHGTLVAHSGGGEGRERRRKWRWGR

SEQ ID NO: 150582 - protein, 70 aa, Oryza sativa
  Clone ID: PAT_MRT4530_50806C.1.pep
MRKRGEAEASVAVVQASNGKQQEAATAWRRHGVHFSASNFIQAPLSALPEYSEILYANLLTNFSSEKDIL

SEQ ID NO: 150583 - protein, 585 aa, Oryza sativa
  unsure (1)..(585): unsure at all Xaa locations
  Clone ID: PAT_MRT4530_50807C.1.pep
MMGMDCKILAGSGCSGGARGDARRIQAASAYHNAHLNQAMRFGRLQVDGTLYGQAETTSPPHIESSWLRPVEGVSFASLVDTEQPSAGPNLLLPLSALRSPRARLSSPRLGGSCALVGSSSRRVPYAPLILRGSHSHAATTAASPPPCRHAPAASASSPLRLTSHLRSTRAFASPLTLQARLPHSSASAPVTPRNSLVIFELXFVYEILVQESAEAQPXLNNQSRLHSSISKPGIYHSKPGAKQVVTNYSIVYYVFWNTSDALTNLRNDGNDKLTXKTRRKTNKNQINSTXKDHPNDQPKPANGTGGSEQLXLKDDSTRTNERSXGTPRSNERANDSTTAAAKPEHEXKSHRTKMIGEGEMTMATRWQHTETTTTLDRHRIRLDWIKTLGINYTGERHGGDDFPATNGGNRGVDEVGDGLAITTATFPRSSTQGNWLPSLLLTLQSRERWRHRRATAEXDGEVRLDQRPAAAKLGFTSARYFQRSSATGKWRXGLLLLLANPTTAAATEGDDHSDGAGLLERRPEVEREGERGESDSGDDGGRDLRGXGRRRXGVLYIGTGARDQAHNDGKNSGKFRIFAGKRKD

SEQ ID NO: 150584 - protein, 527 aa, Oryza sativa
  Clone ID: PAT_MRT4530_50808C.1.pep
MVLEYIVSKASEENFVTVVGGYWLMPPPSSKVRRLAIQSGDSKRGSGTDSMNLSHVRSLTMFGSLSQLPSNSFKFGIVQVLDLQGCKGFKQHHTKELCNMLLIKYLSLRRTDINKLPKKIGKLQYLEILDIRETNVTKLPRSVCQLERVANILGGNKRTRKALKLPAEDVKKTIKSPWGKEAKESGGKKTLKTLRILSGIEIVGESTAEGDFHHLTDLRKLAIYKLNVRRGDKPFENLISSIEYLCGYSLHTLVIEDVSSEFLESLGDLSSPPKFLKSLELSGKLVELPRWITQLEELTKLTLSVTVLRTDNLRSISQLKKLFSLTFSLSGAKPDPLSTAILEENKNYSDGEILVPAGGFENLKLLRFSAPLLPLLNFQEKAMPSLERLELRFRIFEGLFGIQNLEILKEVHLRVNYRAGEVTKSIVQNVATQVKKEATKSVATEANKENVASATNKEGTEFIIENVTLEANEATAAMKEATTSTVENVATEGNKENVTTDTNKENVATAEKKEVKGPIIIVDQYYD

SEQ ID NO: 150585 - protein, 161 aa, Oryza sativa
  unsure (1)..(161): unsure at all Xaa locations
  Clone ID: PAT_MRT4530_50809C.1.pep
VESRHNFIWKNRAPPKVXFFAWVLSKERLPTSXNLLKKKVVQSATCDLCNGATETAFHFCIQCSFAVAFWNSLEIHLHITSMQELHNLDRPSRIPTKHYELFYLLCFWGLWNHRHDIVFRNQNPSTARLISKCLEDVNLWVERLESWKEILSSLLHSNVTN

SEQ ID NO: 150586 - protein, 365 aa, Oryza sativa
  unsure (1)..(365): unsure at all Xaa locations
  Clone ID: PAT_MRT4530_5080C.1.pep
MSRAPTSWGFVYSRVNKPRGXVRGPGPREWGPRGSLTVHGGPGAPGLTPAGAVGPTRQPYPRARAADGRAPRGSRSARPKAATSARPAGGGAPAPLWSPAAXHRHGGAAAERGEGKGETRRRSTAHPRSTATTKKEGGGAARADGDGGTPAVGELDGGADGDGGGAAKPEKATLGRETVPASGESRPKVVGDRGERGRRRELDSGEERARQRVETGEGGAGRVXMGLEGREGGRGWKETGREVRPPSMAPAKFAGANPPVXMREREGKMGGKGEGITGSNSLLLISRGXTGGGGIRGGGGARXRARRREQREEGDDGWAPPVSEGGGRARSSAARARGEAGWAAGERREGGEMGRIRPKRGKGDF

SEQ ID NO: 150587 - protein, 484 aa, Oryza sativa
  Clone ID: PAT_MRT4530_50810C.1.pep
MAIAVSGRWTRLRTLGRGASGAVVSLAEDGASGELFAVKTAAAAEAAMLRRERGMMSGLSSPHVVPCIGGGDGPDGSYNLFLEFAPGGSLANEVARDGGRLEERAIRVYAADVLRGLTYLHGMSLVHGDVKADNIVIGVDGLAKLADFGCAKTMDSERPVSGTPAFMAPEVARGEEQGPAADVWALGCTVIEMATGRAPWSDMDDVLAAVHRIGYTDAVPEVPVWLSAEAKDFLAMCFARNAGDRSTAAQLLEHPFVAFACHEVKAAQPKPRWVSPKSTLDAAFWESETDDEEEVDEITESLCDRIKSLACPVSALPDWDSDEGWIDLLGEQCEACDSEAARESIDVARSAPSKVSSAATVPAAEVVLVGGGCCPSNEADAFDQSIGGDIQAADRSIERRNKVCAGSDNDVLPFRLVCNGICAMEFFQFFTNLAVLLCLIPSVPTMFSSNCELRPCLEQKLSPYAPRNISIQLYYVSNHAIINN

SEQ ID NO: 150588 - protein, 37 aa, Oryza sativa
  Clone ID: PAT_MRT4530_50811C.1.pep
PSKSNLISLSLTFIKTKTKEQPYLQKVHPLITNDTTF

SEQ ID NO: 150589 - protein, 101 aa, Oryza sativa
  Clone ID: PAT_MRT4530_50812C.1.pep
MPMLETGHPKSGTPTVIGAPRVFVWQVPPWLELGRCQSDTPSATFTNSWLRKELPAAAMIHLPRKEATERIAEDWGGKSTSIWRKLRRGLSSVEMGTQVPS

SEQ ID NO: 150590 - protein, 218 aa, Oryza sativa
  Clone ID: PAT_MRT4530_50813C.1.pep
MVVLVEASPRGGAGDHPASCELDAGGDVGSGGRQYAAVVVGGTFDRLHQGHHLFLKAAAEFARERIVIGICDGPMLAKKQASRMYAYLIQPIEKRMENVKEYIKAMIASYHFQSIKPDLEVHVEPIVDPFGPSIVDEALEAIIVSSKETLPGGLAVNRKRAERGLAQLEIEVVELVPEKSTGNKISSTAFRKKEAERELHKQQQEAPHEQAVELECRI

SEQ ID NO: 150591 - protein, 115 aa, Oryza sativa
  unsure (1)..(115): unsure at all Xaa locations
  Clone ID: PAT_MRT4530_50814C.1.pep
MDETGAAEAIGMEAPPSPTAMATSGSCVVEIPTDITLSHDDGERFPEISMVRPQRHSIYRVPEYIKDMTNRDAYRPQVVSLGPFHYXEPPLKPMEAHKQRAVAHMVSRSGKPRQE

SEQ ID NO: 150592 - protein, 152 aa, Oryza sativa
  Clone ID: PAT_MRT4530_50816C.1.pep
GAGSGAMQPPMRMPGMPPNTLGQGMPPTMPTMPYSPHAGTQVSTPSKIDPNQIPRPMAETSVIIFETRQGGQAAIPPAASSEFIVKDTGNCSPRLMRCTVNQIPCTGDLLTTSGMPLSLMVQPFSLPHPSEEPIQILRSCGLFGAASSRSSF

SEQ ID NO: 150593 - protein, 31 aa, Oryza sativa
  Clone ID: PAT_MRT4530_50817C.1.pep
FFFFFFFFFFFFFFFFFFFFFFLWGAILFIY

SEQ ID NO: 150594 - protein, 67 aa, Oryza sativa
  Clone ID: PAT_MRT4530_50818C.1.pep
MASGYSNVGGKIGQAAIDFCASPASSRKTAATARSGEPAGHGESFARRMASRIRQGFGKETYGSGFV

SEQ ID NO: 150595 - protein, 175 aa, Oryza sativa
  Clone ID: PAT_MRT4530_50819C.1.pep
FLQYSNRVHGVKRFPNFTTTSPGSPARSPAAAAAAAACSAAATAGTGTPRRSRPRHRRRRDARPLPRPPSAPLSPRRPPPPPPPTTTRRPQYPPPSNPPPLPARSPTGQGPCRRHPLLLLRRRTTAAAPSGCPPPAACPGSTRRQRGGWPTAGAAAAAGRGGRRLPQIRPARTPP

SEQ ID NO: 150596 - protein, 84 aa, Oryza sativa
  Clone ID: PAT_MRT4530_5081C.1.pep
GGAPDAGPPLAEGFPGCRKGDIKGRAASPPAFCHLGIPHGGGGVCSWPPGTGPHPFVWNQLLAVHGCVLGPKKFGVPFIWRRVL

SEQ ID NO: 150597 - protein, 35 aa, Oryza sativa
  Clone ID: PAT_MRT4530_50820C.1.pep
MPNDFAAYQLRNHRTGNGSMWPPPHRIGTPPSADY

SEQ ID NO: 150598 - protein, 97 aa, Oryza sativa
  Clone ID: PAT_MRT4530_50821C.1.pep
SRCRHMAIVVLLQVPQWGGPIDDASLHGHSCSPSSTTTRSSKSRDGARRWCLAPWPSSSSSKHRNRETQFQGQSLSLVPRSLAVAAILRAPREELSI

SEQ ID NO: 150599 - protein, 56 aa, Oryza sativa
  Clone ID: PAT_MRT4530_50822C.1.pep
TYLALLFLTFPLTDTHIHSISSPDSNHHKHFRFIPRFVPKHTQHTQHRVRGPPPSI

SEQ ID NO: 150600 - protein, 363 aa, Oryza sativa
  Clone ID: PAT_MRT4530_50823C.1.pep
MAEVCTPGAAEAELWLPDEFLDDDFFTVEEKAAVAAKSESDEEDGLDGLARRMADLLAGEGGKGTGSKVEVMAGSPQSTLCGLAASGEDSPNGGASQFSSPPSSPLEQPPTDPWDVLSEAAGQVARLRMNSIPVPQKPHAHAGHGRFVPPARNPSPPVQAQKTAGAFQFAPNNNMLTQRQVQVAHFHLLKQRQLLKQQREQQLAAAAAAAWGTHRAGVGVGAPLGLNSSGWPPLQKAHQQASSAAGMRAVFLSPPGGKTERTGTGVFIPRQAGAPAEPKKKPSCSTVLLPARVVQALNLNVDDLGARPCFPGGFVLDHDALVSRSNAMLTTQKRVQHHLHAATAAPPTLAAAREVNLPQEWTY

SEQ ID NO: 150601 - protein, 66 aa, Oryza sativa
  Clone ID: PAT_MRT4530_50824C.1.pep
QQRNISTTKIFRKCFFTSAGGLPMGGKIINPSFKFGREEENTCLRLKNYLHLTYKKAGYHTRLSYY

SEQ ID NO: 150602 - protein, 100 aa, Oryza sativa
  Clone ID: PAT_MRT4530_50825C.1.pep
SAGPCTLCSRWKHHLEEVWASLPLCAKTCLNPKPSRRPLARYILKALENPLRVVQGGITVEFITHDVLHLEALGILLFMGTLAGARSSGQHWGSQPGSSQ

SEQ ID NO: 150603 - protein, 123 aa, Oryza sativa
  Clone ID: PAT_MRT4530_50826C.1.pep
QEIISLSKLETLRRAITGEFLLTLKLIETPEQPSKRRIQEELYPFQRTVNLHGNFKYQRKFHASKSAPLSTGLLHHPSFPFPWESSRRPRALAAGCAVSRDGNAAVVSGDPIIAASGRAAVGE

SEQ ID NO: 150604 - protein, 314 aa, Oryza sativa
  Clone ID: PAT_MRT4530_50827C.1.pep
MAEHPPNHRGEGMDDFVAELARMTLVVGYPNTPEYTTVPPLSGELPHRVRLEVHGYVGTCLANMVVEASGGTADHACQEAAYLMMARVRERHNYIFHDTAYRIHPRRASGSDVSSFRPTAGKNDTTFVHMCAVMRGMDRMHSDLHKASKALNDGKLVRIIALKDEIARLKRENAQLKGLPTPRGVRIRTTPRKSTTAPMRIQLAPRYPPPSAAPAAPPAPPAAPAAPAPVPVSAPASALSFAPASAVRGPASGNGGWLPATPSGSRDRSSSSSSGSEPGSGETYLPGSRSRSEGPGDEQEDAFDSTDRRSRSEH

SEQ ID NO: 150605 - protein, 111 aa, Oryza sativa
  unsure (1)..(111): unsure at all Xaa locations
  Clone ID: PAT_MRT4530_50828C.1.pep
AHRKKALRNRRNSREVARVDREEVVDRTGSTFSSTCVLLAVLPRXSAPQTSGTSTAIHTRASKVHRXPIRIPIXSSCTLGCNPKTPFRSTCQQRSLAERIDPPGIHKDHIG

SEQ ID NO: 150606 - protein, 284 aa, Oryza sativa
  Clone ID: PAT_MRT4530_50829C.1.pep
MSSSVGGGGGGGAGGGGGGGGADIASLLDKAKELDQLRKEQDEVVTEINKMHKKILSSPEMVDKQVDATLIRLRALYTRAKELCESEVSASSALVGLLDGLLQSGTSAAQRKKIVGEQKKKRMKSDTDTTRFSSASMRSQLDQATNLKGEQVAAKVKSDEEKDEWFVVKVIHFDKETKEYEVLDEEPGDDEESAQKKYKLPMSDIIPFPKRGDPSSAPDFGQGRQVLAVYPSTTALYRATVASNRKRKSDDYLLLFDDDEEDGNLPQRAVPFYRVVPLPEGHRQ

SEQ ID NO: 150607 - protein, 76 aa, Oryza sativa
  Clone ID: PAT_MRT4530_5082C.1.pep
MGSSPETQSGEKAFFKEEFRSRFLVEEALPQAREEKRRAPPPPPGFPEKKKKAPPARKGGEEFREGSFFFFCAAAL

SEQ ID NO: 150608 - protein, 98 aa, Oryza sativa
  Clone ID: PAT_MRT4530_50830C.1.pep
MAVVREYISPHHGHASIAATAGEFASFTLHETVTSVEQLPTSVTASSGLVGDGTRVSSTLATSATAASAMDIIAGYICAGMPVMEKMMEWHGFNFIKF

SEQ ID NO: 150609 - protein, 42 aa, Oryza sativa
  Clone ID: PAT_MRT4530_50831C.1.pep
MRFKFDSESSVSRRPLSADRPRPSWRLDGGAMLTSPGFEVEV

SEQ ID NO: 150610 - protein, 174 aa, Oryza sativa
  unsure (1)..(174): unsure at all Xaa locations
  Clone ID: PAT_MRT4530_50832C.1.pep
PFVFEPVIAIHDVGIILWTNLGDVRTXQAVHELAAVRLPGHWKEEDRDPARGPDLILDTERRPHLVDTHCMGNSGYWHTRVCAVVWSLQAGTGRSADLHDLPLKLNAIDCMRGKRTHIEDQKRGGTEHEDLVNGDDDSHFQETMDNKGWNXNLLKWAYKFISGDLLSKKRMRNF

SEQ ID NO: 150611 - protein, 96 aa, Oryza sativa
  Clone ID: PAT_MRT4530_50833C.1.pep
AQQLNILTPLFAQRVQPNLNPTQPGKHSIQHKIYNTANQQINWVATRGKGLNRERDRKGLNWGWDRDKKCLNWGRAGPNLFRNPPRYEVSAINHIF

SEQ ID NO: 150612 - protein, 87 aa, Oryza sativa
  Clone ID: PAT_MRT4530_50834C.1.pep
GAPNFFKQGGFCWGPLEKYFWGFPCQNQSGAVEPYRVGKQILFFPCFLKHMGLLWDAFFKLTRWWCVVTHQAAPRLFCSCLLASGPL

SEQ ID NO: 150613 - protein, 184 aa, Oryza sativa
  Clone ID: PAT_MRT4530_50835C.1.pep
MAAARVGAPLLLHARRAAGASPVGAAPALEDGAIWGVIAAGVSLHTDYLPCVSHLTFAASFVDPRPHHDAESEMFGTVSTDVRSTSGDGLVLVRFYDSRNRLPTVRSCGGEPMREWSMRRQSHERDRASTWSASAFVVSRHYLNHWPLRQALPQPPVAQASFASVARRPGELCLSRPLPGRASP

SEQ ID NO: 150614 - protein, 55 aa, Oryza sativa
  Clone ID: PAT_MRT4530_50836C.1.pep
QNIHTYILLHYHTGRLQTQIVLSRLKHDPLVHCSRVNSSVHLQTFWVVATAGSSR

SEQ ID NO: 150615 - protein, 71 aa, Oryza sativa
  Clone ID: PAT_MRT4530_50837C.1.pep
GDERQTRTLGRRRKGGRGRRRDGDHDGDLPERRRRLERRRSTAGATATTAARGARRRRRRPTATGDAKERL

SEQ ID NO: 150616 - protein, 112 aa, Oryza sativa
  Clone ID: PAT_MRT4530_50838C.1.pep
VDGVEDDAAATGPLGHVLPLERRRDGGGGGLACEDVGDGSGERERRGPREGRARLPPLPPPSGNRWPRETVASPAAVSGRGRVRLPQPPPLPPPPGSLCRAAAARERRGRET

SEQ ID NO: 150617 - protein, 101 aa, Oryza sativa
  Clone ID: PAT_MRT4530_50839C.1.pep
FYCRCSFCDSLVVKSNLLCPLAVDAALAAVDPAHPDLLDLHSSGSEADLDRVGVVRLGKSAAAASAATAWTSLGAAMAGRDSAWARSETSREGDEDRMETV

SEQ ID NO: 150618 - protein, 74 aa, Oryza sativa
  Clone ID: PAT_MRT4530_5083C.1.pep
RGSYDSSLFSSPCCLFTLPSRFCLTLISSTHAFTQQLFIKDIICPAHGRWGKKKKNYNRESLSRCSSGGNFAFI

SEQ ID NO: 150619 - protein, 245 aa, Oryza sativa
  Clone ID: PAT_MRT4530_50840C.1.pep
MAATADPRAKPPTAHHLKPWVPTPTPRSHRVPSLPAVSGGGGGGARPARDRRRSSSSSSHRRGGTTTDAGAVDEEEVVEAYDGGLEDLRAKLMGHIKDVADRLHLPQPKPQPRSPEPETPPAPAPLPPPPPPPPDTSVAAAAAAARPWNLRERKRRPSARGSTAASPTTAWARRADTTRGGGERPPFAVALAAEEIEEDMYALTGGRPRRRPRKRPRVVQRQLDSLFPGLWLTEITADAYKVPDD

SEQ ID NO: 150620 - protein, 118 aa, Oryza sativa
  unsure (1)..(118): unsure at all Xaa locations
  Clone ID: PAT_MRT4530_50841C.1.pep
MTMMMRREAGTAAGWRACAKRVKGGDQGEKGKGWRPALLAVACGGRSRTCKRWAGHLEYSELAESRSPQVKGSGKGEKGSGGGWPAEWGGGRLLGFWRVQLXGGKGEMVSERDEIIWE

SEQ ID NO: 150621 - protein, 137 aa, Oryza sativa
  Clone ID: PAT_MRT4530_50842C.1.pep
MDLLEVPYMCGAQIMNAYLGNFISSLARQVGLKFQKTESCLGLQHLGIFLVQIKEKAERMRAGLEEAQRRHVRALVAAVACATMGRVRAAEAKLDRARCHNSELEEKLRQISAEGQAWMGVAKSHEAVAAGLRATLD

SEQ ID NO: 150622 - protein, 346 aa, Oryza sativa
  Clone ID: PAT_MRT4530_50843C.1.pep
MATSSSPRLLSSFLGDRLLSASARPLLRGAAPGSRRAAYQATRTLCNLVDILFNRGQSDKPEDNPRRLRPGKVSPRLSVPKHIQRPPYVNARQRPGLHNGPEIHDERGIECMRASGKLAAQVLKFAGTLVEPGITTDEIDKAVHQMIVDNGAYPSPLGYCGFPKSVCTSVNECICHGIPDSRPLEDGDIINIDVTVYLNGYHGDTSATFLCGNVDDKAKKLVQVTRECLDKAISICAPGVEIKRIGRTIQDHADKFKFGVVRQFVGHGVGQVFHAEPVVLHFRNNEWGRMTLNQTFTIEPMLTVGSVNPVIWSDDWTAVTEDGSLSAQFEHTILITEDGAEILTQC

SEQ ID NO: 150623 - protein, 58 aa, Oryza sativa
  Clone ID: PAT_MRT4530_50844C.1.pep
RNEICFFVCFFYCFFFGETTRIHGLINFTGNISGSLHYTNSFLVTHIVGENTSCFINQ

SEQ ID NO: 150624 - protein, 114 aa, Oryza sativa
  unsure (1)..(114): unsure at all Xaa locations
  Clone ID: PAT_MRT4530_50845C.1.pep
GSGTMATSCSVNSTIPCVIQPMPPHDSCNMPFGPYRPVSGXXXXLPPPPPAATAAACGCSMPSSASAAAIGAGSDRSGRRRRSGVRFCFLLFSLLSLSLFLAFPFLPPPLWCES

SEQ ID NO: 150625 - protein, 70 aa, Oryza sativa
  Clone ID: PAT_MRT4530_50846C.1.pep
GLQEFGTRIDLCFSIRSLYCTNFSLHYNQATSYPSWWQLVSSVTYSVVVCKNHFVSLPFSQKVQAHVIHI

SEQ ID NO: 150626 - protein, 159 aa, Oryza sativa
  Clone ID: PAT_MRT4530_50847C.1.pep
MGVQWTPPFRRATIRPGTLQLCAGHRCLVFQLAHADAAVPAALRRFLADERVVFVGYGVRSDCRKLEEQHGLEVARTVELRSLAGMGNTSMQRMAEEHLGWDGVTTKPRKVGTSRWDARRLSKEQVQYACVDAYLSFRLAVHVVAAPEPDATSSTSSSE

SEQ ID NO: 150627 - protein, 58 aa, Oryza sativa
  unsure (1)..(58): unsure at all Xaa locations
  Clone ID: PAT_MRT4530_50848C.1.pep
GRKFFFFFLRRLEPLFSTDIEQNHHQVSYLWCFILLYADSRLKFPEWTAADMGDFVFX

SEQ ID NO: 150628 - protein, 58 aa, Oryza sativa
  Clone ID: PAT_MRT4530_50849C.1.pep
MQLVIGFFATAFCNVGLVMGSRLASMPWDPKLSPRHQSLPMFSCGSLHESTHISHRES

SEQ ID NO: 150629 - protein, 84 aa, Oryza sativa
  unsure (1)..(84): unsure at all Xaa locations
  Clone ID: PAT_MRT4530_5084C.1.pep
FILSNIASILXVFKKLESKHVVAPEKVVAALKLMEHRYRAKDFTTSQDTSLVASSTYYLTHVDFMYRRVYARKGETVTEVFNGH

SEQ ID NO: 150630 - protein, 100 aa, Oryza sativa
  Clone ID: PAT_MRT4530_50850C.1.pep
MQLKLTAAVAALLVVVFFALFVGSCEARRLRALGRDAASMKLHGSDPTNQKKDLSSTSMDHHMASGDDAKAKDGVAMASPASTATTLFGVELILGVLVLK

SEQ ID NO: 150631 - protein, 136 aa, Oryza sativa
  Clone ID: PAT_MRT4530_50851C.1.pep
MQLKLTAAVAALLVVVFFALFVGSCEARRLRALGRVSSLKPSSSPPTPYKDAASMKLHGSDPTNQKKDLSSTSMDHHMASGDDAKAKDGVAMASPGAVQTTIVVRVSNRLSHQERRVDTAFHLDYAGPRTHPPSHN

SEQ ID NO: 150632 - protein, 242 aa, Oryza sativa
  Clone ID: PAT_MRT4530_50852C.1.pep
MPIPEPDRTSEPDSEPMRPIQSPRVALVATETSRCARPTPCGPHRLRIRPEVGPRRVKFRASAAPDLEWMKMPVLPLLSLRCHVSGQINGATPSMGVSFAAVRFSLRRARATTKHAPTTTTTRRQAQPAGVRRRLPPTAARHWARARPSRPPAAWEGKGREEGRGWEGKGRRWRGRRREIDLRGRRGGGDEEREIDLSGWEGRTGRRGPGMGGGMGGGGGEGDRSEREEREIDLRGRRGRSI

SEQ ID NO: 150633 - protein, 169 aa, Oryza sativa
  unsure (1)..(169): unsure at all Xaa locations
  Clone ID: PAT_MRT4530_50853C.1.pep
IGIRVTIEDVLLYPDSTRTLLSYRDIHQNGIPIKTHMHNXDEFFLLTKPNGYGKRSDKIPSLTSRLYXTYINLIAQVAYRVIFQNVDAFHTWHDRLRHPDIEMMRTFIGNCIIHNFNTDRFVKTSDFVCTACATTKQILRPSXFKITAESLXKFLERIVGSKTTPLIRA

SEQ ID NO: 150634 - protein, 64 aa, Oryza sativa
  Clone ID: PAT_MRT4530_50854C.1.pep
MGNAKKKQVAERQAKSTEPTHLLREEKTPQWHPTNVSSGTRPNPKYKKEAASVAKRATPAKAKR

SEQ ID NO: 150635 - protein, 305 aa, Oryza sativa
  Clone ID: PAT_MRT4530_50855C.1.pep
MASSSPPVRPWADLQHDLLVMIMSRVGLPDLLSGGATRACSAWRASARDPLVWRRVDLRDWAVLTSARRRLAAGDGEAAAAGRGRVPLQAALCSVLEIVVRRAAGRMEALLLPEFADEEHLLFLAQRNPNLHYFSLPATCITYDQFRKAIDKLQFLKGMAVDEGLINHDVLSHVHQCCPDFLELKVFALYVDEEMASIICNSLPRLKKLEIPNSDMSCAAIIKFLDCLEELEYLDISGYETSAISSAVLQKASRLNIFIWNSKFELGEFTDCSNCGEHCINPQEPCKCVMEHRVMDWLAGPSQPS

SEQ ID NO: 150636 - protein, 315 aa, Oryza sativa
  Clone ID: PAT_MRT4530_50856C.1.pep
MVLQEKQEQEKRKQEELNREREELEMMPLACIPLGHGEMQWESPCEAMHRRFKLQWALMGRFILPLTTMKLQVVGFVEGYSDPETIGFTEQRSYIETLRPVAMLSVLPQEHTQVDQILSFKFLVDNVPIRLNDGIILTGWSGITEALPAKCRNDRKRRHDLGLSAIFALEAEEDQGLLYQQKQQENEELRLNALSLPGTLSGGGEGEGEYSLLFESPEESDWAKVSEPYVPKFPTEEEIQKREEWRKEQLKLVMEPIIQPVQEPRRGSNYFMCNPGSRSTTKAELPTDEPYAVLLYYWTLSDKSESIVISVPTLM

SEQ ID NO: 150637 - protein, 104 aa, Oryza sativa
  Clone ID: PAT_MRT4530_50857C.1.pep
HQGKSHRRHRRRRRHHCRGQPPKERSFVAAISIKTREKKSQPVAFSDHSLFLFFCFLDRSSKKLTPKKGPPAADQFFMPSSRQRKKKRGKKSHLSLSLYVFGIR

SEQ ID NO: 150638 - protein, 428 aa, Oryza sativa
  Clone ID: PAT_MRT4530_50858C.1.pep
LNRKLCRLNAARIDWQEHDFGLSAIFALEAEEDQGLLYQQKQQENEELRLNALSLPGTLSGGGEGEGEYSLLFESPEESDWAKVSEPYVPKFPTEEEIQKREEWRKEQLKLVMEPIIQPVQEPRRGINYFMCEPRSRSTREAELPMHEPYSVLLYYWTLSDKSESVVAGLLSGQATFFCLHCNSILQVYTLEIIVADSLHSCKLDISGFVAIRDLRDGRRNYIFNREIGHPFTVVSRHGVLRLPTLSPRRAIHTNPEILLEFNLKIKRTGNGIDSYRELIQGVVEHPSIYRHDWSRVNELSILPCGNRSTPMMRLKLARILKGVEATVELQPLRLPPGGIDLRCTARSGRIADDIELFDGKYGGDDDTSLQFVVATELHGNMEIHLEGVCNGVSRRWCIGFVPKFHALFSQEVDLQFAQLLLTVAWSM

SEQ ID NO: 150639 - protein, 890 aa, Oryza sativa
  Clone ID: PAT_MRT4530_50859C.1.pep
MEAADVRARESLFIPIDLNEKSSHEKQDEEEIHLRQLEQLLAPFNPWEAGDPELEEWQCARPKTRHPTPPPPPPRRCHLLFTMKLSVKRGQAMWSRKETPRFSAERAGGFPLRFARLAADGSPRLELEEDGGRVGALSCFESRPWPWSRREEVVALAAADSVPVRVVAVIRRFPVAGGDRLAIVSNMRMASLVVRLHDKLFVLPPDGSTVTIAFSERWFRVPSNWTEEKLYARVGHDFINITAALEDLARTLYQMYEQEEQKKMVLQEKQEQEKRKQEELNREREELEMMPLACIPLGHGEMQWESPCEAMHRRFKLSMGTDGEVRCNFVEQECPRVMRRRLACDGRFILPLTTMKLQVVGFVEGYSDPETIGFTEQRSYIETLRPVAMLSVLPQEHTQVDQILSFKFLVDNVPIRLNDGIILTGWSGITEALPAKCRNDRKRRHDLGLSAIFALEAEEVQGLLYHQEQLENQDFRLNELSLSGEPSVGGEGEAEYSLLFESPGESDWVKVSEPYVPKFPTEEEIRKREEWRKEQLKLVMAPIIRPVQEPRRGINYFMSEPRSRSTREAELPMHEPYSVLLYYWTLSDKSESKLKPKRKVYPRLVCLEWCTCSPSSMLQVYALEIIVADSLHSCKLDISGFVAIRDLRDGRRNYIFNREMDHPFTVVSQHGVLQLPTLSPRRAIHTNPKILLEFNLKMKRTGNGIHSYHDLIQGVVEHPSIYRRDWSRVNELSIVPCGNNSTPMMRLKLAVISKGVEATVELQLLRLPPGGIDLRCTARSGRIADDIELFDGKYGGDDTSLQFVVATELHGNMEIHLEAVCNGVSQRWCIDFVPKFHALFSQEASAKEKSAVFIVAKDLPKFTFLTLSARWCEDFSVSYGQNVVPFTLIH

SEQ ID NO: 150640 - protein, 478 aa, Oryza sativa
  Clone ID: PAT_MRT4530_5085C.1.pep
MAAGGGGGGGGGGGGGEGFEERVKRLFGSRLFDDVPGSSFPAASWSVAAGDVERRRWAKPSEARDEEEAREGADAADRGDTPCASAFYDDNGCLRAGTRRRRRSKQEEFEGDLDEEDEEEEEEEKERGGGGGKQQQEEDEEEGVRVSIGLDPTLDREILDENFLFAGYSLLLWSVISNKIFILQEEEDKYDREAFGREDAFDRVYMNEIMDDGINMSINTVVPDILDDSVEEIHRFSRDPRADMGAASARLKEYDSSAKGGTCSLAQPNEFPSGRIQAMKTDDANVKPILKRKEEQGDSKPRKRVKFAADVKDQSAELPEQDEDSPMVPQSMDLVIGKDSSTPSESPGVPDYVKNPAKYTRYTLDTPECNDETNRRAFADLHDILRRMEPEPEAPPVEIPTSVTFIPRKKTIDAMTVDEGPKSNDANSSLIGLAAGASDETEQCEMDEDDPKALLPPQVQTNTKMNSRRYRSSRTDDE

SEQ ID NO: 150641 - protein, 778 aa, Oryza sativa
  unsure (1)..(778): unsure at all Xaa locations
  Clone ID: PAT_MRT4530_50860C.1.pep
MAEQGGGVCWAYLPAELAELIAAGGGGGXSTDYVRFRAVCSPWRAAAPSPRGRGVLDPRLHPGARWMMFPEGFGRFPGHRALAGHARFLDLSASAAAALIRVPLPFLRDHCVLDSPDGLLLLQRDGDTAIRLLHPFTGDIAEFPPPRFPRPPAPPPGLRPHRRSDIRKICAAVDVADEGIVTVMLAVEKIGRVAFAAAGDDDWVISTWKENQLDNALDGLIHASVIDPPRRRRREGEESVAQPPVPPPRRIATCSSEEIHLPSLVELDSELMLVGYNGSSLSRILVLRLADLAMGMIVPVANIGDHVLFIGARSLCVSPGWLPSIRGNSIVCFHAGENYLAQYHLGTGSWSPASDGQLMLSPPSRPCSLIHHIFTCCYRQFCYISSVLYGDLVSGSAKVQTCSRNKGLIFCSESEPEWWAMRKYRYGDSTRQGFHPRLSQTAPPPNPRRVAGTSVEGHRCRACKTSSSDSASTVNHTAARPETTSHAGTQLQETNGAADDQRDRTPETNSARHPYRTTELPGNDWKQPSLRREEHLRRGERPPHRQRAPEEQLLKKGRTGSGGLEGREMEAPSPSPAKAAVGRQPGQDHAAAGARARSARAPLDNRTSRRQPESRRQPGSVVADETAPELLRPRAPASTKTVAGRAETRRHAAVVTPARSGEATGSGDALDGAAQSPTAAPPSPQGAPPPRRRRDLAVPPPRPRRPAAIVATPAPGRDGAEGDGPAAAIPARRPALPATSSSGGEAGRREEEGRRWLGFRPCTYSILSLNKLVSSTVK

SEQ ID NO: 150642 - protein, 898 aa, Oryza sativa
  Clone ID: PAT_MRT4530_50861C.1.pep
MEACSSPIFLEEKAAHQKEEEEEIHLRLLDQLFAPFDMFEGGDPVLHEWQYARPIYGKERDAAPPRHCHRLFRIKLSSKRGQALWSHRETRRFCAEREGGFPLRLARLAADGCCLELEDDGGQVGALSCFRLSTSQSGLSRKAEMVAAVVAAGSPPVRVVAVIRRLPGAGGDRLALTTNMWIARLAVRLHDKLFVLPPDGSTVTIAFSERWFRIPSKWTEEKLYARVGHEFINITAALEDLARNLYQMYEQEEQEEMILHEKQEQERRKQEELDREREELEMKPLAYIPLGHGDIKWESPDEAMHRRFELSVGTNGEVRCSFVEQECPRDMRWRLACYDRFVLPLTTMELQAVGFVEGYLDPKMDGFTEQRGKTVALRPVAMVSMSPQVDQIFSFKFLVDNLAIWLNDGVVLTGWSGITVSIHCGDDDNSCAFPSFTSADNWTHQVLEWKVDDNNPISCSCLLLQLNRKLCRLNAARIDWQEHDFGLSAIFALEAEEDQGLLYQQKQQENEELRLNALSLPGTLSGGGEGEGEYSLLFESPEESDWAKVSEPYVPKFPTEEEIQKREEWRKEQLKLVMEPIIQPVQEPRRGSNYFMCNPGSRSTTKAELPTDEPYAVLLYYWTLSDKSESKLQPKRNLHPRLVCLEWCTCAPSSILQVYTLEIIVADSLHSCKLDISGFVAIRDLRDGRRNYIFNREIGHPFTVVSRHGVLRLPTLSPRRAIHTNPEILLEFNLKIKRTGNGIDSYRELIQGVVEHPSIYRHDWSRVNELSILPCGNRSTPMMRLKLARILKGVEATVELQPLRLPPGGIDLRCTARSGRIADDIELFDGKYGGDDDTSLQFVVATELHGNMEIHLEGVCNGVSRRWCIGFVPKFHALFSQEVDLQFAQLLLTVAWSM

SEQ ID NO: 150643 - protein, 52 aa, Oryza sativa
  Clone ID: PAT_MRT4530_50862C.1.pep
CLRYVVLALPPIVLPGALPLLVVPGFGLKKFQRLFFYFKVFPLHVRVLKFRV

SEQ ID NO: 150644 - protein, 105 aa, Oryza sativa
  Clone ID: PAT_MRT4530_50863C.1.pep
ITPLEKLRRLDHRLPNSPVLDRSRKPARPPDRPRSGSLQPLFLRTSPGAIAPRVPRSLPELRSGRGSAQNGPRYLGGQVHTNAWARSCGRRMVSPRSRDRDSSSR

SEQ ID NO: 150645 - protein, 126 aa, Oryza sativa
  Clone ID: PAT_MRT4530_50864C.1.pep
MGRRARWRRAWIGSSSVSVTSSGDAATSTLKLGGVCASPPIHLPPCRCIRPCGPAVELGATLDWEGRARGLGFDVEAASAATAGPAAPKRALVLVADGTVLVEAVATADVLNRAGASRRTSALGGG

SEQ ID NO: 150646 - protein, 61 aa, Oryza sativa
  Clone ID: PAT_MRT4530_50865C.1.pep
MNRKIDLGSLRRCGAWDTQLKLPYYYFRFTEGQREYGIEGLFRCRLKFSPYYIEWGHNGPK

SEQ ID NO: 150647 - protein, 80 aa, Oryza sativa
  Clone ID: PAT_MRT4530_50866C.1.pep
MVGPTWASLVIHSPRLLPTRPAGGGGARDDLEDEDAGELCLDGDTDGAGGSATRPAGGGGARDDLEDEDARELRLDADAD

SEQ ID NO: 150648 - protein, 216 aa, Oryza sativa
  unsure (1)..(216): unsure at all Xaa locations
  Clone ID: PAT_MRT4530_50867C.1.pep
VCSRKDAVIDFCLGSRTLSSTPIRFWTMHVVDNCTVQLIQKSHGEDVVVRDLETPLSLQPCPPAVILVASAGQDADHITAMELLSEVKSAGKLAASIFLQFFQIIMQXPPYTVIEADSLLETEVETLAEALESANNAVLSTISMISIMMSGLNQTFRSSINAQIMEVHPDELGQLLRSYGEARIGFGAGYNIQSAIKQAVFHCPFLRGGIKVHMII

SEQ ID NO: 150649 - protein, 273 aa, Oryza sativa
  Clone ID: PAT_MRT4530_50868C.1.pep
MAPRCSNAVFAAINVVTLLLGAAVLAAGIYYGAPHRGGGGVTECERFLRAPALALGGAIVAVSLAGLAGACCRATPLLWAYLLLTGLLILAAACFGVFALVVTNAGAGRAVSGRGFREYHLGDYSTWLRRSVEDGGHWARIRSCLVDTGVCRSLKSNQTLDEFVNSNLSPLQSGCCKPPTACNFTYQNETYWIKPPTPSNYSDPDCNSWSNDQSELCYGCQSCKAGVLGNLRSSWKKIAFVNAAFVALLLVVYSLGCCALRNNRRHKYSLVGK

SEQ ID NO: 150650 - protein, 75 aa, Oryza sativa
  Clone ID: PAT_MRT4530_50869C.1.pep
YPSGSSSSTPSAELWPAASHEWRHVTFRRDDSTVVLRPWERRGDRPNGRARRLPLFWLRNPPVKPRAALPPRQPP

SEQ ID NO: 150651 - protein, 459 aa, Oryza sativa
  Clone ID: PAT_MRT4530_5086C.1.pep
MATRRAPPPAAAAAADGSIEENAMAILDTAGIKDARDLHDDRCAFLETVRSACLAADSPSPPSWRMYNAVFQILQDSSSLELTMASLHLLMELGKQYPRAYLTDSGSGQALVAVKEAWSPFHLRSDVGCGEIGGNNRHLDHLFDSSRFSSLIEDMVETANDTDANNGIEHIKNMVLLEYLVSTLEADFVPRQIAYKEKDILTNSSGFVTESLDWVIFRESLLQMLLGVEDGISSKEGSAKSAPDLESSLAIISFEFERKALASVQKLFTMVMNLDLIRKEADTMGLTSRADGCRNPILDVILDELTYNISYLSPFLLIFVEWKWKLEIILQYFSKYCGKPAVRTRRSDNSQHDLTLENVLTLFSTAATTKAIVKKMSSEVVQLLLANAYQVCLHLECDSSKDSDTTKKIGATLLQISESFVSAFHNMRKINPDMQLSPFEKEALFTAASMARVLKNKQR

SEQ ID NO: 150652 - protein, 382 aa, Oryza sativa
  Clone ID: PAT_MRT4530_50870C.1.pep
MAKASVVVPEQVGAAAAAQVGCPCPGTTLFPYPPPRAGIAVRRKCLQAAQQLELGAGLRGGWVESMRASSPTHAKAAAALAAGVDEEHAAWMARHPSALGEFEKVVAASKGKQIVMFLDYDGTLSPIVDDPDAAFMSETMRMAVRSVAKHFPTAIVSGRCRDKVFEFVKLAELYYAGSHGMDIKGPASRHAAAKSPPHNKGVLFQPASEFLPMIEQVHQRLEQATSSIPGAKVENNKFCVSVHFRCVDEKSWGALAETVRRVVREFPRLRLSQGRMVFEVRPTIKWDKGKALEFLLDSLGFADCSDVLPVYIGDDRTDEDAFKVLRRRGQGVGILVSKHPKETSASFSLQEPAELKKSSVHYPLPAQRSNRLNRILVNWDEQ

SEQ ID NO: 150653 - protein, 46 aa, Oryza sativa
  Clone ID: PAT_MRT4530_50871C.1.pep
MAVPFSMIQWTVDGGDHMNEPAAVALPLGAMAPPVSPPSARSVGPT

SEQ ID NO: 150654 - protein, 52 aa, Oryza sativa
  Clone ID: PAT_MRT4530_50872C.1.pep
FGQGPGLGVLSRMVVSIVELKFTIFFFKARLHKCVLWIIYCLQWTMFFILPW

SEQ ID NO: 150655 - protein, 202 aa, Oryza sativa
  unsure (1)..(202): unsure at all Xaa locations
  Clone ID: PAT_MRT4530_50873C.1.pep
MAPRTRRGRFSASSPGLVAVPPPPPPPPQAGESSPRRGRCAALQRPQAPRYSPARCTALPPPPPQAGPSSSAXRTALVPSPPARCTDLLLLQAQPSSPARRAAQPPQQARRAPPPPPPLHRTGPRREPPPPPPHRSPARIGPRASGSRLSPWRASATATATAAARRRGESGTTTHARAAAARSPVHRGAAAAPAWTHASGDP

SEQ ID NO: 150656 - protein, 411 aa, Oryza sativa
  Clone ID: PAT_MRT4530_50874C.1.pep
MPPDLEEARPGPPPPRRPDRSAAGSGGGAREKEGEVERVRGWKGALPLARGRVPTPPPLAGGRAPPLPLLVSRCKARWCVETRRGRDVVRAALRGKAASGGPAQCGVAGNEQCYCPECHRTTVVVVDHATGDTICTECALVLEERYIDETSEWRTFSDAGSGEDRDPNRVGGCSDPFLSHAELGTVVAPAKRQAKDTASPPHVRVDSKSGQDSSLAVAFRAISDMADRLQLVATIRDRAKELFKKMEEAKLCARVRNRDAAYAACLHIACRNEGNPRTLKELASVMRDCQDKKEIGRMERIIRRHLGEEAGTAMEMGVVRAADYMSRFGSRLGMGKPEVREAQRAAQTLEDKLDVRRNPESIAAAIIYMVVQRAGAQTSARDVSKASGVAEATIKEACKELSQHEELLFSS

SEQ ID NO: 150657 - protein, 230 aa, Oryza sativa
  Clone ID: PAT_MRT4530_50875C.1.pep
LVAVVRASYEAGVGVMATKVGMMTYFDPATGKPVPVTVVGFREGGNVVTQVKTAATDGYDAVQVGYHGVREEKLTRPELGHLGKAGAPPLRHLQEFRLQSVDGYDPGQPLDFADMFKEGDLVDISGKSIGKGFQGGIKRHNFKRGLMTHGSKSHRALGSIGAGTTPGRVYKGKKMPGRMGGTKTKIRKLKIVKIDNDLKVVMIKGAVPGKPGNLLRIAPAKIVGKNIPKN

SEQ ID NO: 150658 - protein, 405 aa, Oryza sativa
  Clone ID: PAT_MRT4530_50876C.1.pep
MVVEQRPNHQRLGRIHGAKDGAPLAPRMLLQVLGPKGFRPCRPPPAARRLSPPRSDSTSTIVAGTAAGSHLLKIDGYSLTKGTPNGSFLISSQFTVGGHRWRIRYYPNGFSSSSADFISLFLVLDEKVKVQAKSDFQISYTGQVDEPPWLATMKADTFDGAGFRSFGYEKFVRRCDFEKLIRDDSFTIRCDIVVIDEIRAEESTEITTTTAAVVTVPPSDLNQQLGDLLESEKGADVVFEVGGQTLAAHRCVLAARSPVFKAELYGLMKEGGTAAGAVHIEDIEPRVFKVLLRFMYTDSLPEMEEEDVMCQHLLVAADRYNLERLKLICEEKLCRHISVGTVWNILPLADQHHCDGLKKACFDFLGSLANLSAVVASDGFKHLCRSCPSLMEELVVTLALPGSHA

SEQ ID NO: 150659 - protein, 126 aa, Oryza sativa
  Clone ID: PAT_MRT4530_50877C.1.pep
MDTAAQNKLAEYGDTATEKLERGYLTQLYPSCSTFLPSRVGCREGPQPLHDATFTKRSIGKGERKPAGVGGHEGPRLTKEELDPEAEATTTLLVGELWPDPGDSSQAEPRDGCVEEKDGVTEDLSV

SEQ ID NO: 150660 - protein, 106 aa, Oryza sativa
  Clone ID: PAT_MRT4530_50878C.1.pep
GCQALETQTMPRVRALAAAPIACNLYVNHDCEEGSPTTSRAQDSRCMSLRTQQDAFRWLRLSRSTTEMRKASGKPQRTSARINIAYSLDLAIATSTMLSMTSKSSV

SEQ ID NO: 150661 - protein, 85 aa, Oryza sativa
  unsure (1)..(85): unsure at all Xaa locations
  Clone ID: PAT_MRT4530_50879C.1.pep
ERSLFWSWGTLGGGRRLRLAVGVCGGLMAFRGXPRARLCRWLRSRCWRKPCHALGRFDNXASVGAVSLLGGVVMAFFHILTNLTR

SEQ ID NO: 150662 - protein, 86 aa, Oryza sativa
  Clone ID: PAT_MRT4530_5087C.1.pep
PPRSPPQGWDAAAAPPTTASPVRCRRGYHPRRPRPAWPHGHSARRPAARRRRRGPPVRRRGGRRRAPRRAPSRCRPRRAPAAGTRR

SEQ ID NO: 150663 - protein, 159 aa, Oryza sativa
  Clone ID: PAT_MRT4530_50880C.1.pep
MPKMFGFSRRRMKLGRLKGHLHDPFHGSRSPARTKRSSHPNFSRFVQGEDQVTTSVSGRADDLAWRCSSDTFDLNGRAFENSENWAVLSTEGDKPIPRFDHAAAMVGSKMVVFGGDSGHHLLDDTKILSLDKLTWDSVAPKIRGSQGGHAPKFSTMRRP

SEQ ID NO: 150664 - protein, 86 aa, Oryza sativa
  Clone ID: PAT_MRT4530_50881C.1.pep
MEACLDGAVAVAEVVLRFGRDTSRTHRSSRQLPPEIQVAERVFASSRKRILNQIWHPNLSGWIWPNDIHMGQGRRGRASKDEEERR

SEQ ID NO: 150665 - protein, 135 aa, Oryza sativa
  Clone ID: PAT_MRT4530_50882C.1.pep
MVLNTPLDPFLNVIVIGADVQRIGAGVVGAKDRHQRPRTGGAAPGRCLLVVSGGRGGADPVDVCAGPAAPLPFASSSSLSLEATAGASRGKAREPPPSPSTAPPGRREADRGGSPHPMPSRVVPPATPTAICARC

SEQ ID NO: 150666 - protein, 58 aa, Oryza sativa
  Clone ID: PAT_MRT4530_50883C.1.pep
LGGGLKTFFHRRRSLKKLVNQAACLVVLPGGAPVNSSTFRRAGWVVLAIWRCILLFSV

SEQ ID NO: 150667 - protein, 97 aa, Oryza sativa
  Clone ID: PAT_MRT4530_50884C.1.pep
MADWSITQVKPLPLKQVLWQFENQWIDPPNYPLRKATRINTTQAACRSNSAQIGTKTHTRSARESAAGDFTCVTDSTETSEEAAAGSGGLAMALSEV

SEQ ID NO: 150668 - protein, 112 aa, Oryza sativa
  Clone ID: PAT_MRT4530_50885C.1.pep
PSDLRTEPIVGHKHGETIEYVDLAGTMSNASFERDNRRNGLRMRSLTHGCRVLKRPEPMSHVVPDLEKVGNEDVGGTRSQMPLDGHGALTTPCLDMYQPSGRRQYQYGGRCR

SEQ ID NO: 150669 - protein, 245 aa, Oryza sativa
  Clone ID: PAT_MRT4530_50886C.1.pep
MVAVAWQAEPLQWSLLLLLGIWLIGCFKLFGLLHIMFPAYHGDNHSMGAATPTSPACVELVNRAEVAWSGYILMAAPVLAVWAGFISGPEISFLAFLLLLLGCRSAHCSHSRPLFSVSESPPQIRPCSSSDPLPVPSSSPDSSASPICPAASSDRSQMMPMPIDTVHRRRGDLRVDLDRVDPRSCRSSAGPATAPQPLNWSACCPVRGAAQPMVFAWQLLHVPWPLAPYAIRFLVRLSCIFPLAR

SEQ ID NO: 150670 - protein, 210 aa, Oryza sativa
  Clone ID: PAT_MRT4530_50887C.1.pep
ASIYITKQKEAQFESALSKSHIDTQINTHSMPRCIPKGTKASKTNTKRKEAHHAGARANPHIDTHHHAEGTPGGVPSCLLEAEDEDATTPATCRGRGLNSLGSPLPVPRPLPLLPHNNAKVATHWGRCLSVPRLSPLLLLNETEIVTRQGHCLPLGRGRCFSHYSMSLRSLLVGRGCRHHRCRLVVARRGRGRCVAHVWLVGEIEGEAYV

SEQ ID NO: 150671 - protein, 128 aa, Oryza sativa
  Clone ID: PAT_MRT4530_50888C.1.pep
MAAARWTKSGRARPGGTMDLDHRWSTGERSSASQLRGGGAWPDDHRQRDRDERRHGKRQNGRGRRGGGGGSPHRAPRVAEHLLDLAKGMEGLGREEEVRGGGRCAVGCGERGGCVGIACGGRERWQMV

SEQ ID NO: 150672 - protein, 134 aa, Oryza sativa
  unsure (1)..(134): unsure at all Xaa locations
  Clone ID: PAT_MRT4530_50889C.1.pep
LVRVQSHAWCSPDNGFGLASDTCAVASAASGYMVFKSLFLYIIIGTVTTTTKVQQHQQVQEQDVMVNNAVEENTIPDGGSLAWSGYAMIVLSVLALWSGFVSEPVAVFLAFVLLLLXCGFLYVAMLAPVKPKML

SEQ ID NO: 150673 - protein, 136 aa, Oryza sativa
  Clone ID: PAT_MRT4530_5088C.1.pep
MEGEPRTVATGGDGRGEAKERWQQARMTEGKPRTMATVGGDWEVTRSSGGDSSAVVDICAKEAACSDVSADDVDENPKLRSAYCCASPLSGMELLMNIADPYITAGFLAPAIASSWCCCAVSHDGVNRCCFLLRHN

SEQ ID NO: 150674 - protein, 153 aa, Oryza sativa
  Clone ID: PAT_MRT4530_50890C.1.pep
MPMHIDIVHRLCGGQLVDLNRVNAGPDHNRGVPANGAQQFNWSGFSLMLGYMVFKSLFLYIIIGTVTTTTKVQQHQQVQEQDVMVNNAVEENTIPDGGSLAWSGYAMIVLSVLALWSGFVSEPVAVFLAFVLLLLGCGFLHVAMLAPSKPKML

SEQ ID NO: 150675 - protein, 188 aa, Oryza sativa
  Clone ID: PAT_MRT4530_50891C.1.pep
TLFLPFPLRAASSPRLADPPLVPPAFRPLKMVKVDTSAFVILLYCASPMVAVAWQAEPLQWSLLLLLGIWLIGCFKLFGLLHIMFPAYHGDNHSMGAATPTSPACVELVNRAEVAWSGYILMAAPVLAVWAGFISGPEISFLAFLLLLLGCRFVYLAMLAPSKFKMSLQHFHGPHQKKKRKKLAKHLV

SEQ ID NO: 150676 - protein, 482 aa, Oryza sativa
  Clone ID: PAT_MRT4530_50892C.1.pep
MAPNNCSPNLFDLVASVCYVWMFGDFSQNTVGRLMKSWKQMQIFVKTLTGKTITLEVESSDTIDNVKAKIQDKEGIPPDQQRLIFAGKQLEDGRTLADYNIQKESTLHLVLRLRGGMQIFVKTLTGKTITLAVESSDKIDNVKAKIQDKEGIPPDQQRLIFADKQLEDGRTLADYNIQKESTLHLVLRLRVAEKSILLILDMCSLFPENVDKYAIWPTDGCDFAIILLLSTALRATVMLMHNVHHLRGGQLVDLNRVNAGPDHNRGVPANGAHQFNWSGFSLMLFGAAPMMVLPWQVITWYLLLWDSPLITGPSGMMLMHNVHHLRGGQLVDLNRVNAGPDHNRGVPANGAHQFNCPDDGFALAGGTCAVASAASCVDDLVHRLPQALRFSNRFSCILSSARWQQQPRDGMVNNAEMEEENAIPDEGSLAWSGYALMVLSVLALWSGLVTEPVAVFLSFLLLLLGCGFLHLAMLAPSKPKMF

SEQ ID NO: 150677 - protein, 59 aa, Oryza sativa
  Clone ID: PAT_MRT4530_50893C.1.pep
DPPPPVVRELPKPGVQDFSRLKVRHRAAVQEVPKPEVPHPPVPKHEHPQKLVNHSPENP

SEQ ID NO: 150678 - protein, 150 aa, Oryza sativa
  Clone ID: PAT_MRT4530_50894C.1.pep
DVDLYVNNCRLCTLAGPAQELQTIPLSWPFAVWVLDMVGPFKRATGGFTHLFVAVDKFCKWIEAKPVVTITAEKARDFFINIMHWFGVPNRINTDNGTQFTGGAFKDFCEDFGIKICYASVAHPISNGQVERANGMVLQGIKARVFDRLH

SEQ ID NO: 150679 - protein, 54 aa, Oryza sativa
  unsure (1)..(54): unsure at all Xaa locations
  Clone ID: PAT_MRT4530_50895C.1.pep
HASAHASAVFLWCEDQVTEHRAKYKDGDEIPPLVIGVSAPQGSGKTTXCFALDY

SEQ ID NO: 150680 - protein, 226 aa, Oryza sativa
  unsure (1)..(226): unsure at all Xaa locations
  Clone ID: PAT_MRT4530_50896C.1.pep
MARLRRGLEHLERRYAFYAAYHSNPANVLVHAVCVWPILLTAMLPLRYAPPLPLLRFYCPLCRQYLPVQLGFPVAVALGAYYALMDRRAGAAAAALCVAGWAAGTLLADAAGLWTFRDAWRPLLTAQAVLWSXQFFSHAFFEKRRPALVDGPVQAVVTAPLFVFIEVLHRLFGYEPTPGFYKRVQARVAAMHNGPPAPAPAPEKKEEEEKENVSKATQEESAEKDS

SEQ ID NO: 150681 - protein, 1931 aa, Oryza sativa
  Clone ID: PAT_MRT4530_50897C.1.pep
MAEQAKAHDHSPSVSGDDGEPNPRRRARTPPPPPRQSPKRGEALERVERSATSPIAGDGKERQDGERRLLVYGDGNTPQGALQAAGALLRHPPVVPDPESPAQRWLDDVAKLVMTARQRLDAGGRSSATKTSGAATTGSASSRRRARRAAAAVRRSAATPSSTPSTREDLRGEQDARASIERRRNDRSAAHATEGASSSRVSPRHGRGNQPSVPPVGGVSCRAFVASLRNVRWPPRFRPTIAEKYDGSVNPAEFLQVYTTGIEAAGGDDRVMANFFPMALKGQARGWLMNLPPASVHSWEDLCQQFTMNFQGTYPRPGEEADLHAVQRRDDESLRSYIQRFCQVRNTIPCIPAHAVIYAFRGGVRHNRMLEKIASKEPQTTAELFQLADRVARKEEAWTWNPSGSGVAASAAPGSAAQTGRRDRRRKKRSVRSDDEGHVLAVEGASRATRKGRPASDKKKEASAPSRERPTGKWCTVHNTSLHDLADCRAVKSLAERTRKWEEERRQERREGKSPAVPSGHRRSEAKQKAPAEDIDDGNDDLGFQEPGATIATVDGGACAHVSRRSLKAMKRELLAAAPTHEATRRARWSEVALTFDQTDHPPCVARGGQIAMVVSPTVCNVKLGRVLIDGGAALNILSPAAFDAIKAPGMMLRPSQPIIGVTPGHTWPLGHIDLPVTFGGPANFRTEREDALVSFLRANADVFAWRPADMPGVPREVIEHRLAVRSGARPVRQKVRRQAPERQAFIREEVARLLEAGFIREVIHPEWLANPVVVPKANGKLRMCIDYTDLNKACPKDPYPLPRIDQIVDSTAGCDLLCFLDAYSGYHQIRMAREDEEKIAFITPIGTYCYTTMPFGLKNAGPTFQRTTRISLGSQLGRNVEAYVDDLVVKTRNQETLLSDLAETFESLRSARIKLNPDKCVFGVPAGKLLGFLVSARGIEANPEKIRAIERMRPPSKLRDVQCVTGCMAALSRFISRLGEKALPLFKLLKRSGPFAWTEEAEHALTRLKAYLSSPPVLVAPEPNEPLLLYLAATPQVVSAALVVERDEDNPHSAHPHPVLTWPGSEQGGEAPEPNGGLRPLMTGVGPLPARQTVLGAPDPQEGPEATAGRPHLSPSDPAANPVPIRPGREQGGEAPEPNGGPRLPTTGDGPLPACPTTPGAPDSQDGPEATVGRPPLSSSDPEVIGTEDECAPRGHLDEERPGDMAPSEEDRPHRKVQRPVYFVSEALRDAKTRYPQAQKMLYAILMASRKLRHYFQAHRVTVVTSYPLGQILHNREGTGRVVKWAIELSEFDLHFEPRHAIKSQALADFVAEWTPAPETASVSEASSDPSQLPHTAHWVMQFDGSLSLQGAGAGVTITSPSGDVLKYLVRLDFQATNNMAEYEGLLAGLRVATGLGIRRLLVLGDSQLVVNQVCKEYRCSDPQMDAYVRQVRRMERHFDGIELRHVPRRDNIIADELSRLASSRAQTPPGVFEERLAQPSARPDPLGETDAPDRPPRPVGAQASGPEGSTPSSLRLIAWISEVQAYLTDKTLPEDREGSERVHRISKRYVLVEGTLYRRAANGILLKCIPQEQGVELLADIHEGECGAHSASRTLVGKAFRQGFYWPTALNDAVDLVRRCRACQFHAKQIHQPAQALQTIPLSWPFAVWGLDILGPFRRAPGGFEYLYVAIDKFTKWPEAYPVIKIDKHSALKFIKGITARFGVPNRIITDNGTQFTSELFGDYCEDMGIKLCFASPAHPRSNGQVERANAEILKGLKTKTFNILKKHGDSWIEELPAVLWANRTTPSRATGETPFFLVYGAEAVLPSELTLKSPRATMYCEADQDQLRRDDLDYLEERRRRAALRAARYQQSLRRYHQRHVRARSLCVDDLVLRRVQTRAGLSKLSPMWEGPYRVIGVPRPGSIRLATGDGTELPNPWNIEHLRRFYP

SEQ ID NO: 150682 - protein, 2004 aa, Oryza sativa
  Clone ID: PAT_MRT4530_50898C.1.pep
MAGQAKAHDLSPSVSGDDGEPNPRRRARTPPPPPHQSPKQGEALERVDKSAASPIAGDGGERRDGERRLLVYGDGSTPQGALQAAGALLRHPPVVLDPESPAQRWLDDVANLVMTAQQRLGAGGRSATTKTSGAATTGSVSSRRRARRAAAVARHSAATPSSAPPTREDQHGEPDARLDIERRRNSRRTPRATEGASSSRVSPRHGREDQPSVPPAGGVGCRAFVASLRNVRWPPRFRPTITEKVMANFFPMALKGQARGWLMNLPPASVHSWEDLCQQFTMNFQGTYPRPGEEADLHAVQRGDDESLRSYIQRFCQVRNTIPCIPAHTVIYAFRGGVRHNRMLEKIASKEPQTTAELFQLADRVARKEEAWTWNPSGSGVAASAAPGSAAQTGRHDRRRKKRSVHSGDEGHVLAVEGAPRATRKGRPASDKKKEASVPSRERPTGKWCTVHNTSLHDLADCRAVKSLAERTRKWEEERRQERREGKSPAVPSGRRRSEAKQKAPAEDIDDGDNDLGFQEPGATIATVDGGACAHVSRRSLKAMKRELLAAAPTHEATRRARWSEVALTFDQSDHPPCVARGGQIAMVVSPTVCNVKLGRVLIDGGAALNILSPAAFDAIKAPGMMLRPSQPIIGVTPGHTWPLGHIDLPVTFGGPTNFRTERVNFDVADLSLPYNAVLGRPALVKFMAAVHYAYLQMKMPGPDGPISVHGDLKVALACMEQRADRLAVVSKPEGGDERLDTSAPAAPKQRIVTSDEVPVKEEDALVSFLRANADVFAWRPADMPGVPREVIEHRLAVRPGARPVRQKVRRQAPERQAFIREEVARLLEAGFIREVIHPEWLANPVVVPKANGKLRMCIDYTDLNKACPKDPYPLPRIDQIVDSTAGCDLLCFLDAYSGYHQIRMAREDEEKTAFITPIGTYCYTTMPFGLKNAGPTFQRTTRISLGSQLGRNVEAYVDDLVVKTRNQETLLSDLAETFESLRSARIKLNPDKCVFGVPAGKLLGFLVSARGIEANPEKIRAIERMRPPSKLRDVQCVTGCMAALSRFISKLGEKALPLFKLLKRSGPFTWTEEAERALTQLKAYLSSPPVLVAPEPNEPLLLYLSATPQVVSAALVVERDEGNPHSAHPHPVLTWPGSEQGGEAPEPSGSLRPLATGVGPLPARQMVLGAPDPQEGPEATAGRLHLSPSDPEANPVPIRPGREQGEEAPEPNGGLRPLTTRVGPLPACPTTPGAPDPQDGPEATVGRPPLSSSDPEVIGTEDKCPPRGHLDEERPGDMALSEGDRPHRRVQRPVYFVSEALRDAKTRYPQAQKMLYAILMASRKLRHYFQAHRVTVVTSYPLGQILHNREGTGRVVKWAIELSEFDLHFEPRHAIKSQALADFVAEWTPAPETVSIPEANTDPSQLPHTAHWVMQFDGSLSLQGAGAGVTLTSPNGDVLRYLVRLDFRATNNMAEYEGLLAGLRVAAGLGIRRLLVLGDSQLVVNQVCKEYRCSDPQMDAYVRQVRRMERHFDGIELRHVPRRDNMVADELSRLASSRAQTPPGAFEERLTQPSARPDPLGETDAPDRPPRPVGVQASGPEGSTPSSLRLIAWISEIQAYLTDKTLPEDREGSERVQRISKRYVLVEGTLYRRAANGILLKCIPQEEGVELLADIHEGECGAHSASRTLVGKAFRQGFYWPTALNDAVDLVRRCRACQFHAKQIHQPAQALQTIPLSWPFAVWGLDILGPFRRAPGGFEYLYVAIDKFTKWPEAYPVIKIDKHSALKFIKGITARFGVPNRIITDNGTQFTSELFGDYCEDMGIKLCFASPAHPRSNGQVERANAEILKGLKTKTFNILKKHGDSWIEELPAVLWANRTTPSRATGETPFFLVYGAEAVLPSELTLRSPRATMYCEADQDQLRRDDLDYLEERRRRAALRAARYQQSLRRYHQRHVRARSLCVDDLVLRRVQTRAGLSKLSPMWEGPYRVIGVPRPGSIRLATGDGTELPNPWNIEHLRRFYP

SEQ ID NO: 150683 - protein, 81 aa, Oryza sativa
  Clone ID: PAT_MRT4530_50899C.1.pep
LRNNQVWPQLALVGHQSPHQDINIVQAKGQQLQPQQFGDLPFDRNLAQAQALLAFNGPSKYGIPPRDYGAPSPIPPLGGVL

SEQ ID NO: 150684 - protein, 143 aa, Oryza sativa
  Clone ID: PAT_MRT4530_5089C.1.pep
EHNNCSALGHGMFSKHFRRETATCSSIKVGSHSYSDSLRSHIKFPIEDKPKSRVPQNTCIPDSKIDCATVPCPFRPSSPPIPRQEDQQVGSNDEAYHHGVSKEPDVSKHGANLLLYRPLLLRRELLQQQTDDCEADREEREQN

SEQ ID NO: 150685 - protein, 115 aa, Oryza sativa
  Clone ID: PAT_MRT4530_508C.1.pep
MANTMEQVQREAKDRVGTLPSRRPLGRRTQGEEYMPKGDDFAKASSPREGQRSLFRPIKPRGHWADDRLTAHQESMNLYYTMYSFVVSTTAGADRVDLRAKPLRANATEEGRKGE

SEQ ID NO: 150686 - protein, 1904 aa, Oryza sativa
  unsure (1)..(1904): unsure at all Xaa locations
  Clone ID: PAT_MRT4530_50900C.1.pep
MAEQAKAPNLSPSVSGDDGEPNPRRRARTPPPPPRQSPGREKAPKRAEGSATSTSTGAGKGRRDGERRLLVYGDGSTPQGALQAAGALLRHPPIIPDPESPAQRWLDDVAKLVMTARQRLDAGGRSSATKASGAATTGSASSRRRARRAAAAVRHSAATPSSTPSTQEDLRGEQDARTSIERRRNDRRAAHATEGASSSRVSPRHGRGNQPSVPPVGGVGCRAFVASLRNVRWPPRFRPTIAEKYDGSVNPAEFLQVYTTGIEAAGGDDRRFCQVRNTIPCIPAHAVIYAFRGGVRHNRMLEKIASKEPQTTAELFQLADRVARKEEAWTWNPSSSGVAASAAPGSAAQTGRRDRRRKKRSVRSDDEGHVLAVEGASRATRKGRPASDKKKEASAPSRERPTGKWCTVHNTSLHDLADCRAVKSLAERTRKWEEERRQERREGKSPAVPSGHRRSEAKQKAPAEDIDDGDDDLGFQEPGATIATVDGGACAHVSRQSLKAMKRELLAAAPTHEATRRARWSEVALTFDQTDHPPCVARGGQIAMVVSPTICNVKLGRVLIDGGAALNILSPAAFDAIKAPGMVLRPSQPIIGVTPGHTWPLGHIDLPVTFGGPANFRTERVNFDVADLSLPYNAVLGRPALVKFMAAVHYAYLQMKMPGPDGPISVHGDLKVALACMEQRADRLAVVSKPEGGDERLGTSAPAAPRQRIVTGDEVPVKEEDALVSFLRANADVFAWRPADMPGVPREVIEHRLAVRPGARPVRQKVRRQAPERQAFIREEVARLLEAGFIREVIHPEWLANPVVVPKANGKLRMCIDYTDLNKACPKDPYPLPRIDQIVDSTAGCDLLCFLDAYSGYHQIRMAREDEEKTAFITPVGTYCYTSMPFGLKNAGPTFQRTTRISLGSQIGRNVEAYVDDLVVKTRNQETLLSDLAETFESLRSARIKLNPDKCVFGVPAGKLLGFLVSARGIEANPEKIRAIERMRPPXNLGMCNVSPEVERALTQLKAYLSSPPVLVAPEPNEPLLLYLAATPQVVSAALVVERDEDNPHFAHPHPVQTWPGSEQGGEAPEPNGGLRPLTTGVGPLPARQTVLGAPDPQEGPEVTAGRPHLSSFDPEANLVRTRPGRKQGEEAPEPNGGLRPLTTGVGPSPACPTTPGAPDPQDGPEATVGRPPLSSSDPEVIGTEDGCAPRGHLDEERPGDTAPSEEDRPHRKVQRPVYFVSEALRDAKTRYPQAQKMLYAVLMASRKLRHYFQAHRVTVVTSYPLGQILHNREGTGRVALADFVAEWTPAPEPVSIPEVNSDPSQPPHTGHWVMQFDGSLSLQGAGAGVTLTSPTGDVLRYLDRLDFRATNNMAEYEGLLAGLRVAAGLGIRRLLVLGDSQLVVNQVCKEYRCSDPQMDAYVRQVRRMEHHFDGIELRHVPRRDNMIADELSRLASSRAQTPPGAFEERLTQPSARPDPLGETGVPDRPPRPVGVQASGPEGSAPSSLRLIAWISEIQAYLTDKTLPEDREGSERVQRISKRYVLVEGTLYRRAANGILLKCIPQEQGVELLADIHEGECGAHSASRTLVGKAFRQGFYWPTALNDAVDLVRRCRACQFHAKQIHQPAQALQIIPLSWPFAVWGLDILGPFRRAPGGFEYLYVAIDKFTKWPEAYPVIKIDKHSALKFIKGITARFGVPNRIITDNGTQFTSELFGDYCEDMGIKLCFASPAHPRSNGQVERANAEILKGLKTKTFNILKKHGDSWIEELPAVLWANRTTPSRATGETPFFLVYGAEAVLPSELTLRSPRATMYCEADQDQLRRDDLDYLEERRRRAALRAARYQQSLRRYHQRHVRARSLCVDDLVLRRVQTRAGLSKLSPMWEGPYRVVGVPRPGSIRLATGDGTELPNPWNIEHLRRFYP

SEQ ID NO: 150687 - protein, 1746 aa, Oryza sativa
  Clone ID: PAT_MRT4530_50901C.1.pep
MAEPAKAHDLSPSMSGDDGEPNPRRRARTPPPPPRQSPRREKAIERAEGSATSTSTGGGKGRRDGERRLLVYGDGSTPQGALQAAGALLRHPPVAHDPESPAQRWLDDVAKLVMTARQRLDAGGRSSATKASGAATTGSASSRRRARRAAAAVRYSAATPSSTPSTREDLRGGPDARTSIERRRNDRRAAHATEGASSSRVSPQHGRGNQPSVPPVGGVGCRAFVASLWNVRWPPRFRPTIAEKYDGSVNPAEFLQVYTTGIEAAGGDDRVMANFFPMALKGQARGWLMNLPPASVHSWEDLCQQFTMNFQGTYPRPGEEADLQAVQRRDDESLRSYIQRFCQVRNTIPCIPAHAVIYAFRGGVRHNRMLEKIASKEPQTTAELFQLADRVARKEEAWTWNPSGSGVAASAAPGSTAQTGRRDRRRKKRSVHSDDEGHVLAVEGASRATQKGRPASDRKKKAGAPSRERPAGKWCTVHNTSLHDLADCRAVKSLAERTRKWEEERRQERREGKSPAVPSGNRRSEAKQKAPAEDIDDGDDDLGFQEPGATIATVDGGACAHVSRRSIKAMKRELLAAAPTHEATRRARWSEVALTFDQTDHPPCVARGGQIAMVVSPTVCNVKLGRVLIDGGAALNILSPAAVDAIKAPGMMLRPSQPIIGVTPGHTWPLGHIDLPVTFGGPANFRTERVNFDVADLSLPYSAVLGRPALVKFMAAVHYAYLQMKMPGPDGPISVHGDLKVALACMEQRADRLAVVSKPEGGDERLGTSAPAAPRQRIVTCDEVPVKQEDALVSFLRANADVFAWRPADMPGVPREVIEHRLAVRPGARPVRQKVRRQAPERQAFIREEVARLLEAGFIREFIHPEWLANPVVVPKANGKLRMCIDYTDLNKACPKDPYPLPRIDQIVDSTAGCDLLCFLDAYSGYHQIRMAREDEEKTAFITPIGTYCYTTMPFGLKNAGPTFQRTTRISLGSQLGRNVEAYVDDLVVKTRNQETLLSDLAETFESLRSARIKLNPDKCVFGVPAGKLLGFLVSARGIEANPEKIRAIERMRPPSKLRDVQCVTGCMAALSRFISRLGEKALPLFKLLKRSGPFTWTEEAERALTQLKAYLSSPPVLVAPEPNEPLLLYLAATPQVVSAALVVERDEDNPHSAHPHLVQTWPGREQGGEAPEPNGGPRPPTTGVGPLPACQTVLGAPDPQEGPEATAGRPHLSPSDPEANPVPIRPGREQGEEAPEPNGGLRPLTTGVGPLPACPTTPGAPDPQDGPEATVGRPPLSSSDREVVGTGDECAPRGRSGEERPRDAAPSEEDRPHRKVQRPVYFVSEALRDAKTRYPQAQKMLYAVLMASRKLRHYFQAHRVTVVTSYPLGQILHNREGTGRVVKWAIELSEFDLHFEPRHAIKSQALADFVAEWTPAPETVSMPEASTNPSQLPHAAHWVMQFDGSLSLQGAGAGVTLTSPNGDVLRYLVRLDFRATNNMAEYEGLLAGLRVAAGLGIRRLLVLGDSQLVVNQGITARFGVPNRIITDNGTQFTSELFGDYCEDMGIKLCFASPAHPRSNGQVERANAEILKGLKTKTFNILKKHGDSWIEELPAVLWANRTTPSRATGETPFFLVYGAEAVLPSELTLRSPRATMYCEADQDQLRRDDLDYLEERRRRAALRAARYQQSLRRYHQRHVRARSLCVDDLVLRRVQTRAGLSKLSPMWEGPYRVIGVPRPGSVRLATGDGTELPNPWNIEHLRRFYP

SEQ ID NO: 150688 - protein, 2001 aa, Oryza sativa
  Clone ID: PAT_MRT4530_50902C.1.pep
MAEQAKAHDLSPSMSGDDGEPNPRRRARTPPPPPRQSPKQGEALERVERSATSPIAGDGKERRDGERRLLVYGDGSTPQGALQAAGALLRHPPVVPDPESPAQRWLDDVAKLVMTARQRLDAGGRSSATKASGAATTGSASSRRRARRAAAAVRRSAATPSSTPSTREDLRGEQDARTSIERRRNDRSAAHATEGASSSRVSPRHGRGDQPSVPPVGGVGCRAFVASLRNVRWPPRFRPTIAEKYDGSINPAEFLQVYTTGIEAAGGDDRVMANFFPMALKGQARGWLMNLPPASVHSWEDLCQQFTMNFQGTYPRPGEEADLHAVQRRDDESLRSYIQRFCQVRNTIPCIPAHAVIYAFRGGVRHNRMLEKIASKEPQTTAELFQLADRVARKEEAWTWNPSGSGVAASAAPGSAAQTGRRDRRRKKRSVHSDDEGHVLAVEGASRATRKGRPASDKKKEASAPSRERPTGKWCTVHNTSLHDLADCRAVKSLAERTRKWEEERRQERREGKSPAVPSGHRRSEAKQKAPAEDIDDGDDDLGFQEPGATIATVDGGACAHVSRRSFKAMKRELLAGAPTHEATRRARWSEVALTFDQTDHPPCVARGGQIAMVVSPTVCNVKLGRVLIDGGAALNILSPAAFDAIKAPGMMLRPSQPIIGVTPGHTWPLGHIDLPVTFGGPANFRTERVNFDVADLSLPYNAVLGRPALVKFMAAVHYAYLQMKMPGPDGPISVHGDLKVALACMEQRADRLAVVSKPEGGDERLGTSAPAAPRQRIVTCDEVPVKEEDALVSFLRANVDVFAWRPADMPGVPREVIEHRLAVRLGARPVRQKVRRQAPERQAFIREEVARLLEAGFIREVIHPEWLANPVVVPKANGKLRMCIDYTDLNKACPKDPYPLPRIDQIVDSTAGCDLLCFLDAYSGYHQIRMAREDEEKTAFITPIGTYCYMTMPFGLKNAGPTFQRTTRISLGSQIGRNVEAYVDDLVVKTRNQETLLSDLAETFESLRSARIKLNPDKCVFGVPAGKLLGFLCVTGCMAALSRFISRLGEKALPLFKLLKRSGPFAWTEEAEHALIRLKAYLSSPPVLVAPEPNEPLLLYLAATPQVVSAALVVERDEDNPHSAHPHPVLTWPGSEQGGEAPEPNGGLRPLTTGVGPLPARQTVMGAPDPQEGPEATAGRPHLSPFDPEANPVRTRPRGEQGEEAPEPNGGLRPLTTGVGPLPARPTTPGAPDPQDGPEATVGRPPLSSSDPEVIGTESECAPRGHLDEERPGDMAPSEENRPRRKVQRPVYFVSEALRDAKTRYPQAQKMLYAILMASRKLRHYFQAHRVTVVTSYPLGQILHNREGTGRVVKWAIELSEFDLHFEPRHAIKSQALADFVAEWTPAPETVSVSEASSDPSQLPHTAHWVMQFDGSLSLQGAGAGVTITSPSGDVLRYLVRLDFRATNNMAEYEGLLAGLRVAAGLGIRRLLVLGDSQLVVNQVCKEYRCSDPQMDAYVRQVRRMERHFDGIELRHVPRRDNMIADELSRLASSRAQTPPGVFEERLAQPSARPDPLRETDAPDRPPRPVGAQASGPEGSAPSSLRLIAWIYEIQAYLTDKTLPEDREGSERVQRISKRYVLVEGILYRRAANGILLKCIPQEQGVELLADIHEGECGAHSASRTLVGKAFRQGFYWPTALNDAVDLVRRCRACQFHAKQIHQPAQALQIIPLSWPFAVWGLDILGPFRRAPGGFEYLYVAIDKFTKWPEAYPVIKIDKHSALKFIKGITARFGVPNRIITDNGTQFTSELFGDYCEDMGIKLCFASPAHPRSNGQVERANAEILKGLKTKTFNILKKHGDSWIEELPAVLWANRTTPSRATGETPFFLVYGAEAVLPSELTLRSPRTTMYCEADQDQLRRDDLDYLEERRRRAALRAARYQQSLRRYHQRHVRARSLCVDDLVLRRVQTRAGLSKLSPMWEGPYRVIGVPRPGSIRLATGDGTELPNPWNIEHLRRFYP

SEQ ID NO: 150689 - protein, 1839 aa, Oryza sativa
  Clone ID: PAT_MRT4530_50903C.1.pep
MAEQAKAPDLSPSVSGDDGEPNPRRRARTPPPPPRQSPKQGEALERVERSAVSPIAGDGGERRDGERRLLVYGDGSTPQGALQAAGALLRHPPVVPDPESPAQRWLDDVAKLVMTARQRLDVGGRSSATKTSGAATTGSASSRRRARRAAAAVRRSVATPSSTPSTREDLRREQDARASLERRRNDRSAAHAMEGASSSRVSPRHGRGNQPSVPPVGGVGCRAFVASLRNVRWPPRFRPTIAEKYDGSVNPAEFLQVYTTGIEAAGGDDRVMANFFPMALKGQARGWLMNLPPASVHSWEDLCQQFTMNFQGTYPRPGEEADLHAVQRRDDESLRSYIQRFCQVRNTIPCIPAHAVIYAFRGGVRHNRMLEKIASKEPQTTAELFQLADRVARKEEAWTWNPSGSGVAASAAPGSAAQPGRRDRRRKKRSVRSDDEGHVLAVEGTSRATRKGRPASDKKKEASVPSRERPTGKWCTVHNTSLHDLADCRAVKSLAERTRKWEEERRQERREGKSPAVPSGRRRSEAKQKAPAEDIDDDDDDLGFQEPGATIATVDGGACAHVSRRSLKAMKRELLAAAPTHEATRRARWSEVALTFDQTDHPPCVARGGQIAMVVSPTICNVKLGRVLIDGGAALNIISPAAFDAIKAPGMVLQPSQPIIGVTPGHTWPLGHIDLPVTFGGPTNFRTERVNFDVADLSLPYNAVLGRPALVKFMAAVHYAYLQMKMPGPGGPISVHGDLKVALACMEQRADHLAAASKPEGGDERLGTSAPTAPRQRIVTCAEVPVKEEDALVSFLRANADVFAWRPADMPGVPREVIEHRLAVRPGARPVRQKVRRQAPERQAFIREEVARLLEAGFIREVIHREWLANPVVVPKANGKLRMCIDYTDLNKACPKDPYPLPRIDQIVDSTAGCDLLCFLDAYSGYHQIRMAREDEEKTAFITPIGTYCYTTMPFGLKNAGPTFQRTTRISLGSQLGRNVEAYVDDLVVKTRNQETLLSDLAETFESLCSARIKLNPDKCVFGVPAGKLLGFLVSARGIEANPEKIRAIERMRPPSKLRDVQCVTGCMAALSRFISKLGEKALPLFKLLKRSGPFTWTEEAERALTQLKAYLSSPPMVLGAPDPQEGPEATAGRLHLSPSDPEANPVPIRPGREQGEEAPEPNGGLRPLTTRVGPLPACPTTPGAPDTQDGREATVGRPPLLSSDPEVISTEDECAPRGHLDEERPGYMAHSEGDRPHRKAHRVAVVTSYPLGQILHNREGTGRVVKWAIELSEFDLHFEPRHAIKSQALADFVAEWTPAPETVSIPEAGTDPSQLPHAAHWVMQFDGSLSLQGAGAGVMLTSPNGDFLRYLVRLDFRATNNMAEYEGLLAGLRVAAGLGIRRLLVLGDSQLVVNQVCKEYRCSDPQMDAYVRQVRRMERHFDGIELRHVPRRDNMVADELSRLASSRAQTPPGAFEERLTQPSARPDPLGETDAPDRPPRPVGVQASGPEGSAPSSLRLIAWISEIQAYLADKTLPEDREGSERVQRISKRYVLVEGTLYRRAANGILLKCIPQEQGVELLADIHEGECGAHSASRTLVGKAFRQGFYWPTALNDAVDLVRRCKACQFHAKQIHQPAQALQIIPLSWPFAVWGLDILGPFKRAPGGFEYLYVAIDKFTKWPEAYPVVKIDKHSALKFIKGITARFGVPNRIITDNGTQFTSELFGDYCEDMGIKLCFASPAHPRSNGQVERANAEILKGLKTKTFNILKKHGDSWIEELPAVVPFLQPPASDGNRRRIRHVAASSALPAPTPRRSRVPLPRRRLSPASPALARLANGRDSNLNPTPLSLPHLPTSPAQ

SEQ ID NO: 150690 - protein, 77 aa, Oryza sativa
  unsure (1)..(77): unsure at all Xaa locations
  Clone ID: PAT_MRT4530_50904C.1.pep
PRVLPLVPNEGLSTPSLRRRASLDRCATSXNISSTCSVPSVCPAFSSSWSDTSTVISTYPICYYFHIYINFSLFYIF

SEQ ID NO: 150691 - protein, 1475 aa, Oryza sativa
  Clone ID: PAT_MRT4530_50905C.1.pep
MAEQTKAPDLSPSVSGDDGEPNPRRRARTPPPPPRQSPKQGEALERVERSAASPIAGDGGERRDGERLLLVYGDGSTPQGALQAAGALLRHPPVVPDPESPAQRWLDDVAKLVMTARQRLDAGGRSSATKTSGAATTGSASSRRRARRAAAAVRRSVATPSSTPSTREDLRREQGARASLERRRNDRSAAHAMEGASSSRVSPRHGPGNQPSVPPVGGVGCRAFVASLRNVRWPPRFRPTIAEKYDGSVNPTEFLQVYTTGIEAAGGDDRVMANFFPMALKGQARGWLMNLPPASVHSWEDLCQQFTMNFQGTYPRPGEEADLHAVQRGDDESLRSYIQRFCQVRNTIPCIPAHAVIYAFRGGVRHNRMLEKIASKEPQTTAELFQLADRVARKEEAWTWNPSGSGVTASAAPGSAAQTGQRDRRRKKRSVYSGDEGHVLAVEGASRATRKGRPSSDKKKEASVPSRERPTGKWCTVHNTSLHDLADCRAVKSLAERTRKWEEERRQERREGKSPAVPSGRRRSEAKQKAPAEDIDDGDNDLGFQEPGATIATVDGGACAHVSRRSLKAMKRELLAAAPTHEATRRARWSEVALTFDQTDHPPCVARGGQIAMVVSPTICNVKLGRVLIDGGAALNIISPAAFDAIKALGMVLQPSQPIIGVTPGHTWPLGHIDLPVTFGGSTNFRTERVNFDVADLSLPYNAVLGRPALVKFMAAVHYAYLQMKMPGPGGPISVHGDLKVALACMEQRADHLAAASKPEGGDERLGTSAPAAPKQRIVTSDEVPVKEEDALVFFLGANADVFAWRPADMPGVPREVIEHRLAVRPGARPVRQKVRRQAPERQAFIREEVARLLEAGFIREVIHPEWLANPVVVPKANGKLRMCIDYTDLNKACPKDPYPLPRIDQIVDSTAGQLGRNVEAYVDDLVVKTRNQETLLSDLAETFESLRSARIKLNPDKCVFGVPAGKLLGFLVSARGIEANPEKIRAIERMRPPSKLRDVQCVTGCMAALSRFISKLGEKALPLFKLLKRSRPFTWTKEAERALTQLKAYLSSPPVLVAPEPNEPLLLYLAATPQVVSAALVVERDEGNPHSAHPHPVLTWPGSEQGGEAPEPNGGLRPLTTGVGPLPARQTVLGAPDPQEGPEATAGRPHLSPFDPEANPVPIRPGREQGEEAPEPNGGLRPLTTRVGPLPACPTTPGAPDPQDGPEATVGRPPLSSSDPEVIGTEDECAPRGHLDEERPGDMALSEGDRPHRRVQRPVYFVSEALRDAKTRYPQAQKMLYAILMASRKLRHYFQAHRVTVVTSYPLGQILHNREGTGRVVKWAIELSEFDLHFEPRHAIKSQALADFVAEWTPAPETVSIPEGSTDPSQLPHTAHWVMQFDGSLSLQGAGAGVTLTSPNGDVLRYLVRLDFRATNNMAEYEGLLAGLRVAAGLGIRRLLVLGDSQLVVNQIRLYLRTVKGVNASNAFPNATCW

SEQ ID NO: 150692 - protein, 2030 aa, Oryza sativa
  Clone ID: PAT_MRT4530_50906C.1.pep
MAEQAKAHDLSPSVSGDDGEPNPRRRARTPPSPPRQSPRREKAPERAEGSATSTSTGGGKGRRDGERRLLVYGDGSTPQGALQAAGALLRHPPVAHDPESPAQRWLDDVAKLVMTARQRLDAGGRSSATKASGAATTGSASSRRRARRAAAAVRHSAATPSSTPSTREDLRGGPDARASIERRRNDRRAAHATEGASSSRVSPRHGRGDQPSVPPVGGVGCRAFVASLRNVRWPPRFRPTIAEKYDGSINPAEFLQVYTTGIEAAGGDDRVMANFFPMALKGQARGWLMNLPPASVHSWEDLCQQFTMNFQGTYPRPGEEADLHAVQRRDDESLRSYIQRFCQVRNTKPCIPAHAVIYAFRGGVRHNRMLEKIASKEPQTTAELFQLADRVARKEEAWTWNPSGSGVAASAAPGSTAQTGRRDRRRKKRSVHSDDEGHVLAVEGASRATQKGRPASDKKKKAGAPSRERPAGKWCAVHNTSLHDLADCRAVKSLAERTRKWEEERRQERREGKSPAVPSGNRRSEAKQKAPAEDIDDGDDDLGFQEPGATVATVDGGACAHVSRRSLKAMKRELLAAAPTHEATRRARWSEVALTFDQTDHPPCVARGGQIAMVVSPTVCNVKLGRVLIDGGAALNILSPAAFDAIKAPGMMLRPSQPIIGVTPGHTWPLGHIDLPVTFGGPANFCTERVNFDVADLSLPYNAVLGRPALVKFMAAVHYAYLQMKMPGPDGPISVHGDLKVALACMEQRADRLAVVSKPEGGDERLGTSAPAAPRQRIVTSDEVPVKEEDALISFLRANADVFAWRPADMPGVPREVIEHRLAVRPGARPVRQKVRRQAPERQAFIREEVARLLEAGFIREVIHPEWLANPVVVPKANGKLRMCIDYTDLNKACPKDPYPLPRIDQIVDSTAGCDLLCFLDAYSGYHQIRMAREDEEKTAFITPIGTYCYTTMPFGLKNAGPTFQRTTRISLGSQLGRNVEAYVDDLVVKTRNQETLLSDLAETFESLRSARIKLNPDKCVFGVPAGKLLGFLVSARGIEANPEKIRAIERMRPPSKLRDVQCVTGCMAALSRFISRLGEKALPLFKLLKRSGPFTWTEEAERALTQLKAYLSSPPVLVAPEPNEPLLLYLAATPQVVSAALVVERDEDNPHSAHPHLVQTWPGREQGGEAPEPNGGPRPPTTGDGPLPACQTVLGAPDPQEGPEATAGRPHLSPSDPEANPVPIRPGREQGEEAPEPNGGLRPLTTGVGPLPACPTTPGVPDPQGGPKATVGRPPQSSSDPEVVGTEDECAPRGRLGEERPRDAAPSEEDRPHRKVQRPVYFVSEALRDAKTRYPQAQKMLYAILMASRKLRHYFQAHRVTVVTSYPLGQILHNREGTGRVVKWAIELSEFDLHFEPRHAIKSQALADFVAEWTPAPEPVSVPEASTDPSQLPHTAHWVMQFDGSLSLQGAGAGVTLTSPSGDVLKYLVRLDFRATNNMAEYEGLLAGLRVAAGLGIRRLLVLGDSQLVVNQVCKEYRCSDPQMDAYVRQVRRMERHFDGIELRHVPRRDNMIADELSRLASSRAQTPPGAFEERLAQPSARPDPLGETDAPDRPPRPVGVQASGPEGSAPSSLRLIAWIAEIQAYLTDKTLPEDREGSERVHRISKRYVLVEGTLYRRAANGILLKCIPREQGVVLLTDIHEGECGAHSASRTLVGKAFRQGFYWPTALNDAVDLVRRCRACQFHAKQIHQPAQALQTIPLSWPFAVWGLDILGPFRRAPGGFEYLYVAIDKFTKWPEAYPVVKIDKHSALKFIKGITARFGVPNRIITDNGTQFTSELFGDYCEDMGIKLCFASPAHPRSNGQVERAKAEILKGLKTKTFNILKKHGDSWIEELPAVLWANRTTPSRATGETPFFLVYGAEAVLPSELTLRSPRATMYCEANQDQLRRDDLDYLEERRRRAALRVARYQQSLRRYHQRHVRARSLCVDDLVLRRVQTRAGLSKLSPMWEGPYRVVGVPRPGSIRLATGDGTELPNPWNIEHLRRFYP

SEQ ID NO: 150693 - protein, 1210 aa, Oryza sativa
  unsure (1)..(1210): unsure at all Xaa locations
  Clone ID: PAT_MRT4530_50907C.1.pep
MAEQAKVHDLSPSVSGDDGEPNPRRRARTPPPPPRQSPKQGEALERVERSAASPIAGDGGERRDGERRLLVYGDGSTPQGALQAAGVLLRHPPVVPDPESPAQRWLDDVAKLVMTARQRLDAGGRSSATKTSGAATTGSASSRRRARRAAAAVRRSVATPSSTPSTREDLRREQGARASLERRRNDRSAAHAMEGASSSRVSPRHGRGNQPSVPPVGGVGCRAFVASLRNVRWPPRFRPTIAEKYDGSVNPAEFLQVYTTGIEAAGGDDRVMANFFPMALKGQARGWLMNLPPASVHSWEDLCQQFTMNFQGTYPRPGEEADLHAVQRRDDESLRSYIQRFCQVRNTIPCIPAHAVIYAFRGGVRHNRMLEKIASKEPQTTAELFXLADRVARKEEAWTWNPSGSGVAASAAPGSAAQSGRRDRRRKKRSVRSDDEGHVLAVEGASRATRKGRPASDKKKEASVPSRERPTGKWCTVHNTSLHDLADCRAVKSLAERTRKWEEERRQERREGKSPAVPSGRRRSEAKQKAPAEDIDDGDNDLGFQEPGATIATVDGGACAHVSRRSLKAMKRELLAAAPTHEATRRARWSEVALTFDQTDHPPCVARGGQIAMVVSPTICNVKLGRVLIDGGAALNIISPAAFDAIKAPGMVLQPSQPIIGVTPGHTWPLGHIDLPVTFGGSANFRTERVNFDVADLSLPYNAVLGRPALVKFMAAVHYAYLQMKMPGPGGPISVXHGDLKVALACMKQRADHLVAASKPEGGEERLGTSAPTAPRQRIVTCAEVPVKEEDALVSFLRANADVFAWRPADMPGVPREVIEHRLAVRPGARPVRQKVRRQAPERQAFIREEVARLLEAGFIREVIHPEWLANPVVVPKANGKLRMCIDYTDLNKACPKDPYPLPRIDQIVDSTAGCDLLCFLDAYSGYHQIRMAREDEKKTAFITPVGTYCYTSMPFGLKNAGPTFQRTTRISLGSQIGRNVEAYVDDLVVKTRNQETLLLDLAETFENLRSARIKLNPDKCVFGVPAGKLLGFLVSARGIEANPEKIRAIERMRPPSKLRDVQCVTGCIAALSRFISRLGEKALPLFKLLKRSGPFTWTEEAESALTQLKTYLSSPPVLVAPGPNEPLLLYLAATPQVVSAALVVERDEDNPHFAHPRPVLTWPGSEQGGEAPESNGGLRPLTTGVGPLPACQTVLDSPQQTSPPEVHYK

SEQ ID NO: 150694 - protein, 396 aa, Oryza sativa
  unsure (1)..(396): unsure at all Xaa locations
  Clone ID: PAT_MRT4530_50908C.1.pep
PPAPPPPNASSHLAAAGARRRXNRAAGREGGGGENVPAAEQPLGVGGGATHARRKAAAGAAGGADPVAPDADPASPMEDLAPRRPDLERGGGGAARRRAASSSRRRRCGKSAGGPSSRRRRAASSSRRRRRGKTAGDLVLAATAARPRAHGSGGATRRNSSRRRRQRGSEEQPGRHAAEADRPDGCWXRRRQSCPPWCSWQLAASSAGNGGVELAAWWRRTTAQRFAEAEAGIDGSGDGGRGCGRWRRRRMRVASEVAGRSAATAAVARGAADGSGGRLGARGAGGGDGGRLGARGAADGGRLEWRERRIRWRRPVWREWRGRRWRRRPRCEEELPVGVARSSAHEGWPAGDAGAGVPHVGRACVVVEHRCISRGFTSGERRRLWWPQRPWRRRRM

SEQ ID NO: 150695 - protein, 249 aa, Oryza sativa
  unsure (1)..(249): unsure at all Xaa locations
  Clone ID: PAT_MRT4530_50909C.1.pep
PPVLPPPNASSHLAAAGARXGNRAAGREGGGRENVPAAEHPLGVGGGTTHARRKAADGAAGGADPVAPDTDSASPVEDLAPCRPDRERGGGSAARRRAASSSRRRRRGKSAGGPSSRRQRRCKMVGGLKLPTTAAREQPGRHAAEADRPNGCWXRRRRSCPPWCSWQFAAVSASNGGVGLATWWQRTTAQRFAEAEAGIGSSGDGGRGCGRWRRQRMRVASEVAGRSAAAAAVAVTVSAVTGGMADLDG

SEQ ID NO: 150696 - protein, 52 aa, Oryza sativa
  Clone ID: PAT_MRT4530_5090C.1.pep
RYNSVFNLTILIQSSGLGNVHTSTSTKYHFWLILPPIFKIQNTVEFLTYVHH

SEQ ID NO: 150697 - protein, 743 aa, Oryza sativa
  Clone ID: PAT_MRT4530_50910C.1.pep
MPPVIADTVTATATAAAAAERPATSLATRIRQRRHCPQPRPPSPLPPTPASASANRCAVILRHQAASSTPPPCPPPLLPAAAAANCHEHHGGHDRAAVANSRLAGQPPLHAGRAAPPRRAAALSRPPPPQAVPPSRAPTAVSSRSRRHHRKHEVARRLAAPPLSGARGRPPSCRAAVATSSGRPPTCRVAVAASSRPPTVLPRRRRPSPDLATGGPDPPRGGRIRVQHDRIRPTGRSGRRLPPCVRRAASHAEGMLRRRGDSAVGGVTVDVTLSPNAVLPGFAKRPEAMTEASCCGGGFPRCARAAAAAAWAFASEDAGRVAFALKAGLAMLLASLLVLVGEPFRLFGTNIIWSILTVGIMFEYTVGASFNRGFNRAVGSMVAGVVAIAVIWISLRCGSVAEPYVIGLSIFLVGAVTSFVKQLPALAPYEYGFRVILFTYCLIMVSVYRVGEPVAAGLDRLYAIAIGAVLALLVNVLIFPAWAGEQLHRELVASFAAVADSLHGDETAVDGGEPAIEKCRAILNASARIESLARSARWEPPHGRFRSFSFPWSHYARVGAVLRHCAYEAPDGVREAFRAEIEDATAQAAELVRVLGGDVDGMTRSAERLSLLKSVHGSAYRLQLALELNSHLLVSSGSVAEEITSGGGLERSCSRLRESARRQRLSWPSREADELEEAEAGGGYAAMMVRVRALESTAALSLATFASLLLEFVARLDHLVDAVDELSKLAKFREESDSIKLAT

SEQ ID NO: 150698 - protein, 1394 aa, Oryza sativa
  Clone ID: PAT_MRT4530_50911C.1.pep
MDVAVGAASWLLGKVVTQLSDGMVAAYVSSTELGLNMEQIKTDLAYTQGLLDAAEERDVRNNHGLRVLLEILTKQADEAEDVLDELQYFIIQDQIDGTHEATPMVDDGLRGQVLIHGRHALHHTTGNWLSCFCCSSARDDADDPHDIPKSHSDVPDHVSKLTFNRVDMSNKIKLVIEGIHASCTPVSNLLKIIHPAVGRALPPKRPPTSSTITQDKLYGRENIFNQTLDAMTNFTIHSRTLSVIPIVGPGGIGKTTFAQYLYNDKTIEAHFSIKVWVCVSTHFDVVKLTQEILKCIYHAENEGSRRVDELSNLDQLQITIAQRLKSKRFLLVLDDMWKCGSEAEWGSLLAPFSKGDAKGSMVLVTTRFPSIAQMVKTTKPIELQGLGDSEFFTFFEECIFGHDKPEYYEDNIIDIARKISKKLKGFPLAAKSVGRLLKYRISQERWIEILERNEWQHQTNNDDIMPALQISYDYLPFYLKRCFSYCALYPEDYHFNNIEISHFWEALGIIDSGSHKNRAEDIGLKYLDELEGNGFLVKKVDDRTGRQYYVMHDLLHELAQNISSQECINISSYSFRSDNIPWSIRHVSITLQDNYEDSFEREMENLKRKIDIGNLRTLMLFGEGNASMLILFKDLLKETKRLRVLFMHANSLQSFPHNFSKLIHLRYLKLEIPYDVELSLPNAVSRFYHLKFLDLGYSKCILPKDINHLVNLCLLNARKELCSNIPGIGKMKYLQRLEEYHVKKRDIGFELSELGDLTDLEGELKIFNLEKVATREEANKAKLMSKRNMKKLELAWGMVQRTTRSDVLEGLQPPSNLKALVIKNPGGSIGPSWLCGNICVNYLKSLHIEGVSWGILAPFGQLMQLEELTLNNIPSTRRFEPNFGGVTQQSFSHLKKVEFVDMPELVEWVGGAHCHLFSKITSIRCENCPNLSMLLVPSSRFSVSYAQDINTRWFPNLCSLEIENCPKLSLPPIPHTSMLTCVIVSERKTDLLRLQENKLISHGYRGALVFDNLDKVEDMSIEEMPHVSLTDLQKLSSLTRLAVKGCESMLFSEVEEGVIFPSVQQLEISDCRLTRNSLTKLLNRFPALTEFHLIFSSFEVGEEAVLQLPSSNLLSYVRIWCCKNLVLPVADGGGLHDLSSLQEVEIRGCGKMFDRCSMVEAGARSNKFFPASLRELNISDELSIQSMALLTNLTSLTHLTLINCDNLTVHGFDPLITCSLKELVVYKKADDEIHLYSLADDLFLEVATRMTKVIPAGGSYFQQLEKLEVDSISAVLVSPICSLLAANLRELRFRYDLWMESFTEEQEEALQLLTSLQCLKFRKCLRLQSLPEGLHCLYSLYKLNIAGCPEIMSLPKDGFPVSLERLRIRDCSIDLMVQVKELEASNPDLHIRLH

SEQ ID NO: 150699 - protein, 52 aa, Oryza sativa
  Clone ID: PAT_MRT4530_50912C.1.pep
YYMTPFIYIFSGGKLYHNQLVEYAKFTYTLSSRGASIISFDQHVILNLIYNC

SEQ ID NO: 150700 - protein, 260 aa, Oryza sativa
  Clone ID: PAT_MRT4530_50913C.1.pep
MGPRIKGLGSLREGEGHLAAAGARRRNRATSREGGGGENVPAAEHPLGVGGGATHARRKAAAGAAGGADPVAPDADPASPVEDLAPRRLDRERGGGGAARRRAASSSRRRRRGKSAGGPSSRRRWRGKTAGSLELPTTAAEEQPDRHAAKADRPDGCWRRRWRSCPPWCSWQLVVASAGNSCGGHGGGVELAAWWRRMTAQRFAEAEAGVGGSGDGGRGCGRWRRRRMRVASEVAGRSAAAVAVAVTVSAVTGGMADSDG

SEQ ID NO: 150701 - protein, 280 aa, Oryza sativa
  unsure (1)..(280): unsure at all Xaa locations
  Clone ID: PAT_MRT4530_50914C.1.pep
TLPPLPAPPRPPPSRGAPPAAAPPHPAPPPNASSHLAAAGARRRXNRAAGREGGGGENVPAAEHPLGVGGGATHARRKTAAGAAGGADPVAPDADPASPLEDLAPRRPDRERGGGGAVRWRAASSSRRRRRGKSAGGXSSRRRRRGKTAGDLLAAAAAATARQRGSEEQPGRHAAEADRPDGCWXRRRRSCPPWCSWQLAAASAGSGGVELAAWWRRTTAQRFAEAEAGIGGSGDGGRGCGRWRRRRMRVASEVAGRSAAAAAVAVTVSAVTGGMADSDG

SEQ ID NO: 150702 - protein, 461 aa, Oryza sativa
  Clone ID: PAT_MRT4530_50915C.1.pep
MAAARLQPRRRDRLGVKGRRGASGRPRRRCGEEQRIRRRHHRIRRPASATRRVAAGSDVSAAGSEPWWCGSTADAATPMARRPWLVSSGAEAWRRRGDAASAASATAGGAGGRSRRSGATAVAGRWAAVAGSATRRPWLAGNGKAATAEIVPASWRLVTGLSWAAVVLVVVVTASWWFKAAGMAMVAGMASAEGAKAAVLVPARRWRGAQRRRRRCPQIRASRPDLEGSRLWWSETLADLRRLATAVGDGGGVAAAVGSDGVGRRRRRRTWRQHGEWRQRSGCWQWRRLTEAVAGGRDSSHRRHGGPGRLAEGVGDGCIWPTRHRLVEGSETGLAQRGAADGSGGRLGARGAGGRVGGRLGARGAADGGRPDWRERRVRWRRPAWRRRPRCEEELLVGVARSSAHKGWPAGDAIAGVPHVGRACVVVEHRCVSRGSHPSRAIAGRKPSLGSFESRRMAVAL

SEQ ID NO: 150703 - protein, 160 aa, Oryza sativa
  Clone ID: PAT_MRT4530_50916C.1.pep
MTSAMTSSPAAAQARKLAGERRRDGTNGGHQRVESDAANSPKLTVKAEKYKFGSLFNLVKVLKPPMIVVHVKDEQTAKKIKEDVLQSIEGCRATSIHKMELGFMIRLSPRDKTKKPLGYLRVSYDSAVISDRTPIESTLGVASARVRIDKKLLTSTACKK

SEQ ID NO: 150704 - protein, 460 aa, Oryza sativa
  unsure (1)..(460): unsure at all Xaa locations
  Clone ID: PAT_MRT4530_50917C.1.pep
MAAARLQPRRRGRLGAKGRHGASGRPRRWRGEERRIRRLASAMRRVAAGSSVSAAGSEPWWCGSTADAATPMARRPWLVGGGAEAWRRRGDAASAASATAGGAGGRSRRSGATAVAGRRAAVAGSATRRPWLAGDGEAATAEIVPASWRLVAGLSXAAVVLVVVVTASWWFKAAGLAMVAGMASAEGAKAAVLVPVRRRRGAQWRRRRCPQIRASRPDLEGSWLWWLETAADLRRLATAVGDVGGVAAVVGSGGVGRRRRRTWRRLAEAVAGGHDSGHRRHGGPGRLAKGVGDGCIWRARHRLVEGSETSLAQRGTADSSGGRLGARGAGGGVGGRLGARGATDGGRPAWRERRGRRWRRRPRCEEEQLVGVARSSAHEGWPAGDAGAGVPHVGRACVVVEHRCVSRGSHPSRAIAGRKPNLGSFESRRTAVAVFPSLLFLKTSFWHPLGSDLSCVPLLV

SEQ ID NO: 150705 - protein, 101 aa, Oryza sativa
  unsure (1)..(101): unsure at all Xaa locations
  Clone ID: PAT_MRT4530_50918C.1.pep
RGAADGSGGRLGARGAGGGDGGRLGARGAADGGRPDWRERRVRWRRPAWRERRGRRWRRRPRCEEELPVGVAXSSALEGWPTGDAGAGVPQVGRACVVVGH

SEQ ID NO: 150706 - protein, 55 aa, Oryza sativa
  Clone ID: PAT_MRT4530_50919C.1.pep
RNSPFKRHPRHPVAFQNPVAVSRKQVTSNTAAGKVVKSQSHSQSSSSSLRPPKFS

SEQ ID NO: 150707 - protein, 86 aa, Oryza sativa
  Clone ID: PAT_MRT4530_5091C.1.pep
YVVPMDLAAYISAGWYILFKYSIEQVSYGYWLNGLDVQHVDNRSLSCGTPPDCEWKAQAGNPCEASFDWRSPGICNPVDRMEEVPC

SEQ ID NO: 150708 - protein, 52 aa, Oryza sativa
  Clone ID: PAT_MRT4530_50920C.1.pep
MARNGDLLDNAFKKGPVEEGESGRSTTPREGNAASEDVAIAGLGSPKLVFHR

SEQ ID NO: 150709 - protein, 151 aa, Oryza sativa
  unsure (1)..(151): unsure at all Xaa locations
  Clone ID: PAT_MRT4530_50921C.1.pep
IPGQQHLPSNVAPQMLQQPVQQMPSQAPQLLLQQQAALQSSYQSSQQAIYQLQQQLQFLXQWDKPEEYVLYEQQQQQQQQQKLLLLQQHQQKLAMQQLQSPPQAQTHPAMQPVQQIPQAQQGQQQMQMKQQVHMLFLGNELHSTCCLHQMP

SEQ ID NO: 150710 - protein, 109 aa, Oryza sativa
  unsure (1)..(109): unsure at all Xaa locations
  Clone ID: PAT_MRT4530_50922C.1.pep
TVHRRIYGHSLYTLRNXITKFTNGKVPTRIGLGRYYIVQGPMSPSPTWRPPDLRYKRDPXGDLRIESHXPTQQPQPTKPETTGARSTGDLVESTRLRSRRYHRVLLFPL

SEQ ID NO: 150711 - protein, 500 aa, Oryza sativa
  unsure (1)..(500): unsure at all Xaa locations
  Clone ID: PAT_MRT4530_50923C.1.pep
MKDGMRQSRGCGFVKSSSREQGQAAMSDFCAECSWRRCLHSERSREADPRMCLRQNLMTRTGAGSPDCCAWEECDEVVRATVNNSVPRSQHMHTDSWHPSSPRSAPHQFNNFGSDNPMAPKGSTVTSTTDTATFRPQMFSGNGSLSSQTAVPSSSHMGMNPPPMAQGHHLGGQQIPPLQQRKWLFVQAKQQCQXSHMGMNPPPMAQGHHLGGQQIPPLQKLPPEXRLSGQLPVSQPLMQQNASVSAVQVPSAVSNSMQAIPGQQHLPSNVAPQMLQQPVQQMPSQAPQLLLQPRPIPCKLFPSSQQAIYQLQQQLQLMQQQQQSNLNHQQPTQVAEQHGQPVQSSNPGAPNAIIPSNINTIPQQATSPAVPLTCNWTEHTSPEGFKYYYNSITREKSKWDKPEEYVLYEQQQQQQQQQKLLLLQQHQQKLAMQQLQSPPQAQTHPAMQPVQQIPQAQQGQQQMQMKQQELNYTQLQTPGAIDPSRIQQGIQSAQERAWKS

SEQ ID NO: 150712 - protein, 59 aa, Oryza sativa
  Clone ID: PAT_MRT4530_50924C.1.pep
WFFFFFGFFFFFFFFFFFFFFKTKNPGVFLKGLILTSITSKRLLFPPPTFDHYGATGHP

SEQ ID NO: 150713 - protein, 139 aa, Oryza sativa
  Clone ID: PAT_MRT4530_50925C.1.pep
MAANRKLLFCFAILVATAILVRMNARIYTLVCFELVSLLTLAVPDLVVAAGEEKYGCVYCTPGPEDRGDDAAETGTGSPGPSMHGQSVYDAAEDAERTTPPACSIFTDIYRAPLWSSPSSSGSPASHRSSTAPSGGVCK

SEQ ID NO: 150714 - protein, 74 aa, Oryza sativa
  Clone ID: PAT_MRT4530_50926C.1.pep
KTRDRSKTHDRRSYKTVARDLDGPAGSMCGTGHKQFAPAFWDHRGPARPFRGTSVPCFRTAGPSRSHVSVPRSG

SEQ ID NO: 150715 - protein, 468 aa, Oryza sativa
  Clone ID: PAT_MRT4530_50927C.1.pep
MEEPPSSSSSPALPLDIVVEIAERSDPITLLRCAAACKHLRRVISGEGFRRDLRLRNADGFVPGLLHGFFFQPRCPSPHDHGYNYEPLRFVAAGRHDHIASGDNCQIPSFVSDSDENNPCRRIEPVAARGGFVVLRTGEFSGKVCNPMTGYVRAIDMPRKTSKGEGSSYLVLTADDGGDGVDVGVTSDDSELHPFRLLAVRLFARTRVEMQALTTDTGTWGPATTLAVVNTGCLGPRPVLVRPPVVVAGVAYFLGEMSGRDDRTYQLQRRMSRVSFDPPYQHSPPPSYTYFVLAVDVSIRRRDGETGGTTAAATIMPLPTTELRAPSCTGEATVTPGQLLLAPSSWRGGDRRSSSLALLVGRSTQVEIWTMKLTCHGMALLRMACTKVVDLMGVPRSPCSPPVSESEVALLWSGDASGAVVLRLGGTVCLLDRRRRAIVVRALGEEFVEFRSGRRHVLLPYEVGRGKF

SEQ ID NO: 150716 - protein, 170 aa, Oryza sativa
  unsure (1)..(170): unsure at all Xaa locations
  Clone ID: PAT_MRT4530_50928C.1.pep
ATEQGVVAVSNKRVILKRYLTACEIGQLGDEMEVVTAEAVPLSVPAGSSAVLVKNLYISCDPYLRNRMIRHEVPTYISDFVPGEVISSGHLDFKAGDLVWGMTGWEEYTLINNPESLFKINYPEFPLSNYTGVLGXLLKTKFGFDDAFNYQKEPDLEAALKRCFPEGIDI

SEQ ID NO: 150717 - protein, 108 aa, Oryza sativa
  Clone ID: PAT_MRT4530_50929C.1.pep
SNMMLRPCAPGRKATQIKNIECTAIMPRYILLHLFLEHTRKHMEACHGSELIKEIAWLQVHAHAFQVDLLLHSTGEDHAADKNNLALGSLLQLKNDLGTTPFLFYPPN

SEQ ID NO: 150718 - protein, 67 aa, Oryza sativa
  Clone ID: PAT_MRT4530_5092C.1.pep
FIIEPLGKYNLENSNRFNCPELYQPTVEIIVDFLFCRIIESRTKALHSIKELLLCSHQSTESMSLLY

SEQ ID NO: 150719 - protein, 65 aa, Oryza sativa
  Clone ID: PAT_MRT4530_50930C.1.pep
RKEGVMRVSVRMGILGRAQITGFECLGARRMARKTYWLGAKLADFGTWTKLGAVIVGTWISTCNY

SEQ ID NO: 150720 - protein, 89 aa, Oryza sativa
  Clone ID: PAT_MRT4530_50931C.1.pep
INDQRLLLLVLPTRVSIRTVSLDSTHNLCLQAQIASEPRSVAILILGIHAVAPPLFQKIANLADQKSSGAYGFLLSKKTSSRAGSDEAR

SEQ ID NO: 150721 - protein, 427 aa, Oryza sativa
  unsure (1)..(427): unsure at all Xaa locations
  Clone ID: PAT_MRT4530_50932C.1.pep
APYTVPAESAIGRSPAPRCPPRRRRIGLLLPPGTPSTTSHQPRSATASFHRRLCRVSLPQDVPHNGHADFLLRVLSSITDRPLPQLPPPLPWTPLPVARRAALAARPRQDPSGDARSGHGGTGSGGGRGVAAAPTHRRRRRQPPPSLLRPDLGGGRGXPPPASPSLLRPDLEGEEGEPPPPPPRAVVAATARRRAAPDAAPLPNAAAALAGLPLPPPPDLGGEPRRQPDAAPPRPGRNPSRPGVATFLTPSGCLVTTENRAANREGGSGENEPAVELLSVGGGAAQVGREAAAGVVGGTDLPPSTHGQIERKGQLRQRWRTPARRVRGGAAGGGGVRSGTRRHGRWPVTVKANVVRGGVIGSVSGRHGQMPSQRNEGDVMRRLAGGARGCNGAHTPTEGENPVWVLFENSTDGGGGAFIASLPRDVV

SEQ ID NO: 150722 - protein, 250 aa, Oryza sativa
  Clone ID: PAT_MRT4530_50933C.1.pep
MATRRCLLRLLSRRLLAHTPQPASLASIATRTLASLAKPLVPQASRVLASPRLFPSRCHYASNRSSGDEEEGDDDDHYDEEGSGDEWGEEEEEAVAAKPPSGKTEEEKVAEAAEIGYTVVGPLGADEKPFKPYEPVFAVVQIGSHQFKVSNGDSIFTERLKFCDVNDKLILNRVLMLGSQSQTVIGRPTLPDATVHAVVEEHALDAKVIIFKKKRRKNYRRTKGHRQELTKLRITNIEGIDKSEATAVAA

SEQ ID NO: 150723 - protein, 376 aa, Oryza sativa
  Clone ID: PAT_MRT4530_50934C.1.pep
MGRESLPTLAMVMVQLGFAGMNVVSKLALDTGMSPYVLIAYRNIIAAVFLAPFAYYFERKSGMVITKKVLVQIFFSSIFGATLNQVLYFVGLKSTINFSPATCLNTTATLVCEYNCRWSRNYNYGQEKIFKSKIMNIFQVVIYFSSTAFSAHSAAPWYTSAPSLCASIACDPIEHELQLLDSTLTIHKCTMRRGGAVWFIIQTKMSERFSAPYTSTTIMCLMAGVQCAGVSAAMDRSVAVWKLGFDIRLYSVLYIGVVGSGIAFALMSWCIQVRGPLFVSMFSPLMLVVVAIVGWAILDEKIHVGSAIGSVLIVAGLYMVLWGKAREMGSPSDLDGGGGGGGVVELNGKGADAATTLPVFCTTTNKHETTRNGCSN

SEQ ID NO: 150724 - protein, 109 aa, Oryza sativa
  Clone ID: PAT_MRT4530_50935C.1.pep
QQDTIHQRSLETDNNNGMQNSTHIRYRAFCWVCYLLDAFFTSEDAVGCIACMPDVCLYVYVRVPMHTCLPECCVACPRSTAAPAVGAMGHGREPWDLKALLDTSFFRAY

SEQ ID NO: 150725 - protein, 346 aa, Oryza sativa
  Clone ID: PAT_MRT4530_50936C.1.pep
MAAAADAAPKTMRAVQYDKYGGGPEGLKHVEVPIPAPKEGELLIKMEAASINPIDWKIQKGMLRLFLPKKFPFIPVGDLSGEVVELGGGVSGFKPGDKVVSMSFPNCGGLAEYAVAPASLTVARPPEVSAADGATLPAAAGSALQQLKAAGVRFDADADAAAAAGGPKNVLVTAASGGVGHYAVQLAKLAGLHVTATCGARNLAFVRDGLGADEALDYRTPDGAALRSPSGRRYDAVAHCAPPAPWPVFRDALADAGGVVVDLTPGVAATVRSFLHRVTFSKKRLVPLILMPKKEEMEWLVDMAKQGKLKTTIDSKYPLSRAQEAWAKSMEGHATGKIVVEMGGTE

SEQ ID NO: 150726 - protein, 84 aa, Oryza sativa
  Clone ID: PAT_MRT4530_50937C.1.pep
MALLLLLLPSSLSLALSPPPPPPPFFPPQWAPPVPGGGGPFAEHGVGYGSGPDGSHNPTVSSVHGNQYMPTGRHGMYRWPGRRT

SEQ ID NO: 150727 - protein, 68 aa, Oryza sativa
  unsure (1)..(68): unsure at all Xaa locations
  Clone ID: PAT_MRT4530_50938C.1.pep
ISLVNYSYTQKSVNHSIKHRIYIRCNFFSSSYSLWIFFLLFCFLFLFQREVGSLIMGFAARVHDTXQY

SEQ ID NO: 150728 - protein, 308 aa, Oryza sativa
  unsure (1)..(308): unsure at all Xaa locations
  Clone ID: PAT_MRT4530_50939C.1.pep
MAEERENLQSQWAPSDVTEETLKEMVEHGVLPSKEIIEXRPAFGEAFPIPDTHEIVVFTHFFYGGFALPTSKFFRGILEFYGINIYHLNPNSIIHIANFVHLCEALLGVRAHCALFRRIFFLKPQPNKSKPCIVGVSSFQLRGTLCQKYFTLPFKTSNKGWHASXFYIQNPDPSLPKYSCIPPKYQDIWNSLPMGDEASQALELLNRLLKLKEQGLQGEQITWHFIKCRLAPIKERXSRTAFEYDGENDPNLEDPDSLEFKIMKERMYKVFSSSIAVSFSHLLSVVPYNAFNPPPAENALMKSEPPTT

SEQ ID NO: 150729 - protein, 194 aa, Oryza sativa
  Clone ID: PAT_MRT4530_5093C.1.pep
MQTLKVYKEVSAAFNAGPADLGYLTFLMNFLKSIASPLAGILSLHYDRPTVLAIGTVFWALSTGAVGVSQHFRQVAFWRAVNGLGLAIVIPALQSFIADSYKDGTRGAGFGLLSLIGAVGGIGGSILATIMAGNDYWGLAGWRVAFIMVALVSLIIGILVYLYATDPRKIPGNHLLDDDDYELNMIIKLLARKG

SEQ ID NO: 150730 - protein, 40 aa, Oryza sativa
  Clone ID: PAT_MRT4530_50940C.1.pep
NRELGVLNTAFVEVAGGPEPRRDGERPTEDADGEDLGRRH

SEQ ID NO: 150731 - protein, 61 aa, Oryza sativa
  unsure (1)..(61): unsure at all Xaa locations
  Clone ID: PAT_MRT4530_50941C.1.pep
CTLIXSIAPXXDPXXNRLHHGTVGGIPXFHSQRSKFXGFMKXRTTAKAFAKDVFINQKKNX

SEQ ID NO: 150732 - protein, 110 aa, Oryza sativa
  unsure (1)..(110): unsure at all Xaa locations
  Clone ID: PAT_MRT4530_50942C.1.pep
VPNPTARAPPKSENKENNPRPPGEEHAREGRRESPRKGNSPRRKAKRTTPPGIEKQPPKAXPAKKREEPTDTPHTKTRQTPQTKMSPTPLEGTAPAPRQNNHTNPNQQPK

SEQ ID NO: 150733 - protein, 90 aa, Oryza sativa
  unsure (1)..(90): unsure at all Xaa locations
  Clone ID: PAT_MRT4530_50943C.1.pep
ELRPPPPPPTRGARASPPPPLAVTTXPFPPPPLHAPPHPPPPPRGGISTLPSPYPQKPPNPSPPNSEAAGGEVGGFRVLIRKEFRGAAAG

SEQ ID NO: 150734 - protein, 97 aa, Oryza sativa
  Clone ID: PAT_MRT4530_50944C.1.pep
MSGMHSRLGFICPQPTLHLLPWWLAVRKTICKQEQRAFNAGVILVTWLIWKEQNARVFEGKATMVFALCVVIIDEWRMWKVAALFTLGLGCMGHCVF

SEQ ID NO: 150735 - protein, 133 aa, Oryza sativa
  Clone ID: PAT_MRT4530_50945C.1.pep
APLYGDIAHSLLHPTRRSNSIPRPARRRVLVIRRAGLKKGFWEALHVTSCCSSTTAPHCSSDACCRQHPVPRVVPVVQQNIQNPCFIDDIDCILYDGNDRITDDDIDHIIYNNNVSINSASLFLMTATRHRKS

SEQ ID NO: 150736 - protein, 81 aa, Oryza sativa
  unsure (1)..(81): unsure at all Xaa locations
  Clone ID: PAT_MRT4530_50946C.1.pep
MVSGSGLCTRRVVVDARHHMLGRLASMVAXELLNGHKVVVVRSYEMCISGGLDRQKMNYLRFLRKRMNTKPCHGPIHFRAL

SEQ ID NO: 150737 - protein, 199 aa, Oryza sativa
  Clone ID: PAT_MRT4530_50947C.1.pep
HPCAVNGTCQGPNGSRFAAAVNNVSFVLPYTALVQSHYTGRSNGVYASNFPAMPLSPFNYTGTPPNNTNVSNGTRLVVLPYGASVELVMQGTSVLGAESHPFHLHGFNFFVVGQGFGNLDTVNDPAKYNLVDPVERNTVGVPATGWVAIRFLVDNPGVWFMHCHLEVHVSWGLKMAWVVQDGSLPNQKILPPPSDLPKC

SEQ ID NO: 150738 - protein, 94 aa, Oryza sativa
  Clone ID: PAT_MRT4530_50948C.1.pep
RHIYFAMVKCMKPAYQGLMLFCLVLVVCSALPAQIRGQTIRKIGSNIPMGLKNVVSHASLNVCYQEERDFAYCCSKDKKCYSTISECLAKCTYN

SEQ ID NO: 150739 - protein, 978 aa, Oryza sativa
  unsure (1)..(978): unsure at all Xaa locations
  Clone ID: PAT_MRT4530_50949C.1.pep
MGRLANAGPVASGLDRLRWPLGPPXSWTCYGKVIRLRHTLFAIXSSPNMPSTLWDTGAILHPSPSLLHSLRHGFRQVRSKGLMXTANKPLTGKSEIGASAETVQTMWYGKAVVPKHGDNRTMVFAVFFEVGLQFPCNVLLPEILRLFQVELPQLSPSALVRVTIFDWACRTARFEPSAELFGAVFYGTVNSKTVVTPAGTKKTAFGSVNFNVRPERSDLWPVNAAMSKWDRHXMAKWFYHSIPFEAGSDAAKALRWRRRAISPNRKPKVAIDGTMEARFTLLRKVCSRLSCRDLVEEFCMLRIFPLSQSWHVVVNEDEEVHGLSKLVMPEGANMLTLAQVDTEARKMIGDVSITEFSQLLTRLAAGRANEVAAGQVKLAPRKCRAPASTDSDADDKDTVIDHDDKEEGEDVGETEVVAEKATDEAAGNRAKTPSYTPTPSPEHVGTGVESNFSLLRQMDMEGVKALVAIAATKVTKGGSIKKAPKKKGLVDVARIFSDDESSDETPTSPTGRSLGLSTALSAMVDAGGARGECGRWALAFADRIVRVVARVFGSPVRRTXFSPLVIEKGKKTVVETSASEYSLVAPHCAPADFETGADLIPFVEGILAAHCSTERTMRACLDGFKNRLRAKDDELGRKSLEMEGLANTLKEAKAENKRLQAELEKGSEAKAEIERLKAELKKEQAHSTALTDYYNLIEPKIXALRLEVSKAEANTEPXEAAVKLGDDGSVGIRYHXQEGAAGPRWRSKRGGELGLHGDEVLPGVFGFGEMAAELAIDLAEPREVAALTGDGRSDGARRLERRPKVEREGAPGESNSGDGXKTGLEGEVEDNEGGVCRKLCVRSPFGNWRNKNEKFVAAKGLPKVRCPFRPVYCEMIINGNSYKVLKVAGXMRAHPGRTLEDYDRIHTERLEDMVRFWRNHQKTDRQEAISQCRYSLVCVSPPXPLRVVYNISSDDEPDSPNHSLGSEDCCGGECVIYL

SEQ ID NO: 150740 - protein, 53 aa, Oryza sativa
  Clone ID: PAT_MRT4530_5094C.1.pep
LAKNSLIRDKKEKHKKKKKKKKKKKKKKKKKKKKKKRRRNSRSRDSLVQSAAP

SEQ ID NO: 150741 - protein, 95 aa, Oryza sativa
  unsure (1)..(95): unsure at all Xaa locations
  Clone ID: PAT_MRT4530_50950C.1.pep
SPDSGVGEGGGAGAAGVGTGQHLRGVRKRPRGRYAEEIRDPAKKSRVWLGTXHTGEEAARSYDAVAREYRGAKAKTNLPYPNGAPAVRVNSGSSN

SEQ ID NO: 150742 - protein, 54 aa, Oryza sativa
  Clone ID: PAT_MRT4530_50951C.1.pep
SIHPSMTLLQFFNSCAHVCMLNLACLISCMYTCCMHVRFLSPHSLIVAETVHVQ

SEQ ID NO: 150743 - protein, 576 aa, Oryza sativa
  Clone ID: PAT_MRT4530_50952C.1.pep
MKAGERPKLVRGVRQESRRFRLLVIVVGFFLVSLTFVFVSKPDAILFSLNGKLPVEQAPTSILIQQKVNEPSGESRKTSTDALRGDPKVVDDEADAKPKGTGGGSEEEEGRVLSEPDPTSGMMEPTHNKDGNGHKSHQETLGGGGDGESKGNDEEGEHAEQKHKVTLPTVSNYTIHDAAEDTENAKQEGMNNVQQGSKPLCDFSNFRANVCEMRGDVRIHPTATSVLFMEPEGSQRDEVWKIKPYPRKGDEFCLSHITEVTVKSSKVAPECTKYHDVPAVIFSLTGYTGNLFHDFTDVLVPLFTTASEFNGEVQFLITDMALWWTIKYQTVLQKLSKYPVIDFSKDDQVHCFKHAIVGLHAYMEFTIDSTKAPHNYSMADFNRFMRGAYSLGRDSVTVLGEYPKIKPRLLIIKRHRTRMFLNLDEIISMAEELGFEVVIDEANVSSDISRFARLVNSVDVMMGVHGAGLTNCVFLPQHATLIQIVPWGGLDWISRTDFGNPAELMGLRYKQYSIGVDESSLTDQYPRDHEIFKNPISFHQRGFDFIRQTFMDKQNVKLDCKRFRPILLEALDNLNP

SEQ ID NO: 150744 - protein, 358 aa, Oryza sativa
  Clone ID: PAT_MRT4530_50953C.1.pep
MVEPWQCDACKQPGFGELYACDACGFHLHYICAHAEETITHPLHRDRCCTFTLHDRAPGRTRRFCDAFGEIAAPAGLVYHCACGSRDLHPCCAGLDRSRPTDDGGVLHLRKASSSARWRCDCCGERSDYWVYRSGSGNVTLNVSCLKKMAARESVLAYLRPQDGSAAGDEESSAGQQPADALVVRVPRGAVQRTTTTRGDEHWLQRLCRIAGTAIRIIIGTILGDPTALIAAVVAGFLQLTTLLAISDVDKIIAHVRLAIDKLKLAVLGYTIKLAIRGMNARRTEYKLLIQTSQLARRRIDMVATRRAIGWESLGDWTGDVQFPQIVRTKQISEALWAVVLEQDAKSLFRVLQNIIGV

SEQ ID NO: 150745 - protein, 86 aa, Oryza sativa
  Clone ID: PAT_MRT4530_50954C.1.pep
MVGCERMVLMVVLMTIKDRFTIFGCETLTVPTTSQHGQRLYFLYSMVHRRAPDCEVAEISPQGSLGSPCLVYKGVIMIREQCTTLN

SEQ ID NO: 150746 - protein, 62 aa, Oryza sativa
  unsure (1)..(62): unsure at all Xaa locations
  Clone ID: PAT_MRT4530_50955C.1.pep
GXPNKLXKAXPTNVDRHYGPNNHGXWAISGPRNPSKINXFNRKQNRPTGFVRRTXMLGIAWG

SEQ ID NO: 150747 - protein, 135 aa, Oryza sativa
  unsure (1)..(135): unsure at all Xaa locations
  Clone ID: PAT_MRT4530_50956C.1.pep
IWSTAHNRGHGYSNSFTQIRGVQLYPQDTAPQHISVXPTCHHDILERGRDRTLRITPSNXSHHTSGFTPTPRKAAGSPPSCHGESGSRSTGHAGRPTRLSYYLRASQLISRSCYADMDVAHSPVCLLLSLLSLLA

SEQ ID NO: 150748 - protein, 313 aa, Oryza sativa
  Clone ID: PAT_MRT4530_50957C.1.pep
MAALAEHLLGLSSAPVDWEAESYPGYGDFAVLPFLVAFFPAVRFLLDRFVFELLARRLVLGKGYDKLAETDESRKKINKFKESAWKFVYFLSAELLSLSVTYNEPWFKNTRNFWVGPGEQIWPDQKTKLKLKAVYMFAAGFYTYSIFALLFWETRRSDFGVSMSHHLATVVLIVLSYIFRFARVGSVVLALHDASDIFLEIGKMSKYSSCEGLAVAAFLLFVASWILLRLIIFPFWILRSTSYEVLLTLDKEKHKFYGPIYYYVFNSLLFSLLVLHIYWWVLIYPTLVKQIQSRGRIGDDVRSDSEGEEDHED

SEQ ID NO: 150749 - protein, 1574 aa, Oryza sativa
  Clone ID: PAT_MRT4530_50958C.1.pep
MGRRKSRPARAVGLGPGAAAAAEPDAPSPSGSGGASKSRRAAKGEARRREDVCFEVDDSTWCLSDGDRRDLAELVMRDVRISGEGEGALDVAALHEAEREKRCSLRLRVRDAPEEGFRLGQWPVVPSDCVILEYAIAGMVFSGCFDGPDEGVSGLAHLVRLRFVTLRVHAFAVSRSADSVSVASFRVRLGLMEQAFATCESLLEVTRHPWRKSFMNMMAWVRPEVMTSAAIYGMDGLARPINGGANGDFTPKKDSQFDLAAFYEAVKPSMEAGLLEEELPDLLPHLRTYQLRAANWMVQREKGNTMISSPNQHYVHSAPYCVPIDFMHKKSRMFYNPFNGNVSMHPEPSPPYVSGGILADEMGLGKTVELLACIFAHRRPYSADCSVSSNIKGADQIKRHKRERVECICGAASVTSAYQGIWIQCDICDAWQHASCVGYSPKEEMHVDDDDGDEASNNEKGTLKSKNRRKKKDRHTRPGSLKVCIYEGAKNTDLTSTQKSDMAEISTADIVLTTYDVLKEDLSHDSDRHDGDRRFLRYQKRYPVTPTVLTRVHWWRLCLDEAQMVESSKTSVTEMAMRLNAQHRWCITGTPIQRRLDDLFGLLRFLKTHPFDTYRWWVDIIRDPYEKGDMVAMNYAHKFFKEIMWRSSKIHVSRELQLPPQEECFSWLIFSSIEEYFYQKQHATCMDHAHEIIRRIRDDANKSEPISDSNVVSNLYLSNDDIAKLLVPLLKLRQACCHPQVGSFGLCSLQRTPLSMGEILQVLIGKAKVEGEEELRKIVVALNGLAGLAVIEQNNQEAISLYKEALALACENFDDFRVDPLLNLHINHNLAELLRASSEYLQECPLKEQTSEVHGARKRKETSPADSETSKEDKNINTQVCGSEEMDVENDSGCHTSSVSTLSMELQNQNMNWWLYALDCIEQNKDSADELIRKIDISSNKSTTGLGSTGMSSRVQTIAGLKYTIQTGIDSLQSSRQQVMDRLLELDKTMDSPKDEDIECQRYCPNCYDGNGSLCIQCELDDLFQGYEARLFLVKKSNNDSVIASVEEARDLQRRKYELNQFFRNTKTNEGSEPGDDNKNPRSAREGFLVYRHPSRIETSLRVILTHSKTIMGEQSAKIAKKNLLLFEAMRKEFSQARNLSIAQTQLLRAHDEIKMSLSRLQLKEKDDEPSAVNIVTREELIPYNVQFTSEKFLSLSSLARIRGQLRYLKGLVLSNKKPLGKHGESLPESGNSVAIATSIPATGQTASDIINEPCPICQEKIFDQKMVFQCGHFVCCKCCLYMTEQAAAHFGRSKKWIMCPTCRQRTDLENVAFVVENQRGNADREIEDLAESAISVQGSYGTKIEAVTRRILRITSTDGAAKILVFSSWNDVLDVLEHSLAANNISYVRMKGGRKSQTALAQFKGLASSISGEKAKKSFSKMQPAQVLLMLIQHGANGLNLLEAQHVILVEPLLNPAAEAQAISRIHRVGQDKSTFIHRFIVKNTIEESIYKLNRGRAVCSTIHRKSKNFKDELVLTLKDIESLFPVATLDQPSEQENKNYGGAGGHMRSLPPSVAAGLAAERRLLEQHDNQH

SEQ ID NO: 150750 - protein, 46 aa, Oryza sativa
  Clone ID: PAT_MRT4530_50959C.1.pep
EPRFPPLTAQDIKGLQNRPRGATSRQAQARPRPQSLSSAGHALSMR

SEQ ID NO: 150751 - protein, 507 aa, Oryza sativa
  Clone ID: PAT_MRT4530_5095C.1.pep
MASVDLELGRPLSAAAAAYPPPLRRSINDDDVDDDGKPKRTGGLKCEMSALSLRNFMIIEKVSRGTEWTASAHIVTAVVGSGVLSLAWSTAQLGWVAGPATLVVFAVITYYTSVLLADCYRAGGDQVSGKRNYTYMDAVESYLGGRQVWFCGLCQYVNLVGTAIGYTITASISAAAVYKSNCFHKNGHSADCSVFTTSYMVVFGVVQVFFSQLQSLHEVAWLSVLAAVMSFSYSAIAVGLSLAQTISGPTGMTTMSGTVIGIDVDLSHKIWQALQALGNIAFAYSYSLVLIEIQDTIRSPPAESKTMRKANALAMPVITAFYTLCGCLGYAAFGNAAPGNMLTGFGFYDPYWLVGLANACIVVHLVGAYQVMSQPVFTAVESWASSRWPRCGFFVTGGGGTRLISVNAFRLAWRTAYVVACTAVAAVVPFFNDVLGLLGAVGFWPLTVYFPVEMYIRRRKLERSSKRWVALQSLNAVCFVVTLASAVASVQGIAESMAHYVPFKSKL

SEQ ID NO: 150752 - protein, 417 aa, Oryza sativa
  Clone ID: PAT_MRT4530_50960C.1.pep
MAFPSRSGPWTPVLELLRGPYPVKHLSDHLGILSCGEHFLVVNPKWQFHADGQVRCDLHVFSSKTTSWESKVARLPCGVEAYIGDFIPTKVLSVEGRSIAWVDLWNGILLFDSVTSNPEVRLIQLPPLMPINGRYLRGGGLDDTYISVDPNRDITCSNGWFRFIEMGFPLLDGSTGQLNFRWQATMFKRLVRPEECQWEPCGTETDSAELVCADSCSLDLLPVIWDSKDNQLTFTNLICTYPTMDLYDDNILYVMAKMKGTDPSGWVLSVNTENKKLEKVSPFSQEILFFHRIYLQCDLFKHLGKAPVWWGPNFLKFSLTKVLDKHTNRDKRRIFEEKEADSSNSDSGTYVVSEHLRLMGDLTLQLLAPIDVTESKIRVAHGALYNLKGTLPSDVLDKNFVKRTSFSGPEQKKDAAV

SEQ ID NO: 150753 - protein, 235 aa, Oryza sativa
  Clone ID: PAT_MRT4530_50961C.1.pep
MARRVRGRARWGHEVVRVLGRGEHVLAPVSPSPTMRHLLQSSEHLTAATATAAASGGRGVHTDTFLILAAVLCFLLCVVGLALVARCSRLCNPSSFAVEAEEAMPPAPCKGLKRKALLSLPTVSFAEAAAAEEEEERPECAICLAEFARGDEVRVLPPCGHGFHAACVDVWLVSTSTCPSCRRAIVVLAAPSPAVTAAATDPPPPCCAADAAQASSQPPQPTGASDRGGCRTSVP

SEQ ID NO: 150754 - protein, 57 aa, Oryza sativa
  Clone ID: PAT_MRT4530_50962C.1.pep
MESPARSCVSSEAEDQQAAAAAMVVAGCPRCLMYVMLAVSNTKQPRCPSPSLMKSYC

SEQ ID NO: 150755 - protein, 112 aa, Oryza sativa
  Clone ID: PAT_MRT4530_50963C.1.pep
MSSSASPSTAPSAEYAEKTTPEKSWITWYKRVSASKKVHWDEIGIGQALALTIVNSSKDEPLMAAATYFCCGPTTNWQFAAEALEPKREFPLGKILLGYLYQMLNNASAKIA

SEQ ID NO: 150756 - protein, 50 aa, Oryza sativa
  Clone ID: PAT_MRT4530_50964C.1.pep
VSSYLPPFHFLGGFLIRGGFFFTFFTFLVLRCMHCHLTTKNVEPLHTVQR

SEQ ID NO: 150757 - protein, 579 aa, Oryza sativa
  Clone ID: PAT_MRT4530_50965C.1.pep
MDHQLVARGLFKPLLLFVAGLIVLYALRRRRRHRRSSGLRLPPSPFGLPILGHLHLLAPLPHLALHRLAARHGPLLFLRLGSVPCVAACSPDAAREVLKTHEAAFLDRPKPAAVHRLTYGGQDFSFSAYGPYWRFMKRACVHELLAGRTLDRLRHVRREEVARLVGSLRASADGGERVDVDAALMGLTGDIVSRMVMGRRWTGDDNDAEEMRSVVAETAELTGTFNLQDYIGVFKYWDVQGLGKRIDAVHRKFDAMMERILTAREAKRKLRRQAAADGEDDEKDLLDMLFDMHEDEAAEMRLTRDNIKAFMLDIFAAGTDTTTITLEWALSELINNPPVLRKLQAELDAVVGGARLADESDIPSLPYLQAVAKETLRLHPTGPLVVRRSLERATVAGYDVPAGATVFVNVWAIGRDAAWWPEPTAFRPERFVSGGGGGGTAADVRGQHFHLLPFGSGRRICPGASLAMLVVQAALAAMVQCFEWSPVGGAPVDMEEGPGLTLPRKRPLVCTVSPRIHPLPAAASASLTPAAAGISHFLREKESRRALVSGTEEAENTRETGVTDNCRPSIGIWKRGGLG

SEQ ID NO: 150758 - protein, 393 aa, Oryza sativa
  Clone ID: PAT_MRT4530_50966C.1.pep
MVLSNPAMLPPGFRFHPTDEELIVHYLRNRAASSPCPVSIIADVDIYKFDPWDLPAKANYGDREWYFFSPRDRKYPNGIRPNRAAGSGYWKATGTDKPIHSSGGAATNESVGVKKALVFYKGRPPKGTKTNWIMHEYRLAAADAHAANTYRPMKQGTARVRLDDWVLCRIYKKSSHASPLAVPPLSDHEQDEPCALEENAPLYAPSSSSAASMILQGAAAGAFPSLHAAAAAATQRTAMQKIPSISDLLNEYSLSQLFDDGGAAAAAPLQEMARQPDHHHHQQQQHALFGHPVMNHFIANNSMVQLAHLDPSSSAAASTSAGAVVEPPAVTGKRKRSSDGGEPTIQALPPAAAAGKKPNGSCVGATFQIGSALQGSSLGLSHQMLLHSNMGMN

SEQ ID NO: 150759 - protein, 801 aa, Oryza sativa
  unsure (1)..(801): unsure at all Xaa locations
  Clone ID: PAT_MRT4530_50967C.1.pep
MPKRTLLTYYSSLSNTNTSDPPLNNEIASQSKRPRAEFSHMDIIGDPVEWKPIENYQPEIRDQVKRIYALSGPTQPDFCTFPRKWQSGEWRSFQKAWFNEFDWLEYSVSKDAAYCLYCYLFFXLGKPXKFGSSVFAKEGFVNWKKAKDRLATHSNCKTHNDTRKKCKDFMNQRTSIFRKIEIVSKEEDIRYKIRLTSSLDVIRFLIKQGDPFRGQDKTNASLNKGKFREMVNWYKDKVPXSNKNCQMLSHDIQQDLTKACAEEVTAVIMDEIGHXNFSVLIDESCDVSINEQMGVILRFVNDXEGKVMERFLGLKHIERCTTVALKEALVGMLSSYKLIISRIREQGYVGASNMRGEFNGVQKLIRDENPFAYFVHCFAHQLQLVVVTVSSSTAATIDFFNYVPLIVNTVGASCMRKDALLAKHHDVLLEKVENGEITTGRGLNQECSLARPGDTRWGSHLKTLLRIMVMWEAIIFVLENVKKDSTKPTFIGGAFGLMGKMQWFDFVFIMHLMIDILSITDDMSRALQRKDQYIVEAMNLIIYVXTRENGWEPLMNRVASFCVKHEIEVPKMDKEVNESGTSLCRKHKVTNKHYYHVEIFLAAIDAILAEMNRQFSEVSSKLLXVCMSAFNPWIFLSNFDVDKLVRLAEIYSQDFLVGDLMLLRPQLANFITNIRRAKEFVGCKDLAKVAELMVQTGKNRTYPLVYRLIELVLILPVATASVERVFSAMSLIKTNLRNKMGDEWLNDLMICYTEKQIFRSISNEKIIRRFEDMKARRMLLPTKKLVECSMPPLPANCHYSL

SEQ ID NO: 150760 - protein, 219 aa, Oryza sativa
  Clone ID: PAT_MRT4530_50968C.1.pep
MSRAQRDDGIRAGEEEVAESIHPVAADGGSAQEGMEKPWDPCERGRDRRIGQVLPTHRGGKHPPATMPGRSSSRRIRRGRSHYRRIHPRPLPPPPDPHAVAATAVGSAAGGRRERAEGAATATVADPPAAAAAAATDAGSAAGGRRDDERGDPSMTRSASPSSTTPSASSCSPPSTAAASSRTHVFTLDEDLRGDGIVDLADNFEGKRRLTTIMWIGRR

SEQ ID NO: 150761 - protein, 287 aa, Oryza sativa
  Clone ID: PAT_MRT4530_50969C.1.pep
MRVVHPHKKIGFLRAGDGRHRVVWVGDGHLHWICAGHGRRHSPTAAAVLILPPCWIHADPGGGWPPLPLSPLIAFAAFLLASATVTPCQLATLPSRGDVEKTAANESTIFESKEGIGASGTDAATQWDQHFAANVPKQPTSVADGLKQRQEHEETGLSREAERSTSLVDLESRGLGSGRERIATGPFPRCCAAPCSSFPLAATWPPLPHNVPLLTLRRRAACRSSPPPGGELGEARGKGQEGKETARSDDMDDEYTRRARKIYSSRGYPGRCQHRVSAGDNPEVLSL

SEQ ID NO: 150762 - protein, 57 aa, Oryza sativa
  Clone ID: PAT_MRT4530_5096C.1.pep
VMYPILHRSAGREAIAADESLFLHFVVCLQIAWTAMTRRAKFDRYAVAVRHRPETRV

SEQ ID NO: 150763 - protein, 168 aa, Oryza sativa
  Clone ID: PAT_MRT4530_50970C.1.pep
MAWHGVTLEQSEALKTNPTVRRLVALLPFARVKPPPRASWQPSPRQPEKAAGRLAVSLPFARLRLPPRQAAATRKGTGRWLREDPDVFISYWYLFPTATSQFALQVQPTFPNWPRTHLFHTGRRLDLVDSRSPPRASGRSPPCASGHGGTAGPGPNLTRRPPDRLHTR

SEQ ID NO: 150764 - protein, 68 aa, Oryza sativa
  Clone ID: PAT_MRT4530_50971C.1.pep
AIDARDALAKSIYAHLFDWVVEQINPSLGTGREHTWRSISGIFNIQVRGLSKKKKKKKKKKKKKKNFL

SEQ ID NO: 150765 - protein, 308 aa, Oryza sativa
  Clone ID: PAT_MRT4530_50972C.1.pep
MALWGGLGQTATVAQLVGVDVGGLVSMIMHAALTARQNKRECEQLARRVFMIGELLPHLQDSSVMRRPEVRRPLMLLGGMLREAHELVASCQGRSTVYQLVAAGRQAEKFRDIQRRIDSYLLLFPFISHIDITRRLDRIHREMIPSDHPKPTSLPSPSTGSQNHEAVVIQDVVIHGGEAGEKINLAGLAAATNNFAPDREIGKGGFSTVYMTRLPDGREVAIKRIDSASMEEDTLREATMLPSLRHEHIIRLFGWVSVRKKQHRQQPFWKKRKGGTDTGYGGYPPIRDVHERSITVAIALNKISLCRL

SEQ ID NO: 150766 - protein, 51 aa, Oryza sativa
  Clone ID: PAT_MRT4530_50973C.1.pep
YFYTSKVYTPKVYRSKVYKSKVYIPNSNLNLNSNFLYIVFLYIYFSNFCFF

SEQ ID NO: 150767 - protein, 218 aa, Oryza sativa
  Clone ID: PAT_MRT4530_50974C.1.pep
MTQSLAATCERLKKLAQQAGIDFRFRAVSCRAPEIEASKLGCEPGEALAVNLAFTLSRVPDESVSPANPRDELLRRVRALGPRVVTLVEQELNTNTAPMAARFSDASAHYGAVLESLDATLGRDSADRTRAEAALASKVANAVGREGPDRVERCEVFGKWRARFGMAGFRAVAIGEDIGGRERARAGPARPGRDGTPDGGRLGVGWMGRVVTVASAWR

SEQ ID NO: 150768 - protein, 197 aa, Oryza sativa
  unsure (1)..(197): unsure at all Xaa locations
  Clone ID: PAT_MRT4530_50975C.1.pep
TGSAAPAARRWRALSARQHRHHRSPAAEAFRCRRRAAERPRRRPVVASHLRPRRRGSATADDPGLAVYXGRHKEEGSLREACDTGHYTTVIITFYNVFRYGRYSXDISGHLLTAVGADIKHCQSRGITVLLSIGSQGGGYSLHINASVADIADNLWNAYLSSHRAGVHRPFGNGGDGREEEADAWGPRGSHAESAAT

SEQ ID NO: 150769 - protein, 84 aa, Oryza sativa
  Clone ID: PAT_MRT4530_50976C.1.pep
RPEHLFRSIRRCFGLLSKRALWLTDLVDCVPLARIGTERRFYRRSRPGSRRIESYLFIQELRMSLVHVYDAVVHAVVVTKNEPR

SEQ ID NO: 150770 - protein, 236 aa, Oryza sativa
  Clone ID: PAT_MRT4530_50977C.1.pep
AYSFCICGRYCFNAASPSCCASNSPPTRSRRQPRPMTTSRWCTTCAPTSSSHRSRTPPPSSGGGMRSSPMPAPSPSSSPVSPSASASASAAVVSSPIYRPRQLERINDDDTDVVVGLPHCLLLCRRRQDKGPPTIHLPRSDDDDNRRVQFLPRRLPAAPISALAGRSPLLPRRFRDERGREVEREKGKKRLTCGTHAESAATSDKTGVKTAEGPSLHWFCKLRDALYPFCGLRMIL

SEQ ID NO: 150771 - protein, 118 aa, Oryza sativa
  Clone ID: PAT_MRT4530_50978C.1.pep
MAGINRKGGAAAAYAVALLLAAGAADAAGCNPSALSPCMSAIMLGAAPSPGCCVQLRAQQPCLCQYARDPSYRSYVTSPSAQRAVKACNPPAAAGWVLASRAVAAVVLRRSGNGEEMG

SEQ ID NO: 150772 - protein, 86 aa, Oryza sativa
  Clone ID: PAT_MRT4530_50979C.1.pep
MSDAPPMAEKPTIKVETTPGDWRFPSANQTKRCFTCYIEYNKCIEAKGEGSDECTKYAKCYRSLCPGEWIERWKEQRANGTFAGPL

SEQ ID NO: 150773 - protein, 201 aa, Oryza sativa
  Clone ID: PAT_MRT4530_5097C.1.pep
MQYCVAVVRYARNVANVSSSRKQPCGRSIDVVTLMKTITNNLSPLRPDETSCVDPHGIASRGDRDGRRDHVTRARAEHGCMRRKREISRRFRRRFRVIRSLRTQVVSHWIDLRIHWEGDYYYYLHEHEPVISRVGYEVPPTALTDYFTTCPSSFLLIVIRILSGDLLIVFRCHINSHHSAPLVVIESIGRNSEVNARMQFY

SEQ ID NO: 150774 - protein, 63 aa, Oryza sativa
  unsure (1)..(63): unsure at all Xaa locations
  Clone ID: PAT_MRT4530_50980C.1.pep
VTFVYIPLSPPPPPPXXXILMTHLSYAYAWFSEHMHIGRRDQIKGLNREITAIPHKKHCIXLF

SEQ ID NO: 150775 - protein, 486 aa, Oryza sativa
  Clone ID: PAT_MRT4530_50981C.1.pep
MNTNYSSLPLTSIELQSNQRTSEVANGVGYNGHAKISKQDSFLVDGDAAAGGGGGENDDLPLIGDGPAGPPEGSGVPAAVFNLATSIIGAGIMALPATMKVLGVAVGLVSILVMGILSEVTIELLVRFAVYCRALSYGEVVHKALGRPASIVAQMCVIINNAGVLIVYLIIIGDVMSGSLKHIGVMDQLIGHGEWDNRRLLILVVLVIFLSPLCALEKIDSLSLSSAASVALAVVFVVVSCIIALVKVVEGKISMPRMGPDFSSRAAMLDLLVVIPIMTNAYICHFNVQPIYNELKEKTPHNMYKIGRITTVLCVVVYALTAVSGYLLFGEDTESDVLTNFDKDLGIRFSSILNFIVRIGYVIHLVLVFPVVHFSLRQTVDSLIFGELAPHSRKKMLTLTVVLLALIYLGSTMIPNIWVAFKFTGATTGLALGFIFPALIALRLDKEGKSLGKGERLLSIVMLGLAMVVSIIGVIGNVYSLRSKSA

SEQ ID NO: 150776 - protein, 98 aa, Oryza sativa
  Clone ID: PAT_MRT4530_50982C.1.pep
MVRLQKSFFSSIETKPPRRTTVVHKPTKKPTPLTAIDSHLNLRGLELTFFTLQLCSMCATLGYPHEMAYHGGHILSVAYQNVALVAIDMLHQHYLDEL

SEQ ID NO: 150777 - protein, 67 aa, Oryza sativa
  Clone ID: PAT_MRT4530_50983C.1.pep
MVTGNTVTCTLFRDEGYNDLTASLQQTPLFREVYIKADLVQKFGAEKEGLLESEAKRTDDFQCSTMV

SEQ ID NO: 150778 - protein, 53 aa, Oryza sativa
  Clone ID: PAT_MRT4530_50984C.1.pep
RFQKSALHGLQRASKPFLAGLFKDTNLWSIPAKGVPIMSKVIQLARRILGKGP

SEQ ID NO: 150779 - protein, 119 aa, Oryza sativa
  Clone ID: PAT_MRT4530_50985C.1.pep
LRSSYYVAAPRRRRRRRRRGTLVRRRLPASSGSSAIDCVRLLRLLRSPRRRLSLLYVHRGRVVSGLAVASRRPVSGRRYRPTYVVPLASPSYLPVSASYSYLLYCISLSLSQLYYPRAV

SEQ ID NO: 150780 - protein, 144 aa, Oryza sativa
  Clone ID: PAT_MRT4530_50986C.1.pep
MGVPHPISSRQQRHAWGQATTAGNPRGAAELSRDHRAQEAATFPYAATAGRRHLEHRDRGTMPDMRMMSERSWCGGKGWGRVEEGLAVDNKSVLGRWCQIRVGDKSLCMLAVESVSWRQGRPTLALGGGSMVGGVSVRSLVKMT

SEQ ID NO: 150781 - protein, 484 aa, Oryza sativa
  Clone ID: PAT_MRT4530_50987C.1.pep
MGLLSSASRSCCCCSWVRGGCASCCSWIRGFCGGGGGATTSAQDTAASDAKKRKKRKWVVRGVFGKAAREAEEPLTLETMKKRKSAATSPELEKNKWGTKKNWKKKKGKTQPTGLASLVKEISLENSTRNRAAAGEILRIGNHNIPSRVFTFRQLADATGSFSPENLLGEGGFGRVYKGFIPDTKEVIAVKQLDKDGLQGNREFLVEVLMLSLLHHPNLVTLLGYSTECDQRILVYEYMPLGSLQDHLLDLTPNSSPLSWHTRMKIAVGAARGMEYLHEIANPPVIYRDLKASNILLDGGFNAKLSDFGLAKLGPVGDKSHVTTRVMGTYGYCAPEYAMTGKLTKMSDIYSFGVVLLEIITGRRAIDTTKPTREQILVHWAAPLFRDKKKFVKMADPLLDMKFPLKGLYQALAISSMCLQEEASSRPLISDVVTALTFLADPNYDPPDDVEPLPIKAPNLDRESSQKEAEGGDNDSDEGGEEQV

SEQ ID NO: 150782 - protein, 82 aa, Oryza sativa
  Clone ID: PAT_MRT4530_50988C.1.pep
LIHHRPRLLAVASLLFAVAGRRQRQRRASTAIHCVSEFLSVPRCYTFSSHLADCSLSLVDLVFLIVVDFSPLLLVGSIDIGP

SEQ ID NO: 150783 - protein, 70 aa, Oryza sativa
  Clone ID: PAT_MRT4530_50989C.1.pep
MAISSLLLRHHLCPDPEKMGVVADLHPARYSPPFTSLRLASCPPLWDSILLAIDVARTFSGEDVRLEVDW

SEQ ID NO: 150784 - protein, 99 aa, Oryza sativa
  Clone ID: PAT_MRT4530_5098C.1.pep
MPGQPSVPAGRPRHGPAVGPGQHGPDPSRAMPCLGRAKKPCRDSGGGAMDSRRWRRDGYQTTAARQIPNDGGTTETGNSATKAGGGGSTAIRVGQAVRS

SEQ ID NO: 150785 - protein, 26 aa, Oryza sativa
  Clone ID: PAT_MRT4530_50990C.1.pep
YRRLTTRLKTNIRNNVYILPSQCYCP

SEQ ID NO: 150786 - protein, 92 aa, Oryza sativa
  unsure (1)..(92): unsure at all Xaa locations
  Clone ID: PAT_MRT4530_50991C.1.pep
YTVTPISTGPIVIGNKKGTATTERNGAPSIIPPTPMENGTSTXPNTLKPRTWCPIHKTTKHALEDCPVILHVQAELYTNCRIFLRTLKPAHH

SEQ ID NO: 150787 - protein, 54 aa, Oryza sativa
  Clone ID: PAT_MRT4530_50992C.1.pep
IKQAAAAIFHRMISHTTISFSNMIGPVEQVEFCGHPVVFIAPSGYGPPEVSSHV

SEQ ID NO: 150788 - protein, 70 aa, Oryza sativa
  unsure (1)..(70): unsure at all Xaa locations
  Clone ID: PAT_MRT4530_50993C.1.pep
MALESTFIMIKPRRRQEVIHCETDGVHTGLTGDIISRLEKNGFYLRGMTFMNAERSFXQQPYARLSDKPF

SEQ ID NO: 150789 - protein, 114 aa, Oryza sativa
  Clone ID: PAT_MRT4530_50994C.1.pep
WPPRPPSRGPWPSGRRPPRCARAPSPSLQVLPLLHIRFLLLLVEPRARPPREDDAQQPAEEAEPDDAPDRDPHADHRDVCRRRRRRRRRGRRSEVRPLAFPYPYIYLREIWFCS

SEQ ID NO: 150790 - protein, 113 aa, Oryza sativa
  Clone ID: PAT_MRT4530_50995C.1.pep
DIRIQTDKENGIITITDTGIGMTRQELVDSLGTIASSGTAKFLKALKESQEAGVDSNLIGQFGVGFYSAFLVSDKVAVSTKSPKSDKQYVWEGEAESSSYTIREETDPEKLLP

SEQ ID NO: 150791 - protein, 731 aa, Oryza sativa
  Clone ID: PAT_MRT4530_50996C.1.pep
MKMLNLHNREPFLICNGRYESVLIFSVAAHVLYPCCIQSSFLYLIVDLIEILTVYYLDKIMPGLCLFLRFLVVIDDISSIETWNSISGAFVENNSGSRIITTTRTKDVANACCSSFRGIVYKMKPLGWTDSRSLFFRRLYGSDNYIPEPEELVIVVDILRKCGGVPLAIDVIASLLASQREVNKLDNWLKIKNSMGFELETNPNSKWMKHILKLSYNNLSWDLKTCLLYLHMYPENINIMKKDLVRQWIAEGFITQRDNRDLEDIAESYFRDLINRSLIKPVQFKYGEVVSCRVVHNLLLDLIVEKSTEENFVTVISTDQDCSRRGNFLIRRLNYRSNCGNIIQASESLHQVRSITYFGNWLHQRGESLPRLRMFKALRVLHMRIEGYFSFRAIYDLSPICNLFQLRYLKLEGIFFQFPDTIGELRYLQVVDINCGTNLVLVGGFLRDACLPSLRHLRAAGSEELGRGINRLTSIRTLEGINFCNCFVENIRHLGVLTNLRTLGVIYNRRRGNDEDDLIDMVKFAALATSLRELGGCNLRCLDFRVVLEGNIRQPPISFLCSWSPPPQFLQRCHLYKAFHRVPYWIQQVETLTSLCLKVVELKGDDMRVLSRLPCLAYLDLQVFMVPGMEIIIDSVSFSVLKELKLTYGSSTSSLSIKPGAMPKLRIMHLIVFGQAEQDTKSLYGIQHLHSLEDVIITSDYNNVLVSFREALDRHPRIGSIQVCIGASSDL

SEQ ID NO: 150792 - protein, 67 aa, Oryza sativa
  Clone ID: PAT_MRT4530_50997C.1.pep
LQATPDDHLPILIIQHIAYQFINQDFSNKALGFNLHQYTSKHHCCSATSHFLIRKEVLSNHFYLLLS

SEQ ID NO: 150793 - protein, 132 aa, Oryza sativa
  Clone ID: PAT_MRT4530_50998C.1.pep
QWQAKDAAGVAVELDEEARPRVKASSEWILNCIAHGGDIYGVTTGFGGTSHRRTKDGPALQVELLRHLNAGIFGTGSDGHTLPSETVRAVMLVRINTLLQGYSGIRFEILEAITKLLNTGVTPCLPLRGTIT

SEQ ID NO: 150794 - protein, 702 aa, Oryza sativa
  unsure (1)..(702): unsure at all Xaa locations
  Clone ID: PAT_MRT4530_50999C.1.pep
MAGNGPINKEDPLNWGAAAAEMAGSHLDEVKRMVAQFREPLVKIQGATLRVGQVAAVAQAKDAAGVAVELDEEARPRVKASSEWILNCIAHGGDIYGVTTGFGGTSHRRTKDGPALQVELLRHLNAGIFGTGSDGHTLPSETVRAAMLVRINTLLQGYSGIRFEILEAITKLLNTGVTPCLPLRGTITASGDLVPLSYIAGLITGRPNAQAISPDGRKVDAAEAFKLAGIEGGFFTLNPKEGLAIVNGTSVGSALAATVMFDANILAVLSEVLSAVFCEVMNGKPEYTDHLTHKLKHHPGSIEAAAIMEHILAGSSFMSHAKKVNEMDPLLKPKQDRYALRTSPQWLGPQIEVIRAATKSIEREVNSVNDNPVIDVHRGKALHGGNFQGTPIGVSMDNARLAIANIGKLMFAQFSELVNEFYNNGLTSNLAGSRNPSLDYGFKGTEIAMASYCSELQYLANPITNHVQSAEQHNQDVNSLGLVSARKTLEAVDILKLMTSTYIVALCQAVDLRHLEENIKSSVKNCVTQVAKKVLTMNPTGDLSSARFSEKNLLTAIDREAVFSYADDPCSANYPLMQKLRAVLVEHALTSGDXRARGLRVLQDHQVRGGAPLCAAPGDRGRPRRRRQRXTAPVANRIVESRSFPLYRFVREELGCVFLTGEKLKSPGEECNKVFLGISQGKLIDPMLDCLKEWNGEPLPIN

SEQ ID NO: 150795 - protein, 539 aa, Oryza sativa
  unsure (1)..(539): unsure at all Xaa locations
  Clone ID: PAT_MRT4530_5099C.1.pep
MGLPGAEPPAASGGGLPGFFGGKSKYVRMDDVLPQEQEEDGVGGGGGGVRVRRSHSSRRYVFACSVFASLNSVLLGYDVGVMSGCILFIQRDLHINEVQQEVLVGCLSFISLLGSLAGGRTSDAVGRKWTIGLAAIVFQAGAAVMTLAPSFEVLMVGRLLAGVGIGFGVMIAPVYIAEISPAASRGSFTSFPEIFINLGILLGYISNYAFSGLPDHVSWRVMLAVGILPSVSIAFALLVIPESPRWLVMKNRADEAREVLLKVPDSEDEAKERLAEIERAAAAVASAGKYGDKTVWQELTRPSPVIRRMLITGLGIQCFQQITGIDALVYYSPTIFRDAGITTESQLLVATVAVGFFKTAFIALAIVLIDRVGRKPLLYVSTVGMTACLVVLAATLAALAHGSASRSAGIAVAILTVCGDVAFFSVGIGPICWVMSSEIFPLRLRSQAAALGAVMNRVTSGAVAMSFLSVCRAISVAGAFSVFAVISALSVVFVYRYVPETSGKTLEEIELLFGGGGGRXEAARGEVELRDGEHLVHKG

SEQ ID NO: 150796 - protein, 82 aa, Oryza sativa
  unsure (1)..(82): unsure at all Xaa locations
  Clone ID: PAT_MRT4530_509C.1.pep
MSFVISITPLTIINDAVIGNNLFSSWFGMVYSWFADRSQDWLFRMVGPMQXGMLYSVELILFNXYFTVLLNSERFIKCYLCK

SEQ ID NO: 150797 - protein, 55 aa, Oryza sativa
  Clone ID: PAT_MRT4530_50C.1.pep
MELKHGSIVDSNAATTDRSIECDSIVILDVLLDMDAYVFMAMLIDDIFNTLLHSS

SEQ ID NO: 150798 - protein, 49 aa, Oryza sativa
  Clone ID: PAT_MRT4530_51000C.1.pep
SLGLALCERETDLVLVLWSSDTIGPTRQNYLPNCEDGAVCPPGALAQWP

SEQ ID NO: 150799 - protein, 148 aa, Oryza sativa
  unsure (1)..(148): unsure at all Xaa locations
  Clone ID: PAT_MRT4530_51001C.1.pep
RGGRGERGRGRKGEEKKEKKEGGGKGKKKKGWRKTXSLACFLTANKGFIWVSADKVSGRCIGLQGLHXVGFSQIILLISCXYHQPIVFILLFTSSVRIYIRIIADSSKPYRYRLGQTYWYVRISSTFGPALELSRSSSPVCVFRINMV

SEQ ID NO: 150800 - protein, 795 aa, Oryza sativa
  unsure (1)..(795): unsure at all Xaa locations
  Clone ID: PAT_MRT4530_51002C.1.pep
FFNEVISNLGILEIPLKGKAYTWSNMQDSPLLEQXDWFFTIVSWTSSYPNTLVKSLSRVVSDHIPCVVQIVTSIPKTNLFGFENFWVEHEGFXYLVSSIWCGNGNCQDSAKNISLKFKSLRKGLKKWSKGLPRLNLVIKNCSLVTSFIDRIDELRDLTLAEWNLRNIIKGKAVLYMRYIHLYXQKRCTVRWVRFGGENTKFFHAAATEXYKRNLITHLKSNDGISLSGHAEKAAVIFXTFQQRMGVTSKPKMHFQLSQLLSPCESLINLFDNISISEIDGVVNKMPIDRAPGPDGFNGLFMKKMXPLIKQDFYMLCAQFCEGTLCLESLNRSFITLAPKKPNPEKVNDYRPIALQSIALKLIKKVLADRLQSVIISLIHQNQYGFIKARIIQDCLAWSFEYLHQCQKSKREIILLKLDFEKAFDTIEHSVILDVMRHKGFDSKWLGWIEKIFTSASSSVLLNGVPRKSFYCKRGVRQGDPLSPLLFVLGADLLQSIINSAYQHNVISMPIPTPDNDFPIVQYADDTLLFLSASSNELFSLKAILNTFASSTGLKINFEKSCLIPLNVQPEKVQHLSKMFGCMIGTLRFTYLGLPMGINRPKVIDFSPLVDRIERRLYATSALLSYGDRLTMVNSVLSSLPTYYMCTLSLPKSVINSIDRASRHCLWRGXDINSSKKPLVLWDRVCQPKSKGGLGVIDLKFQNNALLMKNLHKFYNRHPVPWVNLIWTTYYPDKVPHALSLRGSFWWKDVLQFIDIFRGLSKCTVGDGKTCLFWTDFWNDNIISVSYPRAFSFVRN

SEQ ID NO: 150801 - protein, 624 aa, Oryza sativa
  Clone ID: PAT_MRT4530_51003C.1.pep
MSGHLDRLARPCFEGSSSNDDKRDHKSDVENSEDDKRTRMGSLKKKAIDASTKIRHSLKKKKRRSGSRVLSVSIEDVRDLEELQAVEAFRQALILDELLPARHDDYHMMLRFLKARRFDIEKAKQMWTDMLKWRKEYGTDTIVEDFDYNELDAVLQYYPHGYHGVDKDGRPVYIERLGKVDPNKLMHVTTMDRYVRYHVKEFERSFLIKFPACSLAAKRHIDSSTTILDVQGVGLKNFSKTARELIVRLQKIDNDNYPETLYQMFIVNAGPGFRLLWNTVKSFLDPKTTSKIHVLGNKYQSKLLEVIDASELPEFLGGACTCPEYGGCLKAEKGPWKDQNILNIVLSGEAQCARQIVTVSNGEEKIISYAKSKHHTIRGSDTSTAESGSEAEDVTSPKVLRSYISHPKLTPVREEVKMVRATSFSTRMPEYDVPVVDKAVDATWKREVTRKTAFSSKDSSLTSTESSSNGSLDRIVAVLLAVFMAIITLVRSVKDLAAKRLPDKNESEQKYSTLYPDSMPKEEFRPPSPTPGFVEAELFSSVLQRLGDLEEKFLMLQDKPSEMPCEKEELLNAAVRRVDALEAELIVTKKALHEALIRQEELLAYIDSKEVAKAQKKKKAMFCY

SEQ ID NO: 150802 - protein, 67 aa, Oryza sativa
  Clone ID: PAT_MRT4530_51004C.1.pep
GPKCFIFLLRILGFLLSILTIWYCGVCFIEFYHITVHNKKSKFHTTYIWIKLSQNYIFKTGITKLYI

SEQ ID NO: 150803 - protein, 34 aa, Oryza sativa
  Clone ID: PAT_MRT4530_51005C.1.pep
GLEVRAGRHGRQCQVVRTGGGHGRPWDEESVEMV

SEQ ID NO: 150804 - protein, 69 aa, Oryza sativa
  Clone ID: PAT_MRT4530_51006C.1.pep
CKNGQGEFTLFARRPAVLRPRFPFDFVSCVTSSIDLLYVCSLLESKKKKKESGSKKEASYDVRVRASCV

SEQ ID NO: 150805 - protein, 63 aa, Oryza sativa
  Clone ID: PAT_MRT4530_51007C.1.pep
MQFFNKAGNIPTIGPSVSHILPVQVTIYGTDKSKGLYGTGLKICQRQINDVQRSLYLASMLEN

SEQ ID NO: 150806 - protein, 107 aa, Oryza sativa
  Clone ID: PAT_MRT4530_51008C.1.pep
QNIPWGRVCYEKGPAHATQQRGDPTSYEASQVSPVLAGGQHAELMELNPAHWTEADGCTVLPWTESHGSSPDETAASHSSPAAETTGRNSTAATATPKATITMTKTT

SEQ ID NO: 150807 - protein, 521 aa, Oryza sativa
  Clone ID: PAT_MRT4530_51009C.1.pep
MGAAEEQLKELGEKLEAAPPDPADDLAKLLEVRTCYCSLGGWFCGGLTFCTEEEKNLIFGHQFKVQDFRRVNQQAAECLHGVEQSPGPSVMETIQPCLKAVARDEFLKHHDEDVKVLLATCFCEITRITAPEAPYSDDVLRDMFHLIVDTFSGLNDVNGKSFGRRVAILETVARYRACVVMLDLECNDLIADMFRSFLEIISDNHEPNIVNSMQSVMALIIDESEDIEESLLNVLLSTLGRKKTGVSLPARKLARHVIEHSAGKLEPYIRKILTSSLDGDGTSTNNSIDHHEVIFDLYQCAPKVLKVVVPYITGELLADEVETRSKAVEILGELFSLPGIPILESFKSLFDEFLKRLTDRAVEIRVSVIEHLKKCLMSNHSRPEAQEIIKALCDRLLDYEENVSVKCYTMERLADIYKFYCQSGSDSSVNSDDFEWIPGKILRCLYDKDFRPESIESILCGSLFPPEYPTKERVKHWVTAVTHFDKVEMKALEQIFLQKQRLQQEMLKYMSLRQTSQVGES

SEQ ID NO: 150808 - protein, 265 aa, Oryza sativa
  unsure (1)..(265): unsure at all Xaa locations
  Clone ID: PAT_MRT4530_5100C.1.pep
MPTLSPVGMVTVIDGDKGENAQVQLSVEQDNGDFVIQNGTGTILSSLSFDREQQSTYTFQLKAVDGGVPPRSAYVGVTINVLDENDNAPYITAPSNTSHKLLTPQTRLGETVSQVAAEDFDSGVNAELIYSIAGGNPYGLFQIGSHSGAITLEKEIERRHHGLHRLVVKVSDRGKPPRYGTALVHLYVNETLANRTLLETLLGHSLDTPLDIDIAGDPEYERSKQRGNILFGVVAGVVAVALLIALAVLVRYCRQREAKSXYQAW

SEQ ID NO: 150809 - protein, 146 aa, Oryza sativa
  unsure (1)..(146): unsure at all Xaa locations
  Clone ID: PAT_MRT4530_51010C.1.pep
MKLLKIMDYPARQSSEERKSSGLEVGGKRGAPPPGXGGGSAVSRRGRCGPAHGSDARGCSRRPAATPGTHERHQPSGWKXREVAHPXCERRRRKVXGVSLAYRDLFIFLEIANMWDTYGIRIGAYPIRIRIRCRIRYGYVTMQPYQ

SEQ ID NO: 150810 - protein, 178 aa, Oryza sativa
  unsure (1)..(178): unsure at all Xaa locations
  Clone ID: PAT_MRT4530_51011C.1.pep
LLGFPILESFKSLFDEFLKRLTDRAVEIRVSVIEHLKKCLMSNHSRPEAQEIIKALCDRLLDYEENVRKQVVAAICDVACHSLGAVPVETIKQVAERVRDKSVSVKCYTMERLADIYKFYCQSGSDSSVNSDDSEWIAGKILRCLYDKDFRPESIESVLCXSLXHQXFNKERVKHWVT

SEQ ID NO: 150811 - protein, 112 aa, Oryza sativa
  Clone ID: PAT_MRT4530_51012C.1.pep
FFFFFFFFFFFFFFFFFFFFFFLGPKILGHSPVKKLSPMGPGAKNREIGMRGQKNWLKVPKPKLKHPDGGKKLFFFLSPGKIKQVARTPNFRGEKTGGGKNKGGDNRRTGKT

SEQ ID NO: 150812 - protein, 61 aa, Oryza sativa
  Clone ID: PAT_MRT4530_51013C.1.pep
SGIASNPNPLLIQNFRSGGGLRLPSPPPGPNQTAPFPPPAPPPPPPRPRAPNPKSPPHLLH

SEQ ID NO: 150813 - protein, 185 aa, Oryza sativa
  Clone ID: PAT_MRT4530_51014C.1.pep
MRSASWLPSAAGAVVGAACHLSESDGALRSSADTTASDTLDDGEPRSLSSKNSAMQQPSLHVRLRAICRSWRAWGEVSTTWCDNTGGHLILALSVSPSLLTWNGPSSSMAPYRIDEQTRPPLSQRRRGALDDVVEPPSASPLVEQRALRRLVHRDVPTKRCRTLAAVANGVDLALYRPSSTSNSG

SEQ ID NO: 150814 - protein, 77 aa, Oryza sativa
  Clone ID: PAT_MRT4530_51015C.1.pep
GRPGKKKKKKKKKKKKKKKKKKKKKKKKKKKKKNKKKKAPPLGFLKQKKKGSQKTPQKFFHPGVYPFGKGFPTPKVF

SEQ ID NO: 150815 - protein, 327 aa, Oryza sativa
  Clone ID: PAT_MRT4530_51016C.1.pep
MAAALLSLLILVPPIGLLAALAFLARPRAARIPLKGRHVLITGGSSGIGLAMATAAAREGARVSILARNAARLEEARGAIRAATGRDVGVHAADVRDADAVARALAEAGPVDVLVCNHGVFVPQELEKQEMEEVKWMVDINLMGTFHLVKAALPAMKERTKETRLPASIAIMSSQAGQVGVYGYTAYSASKFALRGLGEALQHEVIADNIHVSLIFPPDTETPGFAEENKRRPELTNIIAGSSGGMKADDVARKALDGIKSGKFIVPCNFEGAMLAVATAGLSPQSSPLTAFLEIIGAGVMRFAAICFQFNWFMTIENWYAKNKKHA

SEQ ID NO: 150816 - protein, 227 aa, Oryza sativa
  unsure (1)..(227): unsure at all Xaa locations
  Clone ID: PAT_MRT4530_51017C.1.pep
SPLAHPPPNPXPPPSVSPPPTRPHPLALLPPPPPPPRAAASXPARPPPPPPPPTPLPSPRAAASTSSPPPSLRRLPAPQPPHCVVAAAVAPSSPSASASPSHRRRRRAHPSPPPLASSXAPPLPPSPPSXPCRPPSPGDGDLTSPVRRAASPPPSPPSSSPXPPLPPPPRPVAXSPPPLLRASPPSPTVGAPPSVAAAIEETAVVTEPAPRPPPPARATSLYCRLGP

SEQ ID NO: 150817 - protein, 201 aa, Oryza sativa
  Clone ID: PAT_MRT4530_51018C.1.pep
MGALYVEISPAPPHQPSRLMDGVGTRQQASTSMAESTEAIPNLDQGFKALRWYGEPGEAHAASASASAPTGAGGRASCARVRTGPPGDGGGGYPNPPDAAIPDAATLREQWLFAVRQYSRWYSHAWGTAILAGAAFFGLGWLVKGSNPLPSRAEPHASNAKEEGLPVCNVNSLNLVVSFQKFHIGNANIEFGELSDKRDEL

SEQ ID NO: 150818 - protein, 82 aa, Oryza sativa
  Clone ID: PAT_MRT4530_51019C.1.pep
KMMMKFGGAFGEEKAIGGREGGSDSLECLKHLFWFSVFRFLGSNLTIASQCLALRWKYKCFNSLKCSYTFLSYLICASTRTT

SEQ ID NO: 150819 - protein, 229 aa, Oryza sativa
  unsure (1)..(229): unsure at all Xaa locations
  Clone ID: PAT_MRT4530_51020C.1.pep
ASASPSRRRLRSARPPPPPPPPTPLPSPRAAASTSSPPPSLRRLPAPQPPHCVVAAAVAPSSPSASASPSHRRRRRAHPSPPPLASSPXPPLPPSPPSVPADRRLRPPASGSGPHVVGGRGSDIPRAPXASPPPSPPSSSPSAATSATASPRCXTSPPPLLRASPPSPTVGAPPSVAAAIEETAVVTEPAPRKAVVASRRGGPYVARRLRLSLEEWSCRVTWKPVAHRS

SEQ ID NO: 150820 - protein, 72 aa, Oryza sativa
  Clone ID: PAT_MRT4530_51021C.1.pep
ERNFNGPNNCFFKTMLLRYVGNPGNLKNKNWRTKLRSYPLLHDITQKTLPRYIYSFHPQPLNGKNAAPNNCR

SEQ ID NO: 150821 - protein, 86 aa, Oryza sativa
  unsure (1)..(86): unsure at all Xaa locations
  Clone ID: PAT_MRT4530_51022C.1.pep
VPCRAPEDRNRPPPPIDRVPPIIAPPXXPPFLLFSTFSSSYIFFPSSYTYKSLSMFLLTLLPFIPQAIDLLYDHDPSYYESFLIVL

SEQ ID NO: 150822 - protein, 380 aa, Oryza sativa
  Clone ID: PAT_MRT4530_51023C.1.pep
MGGRKDAGDEEDGEAGAATAFRRNRGAAGVEGDAATSTKETATSADALTRRSGRLKAVQWRQRHCFAGEDASPVISPRNGGEAGEEEAAATPGEVTAQPDGARARRERRLEAAGAKEREGRRRERSSGGLRGKWRASRGRGGGCEAEGGGGAASQRTGKETGAAGGGRRHGRERKVMGRARTECRTRERPKTAPEEVAGGINGGGGGTVHGTAGELGLCLSWKKEHCSAGEGMIAPIREKFSSEDFESLSHLTQKVTLHEQRFAEARKNSRKVNHVCPYMYGSDDEDDDSEIAAAEWVRSKKVIPCQWVKSSGKEERYDFDITKADKIFDLLLREKQIQLPAGHTIPSAEEYGKKRQQIQAAIEGDKIKFDDSKRPMKVD

SEQ ID NO: 150823 - protein, 233 aa, Oryza sativa
  Clone ID: PAT_MRT4530_51024C.1.pep
MGGRKDAGDEEDGEAGAATAFRRNRGAAGVEGDAATSTKETATSADALTRRSGRLKAVQWRQRHCFAGEDASPVISPRNGGEAGEEEAAATPGEVTAQPDGARARRERRLEAAGAKEREGRRRERSSGGLRGKWRASRGRGGGCEAEGGGGAASQRTGKETGAAGGGRRHGRERKVMGRWLGAWERAKWTKGRRRASFYRARTECRTRERPKTAPEEVAGGINGGQRRGIKSR

SEQ ID NO: 150824 - protein, 87 aa, Oryza sativa
  Clone ID: PAT_MRT4530_51025C.1.pep
HRSLNLYRCVISVPKLANRPFRSSNLFDCVIPVPKLVDHSFRSSNLFGCGTTIPKLGFEYHLACDIRASIKFNRNQQPPPDLTTLNR

SEQ ID NO: 150825 - protein, 743 aa, Oryza sativa
  Clone ID: PAT_MRT4530_51026C.1.pep
MAEPESSTAAAGGSRLRNACGGVLCAFTLLLIGVLAFSIRLFSVIKYESVIHEFDPYFNFRVTQFLSKNGIYEFWNWFDDRTWYPLGRVIGGTVYPGLTLTAGTIWWLLNSLNIPLSVETVCVFTAPIFSANASWATYLLTKEAKGTGAGLMAAAILAMVPSYISRSVAGSYDNEAVAIFALIFTFYLYVKTLNTGSLFYATLNALSYFYMVCSWGGYTFIINLIPIHVLLCIVTGRYSSRLYIAYAPLVILGTLLAALVPVVGFNAVMTSEHFASFLVFIILHVVALVYYIKGLLTPRLFKVAMTLVITVGLAVCFAVIAILIALVASSPTKGWSGRSLSLLDPTYASKYIPIIASVSEHQPPTWPSYFMDINVLAFLIPAGIISCFLPLSDASSFVVLYLVTAVYFSGVMVRLMLVLAPAACILSGIALSEAFDVLTRSVKYQLSKLFDDSPAASGDSSAESSSASTVSTNSAKNETRPEKTETAPKEKPSKKNRKKEKEVAESVPVKPKKEKKLLVLPMEASVLGILLLIVLGGFYVVHCVWAAAEAYSAPSIVLTSRSRDGLHVFDDFREAYAWLSHNTDVDDKNKSITSGPRSLTLGVYFTGLVGYPSDDINKFLWMVRIGGGVFPHIKEPDYLRDGNYRVDAQGTPTMLNCLMYKLCYYRFVETDGKGFDRVRGYEIGKKHFKLTHFEEVFTTHHWMVRIYKLKPQKNRVRGKLKKLKSGSKASSTNAAGRKKNPWQ

SEQ ID NO: 150826 - protein, 118 aa, Oryza sativa
  Clone ID: PAT_MRT4530_51027C.1.pep
MASSVALKGCPLATLLRQLLADAPSTPTGRPVTGPAAFRRTAPAPPPPGGPPPPPPPEGASLRRYDVVDESGPTAARSLRVFSKFSLGDDSTVDLILGARDADQAESDGFLRRLDDDR

SEQ ID NO: 150827 - protein, 68 aa, Oryza sativa
  Clone ID: PAT_MRT4530_51028C.1.pep
HSETQYYIGIYGIDQQDYTTGTGFIDVERPNGSSFNVTTVAYSSDSIIRCMSNPATNDWIPSSETVWQ

SEQ ID NO: 150828 - protein, 170 aa, Oryza sativa
  unsure (1)..(170): unsure at all Xaa locations
  Clone ID: PAT_MRT4530_51029C.1.pep
RRQPLPLLSTLSDFHQSSSLVPEKQKXLILPRPSQLLHSGWRGPPRPTAQSSTCRHXGRVTRLNALLHAVIEVNSDALQQPARADTASXASSHRYCGPLHGVPILKDNIVTRDRLKTTAGSFALLGFVVCRDASVTAGLRAAAATILGKANSSKWSNFRPVPNGWSXRRW

SEQ ID NO: 150829 - protein, 80 aa, Oryza sativa
  Clone ID: PAT_MRT4530_5102C.1.pep
MEAMVVSSTEGAVRILLGKLADVLAGRYALLLGARDEIQELKDELESMNACLRDLAAAGDVDDRNEQVNAAASRLVRAVV

SEQ ID NO: 150830 - protein, 394 aa, Oryza sativa
  Clone ID: PAT_MRT4530_51030C.1.pep
MWPERKRQSRDREHAHSLPTRSTHACPIDRSIMDRWVRDHHSLVSLVTYVLAYVDHPATATAIDRSITLGSALLLGVRLPPTPRRYMSRALRYVVRSPSSISKPSDKSCNKWLIDRCRLRAPGGFAESFGEKAIGHSRVERPSTLKCSTSTCQERQRSDDPSLRCYARNLRALLSPVASYSTEYREMEKKKISSSSQSFTVRWDVTGRTDVGVRRTRRDEVISAGGARAMVHATYGHTASSYSGRMRARKLRGTQSRSTSCMRSVGPVFCASSRGAPRQLIACLLLYASMSQRRTLAVASRVLLELSVVRSTGVRSSIPGDPADPAMELIDMSDIMCKMHDDAAPWQFYSIHACFGSTKQLRGRQEDTQELCRCCRYCLLSQVGVAFYNDTVTN

SEQ ID NO: 150831 - protein, 152 aa, Oryza sativa
  Clone ID: PAT_MRT4530_51031C.1.pep
MEELSRGAVAAVAGDGSGRGSNSIMRLGQWRRWLGNSGGKGVAAASGCRGGGGKGVAAADGDQQQQQHAPGAARKQQEHHGTVSPGPPLVTYGYVTDGCHVAANMAGGPLAVLREGGFTLFGGRLQQGDEGGPLAALREGGDKGSPSLEPNK

SEQ ID NO: 150832 - protein, 46 aa, Oryza sativa
  unsure (1)..(46): unsure at all Xaa locations
  Clone ID: PAT_MRT4530_51032C.1.pep
KGGVSFDQPQAQAQACRALTWPPKCGIYPKXYFAPRSIPPVGGVWS

SEQ ID NO: 150833 - protein, 175 aa, Oryza sativa
  Clone ID: PAT_MRT4530_51033C.1.pep
MIPNCITKLIKLMYLSLRGSSKLLSLPESVGEMEELMYLDLSDCSGIRELPESFGKLKKLLHLDFSDCSCIRSLSLCLGSLTELQYLNLSCSSDLYLPEVQFLGNLTKLEYLNLSCSSNLFIPGVQFLGALTKLNYLNLSSQHSNLQSLPEDFGSLIELKYLSLSGCDMIVELPR

SEQ ID NO: 150834 - protein, 57 aa, Oryza sativa
  Clone ID: PAT_MRT4530_51034C.1.pep
MGSGESGNQRGGDGESSEPARSELESASACDVRRLGVERERVYGCAAAWGGEGRSGW

SEQ ID NO: 150835 - protein, 108 aa, Oryza sativa
  Clone ID: PAT_MRT4530_51035C.1.pep
PCAIGEKPSQGWGRERRGARRSIPLRLRRRTAASSRVESQIEPLLHISHSRSPSSSVAARGCSASRRRSPLLQLSSPSRASPSISLSSDQRWWPSLAPAVVRGEAGYS

SEQ ID NO: 150836 - protein, 413 aa, Oryza sativa
  Clone ID: PAT_MRT4530_51036C.1.pep
MGRERGGGEGMTMLQRWSSSVWSVSGSGRLLWADKAWRAHAAMAFTQLAYGGYHVLTKSVLNVGMNQIVFCVYRDLVALALLAPAAFFRERRTRRPLTPHLLASFALLGFTGIFGNQLLFLLGLSFTNASYAAAFQPAIPVFTFLLAAIVGVEVINIFTKDGIVKVLGTAVCVSGAVLMVFYRGPSLIGMGGGGGGGSNGVGENVLAGTWSSNSYTPQWLTSAMLQYGLETWNLGVICLIGNCFLMGAYLVIQAPVLIKYPASLSLTAYSYSFATVFMVLTGVVTTNGLHEWALTTTEIIAILYAGIVASCLNYAIMTWSNKILGPSLVALYNPLQPACSTILSTIFLGTPIYLGSIIGGVFIIAGLYLVTWARYNEAQRVLAIGYLDPLLVEDEDPPTPKTQESSFTGSIDP

SEQ ID NO: 150837 - protein, 74 aa, Oryza sativa
  Clone ID: PAT_MRT4530_51037C.1.pep
DGGVVEAGHNAEQGQYRRVLKAQRLEQAATARQKLGGAWSGGDARAGGAEERHGARRGCGHVGALLLLLLLITK

SEQ ID NO: 150838 - protein, 50 aa, Oryza sativa
  Clone ID: PAT_MRT4530_51038C.1.pep
LPKDKQFRSLREASTPNFQTKVAYRPLYGSKIHNRRSDMIFMAASPRTKS

SEQ ID NO: 150839 - protein, 124 aa, Oryza sativa
  Clone ID: PAT_MRT4530_51039C.1.pep
MASSTLLLPGRCYAAFTVRLSRRCPHRCIPRRAYLWWCRCRQPPWPDVDRDRSQIIVAPVDEDAAASFNELLVFFYAKDGFSSHTNILASGVAVQQCHIFLQRWRQCYIIACDGWFGVVDGVDQ

SEQ ID NO: 150840 - protein, 75 aa, Oryza sativa
  Clone ID: PAT_MRT4530_5103C.1.pep
GLPDIRHERAPHVPKVFRELPREGGLGSRAAASLPAFCNVDIPNGGEWCLLTGWRDIWLLARLLYLAVHVCACGY

SEQ ID NO: 150841 - protein, 317 aa, Oryza sativa
  Clone ID: PAT_MRT4530_51040C.1.pep
MAADALVVAGQAKARHPLSQIAESGTHRLLLKQWLKEEDLLARRVALREARLDGARKEIAFLYCAFFAFHAASILLLFLSASASTSAACRRSWIPCLVSLLSSLAMLWALRYKADTEAVLERLLAREREDALLLGKCVAELKRKGLEFDLLKEVDALRRAKSLRVEAKGGAGGERPKRWAARDLAVFLLFGAACGVLVLTRCKLIKGPRAASWLAVDRARERGRRKRLTGVSRSGRAEVAPTWRLRGCHAGRLEEDEGAGCEWTAGSGGFSGTPCDDEGRRGGNTPWEAGDERWLPDSGGDGGEPTASDGSSRGGAS

SEQ ID NO: 150842 - protein, 455 aa, Oryza sativa
  Clone ID: PAT_MRT4530_51041C.1.pep
MGARRWLDAAVTSGLLQALLFHLASYSFVPSYRTFSSFRNASQSFIGVNYGTIADNLPPPASTANLLKSTSIGKVRLYEPQPDLVAALAGSNISILLGVPNGDVPNLASSPAAASAWAAANIPTTVPVSAISVGNELLNSGDPTLAPQLLPAMQNLLAALPAGSTTKARISSQHLYISTVHSMAVLSSSDPPSSGAFHADLAGSLDPVLDFLKQNGAPFMINPYPYFAYASDTRPETLAFCLFQPNPGRVDAGSGLTYTNMFDAQLDAIRAALDAKGYSGVDIVIAETGWPYKGDADEGGATVDNARAYNGNLVAHLKSQVGTPRTPGKSVDTYLFALYDEDLKGGPESERSFGLYRTDLTANYDIGLAAAPGTAAPATVTPVTVQNTPQPSRGMTPTGYCVTAAGVPGTTQGQQVPQTSSCYIPAGAVSRRADAAVRRLVWLGVLLCLVTLVRK

SEQ ID NO: 150843 - protein, 61 aa, Oryza sativa
  Clone ID: PAT_MRT4530_51042C.1.pep
MCVRVLTGEDAAEAAGTTAEPLGADGGQADSPDEKGTDGGSHRLGSRLVRAEPELDCKLEG

SEQ ID NO: 150844 - protein, 259 aa, Oryza sativa
  Clone ID: PAT_MRT4530_51043C.1.pep
MSTDGGVNGGHVGGGTGGGENDNINGGNNNNSNISFSGAFSSKPSEPPLSPKEEAMFESADCLFHGALISVLADNILDVYMHMPSAKDMWDAVEAKFGVSDAGKFGVTDLIGSLGVEEKVRAKDNPDKKIKRGSSANLVQKKNPNAPHNNNKKVKRDVKLKATTNFKKKCKGKAKGNCFVCGKSGHWAKDCPDHNDKKSANMVISEGEGTSGYGKFLPTVLSIFHSPDWWVDTFRHFRSRLRYLHGLEIVGARVYARLK

SEQ ID NO: 150845 - protein, 30 aa, Oryza sativa
  Clone ID: PAT_MRT4530_51044C.1.pep
SSENSHAYFKTVSNPPSSKIDVKLSSFSCG

SEQ ID NO: 150846 - protein, 507 aa, Oryza sativa
  Clone ID: PAT_MRT4530_51045C.1.pep
MNGEAVVPEPAAAASSPAQASPSPPEWRFSQVFGERSAGEEVQDVDIISAIEFNKSGQHLATGDRGGRVVLFERTDAKDNACRKEAEKVDYSVSRHPEFRYKTEFQSHEPEFDYLKSLEIEEKINKIKWCQTANGALFLLSTNDKTIKFWKVQEKKVKKVSEMNLSPSNASANGRPAGSNASGSSAYLPNGGISKPVGLNSLRLPVVVTSQETSLSASCRRVFTHAHDYHINSISNNSDGETFISADDLRINLWNLEISNQSFNIIDVKPTNMEDLTEVITSAEFHPTHCNTLAYSSSKGSIRLVDLRQSALCDTHSQVFEQHEAPGSRSFFTEIIASISDIKFSKDGRHILSRDYMTLKLWDINMNSGPVATFQVHEYLRPKLCDLYENDSIFDKFECCQSGDGLRVATGSYSNIFRVFGCGTGSNEATTLEATRNPTRRQLQNPTRPARSLSTLTRVVRRGAESTGIEANGNSYDLSTKLLHLAWHPSENLIACAAANSLYMYYA

SEQ ID NO: 150847 - protein, 106 aa, Oryza sativa
  unsure (1)..(106): unsure at all Xaa locations
  Clone ID: PAT_MRT4530_51046C.1.pep
GDEGGLFAHTKEVPAALKPSRAFQKEEPLEEPTVFVGTVFKGKFYAPGDFKAPKTMPTRAKGXPKLLGSLQGAPPPGVPPLQGPAREVVPGPWGWVGKLEQEVGPP

SEQ ID NO: 150848 - protein, 380 aa, Oryza sativa
  Clone ID: PAT_MRT4530_51047C.1.pep
MAWPQPTFDSSMAAHQAPPIGTAQPNTVAQPYAQAVTSPFATPYPQQGETDTKEFLSIYESAIEAAHGDENTKAKDITEASVINAASAGLLEGELTRKITNKEPQTLEHLLRIIDGYARGEEDSKRRQVIQVEYDKASVAAVQAQVQAQVSEPAPLAVRQSQPPVQGQPPRLGQAPMTWRKFRTDRAGKAVMAVEEVQALRKEFDAQQASSHQQPVRKKGPDEVGGVSKDLIMHHLAVKPGAKPRKQKLRKMSADRQEAAKAEVQKLLKAGVIQEIDHPEWLANPVLVRKSNGKWRMCVDFTDLNKAYLDDIVVKSRKTLDHASDLQETFNNLRVAAIKSQVLADFLAEWTPAFAPEPESVEQPWVMHSDGSWSQKGAGA

SEQ ID NO: 150849 - protein, 1442 aa, Oryza sativa
  Clone ID: PAT_MRT4530_51048C.1.pep
MATEEGVEPSAPVAEDGGAPPASAPAPLLPSSAPIASLGQVPNTPDTMKAAAAARALQTRAEILSTSHLLAPQAAPSQPAMVSTALVAAQVNPDPETQAEADMEAMRQNMTRLQGMLRQMQEQQQAYEAARRAKAASAPILQYSAGYVPPQVYPQATQVPAYFVGQPSIAAVHPAPRGQPQAQPVTVQVHPQLPGQVSQAMAKGASTRQAQLQAFLQQLSQPRTQVRVRPVGCRRISQAPAVRPQAPTPGFGANQAPNQAAMAWPQPTFDSSMAAHQAPPIGTAQPNTVAQPYAQAVTSPFATPYPQQGETDTKEFLSIYESAIEAAHGDENTKAKDITEASVINAASAGLLEGELTRKITNKEPQTLEHLLRIIDGYARGEEDSKRRQVIQVEYDKASVAAVQAQVQAQVSEPAPLAVRQSQPPVQGQPPRLGQAPMTWRKFRTDRAGKAVMAVEEVQALRKEFDAQQASSHQQPVRKKISFEPEDAEGVLFPHQDPLVISAEVAGFEVRRILVDGGSLADVIFAEAYAKMGLPTLALTQAPALLRGFGGEVVQVLGQVQLVVAFGISENRREEQILFDIVDIPYNYNAIFSRATLNKFEAISHHNYLKLTMPGPIGVIVVKGLQPSTLSKGDLVASRTVDNVEAEPHDHAKRMPKPAPHGKVIKMQVDDADPTKFVLLGGDLGEEEAEDILKGPDEVGGVSKDLIMHHLAVKPGAKPRKQKLRKMSADRQEAAKAEVQKLLKAGVIQEIDHPEWLANPVLVRKSNGKWRMCVDFTDLNKVCPKDDFPLPRIDQLVDSTAGCELMSFLDAYSSYHQIHMNPADIPKTAFITSFGTFCHLRMPFGLRNAGATFAKMVYKAYLDDIVVKSRKTLDHASDLQETFNNLRVAGMKLNPEKCVFGVRAGKLLGFLVSERGIEANPEKIDAIRQMKPPSSVREVQKLAGRIAAISRFLSKAAERGLPFFKTLRGAGKFSWTPECQVAFDELKQYLQNPPTLVSPTPGSEMLLYLAASPVAYPLGEVLWGKEITGRLSKWAAELSPFDLHFVTRTAIKSQVLADFVAEWTPAFAPEPESVEQPWVMHSDGSWSQKGAGAAAVLTSPGGVPIQYAARLQFGTTNNMAEYEAVLLGLRKAKELGVRCLLIRTDSKLVASHVDKSFEVKEEGMKKYLEAVRSMEKCFAGITVEHLPRGQNEEADALARSAACGGPHSPGIFFEVLYAPSVPAESLVILAIDQAELGEDAEDWRTPFVKYLKNGWLPEDEAEAKRLQLRATKYKLISGQLYRSGVLQPLLHCISFAEGEEMAKEIHQGLCGAHQAARTVASKVFRQGVYWPTVLKVCVEQAKKCESCQRHGRSQTAPQYELQPIAPVWPFARWGLDIVGPFPVARNGYKFAIVAIEYFSRWIEAEPLGPITSAAVQKFVWKNIVCRFGVPKEFITDNGKQFD

SEQ ID NO: 150850 - protein, 80 aa, Oryza sativa
  unsure (1)..(80): unsure at all Xaa locations
  Clone ID: PAT_MRT4530_51049C.1.pep
WCHIDTSHSENSKIFSTYRTCIVWDFHAESSPTFWVSGLISQGAKNPLRRMSRQELKKKKGEVETPRERERESTSEXPGR

SEQ ID NO: 150851 - protein, 126 aa, Oryza sativa
  unsure (1)..(126): unsure at all Xaa locations
  Clone ID: PAT_MRT4530_5104C.1.pep
ASXLNLLSLLKFVGLDKEKRXMVLKKIPPVHHHQVPWHAGPXIIXCMPKSRPISSVPCAAHVNTIRSPSVAAVSVNGSHDRVRRLQPVVSPDKHLTMXDPHXTXPISGIIPGSNKCNTRWAPLDLH

SEQ ID NO: 150852 - protein, 132 aa, Oryza sativa
  unsure (1)..(132): unsure at all Xaa locations
  Clone ID: PAT_MRT4530_51050C.1.pep
IRXPGKQKKXLAXXIXSCKRQXHIXRSDELXERXXLPXANXRXIIGIXSPHGKLIXXGXATNLLKTGXRSGQIISRSTGSRRARASGGGPGYCIGGPDRTGIIGISPLPAIARRAPPALTEEEESCXAAAAA

SEQ ID NO: 150853 - protein, 249 aa, Oryza sativa
  Clone ID: PAT_MRT4530_51051C.1.pep
MPSSSSSTAVPEEIEQWLVLGKQALWVEDFSGTCQRECFCASCFHAFCTHCCWFHHEPTIHMVFPVAADAAGRGVYATHGPDGCRVHPDFVEDVLAAQDYATRLPWDAFCLLCGTAFAAAACPDHHRHHHDPSLPDAVLRVERRGGRHCVRCTGSEWWFPYVEQILDDPVEDDGDEQLLPVMTRRPGSCKQCGDPDTGYLIAVCSSSCSESYRRDLAGRRQRREVRQAARAAAGDQAKQLIDGLRISNY

SEQ ID NO: 150854 - protein, 72 aa, Oryza sativa
  Clone ID: PAT_MRT4530_51052C.1.pep
TSCTLYSSGAKAQNENAKFNGPYFANEKNIFLRDPRTLRYLPYFLLPKTRAWKIITQTTRGLLFHKTRPKSG

SEQ ID NO: 150855 - protein, 138 aa, Oryza sativa
  unsure (1)..(138): unsure at all Xaa locations
  Clone ID: PAT_MRT4530_51053C.1.pep
PGGELTHDETTMIGGALDLTDXTATEAMTPMERTFSLDDDYKLDGQAIGKVLARGHSLERXYSGNTKNIICLMVLKXLSTDRDETETPIRAVYITRIARVPGHMPLYDILNVFQKGSSYMAADVRLSPKMYHFLTKLN

SEQ ID NO: 150856 - protein, 727 aa, Oryza sativa
  Clone ID: PAT_MRT4530_51054C.1.pep
MEVGPTTPAPSRSSPLPPPRLLSTPRAKISGTASSLRIDLVQVCDDTIVADESIASPEKRKGSCYQQDDSPRSGKKMRYSGPYLPEEMWQHIHSLMPMKDAARAACLSSAFLYSWRNRPKLSFSTETMGIVEGTTDFIRKIDRVMEKHSGIGVKALTIEFNGLFSTKARSYLERWLQIAVTPRIEELSLSMSKGKAYYDFPCSLLSDGSGSSIRLLDLYCCTFHPTAEIGCFQSLTRLHLEYVRITGDELGCVFSASFALEWLKLRLCRHIKYMKLPCVLQRLTYVEVRGCSRLRVIENKAPNLHSLHIFYQAYHPIQLSFGESSLVKNLSVRYSSVLNHACAELPYIFPNLETLTIRSLGEMVSTPMVPNTFLLLKYLCITLSAVTLSPSYDYLSLVSFLDACPSLDTFIVDVSAKHPKNDSIFENPSHLRQLPEQRHDNLRNVKITGFRSAKSLFELTYHILENTSVECLTLDTSFESFRCSPGKLGRCSRTPKDDPMEASKALFAIRTYIEGKVPSTRRWEAEGGAGRREAGGGRGGRRRSTTSTAPRSTTSTTTPTTTSTTAPPTTTTVASAVGRRCGAGGGWALARRRPEGRRGEAARKRWEAAGKGRRRGEARGGGRRTRWEAPLDDLDDDPDDDLDDDDGGPDDLDDDDPDNGDLNDDDDGAPDDDDDGLGTGHWGQRVVLAGGWGKRVGPMIGEALLAGQSWPARGEVWLARWLGQSLS

SEQ ID NO: 150857 - protein, 153 aa, Oryza sativa
  Clone ID: PAT_MRT4530_51055C.1.pep
RRRCDGARASGTASAARPRAGRYPAAAAPPPCRARRTARCCSRAPRRTPPPPPPTRRRSCPRCSRRPRRTCRTRRARRTPAFGTPRCRTRRTCRGTPRSRRGAARCSTRSRRQETTPRRRRRQRRRRRSRGRTRRRRTARPRPRVRPRVRGRV

SEQ ID NO: 150858 - protein, 73 aa, Oryza sativa
  Clone ID: PAT_MRT4530_51056C.1.pep
RRGSMSHSSGNSASSTSGRSSSSDWSRPRSRSRRTMMASKWCASYTARLTCVSAHSMMSPALFGVHPECSSPL

SEQ ID NO: 150859 - protein, 63 aa, Oryza sativa
  Clone ID: PAT_MRT4530_51057C.1.pep
MAWTSVLRRDKAVAMDVGTCNDLGNEFSSSRCHVALSSLAAGAPPALGDVSPFSSPQLLPQVE

SEQ ID NO: 150860 - protein, 124 aa, Oryza sativa
  Clone ID: PAT_MRT4530_51058C.1.pep
LVDPRAAGSSVAATAASCEAPISSEVHLGWPRAELVGLRASDPGKRTDGDDHLAAPPRPWQLSMPSCRWHLVTHWTWLSAPGLRIHEDENTFPKRRSKSAIANRGSYCRLSLSCLRSVRESLTT

SEQ ID NO: 150861 - protein, 402 aa, Oryza sativa
  Clone ID: PAT_MRT4530_51059C.1.pep
MHRWFIASCGDIRAAAARSSRRRGGDAIAPKSAPPSPSPPPRLRKTVSETAAVMLAVPKDVEEFRTMPAYGTNLELFTYDQLRAATADFSPEQIVGEGGFGVVYKGLIHGAVVAVKQLNPLGHQGDREWLTEVSYLGQYNHPNLVELIGYCCEDDHRLLVYEYMANGSLENHLFRRSCNLSWTTRMKIALDVARGLAFLHGGDRPIIYRDFKTSNILLDTDMKAKLSDFGLAKEGPRGGKTHVSTRVMGTYGYAAPEYVATGHLTAMSDVYGFGVVLLEMLVGRRALEPPAAGCSKCNLVDWARPILIRPKKLERIVDRRMALPAPAADYGGGVDAAVERVARLAYDCLSQNPKVRPTMGRVVHVLEAVLADHHHHAGAAAAAARPAAAAAAATATAGRLYV

SEQ ID NO: 150862 - protein, 72 aa, Oryza sativa
  Clone ID: PAT_MRT4530_5105C.1.pep
IAISHKMHVNHTSLAAAARSQVGQARADVQHSGSRGNTRTERASGCAGSKVHEARLLEPAATRCCMRLATHI

SEQ ID NO: 150863 - protein, 44 aa, Oryza sativa
  Clone ID: PAT_MRT4530_51060C.1.pep
MLRQAQQALLHKIKGKDRACATCGDKIDSGNVIRCQCKKSPEHA

SEQ ID NO: 150864 - protein, 65 aa, Oryza sativa
  Clone ID: PAT_MRT4530_51061C.1.pep
MGGGVLRTWPTPRIQGNPSTTAIWRYVFDHSGNQTLLRSPEGTPGSPWRGGYHIWSADLKGQRQD

SEQ ID NO: 150865 - protein, 95 aa, Oryza sativa
  Clone ID: PAT_MRT4530_51062C.1.pep
MAVWAEITLKPWGQHGELGTGKTHVEVDVRRREQRGARVCPGNPDYLADKPPLSPDPGSNHPLYHVAPLSSLQDPRVPLPFISGHALSLPYFGSY

SEQ ID NO: 150866 - protein, 423 aa, Oryza sativa
  Clone ID: PAT_MRT4530_51063C.1.pep
MNQDLQYHLNVLLMETERAPSGKFQRSKSVPVSSAAFDSLRLDDGCSNPEHEEPTSSKEEIKPKNGKSSLKGKISSFFLKRKKSGKDKLAPSPLGALGRGVPLASNASIVSSDVSQTEWTSLQDDVASENLEKFDIAPTVVPVNEPEATSSSKPPIITLEKALSFEIRNSHFDQPSPTSVLDASFEDASEKSPNSSEHAIIAKQEPLSRSLPIGSIARTLSWDDSSQEATLCSAKGDSHEQDQHEFVEKILSSVGFDNEKTSDIFVRWHSHDFPLGTGVLDQFLERKVEDAKCRERRSNQRLLIDSVNAALLDIGQSKLWGAYPCTDPQVNNARRVATGEVLVVDEVWRLVKGWLSDDDGEKHMVNAEDNAGLVADWVVGKEIQGRSWPEALRLEVDEISTEICGEVLDELVGEAFSELVGCH

SEQ ID NO: 150867 - protein, 97 aa, Oryza sativa
  unsure (1)..(97): unsure at all Xaa locations
  Clone ID: PAT_MRT4530_51064C.1.pep
PFAENDNKVEENRHQLRRXTNRTVSRTRLMYEWAKNSEITXHIGPKFTSLRRRTTKEAASXRWVGLGQPMGLAEPLVAPIMQGLDGRPGLIPNDGWR

SEQ ID NO: 150868 - protein, 81 aa, Oryza sativa
  Clone ID: PAT_MRT4530_51065C.1.pep
TTHTRGRTPLGASTYTCYYTQRRQMEEASAETQDGHRRRARGYHRRGIKKPHRLTLGGHNFVGPMNYIAIHRGAKVAKDFI

SEQ ID NO: 150869 - protein, 82 aa, Oryza sativa
  unsure (1)..(82): unsure at all Xaa locations
  Clone ID: PAT_MRT4530_51066C.1.pep
XLXRLIRXXXTRLXLHRVAPSTGWXCLHXXXXSPNSIINXNXXAGSMGGXGXGWLSXPRSTAXISASLLLSSQSLKNHMPLR

SEQ ID NO: 150870 - protein, 72 aa, Oryza sativa
  Clone ID: PAT_MRT4530_51067C.1.pep
SFWWAPLLPIRHINIFQAKGQKVKPHQFGDLPFDRNLAQTQALLAFNGPSKNGIPPRDYGAPRPIPPLGGVL

SEQ ID NO: 150871 - protein, 336 aa, Oryza sativa
  Clone ID: PAT_MRT4530_51068C.1.pep
MAAEAEAAALPQLQLQLLSLVSEHRLLRGFGSNLLMRGGGFGVEFEQRWKEAEEGHRRETRELRAEVAARDDALRRLESRIKCLENENEQLEKNEKELKDNMEGLLQSKEAFIKHYEAEKLNAHLALFSSVGKEVAAVKQVLGNVKCLVGDKENVVSDLKGKVEKISVLEKDFVEKLRFFEEKINDYQLELRNRARLIYELRERLEAEKLNTKFQPKLEEISISTELKAMLMELHNMEIALHKFQDIFDSIGHEVIKRSSPVSNSQDVTEDVNREKLESIPGSQCEPANEHTVIPVFDEAGSCIKIHVAVYPTYTFATSCWDQIPLARKMERSIRA

SEQ ID NO: 150872 - protein, 383 aa, Oryza sativa
  Clone ID: PAT_MRT4530_51069C.1.pep
MAAEAEAAALPQLQLQLLSLVSEHRLLRGFGSNLLMRGGGFGVEFEQRWKEAEEGHRRETRELRAEVAARDDALRRLESRIKCLENENEQLEKNEKELKDNMEGLLQSKEAFIKHYEAEKLNAHLALFSSVGKEVAAVKQVLGNVKCLVGDKENVVSDLKGKVEKISVLEKDFVEKLRFFEEKINDYQLELRNRARLIYELRERLEAEKLNTKFQPKLEEISISTELKAMLMELHNMEIALHKFQDIFDSIGHEVIKRSSPVSNSQDVTEDVNREKLESIPGSQCEPANEHTVIPVFDEAATTPNIEGQSEIDPGRKQHSALPSPEPANANAETADCLHGSEDIDMDLASRFMLLYIQLTLSLLLVGIKSLLHGKWSDPLEHD

SEQ ID NO: 150873 - protein, 67 aa, Oryza sativa
  unsure (1)..(67): unsure at all Xaa locations
  Clone ID: PAT_MRT4530_5106C.1.pep
FCTKNNFXQKGEDHTDVARSLYWLRAIHLQLQVHLSGLHILELRETSCSPCATKLTGCPWRAHCRAT

SEQ ID NO: 150874 - protein, 474 aa, Oryza sativa
  Clone ID: PAT_MRT4530_51070C.1.pep
MPERFDPAGRRRRGILPPPVGAGASTGLRRRPPDVHIAGTGASAERSEPALSPPDRQIEFCGGLNTPENCAIIQGRANRNCAIIQSRANRRDDILDEMEVAALASRINWTEYQLASIEAAAIGNIIRDGKVIEIAPNSKGGPLQDVLRSLLEKNELMINKLCDEDAPLESTASRPLSGFFFNTLCKEPGYLAFDTIRCGKLLYPESRFAALPEPVSFLASTRGLVCVCGKTTGLYYVTNTTTFKWVQLPRHSCDHGEPAVVITFEEPLTSCFDGAVEHYHVVAAFHLKGSVWTSESYSSRTGRWTIAKDAPPAVEVKAESGVGTLGCAFWRTSLGSILCYDPGKDLLKVIPAPRVVNQDTVWELGQMEGDLTVTCFKDVDGFLTLGVLKINKRLFDDKVAALWTVVGSFSGEKVGKRAMLLRSQGAAEVVVWEPLEERVVAMDLEGLVTGNFGPLTNEGCTPCFVPYVPSSVSI

SEQ ID NO: 150875 - protein, 39 aa, Oryza sativa
  Clone ID: PAT_MRT4530_51071C.1.pep
LKKERLGLICVSLLHVWKVRKCEFMAPWECFKIHPLEKV

SEQ ID NO: 150876 - protein, 1133 aa, Oryza sativa
  Clone ID: PAT_MRT4530_51072C.1.pep
MQLPNLPCSSSSSTTTTTTTKLSVAFFRLLVILLLSFASPTSSCTEQEESSLIGFLEGLLPGHNGSLSTSWVKGIDCCKWEGINCSSDGTVTDVSLASKGLQGRISPSLGNLTGLLHLNLSHNLLNGYLPMELLFSRSIIVLDVSFNRLDGSLPELESPSGGSPLQVLNISSNSFTGQFSSKQWEVMKNIVALNVSNNSFTGQIPPSICINSPSFAILDLCYNQFSGSISSGLGNCSKMREFKAGYNNFSGALPEELFSATSLEHLSLPNNDLQGVLDGSHIVKLVKLTVLDLGSTGLSGNIPDSIGQLSTLEELRLDNNNMSGELPSALGNCTNLRYLSLRNNKFVGDLSKVNFTWLNLRIADFSINNFTGTVPESIFSCSNLIALRLAFNKFHGQLSPRMGTLKSLSFFSISDNHFTNITNALQILRSCKNLTSLLIGTNFKGETIPQDETVDGFENLRVLTIDSCGAMGQIPPWISKLKKLEVLDLSNNMLIGEIPFWIRDMPVLFYLDITNNSLTGDIPVALMNLPMLQSGKNAAQLDPNFLELPVYWTPSRQYRLLNAFPNALNLGNNSFTGVIPPEIGQLKMLDGFNVSFNRLSGEIPQQICNLTNLQLLDLSSNQLTGELPAALTNLHFLSKFNVSNNELEGPVPTGRQFDTFLNSSYSGNPKLCGPMLSNLCDSVPTHASSMKQRNKKAIIALALGVFFGGIAILFLLGRFLISIRRTSSVHQNKSSNNGDIEAASLSSVSEHLHDMIKGTILVMVPQGKGGSNNLKFKDILKATNNFDQQNIIGCGGNGLVYKAELPNGSKLAIKKLNGEMCLMEREFTAEVEALSMAQHDNLVPLWGYCIQGNSRLLIYSYMENGSLDDWLHNRDNGRPLLDWPTRLKIAQGASRGLSYIHNICKPHIVHRDIKSSNILLDREFRACVADFGLARLILPYDTHVTTELIGTLGYIPPEYSQAWVATLRGDIYSFGVVLLELLTGKRPVQVLSKSKELVQWTREMRSHGKDTEVLDPALRGRGHEEQMLKVLDVACKCISHNPCKRPTIQEVVSCLDNVDAGAPSDAACSRRRWRPSLESAASGGDGSAAAAPMGRKGTPASRPIWSLPGRTRSRPSYELLYLVSLFFVEIFLI

SEQ ID NO: 150877 - protein, 166 aa, Oryza sativa
  unsure (1)..(166): unsure at all Xaa locations
  Clone ID: PAT_MRT4530_51073C.1.pep
MPSTLLASPPPQPQPPYHAACSRPPRCTTATTARRHSASRPPPRCSASTSSGFCAIRPSPSPSRLPTIRADPAAFPPPAQIPPSXPPPMRADPSAAMTGGTDPVASPPRADPAASPPCSSDDDGGGFRRDGDGDFGTTTSAASATWGFSEGVKGLPIGQVRDNVVG

SEQ ID NO: 150878 - protein, 446 aa, Oryza sativa
  Clone ID: PAT_MRT4530_51074C.1.pep
MAFSLDWNMHLKFTFSKMKNSTRSSFGPSQRKNCRSKRSKGFKSKVMNGIANDVRKSQFYYRQPNKRGNVNGDRRNDDRNKAQTHGVTSTVASKEIPKKSNRKESLSSSKPYNATTNTSSKLSKVLTSPPSRLPMLSPSKGVRSVPSTRREERRKEEATQGCRDHSWKNARQVRTEQSTTREDRGKEKNRHDRHDHSRKNAHQISREPSTRREESGNKKVTHDHQIHLGENENAHQMRSEPSTRREERGNKEVAKEHPNLLQKNARPMCSEDLLRDGKDGGLRISDECSEHSTVDHVNEFKLVKRKLEGCIQGRIPNVLGREEDDIGNVESTKGRNGQMGKKHKKNLDVSEESRHLASNGSILQTQCRGSEAYEDGQDSRLVKDGISGVSIPTILGAIKGHCSLPVDEPIWRYNIFFRLKFVCGPFLWIAFRTLLFVDLLPYEGKI

SEQ ID NO: 150879 - protein, 59 aa, Oryza sativa
  unsure (1)..(59): unsure at all Xaa locations
  Clone ID: PAT_MRT4530_51075C.1.pep
KRHKFFSKDLEYSAGPTAEEAQKIGEVMANSGWEKGITKVVLARGGFINHGPLKAWXDA

SEQ ID NO: 150880 - protein, 156 aa, Oryza sativa
  unsure (1)..(156): unsure at all Xaa locations
  Clone ID: PAT_MRT4530_51076C.1.pep
SSPSRLIRDLGAAFPRINLDXLVPPAPQPHPLVVREERPPSPRCGGLTVEEARKVXRATQMETARARRRXTGTVPYAEFLRLCCDASGAESGASVTCALDESGSVIVLGKTVFLRPEMVWRIVAHHMLFCCSSVLVMLQSVFSKCFFKSVLEKKKK

SEQ ID NO: 150881 - protein, 72 aa, Oryza sativa
  unsure (1)..(72): unsure at all Xaa locations
  Clone ID: PAT_MRT4530_51077C.1.pep
IVNVLKPFXKKKKKKKKKKKKKKKKKKKKKKKKKKKEKKKKKKKKKKKKKGGGRFKGHNFAPRGFGGKTFLM

SEQ ID NO: 150882 - protein, 158 aa, Oryza sativa
  Clone ID: PAT_MRT4530_51078C.1.pep
MDTYEEVRSIGSGNFGVTRLMCNRDTGELVAVKTIPRGNHRINKSAYREIINHRSLRHPNIIQFIEAILTHTHLAIVMEYASGGELFDRIVDLERFSEDEARYFFQQLIWGVSYCHHMSSMLHSRPKSAVGTPAYIAPEILNLQEYDGKQKPGTGSTS

SEQ ID NO: 150883 - protein, 938 aa, Oryza sativa
  Clone ID: PAT_MRT4530_51079C.1.pep
MSQLQYFLIDAEQRRSEESAVNIWLGELKDATYEAEDILDLASFEGNKLLSQNPLPSSSSRNSTGCTGFSFFCCLPNIHRRHEIAVRIRNFNFELEKIFKMGELYLKLQNMQPTVQVPAAKPIKTCQLLEPNLVGKEILHGCTRLVKLVLAHKDKRAYRFGIVGTGGIGKTTMAQKIYNDHRIKGIFSKRAWICVSQDYSDVNLLREVLRNFAVYQEQGETVTELKSKLAATVKGESFFLVLDDVWKHEVWTYLLGTPLLAASTGIVVITTRHDTVAREIGVEHMHQVEFMSAAVGWELLWKSMNIEREKEVQHLREIGIEIVRKCGGLPLAIKVIARVLSTKEKSENDWRKVINKSAWSRGMLPTDLRGALYLSYEELPRHLKRCFLYCALHPEDWFILRDDLIGYWIAEGFVEEQEEQLLEETAEEYYYELIYRNLLQPEHTYFNNIMCRVHDLLRQLAWHLSGDEIFYGEPESLGAKTLSKLRRASIYTKKDSVVLPDMDNEHTRVRTLNIQCSLPMTITQLCNLRRLGLCHTPINEVPKGINRLKFLNDLGGFPISSGSNNNTEIQDGWNLDELGSLSQMRRLDIIKLERATPLYSTTSLLTYKKHLKVLYLCCSGWTSEAYSDEDVSNNERIFEQLTPPNNLEDLSIYHFVFPKTPRTLRCKSCMHLPPIGQLPCLKYMKILGTNITKIGPEFVGFGVHKLESVEVAAFPKLECLVFSDMPNWEEWTFNETASVSVEASTPLTLKFLPCLEKLYIYGCPKLRALPLEIGQGTTRLRELHIRGANCLRVVDDIPFLSDCLSIRQCEGLERVSNLPQLRKLYLGVCPNLRNVEDLNSLELLLQTTDMQEMSSQWVPQLRDQHRHLHHEDLDVYTWRWDREKPIFMTKLSQEKEYEVKRTRQTVYSASEGYVQDLKEDVCGDKGLDMYRTSRREVY

SEQ ID NO: 150884 - protein, 65 aa, Oryza sativa
  Clone ID: PAT_MRT4530_5107C.1.pep
MTKPPSSKAEVEPSNVIPITLEELDREARKSMEEYLKEVTHEALMRACTRDSARVIVKPGPRIKP

SEQ ID NO: 150885 - protein, 58 aa, Oryza sativa
  Clone ID: PAT_MRT4530_51080C.1.pep
KNGGFLATARWEGPGAVGKALALGLAAASYEQPVRAARGMWLTRRRDGLVVDGPCLGV

SEQ ID NO: 150886 - protein, 185 aa, Oryza sativa
  Clone ID: PAT_MRT4530_51081C.1.pep
MAADYRTPDRLLSAAAPGEEQAQDPPKPVLAVAATHDGLRFWQYMLAGSVAGVVEHTAMFPVDTLKTHMQAGAPPCRPVLSLGAVLRAAVSGEGGVRALYRGLPAMALGAGPAHAVYFSVYEFAKSRLSERLGPNNPAAHAASGVLATIASDAVFTPMDTVKQRLQLTSSPYTGVSHCVRTVLRD

SEQ ID NO: 150887 - protein, 91 aa, Oryza sativa
  unsure (1)..(91): unsure at all Xaa locations
  Clone ID: PAT_MRT4530_51082C.1.pep
FTXPXGVAXGKTXNQXXYKXRPXCPXDPGLCXTGXGVASVXVFGLGTGFIXQWRAQIAXXMNVASLXPWAXRKXNXLVYSELLEHKLGLFX

SEQ ID NO: 150888 - protein, 254 aa, Oryza sativa
  Clone ID: PAT_MRT4530_51083C.1.pep
MARGSAAAAIAGVVWVLLLLVGVASGARLPGGSGGNRGREPRGGAAAAAVATETAVFALGSFWRSEAAFGCLPGVIRTSVGYAGGSKARPEYRNLGDHAECVKVEYDPRLIQYKKLLEVFWASHDPREVFGQGPDVGNQYRSIIFTNGSVEARLAGLSKEKEQAKDRRSVITTQIQPIGAFYPAEPEHQKFELKRKPFLLQLIGNLPEEELLTSTLAAKLNAYAAELCSPNTQNRINSKIDEIAKKGWPILRDI

SEQ ID NO: 150889 - protein, 926 aa, Oryza sativa
  Clone ID: PAT_MRT4530_51084C.1.pep
MDIALASAAATWLINKLLDRLSDYAIKKLLGSEGLDAEASSLRDALRRATLVLGAVPAGAAAGVRIGNDQLLPQIDLVQRLATDLARHLDELEYYDVKKKVKKNQKSSNPLSKMNLPLTQAGQSKPKYNRTDIKQIRDTVGYLHSICDDVHKALLLDKLDAIKQAAQDASTDKRETVDNFTENPRNKVFPREEMKDIIELINSAASSDQELLVVPIVGAGGVGKTTLARLVYHDPEVKDKFDIMLWIYVSANFDEVKLTQGILEQIPECEFKSAKNLTVLQRGINKYLTKRFLLVLDDMWEESEGRWDKLLAPLRSAQAKGNVLLVTTRKLSVARITSNTEAHIDLDGMKKDDFWLFFKRCIFGDENYQGQRKLQNIAKKIATRLNGNPLAAKSVGTLLRRNINEDYWTRILDSNEWKLQESIDDIIPALKLSYNQLPYRLQLLFSYCAMFPKGYNFDKGQLICTWIALGFVMNERKKLEDEGSDCFDDLVDRSFFQKYGVSQYYTVHDLMHDVAQEVSINKCLIIDGSDLRTVPSSICHLSIWTEPVYNEQSIERNDNFEEKLDAVQDNVLGSLECLILAGVYDENYSAKFVKTLERVRYVRMLQLTAMPFNSDILLSSIKKLIHLRYLELRCTSDKPKSLPEAICKLYHLQVLDVQHWSGLNDLPKDMSNLVNLRHLFVPGSGSLHSKISRVGELKFLQELKEFQVQEADGFEISQLGNINEIRGSLSILGLETVKKKGDATRARLKDKKHLRTLSLTWGSASGSTTTVQKEVMEGLKPHENLSHLLVYNYSGATPSWLLGDSFSLGNLESLHLQDCAAVKILPPFEEMPFLKKLSLVCMPCLKSIRIDFNSADEEDELELSEIEISKCLALTSIRLHSCKALTMLSINDCEALGSLEGLSFSEKLKQCVVQGCPKLPSGFIAN

SEQ ID NO: 150890 - protein, 490 aa, Oryza sativa
  Clone ID: PAT_MRT4530_51085C.1.pep
MAQVFRARRRGGGGREEPIALVKKDLAHRLFRVHMGHEQKVFVQMRQTAQADSSCFGCVGIRVLAFYKFADAARLQSTRSGHQLATGSASATETTTRTGDDHQPATGSAFASATSTPPRQLTISARLAAGSASSSCRRHWNRRWNHFGDDGGTRLAEGGGRQLLEGVRREAPRRLGRARGKAAAAGTAGDTPRARHDRRRLCGGAKAAKERAGVRCIIRYLLILAEFLTAQADLKVCQRNQSDMIIEVCCCLGFAANVAQLAGLDVASLVKEIKERVQTVSQNKEDCELLAERAELILDLLGRLQKSKVIEDPDMWKPTERLRSTLRRACEVIEFCRERSCTYRFCKSDHTAKELRKTPDVVQLQDGVQVPALGLPAQHFKYNDRNDRGETLGISGKAQLVTEPSSVNEPGERATKEPLDWPKRSQIVRGIAQGAVYLHKLCEPRIIHGDLKPGNILLDASLKPKICDFGISKALKADADKDCTGVVVGS

SEQ ID NO: 150891 - protein, 372 aa, Oryza sativa
  unsure (1)..(372): unsure at all Xaa locations
  Clone ID: PAT_MRT4530_51086C.1.pep
MHHAWQVDIDKIRRKFLWAGXKTFMGKCKVNXKRICRPKDLGWLRVIDLXRFASALRLRWLWYEWTAPEKSWVGTAVXCNQEDRELFSVVTTITISNGRTACFCDSKWLENQTPRKIAPDIYVASKRKNRSVHDALQESNWVRDIDILHITQGDHVQQFVRLWTMIRRMNPXTEDQDNIRWNLIANGQYSAKSAYRLQFMGATRSAFNQMIWKAWALPKCKFFSWLAIQNRLWTTDRLEKRGXQNQKICPLCCIIDESTLHLLAHCRVTKKVXTEIQRWTQTDLQMNKWSNCDSVELWWSLVVDSPNNPRIPTRTLVILVSWEIWCERNTRIFRNTASLPASILAKIKEEGRAWVKAGASKLQEFGILGDIT

SEQ ID NO: 150892 - protein, 61 aa, Oryza sativa
  Clone ID: PAT_MRT4530_51087C.1.pep
GFGGLRVRGFRTGPLPMFSRLGFLVRAMVPGRGPLGTLAGPLAGPVNKKAWGDPPNLVPGK

SEQ ID NO: 150893 - protein, 479 aa, Oryza sativa
  Clone ID: PAT_MRT4530_51088C.1.pep
MIIEVCCCLGFAANVAQLAGLDVASLVKEIKERVQTVSQNKEDCELLAERAELILDLLGRLQKSKVIEDPDMWKPTERLRSTLRRACEVIEFCRERSCTYRFCKSDHTAKELRKQTPDVVQLQDGVQVPALGLPAQHFKYNDRNDRGETLGISGKAQLVTEPSSVNEPGLKRFAFSQLEVATDNFSLENQIGVGAFSIVYQGRLNEGLEVAVKRASYVDKIPFHQLENELDLIPKLQHTNIVKLLGYCTRKRERILVFEYMPNRSLDSFITGERATKEPLDWPKRSQIVRGIAQGAVYLHKLCEPRIIHGDLKPGNILLDASLKPKICDFGISKALKADADKDCTGVVVGSRGFMAPEYKQGGCLSLQTDVYSFGATLLQIIRGKHISPSSLALSDESHNYGPLNKWAWNLWKDGNLMELIDPSLHDENHASEIKRWVQIALLCVQQSPEERPSMWDVLLMLSCDSVILPEPKLPAYYY

SEQ ID NO: 150894 - protein, 60 aa, Oryza sativa
  Clone ID: PAT_MRT4530_51089C.1.pep
SSPSASFQPRLYSRLRRRRRSQLCASSQSACKYIPWQAGEIVLAQVCECPIPGASLVRWK

SEQ ID NO: 150895 - protein, 112 aa, Oryza sativa
  unsure (1)..(112): unsure at all Xaa locations
  Clone ID: PAT_MRT4530_5108C.1.pep
QDPKLPKLTDDEIVEMMLFPVVNEACRLLDEGVAMKASDLDVASIMGRGFPXSYRGGVMFWADSFGAKYIYDRLKDWSKYHGGIFEPYEYLSTRARQGLSLAAMADGAMSRF

SEQ ID NO: 150896 - protein, 127 aa, Oryza sativa
  unsure (1)..(127): unsure at all Xaa locations
  Clone ID: PAT_MRT4530_51090C.1.pep
KRGIDSHSAYPFCVQXLKTANHILLNCEFARQVXHRILSLPDWSDLTLLRGSSLQVXWPTSRACLPKHCHKCFDSLVLLSSQLXKERNSRVFDYSLSSVSVVLKSILHEGFPWSFTGVASFGDILGV

SEQ ID NO: 150897 - protein, 1315 aa, Oryza sativa
  Clone ID: PAT_MRT4530_51091C.1.pep
MVEEKEITFKASLDVLLLPGALILLLYAIRHSHDEEGYETNANALYKPLNTEKDHDTADSEIHVTPFAKAGFFSVMSFWWLNPLMKMGYEKPLEDKDIPRLGSTDRAQNQYLMFLDELNSKKQSEPHATPSVFWTIVSCHKSGILISGFFALLKVLTLSSGPLLLKAFINVTLGKGTFKYEGIVLAVTIFFCKCCESLSQRQWYFRTRRLGLQVRSFLSAAIFKKQQKLSNLAKMKHSSGEIMNYVTVDAYRIGEFPYWFHQTWTTSVQLCIALAILYNAVGLAMISSLVVIIITVICNAPLAKLQHKFQTKLMEAQDVRLKAMTESLVHMKVLKLYAWETHFKKVIEGLREVEYKWLSAFQLRRAYNGFLFWSSPVLVSAATFLTCYLLKVPLDARNVFTFVATLRLVQEPIRQIPDVIGVVIQAKVAFTRVVKFLDAPELNGQRRNKYRAGAEYPIALNSCSFSWDENPSKQTLRNINLAVKVGEKVAICGEVGSGKSTLLAAVLGEVPKTEGTIQVCGRIAYVSQNAWIQTGTVQDNILFGSSMDKQRYKETLVRCSLEKDLAMLTHGDCTQIGERGVNLSGGQKQRVQLARALYQNADIYLLDDPFSAVDAHTASSLFNEYVMGALSDKTVLLVTHQVDFLPVFDSILLMSDGEIIQSAPYQDLLACCEEFQDLVNAHKDTIGVSDINNMPLHRAKEISTKETDDIHGSRYGESVKPSQADQLIKIEEREIGDTGLKPYTLYLRQNKGFLYASLAIISHIIFICGQISQNSWMAANVENPSVSTLKLIVVYIAIGVCTLFFLLSRSLSIVVLGMQTSRSLFSQLLNSLFRAPMSFYDSTPLGRVLSRVSSDLSIADLDVPFFFMFSMNASLNAYSNLGVLAVVTWQVLFVSVPMIILAIRLQRYYLASAKELMRINGTTKSALANHLGESISGAITIRAFEEEDRFFAKNLELVDRNAGPCFYNFAATEWLIQRLEMMSAAVLSFSAFVMAILPPGTFSPGFVGMALSYGLSLNMSLVFSIQNQCNLANQIISVERVNQYMDITSEAAEVIKENRPAPDWPQVGKVELRDLKIKYRQDAPLVLHGITCTFEGGDKIGIVGRTGSGKTTLIGALFRLVEPAGGKIIIDSADITTIGLHDLRSRLGIIPQDPTLFQGTVRYNLDPLGQFSDQQIWEVLDKCQLLETVQEKEHGLDSLVVEDGSNWSMGQRQLFCLGRALLRRCRILVLDEATASIDNATDAILQKTIRTEFKDCTVITVAHRIPTVMDCTMVLAMSDGKMVEYDKPMKLMETEGSLFRDLVKEYWSYASNGNI

SEQ ID NO: 150898 - protein, 182 aa, Oryza sativa
  Clone ID: PAT_MRT4530_51092C.1.pep
MDPLSASPRPRRRRMDPTAHLGRHHASDLATPHPPTTPTSPSNTNNIHIHPFTRATNQFGESQRRRRRRWRKRRRVDLAGGSDDEVVVAAKPAVAIGGNFGSAVFGKRHGVRRRQWGWLQQWRMDDGQQQNIVGGEMIPVAGGEKGGVLGQAVEHTHMSSSSGAAAANMGAALARVRRHRHR

SEQ ID NO: 150899 - protein, 66 aa, Oryza sativa
  Clone ID: PAT_MRT4530_51093C.1.pep
PTTAPDTMIGAALTAQNILPLTMRMTSTATATTSTMGYNTYIAARIVSWMDLGDNDPWLLIPSSRG

SEQ ID NO: 150900 - protein, 67 aa, Oryza sativa
  Clone ID: PAT_MRT4530_51094C.1.pep
VGVLKNTPAFYSSNRNGIDPNYDPFKKYINLADAVDMLFWPPRANGEARWLARLGGLDPSLPIRRHS

SEQ ID NO: 150901 - protein, 214 aa, Oryza sativa
  unsure (1)..(214): unsure at all Xaa locations
  Clone ID: PAT_MRT4530_51095C.1.pep
MECCFRVYGLAIANAVSIGGTSLLVYQLVRLARTPGSKGGVVALAIFLVFWVSINAVAYSVFCGMLFPWSALRRCLAPLPSAARWLLCLPCRCARRRRRRPATSTSSSASALPPHMYVLEREPPVRWGARVATADDIPAYEQPAASEGGAAAAAAECAVCXLGEVEKGEMVKRLPVCLHMFHRRCIDPWLRDHSTCPVCRCDAFAAPPLPAQMV

SEQ ID NO: 150902 - protein, 63 aa, Oryza sativa
  Clone ID: PAT_MRT4530_51096C.1.pep
GIWCSLNSNRSFQARRVLKDITASNHTIFAPPFYSAGTIEMSLSGWLEACALGENFKTFAFFP

SEQ ID NO: 150903 - protein, 105 aa, Oryza sativa
  Clone ID: PAT_MRT4530_51097C.1.pep
LSHKARKKVVSFSGQMGHRRIILLFAFSAVVATSTESAAMWECIYTHMIQSGMDHANSWLELNCIRACHPNLMSQMPFDRYCAGRERGTNTLLKETGACRTVPEL

SEQ ID NO: 150904 - protein, 227 aa, Oryza sativa
  Clone ID: PAT_MRT4530_51098C.1.pep
MAARRSPAAAHHCLFLLLLLFSALLAPLASAYRPGDIVPMLRSGQYHGSRSVWFDVVGRHCPSFAVNHEVMMPIPKPTGFTGADPYKITFQIGHEKFHLPWLYVINRKSSEVPMIDFHLKYSGNDLLGVTAKVVDMPHIYVEHHPDIRKNFWDQQNWPKYVLVRYTWEEQSEIDVPGGFYVLFGSGLVLSFILAIYVLQSSQEKLTRFVREAVNDSSLPEGGFAKVE

SEQ ID NO: 150905 - protein, 212 aa, Oryza sativa
  Clone ID: PAT_MRT4530_51099C.1.pep
RNSARGNGRGYHLPVDIWSLGCTIIEMATAKPPWHKYEGVAAIFKIANSKEIPEIPDSFSEEGKSFLQMCLKRDPASRFTATQLMDHPFVQDHPAVRAAKSGALRNAFAPADGTHTTSNREFSRKSITPLKDIGVSARDFTGFSTAVPSPHTDSPISVVRTNMSLPVSPCSSPLRQFKQSNWSCLPSPPHPTFSNGATSYNLSSYMMNETRR

SEQ ID NO: 150906 - protein, 101 aa, Oryza sativa
  Clone ID: PAT_MRT4530_5109C.1.pep
PWRIPWVQVSRAWPLLPWGPPFPPPWPHPRLLWPPPPPPLFAFGPKLPPRPPRQQRGGGSHPPPPSPSSDWDSPQPAPPPGLPSPPHLRQPPPRVQPWPGG

SEQ ID NO: 150907 - protein, 35 aa, Oryza sativa
  Clone ID: PAT_MRT4530_510C.1.pep
DKGKGATYRYTDAKLHTVMMYLAVHIANTTVKSSL

SEQ ID NO: 150908 - protein, 70 aa, Oryza sativa
  Clone ID: PAT_MRT4530_51100C.1.pep
MASAAAEKGKAPADTEQTAAATAARLAAEWTTWAMKNAKVVAHYGFIPLVILIGMNSEPKPRLAQLLSPI

SEQ ID NO: 150909 - protein, 108 aa, Oryza sativa
  Clone ID: PAT_MRT4530_51101C.1.pep
IKHMAQTSTFHYLKMKNQLQLRLIRRHTYFLLSKWSMRHCWSMDYKTVSFREKNRTKVQRAHGRSTTPRAYGARSLPRSCLDADKMEVWLLAMARHGGWGKLGFGRHL

SEQ ID NO: 150910 - protein, 155 aa, Oryza sativa
  unsure (1)..(155): unsure at all Xaa locations
  Clone ID: PAT_MRT4530_51102C.1.pep
ARGNRRSGSSWTRKYPQWISLSRPIVSLAKAAATXXXSTXXAXAAAAAGGAXWXSVVXAGRPAPXRRVXLVLXAXSEPEVEPTKXETVTSSSSXSPATTPTPSPXAAAPXAXPXVSTNXCGTCWRSTGXPRXDXPADXXGGGXXPXWPXKLSRRR

SEQ ID NO: 150911 - protein, 263 aa, Oryza sativa
  Clone ID: PAT_MRT4530_51103C.1.pep
QYISNIRTIQEYLCSRADKYLVPKVNNTNVDRSVASIHATVFSCLRRRAAGDQLYDPATNTVAVVNEEYKNQCVANSMSSKGMFKWLQGFGSSRKLMAIVNVDGSVSKAWPVESSSGDGKGGSENGSKKYVGDPIYGPLNIGRAESVNLQFGAFGISAWPTDAGCTSQAGSVNESWDNANEGTGSHVPSSSGSPKKLDGHCKEIKESAAASGSDDDEEEEEEAADVPPNSGSEEDLSEEDIRAIHEEMEGSVDEDCNRSDEEY

SEQ ID NO: 150912 - protein, 426 aa, Oryza sativa
  Clone ID: PAT_MRT4530_51104C.1.pep
MQMAATTTTTDSSQAAVPPHHPHPHAHPHPHAHPHPHHPMAQARWVVLPYPPPPPPMVAAPPPPPPQYAKHFAAGPPPAAAAGRRTPTPPAPAGSGGNGCEENKTIWVGDLQYWMDENYLHSCFGPSGEVVTIKVIRNRQTGQSEGYGFVEFYSHGSAEKALQNFTGHVMPNTDRPFKLNWASYSMGEKRSEVASDYSIFVGDLAADVTDEMLMELFANKYRSVKGAKVIIDANTGRSRGYGFVRFGDDNDKSHAMTEMNGAYCSTRPIRIGPATPRRSSGDSGSSTPGHSDGDSTNRTVYVGGLDPNVSEDELRKAFAKYGDVASVKIPLGKQCGFVQFVSRTDAEEALQGLNGSVIGKQAVRLSWGRSPSHKQSRADSGSRRNNMYYGTPFYGGYGYASPVPHPNMYAAAYGAYPVYGSQQLVS

SEQ ID NO: 150913 - protein, 58 aa, Oryza sativa
  unsure (1)..(58): unsure at all Xaa locations
  Clone ID: PAT_MRT4530_51105C.1.pep
RRPVTLSSGRSGASLLLVVCVGAVGVWGLYIFSFFRVMTLXGCNLVICSYSINRTSHH

SEQ ID NO: 150914 - protein, 125 aa, Oryza sativa
  Clone ID: PAT_MRT4530_51106C.1.pep
MSSVGDMSPGVSGLEGGGCPPTPRGPPPKGVRPEVTTYGGLGVRLQVPTYPYLWRPERSRHAAFNASVLDKASSGFDFAPRASLMGRKCRKVSTFESSSSSDLDKFQRKLQSQMPVAPLFPTKKI

SEQ ID NO: 150915 - protein, 128 aa, Oryza sativa
  unsure (1)..(128): unsure at all Xaa locations
  Clone ID: PAT_MRT4530_51107C.1.pep
MAGSGAGRGEGRLKSGGSGSGDDDHEEHGISTRTKNSRRRCPPARGPPPSSPQSPTTDPXPEAGRPLLPPPSSSPPCLRPAPSSPRSPATDLPFPRRDDGSAPPPPPXPMPPPSMPPPLSPMLPPPPP

SEQ ID NO: 150916 - protein, 275 aa, Oryza sativa
  Clone ID: PAT_MRT4530_51108C.1.pep
MASSALRRSLRRLLPSSPPPPSPASAAAAATFRRSFLSGGGDGVGESVEEFEKRMLSGLDDGLENRRGGSDWGWRGGFRNRGNSSSILAELCTGFDSLEDGLDEKLDEASRTFHVTEEYEDDDYDYRPDVTFRRGSPPGRPDHQCPTPTTASEHAVPRRSHIRSRELHEKADFRNVRFLANFLTEAGIIIKRSQTRISAKAQRKVAREIKTARALGLLPFTTMGQRPFIYGRSVEVNLSEEEYGYDFVDRRAGEPDENADDAVPDEDVAPGVENA

SEQ ID NO: 150917 - protein, 138 aa, Oryza sativa
  Clone ID: PAT_MRT4530_51109C.1.pep
MEMASGGGAAAAAGGGVGGSGGGGGGGDEHRQLHGLKFGKKIYFEDAAAAAGGGGTGSGSGSASAAPPSSSSKAAGGGRGGGGKNKGKGVAAAAPPPPPPPPRCQVEGCGADLSGIKNYYWRHKVCFMHSKAPRVVVA

SEQ ID NO: 150918 - protein, 97 aa, Oryza sativa
  unsure (1)..(97): unsure at all Xaa locations
  Clone ID: PAT_MRT4530_5110C.1.pep
KKXXKDTWFQQQKNPKVKTLHYTITLHTGDPNRIFLVKFTPGELNQPVMPTQKFFSLFFLFKKKKTGGLMGLGRKHKKTLKPAGSLLNNGGGNGFRP

SEQ ID NO: 150919 - protein, 265 aa, Oryza sativa
  Clone ID: PAT_MRT4530_51110C.1.pep
MAICAAAADHSRASPSSAATQPTTICWRPSKVKEEVEEDGMVVDPPDDASEASDNLRATGFQDTPTVGELVLRHLRPRLRGFHCADGDVPVIGVRDDPAAAAPLDLVARHGGAADRRRGEAFYFVRRRRCRRPNVRRTVAEGGGGGGGAGGLWKKSWTGSGKSVTDLGVVVPWSKTCYCFYRRDEGGRLSTFGGGWVLAEYEITEPGTYRRADEEEDDDDYWVLCHVRKTASKKRKRNRCDEAVAARAVAGTESKSYLLCGLTAN

SEQ ID NO: 150920 - protein, 180 aa, Oryza sativa
  unsure (1)..(180): unsure at all Xaa locations
  Clone ID: PAT_MRT4530_51111C.1.pep
MSPPAIAVLYDHHGPPDKVLRVAELPPAEIGNRDVCVRMLAAPINPSDLNRVEGVYPVRPPLPAVVAGYEGVGQVHALDAAVDSPLLSPRDWVIPSPXDVPPQYAATITLNPLTAPRMLQDSTLPWRSIRSARRRHGSRGHGRRHNRTTRGLAASACYAGGGGEGEQEDKAEMATTRLSL

SEQ ID NO: 150921 - protein, 66 aa, Oryza sativa
  Clone ID: PAT_MRT4530_51112C.1.pep
IKDFEDCLLKKIRHQLILTSHNFTRLTHLLVSFQPVLNRKVIRSLVQRAISCRGNMTELSLNREVS

SEQ ID NO: 150922 - protein, 436 aa, Oryza sativa
  Clone ID: PAT_MRT4530_51113C.1.pep
MATSRREPDARNNRTIRAMSTGIKPTDPAKGLRRARSVPSSPDRKLSPSHDASSSNAYRPSSSFSTRTGTSRSTFGSASSSIHSSKAPQTSSSTTTAKPANTTKGKADKSGGSSVWPPALTARNRSSKDMNRTAKSSSAMQKSNLSSRPGVDKMAASSAKQRTQKATPGALAGGKTQAVPSVRAPGTTTKKTMGVANSVPSIQRTSIPSRPIEAPKVNEQEVELLMEFDEMESISTPSIEEHLQERLPDPVELKQVDVIAYLLFGDNPSEPASNQQEDKNEEVVELISEEKHQVPDNNSFNGRDNADIGINSKVQAVKEAIDNSELKEAANETELKEAVDETELNEVVSESELYKDVNTTKYTEDALEPMLIEKEEAEENVEMVVPPKKTLKPVQGWSKDDGKSNEMKEEGRSKPTEERKSKVMALIGRFETAMSG

SEQ ID NO: 150923 - protein, 862 aa, Oryza sativa
  Clone ID: PAT_MRT4530_51114C.1.pep
MVSKSYSNLLEMSCGDGVDFRQPFKSLPRVVTSPGIISDPDWDTRSDGDSVGSASSVERKIIVANFLPLNCTKDEAGQWSFSRDDDALLMQLKDGFSNETDVIYVGSLKVQVDPSEQDQVAQKLLRDYRCIPTFLPPDLQQQFYHGFCKQQLWPLFHYMLPICLDKGELFDRSLFQAYVRANKLFADKVMEAINTDDDHVWVHDYHLMLLPTFLRKRLHRIKLGFFLHSPFPSSEIYRSLPVRDEILKSLLNADLIGFQTFDYARHFLSCCSRLLGLHYESKRGYIGIDYFGRTVSLKILAVGVHVGRLESMLKLPATVKKVQEIEQRYKGKMLMLGVDDMDIFKGISLKLLGLELLLDRNPKLRGKVVLVQIVNPARSTGKDVEEAITESVSVAERINLKYGSVDYKPVVLIDHRIPFYEKIAFYAASDCCIVNALRDGMNLVPYEYTVCRQGNEEIDNARGSDTNCHHTSTLIVSEFVGCSPSLSGAFRVNPWSVDDVADALHHATDLTESEKRLRHEKHYRYVRSHSVAYWAHSFAQDLERACKDHYSRRCWAIGFGLNFRVIALSPGFRKLSLEHFASSYNKATRRAIFLDYDGTLVPQSSINKAPSDELITILNSLCDDPKNDVFIVSGRARSLLDEWFAPCQKLGIAAEHGYFVRWNKAAEWESSYPNHDFEWKHIAEPVMQVYTETTDGSSIEPKESALVWHYLDADHDFGSCQAKELLGHLERVLSNEPVVVKCGHYIVEVKPQGVSKGLVVDKVIHRLMNNGKTPDFVVCIGNDRSDEDMFKSIDSMTSSSAFPAVPEVFACSVGQKPSKAKYYVDDAGEVVRLLKNVAGISSHREAVSHGRVTFRDVMDYVE

SEQ ID NO: 150924 - protein, 477 aa, Oryza sativa
  Clone ID: PAT_MRT4530_51115C.1.pep
MAQQWRSLLFLLLLLLVPFAAAAGQDAPFVVAQKKVALSRPGPGVERLAVTLNLYNQGSATAYDVSLNDDSWPQEAFQLISGTTSKIVEKLDPGATASHNFILETKVQGKFQGSPAIITYRVPTKAALQEAYSTPMFPLDILAERPPQQKFELAKRLVGKYGSLVSVVSFVEPLPVPGFPAGCSNLEEKAAAAMAAYEYESSSCSSLDPTSMPMVYSPIVLQPQECPLSFVFDNAAAAAGDNKWVPGIQGSCPCSLGSTQDMDASWGKSRKHKRSNVGLKGLEEKKARRVVLHQHDDDVKKKAKEAAGGEPPAGYIHVRARRGQATDSHSLAERVRREKISERMKMLQSLVPGCDKVTGKALMLDEIISYVQSLQNQVEFLSMKLASLSPLMYEFGPGIDMHPDVLRQLAKMPHEMVQCMGQMGSTGISLQGLGGGPTGFAQDGSSHINMVVMQVGEQGQQQGSLHQVEMSSHCFFH

SEQ ID NO: 150925 - protein, 396 aa, Oryza sativa
  Clone ID: PAT_MRT4530_51116C.1.pep
MGRSPCCDKASVKRGPWSEEEDAILRSFVERFGNAGNWIALPHKAGLKRCGKSCRLRWLNYLRPAIRHGGFTDEEDNLILSLYGEMGSKWSVIASKLPGRTDNDVKNYWNTKLKKRYLAAAATEATTPPPPAAGDDDNNPTTQASSQPAPPTPPAPLVNLDAAGLDGAVGDNDELLLHKSEQLYAELMGLIEQQQYSTITAAAVDAATTTTSWSSPSTGTTSPTASSSTDGSSSSSNLPWPAVDVHDSTMMPPLSESSGSSSGLFFGSHAFGSGSFQDLLGSAASFDDVMLSQEMLDNFKNGATPGGDGDLSPTDACLTVMELVNMISVLMALTAAIRLDVPAKLWARGANAPFPTGHPNPFVLERLLRLLTSCSVFCEHKGSPRHFALTTGDDES

SEQ ID NO: 150926 - protein, 53 aa, Oryza sativa
  Clone ID: PAT_MRT4530_51117C.1.pep
KLKNNGQHMNTIHDSVGTEKCVNIIITHSRVGKYPTSKLLAGINIHYWQKKIV

SEQ ID NO: 150927 - protein, 974 aa, Oryza sativa
  Clone ID: PAT_MRT4530_51118C.1.pep
MANQQLLEESKDEHRPLEYCLRKYLLLLAIMVATVTYAAGFNPPGGVWQNTEAGHLAGESIIRDTYYPRYLVFFYCNAAAFALSIVVIILILILAVVHEKEELWISMIPLRVAMMLDLLGLVGAYAAGTSRGVLKAKNACVLVAIFVYMAVQVVLTSFSEKSQLFRCTGDSKKKEAKGQLESADGKGEINKEEEKERRRKLLLLLATFVMSITYLAGLSAPGGYWDSSKEGHIAGDPVMREHHSIRLKAFFTFNAIAFVMSLLIIMLLLDKQLVIPLLKGKNQNKTSPVRTFVLKAYIFIAFVGLAGAYATGSSRECDTTIYVGSLVLAVLACIIVLKAIISCQTYSNDRSNNVEEQTSTGNCRAQINTSNGGAESLSSNGGAESVSSNGGAESVSSNARAQPTTTNGGEETKTSNAGAQKNTRNADFMDKAQSLVVLLSTLVATVAYQAGLVPPGGVWQDNWNGHEAGDSILLSMQPERYRVFFYCNSIAFAASLVIIILVQYKPILKLRVLQFAMILDLFGLIGAYSSGSCRDVTTSIYVIALAGAVLIYVVIHVLFVTLEDEDIRKEGREKDRKLEDKRRKRLLLFAVLCVTLTYQAGLTPPGGFWLMDDEFGHHAGDPVLFYNYPRRYKAFFYCNSMSFMSSIALIILLVNPNLYRPAIRSYALSVCTAVGMFALLCAYAAGSTQHLKTSIYIFGLVLLVFFIMIVLLIYSYWRQKRIMSHNKEDTEKGKSPGTQNEDITKQDSKTVKPTGTKSDVEMEEDDITAKSTKLKENDSTGKSSEIEDEGEAKQNRLEHSIERAKQETATESPKKEDKSKKKHATRKYLMLLGVLAASVTYQAGLNPPGGVWQGNSNDHAAGNPVMHDKKRYRYLIFFYSNSTSFVASIVVIILLLPEKLLGEAWSLNVMNITIVLDLLGLLLAYMAGSRMRLQSSGYFVVFVIGALGFAAIHKIWSYLQRKRNDQHRLLDQPR

SEQ ID NO: 150928 - protein, 61 aa, Oryza sativa
  Clone ID: PAT_MRT4530_51119C.1.pep
RHLQLPSALYQERYCVVTRPNQSSLAAVITMVKDGRPLSLPATVDEVAGIEQKEGSRVGYL

SEQ ID NO: 150929 - protein, 52 aa, Oryza sativa
  Clone ID: PAT_MRT4530_5111C.1.pep
LNSSMCVTNVVHSDRSKHLSTFCSTGSVLTVVILSEEMIPNSLFNKLEPMQG

SEQ ID NO: 150930 - protein, 197 aa, Oryza sativa
  Clone ID: PAT_MRT4530_51120C.1.pep
MAAAAGEVPGPPEADPLEGIITFTLNLADVDKEQLTLILYPSCANTLLRGHHLLVEIAPPHPSMSSEETKIEASYHKLIPSGRYCFGPNEWYFGFGYYGDEQLDIALAPMSGSFLIVSGIMYYCVGSFLSVSGIRFPKDSRKGQMHVEQGIQSQDMMRVLSSEKVLKMQETHNVTGHGEGFKLRKGSEDAGDTQYKY

SEQ ID NO: 150931 - protein, 137 aa, Oryza sativa
  unsure (1)..(137): unsure at all Xaa locations
  Clone ID: PAT_MRT4530_51121C.1.pep
GKLARLQSPGPVLRGRLHVVRPRVRGHVGGITNKFLVLWGSAFADAIYQLKMMPLLMLFGQLCPSGVEGTPLALGMSINNFGSTLRLFLGAGLASALSISSPHXKNMTLGLSVHPIGSLLPRGFLFVIPNRITRXTS

SEQ ID NO: 150932 - protein, 65 aa, Oryza sativa
  Clone ID: PAT_MRT4530_51122C.1.pep
KWVPGEHHSGRQGIPLARKCQCKTPVLDELVLDLTAVGQHGCGRSERGRRLRRIGRSRRGRSRRP

SEQ ID NO: 150933 - protein, 513 aa, Oryza sativa
  Clone ID: PAT_MRT4530_51123C.1.pep
MASAACSSSASALVRLTGPIHLCSAPPRGSARRRHASVRCSFAPVETARIKVVGVGGGGNNAVNRMIGSGLQGIEFYAINTDSQALLNSQAQYPLQIGEQLTRGLGTGGNPNLGEQAAEESKEAIANALKDSDLVFITAGMGGGTGSGAAPVVAQISKEAANLSGLSPFQALEALEKLERSVDTLIVIPNDRLLDVVDENTPLQDAFLLADDVLRQGVQGISDIITIPGLVNVDFADVKAVMKNSGTAMLGVGVSSSKNRAQEAAEQATLAPLIGSSIEAATGVVYNITGGKDITLQEVNKVSQIVTSLADPSANIIFGAVVDDRYTGEIHVTIIATGFPQSFQKSLLADPKGARIMEAKEKAANLTYKAVAAATESSFVPGTGLFCTLLYSAAAVHISMRTFKHHQDLHALAEMTARGEGDGQSPKAARIVGYLDACDIRESWRKKEREASDSQDAAALRRGTPYVPSRQGSGLRSSGVQVQHVVLKMAPGGSSCIVRCRMGIAGYLSSHET

SEQ ID NO: 150934 - protein, 404 aa, Oryza sativa
  Clone ID: PAT_MRT4530_51124C.1.pep
MASAACSSSASALVRLTGPIHLCSAPPRGSARRRHASVRCSFAPVETARIKVVGVGGGGNNAVNRMIGSGLQGIEFYAINTDSQALLNSQAQYPLQIGEQLTRGLGTGGNPNLGEQAAEESKEAIANALKDSDLVFITAGMGGGTGSGAAPVVAQISKEAGYLTVGVVTYPFSFEGRKRSLQASALEALEKLERSVDTLIVIPNDRLLDVVDENTPLQDAFLLADDVLRQGVQGISDIITIPGLVNVDFADVKAVMKNSGTAMLGVGVSSSKNRAQEAAEQATLAPLIGSSIEAATGVVYNITGGKDITLQEVNKVSQIVTSLADPSANIIFGAVVDDRYTGEIHVTIIATGFPQSFQKSLLADPKGARIMEAKEKAANLTYKAVAAATVQPAPAATWSRRLFS

SEQ ID NO: 150935 - protein, 81 aa, Oryza sativa
  Clone ID: PAT_MRT4530_51125C.1.pep
FTLPSARVQAGGGGNCGAGGGGSGRFKRALLRNLMLGLRKGGVASGEMGFHERKSAIKRADDAALVVFRGAGDVLMSFAVL

SEQ ID NO: 150936 - protein, 77 aa, Oryza sativa
  Clone ID: PAT_MRT4530_51126C.1.pep
MALTNFILTVVGVGTAVLLLRSDVKQSASIFRRNVRHIRKWLEEESAAAAKPAERAAPKELESQAAKKDVTPKDDKH

SEQ ID NO: 150937 - protein, 470 aa, Oryza sativa
  Clone ID: PAT_MRT4530_51127C.1.pep
MAAPVAGRLSGLLRRCAAAGAVRPGEQAHARAVVGGWLPDATLETDLVLMYCRCGERRRARRVFDGMRAPSMHAYNVLLAASPPRDAMEVFSRLLASGLRPDGYSVPAVVRACAELPDAVLGGVIHGFAVRLGLMGNVVVAAALLDMYAKAGFLDDAVRVFDEMTERDAVVWNCMVAGYARAGRAVETFEIFSRAQVEAVNMVNGLQAVPSVLNICAKEGELMKGREIHGRMVRCLAFDSDIAVGNALINMYAKCGRVNVSQAVFSGMQQRDVVSWSTMIHSYSIHGKGEQALKVYMEMLSEGVKPNWITFTSVLSSCSHSGLVTEGRKIFESMTKVHGVHPAAEHYACMVDLLGRAGAIEEAVGLIRKMPMEPCASVWGALLSACAMHNNVDVGEIAAFRLFELEEGSASNYVTLCGIYDAVGQSDGVAGLRSRMRELGMVKTPGCSRIDVKGRAHAFYQGSIPRYLRR

SEQ ID NO: 150938 - protein, 114 aa, Oryza sativa
  unsure (1)..(114): unsure at all Xaa locations
  Clone ID: PAT_MRT4530_51128C.1.pep
RLPRERGRCYYDFTEITKALNMAWGPYVENGGRHKEGKDELYHNTKFAXAQQVRDQGGFQYQHXILNVLTSDLSNXKGRDGLKISPINXPAIRGEVCAFILAEIMNKKGRFHVK

SEQ ID NO: 150939 - protein, 408 aa, Oryza sativa
  unsure (1)..(408): unsure at all Xaa locations
  Clone ID: PAT_MRT4530_51129C.1.pep
MNPTIENGGSGGDGSAAAAAAEGSAIWKSELVPQLQLPPGYHFVPTDEELVDFYLRGKIEGRDPPRHFISEENIMRYDPQKLIEKYKGYGEDRWYFFMVREPSKTKKKDEPNRKVVVDGVEEGSWSATGSVVQIHSTKETNRKAIIGSKRVLTYKSARSAENDMWSMHEYVLAGKSQMGQYVLCAIQLKQTYEREEKAREEQKNDNKRNKKAARRKNMQQQPTACQAQDEQQETAPTPGEETIVDPDQFMDIAHSMHMMFGGVDQDAPPFMPSLIAPCNNDDGMLQLQPLQLQNPNPAMLYSNQLEPSYIGDQSMFTPCCCDRNCISCRQLQFYQQQQAEDGSVAFEKADLYNNMIGLWXNIGVYPDNVWVDGNMADYAQRQIYNDQDNGGSFQGNILASVLGSTTKV

SEQ ID NO: 150940 - protein, 110 aa, Oryza sativa
  unsure (1)..(110): unsure at all Xaa locations
  Clone ID: PAT_MRT4530_5112C.1.pep
EWPEGNVCTPSRVPGPQIERMHVRKPESEAPRGEKKTETRVIAAAHIPSCPLHAHALSDRXPGDSDLAKSQKSKLHRVSPAAGADVIHSMAITXCSALTQSPWLLLPAAQ

SEQ ID NO: 150941 - protein, 73 aa, Oryza sativa
  Clone ID: PAT_MRT4530_51130C.1.pep
RLIPLKGAPLYLFIFFMFILLFFFFFFFFYFFFFFFFFFFTFNFHFLFQLYSHLSVSDTYQEYVKDLQSLPTM

SEQ ID NO: 150942 - protein, 104 aa, Oryza sativa
  Clone ID: PAT_MRT4530_51131C.1.pep
FYTTYRYRKPLPRVELEPEGAHGAKLSLLTQAGSVSAEFRGSRRPHKEQRYCGIARADHEKKVETRERTTGHQKHIHLTVDEIRFTKSGGTLRFYGNQREETCI

SEQ ID NO: 150943 - protein, 340 aa, Oryza sativa
  Clone ID: PAT_MRT4530_51132C.1.pep
MGRSPCCCHDAGVKKGPWTEEEDRALVEHIKKQGGHVGSWRGLPRAAGLNRCGKSCRLRWTNYLRPDIRRGNFSDDEERLIIRLHAALGNKWSTIATHLDGRTDNEIKNYWNTHIKKKLLRMGIDPVTHQRLPPDLLADGGGLGAASPLLSPPGPAAAAALQPLLSAVASLGSLDTALRQFQLLQHLLNSITSSSSDVAATAGLMATNLAATNTMVNSSSNVASFQEQMNALAHANYQPGYLRDVVPSFPGQDMAPQLNSTSSTPSTAPVLRSSAEPADQCCNDAALVPETYPREVAASVDHWKVQDFPSLEPLELPNLSTLESDLDPFWKEILESSFRS

SEQ ID NO: 150944 - protein, 60 aa, Oryza sativa
  unsure (1)..(60): unsure at all Xaa locations
  Clone ID: PAT_MRT4530_51133C.1.pep
XXXXFGGKFLSXRDXXDLVQXPLVXSXSXGDXXLLYSXLAKNFDLXSXXTWLXDFXXMGP

SEQ ID NO: 150945 - protein, 88 aa, Oryza sativa
  Clone ID: PAT_MRT4530_51134C.1.pep
NSASAAPRRKRPRNNGAGAGVGQQQLPHAVAAVLQSCELDLCLTPVSPPAVQLVGGGGGASDEHSTTTCEEASDGDGAGAPTLLNLFS

SEQ ID NO: 150946 - protein, 100 aa, Oryza sativa
  Clone ID: PAT_MRT4530_51135C.1.pep
MSRSQRGRQEGGGRAQPRRHRRRCRRRATARWWTAAGGRSGRHQGHRAPALPRCRRPAPPPPAAARAQLRPAGRAPLRPRRPRPAPPSTTAAWEGGRGRP

SEQ ID NO: 150947 - protein, 119 aa, Oryza sativa
  Clone ID: PAT_MRT4530_51136C.1.pep
MGMPPARGRHQGHRAPALPRCRRPAPPPPAAARAQLRPAGRAPLRPRRPRPAPPSTTAAWEGGRGRPCSAAAAASSPIARRRPPVSRAPPPTSCPTWGGEEGERKREEEDRGRREGNKG

SEQ ID NO: 150948 - protein, 146 aa, Oryza sativa
  unsure (1)..(146): unsure at all Xaa locations
  Clone ID: PAT_MRT4530_51137C.1.pep
LLLMTKIGNLGIRDEDQXKRNPRQRSFRKQSKNRLKSESAATSIGRVRVGQGSRLSRFRQCDSLGQKSAAKTYGILEFVRDTSCVRHGHILIKSTGTLTNLKAXFWTCTKVKQIFQASCFSHQQTGTRPNPPRRRWVPGLRSLLPP

SEQ ID NO: 150949 - protein, 39 aa, Oryza sativa
  Clone ID: PAT_MRT4530_51138C.1.pep
PTRPIIEYYSSFTTLNSLTVVEYYWGESIRPDACSILLM

SEQ ID NO: 150950 - protein, 1083 aa, Oryza sativa
  Clone ID: PAT_MRT4530_51139C.1.pep
MAVLSYLDFFSTGVQPGINQQLRRPGLVEYINIYAKTLLLLGISGTLKDILSGSGLVAGASVSPALSRPAEQMFEIVSLADDLLPHLPSGIISLPAYFHVLVKGSSSKKSASTKQDGTSSTENERSGHERLLREHPELLKQFGILAWKDPQVLIPALQIAEIMMEKLPETFSKLFVREGVVHAVESLICPESSDMVPSQVLPHDKDNESVMPSHSRRQRRRGAAAPTENSSLDESNTSNPGIASSTPCSTEVQNTSLRFAVSDRAKSFKDKYFPSDHESRDLGVTDDLLKLRTLCAKLNSASENVVTKAKGKSKALSATHFDISHDVEAQFELIITQILTELSKTNGVSTFEFIRSGVVAALLDYLSCGTFGKERVSEANLPKLRQQALRRYKSFISVALSIDHERNETPMAFLVQKLQSALCSLERFPVVLSQSSRIGIGGSRLTSAVEEFLWPRVQRSEAASKPTVPSGNNSESGIPGTAAGASSTAAPAPSGRRPTTRSKSSAASSGASKKDSQEESTNTAKGKGKAVAKPNSEEPKGPNTRNATRRKAASEKDLEMKRAHGDSSSEDEELDTSPIEIDDALMIDDDDMSEDEEDDHEVLQDGSLPICVQDGVHDVKLGDTDDSNIGSASDSQVQPSSGSSTRNIMSRGVDPNTFGSRGAMSFVAATMAGLASVGGRGVRGSRDRRGLSLGGSINEHNKLIFMAGGKQLSKHLTVYQALQRQLMFEEDDDEKFNGSDLSNDGNRFWGDVFTITYQKADSQAEKQQQGDNQNAGGEREIRFGRLQRQKVRVSRNRILDSAAKVMEMFSSQRAVLEELDLFDIISFDAEFGKTLQELQILVERKRFLESTYGMNQLEVTDLRFRGTPIEDLCLDFTLPGYPDYILKEGEENTIVNIYNLEEYVTLVVDATVKSGIMRQVEAFRSGFNQVFDISSLKIFSPEELDYLICGRREIWEPDSLVDNIKFDHGYTAKSPAIVNLLEIMAEFTPEQQHAFCQFVTGAPRLPPGGLAALNPKLTIVRKHPSSAVNTSNIAGVTESADDDLPSVMTCANYLKLPPYSTKEVMRKKLLYAILEGRGSFDLS

SEQ ID NO: 150951 - protein, 482 aa, Oryza sativa
  Clone ID: PAT_MRT4530_5113C.1.pep
MGSEVKPAKLGLRRHLNAGFFAGFLLVLLTYVIVSQQFAMETPTAVTSRAPRIDENESVTKARVETEKKREQEWQRPKDTSGAVSAEEFSKRDSTNAKPIENGKVVCGSNGFYSDTCDVDGDVRINGTALSVTLVPASRRSERRREWKIQPYPRRTVSGIAEVTVTRQQDRAAAPACTVTHGVPGVVFALGGLTGNYWHDFSDVLVPLFVASRRYGGEVQFLVSNIQPWWLGKYEAVVRRLSRYDAVDLDRDTEVRCFRRVAVGLRMHKEFSVKPELAPGGQRLTMADFAAFLRDTYALPRAAAAGARRPRLVVIRRAHYRKIVNMDEVVRAAEAAGFEAAVMSPRFDEPVEEVARKVNAFDAMVGVHGAGLTNAVFLPAGAVVIQVVPYGRLERMARADFGEPVADMGLRYMEYSVAADESTLLEMLGPEHQVVKDPEAVHRSGWDKVAEYYLGKQDVRINVARFAATLAAAFDHLRPSHS

SEQ ID NO: 150952 - protein, 224 aa, Oryza sativa
  unsure (1)..(224): unsure at all Xaa locations
  Clone ID: PAT_MRT4530_51140C.1.pep
RDDDLSAKELSSDLPDNGSHLIQAPFGLFPRPWPLTVDASEGSRFSKVIEHFRLVGRVMAKVLQDGRLLDLPLSTALYKLILGQELDLFDIISFDAEFGKTLQELQILVERKRFLESTYGMNQLEVTDLRFRGTPIEDLCLDFTLPGYPDYILKEGEENTIVNIYNLEEYVTLVVDATVKSGIMRQVEAFRSRFNQVFDISSLKIFSPXELDYLICGRREIWEP

SEQ ID NO: 150953 - protein, 296 aa, Oryza sativa
  Clone ID: PAT_MRT4530_51141C.1.pep
PRVRRDLGVTDDLLKLRTLCAKLNSASENVVTKAKGKSKALSATHFDISHDVEAQFELIITQILTELSKTNGVSTFEFIRSGVVAALLDYLSCGTFGKERVSEANLPKLRQQALRRYKSFISVALSIDHERNETPMAFLVQKLQSALCSLERFPVVLSQSSRIGIGGSRLTSGLSALAQPFKLRLCRGQGEKSLRDYSSNIVLIDPFASLAAVEEFLWPRVQRSEAASKPTVPSGNNSESGIPGTAAGASSTAAPAPSGRRPTTRSKSSAASSGASKKDSQEESTTLPRERGRLLQ

SEQ ID NO: 150954 - protein, 67 aa, Oryza sativa
  Clone ID: PAT_MRT4530_51142C.1.pep
GGPHPSARVAGGPARRDKSTPLTRISSPRFEDASKKIADFDWAAALEDEASVPELLITHILGVNLIQ

SEQ ID NO: 150955 - protein, 45 aa, Oryza sativa
  Clone ID: PAT_MRT4530_51143C.1.pep
VCKIFLMRWSNLFIYFSMSQISSVRAVVPNYPKNPSSVCQHSKNR

SEQ ID NO: 150956 - protein, 55 aa, Oryza sativa
  Clone ID: PAT_MRT4530_51144C.1.pep
MAMAKGVLAARELVETTKVVVDGMKVELPEGRKGAAAVSGRPAKQSEKTKRNTRD

SEQ ID NO: 150957 - protein, 88 aa, Oryza sativa
  Clone ID: PAT_MRT4530_51145C.1.pep
MAAAVDGAVQQRRRAPPTAKGGGVQATGGRLNHHPLPPLLEMAMRMPLQTAVVTDICRQGGLENMQHFVGSMSICFIGVVLLVGFVHA

SEQ ID NO: 150958 - protein, 79 aa, Oryza sativa
  Clone ID: PAT_MRT4530_51146C.1.pep
MHSRKKPSPVAAAAAVPLLLMCLLFAATAMAASPSSSSSAAAAAASFVEPSDADTYSTCFEAGGCNNTGCAIRIVKINV

SEQ ID NO: 150959 - protein, 107 aa, Oryza sativa
  unsure (1)..(107): unsure at all Xaa locations
  Clone ID: PAT_MRT4530_51147C.1.pep
KSVERAKKFAGASPLPPRASPSSSPSTPPPLRVAVAAAPRCHRAAAPAGFPLPPPARSGREGWEGSLRAAPHRRRRRRLRRPPPSLLRPDLGGRGXGEPPPPPLPAS

SEQ ID NO: 150960 - protein, 51 aa, Oryza sativa
  Clone ID: PAT_MRT4530_51148C.1.pep
SPSIQDKEGIPPDQQRLIFAGKQLEDGRTLADYNIQKESTLHLVLRLRGGQ

SEQ ID NO: 150961 - protein, 44 aa, Oryza sativa
  Clone ID: PAT_MRT4530_51149C.1.pep
PCPCATRARVSRLGLTDTLIHVQTGKKSQSHQSALGRQQRMQHE

SEQ ID NO: 150962 - protein, 439 aa, Oryza sativa
  unsure (1)..(439): unsure at all Xaa locations
  Clone ID: PAT_MRT4530_5114C.1.pep
RSKSIFRVSCFLNPLFQHLRDQVLIPVVHADTRYFLGPMGDPDPTIFITTETNRIPFXESKPKFNHWPNIFRSWPSKLDXWKDWFKRVSTAKRSSWKKIGIEQCLQLSLADMPKSESMLSAATYFWSNTINAFILGHGPMTPTLLDVKMLTCLDITSSANPINLKTKCERKINAKVCGGWLGYVTRCMGTGLVTNEEHIAFLNLWLKRFIFCXHNFQHLAQALHEENSIPLGKFILGAIYQIMSQASTRLLMNSSVKHGGPWWFVQLWLNIYIVNSINHQTLQDFRFPSIEDNEDDRPCMSFGEAAYMFAGSNLSAEPFEHWFKHFYDGFPNDTEMWYAYENFEDFECPEDLRIDDLNNEFYPENKKNFISALLPCILPTGVSQGRFTQNSYEFYHPMIAARQFGLGQLPLNLHFSTKIQARDIVSSVMILSSLLRLFT

SEQ ID NO: 150963 - protein, 49 aa, Oryza sativa
  Clone ID: PAT_MRT4530_51150C.1.pep
MAPSFSIREYAASMRGTAGFRHPALSAAGDFPPMPIRRFRWWVDELHAA

SEQ ID NO: 150964 - protein, 351 aa, Oryza sativa
  unsure (1)..(351): unsure at all Xaa locations
  Clone ID: PAT_MRT4530_51151C.1.pep
HVGHPPRPQRLIFAGKQLEDGRTLADYNIQKESTLHLVLRLRGGMQIFVKTLTGKTITLEVESSDTIDNVKAKIQDKEGIPPDQQRLIFAGKQLEDGRTLADYNIQKESTLHLVLRLRGGMQIFVKTLTGKTITLEVESSDTIDNVKAKIQDKEGIPPDQQRLIFAGKQLEDGRTLADYNIQKESTLHLVLRLRGGMQXFVKTLTGKTITLEVESSDTIDNVKAKIQDKEGIXPPDQQRLIFXAGKQLEDGRTLADYNIQKESTLHLVLRLRGGMQIFVKTLTGKTITLEVESSDTIDNVKAKIQDKEGIPPDQQRLIFAGKQLEDGRTLADYNIQKESTLHLVLRLRGGQ

SEQ ID NO: 150965 - protein, 519 aa, Oryza sativa
  unsure (1)..(519): unsure at all Xaa locations
  Clone ID: PAT_MRT4530_51152C.1.pep
MQIFVKTLTGKTITLEVESSDTIDNVKAKIQDKEGIPPDQQRLIFAGKQLEDGRTLADYNIQKESTLHLVLRLRGGMQIFVKTLTGKTITLEVESSDTIDNVKAKIQDKEGIPPDQQRLIFAGKQLEDGRTLADYNIQKESTLHLVLRLRGGMQIFVKTLTGKTITLEVESSDTIDNVKAKIQDKEGIPPDQQRLIFAGKQLEDGRTLADYNIQKESTLHLVLRLRGGMQIFVKTLTGKTITLEVEXSDTIDNVKAKIQDKEGIPPDQQRLIFCWASSLEDGXRTLCWTYNIPEGVPPFHLVASGFRGGMQIFVKTLTGKTITLEVESSDTIDNVKAKIQDKEGIPPDQQRLIFAGKQLEDGRAKNFSPISRGSRRRIESSRVLKMQIFVKTLTGKTITLEVESSDTIDNVKAKIQDKEGIPPDQQRLIFAGKQLEDGRTLADYNIQKESTLHLVLRLRGGMQIFVKTLTGKTITLEVESSDTIDNVKAKIQDKEGIPPDQQRLIFAGKQLGDGRTLAD

SEQ ID NO: 150966 - protein, 70 aa, Oryza sativa
  Clone ID: PAT_MRT4530_51153C.1.pep
SPAVGILMIQNPDRRTSVLSCRSHSLWQLCSPAVLLYTSGLSAEVVHWDPSNHILRMVICNLDLTAMLSM

SEQ ID NO: 150967 - protein, 155 aa, Oryza sativa
  Clone ID: PAT_MRT4530_51154C.1.pep
MDYLQDFDFVFHLHLMLMILGYANALSLCLQRKDGGILEAMLEVKSTKEKFQAIRDDGWESLLEKMYSFYDEHGILRLDMEEEYIDRHKPRKKINHTNYQQYRWDCLNPVVDLLLIEFNDRFTETNSNLLTYMAAFNPKDSFADFKMNSLMHGTC

SEQ ID NO: 150968 - protein, 47 aa, Oryza sativa
  Clone ID: PAT_MRT4530_51155C.1.pep
LALSPHHAPPPLETSLFSGCFLGCSCHRPEAMNEGVVCCGSGSLVLK

SEQ ID NO: 150969 - protein, 547 aa, Oryza sativa
  Clone ID: PAT_MRT4530_51156C.1.pep
MGSFARKEHQFLAELGLAPRNPGSFACGAWGGSGPVVTSTNPTNNQARLPPHDPLGSRRSIWFGPPWHFWGVIAEVVEASAREYEEGMRACYDAAKTWMAIPAPKRGEIVRQIGDALRAKLHHLGRLVSLEMGKILPEGIGEVQEIIDMCDYAVGLSRQLNGSIIPSERPNHMMMEVWNPLGVVGVITAFNFPCAVLGWNACIALVCGNCVVWKGAPTTPLITIAMTKIVASVLERNNLPGSIFTAFCGGADIGQAISLDTRIPLVSFTGSTKVGLMVQQQVNARFGKCLLELSGNNAIIVMDDADIQLAVRSVLFAAVGTAGQRCTTCRRLLLHESIYRTFLDQLVEVYKQVRIGDPLENGTLLGPLHTPASRDAFLKGIQTIRSQGGKILYGGSAIESEGNFVQPTIVEISPSAPVVREELFGPVLYVMKVQNLKEAVEINNSVPQGLSSSIFTKRPDIIFKWIGPHGSDCGIVNVNIPTNGAEIGGAFGGEKATGGGREAGSDSWKQYMRRATWSSNLFSCVTPVPKQDGLKTLYQKIIHNFFM

SEQ ID NO: 150970 - protein, 509 aa, Oryza sativa
  Clone ID: PAT_MRT4530_51157C.1.pep
MGSFARKEHQFLAELGLAPRNPGSFACGAWGGSGPVVTSTNPTNNQVIAEVVEASAREYEEGMRACYDAAKTWMAIPAPKRGEIVRQIGDALRAKLHHLGRLVSLEMGKILPEGIGEVQEIIDMCDYAVGLSRQLNGSIIPSERPNHMMMEVWNPLGVVGVITAFNFPCAVLGWNACIALVCGNCVVWKGAPTTPLITIAMTKIVASVLERNNLPGSIFTAFCGGADIGQAISLDTRIPLVSFTGSTKVGLMVQQQVNARFGKCLLELSGNNAIIVMDDADIQLAVRSVLFAAVGTAGQRCTTCRRLLLHESIYRTFLDQLVEVYKQVRIGDPLENGTLLGPLHTPASRDAFLKGIQTIRSQGGKILYGGSAIESEGNFVQPTIVEISPSAPVVREELFGPVLYVMKVQNLKEAVEINNSVPQGLSSSIFTKRPDIIFKWIGPHGSDCGIVNVNIPTNGAEIGGAFGGEKATGGGREAGSDSWKQYMRRATCTINYGSELPLAQGINFG

SEQ ID NO: 150971 - protein, 39 aa, Oryza sativa
  Clone ID: PAT_MRT4530_51158C.1.pep
KNTFIASTGVITYMWVACFKTHKITGRTSWSNNKELKLP

SEQ ID NO: 150972 - protein, 70 aa, Oryza sativa
  Clone ID: PAT_MRT4530_51159C.1.pep
TIYPTALLGLLEPPPHGLLPATTLGYTHPRCTDNYTCGATTLLHVTRYTPIDTRGRMHSQSYNAVCTPWL

SEQ ID NO: 150973 - protein, 88 aa, Oryza sativa
  Clone ID: PAT_MRT4530_5115C.1.pep
MACTVAGGSTAAGPVMGGSIIAGAMTGGLDGTNERVGRGGNKPTTRQPRRPKGWWVRRYWPREGQSVVGVYSRIWYRQPDEDRVTGDG

SEQ ID NO: 150974 - protein, 65 aa, Oryza sativa
  unsure (1)..(65): unsure at all Xaa locations
  Clone ID: PAT_MRT4530_51160C.1.pep
ATVHIHLXLGLDRLILDPTIIRKXRYRCLPAIPLLEFVXIYAXVVVDDSLLLSFLXITLXITIFQ

SEQ ID NO: 150975 - protein, 42 aa, Oryza sativa
  Clone ID: PAT_MRT4530_51161C.1.pep
MALLLSVFFSHGPAFSPAIFTCRPPACGHLPTLLSGRVASQR

SEQ ID NO: 150976 - protein, 134 aa, Oryza sativa
  Clone ID: PAT_MRT4530_51162C.1.pep
MAPSPPQIFAPFPLIALFRRAPFPIPLIRFFPPPLPLGPLDPGSPSLIPPLGLGTPPPLFLFPPMALLPPQFCIPLQGLMPPCPFGPRFPIIPSLPPFFFFGLGPPPIIKMAIPIPPICPMAPFNFPLFSWGCC

SEQ ID NO: 150977 - protein, 107 aa, Oryza sativa
  Clone ID: PAT_MRT4530_51163C.1.pep
MARSSSQSQSSVGAAAGAARPATVGPRGTAAAAAGMRRRRASTAGGSGGFSGGGGSNMLRFYTDEAPGLRLSPTMVLVMSLCFIGFVTALHVFGKLYRSRTAASASA

SEQ ID NO: 150978 - protein, 139 aa, Oryza sativa
  Clone ID: PAT_MRT4530_51164C.1.pep
QRRRRFLSNQQRHHLLLSPPPSPPHHPRCIAPGGSSMWPIPHESTISTPPRWFLQGGRIWLRFITKSTTSSLLGSHLHLCSPDLLHLRFWAPSSLLEAQDDVSLSTAINNTRSIFSSYGGICLILVYLTSLTYLARRSC

SEQ ID NO: 150979 - protein, 204 aa, Oryza sativa
  Clone ID: PAT_MRT4530_51165C.1.pep
LCSEFCHGLAYDPHVFSKTEHAIQWAYIYNVLQPVSLQVLGDKAFEKFGKWFISLHFSDQLAGSYKKVLSFKFVLPDASNMAEMTRLVALVPYYIDLVGRYKLSNHARSKTEAARTKASQEAFREQQGLRQEALQRKKAEKKKLMEEAEAKLSAEALRKKEEKERARQMKKSMPKTLLCSSGPSTFLCHGGIQAKGNRLEWRQV

SEQ ID NO: 150980 - protein, 221 aa, Oryza sativa
  Clone ID: PAT_MRT4530_51166C.1.pep
MSLSGSWDVMRSTPGTGRTISDAGIPRANPHSRGVMSDGGASASERGQRREDCGFPPARFMGSWSVGGHWDSDSGRRLQKTVNYLRPCGVGNDIACFDGNLTETEENRDPLVSFGEKAKRGGEAPGERRERRHPRRRRAPGKSGDIHGGAERRGRVAWAAAVVAASLGENGAGGGIRGRVERWGRPGEWRGWRLCLTGGEWRGQDTMAREPTQAGSLSLTS

SEQ ID NO: 150981 - protein, 490 aa, Oryza sativa
  Clone ID: PAT_MRT4530_51167C.1.pep
MATASSIRPPRAALVLLLLALSFSLTLAAHFEGFGSDDLHSAHADAASADDEDDEGLDVELPPPPRISLSTSTPSPPVTTTTTTTSAPNPNPDPNPTLTPPNPTPTLDLWDEDEFEGIPVPEAASSDESSTPAEAAPSEPAADAAAEAAPAPPRRPAELLRAYTVEIACVSFLICFLLNYFTGKRQNEAIALAWATRFATRDSIFDKNFSLLGTGDGKDTPLLMKEGQDVFKFYASGRRYCQGMLATMEMRARHDLLSKLVELVFPRKDTITFEVVMNEEAMDHVMLAVARKKAAKTMQKEERDLQKFAGVLTSAPAGRRWVADELAVVAESKEVAGDMITEAVLDQVLGDKAFEKFGKWFISLHFSDQLAGSYKKVLSFKFVLPDASNMAEMTRLVALVPYYIDLVGRYKLSNHARSKTEAARTKASQEAFREQQGLRQEALQRKKAEKKKLMEEAEAKLSAEALRKKEEKERARQMKKSMPKVKMLRS

SEQ ID NO: 150982 - protein, 410 aa, Oryza sativa
  Clone ID: PAT_MRT4530_51168C.1.pep
MFWKGNRLMKLVKGSKVEVLQEAEVPLGSWRGAEIVLGNGQSFYVRYDPSPVDSCAAVERVQRRLIRPCPPRDDSVCWAVGDILEAFDSYSWKIAEMVRVLGKDFYLVRLLGSSLELRTHASELRLRKHWKDGKWTVLQKDSTKCFGGSFRGQPKSGNLGSNFGKQRQPYCAMDNNLLLKNQKALEGDKSRGMKRKSSAITHPTQCSEVTRGMKRLQTPHRDGRHAALVAGVSPRLAEKVDAVDSPCLMLGEKYMHASLNKRKNGVHTTNLAGVNVDTENKFRPLTSAYPSDTESISSSVGSCSPSSSPCSSRHFYSAYQTGDICSRTDGAEAAVSERETSQHDKIIPKEDTHLLELHAYRATMLALYVCGSISWEQEALLTNLRLTLNISTDEHLAELRRPESAASTAS

SEQ ID NO: 150983 - protein, 69 aa, Oryza sativa
  unsure (1)..(69): unsure at all Xaa locations
  Clone ID: PAT_MRT4530_51169C.1.pep
DGLTXVVFPPVARPPGSGXXHFLAGAGVRGVEIAGNFIKFTAIGVYLEEGAAVPALAKKWAGKSXDELV

SEQ ID NO: 150984 - protein, 177 aa, Oryza sativa
  Clone ID: PAT_MRT4530_5116C.1.pep
PPPSPSATAASRPDPAWVARIWRCSAQRGSSASWRERRRGRHAGGRGGEVLDEPGRRRDTRRGPLPSSPSPSPPYPPPASSLPQPPPAPPPPPSAPAAGHPPARSGRTRHGSGHPPVAVPCRRGRHGTARRRRGTATAAVGDGRGGGGGGRRWRRGTAAAAGEQAWCALRASAASHG

SEQ ID NO: 150985 - protein, 728 aa, Oryza sativa
  unsure (1)..(728): unsure at all Xaa locations
  Clone ID: PAT_MRT4530_51170C.1.pep
MGKSSKKSAVEVAPTSVSVSEGKSGKKGKRNAEDEIEKAVSAKKQKTVREKVVPSKEEAKKVKKQPPPKKVESSSSEEDSSESEEEVKAQPKKTVQPKKAAQPAKEESSDDSSDDSSSDDEPAKKPVARPNKAALSTNSSSSDDSSDESLSDDEPVKKPAAPLKKPVALATNGSKKVETDSSSSDSSSDEESDEDERLPATKIKLPGQRLFQLEIYHTMWSNNDXSVVSRRQVKLLIFASVPLKMGTSGALDMVNEPQRKAEEKALELAGHDVVGRKVEQDRARESGAYTPGSGRDNRAFNTPAASSGNTIFIKGFDTSLDIHQSSDESSEESGDEPPQKKIKDSTTSGTTKPSPKATKKEISSDDESDEDDSSDESSDEDVKQKQTQAKRPDNNREGGFSGGRDFNSSGRGGRRDEPAKTPQKKIYVSKSFFILQETAVSVGSNKSATKPGQEEPKTPASNQNQATGSKTLFVGNLPYNVEQEQVKQFFQEAGEVVDIRFSTFEDGNFRGFGHVEFATAEAAKKALELAGHDLMGRPVRLDLARERGAYTPGSGRDNSSFKKPAQSSGNTIFIKGFDTSLDIHQIRNSLEEHFGSCGEITRVSIPKDYETGASKGMAYMDFADNGSLSKAYELNGSDLGGYSLYVDEARPRPDNNREGGFSGGRDFNSSGRGGRRGGRGDGSRGRGDRGRGRGFGRGDRGHGGRGTPFKQSAGTPSAGKKTTFGDDD

SEQ ID NO: 150986 - protein, 5176 aa, Oryza sativa
  Clone ID: PAT_MRT4530_51171C.1.pep
MKSNADLKAIRIVKFKESDDMKLCKEDCISDCFAMEEDDMIKATSTVNDNGVSVVIHEAKDDNKNVFEDHGMIEDKTYIVPQKYFEPEKFSIEFKNLNGEVEEDKQKEILVLQDKSNMMQDKKDQNNLEQTNSNGGEEELQVKDKDLVALEVEESELKVTGLVAVSDIELRTTEAIRCEESDRVKLTRDDLESDCSAVHTDKVLRDASLGKNFEESGANLAAADDDKNHIVDWGMKEENSISLQVETIEDKTNFMPEKFSELEKVYTGCEKLNNKKEEQEENDKINTLKDEKDHNTFEHTDSIKGEVQLPDKDKNLVTLEAEGSVLEVMHSVSLRYAELRSIETLQGEEGDGVKSMDDFLKSDCMIVQANVHNELSTPTNVDVEEVDLQDDETFYIGEPKAVKLEDVNETNIEEDDKMVLEEVESPIKNDNKTVLVEVESPVKNVCLETLETERDILSEDEKEMEVGHVNECSEIEVGLMVKEVVNKIELEEADSETKSNVDKKPIQILQFEHMDEAEFGADDSKSNYLAVNADNVQRDASLRKNIEESSASLDGADDEKNDMAYCGMKEANTMSLHVETMEEKTNFTPEKSSVPGKNYTEFEKLNDEGEEEEQNDKIVTLKDEKDHNTFEHTYSIGGEVELLVKDENLVMLEAERSVPEVMDIIAVSDAELRLIEHPHCEVTDAVKSAGDYSESDYMILEGNLHNEPSTPTDVGVETVDLQDETFYIGEPKATKLEDEDEPNTEKNDKMVVGEVETPMKNVSLESLETTENITSEDENEIKAGHLCESSENDIRFPEKEDTNKIDLEVADSVMEGYDDQKPIKILQWEHMEEAEYSTADSKSDLLTMYADKVQRDASRGMNVEESGASLEGVDGGKNDVANWGVKEGNNLILQVETMEEEINFMSEKFSDPKKFYTRFEKENDKIEEQEENDKSSTLNDKKDENTLEHTDSVGGDVKLLVKDESLVTLEAKASALEVMDLVLVSDVELSSNETLQCEESDGAKSTGDYLEDEPSTPTDVKVEEVNLQDETFYIKEPKVAKLEDEMETNTEEKDKIIVVEVESPVKHLNLETGENIKLEDEKEMEVGHLNKSRGNEMEFLVKEDAKITELAQTNLDIKNNADQRAIQNIQCINMDEAEFVTDDLKSDCLAMHADNVQRDASLTKNIEESSASLEGADDEKNNMADCRMEVGNTMSLQVVTMKEKTNFMLENSSVQENDNTGFETLNDKREEQVKNIKLNPLKDENNHNTFEHTYIIEGNVELHVKDEKLVTLETEGSELEVMDTVLVSDAELRLMEPPQCEEIDAMKSTGDFSESHCLILEANVRNEPSTSTDDVVEAADLQDETFYIEEPKEAKLADENNKMVTVEMESLVKNLSLELLESEKNVMLEYEKEMKVGHVGQSDENDVGLLVEEDAKKIKLEEADSDIKSNVDKKAFQILQCEYMDEAKFGTVDSKSNYLAVHEDNVQREASLTNNVQESSASLDSADDEKNDIADCGMKERNTMSLQVGMMEENTNFIQVQSSGLEKDCTRFEKLNDKREEEEKNEKTNTLKEEKDHNTFEHTYSIGEGVELLVKHENLVTLEAEGSVLEVMDTILVSHAKLRLMEPPQCEEIDAMKSTGDYLESYCTILEANVQNKSSTPTNFEVEVTDLQDETLYRGEPKASKLEDHSEPNTEENDKMVVVEVESPLKNVRLGSMETREYITLEEKEMDVGHLGASSGNDFQFLEKEDTHKIELVEADSSIMCNDDQKPIKKLQWEHMEEAKLGTTERSALEVMNSVLGSDVELSSIETLQCEESDRAKLTRDYLECDCVIVEANVQDEPSTPTDVEDEEVDLQDETSYIGEFKDAKLEDEKETISEEINKMVAVEVESSVNKLCLETTENITLEDEKQMGVGHLDKSSGDEVFSVKELTKKSELVHANLDINNNSEQKAIQNLQCIKIDEAELVAVDSKSDCLAVHAGNVEVDASMTKNIEESGACLEGADNSKNDVVDFRMKEGNNMSSQGETMEEKTNFMLEKYSVSEKDLKRSEKLNDVEEEQEENDKTSTLKEEKDHNTFEHAYSIRGEVGLLMKDVTLVTLEVEGSALNILDSALVSDDALRLMETPQCEQSEGVKSTGNYLESNCVTEEANVDNKPSTPIDVEVEVTNLQDQMLCIGEPKAAKLEDQNEPNTKENNKMVGVVVDSPEKHTSLETLETREHVTSEDEEEIDVGHLGESSGNDTGFLDKEDTNKIELQEADSGIQCNDDQKPIKILLWEHMEEAELGTAEGSTLEVTDSVLVSDVELSSIETVQCEESDGSKSTEDYFESDCMMEQANVQDESSTPTYVEVEEVDLPDETSYIGDPNSAKLEDEKQTVTEENDKMVIVKVESSVKNLSLEVAENITLEDEKEMEVGNLGKSSGDEVFPVKEDANITELAQAGSDIKKKSGQKAIQNLQRIEMDEAEFVTVDSKSDCLDLNSGSVQIDASLTENIEESVASLEGADNAKNVVVGCWMKEGNTMSMQVEMMEKTNFMHEKSSVPENIYTIFEQMNDEGGEEEAKEKTNTLKDVKDHYTFDHTNSIGGEMELLVKDENLVTLGAEGSALDFLDSVLMSDTELRFVEPLQYEESDGVELTGDYSKIDCVIVDANVHNEPSTPIDVEVEATDLQDETFYIGHPKVAKLEDENETNTKENNKMVGVEVDSPLKNISLETMQTRKNVILEDEEEIEVDHLIESSGNEVGFIGGEVDLLVEDGNLVTLGAEESALEVMDSVSVSYAELRSIKTFRCEESDGVKSTKDYLESDCMIVPSDVHYELSSPRNVEVEAVDLRDETFYIGETKAAKLEEKNETNTKEDDKMVLVEVESPVKNEDKTDLVELESFVKNVSLETFGTEENTMSEYVKEMEVEHFDESNENDLGFLVKEDAQNIELEEINSDKKSNADKMSIQILQLEHIDETEFGTDESKSDCLSVHLGKLQRDSSGRNNVEESGASLDSANDEKIDMADHGMKEGNVVSLQVDMMEVKTNFMPKKCTVPEKDYTGFENLNDEGEEQEENDKSNTLKDEKHHNTFELKDSAGEEVELRVKGENLVTLVTEGSALEVMDSILVSGVKLRLIEPLQCEESDGVELMEDYSESDCMIENANVNNESSTPIDVEVETADIQDETFYIGEPKTSKLEEGNKTNTEENDKIVVVEVEPPVNNLSSETLETRENITTKDEEEMEVGHLNESSGIEVGFLVKEDTNKIKLLEADSNIKSNADKKDIQILQYEHTDESEFGTNDPKSDSLFVHVDMVQRDASLGTNIEECGASLEAADNEKKDMADCGMKEGNTTSLQVETMEEKTNLISKKSSVPEKVYTGFEKLNDEAKEQEGNNRSNTLEHGKDNNTFEHTNSIRGEVEWLEKDNNLVTLLTEGSALEVMDSVSVSDDELGSIETLKCEESDGVKMTRDYLESDCLQVEATLKNEASTPTNVEVETVDLQHDKFYKREPIATKLEDENETIVDENTVFTEEGIPMENVSLKTIETGEIIMSEDKEDNKVGHVEPSGNEAGLIEKEDANGIEFKNVESDIRSNADQKDIQILHCEYVDKETNFTSKKFNKLEKVYIEFKKLNDEVEEEKNDKSNIPKEKEDRFTVGHTEESVHEVMQSVLVSDADLRSIETLQCEESNGVKSTGDYLESGCIIVETNVCNEPLAPKDVEGEVVDLQDETFYIGEPKATKSEDHNENNTEEEDKMVFAEVESPVKIDDEMVLADVESPMKNVSLETLKTEENIMLEDEREKNTSEHTDLIRAEVELLVIDENLVTLEAEGRTLEIIKSVLISDAELRSIETLQCEDSDGAKSTENYSESDHLIVEANVHIEPSIPTDVDVEVVDLQDDTVYVGEPRDAKLVGENKTKMEEDDMMVLAEVESPVKNVSLETLEAEKDILSEDKEHMEVEHVQSHENETGFIVKEVNKIEFEEADSDVRSDVDQKAIQNFQFEHMDEAEFGIEDLNSDCLTMHEDKLQRDASRGKNLEGSVASIESVDDDKNDKADCGMKEGNTISLQVETTEHNTNFMSEKSNKPEKIHTGFEKLNDEVEEQEENGKSNTLKDQKENNTCEYTDSIGGEVNLLVIDENLVTFEEERSVLEVIESFSVSDAELISIETLDCEQSEGVKLARDFSKSDWMIIEAKEYNEPSTQMDVEVETVDLEDETFHVGELRASKSEHDNETIIEEDDKLILADVESSVKNVTLETLETEKNTMLEDEEEMEVGHVVDSCENEVVCLVKEGGNKIEFEETIQIVQHVEEKTNFVPEKSSVPEKVFTEFEKLNDEVEEHVENDKNIILKNKKGRNTFEHTNKIGGDIQLLVKDKNLVTMEAERNELEVANSVVVSDPELRSIESFQCGENDGMKLTRNYLESDCMILETNVHEESSTSSDVEVEAVNLRDDTFHIRESTAAKLDDENKTNTENISVVMPNKLQKDVKLSLGKKIVSEISQKPINEDVVLSSEQAMEGDKKIELDANIEGNIVRNDIEMVTHNCEICDNCANTMEEDTNGSSHNSPTHVMDSSNTLIYIIKEAITGDEEGIDSSILVTDLQHVASGSHGGNMCPKYFRSSESNSSSRTCISSYNDTKMEYNFTDMTVTKKDKKLHQKLELITEKFLNLLSRMGANTMDFNLDHHHHKSSQQYHDNQKDLSFSCNILVLGKIGVGKSTVINSIMGEEKNKINAFDGATTNVRLVSSVVDGIKVNIIDTPGLRTNVMDQGWNKKILSTVNSYTKKCPPDIILYVDRLDSWSNHFDDIPLLKTITTILGTSIWVNTVVTFTHANSIPPDNSNGDPMTYETFIAQRSHIVQQSIQQATGDMCLINAFSFVENYLYCKRNCQGKKVLPTIQNWRKYLLILCYSTKPKYQPKASIHHKGLKEDSSIEVDDYSEVCDDEYEYGQLPTLWPLMKAQFDELMKDKNKDECAYHVKLIQGMQFNGVTQGSMPCDNDLNPLQKNRMSPILNMVIEPSFDFDDPPTHQYNLLEPTSIITRKHVLGAHTWDHEYNFDGASLEKTLVLHKPTKCFEATLVEFSKDMKKSRIHFNSSFRSKHVDDASHCLGYNIQNAWKKLAYCIWGETTTKDTKHKTVGGLSVMFLGDTMLTGVKIEDYISVGESLALLSQYLLRRHSKMALHIGLNTLRNGQINLKMSTSKMVQIALLGLVPLATSMYKSFVHSAEHN

SEQ ID NO: 150987 - protein, 48 aa, Oryza sativa
  Clone ID: PAT_MRT4530_51173C.1.pep
MAKLVAYVHHIMESARELLLIWNFSIEANNLPTIEACRIYFVKPNLAT

SEQ ID NO: 150988 - protein, 105 aa, Oryza sativa
  Clone ID: PAT_MRT4530_51174C.1.pep
GRRRRPPTPTPPPPTAPPPATLSAPRRRPQPPPPPSPLSLASYLTRTARATAQPPPRSPTSLVLVLDHHKSPKTTQEYKIPREGERERKGEAFRGARRTGSPWWW

SEQ ID NO: 150989 - protein, 562 aa, Oryza sativa
  Clone ID: PAT_MRT4530_51175C.1.pep
MASAPGDGKQGGGGGGPAVGIDLGTTYSCVAVWRHDRGEVIANDQGNRLTPSCVAFTADDDDSFVGDAAFNQSALNPTNTIFEVKRLIGRRFSDDSVQKDIKLWPFKVVAGQEDRPMIVVRHEGEERQFMPEEISSMVLAKMRETAEVYLGKTVTNAVITVPVYFNNAQRQATMDAGAIAGLNVMRIINEPTAAALAYGLEKMPVSNKGRMVLVFDLGGGTFDISLLNIDPGVNIDMGLFEVKATAGDTHLGGADFDNELVKHSLREFNRKHGSMDIESNQKALRRLRTACERAKRMLSSTMQTTIEVDSLHQGIDFRVTLTRSRFEELNKDLFSKCMEAMENCLRDAKVDKWSVDDVVLVGGSTRIPKVQKMLSEFFDGKELCRSINPDEAVAYGAAIQASILCGGTDDKRLVDMLLREVTPLSLGVETEDNCTMSVVIPRNTAIPTKKVKNFTTLYDNQINVSFPVYEGESANTKDNNLLGEFTLYGIPPAPKRVPSIDVTFDIDANGVLNVSAEHKVTGQKNSITITNRSGRLNKEEIDRMALEAERHKMKRIKQNEVV

SEQ ID NO: 150990 - protein, 50 aa, Oryza sativa
  Clone ID: PAT_MRT4530_51176C.1.pep
QTNALPGHVNWTGHLHYTYIKYIYKLSSCCIMTKTAISQNFTHNTKTYNT

SEQ ID NO: 150991 - protein, 61 aa, Oryza sativa
  Clone ID: PAT_MRT4530_51177C.1.pep
MAPSYVAVGSRDYARRGSGRRPRIEDQWLDLAPTTTLLPAQVKALHPTLCLEEEVARATMS

SEQ ID NO: 150992 - protein, 475 aa, Oryza sativa
  Clone ID: PAT_MRT4530_51178C.1.pep
MATLAPALVLLPEWGSGHLMSMLESCKRVLLAGAGGGREFSITLLVMRPPTDEAGSEVEAHVRREAASGLDIRFHRLPAVDPPADAAGVEEFIARYIHLHAPHVRDAVAGMGRPVAALVLDMFAAPMVDVARDLGVPSYVFMSSTGAMLALMLHLPVLHDRVAVEFHEVDGEKSPNYTWFVRLGDRFMDATGIIANTADELEPGPLAAIADGRCVPGRAAPPVYPIGPVLSLGGNDKRDSSEPPHECIAWLDGQPPASVVFLCFGSMGWFEAAQVVEITAALERSGHRFLWVLRGPPPAAESGTGAPDGSEHPTDANLDELLPEGFLERTKGRGMVWPTWAPQKEILAHPAIGGFVTHGGWNSVLESLWHGVPMAPWPLYAEQHLNAFELVRDMGVAVPLGVDRERDNFVEAAELERAVRSLMDDASEEGKKAREKAAEMKAVCRSAVAAGGGSSHAALQRLSEALHQGAALPKN

SEQ ID NO: 150993 - protein, 294 aa, Oryza sativa
  Clone ID: PAT_MRT4530_51179C.1.pep
MAALAQALVLLPEWGSGHLMSMLESCKRVLLAGAGGGREFSITLLVMRPPTDEAGSEVEAHVRREAASGLDIRFHRLPAVDPPADAAGVEEFIARYIHLHAPHVRDAVAGMGRPVAALVLDMFAAPMVDVARDLGVPSYVFMSSTGAMLALMLHLPVLHDRVAVEFHEVDGEVDVPGLPPLPPASMPCPVVDKKSPNYTWFVRLGDRFMDATGIIANTADELEPGPLAAIADGRCVPGRAAPPVYPIGPVLSLGGNDKRDSSEPPHECIAWLDGQPPASVVFLCFGSMGWFEAA

SEQ ID NO: 150994 - protein, 1123 aa, Oryza sativa
  unsure (1)..(1123): unsure at all Xaa locations
  Clone ID: PAT_MRT4530_5117C.1.pep
MTVRETLDFSRWCLGIGSRYDMLTEISRRERNAGIKPDPEIDAFMKATAMQGQETNIITDLILKVLGLDICADTIVGDEMIRGISGGQMKRVTTGEMLTGPARALLMDEISTGLDSSSTFHIVKFIRHLVHIMNETVMISLLQPPPETYNLFDDIVLLSEGYIVYHGPRENILEFFEASGFRCPQRKAVADFLQEVTSKKDQQQYWFLDKEPYCYVSVPEFAERFKSFYIGQQMMKEQHIPFEKSKIHPAALTTMKNALSNWESLKAVLCREKLLMKRNSFLYIFKVTQLIILAFLSMTVFLRTKMPHGQFSDGTKFLGALTFNLITVMFNGLSELNLTVKKLPVFYKHRDFLFFPPWTFGVANILIKVPVSLVEATVWVVITYYVMGFAPAAGRFFRQFLAFFVTHLMAMALFRFLGAILQTMVIAISFGMLVLLIVFVFGGFVIRKXQNAISINEFLASRWAIPNNDTTIDAKTLGXILQKLALLAIRSANALVIDEHNETELYTETRNEEHRSRTSTTTSSIPTSANGEGNRPTQSQFVLPFQPLSLCFNHLNYYVDMPSEMKQQGLMESRLQLLSDISGAFRPGLLTALVGVSGAGKTTLMDVLAGRKTSGTIEGSITLSGYSKKQETFARISGYCEQADIHSPNVTVYESILYSAWLRLPSDVDSNTRKMFVEEVMALVELDVLCNAMVGLPGVSGLSTEQRKRLTIAVELVANPSIIFMDEPTSGLDARAAAIVMRTLLLLKRGGRVIYAGELGDHSHKLVEYFETILGVPSITEGYNPATWMLEVSSTLEEARMNVDFAEIYANSLLYRKNQELIEELSIPPPGYRDLLFATKYSQSFYIQCVANLWKQYKSYWKNPSYNSLRYLTTFLYGLFFGTVFWQKGTKLDSQQDLYNLLGATYAAIFFIGATNCMSVQPVVSIERAVYYRESAAGMYSPLSYAFAQASVEFIYNIIQGILYTVIIYAMIGYDWKASKFFYFLFFIVSSFNYFTFFGMMLVACTPSALLANILITFALPLWNLFAGFLIFRKAIPIWWRWYYWANPVSWTIYGVIASQFGGNGGSISVPGGSHVAMSQILEDNVGVRHDFLGYVILAHFGFMAAFVLIFGYSIKFLNFQKR

SEQ ID NO: 150995 - protein, 103 aa, Oryza sativa
  unsure (1)..(103): unsure at all Xaa locations
  Clone ID: PAT_MRT4530_51180C.1.pep
MADREEQYTARSMNKSDMRFRDRQCQPQVQDSPLYACRQVLYRHVTGRKRFQPMFLRPGALXLRMQCIHLLQDVSREYRSAAIRLMKRSYDESLQMPLHQGWY

SEQ ID NO: 150996 - protein, 41 aa, Oryza sativa
  Clone ID: PAT_MRT4530_51181C.1.pep
GKYVLISYVPKIGFPYVVMRFQDIPLSKKKDLPPNFVPSAF

SEQ ID NO: 150997 - protein, 212 aa, Oryza sativa
  Clone ID: PAT_MRT4530_51182C.1.pep
MAFSSAFSYRCRFWGWFYNKWYQSLREIHGRGTREVLHAATTTQGVQGQTWTQGRARRRSTEFDRWNRTLLAAAGTINGCFNREMTKRGARVDGGGSDWRINRWVGHFGRVARTFRWSIGVRSGLRVEVEPQRWRKPRVEPLLEAVLDVSSTRRLQRFNAHARRRLKHTSRCMPARLRSQAFHQSHMAIISAGDSRNNGESLDPATTAIHII

SEQ ID NO: 150998 - protein, 94 aa, Oryza sativa
  Clone ID: PAT_MRT4530_51183C.1.pep
VQHSVNFLDLCLHIVKQECLPYVLPFLQHINYRISLFRSMTVTVGCLPTHVQVVVVLLCGFPSASGSIAHPTVAAQVTNLSSIRCRAYAARVYV

SEQ ID NO: 150999 - protein, 100 aa, Oryza sativa
  Clone ID: PAT_MRT4530_51184C.1.pep
MWTRVPDFPKGSDKQRFGRSRDTNRSDFLNAHALEPRNSRTTCPLVITRAETRMTLPRSNAAPGQILDVNLFGRFPLTWKEFGCGTKTIGTFVESSLHLI

SEQ ID NO: 151000 - protein, 95 aa, Oryza sativa
  Clone ID: PAT_MRT4530_51185C.1.pep
TRARARAYTAMAIAAAMGVGLPLTTPPTPPHPHRATTLRLLRRGRPAAAAARGRPPPPPPPLRRGGGGGRSSSPRARCPTTKSYADLPTTRTPAR

SEQ ID NO: 151001 - protein, 316 aa, Oryza sativa
  Clone ID: PAT_MRT4530_51186C.1.pep
MGMGMRRERDAEAELNLPPGFRFHPTDDELVEHYLCRKAAGQRLPVPIIAEVDLYKFDPWDLPERALFGAREWYFFTPRDRKYPNGSRPNRAAGNGYWKATGADKPVAPRGRTLGIKKALVFYAGKAPRGVKTDWIMHEYRLADAGRAAAGAKKGSLRLDDWVLCRLYNKKNEWEKMQQGKEVKEEASDMVTSQSHSHTHSWGETRTPESEIVDNDPFPELDSFPAFQPAPPPATAMMVPKKESMDDATAAAAAAATIPRNNSSLFVDLSYDDIQGMYSGLDMLPPGDDFYSSLFASPRVKGTTPRAGAGMGMVPF

SEQ ID NO: 151002 - protein, 113 aa, Oryza sativa
  Clone ID: PAT_MRT4530_51187C.1.pep
MGAWRHRPSAQAPRACRSASAVTLAMMGWLAYFLDGLSLLDCFLDGLMDRGFWENHVDAGKPNIDVFDEVQQEISNDIVARVIRDAHGLKACMTGSCQCPPIPIVRALRIWRR

SEQ ID NO: 151003 - protein, 90 aa, Oryza sativa
  Clone ID: PAT_MRT4530_51188C.1.pep
MQEVAGGTTALSGAGVGIDSTWRRLGRTCVGLVLVLHCCYERPDIDGLRRWRGEPVIVYWFIPIYEREAGQWPHMATSCERTVVAWHSWA

SEQ ID NO: 151004 - protein, 108 aa, Oryza sativa
  Clone ID: PAT_MRT4530_51189C.1.pep
SIIGSWSDLIWCELFVQLDDWVLCRLYNKKNEWEKMQQGKEVKEEASDMVTSQSHSHTHSWGETRTPESEIVDNDPFPELDSFPAFQPAPPPATAMMVPKKESMDDAT

SEQ ID NO: 151005 - protein, 46 aa, Oryza sativa
  Clone ID: PAT_MRT4530_5118C.1.pep
LPSFLLFSGDPLAAMDLEKSTSTTASLKKLQDDGALPGRRTMQREA

SEQ ID NO: 151006 - protein, 291 aa, Oryza sativa
  Clone ID: PAT_MRT4530_51190C.1.pep
MAAAIDLSGEELMRALEPFIRDASGSPPVCSQFSPTSPFSFPHAFAYGGGLAQQPELSPAQMHYIQARLHLQRQAAQAGPLGPRAQPMKASSSSASAAGAAATPPRPQKLYRGVRQRHWGKWVAEIRLPRNRTRLWLGTFDTAEEAALAYDQAAYRLRGDAARLNFPDNAASRGPLHASVDAKLQTLCQNIAAAKNAKKSSVSASAAATSSAPTSNCSSPSSDDASSCLESADSSPSLSPSSAATTAETPATVPEMQQLDFSEAPWDEAAAFALTKYPSYEIDWDSLLAAN

SEQ ID NO: 151007 - protein, 114 aa, Oryza sativa
  Clone ID: PAT_MRT4530_51191C.1.pep
AEKEQTHTERTKTEKSTLDPDRPSLLQEQLHRDTTKTRQETKPKPGWLSTEFSQLQTYESCQKRPFFGMLPLRHLSAETFERFRFHDPGGAPSGQPKNTVCMAKSNQLASPQIL

SEQ ID NO: 151008 - protein, 70 aa, Oryza sativa
  Clone ID: PAT_MRT4530_51192C.1.pep
NVQWLAVSSDKGTVHIFSLRVRVAGEDASNEQRSLEGPRMDHQNSSSSIDPLIQTNTGSNASSSLSFMKG

SEQ ID NO: 151009 - protein, 117 aa, Oryza sativa
  Clone ID: PAT_MRT4530_51193C.1.pep
MPGSSSPTSAAVAQTLANHRCRHIRWGEGGGEVPLPSTCSCLPSSPTRSMPSDPLLPGPPSAVAYRGGVVAGGGRGRCGGSQRKGEAQRLEEEGGGVAVGGGGGVAAEMRRGGAQSE

SEQ ID NO: 151010 - protein, 441 aa, Oryza sativa
  unsure (1)..(441): unsure at all Xaa locations
  Clone ID: PAT_MRT4530_51194C.1.pep
MGECKVGGGGGCGVCLIKLFGETIPVPEPGACARGDXVDKDLQHSGSSTTEPKTQENTVQDSTSPPPQPEVVDTEDSSADKNSSENQQQQGDTANQKEKLKKPDKILPCPRCSSMDTKFCYYNNYNINQPRHFCKNCQRYWTAGGAMRNVPVGAGRRKSKSVSAASHFLQRVRAALPGDPPLYAPVKTNGTVLSFGSDLSTLDLTEQMKHLKDKFIPTTGIKNTDEMPVGLCAEGLSKTEESNQTNLKEKVSADRSPNVAQHPCMNGGAMWPFGVAPPPAYYTSSIAIPFYPAAAAAVAAYWGCMVPGAWNAPWPPQSQSQSVSSSSAASPVSTMTNCFRLGKHPRDGDEELDSKGNGKVWVPKTVRIDDVDEVARSSIWSLIGIKGDKVGADHGRGCKLAKVFESKDEAKASTHTAISSLPFMQGNPAALTRSVTFQEGS

SEQ ID NO: 151011 - protein, 134 aa, Oryza sativa
  Clone ID: PAT_MRT4530_51195C.1.pep
MEGLLELKVFIECVQKIGSLIPLLWDGEFQSRKWRSNIQTCREVQISREEAEFRTYRFAENMHCNANKSGVADYTCHAKELGVAEVPRQRQIDLVNDNVCHEAPFDMPRVTNGMAVQIGHTDYNGVAGSFLEIS

SEQ ID NO: 151012 - protein, 101 aa, Oryza sativa
  unsure (1)..(101): unsure at all Xaa locations
  Clone ID: PAT_MRT4530_51196C.1.pep
VVHSIGRSPLALEHEQVLLEXSRAPRRGWTEIGRLFSGREDXAVKNHWHVIMVRRCRXRIWLSHRRGGASAAGAAKGDESPVRISNGEKTATRPPATNGSG

SEQ ID NO: 151013 - protein, 193 aa, Oryza sativa
  Clone ID: PAT_MRT4530_51197C.1.pep
MQAAAPAWAPPIVSSASAVFARPRRGARAGAGAVRCELAASAPSSAAGSMAPRWAQRTIVIPPQRRGCHLITPKIVKGIKDDLSEFKCGMAHLFLQHTSASLTINENYDSDVQFDTETFLSRIVPEGPSAPWKHTIEGPDDMPAHIKSSMFGCALTIPITDGRLNMGTWQGIWLCEHRDYATPRQIVITLNGI

SEQ ID NO: 151014 - protein, 107 aa, Oryza sativa
  Clone ID: PAT_MRT4530_51198C.1.pep
EDIITRVAHINNDAVSSIVSSLNSFSCLALPLDELLQLLLLKPLLSDLTPVHVYPCYALQVYHRHWLMLPTQNMFELSQQIVVFDYQTSRQFSLHGNCLLGERGSFV

SEQ ID NO: 151015 - protein, 61 aa, Oryza sativa
  Clone ID: PAT_MRT4530_51199C.1.pep
CLVAKTKTYTRSQIITKARSPPRLQTSRPPTRQPRPHTHPRTALPTARRGRGRPLRRRTIC

SEQ ID NO: 151016 - protein, 257 aa, Oryza sativa
  Clone ID: PAT_MRT4530_5119C.1.pep
MAPLVRLPPSSTPSPAATATILYVVIVASRDYRRRHKGPGRCFPLVNRHWTIVAAANPRSIAAISSPLGPLAAAARQRAHGDTIPGYPTGGLRLQCRGTFDIVADALGQLQQVNPGLVGPVQDIWFSAGTSFYIGSLDFTANKAGALRPLNPSIFDPTATSLVPFDLAKINFHDDRSLHDKVATTPTRRPGHHGRSKHRRPRLPTEFGPDGSDSSTYVVSRLRDIIILGYILRMRGGPLMVTAQYGGGFSKYQEGIE

SEQ ID NO: 151017 - protein, 83 aa, Oryza sativa
  Clone ID: PAT_MRT4530_511C.1.pep
NQTSLRFADSMVKTGDLHHSDTKPAFSGRKIPIVPLGSNIRSCVSQAPANRVFFVAHSSEDPYFCLQQELVNVSVASSSCSRT

SEQ ID NO: 151018 - protein, 363 aa, Oryza sativa
  Clone ID: PAT_MRT4530_51200C.1.pep
MENTQFSRPKAVPYNDSWEIPNSDYILLYLNDKQTGKITCMVCGKEGHYTCECPMKNKEKYVICTLCGKVGHCHLWCCHQNESERRACRRCGEKGHYDNWHHLGCSSCEKHHPLGRCPMGKITCFLCEGNGHVPVQCHLSPMLTAITQNQRESFNQGEEGHSALRNPNRCHVPSSDKANVAADKAPNQSLGVTCFNCGGKGHYSNKCPQKQKQHGVRSTNAAAMKDKTPNLTGVTCFDCGDRGHFSYTCPQNLLEVMLTAELEPHDDTYERQPKADNGTVPTVLSLNCGEASHCGRNNPMKSLESSSDKINSTAMTYKAPKRVLGVICFNCHEEGHYANRCPQKQQGINSGTSQSPIKRQRKE

SEQ ID NO: 151019 - protein, 136 aa, Oryza sativa
  Clone ID: PAT_MRT4530_51201C.1.pep
MRRLERDSSGGDSKGGAAGAAEQGWVKLEADEEEEERRRRARVLGVATCHSAVRRVAAAPRRRWWWVPDSAPLLPRLRVELSQLRPSRRRCSPVVAGRREKEKKERKRDGELTCGPKGIFDISRDFSLLLNRKSLF

SEQ ID NO: 151020 - protein, 399 aa, Oryza sativa
  Clone ID: PAT_MRT4530_51202C.1.pep
MAMAMASPPACPFLLSLSAGATAISTVSAAYGSVSAPRAPLFLLASPRPVPPRRPLAAGSSSPKAAAPAAVEIPEEYVDDVDAVNIAQDVTQLIGKTPMVYLNNVVDGCVANIAAKLEYMGPCRSVKDRIGLSMINDAEEKGLIFPNKTILVEPTTGNTGIGLASVAAARGYKLIATVPSSIDVERCVLLRAFGAEIVLTDPNKGLKGALDKAEEIVSKTPNAYMFQQFNNSANSEIHFQTTGPEIWEDTLGTVDILVASIGTGGTITGTGRYLKMMNKDIKVIGVEPAETSVISGDNAGYIPSILDVQLLDEVVKVTTTEAVDVARELALKEGLLVGISSGAATVAAINVAKRPENAGKLIAILKGEVPGRLQRVVPEILKRHRHWSASQKVEIAHGC

SEQ ID NO: 151021 - protein, 1220 aa, Oryza sativa
  unsure (1)..(1220): unsure at all Xaa locations
  Clone ID: PAT_MRT4530_51203C.1.pep
MAAVRVVAPAPSVLLLVAAAVVLLHLARAIAGAADEAAALLAFKDASVAVDPXGALAGWANSTTPGSPRPVGPAVSCAAGRVRALDLSGMSLSGRLRLDALLALSALRRLDLRGNAFHGDLSRHGSPRRAAPCALVEVDISSNTFNGTLPRAFLASCGGLQTLNLSRNSLTGGGYPFPPSLRRLDMSRNQLSDAGLLNYSLTGCHGIQYLNLSANQFTGSLPGLAPCTEVSVLDLSWNLMSGVLPPRFVAMAPANLTYLSIAGNNFSMDISDYEFGGCANLTLLDWSYNRLRSTGLPRSLVDCRRLEALDMSGNKLLSGPIPTFLVELQALRRLSLAGNRFTGEISDKLSILCKTLVELDLSSNQLIGSLPASFGQCRFLQVLDLGNNQLSGDFVETVITNISSLRVLRLPFNNITGANPLPALASRCPLLEVIDLGSNEFDGEIMPDLCSSLPSLRKLLLPNNYINGTVPSSLSNCVNLESIDLSFNLLVGQIPPEILFLLKLVDLELVDLVLWANNLSGEIPDKFCFNSTALETLVISYNSFTGNIPESITRCVNLIWLSLAGNNLTGSIPSGFGNLQNLAILQLNKNSLSGKVPAELGSCSNLIWLDLNSNELTGTIPPQLAAQAGLITGAIVSGKQFAFLRNEAGNICPGAGVLFEFLDIRPDRLANFPAVHLCSSTRIYTGTTVYTFRNNGSMIFLDLSYNSLTGTIPASFGNMTYLEVLNLGHNELTGAIPDAFTGLKGIGALDLSHNHLTGVIPPGFGCLHFLADFDVSNNNLTGEIPTSGQLITFPASRYENNSGLCGIPLNPCVHNSGAGGLPQTSYGHRNFARQSVFLAVTLSVLILFSLLIIHYKLWKFHKNKTKEIQAGCSESLPGSSKSSWKLSGIGEPLSINMAIFENPLRKLTFSDLHQATNGFCAETLIGSGGFGEVYKAKLKDGNIVAVKKLMHFTGQGDREFTAEMETIGKIKHRNLVPLLGYCKIGDERLLVYEYMKNGSLDFVLHDKGEANMDLNWATRKKIAIGSARGLAFLHHSCVPHIIHRDMKSSNVLLDGNFDAYVSDFGMARLMNALDSHLTVSMLSGTPGYVPPEYCQDFRCTTKGDVYSYGVVLLELLTGKKPIDPTEFGDSNLVGWVKQMVEDRCSEIYDPTLMATTSSELELYQYLKIACRCLDDQPNRRPTMIQVMTMFKEFQVDSGSNFLDDFSLNSTNMEESSEKSV

SEQ ID NO: 151022 - protein, 48 aa, Oryza sativa
  Clone ID: PAT_MRT4530_51204C.1.pep
MPRVCGCPEVLMCAHVNQMNGRGVTCRARINSRMVPPRHLSRVDWWTP

SEQ ID NO: 151023 - protein, 66 aa, Oryza sativa
  Clone ID: PAT_MRT4530_51205C.1.pep
YSVQRYERTTTCFNSTKLLLDVLHTVLQDVTINLNTSHILLMSLCAGCRTIRSNTWCVIIRICNNK

SEQ ID NO: 151024 - protein, 45 aa, Oryza sativa
  Clone ID: PAT_MRT4530_51206C.1.pep
RARRVLNQGPLPRRAWRMPSQLVKRARSQPPQLGDGANISRDDPT

SEQ ID NO: 151025 - protein, 82 aa, Oryza sativa
  unsure (1)..(82): unsure at all Xaa locations
  Clone ID: PAT_MRT4530_51207C.1.pep
PCXRNRWXPTIKWGGRTIKMVWKWGAWREVWGKSSSINFMVHLSPNCSFIKXMSSIXEXIPSIXEXMPSIIKMMCSIIKIMP

SEQ ID NO: 151026 - protein, 75 aa, Oryza sativa
  Clone ID: PAT_MRT4530_51208C.1.pep
SHMILYKLVATFMQGTFCPQPARSCSPHLINAKAALITRTCKSQRPQQQCHLGTTKLYISEQMLRDFSTAKVSNV

SEQ ID NO: 151027 - protein, 75 aa, Oryza sativa
  Clone ID: PAT_MRT4530_51209C.1.pep
MAARGSLAGHDDDGMRSLLTPGTYGCSGWYLGTHETTTTTSASPTFAGRDPHDRGPLAATPEAEPPGPYPDPDEE

SEQ ID NO: 151028 - protein, 68 aa, Oryza sativa
  Clone ID: PAT_MRT4530_5120C.1.pep
SIHASNTSQIIPPTHIGIHHWPYPSSHSDIIAFKLHNFNRDTSILGRSVTLHKAQTMLTRTKMGFLHA

SEQ ID NO: 151029 - protein, 47 aa, Oryza sativa
  Clone ID: PAT_MRT4530_51210C.1.pep
MPLFRAKTECKLPRAAHESGDDHSVLEVGTAETHWRHPPICGVGNTE

SEQ ID NO: 151030 - protein, 185 aa, Oryza sativa
  unsure (1)..(185): unsure at all Xaa locations
  Clone ID: PAT_MRT4530_51211C.1.pep
FALALAASLLLALALHVCLLCHHVSGGAAPWPPAAASYEWRHHLQRRAALAADRRRRERRRRRRRRHRRRXVITGRGRSVMXRRRARIPGRRRRRRRRRSCPRRRRQPGVHVRGAGAGEAEADERHVRRHPPPRPQPPGEGGGGQDGGAKAGAPARARPPGNGGGGAALEDPSLRTRACDVIALL

SEQ ID NO: 151031 - protein, 94 aa, Oryza sativa
  unsure (1)..(94): unsure at all Xaa locations
  Clone ID: PAT_MRT4530_51212C.1.pep
PFRERRQSAWXITAXWDVLAFVLLLVIGYLWAPSQSSQRYAYSGEAADDDDEESQSLTKGTDGDVGMVKVDKDRSGGVSSAFSLEDEAEEDKRE

SEQ ID NO: 151032 - protein, 523 aa, Oryza sativa
  Clone ID: PAT_MRT4530_51213C.1.pep
MDLLRDRRLGALLVVVLVLVSGAAVEASIHTYDREPFRGGGERVPPLRGAREGVVADGADLAAPRLLLHQMLGFLTVRFTNVTFWRTPESAESHAKMAHSTGLVQAILFEAADRDNIGGSAYGGQRSICCTPDLAKLEGCKQGEVIRRPSSDDPDWPYVLDTHFSGSHLSVKLEDEVVRITKTGMYNLFFISCDPKLRGLSMSGKTVWRNPGGYLPGRMAPLMKFYVFMSLAYLLVMVVWSSQYIRFWRDIMPIQNWITLIIALGLFEMTLWYFEYLNFNSSGVRPIGITTWVVTVGAIRKTISRLLILSISMGYGVVRPTLGGLTSKVLLLGLTYFLASELLDIAENVGTINDISGKARLFLVLPDAFLDAFLILWIFTSLSRTLEKLQARRSSVKLDIYRKFTNALAVSVIASVAWIGYEVYFKATDPFSERWQSAWIITAFWDVLAFVLLLVICYLWAPSQSSQRYAYSGEAADDDDEESQSLTKGTDGDVGMVKVDKDRSGGVSSAFSLEDEAEEDKRE

SEQ ID NO: 151033 - protein, 680 aa, Oryza sativa
  unsure (1)..(680): unsure at all Xaa locations
  Clone ID: PAT_MRT4530_51214C.1.pep
MAPPPPSPPCRPRVKPERALLCFSLLLLLTATTANASITDCPTTSSTNSSHVDDGAFGANLRALLSSLSAAAAASSSGFAENATGAAPDTAYGLAQCRGGIVGGGNGTSCRSCLDDSVRDAAKACPGEKSAVIISDYCLVRYSNASFAGAADERTVKLWWNTDNATQPERFKSLLGTLMGNLTDAAARASSPLMFAAGETDLPPFTKIYGMAQCTRDLAAGDCYRCLVGAVNNIPKCCDGKQGGQVITRSCSIRFEVYPFFDAQAAKAAMSPAPAPAPVTTPTGVNGSNHTVSKSVIVPVTVGVAVLLVVILLLIALCLCKRNRKPHKHMMIGSVDLGDEDEMRGSESLLYDLSTLRAATANFSEENKLGEGGFGPVYKGTLQNGQEIAVKRLSATSHQGQLEMKNEVVLVAKLQHKNLVRLLGCCIEEREKILVYEFLCNKSLDTILFDTSRQQDLNWEQRFKIIEGIGRGLLYLHEDSRLKIIHRDLKASNILLDVDMNPKISDFGLAKLFNMEASVANTSRIAGTYGYMAPEYALHGIFSAKSDVFSYGVLLLEIVTGRRNTCLHDSEDLLAFVXPRKSYLKFKSCSTACPAAGRRPQELLRCIHVGLLCVQEDPQLRPGMAAVVVMLNSRSVTLPAPSAPAFVSASRGIGGSPPPAAAAGDAPARSTDHEVPTAAR

SEQ ID NO: 151034 - protein, 88 aa, Oryza sativa
  Clone ID: PAT_MRT4530_51215C.1.pep
MEYGEVVMDSASLGTAHEEVEYLNTVIDNPAAYNRPPREGLAAASKWQCELDGIAALAVGHRRCPDDLRNKPCSENKPCRYSRREIWE

SEQ ID NO: 151035 - protein, 271 aa, Oryza sativa
  unsure (1)..(271): unsure at all Xaa locations
  Clone ID: PAT_MRT4530_51216C.1.pep
GAKKAVLVGHSAGCLVAVEAYFEAPERVAALXLVAPAIFVPVFRRKGXKENGVGEQEWQNKKDSNDSNLPTNPLNRIWGKFLELCLWIAGFLMNMIRAIXGVVRSLYYKSVVAVLRSSVGVMLVRLIMDKFGILAVRNAWYDPSKVTDHVIQGYTKPLRSQXGGEMALLEYTISMIMDSISSSKVPVSERLSEISCPVLVVSGDTDRLVPRWNTERVARAIPGAGFEVIKNSGHLPQEERPEEFVSVVERFLRRAFGRPNNEQEQVLQAAV

SEQ ID NO: 151036 - protein, 77 aa, Oryza sativa
  unsure (1)..(77): unsure at all Xaa locations
  Clone ID: PAT_MRT4530_51217C.1.pep
TPWXCRPNIVEXXGXYERVQLHEXXEXXARXPXXAPKDWRPSASGLAGSRKXVXXSAXEGSARRISSATAXLLRXRG

SEQ ID NO: 151037 - protein, 481 aa, Oryza sativa
  Clone ID: PAT_MRT4530_51218C.1.pep
MPMHLPRSLQYPPSTPHPLHSTAFSHSLRPRRPNGPPPAFASAEFPGSVPDSAQMPPRRRRRRSVAGIDQDDLLDPDALADPDSSFYEINGVRVHHKVCTHEDSSDQSPDSAITNADQNQIGLPIVLLHGFGSSVFSWTHIMRPLARIAGAKVLAFDRPAFGLTSRTIWSGDDTKPINPYSMAFSVMATLAFIDQLGAKKAVLVGHSAGCLVAVEAYFEAPERVAALVLVAPAIFVPVFRRKGVKENGVGEQEWQNKKDSNDSNLPTNPLNRIWGKFLELCLWIAGFLMNMIRAIGGVVRSLYYKSVVAVLRSSVGVMLLIASSMDTLVNVSTKVRLIMDKFGILAVRNAWYDPSKVTDHVIQGYTKPLRSRGWEMALLEYTISMIMDSISSSKVPVSERLSEISCPVLVVSGDTDRLVPRWNTERVARAIPGAGFEVIKNSGHLPQEERPEEFVSVVERFLRRAFGRPNNEQEQVLQAAV

SEQ ID NO: 151038 - protein, 68 aa, Oryza sativa
  Clone ID: PAT_MRT4530_51219C.1.pep
QQDGASLFGAVPPPTWRGDAEVARGTYIPCSLPSDSAALLGKERAGGFAGRTAGWGKIGPAEGGMPGN

SEQ ID NO: 151039 - protein, 172 aa, Oryza sativa
  unsure (1)..(172): unsure at all Xaa locations
  Clone ID: PAT_MRT4530_5121C.1.pep
TGTKNAYLVPVGVTNSLAIFKALWXSPTEPKQRFFGWLVLHQKILTAENLLRRHWPCNWICYLCTSAFEDSCHLAKDCPYTVSVWTLVTNWLGYNSAALQPHQISNLSQRWDFLSSLALAERRRKILTALISTWWNVWLERNRRIFHQISRDEQQVAFIIKENIDQIRLSRL

SEQ ID NO: 151040 - protein, 107 aa, Oryza sativa
  Clone ID: PAT_MRT4530_51220C.1.pep
MAFMSSSTSMTQRPPGENDIISSSVATTNRDVPIGITVMSFNDVAASGSAGSGDGAATLRWCLAGCFQVAPVDNIMMSFNNIAASVTMLALVMGQQLFGGVQLDAPQ

SEQ ID NO: 151041 - protein, 159 aa, Oryza sativa
  unsure (1)..(159): unsure at all Xaa locations
  Clone ID: PAT_MRT4530_51221C.1.pep
VVQPINGDPFIGSLETPVTSSPLIAWXLSNLPGYRTAVNPLLRGVEVGLAHGFFLVGPFVKAGPLRNTAYAGSAGSLAAAGLVVILSMCLTIYGISSFKEGEPSIAPSLTLTGRKKQPDQLQTADGWAKFTGGFFFGGISGVTWAYFLLYVLDLPYFVQ

SEQ ID NO: 151042 - protein, 49 aa, Oryza sativa
  Clone ID: PAT_MRT4530_51222C.1.pep
YNKPFIYLNMYWAKKPQHIYITMGSDDRILKHTARRVQQSNLLAYIIWL

SEQ ID NO: 151043 - protein, 200 aa, Oryza sativa
  Clone ID: PAT_MRT4530_51223C.1.pep
MSMVTSFNLLMSQTAPPVLKAPFGAALRSAGKPAAALALQRKSPRLLVRANNSPKSPADTGHPFGIAPFALVHPKFPPTSGNRWRITEDDDYVKLWFHVGEIDREKLKVRIEHDTVLLVSYGGAGDETSTPANSLDVRLLLPNKPYDTAKVEAELTFGTLLVTVAKRKPLQGRDKVGIPITPAPSNEKTTTATGQTGSET

SEQ ID NO: 151044 - protein, 77 aa, Oryza sativa
  Clone ID: PAT_MRT4530_51224C.1.pep
LFKRHIKIKEYRILDFAAENRGEGRTPLPWPARLAIAKGVARGLAYLHQTLPLFHRPPHGDLKSSNVLVVFPGPGGK

SEQ ID NO: 151045 - protein, 54 aa, Oryza sativa
  Clone ID: PAT_MRT4530_51225C.1.pep
YVKLTFLWESNCVSMLVRRLFAHILEFYLQLSLTLMLHPYLVMLVTLLFWTTNK

SEQ ID NO: 151046 - protein, 1222 aa, Oryza sativa
  Clone ID: PAT_MRT4530_51226C.1.pep
MEDDEYEEGMEMEMGGHHHPHHGGGYGAEEYGAVGGEEMEDEEADGDAPDEEEITQEDAWAVISAYFEEKGLVRQQLDSFDEFIQNTMQEIVDESADIEIRPESQHNPGRQAEFAETLHKISFGQIYLSKPMMTEADGETATLFPKSARLRNLTYSAPLYVDVSYRVMKKGHDCEEVTETMEYPKVFIGKVPIMLRSSYCTLFQQSEKDLTELGECPYDQGGYFIINGSEKVLIAQEKMSTNHVYVFKKRQPNKYAYVAEVRSMAENQNRPASSMFVRMLSRAGAKGGSSGQYIRATLPYIRADIPIIIVFRALGFVADKDILEHICYDFSDTQMMELLRPSLEEAFVIQNQQVALDYIGKRGATVGVTKEKRIKYAKEILQKEMLPHVGVGEFCETKKAYYFGYIIHRLLMCALGRRAEDDRDHYGNKRLDLAGPLLGGLFRMLFRKLTRDVRSYVQKCVDNGKEVNLQFAIKAKTITSGLKYSLATGNWGQANQAGTRAGVSQVLNRLTYASTLSHLRRLNSPIGREGKLAKPRQLHNSHWGMMCPAETPEGQACGLVKNLALMVYITVGSAANPILEFLEEWGTENFEEISPAVIPQAAKIFVNGCWVGIHRNPDLLVKTLRRLRRQIDVNTEVGVVRDIRLKELRLYTDYGRCSRPLFIVENQRLLIKKRHIRALQQRETPEEGWHDLVAKGFIEYIDTEEEETTMISMTINDLIGARHNPEEAYSETYTHCEIHPSLILGVCASIIPFPDHNQSPRNTYQSAMGKQAMGIYVTNYQLRMDTLAYVLYYPQKPLVTTRAMEHLHFRQLPAGINAIVAIACYSGYNQEDSVIMNQSSIDRGFFRSLFFRSYRDEEKKMGTLVKEEFGRPNRENTMGMRHGSYDKLDDDGLAPPGTRVSGEDVIIGKTSPIPQDDAQGQATRYTKRDHSTSLRHSESGMVDQVLLTTNADGLRFVKVRMRSVRIPQIGDKFSSRHGQKGTVGMTYTQEDMPWTIEGITPDIIVNPHAIPSRMTIGQLIECIMGKVAAHMGKEGDATPFTDVTVDNISKALHKCGYQMRGFETMYNGHTGRKLTAMIFLGPTYYQRLKHMVDDKIHSRGRGPVQILTRQPAEGRSRDGGLRFGEMERDCMIAHGAAFFLKERLFDQSDAYRVHVCEKCGLIAIANLKKNSFECRGCKNKTDIVQVHIPYACKLLFQELMAMAIAPRMLTQDNKTGKDQKKR

SEQ ID NO: 151047 - protein, 100 aa, Oryza sativa
  unsure (1)..(100): unsure at all Xaa locations
  Clone ID: PAT_MRT4530_51227C.1.pep
MTVVMVGIVSNTLQSSLGSHLSRPGEPWIKRSCGRFSRTTRFGRTXGWPNPAXFRLVASSAASLCRLVNFGLIHRVKSAFLAHSYISLSLDIVRLIYRPC

SEQ ID NO: 151048 - protein, 181 aa, Oryza sativa
  Clone ID: PAT_MRT4530_51228C.1.pep
MSTSFPPPLSTSLPLSSPLHGRRQRSSWARATGAGGWDWERSRQFVPAATAASWLATVAAASANGIIGTRVCVIGSGPTVCIIRTRPTVHTSVVYVACAELKPVLFEGFFGNDIATGRQLTTTSTDVENFPGFPNGILDADLMDRCRAQPVHFGTRIVSETVTAVDPSSCPFRVANLPRRR

SEQ ID NO: 151049 - protein, 111 aa, Oryza sativa
  Clone ID: PAT_MRT4530_51229C.1.pep
MEYRCSTSPLGDPKEISNSGNVCNLPKAKTIQGQQLMRGSGYSSMMYPNVEDYYDGIQGCHHLPSTSDKYVGYTTNKAEPGTAPFGPFFLVDTNFEALSPLAWWIGPFGGV

SEQ ID NO: 151050 - protein, 64 aa, Oryza sativa
  unsure (1)..(64): unsure at all Xaa locations
  Clone ID: PAT_MRT4530_5122C.1.pep
HLSPGTRGISRLPPCECDLTCTVISECITKLSVVIELCELGXQGCQGNVQEPWGPLASRTYIAS

SEQ ID NO: 151051 - protein, 355 aa, Oryza sativa
  Clone ID: PAT_MRT4530_51230C.1.pep
MAISFKYWDDCLDPEDMQLMWADPHVSKEWIDAGEGPGQKVHLSRDPDGEAYLTQTEMMAVAAITVHKHFKSQLDPYMIGALAEIASGRRLFVDNYDRKTKEIKAGIMQVTIEVAQWLGRELGYKYYDIEEDANLLYWPFVNVYFGAAYAKWLFSCDDKQPESFNDLTPNLLANSSSTEGQLIYWDSKVSEVDMDAMWSQPDVIKEWTKSGERRGNVRFSHDSKRRPYLSRVEVKAVAEITISRHLSSKGVTPEALAALAELAFSCRDCGHRAYTVSSVDDLYNPFTSMYFGAAYLGWLSQYEGRERSHEFIVQAYLGGPENVSLQETGPFWNKFLEALRLYQDPKKEQASCCIL

SEQ ID NO: 151052 - protein, 117 aa, Oryza sativa
  Clone ID: PAT_MRT4530_51231C.1.pep
MGIPILHLNSEIVQSVSSHQLFNSHKRQELQHRIGFLVVLGPAEKGQSYYVQFVLIGQGLEAAKRWRSVAGHLLQAFSPCGMRSRPERSACVAYAAASGHGGVGQSSKSGAVRAGVP

SEQ ID NO: 151053 - protein, 42 aa, Oryza sativa
  Clone ID: PAT_MRT4530_51232C.1.pep
IKGPNIYKNPCLHLFYLNLVYTLVPTIPIPSKYPSRDLKRRH

SEQ ID NO: 151054 - protein, 79 aa, Oryza sativa
  Clone ID: PAT_MRT4530_51233C.1.pep
LFRKLETCKGKTTRVTRPRTAWPGSPACTAWPGPTAWVCSACSSARQLGALADTKAQGPIGNDYLGECARMRPFGPCSQ

SEQ ID NO: 151055 - protein, 78 aa, Oryza sativa
  Clone ID: PAT_MRT4530_51234C.1.pep
RHMLGCVLLFHSKIICVLCSFIYWFCRVGHLLLNSQSRQYEECNLKTVVLQNSDNAGSSAHESGNLSIKHLQIQNHLY

SEQ ID NO: 151056 - protein, 76 aa, Oryza sativa
  Clone ID: PAT_MRT4530_51235C.1.pep
RPLTVIQIWQCGAGEAADSNLHGVVYAAATCMDDAHARVSTFHSLTGSVSCLLCELVDARSSHFHSEEDTSMVSYV

SEQ ID NO: 151057 - protein, 74 aa, Oryza sativa
  Clone ID: PAT_MRT4530_51236C.1.pep
MATVHLHGMNQRSHTARCCASGKRERKTLERIGCTRGAGAVCFHMFPSCPLRANDRDDFGTVRYQYRKPNLKVT

SEQ ID NO: 151058 - protein, 64 aa, Oryza sativa
  Clone ID: PAT_MRT4530_51237C.1.pep
MMVISNVSAPASGANFLAIVASGSTWLIDMVSGKRVDQDFDKNNSIQIMWHHRRPEFQQRHALI

SEQ ID NO: 151059 - protein, 119 aa, Oryza sativa
  Clone ID: PAT_MRT4530_51238C.1.pep
MTHIHARGHMRTARARFLAEMMRFSSLRVGLIRRQRYGAKGRGVSARAESLLPLCTACRARHRVSSGFVLNRVLVLHGRKSLRVRQGFQPSIAACLVAGDLYMANRAATRSIVQRIQPY

SEQ ID NO: 151060 - protein, 790 aa, Oryza sativa
  Clone ID: PAT_MRT4530_51239C.1.pep
MPPLSVQKTGQGFHLEILVEGGVYLDNAPQRVTAPEGVAAAGPAKHWARLSPGTLYPRRRGPLPANSDTTSLTSFYEIGNVAEAVKTFQQMASALTGVMTSVINKLTALLGKEYMKLKGVQGEVEFMIDELSSMNALLHRLAEEDQHLDVQTKEWRNQVREMYYDIEDCIDDFMHHLGHTDIAESAGLVHRMAQHLKTLRVRHQIANQIEKLKARVEDASKRRLRYKLDERTFNLSTAGAIDPRLPSLYAESDGLVGIEQPRDVVIKLLTEGEGASSQKLKVISIVGPGGLGKTTLANEVFRKLESQFQCRAFVSLSQQPDVKKIVRNIYCQVSQQEYGNIDIWDEEKLINATREFLTNKRYFVVIDDIWSTQAWKTIRCALFVNNCGSRIMTTTRNMAIAKSCCTPDHDRVFEIMPLSIDNSKSLFLKRIFGSKDVCIPQLDEVCYEILKKCGGSPLAIITIASLLANKANTKEEWERVRNSIGSTLQKDPDVEEMRRILSLSYDDLPQHLKTCLLYLSIFPEDYEIERDRLVERWVAEGFIITEGGHDLKEIGDCYFSDLINRSMIEPVKIQYNGRVFSCRVHDMILDLLTCKSTEENFATFMGGQNQKLVLQGKVRRLSLNYYTQDHIMVPSTAIITHCRSLSIFGYAEQKPPLSMFPVLRVLDIENGEDMESSYTKHIRKLIQLKYLRLNVRSVAELPEKLGELQHLQTLDLRRTNIRKLPESFVRLQNLTYLRVNNLDLPEGIGHLHALQELTEIRISQDCLASSLLELRNLTKHTLTTKFSPII

SEQ ID NO: 151061 - protein, 109 aa, Oryza sativa
  Clone ID: PAT_MRT4530_5123C.1.pep
KKAIIHDRLARCTKTGISVLTSPHGANAKYVNLYQALVSGLLLEARDWHFGLRLQGVECVVRSLLTKRNMDSERALCDAHLMLMLNGMRSKWVNFYRVCATENDTLRDK

SEQ ID NO: 151062 - protein, 1100 aa, Oryza sativa
  Clone ID: PAT_MRT4530_51240C.1.pep
MAPAVSASQGVIMRSLTSKLDSLLLQPPEPPPPAQPSSLRKGERKKILLLRGDLRHLLDDYYLLVEPPSDTAPPPDSTAACWAKEVRELSYDVDDFLDELTTQLLHHRGGGDGSSTAGAKKMISSMIARLRGELNRRRWIADEVTLFSARVKEAIRRQESYHLGRRTSSSRPREEVDDDDREDSAGNERRRFLSLTFGMDDAAVHGQLVGRDISMQKLVRWLADGEPKLKVASIVGSGGVGKTTLATEFYRLHGRRLDAPFDCRAFVRTPRKPDMTKILTDMLSQLRPQHQHQSSDVWEVDRLLETIRTHLQDKRYFIIIEDLWASSMWDIVSRGLPDNNSCSRILITTEIEPVALACCGYNSEHIIKIDPLGDDVSSQLFFSGVVGQGNEFPGHLTEVSHDMIKKCGGLPLAITITARHFKSQLLDGMQQWNHIQKSLTTSNLKKNPTLQGMRQVLNLIYNNLPHCLKACLLYLSIYKEDYIIRKANLVRQWMAEGFINSIENKVMEEVAGNYFDELVGRGLVQPVDVNCKNEVLSCVVHHMVLNFIRCKSIEENFSITLDHSQTTVRHADKVRRLSLHFSNAHDTTPLAGLRLSQVRSMAFFGQVKCMPSIADYRLLRVLILCFWADQEKTSYDLTSISELLQLRYLKITGNITVKLPEKIQGLQHLQTLEADARATAVLLDIVHTQCLLHLRLVLLDLLPHCHRYIFTSIPKWTGKLNNLRILNIAVMQISQDDLDTLKGLGSLTALSLLVRTAPAQRIVAANEGFGSLKYFMFVCTAPCMTFVEGAMPSVQRLNLRFNANEFKQYDSKETGLEHLVALAEISARIGGTDDDESNKTEVESALRTAIRKHPTPSTLMVDIQWVDWIFGAEGRDLDEDLAQQDDHGFCMLPESSSRLQSRGNFVSCHFTVTVHLLKELMGGPIFSRVPRRYCASWVHFSANVYNIYPMVLTHVLTIIAHQHKTYTTTEISIEEDMPTGAEGTVIVPHTMEQFALHMSQAKQSHKLVVIQFTTSRCPASRYIAPAFTEYAKEFAGAVFIKVNVDSDELESVTDWYDIEGIVPTFFFVKDGEKIDKIPGANKELLRAKIRRHTASPYFLR

SEQ ID NO: 151063 - protein, 64 aa, Oryza sativa
  Clone ID: PAT_MRT4530_51241C.1.pep
TVNRNLLWMLQTFTPRKYNHKWEKESSKYVLLTYITSQRPLLAPMDIKLFYRIYADMANDLKPL

SEQ ID NO: 151064 - protein, 180 aa, Oryza sativa
  Clone ID: PAT_MRT4530_51242C.1.pep
RTRQKRHTRKCAQQKTQWPGKTQKRKTHTPRRATGDSGQGPRPENKGEQHTHRQHNARRLEESGGTRQERTSTTPQGKRKERGAMPRREKGRRLGAGRKDGGRRRGSGDEAPPRARNEPATNQRQDKGREQTNLHTKPRKHHRTRQYKQGKAEDDTRKTTNNETERTEKEERGRRYTKRG

SEQ ID NO: 151065 - protein, 76 aa, Oryza sativa
  Clone ID: PAT_MRT4530_51243C.1.pep
KGEGKRPKMNRYTFSACHYSHVHQVMFTSCKKNPKQQYALPFSKQTSHATRTSSCQCEHTCHQCSCHLATSNAGLP

SEQ ID NO: 151066 - protein, 67 aa, Oryza sativa
  unsure (1)..(67): unsure at all Xaa locations
  Clone ID: PAT_MRT4530_51244C.1.pep
XGLPVIGXMPGVKGCYVAXGHSCWGILNAPATGAALAELILDGDAKIVDLAPFSPARFLTKKSKRGV

SEQ ID NO: 151067 - protein, 388 aa, Oryza sativa
  unsure (1)..(388): unsure at all Xaa locations
  Clone ID: PAT_MRT4530_51245C.1.pep
TYVVRSSCASACVLVDEDGDHSFISYSNHHRVIIDDDNQNFLLQIXNSXCFEDGXFESVKFLSTNASXYNAAEDQRXLTIKGDRTVRKADLGLGRXDVRGIWSLIVDKLGLXKKVVADSIAFPWYLLKVAEDELLVADHKYVPLLVPSSFLVLILLLCNFETSWILKXSTREEKGNWKRSVLGLSFPSSLSXLNYFEGRTERIKPYQQAINERCALLMXLKNIXSVSAKERSDLLGKIPCKELDXSVTRFQKYIVFCCESGQRVSKHDLHTKDTSNIQFLNFWDPFGLPLFAILRVSTWXHSTGQFEEHIHQIKVLPGRCNIKACLDIPANIELAAPLVGICIXCQIRGSGAEISGSHXPATETEKVEGAPPSASALQHMSFSSVRNY

SEQ ID NO: 151068 - protein, 259 aa, Oryza sativa
  Clone ID: PAT_MRT4530_51246C.1.pep
MVLDNDIDTTKKLLLEADAILAQVPNDKVADIREAIRNDWELLANMNVVDQNSLMQQLTTLANSLDDLPMLSSGPTEDDPITNSKVSDSINDWQQNIEKSASSFLDHFIRVTDRNKADAKVFIAPNQEIYLRENIRLRLQIAILAVPRQQNELYKQSIDAVSTWIRSYFDTHNENVKNFLKELDDLAEQSVYIDAPNRLGSLVLLEQLLNKTPKAIDKIEIKAEKALPEPTDSEVKRGLVAGPYLAGSQGYVRIETDSK

SEQ ID NO: 151069 - protein, 474 aa, Oryza sativa
  Clone ID: PAT_MRT4530_51247C.1.pep
MMEKKQMQQQPQQPESEPEPAAPAPAAAAAEAKATPPQPQPQQKPAAPVQPQMPTPRPWPVAFIPPKPVAEIKSTPSTKRKKHCNCKNSQCLKLACSSILDLFTGQIDQLYGYCECFAAGLYCDGCHCKQCGNYVGNESARQEAINSTKQRNPKAFQPKIENGSNALNLRKDDAGAPASLPKHNKGCHCKKSGCLKKYCECFQANILCSKNCKCQDCKNFEGSEELRLITQGDNSSDRNNIQHAANVALNGAIGSSGYRYSPVRRKRPPEDHLYQKLNGEGSTMQTQFQEANHVDSSEITSSTGLEGCYSNYQSRSNVVYRSALANTISPTDATGLAKHLVIVCRKAADAFLTTAENKGEMEVEREIHTDSDGATNMDQQNGGDFGPCCNSLEDSRPASPGTQALMCDEQDSTFGTDYRISFPVALHDQDTSELNAQQEKAVLTGFRDYLRTVITRGKINGTEFAKIFLSLKRC

SEQ ID NO: 151070 - protein, 65 aa, Oryza sativa
  Clone ID: PAT_MRT4530_51248C.1.pep
VHVQSDPAGRLVITGDPEQPDNPWGITPFKKVVNLPLRIDPHQTSAVVTLHGQLFVRAPFGHADM

SEQ ID NO: 151071 - protein, 80 aa, Oryza sativa
  Clone ID: PAT_MRT4530_51249C.1.pep
MVSSGTACREEVGLEAVDSFNVVAPGKSPKDETSARPEGSRRDLMDVRPRVGGGAMDGWGWPPPAVGASPAAGGRWRGGD

SEQ ID NO: 151072 - protein, 709 aa, Oryza sativa
  Clone ID: PAT_MRT4530_5124C.1.pep
MPTPPSPCLFFLFLLFFMWSSHSHLGAASDADALLALKSALDRSDRLPWRRDTAPALCSSWLGVRQCSQPPRDRRVTKLVLENLNLTGVLTATLLAPLSELRVLSLKSNALTGPIPDALPAALPNLKLLYLSANRLQGRIPPTLALLHRATVLVLSSNLLHGEIPTSLTTLPRLTSLLLDDNRLNGILPPLPQPTLRLLNVSANRLSGEIPSVLATKFNASSFLANADLCGPPLRIQCAAPTAPAAAAAFTPLPPPRSNRSRRAKNAGIVAGATVAGVVVLGILVAAAVMASRRGRNKRVAGDVDKGAMPEEEEEQQQQQPQAQPREEINASASASASVASERRGGREFSWEREGIGKLVFCGGVAEMYSLEELLRASAETLGRGEVGSTYKAVMETGFIVTVKRMREPAAGAAELGRRAEELGRLRHPNVVALRAYFQAKEERLLVYDYYPNGSLFSLLHGSHQNPLLTRTTVCRCRQAGSSSRTSSKGKPLHWTSCMKIAEDVAAGLVHLHQSPPAGIVHGNLKPSNVLLGPDFESCLTDYGLVPTLLPSHADLASSTSVLYRAPETRTAHAFTPASDVYSFGVLLLELLTGKAPFQDLMEMHSDDIPSWVRAVREEETESGGESASAGGTEEKLGALISIAAACVVADPARRPTTPEVLRMVREARAEAMSSSNSSDRSPARWSDAVQVQMGMGVPRDQGELGGLT

SEQ ID NO: 151073 - protein, 135 aa, Oryza sativa
  Clone ID: PAT_MRT4530_51250C.1.pep
MVSSGTACREEVGLEAVDSFNVVAPGKSPKDETSARPERKDRGRCKGRGGGRIVPATPPAGMDRVLRLNAPRESLHARASSSVKRGRNTASAQGSRRDLMDVRPRVGGGAMDGWGWPPPAVGASPAAGGRWRGGD

SEQ ID NO: 151074 - protein, 127 aa, Oryza sativa
  unsure (1)..(127): unsure at all Xaa locations
  Clone ID: PAT_MRT4530_51251C.1.pep
MSMHNSETSSANSSSHELSSQIXTCKIAKVREHFEQKLIMIDGLQKAQCKYCGLMLSSTRKSGTSHLINHIXCESCPLVDCEVRNRXATVRKQPVENFMFDPKKXTEELMIKYFIHAKIPFQKIEDP

SEQ ID NO: 151075 - protein, 998 aa, Oryza sativa
  Clone ID: PAT_MRT4530_51252C.1.pep
METAVLSAVLRTLGPKLYAFLRDGHDLLRRDLERDVHYIRNELAMIAAAIEEHDRRPPPAAGDVRSAWIRGVRDLACDMEDCVDRFVHRATGHGLASMGARAKFAAVIQELRRKSEELSRLRASYAAAAGEPSCWVATGSSALTLPASSSEAHTLASDIVGMDGPRDEILELIGETQGQLKVISIVGFGGLGKTLLARQIYESDAVAAQFHPRIWVRAAGKNAEDVLMDILQQLGMPVHHCHASNLVVNLRNCLESKRFFVVIDDMQREYWNSSFRNAFPSDTGLSSIVIVTTAIQSIANACSSRNSHVYVMRTLNEEHSRQLFLKEASWKDYPPGSEAILKKCDGLPLALVTTAQFLQSRCQQQPLGCAKLCDNLGKHLVTEDTLARMKRVLVHHYSSLPGHVIKACLLYLGIFPSGHPVRRKTLIRRWSAEGFVGADHHRSSLDVAIDSFEELVNRSIIQPVDVSSNTEVKTCQTHGMMLEFILHKSICDNFITFLYGQARLPDKIRCVSIQQNSGSKTRVDSDIDLSLVRSLTIFGKAHKSFLNFSRYKLLRVLDLEECDELEDEHLKKICKRLLLKYLSLGRGITVLPKEIAKLKFLETLDLRRTVIKFLPIQVLELPCLIHLFGVFKIQDADQQMRKLKSFLTEKSKLETLAGFVTDRCQTFPQLMKHMTNLAKVKIWCENTADASSSSNSDVHLSEAIQEFIQRGTDVNDVRSLSLDVGECSQEFLNFSLGDSCYLSSLKLKGNKICRLPPFVTSLAVLTDLCLSSSDRLSSDVLAALSNVRALRYLKLIARHLDRFVIERGDLQSLRRLHIVVVSMTTMSKQQPEIQEGALPNLESFHLLCKDLDGPCGHGGIRIDSLGLGCLREIVLDDGVRETAKEQWKDAARRHPKRPKVVFVGAGDVVDRRRVGAAAAAAPAAGESNSAMAPAAVASVVAAGDVKRPAREESDISAALASLPAKMARLLGAASIHQSSGTQGELSCGGNGASQRHFS

SEQ ID NO: 151076 - protein, 367 aa, Oryza sativa
  unsure (1)..(367): unsure at all Xaa locations
  Clone ID: PAT_MRT4530_51253C.1.pep
METLTIIPNQHQPGRRLAHAYRIWTFPAHASRLTLSAPLSLASAVTLRSAPAPAPAPALSPAAPSPAPPLPPPLSAXSLPQSARAATCLLTPSPPASAPAPAPAPAPAPAPAPAPNASPRAPPSPFLLAPSPPQSLAPPPQPPAPPSPPHCSPPSARSAAARTSPHVTVHAVAASNSPPSSRRRITATEEQSAVDSSSSVTRLVPXTSPPRQPHPHWPRAATPAPPSPCPPAGHSRAPXQRPQERGRGRPPPPATPATRAGASSVPSPPSSSRTRPPGSWTPQRSEGGGRAGRAEGGLLGGGEQWPVSGGRGGGEPRLHLNGLPPNPPGGRRRRSRGRRCCRPGSCRSRCGRACRSASSSAPSSCGR

SEQ ID NO: 151077 - protein, 256 aa, Oryza sativa
  Clone ID: PAT_MRT4530_51254C.1.pep
MASKRGEKKPQARMSRRRQQPGSDSDGEDDSFLYRYPLPSAAAPGASGPSSHGGKPGGGGGSGGLAPSKSTVYVSNLDFALTNSDLHTLFSRFGRVARVTVLKDRDSPRSRGVASVLFVRREDAAAAAARDARQAEFIRRRVYRDKSRCYECGEEGHLSYECPRNQLGPRERPPPSKKSRRGGGSGGGGGGGGGGRGASWQSDDEDSAAAFEDDRWASVVDTRGEEEKAAGKGEGKAMKKEKRKGYFSDESDEDED

SEQ ID NO: 151078 - protein, 121 aa, Oryza sativa
  Clone ID: PAT_MRT4530_51255C.1.pep
LLRRSRKGWYGRSSAGEDGRNEAAASVTRWWRRRLVRRRPWWPWYRGGRGVVGAGDVAAAAGALAAAAVRARRRELVCCRLILHRWPLYSSLAYVSCSSRKFLFFFGCMLFFCISSWICVV

SEQ ID NO: 151079 - protein, 96 aa, Oryza sativa
  Clone ID: PAT_MRT4530_51256C.1.pep
MGLIQPIPMAVASRLFLESINAKVCRKDLWIKPTSTLTNLKARFWTYIGVKQIFQASRKSRRYAREEINKSHGARVSANELRLMVMVTGVDGDRLG

SEQ ID NO: 151080 - protein, 255 aa, Oryza sativa
  Clone ID: PAT_MRT4530_51257C.1.pep
MASKRGEKKPQARMSRRRQQPGSDSDGEDDSFLYRYPLPSAADPGLAPSKSTVYVSNLDFALTNSDLHTLFSRFGRVARVTVLKDRDSRRSRGVAFVLFVRREDAAAAAAEMHGKVLNGRTLSASIAEDNGRAAEFIRRRVYRDKSRCYECGEEGHLSYECPRNQLGPRERPPPSKKSRRGGGSGGGGGGGGGGRGASWQSDDEDSAAAFEDDRWASVVDTRGEEEKAAGKGEGKAMKKEKRKGYFSDESDEDED

SEQ ID NO: 151081 - protein, 267 aa, Oryza sativa
  unsure (1)..(267): unsure at all Xaa locations
  Clone ID: PAT_MRT4530_51258C.1.pep
MASKRGEKKPQARMSRRRQQPGSDSDGEDDSFLYRYPLPSAAAPGASGPSSHGGKPGGGGGSGGLAPSKSTVYVSNLDFALTNSDLHTLFFRFGRXDRTSPAGRGVAFVLFVRREEGXAPPAEMHGKVLNGRTLSASIAEDNGRAAEFIRRRVYRDKSRCYECGEEGHLSYECPRNQLGPRERPPPSKKSRRGGGSGGGGGGGGGGRGASWQSDDEDSAAAFEDDRWASVVDTRGEEEKAAGKGEGKAMKKEKRKGYFSDESDEDED

SEQ ID NO: 151082 - protein, 71 aa, Oryza sativa
  Clone ID: PAT_MRT4530_51259C.1.pep
MAVTQAVTVLRRKKVDLRGAGGGDYGGEASGGVDSGVSRRRRRGSQIRSWVLETHTEPRGLGAEEVAGVNP

SEQ ID NO: 151083 - protein, 198 aa, Oryza sativa
  Clone ID: PAT_MRT4530_5125C.1.pep
HPPPPPPRHRHGCCYQQRGVHELEAQARVPLLADQPPGLLPLHPPPPDPTRPPPLLFFFPATTAAVVVAVVRRRRVGRRQGEGGAVGPRAPASDDQLQQRRPPPPPRRLPASPFQASPVRLLTITDDLFGSSDSTPLFRAYASSDTRARVIRIRIIQGLARKPCVMCSLLFYYSTSICTPLCVFFLRGMNGSVQLKKK

SEQ ID NO: 151084 - protein, 143 aa, Oryza sativa
  unsure (1)..(143): unsure at all Xaa locations
  Clone ID: PAT_MRT4530_51260C.1.pep
MSLYAAFSSSIGSIICGYSRDLLAATLCDDDAVSCSRGPIPSPMDFAIKLAEKHLPLCAAPPLYLPFDNTGPVATTSLGSLPCSIHLRLMGLITYHSRERKRRKKEMWAASERRLLGYRLVTAVEXRREGRSISLGPHRRPLL

SEQ ID NO: 151085 - protein, 70 aa, Oryza sativa
  Clone ID: PAT_MRT4530_51261C.1.pep
ILIRLQSKRVSTPGSSLIHSARRVRLCTACKQPPAPVNVSHSDEGTDHHERAPQSVITPPEVITGREGTQ

SEQ ID NO: 151086 - protein, 194 aa, Oryza sativa
  Clone ID: PAT_MRT4530_51262C.1.pep
MQVQVQPQSQRLPSLMRELRHCGRRADCAVVACSGPLGARGVRGLLRLLCFAGLGGTGAACISVSLPPAAQPAAPNEFRSCVQLYYIAIAKVEGIVMTAPELNPLQAVLHATTSLVAISSTTLLTSLPPAVRPRVTDATPLACRQQSARACQRRSARVPPPVSPRVATYCHAHRFTTATCARRRLHRNPSSVVA

SEQ ID NO: 151087 - protein, 230 aa, Oryza sativa
  Clone ID: PAT_MRT4530_51263C.1.pep
MVTSKRYMGGMEASLVSGILNIVGKNLAPLVIKEFSSMAGVSNDLQELQDLVEEINNWLQTVGDKAMRNDRSSNWLKKLKDAAYDAEDLVHEFRIEAEKHEENIVSVKNVIVKHFWTKPKSVVFEFKTAHKIKAIKKRFDAIVKGRSYYSTIANSIPVDRPAQHVSKTIGDVMKIDAQRRHEFYVENPCGKKPRAPTGNNHYRGDDYKRRGITMGMSPLSRTAYKSIYRG

SEQ ID NO: 151088 - protein, 96 aa, Oryza sativa
  unsure (1)..(96): unsure at all Xaa locations
  Clone ID: PAT_MRT4530_51264C.1.pep
RCCFASQTLVLGFFQLWSGSALFSPGTGLLFAGSVFSWPSSFCFRFPVHGFSRPLPFLAGNGPPAGNSPGQTGGRTPGGTPRXGXVWRRPRPRPGK

SEQ ID NO: 151089 - protein, 83 aa, Oryza sativa
  unsure (1)..(83): unsure at all Xaa locations
  Clone ID: PAT_MRT4530_51265C.1.pep
GKSPRRRRLISPSSRARHPRRRLRLLRCRRIFGVRAAAARSPFMHLDLSDLDLSPSRRPPRDAAPXRRRATPPLRRRATPGIL

SEQ ID NO: 151090 - protein, 257 aa, Oryza sativa
  unsure (1)..(257): unsure at all Xaa locations
  Clone ID: PAT_MRT4530_51266C.1.pep
MLRSVSGSNSSRGIAAVVGVGPRLGSAXARKFASEGMVDVVVYVGAEKLSQLAEEIAQEAKAQVFALRVDCADARSVREAFEGVLSLGPVEVLVYNACEPPADGDGDASPRPTPFLAISPDAFHRALAVSAAGAFYCAHQVIPGMVERGRGTVIFTGSSASVTGYAGYSDLSCGKFALRGLSQSLAKEFQPAGVHIAHMIIDGVIGEPRSGRGRCGGETASSAGADPDAVAQSYWHVHAQDRSAWTQEMDIRSPSLM

SEQ ID NO: 151091 - protein, 90 aa, Oryza sativa
  Clone ID: PAT_MRT4530_51267C.1.pep
SGSSVGKIHRIFKWSKWSMVKFMQNFLKKETTFPRNRYWKTLVKSSTPAKKLEQPAQKKPSPAPKPKRVWKEKPKTPAPSPPETGGKSAN

SEQ ID NO: 151092 - protein, 55 aa, Oryza sativa
  Clone ID: PAT_MRT4530_51268C.1.pep
MTVLSTIHCDPKDSFLPLSHHGFLRTSTFPPLRNPTDGDTTVDTRLAVLPMVAPP

SEQ ID NO: 151093 - protein, 277 aa, Oryza sativa
  Clone ID: PAT_MRT4530_51269C.1.pep
MRASSGLATRRGGSGGAPILPPFLLDLSIGGRGRAEEELMVVAIADNVGPSPPRSGRKRGAGQRRRRTEEESRRPQGEGLWIYHYEDGDVAYENDFHRPLCTSGHFPRLEKLFMAAWENDFPSSGPSLGTAKVSRQPRRQSHFDLHTDQRHLSPRTRKHGGGQRRMIREGGMAVVTSIAGRHCEKLRWPMTPLSMLPMSIPPPRPSLQADPPDHRCWQIHFRGPDTCRASLVFLVVLPRRVGEEVAPPRSGEVMPGRGEVLPGRGKAILPGGEGERW

SEQ ID NO: 151094 - protein, 88 aa, Oryza sativa
  Clone ID: PAT_MRT4530_5126C.1.pep
MASSSSDHGPRFTLALSQHGDLPIVKFSLSLSPPPPPLPIEHFASPHSDQRKKRSAAVVGEAPARPGVYNEHSVSVWHRERELRAKLT

SEQ ID NO: 151095 - protein, 105 aa, Oryza sativa
  Clone ID: PAT_MRT4530_51270C.1.pep
GRAIQTHHGKMWSLSGAHRRLVAAYLGRGREGTGETFGWAMATPVVAASSPRSRAYEQCLPPLHRQASSAHHLARKSGRDAVLSMAPSVQLTVRFICCNIEKDLD

SEQ ID NO: 151096 - protein, 91 aa, Oryza sativa
  Clone ID: PAT_MRT4530_51271C.1.pep
QARVQVLVCYTAVDLRVRSPVLLQQQVLSAYDEFVRQQYGISASPFLQSAVFQLRNNQVWQQIALVAHQSHYQDINIVQAIAQQLLLQQFG

SEQ ID NO: 151097 - protein, 98 aa, Oryza sativa
  unsure (1)..(98): unsure at all Xaa locations
  Clone ID: PAT_MRT4530_51272C.1.pep
YYNSVASINRPIVFFTVCLFLLCXGSLAQRLLGXSTSHWRSSRRVGPGXCXFVXLXAFVPXRCVRSXAGSSVFFVVFFERFQCSGVSVVRRVFEPGGL

SEQ ID NO: 151098 - protein, 125 aa, Oryza sativa
  unsure (1)..(125): unsure at all Xaa locations
  Clone ID: PAT_MRT4530_51273C.1.pep
GVCSXSGPXGXLRVLRXXAVARGLSRXPRXRVXRXRPCXPALRWLXRFXWFLPVPPAALGCXPWSPXLVVPPSPXVXXRPSFRAWXRCFWASLLVVLFSALGFFXCLVRSXAAPSXLPXXXXPPP

SEQ ID NO: 151099 - protein, 73 aa, Oryza sativa
  Clone ID: PAT_MRT4530_51274C.1.pep
MEFGWALRQPMRLPDSPRHERGLPAALRGLGVKPEDHRVGFLRVEGRPMCASRLKRFSINAGSAASRSATGQE

SEQ ID NO: 151100 - protein, 113 aa, Oryza sativa
  Clone ID: PAT_MRT4530_51275C.1.pep
PEREQEEEEEEEEDILSIHGGIVEEVAGGAGACRAHVHGHRGGRAPGSGEEARPHAGAPPPGEEARGAQARRPWRPHQASPPHVTGCRRAHACSNQQCHLAFILFHSSSCCFD

SEQ ID NO: 151101 - protein, 98 aa, Oryza sativa
  Clone ID: PAT_MRT4530_51276C.1.pep
LVKFFFLGFALRSLYLSLFQNPNPSGGRERRRRRARRRWGGSGGGYNSHKWGPAPAVRAPTYTYPQNGFCADKPGAARSAPVMALLDLLRRGRLPQEA

SEQ ID NO: 151102 - protein, 133 aa, Oryza sativa
  Clone ID: PAT_MRT4530_51277C.1.pep
TRRNEAGSKQAGRGGESNPIMWASINRPPTPNREEDPQKELSLREIINVKLVESGEKEKLMELLRERLVECGWRDEMKALCRAYARKKGRNNVTVDDLIHVITPKGRASVPDSVKAELLQRIQSFLMSSSSLR

SEQ ID NO: 151103 - protein, 92 aa, Oryza sativa
  unsure (1)..(92): unsure at all Xaa locations
  Clone ID: PAT_MRT4530_51278C.1.pep
KIILGELLLFCWWRGLAXXPLGVGVYLPLFSGVEGPQPPRKVKKGGGAPFFFFFIKNPIQNKGPTRQKKICGPKKGGKKKPGENWLPHGLWG

SEQ ID NO: 151104 - protein, 152 aa, Oryza sativa
  Clone ID: PAT_MRT4530_51279C.1.pep
MEKEREPRNEAGSKQAGRGGESNPIMWASINRPPTPNREEDPQKELSLREIINVKFLPLGAEKAVDSPATGDVQSPKKRLVESGEKEKLMELLRERLVECGWRDEMKALCRAYARKKGRNNVTVDDLIHVITPKGRGRQLGLFSVCTPLYPA

SEQ ID NO: 151105 - protein, 163 aa, Oryza sativa
  Clone ID: PAT_MRT4530_5127C.1.pep
LAVPMVAIRTTGSPRTEARLCRRTRGRSGQGTLRKPAPTTRGRRAGTEPKAHHGAGAMASREPRQGCGATASPEGARCPTTGSATGPGGGRRRGSSRESSAGAATSSNTMSATRTPPDMASTMTAGAESPPSSGSTSTARSLAAGPMCIHYTRKYPSCRFLSP

SEQ ID NO: 151106 - protein, 40 aa, Oryza sativa
  Clone ID: PAT_MRT4530_51280C.1.pep
KISDQDWGAWARVFPLGLLSQHPMCRYQMLVQFLERPSSL

SEQ ID NO: 151107 - protein, 98 aa, Oryza sativa
  Clone ID: PAT_MRT4530_51281C.1.pep
CFVRSSLCSSGRCLRGQSQLTIGVALILQRFNKFHSGLSCTRLFFCRLHGLYTLFDASPVLSWPLQAAYYFMCGTVICSCFHKECCILVVSFSAFAYN

SEQ ID NO: 151108 - protein, 170 aa, Oryza sativa
  unsure (1)..(170): unsure at all Xaa locations
  Clone ID: PAT_MRT4530_51282C.1.pep
MAVRPAATASAAGDFGGSTDRSTSVRPTFIRRDGAIGGASAAGNPPLPHYQEGWKPTAGNPSLPRLRCGPPRRHRGLPPSPAPPPLWTASPPPATSSSPLWTAATPPSPSPXPRWKPASPSPPLWTAAPPPWTAASPSPATSSPPLPSPAPPPPWTAAPPPGEPPGLGSV

SEQ ID NO: 151109 - protein, 71 aa, Oryza sativa
  unsure (1)..(71): unsure at all Xaa locations
  Clone ID: PAT_MRT4530_51283C.1.pep
MESIAIAVVPAGSQAGSSWLMMMRRMMSSSMVGLLVSSLEKKKKKKTPKPXADHGVDPWSNSPYGPRSASS

SEQ ID NO: 151110 - protein, 96 aa, Oryza sativa
  Clone ID: PAT_MRT4530_51284C.1.pep
FINANPEAEWKQQKANNKDYTMRTKNAKQEGTQREAETPGKGNRKPRKEKGIPQPLLDLGTSKGKKAPPTGKTGTGMGNHQKGAPRGTPNYGHRNK

SEQ ID NO: 151111 - protein, 122 aa, Oryza sativa
  Clone ID: PAT_MRT4530_51285C.1.pep
MAGRRTKVASVPETSSVGTNTSGFCFTSTDAPAAFGTFPPYLGIPPFSASRISAAATGGHISPSPSWIQTDKSSDKAATPDLSSPHANMQSWSVQIKLLYIFGHAETEETYSCHVMLFLCTN

SEQ ID NO: 151112 - protein, 80 aa, Oryza sativa
  unsure (1)..(80): unsure at all Xaa locations
  Clone ID: PAT_MRT4530_51286C.1.pep
QXXQQLMLVAQQSHYQAISIVQAIVQQLQLQQFIFFYXDVAQXQSQTLFTFNFPSIFXIYPNYYXXPXIISTFFFFLITI

SEQ ID NO: 151113 - protein, 191 aa, Oryza sativa
  unsure (1)..(191): unsure at all Xaa locations
  Clone ID: PAT_MRT4530_51287C.1.pep
QAAVVVVSSPNASPSSPRVSPPPVRASASPVAAAAFFLRAGRRARRXGIPSPPSFPLSPMSAAVLRACAVVFGRRRRLRAGRRRLPRCRSPPVTARAAAAXHGWPAGLSRAKPTATPLSRPVPLPGGAHQPVDHPSLSPCAAASGARLPAAPSPSRSAADQWGPHVGAAPPWMTSATEWWAVGAWFCWSHP

SEQ ID NO: 151114 - protein, 223 aa, Oryza sativa
  unsure (1)..(223): unsure at all Xaa locations
  Clone ID: PAT_MRT4530_51288C.1.pep
MARRRRRTTAGGDRRRGETAAAGAKAAAAAEDDGGRAEGGGAHGGEERKEERGFLTEAMAATGVGRDERRXRRRGGTDGRRRHPRRRWRGVRRGDDDHGGLNCRPEMEGRGKTHRLARGEVLRRRQAAELGCDGARAVDGTGERGECEKRERKTRGAIYRCGRGRTWPGRRARAGDPGARRPRGGGRPGNRPAWPREKRRKPQPGGFGGGCRRRRVAGGKGTT

SEQ ID NO: 151115 - protein, 204 aa, Oryza sativa
  Clone ID: PAT_MRT4530_51289C.1.pep
KREKRKEKAKGSTRGKRKQEGQSKRRRAEKRRKGRKPRKARQRNDANDKEKKQQERKQRKQRRQRKRDAAERKEGNEGNASRNETRPRDEERRKKTKESTKGSSEKRRATTHNEEQRRATGNRKDKGQNPARGRRNTRKTGTNRATAAGTRRRTEAQKREPPGPHDRRKKRGTGGGHPRRREPPPGGPPPRGRATGHWGAASSL

SEQ ID NO: 151116 - protein, 173 aa, Oryza sativa
  unsure (1)..(173): unsure at all Xaa locations
  Clone ID: PAT_MRT4530_5128C.1.pep
HIYILRSRRRTVEAPPPPPPFAMQDQAAPVPWSTDLFDCFDDSSNCFMTWLCPCITFGQIAEIVDRGSSSCGTSGSLYALVFLVTGCSCIYSCIYRSKLRSQYGLQETPCPDCLVHLWCEPCALCQEYRELKKRGFDMSLGKLKFSXWHANMEKQGQNPAATMAPEMYPGMTR

SEQ ID NO: 151117 - protein, 129 aa, Oryza sativa
  Clone ID: PAT_MRT4530_51290C.1.pep
MQIFVKTLTGKTITLEVESSDTIDNVKAKIQDKEGIPPDQQRLIFAGKQLEDGRTLADYNIQKESTLHLVLRLRGGIIEPSLQALARKYNQDKMICRKCYARLHPRAVNCRKKKCGHSNQLRPKKKIKN

SEQ ID NO: 151118 - protein, 225 aa, Oryza sativa
  unsure (1)..(225): unsure at all Xaa locations
  Clone ID: PAT_MRT4530_51291C.1.pep
HEEKVRQRPRPRRSRPSGDTDGDSNLAAASPHPPALRLAAAXVARRQSRTAARTAAAGRSPHEXAQRRDNGGLLGGGKTADGLAAPGTAESDPPPLAADLASPMAVELVATATGGGMGRRVGSARAEAAHPCEGGRGSXPKRRDPAGKAVATVALGPVMDGRFWRPFARSAACDDNELPRVRWGPAWPRWRGDSGCAHRRLRWRRCSGVWALAVTLACRASTAGS

SEQ ID NO: 151119 - protein, 145 aa, Oryza sativa
  unsure (1)..(145): unsure at all Xaa locations
  Clone ID: PAT_MRT4530_51292C.1.pep
TRICFFLSNGWGRGTVTTRLXPGRAHLHLAAFIGHRLSSHTNTCLFCTFCPHSCAPGKNFPVPGQARLTLELFGDWLPEKKLQLVDMNILLILLNPRPGCYRHLPPPAYKSPCILRQNSVIIDRRQGGESRGRRVPLSCPWRRRA

SEQ ID NO: 151120 - protein, 97 aa, Oryza sativa
  Clone ID: PAT_MRT4530_51293C.1.pep
QTTLQVNMSLMEMIKASKSNTDQGEWSNLPKKSDDLLLAGSDSRLAKRECNIIVIYNLLGKLQLILLFFFGVFYIILEHARRVLRVLKPVRVSATSL

SEQ ID NO: 151121 - protein, 79 aa, Oryza sativa
  Clone ID: PAT_MRT4530_51294C.1.pep
MADLSMHKVSILVWSNTQKSESPVLTWGKFLHTWTRLVREIRRNTLDDISKDLGRFGLEMEPTGKIVVESLSFQAVGSP

SEQ ID NO: 151122 - protein, 57 aa, Oryza sativa
  Clone ID: PAT_MRT4530_51295C.1.pep
GILITIEFLCMNEWMRVRVKVCVYDCTLRRPTYCIGLLLGYVITVVQFMLHRHQSRM

SEQ ID NO: 151123 - protein, 176 aa, Oryza sativa
  unsure (1)..(176): unsure at all Xaa locations
  Clone ID: PAT_MRT4530_51296C.1.pep
DLVRPYFLRRTKESIESLLPNKADLVIWLKLTPYQIXLYETFMKSNLIDKTVKGSTFVATMLLQKICNHPQNLTAVDSCEEQLALKENRTLQGIVKKLEALIAKNTTKTSNXSSSCKLTFILQLLEKLKEEGHKVLIFSQTRLMLDEIEEALTNKGVHSARMDGTVTASKEKLLLR

SEQ ID NO: 151124 - protein, 260 aa, Oryza sativa
  Clone ID: PAT_MRT4530_51297C.1.pep
MVLGVVLPADKHEKVMTKAVTINSGLVTIGQGKDSDRTEFYGYIKEMFKLGFEVLHIYISTCSKLERYSFCYHLEEADLHQCHQILTCTINGSSLVMIWCCHLANNSANCYFLHFTIIRDGDKIEAESKMEVVLETEQGSAKVRICYDRDRQSPSWTRVVSRFQPILPDLALYLTCLIDMLDLPFMLRSYYNKVSRSSEQNLAFFAVYNMETTDIVSLYQQFVKKMMASLPYTCQSQSPSPYFDLSLFRYDKLISAIDRH

SEQ ID NO: 151125 - protein, 126 aa, Oryza sativa
  unsure (1)..(126): unsure at all Xaa locations
  Clone ID: PAT_MRT4530_51298C.1.pep
VTDKAYPLSYDLWNIPIRYTFTYTGCFRIRFRNLSQVMENISISLGISEVLLGILLGGXGIPRYKRDPXERQRASHLITNTLTKVYEARVHGXNSPGDLVESLDYDLIAAPTYLNTLFIQSASITR

SEQ ID NO: 151126 - protein, 134 aa, Oryza sativa
  unsure (1)..(134): unsure at all Xaa locations
  Clone ID: PAT_MRT4530_51299C.1.pep
MVQPVEPVNHRTKSLVXSITSPVSITITLAHSSALILPKIDFIVFWMSFSKMLMKKEFMVGIALDKTPVSVSVCFSTLKMILIEKVDSYYKWYGEESLGHQDDDMMRLLPQKANADKKLEPAWLAPPWKMMLSW

SEQ ID NO: 151127 - protein, 67 aa, Oryza sativa
  Clone ID: PAT_MRT4530_5129C.1.pep
SHHRNLQCPWRGLQYSCGRSHVSAGESTGASSIILVLMEPEGYHVERSSRVLWAGSRYATVFRDIDD

SEQ ID NO: 151128 - protein, 38 aa, Oryza sativa
  Clone ID: PAT_MRT4530_512C.1.pep
SFLKRIKLNIISKSLDPRHRAKPRDERQEHIQVGYKRF

SEQ ID NO: 151129 - protein, 141 aa, Oryza sativa
  Clone ID: PAT_MRT4530_51300C.1.pep
VIALTIMRDCLTCNPSTFRTMNERLVGGCVETTTCVKRLYQMQETVALLFRSINSNDSVTKSKFDNLSGCRHCIPEGLMRATDVMTVGKVAVLCGYGDDIMGCAAALKRAGALVIDTEMDPICALHALMEGFQVLTLEDVE

SEQ ID NO: 151130 - protein, 74 aa, Oryza sativa
  unsure (1)..(74): unsure at all Xaa locations
  Clone ID: PAT_MRT4530_51301C.1.pep
PMEKGVRLPGGXCWPSPTRGSPRXGXRQPSSTRXXHPPPFSPXWGLFPTSCLHERRPXPVLLSWRRXXSRRPVP

SEQ ID NO: 151131 - protein, 2849 aa, Oryza sativa
  unsure (1)..(2849): unsure at all Xaa locations
  Clone ID: PAT_MRT4530_51302C.1.pep
MVNVVQSSRGLSVKTKLHSLKIKDELQGRLSMSSNYLACSVINDNLETVDSSSPDEEDHRKSFSVEEDSFMDALTDFTPDQSPNLQDLEIPSNSIFDPDGHTQLSSKDGLSFDGDQQKVKPTEVFYEAQDNNINDFVVLTFLTRTPDSCLYDGIDSQMCIRMSALEFYCNRPTLVALIEFGFDLSMVNSAPKGDSDTTPAVRNVKPTGMEDNARNFVKGLLGYGKRRTIFNMKMDVDRVSMFLNKEDGSQLAMFVQEKFLFDLKVHPGSFSIDGMLGNMRFCDMSLGPEHRWGWLCDIRKPGVESLIKFAFQSYSVDDDDYEGYNYSLIGQLSAVRIVFLYRFVQEFTSYFMELATPHTEEAIKFIDKVGGFEWLIQKYEIDGASAIKLDLSLDTPIIIVPKNSQSKDYIQLDLGQLKVRNGFCWRGGEESDPSAVRLDILQAEINGINMAVGVNGILGKSMIREGHGINIEVRRSLRDVFKRVPMLCMKFQIGLLHGIMSDKEYNVITSCISTNLSEAPNLPPGFRDNVNRTKDSIRLLADKVNLNNHLLLSRTVVVMTVDVQYALFELRNGPDAESPLAELVLEDTKSEMRLMLGSYSETSKLSTQDPSSDVGVSNLTMRENFIQLSPGRQLIVDGCDIDDFTYDGCGGTISLCDEYDKKGQLYSGTIIILGRGKKLRFKNVKIENGALLRRCVYLNAGSSYSISAEDGVEVSVLESSLNDNEDDNTQNEEYKRINALQPGADTPSAQMLNFTFEAQDLFSVLFLKTVVSPEFTFYDSSKLSIDDSLHIEKLLRAKMDFSFMYASKEKDIWARSVVKDLTIEAGSGLLVLEPVDVSWKYTSVSEKTNIVLASTDVYIHLSLSVASLLLKLQNQTLAALQFGNNNPLVSCINFKRVWTSPNGELPGYNLTFWRPQAPSNYVILGDCVSSRCVPPSQVVVAVSNTYGRVRKPLGFRLVHVLPVSLEQMNSSQAAEDNECSIWIPVPPPGYIALGVTPGFSIWRVDNVIASFHAHNSIEQPTRVEALDLHHVLLRNPNCYIVKDLNADSSVRSNQPADQLTHRKSTSGWDAVRNLSRPSSYCMSTPHFERIWWDKGGDTKRPFSIWRPIPRFGFSSVGDCITEGFEPPTLGILFKCDSAIVSERPTQFKKVAQIDRKGSDEILFFWYPVPPPGYASLGCVATKTDEMPSNDSVCCPKMGLVNHANILEDPISRSSSSKGPNCWSIWKVSNQGCTFLATSDTKKPPAQMAYRIADHAKPKVRENITAELKFGCLSVSILDSSCGMVTPIFDTTIANINLATHGKFETMNAVLICSISASTFNRHLEAWEPFVEPFDGIFKFETYDTSKHPPSKVGKRIRVAATSPLNDTVDSVKNADDLSCSALDEDDFQRIVFENKLGCDIYVKKLEDNEDIIELLQHENQVSLFMPPPRFSDKLSVLSNSTESRYYVIIQIFESKGLPIMDDGNDHSYFCALRLLVGSDVSDQYKIFPQSARTRCVKPLKTCESQTHHAKWNEHFIFEVPEQASAHLEIEVTNLASKAGKGEVLGSLSIPIGRGATILKRAASMRIIQQAADVKRVLTCPLTRKGQALNHENVKHCGMLVLSSCYVERSTQTNFQSWKDSLSNAKSGFWIGLGPDGPWECFTAALPLSTIPKSLNNSHFALEVTMRNGKKHASLRALAIIANGFDIKLEVSVCPVTMHSSSVSNAGSTSSTSIIDEVFENQWYRPTSGWGSNPASDQGCDVGPWSTKDGSYSSKAFFEPRLPPGWKWTSPWKIEISSSVDSDGWAYAANFQNLNWPSSWKSSKSPHDFVRRRRWVRSRQSMQEQSAEIPRKIIAVMEPHASTALPWTAMIKDMDLCLQVRPFSEKSQESYSWSQVLSLGSESIPKQQQSSLSRQSTLKQSSVPSKNSVLRLADLEKKDMLSYCCPPVGIKQNFWLSVGIDASILHTDLNMPIYDWKICFNSILRLENKLPYEAEYAIWEKSTEGSMVERQHGIVSSGGSAFIYSADIRKPIYLTMFVQNGWIIEKDTVLILDLMSLEHVTSFWMVQNRSQRRLRVSVEHDLGASDAAPKTLRLFVPYWIKNISSIPLSYRIVEVEPTENSDAESLSRPDSLSRAAKSSKFSLRYSSKSLIRRGPVAQRNMHILEDYMNRSAGVRFESRDNNSSPARVAICVAVGSCKQYSIGVSLFDLENKEHVDVKAFTSDGSYYWFSAQLKMTSDRTKLRLEGYKWSTPFSIDANGVMCVLMNNTTGNDQALVRVNVRSGTKCSRYEVVFQLACWSSPYRVENRSMFLPVRFRQVGGDDYSWRSLPPNSSASFFWEDIGRRRLLEVLVDGSDPTTSMTYDIDVVMDHQPLAASSRVKKALRVTVLKEGKFHVTQINDWLPDNRTREQTTERLLSPIFQPSEVDSGQSSPDLDSEFHVTLELTEFGLSIIDHMPEEILFLSVQQLLLAYSSGMGSGINRLKMQMHWIQVDNQLPFVLMPVLFCPQRMENQSDYIIKFSMTLQTNNSLEFCVYPYLGVQVPENCVFFVNIHEPIIWRLHEMIQNLKFDRISSSESSAVSVDPILKIGLLNISEIRFRVSMAMSPTQRPRGVLGFWSSLMTALGNMEHMPKDILSQPLQLLSGVDILGNASSALSNMSKGIAALSMDKKFIQGRMRQDSKGVEDFGDVIRDGGGALAKGIFRGVTGILTKPIEGAKSSGVEGFVQGVGKGLIGAAAQPVSGVLDLLSKTTEGANAVKMKISSAIMAEEQLARRRLPRAIGGDSLLYPYDDHKAAGQAILQLAEYATFLGQVDLFKVRGKFASTDVYEDHFMLPKGXMMTQRKFSPAMDPCXVISDVLWEDFVTVELTHGK

SEQ ID NO: 151132 - protein, 168 aa, Oryza sativa
  Clone ID: PAT_MRT4530_51303C.1.pep
RTLWVLGQVDLFKVRGKFASTDAYEDHFMLPKGKILLITHRRVLLLQVPMMTQRKFSPAKDPCSVIWDVLWDDLVTVEMTHGKKDAPGSLPSKLILYLKAKPTNSREVVRLVKCNRGSDQATLIYSSIDGAYKAYGPKSTKELLRWKVPRPYAPRNTSGRTVQDLSYG

SEQ ID NO: 151133 - protein, 356 aa, Oryza sativa
  unsure (1)..(356): unsure at all Xaa locations
  Clone ID: PAT_MRT4530_51304C.1.pep
MRVAPPPQSSIQTMASPSIPAALRHPHAHAAGLRLLRSSGDPCPPCTLPFRLCGVPLKKGHVYAGAVSATRSPGLGNAENLRESPSLSRSWGMNGQIGDDHDILIECRDVHKSFGNKKVLNGISFKIRHGEAVGIIGPSGTGKSTVLKVMAGLLAPDKGDVIICGRKRHGLVSDXFQSAALFDSLTVRENVGFLLYENSSLPEERIATLVTETLAAVGLKGVEDRMPSELSGGMKKRVALARSIIYDDTKETIEPEVILYDEPTAGLDPIASTVVEDLIRSVHVTGKDALGKPGKIASYVVVTHQHSTIKRAVDRLLFLHEGKVVWEGMTQEFTTSTNPIVKQFASGSLDGPIRYF

SEQ ID NO: 151134 - protein, 124 aa, Oryza sativa
  unsure (1)..(124): unsure at all Xaa locations
  Clone ID: PAT_MRT4530_51305C.1.pep
LGFQTTKKQKQQQTKVKXTKKKKQXXPKGGGPQXPQXXPXXXKXLXLXXPLGXPFXKNSXXMRKKHLXFYXKXKSXFXXKNPPXFPXXWXLXXXKKXPPPLFPPLXQXFLPHPLKMGKXWXKFX

SEQ ID NO: 151135 - protein, 84 aa, Oryza sativa
  Clone ID: PAT_MRT4530_51306C.1.pep
RRRKRREEKKRRMVSQFQDAGAGAVDDEDAIGASGGKGRSEDAGAAPQGRDRVPAWLLPGPAALHLPFWPACFLGGCHWLVPYL

SEQ ID NO: 151136 - protein, 255 aa, Oryza sativa
  unsure (1)..(255): unsure at all Xaa locations
  Clone ID: PAT_MRT4530_51307C.1.pep
MVSQSKTPAPEPSTTKMPSAPPAVKGVAKTLAQHHKAVIGFLLGFFLVLLLYTFLSGQLVSSEDAIVRAVTQQSTPAVHTDQDGRTTSPTSPTSTSSNTTQDNLEGKNTERSSQPAVNDEASDKMEEDLIRQDIDQAGTKNGTNHKPGAPRKPICDLLDPRYDICEISGDARTMGTNRTILYVPTVGERGLADDSHEWSIRDQSRKYLEYINKVTVRSLDASXAPGCTLXAVPDVVFVNGLTSNPWHDVTLVPYL

SEQ ID NO: 151137 - protein, 163 aa, Oryza sativa
  Clone ID: PAT_MRT4530_51308C.1.pep
YPPLSFPSRIGANPFEYCVDSKRISSPIFPANSNQSVQIPLNIAWSGLLLPLLLLPPLPASCWRSCCRRCCLLLGLLLLLPPLLLLPPLPAAAAAFFLVIGGRGRALAAIGGENQRRTSWRWGRLPSRPLSEQGPFHLLIHKLYGEEGRGQLDAFFTLHPTVP

SEQ ID NO: 151138 - protein, 51 aa, Oryza sativa
  Clone ID: PAT_MRT4530_51309C.1.pep
LVRLVWCQPELRCCSDYGCLLRLNRHGCICNEGVSGRTGNSGCLTETSLYG

SEQ ID NO: 151139 - protein, 51 aa, Oryza sativa
  unsure (1)..(51): unsure at all Xaa locations
  Clone ID: PAT_MRT4530_5130C.1.pep
MATSMITSPLVAPARAKDLPSISRRXSFFAIVCSCWNKIKTVKPYWIGGGM

SEQ ID NO: 151140 - protein, 86 aa, Oryza sativa
  unsure (1)..(86): unsure at all Xaa locations
  Clone ID: PAT_MRT4530_51310C.1.pep
YYLQLASVRHLWSMYGTLYHILSGIHMELGVSKAGHPMDEVFPVSQIFHLXRTAAIHRALCNLHIFNGVGGVYYSLGYPRTPRYGR

SEQ ID NO: 151141 - protein, 62 aa, Oryza sativa
  Clone ID: PAT_MRT4530_51311C.1.pep
ACFAFYVKPKQDILFFYSCILGGSISCMPDFQCIWMSVLPRFILSILGSAYIFAVCYHAILF

SEQ ID NO: 151142 - protein, 89 aa, Oryza sativa
  Clone ID: PAT_MRT4530_51312C.1.pep
MALQAKFGQFQQNNLAPAGHSPRRSRGHALEVSLLEVLKEDFVTEVEAKVRGHAGLQEAPSSSASIAIGGGWRQCGLGRGMMTTTKIWP

SEQ ID NO: 151143 - protein, 293 aa, Oryza sativa
  Clone ID: PAT_MRT4530_51313C.1.pep
MDAPCGWTTSAAAAVAEEEDVRRGPWTVEEDAVLAGYVAANGEGRWNELARAAGLRRTGKSCRLRWLNYLRPDVRRGDFTPQEQLLILELHFRWGNRWSRIAQHMPGRTDNEIKNYWRTRVQKHAKQLGCDVNSRQFKDVMRHLWMPRLVERIHAAAASSERAAPPPCAAAPASHSGMCHSPDPSTTTSSMAGSSVTHGEQFPSSTNHHLMTMASVTTAAADWSSEQCGSGSATSTSVGISYDMFEGSWSELLARAYDDDGADSSLLPDFQMADTGDNCWWSNLEDIWSQQPY

SEQ ID NO: 151144 - protein, 128 aa, Oryza sativa
  Clone ID: PAT_MRT4530_51314C.1.pep
MAAVDFDLRFTYVLAGSEGTTHDAVVLRDALERENGLHVPQGDRIGGGGGGRGGGGGRGGGEPTCRVGAAAEPIKNIVSVRRRGGGGGGGGSGGERVLLAAPRLASRLAADVEPTKEKTATASTPTGA

SEQ ID NO: 151145 - protein, 320 aa, Oryza sativa
  Clone ID: PAT_MRT4530_51315C.1.pep
MARLAKKLKKKSFKHRNGPIRTRLGVGVRALLTPPPPQLDSESEPDSECGKEDRLDKWAGPDAREPSISRSARALRISAISSRLLSPSRAALRPSMAVPLPEPAAAMADVNCRCSRVVYVGNIAFHATEAELRDACELIGPVRSLRLAALDPATNKRKGYAFVEYADDETARSALRNLHGHLLRGRELRVGLAARPSIRRRGGGGGGEREPVGMEDAVHAASLVVSGRPLASVTRYLAARSRQEVREMVAALEATEQLKIPGLGTAMEQAQRLLEMFAADEEEVARKKLKRASDEEHAKQSKVVGVDGVVKASSRIVPCF

SEQ ID NO: 151146 - protein, 76 aa, Oryza sativa
  Clone ID: PAT_MRT4530_51316C.1.pep
MAAVDGDRARATAVMEGAEPERPASDGSKTRAAAANGGTAAVDGDGARVAAATVDGGDERVNGEAVGVNNEFDLIN

SEQ ID NO: 151147 - protein, 108 aa, Oryza sativa
  Clone ID: PAT_MRT4530_51317C.1.pep
WLDPHKVRPVDGWRAEPTHAVIEDGRVMVIEVAVGMLDQHPIGQILCPSRRILCVSSERYRSLKATLDDDENDVGGGHMLCRHGVVAGSDMERGVKRCSHGVKGGRGH

SEQ ID NO: 151148 - protein, 99 aa, Oryza sativa
  Clone ID: PAT_MRT4530_51318C.1.pep
VKQGFIYYNRCNFHARAHCPACRLLVFEPNFATLYSELFHTPYFIGFPHFDRFSCDKVSHQRKKALNIRTHNSYQVIFLSRSLAKEPIIIHQRFNHLIY

SEQ ID NO: 151149 - protein, 133 aa, Oryza sativa
  unsure (1)..(133): unsure at all Xaa locations
  Clone ID: PAT_MRT4530_51319C.1.pep
KKKKQKKDPNKKKKKKTKKQHKKKNKXXXXXPQNKKPNRNRKTSPSXGIEGNGKXAPKARDKEDRRREHEEQHEDHQRRHHAGEAASPLLLLLPRRRRPWSTGAASSSPSAGSGRRGGEGDVASPRREWADAW

SEQ ID NO: 151150 - protein, 167 aa, Oryza sativa
  Clone ID: PAT_MRT4530_5131C.1.pep
MKKKSIDLKTLWDRHSKSRKVGSGSGSGSTAQPVRIDSEVAVPFVQPITYANESPVQIQITAVEVVPEVYLKAVGLLGERHVSDFLENPSSSGEIANTFEFTWTVLSDTRLDPTIHVALCADPSTTVESEKKERRLRSLEPSLLTKTLVFFKQTLFNFFPLSCPREN

SEQ ID NO: 151151 - protein, 1766 aa, Oryza sativa
  unsure (1)..(1766): unsure at all Xaa locations
  Clone ID: PAT_MRT4530_51320C.1.pep
MSYYVDPYSSVPQFPILSVREYQSSTVARQVGGLGAQGSTSMTSRLPDNSPIISANQGVSTSTPLMWTQVGSIVFPVYTVTPISTGPIIIGSEKGTATTERNDAPPTIPPTPMENGTSTIPTPGRNPQAAEFHPPCERTKPTRITSLKPRTWCPVHKTTKHTLEDCPVILHVQAEVYACXERGIQRTSPTSTTYCPIHRSRVHDLTHYRIFLRTLKPAHHRVQQPRVQTPCVAKEPDAAPIPDRFVGFVDANEPSVLHLLEGYESSSQSPRDVNVVDNTETRMSAAMRTPAHKLRNLDAILRETVTNLNTAFAEAAGGPELNKDGERPPENKDGEDLTARHVTGDRSPRRRDPTPPRREDGDLREHLNGRRRNRRQRNENEHHRHHSPRRRERHNGRRNIPNENRDRPPRDDRRDDDNNRDREDSPRRREKDEGNRXDRNSQSPHPSRDRGRDHRSRSRAPDPSDPSSSSSSSSSDRPQRRRRDHRPHLAXGNGRRAFTPALRNVRWPEKFRPGSIEKYDGSTKPEKFLQVYSTNPGETLRDYTCFNECRNTIPEITDASVIRAFKSGIRDRYTTXELATRRITSTRKLFAIIDRCAHADDALRHKEGKSKAGDEKKKSTDKDAPESSKKRSHRSGKHKSSGEVLAAEQAEPSKRSNPXGDDSRKPWCPIHKTSNHALEDCYVVKKELAKQLAIERGKRVRVVEMAEQATTDNSNSAFPEYDLHVSHIFRGFCSTSQATTAKMKWSQHKIEFSEADHPKIATTPGRYPIMVEPTIRNIKVARVLIDGGSSINLLFASTLDTMGIPRSELTPTDQPFHKITSESLSKPLGKITLPVTFGHAENFRTEQITFDVAGFDTAYNVIIGRTALAKFMAASHYAYQVLKMPGPKGTITIQGNAKLAVQCDKRSLDMVEHTPNPPATTKNPKKPSDMPGVPREVIEHKLMVRPDAKLVKQKLRRFAPDRKQTIREELNKLLKAGLIREVLHPEWLTNPVMVRKANGKWRMFINFTDLNKACPKDHXPLPRIDQLVDSTAGCMAKEDEEKTVFITPFGVFCYTKMPFGLISAGNTYQRSIQGALGTQLGQNVEAYVQDIVVKTKKSDSLINDLRETFDNLRRYQMKLNPEKCMFGVSSGKLLGFLVSGRGIEANPKKIKAIENMKSPTRLKEVQRLTGCMASLSRFVARMGEQGQPFFTLLKKQDKFEWNQEAENALIVLKRYLSNPPVLVAPQINEESFLYIAATPYSVSTVIVVEREKVQHPVYYVSEALHDAKTRYPQIQKLLYVVVMTSRKLCHYFXAHKVTIVSSFPLGEVVRNKDVVGRIAKWVVELSQFDVHFVPRTAIKSQVLADQTDNETWTMEFDGALNSQGAGAGFILTSATGDKFKHAIHLNFRATNNTAEYEGLLAGIKAAAALGVKQLIVKGDSELVANKVHKDYKCSSPELAKYLVEVRKLERKFDGIEVRHVYRKDNVEPDDLAXHASRREPLKPGTFLDVLTKPSVKDTHDDSSDELPDDDTKAEKLSRQAKIYCMIGNDIYKKAPNGVLLKCISSDDGKALLLDIHEGICGSHVGARTLVGKAFRXGFFWPTALKDACEIVQRCEACQFFSKHTKLPAQALQTIPLIWPFSCWGLDILGPFPRGQGGYKFMFVAIDKFTKWIEAEPTREIKADNAIKFIRGIFCRYGLPHRILTDNGSQFTSGDFQDYCIELGVKILFASVSHPQSNGQVKRANRIVLQGIKTHVHDRLMAYDKKWVEELPSVLWAVQTTPTTSNK

SEQ ID NO: 151152 - protein, 187 aa, Oryza sativa
  Clone ID: PAT_MRT4530_51321C.1.pep
MAMEGKSRRFAVACGVLSQYVRAEQKMAAAAGAAPARAVTTLSLMPGAEVVVEEEERREVGEEEAGPATAPAAPLTIFYGGRMVVFEDFPADKAAEVMRMASSGMAAAPAQREGAALADMPIMRKASLQRFFAKRKDRLAATTPYARPSPAETKASEPEEKKTPTSWLDLAASASAAARRDSLTIAL

SEQ ID NO: 151153 - protein, 38 aa, Oryza sativa
  Clone ID: PAT_MRT4530_51322C.1.pep
VLHVVCEAIIDSLFLRAPAILARWVVTCCLSAYALPIL

SEQ ID NO: 151154 - protein, 806 aa, Oryza sativa
  Clone ID: PAT_MRT4530_51323C.1.pep
MALSTAQTGESMHSSTFASRYVRTALPRFRMPEKSIPKDAAYQIINDELMLDGNPRLNLASFVTTWMEPECDKLMMAAINKNYVDMDEYPVTTELQNRCVNMIAHLFNAPIGDDETAVGVGTVGSSEAIMLAGLAFKRKWQNRMKAEGKPHDKPNIVTGANVQVCWEKFARYFEVELKEVKLTQGYYVMNPEKAVEMVDENTICVAAILGSTLNGEFEDVKMLNDLLTAKNAETGWNTPIHVDAASGGFIAPFIYPELEWDFRLPLVKSINVSGHKYGLVYAGVGWVIWRNKEDLPDELIFHINYLGADQPTFTLNFSKGSNQIIAQYYQLIRLGFEGYKDIMQNCRDNATVLREGIEKTGHFDVVSKDSGVPLVAFSLKDSSRYTVFEVAESLRRFGWIVPAYTMPADAEHVAVMRVVIREDFSRGLAERLITDLTKTVADMDAHAVKKAAAEPAKKTVREIEKEVTTYWRSFVARKKSSLWEDEGNGGSGGPRCCSSSSPSQLPVRSSTARESLDHISINCTGGVGATSGCRSVHSRRSAPTRRARLLVPAQPRLCLDSPDWRQSAAGREWEQERDDGDDRRGSWLASESWWFVGDDATAAAATRVRREKRRACAGAGGAGGDGAARAPPSSSSASTRAAASTPGGGMRGSRMHYLRYYDAAFDAVDAAGLLETRPARAKVEEMFAREIRNAVAFEGAERFERHESFAGRRRRMEDGGGLQWGSKAEEKCLLPSSSLARRPRRQPSPPVSLRPDGSLPPAVAAAPLVLPLPRASAAEPPRCAPMPPTAAPLVLPPPLPTEKERI

SEQ ID NO: 151155 - protein, 85 aa, Oryza sativa
  Clone ID: PAT_MRT4530_51324C.1.pep
EEHLEHPRREHPPLRLERRQGGGAGVLDVVHGRHARLHRGRGLGEDDERGGVGGCSQILRARGGASLRIGKATNGVEWRRGVPRA

SEQ ID NO: 151156 - protein, 293 aa, Oryza sativa
  Clone ID: PAT_MRT4530_51325C.1.pep
MADRVYPAAKPNPPPAMANAGGGGATASFPAPKSQMYQRPIYRPQAAAAKRRRGRSCRCSFCCCFCWALLVVILLALVAAVAGGAFYLLYRPHRPSFTVSSVKLTALNLSSSPTSPSLTDSIQLTVTAKNPNKKVVYLYDDFSFSASTAANAVPLGAATSPGFTHDAGNTTVFTATIAANAVAVDPAAAASDIKKSGAFSVAVDAETRAGVRVGSLKTKKIGIQVHCEGIKVTPPPPAALPRPKAVKGKNGTVLAPAPAPADSDTAATTAATVSTAAHSCKVRVRVKIWKWTF

SEQ ID NO: 151157 - protein, 92 aa, Oryza sativa
  unsure (1)..(92): unsure at all Xaa locations
  Clone ID: PAT_MRT4530_51326C.1.pep
MESSSLWGVLGQASNVAQLVGVNALGLVSMVVQAALAVRLHRDACRRLGQHVELVCCLLRELELAKLMRRGGHQRSPXKQLKGALRRCYALV

SEQ ID NO: 151158 - protein, 80 aa, Oryza sativa
  Clone ID: PAT_MRT4530_51327C.1.pep
MTAAAAAAAAAESWRGGERDRNALVFRGVTRESAPPVHRVDETAPPVRGIEHASRGEPSAATAVSNQPPSAVGLQCQQHA

SEQ ID NO: 151159 - protein, 56 aa, Oryza sativa
  Clone ID: PAT_MRT4530_51328C.1.pep
CPRWPGTIQQRLGGGSAIYRQPDRWCDPSAYMAPPSEKQGGDRSAQGNAGDENRRL

SEQ ID NO: 151160 - protein, 132 aa, Oryza sativa
  Clone ID: PAT_MRT4530_51329C.1.pep
NEIPIQCCRWDSRRIGEGTSRMLLTLEADGGWRLVGHRRGRRRLTPARVLYFKKKESSERDAALVWLDWDGRQRLATRAPPHDAADRRGSLVHSVDGRCALARHAAKNQRISVPFPSPPRLRRRRRRRRRRH

SEQ ID NO: 151161 - protein, 258 aa, Oryza sativa
  unsure (1)..(258): unsure at all Xaa locations
  Clone ID: PAT_MRT4530_5132C.1.pep
PRVRPRVRNSALIDREWKVAEVCQKLEHSLEILGVSAIEDRLQAGVPETIEILRQSGINFWMLTGDKQSTAIQIALLCNLISSEPKGQLLYINGRTVDEVARSLERVLLTMRITTSEPKELAFVVDGWALEIILSRYNEAFTELAALSKTAICCRVTPSQKAQLVKLLKSCDYRTLAIGDGXNDVRMIQQADIGVGISGREGLQAARAADYSVGKFRFLKRLILVHGRYSYNRTAFLSQYSFYKSLLICFIQILFSFL

SEQ ID NO: 151162 - protein, 50 aa, Oryza sativa
  Clone ID: PAT_MRT4530_51330C.1.pep
RLYCTHAFSSALATHCLNFIKLPSHSSSFPLLSFLLTLVFIVQEYDTLWA

SEQ ID NO: 151163 - protein, 70 aa, Oryza sativa
  unsure (1)..(70): unsure at all Xaa locations
  Clone ID: PAT_MRT4530_51331C.1.pep
VRIWICTLVEKRSLVGPPDFTIVPVILKTGTKNIFSPGLKAQRNFLIFSTGWXLPTGTKDLFIVPVGNTN

SEQ ID NO: 151164 - protein, 58 aa, Oryza sativa
  Clone ID: PAT_MRT4530_51332C.1.pep
FVFLFSNVIFFILFFMFFMRPPYRNVKTAYKNIRSMKALYGSSKPPLLGGIQGHPRKL

SEQ ID NO: 151165 - protein, 168 aa, Oryza sativa
  Clone ID: PAT_MRT4530_51333C.1.pep
MGKHGDPRTLPNGRCLRSLDDWRLKKAQKRAARRRAAAAGSRRSARRCEREQPQASGGGGCRPAPATPRQHVKDQASSRQPLSPTAAKYKKVEPGNIIVRQRGTRFHPGNYVGMGKDHTLFCLKEGHVRFERNKLTGRKWVHVDPVAGHVLHPVYTSDSTPAAEMEPL

SEQ ID NO: 151166 - protein, 109 aa, Oryza sativa
  Clone ID: PAT_MRT4530_51334C.1.pep
SIWPSIVLSTSSRTASVTHRSCGLPLLSVSTITFGDSDLTTVRKRARRRVAFSPPPPSLLAAASSTPRRPPPAPPPPPTSAAAAPPPVPPPPPTSAPPPTGSPKKGSCS

SEQ ID NO: 151167 - protein, 125 aa, Oryza sativa
  unsure (1)..(125): unsure at all Xaa locations
  Clone ID: PAT_MRT4530_51335C.1.pep
KARNPYALAARTLLKLAPGEQGSVLRPSKHLLWKMSKHVRRLHSRTEGFSSPKEMVSPVNTIVKHPLNLKVKDPDGCTLSGNKVLTVTVLSGQSAASLRQGDISCLFHDEKGINPSRPDNXLMWL

SEQ ID NO: 151168 - protein, 611 aa, Oryza sativa
  Clone ID: PAT_MRT4530_51336C.1.pep
MSSSPLTATPSPLLPAKSKNPPPHHHHHNPLLAYLPHCTSLRALAQLHAVAVKAGGGLQAHPAFVTRLLTLCTEQGAEAPAHLAYARQVFDRIPHPGDVVWYNTLLRGYARGGGGGGGAEEAARVFVRMMEEGVAPDTYTFVSLLKACASARAGEEGRQAHGVAVKAGAAEHEYVAPTLINMYAECGDVRAARVMFDRMDGECVVSYNAMITASVRSSLPGEALVLFREMQAKGLKPTSVTLISVLSACALLGALELGRWIHDYIRKMRLDSLVKVNTALIDMYAKCGSLEDAIGVFQDMESRDKQAWSVMMVAYANHGYGREAISMFEEMKKQGMKPDDVTFLGVLYACSHSGMVSEGLQYFDSMREYGIVSGIKHYGCVTDLLARSGQLERAYKFIDELPIKPTAILWRTLLSACAGHGDVDMGKRVFERILELDDSHGGDYVIFSNLCANTGRWEEMNMVRKLMSEKGVVKVPGCSSIEIDNMVHEFFAGDGSHPHSQEARRMVDEVIEQLKLVGYVPNTSHVFHVEMGEEEKATSLRYHSEKLAISFGLLNTAPGTTLRIVKNLRVCPDCHSMAKLVSMVFNRRIILRDLNRFHHFEDGVCSCGDYW

SEQ ID NO: 151169 - protein, 165 aa, Oryza sativa
  unsure (1)..(165): unsure at all Xaa locations
  Clone ID: PAT_MRT4530_51337C.1.pep
AWTAPTSTPSTPAAVDVSHHSPSEXLHRLHIELPTGELGIEDGVLLKWKADFGVQGRHAQLPSQQQRRSGGSRWSSSGREAVASPAATAGPPRDPVGHGTWRLFAGADEGRRAPPSAGANSSQSSSSTTAESTARDSSLHTVQVFRYGSPVHRHTPPCVPALCDV

SEQ ID NO: 151170 - protein, 56 aa, Oryza sativa
  unsure (1)..(56): unsure at all Xaa locations
  Clone ID: PAT_MRT4530_51338C.1.pep
IHWNRXGPLWTRLHDLLRAMNCEYKNIRMSHLRQLIILSPLIKLXKKCCRLHQPVY

SEQ ID NO: 151171 - protein, 278 aa, Oryza sativa
  Clone ID: PAT_MRT4530_51339C.1.pep
MAAGAPVPPDLLLHLRHRAAAAAAADVDTVPSLAFPPHHLGWGCYGAAAAQYGRRVEDPEPGRCRRTDGKKWRCSREAYGESKYCEKHMHRGKNRSRKPVEMPPPAAAAVYRPSALSISPPPHDADAPSYGAGAGAPLQLHLDSFHASTSPPPSYHRYAHTSSAPLFPSSAAGYGGGWSLSKEHCLTLGGAAADLSLDKPADHHHDATSATTEKPLRRFFDEWPRSDDGRTPWDGTQLSISIPTAAAASPDLAIAGAASRYHSNALVYIRLMLTPYFC

SEQ ID NO: 151172 - protein, 58 aa, Oryza sativa
  unsure (1)..(58): unsure at all Xaa locations
  Clone ID: PAT_MRT4530_5133C.1.pep
PVGCTAIPLTVCVRLLTVTRRGDLLRTLQIXTPSESYHWEQTLXKKAKLSCLFTSQFL

SEQ ID NO: 151173 - protein, 172 aa, Oryza sativa
  unsure (1)..(172): unsure at all Xaa locations
  Clone ID: PAT_MRT4530_51340C.1.pep
HRGFGLYNLXAHDSASSAAFNPKYILDYFRRNGRHGWVSLGGVLLCFTGTEALFADLGCFSIRSIQLSFAFGLVPAVLLAYAGQAAYLRVYPDHVGDAFYASTPQVLFWPTLVLALAASVVGSQAMISCAFATISHSQAMGCFPRVKVVHTSRQYQGQVYIPEINLLLGAPL

SEQ ID NO: 151174 - protein, 99 aa, Oryza sativa
  unsure (1)..(99): unsure at all Xaa locations
  Clone ID: PAT_MRT4530_51341C.1.pep
LFFPVFSQCHANAQSNQTLISTLCTRGTWGTATCKSPAHSQAERWPASRQQTSQELSTTTPPKAIIPSFQTXLXTKNRRTPVSIPSLTRTQPFMHISCG

SEQ ID NO: 151175 - protein, 314 aa, Oryza sativa
  unsure (1)..(314): unsure at all Xaa locations
  Clone ID: PAT_MRT4530_51342C.1.pep
SRAHPCGAAAAATPSTLRLRCSHPPQAIVASLCTDAPFLCEPPPPVLPPSPKHHRLPTXPPPLRACLGATRSVAEPPPDPPXTVAPPPPHRQAIATAPLRQATTPRQATVVPPPPRRAAATTPPPRLAIIAPPPPCRAAAAAPPSHQAAASLPPXKPPPSVDPISCPPPSPSTRSDRCIPXQPPTPPPSPPPPFPPPDSGGRXSPPTTSVPPLPSLPFLRPDXKGRSLPPPPPSPPLPPPSSPSPQGEPPLHHLHVAPPPPSPPPRRRPPTPPPPLQPPPIPSLXRPIPPPPPPXTPPPASPTGRRASTAPVRP

SEQ ID NO: 151176 - protein, 184 aa, Oryza sativa
  unsure (1)..(184): unsure at all Xaa locations
  Clone ID: PAT_MRT4530_51343C.1.pep
EGGEGPPAAVVACGGPHHHPSLHRIQEGGRSPPTTSVPPLPSLPFLRPDLQGEVSATATTIPAPCSGWIXDREGRGAASAPPPSLRAAAVAREGSRLYVATIARRHXLPFVRPDLGAGKEGVAATVASSTVVTVAASAPPLSLPLIQLERGGTASAPPPRRTTATLPSSDRIWREGGEGEGQHA

SEQ ID NO: 151177 - protein, 312 aa, Oryza sativa
  unsure (1)..(312): unsure at all Xaa locations
  Clone ID: PAT_MRT4530_51344C.1.pep
PTLLGRERERLPLTPSPTTCSIRSNPLLSPDRTEASNGAPPPPPLRAGGASPPGLHASPPAPGPNPRALPPPPPSPSPPPXPPHPPAHPPPPPPPPPPPPRAAGPPPPPPPPXXPAPXPPPAPPHPPPHPPTPPHPRTPGXEPPXPPPPRPPTTRPXRPPXPXRPPPDRXPPPPPPRSPPPPPPPPPPPPPXXTXXXXAPPPHPPPPPPPXXXXXXXXPXXXXPXPPPXPPPPPPPPXPPPPHTPPPPPPPPPPPXXXXXXXXHXPPPPPPPPPPXPPPXXPXXXPXXXXXXXPPXXPPPPPPPPPPPXXPP

SEQ ID NO: 151178 - protein, 130 aa, Oryza sativa
  Clone ID: PAT_MRT4530_51345C.1.pep
KLKDDDALRQAMALTVSCRRLLGHSQATVELLLVAHRAFPRAGAHLPSTRCTERGPEHVEGWVAAVRRGGGGRGGDGEGGRRGGRGEGRLPRPLPLAAVRLSAGPRAAAHRAPPSSATPARHFPPPAPLH

SEQ ID NO: 151179 - protein, 140 aa, Oryza sativa
  unsure (1)..(140): unsure at all Xaa locations
  Clone ID: PAT_MRT4530_51346C.1.pep
MASATLLTKSIVPRMSEWVASRQAAAPKPETVCMAARTGAYDDELVKTDRTIGSPGRGISCHAMRSNATCPKRPESIALDNTEANLQAYRTVLVTAPCLIQXIYGAILCEETLYQSTVHGKKSVHILTEHKSXPGINVDR

SEQ ID NO: 151180 - protein, 303 aa, Oryza sativa
  unsure (1)..(303): unsure at all Xaa locations
  Clone ID: PAT_MRT4530_51347C.1.pep
MVADGQASRGGHTVRPKVGHVTEFFGDGLPEKKLQLVDTPCPRPGPLTSGSFYRSIRLATSQSSFETGFRKRSCNLLTHLVPGQAHLHLAAFIALGRDVTFVVHPKRRQVAKMVTREEEDDGATQVNGADGVPAIAXRGEGVDEVGGDGDASGGGTEARGVLNGGEAWLELGGDDGERERERRRWLDSMDERKHKVAKTREGXAVRVFVAMGERERESRGERETXRQILPPSMVPARFAGLNLIALMREREXKWGEXERESWGVIPLPTWTETAGSSGTRGSGGGARRKRREDGDDSARGVAE

SEQ ID NO: 151181 - protein, 64 aa, Oryza sativa
  unsure (1)..(64): unsure at all Xaa locations
  Clone ID: PAT_MRT4530_51348C.1.pep
WCXFYPYLFRHLAEYLTSRFGYERMSGMNTGADGVRTAIKSARKWGHQKKTIPESDAFIVLWCG

SEQ ID NO: 151182 - protein, 47 aa, Oryza sativa
  Clone ID: PAT_MRT4530_51349C.1.pep
IEKVYMPLNQNLPSNDSNGLYNETITQTRVNQKKLVFKKKKKKNTNI

SEQ ID NO: 151183 - protein, 207 aa, Oryza sativa
  unsure (1)..(207): unsure at all Xaa locations
  Clone ID: PAT_MRT4530_5134C.1.pep
FRGMAVEDPSQPHGLRLLIEEYPYAADGLXLWSAISRWSEAYVAAYYPSDKAVQADYELQSWYAEAVQSRHADKRDAPWWSRLSMPGXAEGDLEYAHLVADPHRFFLSALPSLTQTTTXMTVIDTLSTHSAAPPPDSPSTAAPPSLPSAACWCSPAVQTTAPPSCLRHNSHRERNLATPADDADVAAHGQAVGASLTEEVLPMLEEV

SEQ ID NO: 151184 - protein, 110 aa, Oryza sativa
  Clone ID: PAT_MRT4530_51350C.1.pep
MKIGDGSTSDASVERVVPNSSVMELLLLTRANYHQWALVMRVSLEALELWDAVEAVTKDRLALATILHAVPPKMKVGLAVMTSAKEAWDSVKMMRAGDDRVKSASVPRFL

SEQ ID NO: 151185 - protein, 56 aa, Oryza sativa
  Clone ID: PAT_MRT4530_51351C.1.pep
YLAPIPRPLPFPLVPLKSATTTPTSPPPLRRQFLPFPASCRTPRPIKTLPGAPVTP

SEQ ID NO: 151186 - protein, 41 aa, Oryza sativa
  Clone ID: PAT_MRT4530_51352C.1.pep
VGDVPVDSETPTVTSSISPGFAGPVFEDAHRSRVCVRAFIG

SEQ ID NO: 151187 - protein, 225 aa, Oryza sativa
  Clone ID: PAT_MRT4530_51353C.1.pep
MPTTKKDNKVGDAVKERRRYDGGERGSRFRARRQKQRSAWLPDDMDPLKSDANGEPAADADGDAEAVGSGAEGIEASQGAPVPAAVAATKADSVEADRQTTVRSGHVRRGDDGCKSSTQRQRVGAQGQRAGDGAHEQRRERPMLRCGVDGCMAAAGSTAAANSPPPDLVHPSLSILTPPQLHQPVSHRYLSTLTPPRNFGWRRELVLEAAIAISREEKGTILSPV

SEQ ID NO: 151188 - protein, 60 aa, Oryza sativa
  Clone ID: PAT_MRT4530_51354C.1.pep
LSFPFQVEKYTEVSLNLSSSYQNRPSSTKQIPGSPSTNKTCSLECPSGGVLTPVLYLRVR

SEQ ID NO: 151189 - protein, 129 aa, Oryza sativa
  Clone ID: PAT_MRT4530_51355C.1.pep
MGSTGQVVTGCGHGPGGRPFGAAPYFTIAGALSTIILVKGMPGWSLVMLVKPGFFQDETMPLLDVWQWDTMTTAKGRTAQRESSDTACRREQLEPLFFDEPFPTEIDGGSTMRVLENFRISQGAAATPD

SEQ ID NO: 151190 - protein, 160 aa, Oryza sativa
  Clone ID: PAT_MRT4530_51356C.1.pep
MTPMTPTRCCGALLDRIAFPAQAVVAVPHMALLQYSDQHFCYHQWCPTTIAEGGKLMRANGKTMLVKAAAFHTLPLLCATTRRRVALPLDVKGLQPHQVAIATQLPRALPTRHPTITYHHPILISSTSRRPTTTEKTWRVWGKKRNDRQEDEVWVMLYFF

SEQ ID NO: 151191 - protein, 141 aa, Oryza sativa
  Clone ID: PAT_MRT4530_51357C.1.pep
GAVVRSDVGRGALDEGMVRTAEGEQFKGGGMDRDASKRGNKVDLSSFNCVERGCKRSSGFLSDVIHSRFSRQRVAFHSIPDLDTLSPDVWAMHARRCALLLCTGRRAANSGEFSARSSPSEQAIAGHGGGGGGLNSCKRST

SEQ ID NO: 151192 - protein, 1499 aa, Oryza sativa
  Clone ID: PAT_MRT4530_51358C.1.pep
MATPARFSTKPHVFDGTDFTHWCSRMQSYIMAKDYDIWRKVSHAYVIPEVINTAAEKTAFEQNCKARNIFLSGISRSHYDRVAHLETAHEIWNALKNFHQGTNNIKELRRDLFKKEYIKFEMKHGEALDDYLSRFNKILSDLRSVDSSYDVNYPQSEISCHFLNGLDMSIWEMKVTSIQESVNMNRKRGGPNRCFECGSIDHLRSHCPKLGRGKREGKDGEKTNNNKPNNYKSKGSNQGRKMENLRKAFQQVCAAFEPLSDVDGESGDDDKGKNVSDVCFMARGESDTEYEDNEVSAFEEAINILSAKNKKCEKMYKKQEFIIKSLKSEIDRLKSLIPNDDDCENCEVLMNEISKIRDVNAAHDLKNRPSLACSFALHTRTLDELFLTKKLLQKYQIAFYASLMFNMISAKKLKQHHDVLDCSTCNLNNMKLKDALGHVEYMEDVVKNNEVLSCPKCRKSKGVMVDCENCVNLEKEVSYLKNSLLRFSDGVGARSGEILIKPDTNKTVFKSAGIMSTMSASSSKSNVVHAKPPVSACVAKSSSSNNVSKQREKYTCSFCGKDGHIVDFCFRLAHKQKKEREIAFAKSKWQKSGFPSKKPVRPQWVPRSDWRPVRPAEQPRSDRAPVRPAVQRRSDRPPALVARKENVWIVDSGCSWHMTGDKDWFSSLKKASKTESIVFADASTSVVVATGMVKDEAFQHFRGLFLRLELEFPGLRRIRSDNGGEFKNASFEQFCNERGLEHEFSSPCVPQQNGVVERKNRVLVEMARTMLDEYKTPRKFWAEAINIACYISNRVFLRSKLGKTSYELRFGHQPKVSHLRVFGCKCFVLKSGNLDKFEARPTDGLFLGYPAHTRGYRVLILGTNKIVETCEVSFDDASPGTRPDISGTLSQVQGEDGRIFEDESDYDDNDEVGSAGQTGRQASQTAGTPPVRPAHEERSDRPGSSGSGTVDADQDGPPENSTSNSTDTERGSTSEVAAPLHIQRRHPPEQIIGNIGERTTRSKVTAHDVCANSAFVASFEPKDVSHALTDESCINAMHEELENFERNKVWTLVEPPSGHNVIGTKWVFKNKQNEDGLIVRNKARLVAKGFTQVEGLDFDETFAPVSRIEAIRLLLAFAASKGFKLYQMDVKSAFLNGFIQEEVYVKQPPGFENPDFPNHVFKLSKALYGLKQAPRAWYDRLKNFLLAKGFTMGNVDKMLFVLKHGDNQLFVQIYVDDIIFGCSTHALVVDFAETMRREFEMSMMGELSYFLGLQIKQTPQGTFVHQTKYTKDLLRRFKMENCKSISIPIGSTAVLDPDEDGEAVDQKEYRSMIGSLLYLTASRPDIQFVVCLCARFQASPRASHRQAVKRIMRYLNHTLEFGIWYSTSSSICLSGYSDADFGGCRIDRKSTSGTCHFLGTSLIAWSSRKQSSVAQSTAESEYVAAASCCSQILWLLSTLKDYGLTFEKVPLFCDNTSAINIAKNPVQHSRTKHIDIRFHFLRNHVEKGDIELQFLDTKL

SEQ ID NO: 151193 - protein, 775 aa, Oryza sativa
  Clone ID: PAT_MRT4530_51359C.1.pep
MASRLKEDERNERIIRGLLKLPANKRCINCNNLTTNVATFCQIYITRYDLGLEQWPRGTTICLYKFLDLHLYQLQWSTDDKDEYSENRRSDGNWGGSRSPPYNESYSDRRSYSGRSDDRNSRYSYGERSPGYEHNDYKKSPRYFEVDDRNREDRSGKTTPVQRFEDRRPSEPQRPDNGSPNYQKETDGSSPVVRPVRDILGDNAPQLRVGEPPKPNVARTIDPPRPIDPPRPIDPPRPIDPPRPIDPPRPNGTRTIEPPPQMQRTSTASSIGSSEGTSEQIKVASTISLIDFSADPEPSASVPPPQSTPTSQQQPASAQPVQPVNAPAQQPAVEQGKNVSSVSSGGGDWASFDSFGQQQTPQTGNSVDPLESALAQLSFSETPSAPNSSAFPASVMPTSVPNDGGSSMMGQSHSSFFGAPPGVSGHQASTGMSIHGSSVQQTGLAAPAAGLPFQVSANSRATSGIQEAAPNTDSRSIGRKELPADIFTSLYPPGPQTIGGWQRTPQFGMGYAMPYQTAMGMQAYPQMAFAQPAYQQPVYPQQQHAYPQPAKASNPFDLGNEPAPVQAHTQQPLPGPLGASAGMTPPGLLGTSSFGVLPQQPQQLYQSPAPPNHYMMQQVPNMSEQLPNTMLPMQQGGLGSLNMGFDQQAAPSWLYNSFPQGQWSSVTASEHKLHPSEFLMRIPIVFVYLCLMRLQHVVYLPPVQLAIKIYVDDCIKETFWIQQAYFYPMYSCVKYGSSLANQIQPQREGNIPLRIHNGKTLHLYKLNQCIRLLSR

SEQ ID NO: 151194 - protein, 991 aa, Oryza sativa
  unsure (1)..(991): unsure at all Xaa locations
  Clone ID: PAT_MRT4530_5135C.1.pep
MSNNNTSNILLLLLLFFLGSGAELDDGGELQTLLTIKRDWGSPAALSSWKXRNSSSFSHCNWAGIGCSTDGQVTSLSFQSFQIANPIPASICSLKNLKYLDLSYNNLTGDFPTVLYNCSALQFLDLSNNELTGSLPSNIDKLSLGMQHLNLSSNYFIGDVPSAIARFLKLKSLVLDTNSFNGSYPGASIGGLVELEILTLASNPFMPGPIPNEFSKLTKLTYLWLSWMNLTGDIPDALSALKELILLDLSKNKMQGKIPKWIWKLQKLEMLYLFASNFSGEIGPYISTLNMQELDLSMNKLTGSIPEDIANLKNLRLLYLYYNNLTGSIPKGVSMLPNLTDIRLFNNKLSGPLPPELGKYSELGNFEVSNNNLSGELPDTLCFNKKLYDLVVFNNSFSGVFPMNLGDCDTINNIMAYNNHFVGDFPENIWSFAKLINIMIYNNNFTGNLPSEISFNITRIEIGNNMFSGALPSAAIALKNFMAENNQFSGALPDDMSRFANLTELDLAGNRLSGLIPPSMQSLTKLTSLNLSSNQISGEIPAVLGLMDLNILDLSNNKLTGHIPQEFNDLHVNFLNLSSNQLSGEVPAALQTLAYEDSFLDNPSLCCQSESGMHIRTCPWSQSMSHDHLALSIRAILVILPCITLASVAITGWLLLLRRKKGPQDVTSWKMTQFRTIDFTEHDIVSNISECNVIGRGGSGKVYRIHLGGDIKAGRHGGGCTPRTVAVKRIGNTSKLDTNLDKEFESEVRTLGDLRHSNIVDLLCCISSQETKLLVYEHMENGSLDQWLQRYKRAGKSGPLDWPTRVAIAIDVARGLSYMHEDFVQPVIHRDVKCSNILLDREFRAKIADFGLARILAKSGESESASAVCGTFGYIAPEYAYRSKVSVKVDVYSFGVVLLELATGRGPQDGGTESGSCLAKWASKRYNNGGPVADLVDGEIQDPSYLDDMVAVFELGVVCTSEEPASRPPMSDVLHRLMQCSLSSHIQTKPL

SEQ ID NO: 151195 - protein, 1145 aa, Oryza sativa
  Clone ID: PAT_MRT4530_51360C.1.pep
MPGTGKEVVQIVALNVVQLIIFVRIVLSLGEAKEKIKMVRRPTNNKPNNNKSKGSIQGRKTENLRKAFQQVCAAFEPLSDVDGESGDDDKGKNVSDICFMARGESDTEYEDNEVSAFEEAINILSAKNKKCEKMYKKQEFIIESLKSEIDRLKSFIPNDDDCENCEVLMNEISKIRDVNVAHDLKNKSSLACSFALHTRTLDELFLTKKLLQKYQIAFHASLMFSMISAKKLKQPHDVLDCSTCNLNKMKLKDALGRVEYMEDVVKNNEVLSCPKCRKSKGVMVSYLKNSLLRFSDGKKNLNMILDQSKALVARKENVWIVDSGCSRHMTGDKNWFSSLKNASKTESIIFGDAATSAVLATGLVKVNEKFELKNVALVEDLKYNLLSVSQIVDENFEVHFKKTGSKVFDSCGDSVLNISRYGRVFKADFENPVSPVITCLVAKFDKDVMFWHRRLGHVGFDHLTRLSGLDLVRGLPKLKKDLDLVCTPCCHAKMVSTSHAPIVSMMTDAPGQLLHMDTVGSARVQSVGGKWYVLVIVDDFSRYSWVFFMATKDEAFQYFRGLFLRLELEFPGSLKRIRSDNGGEFKNASFEQFCNERGLEHEFSSPRVPQQNGVVERKNRVLVEMARTMLDEYVIFWAEAINTACYISNRVFLRSKLGKTSYELRFGHQPKVSHLCVFGCKCFVLKSGNLDKFEARSTDGLFLGYPAHTSGYRVLILGTNKIVETCEVSFNEASSGTRPEIAGTLSQVQGEDGRIFEDESDYDDDDEVGSAGQTGRQAGQTAGTPPVRPAHEERSDRPGSSGSGTVDADRDGPPEITTSTSTDTERGSTSEVAAPLHIQRRHPPEQIIGNIGERTTRSKEEVYIKQPPGFENPDFPNHVFKLSKALYGLKQAPRAWYDRLKNFLLAKGFTMGKVDKTLFVLKYGDNQLFVQIYVDDIIFGCSTHALVVDFAETMRREFEMSMMGELSYFLGLQIKQTPQGTFVHQTKYTKDLLRRFKMENCKPISTPIGSTAVLGPDEDGEAVDQKEYRSMIGSLLYLTASRPDIQFAVCLCARFQASPRASHRQAVKRIMSAINIAKNPVQYSRTKHIDIRFHFLRDHVEKGDVELQFLDTKLQLADIFTKPLDSNRFAFLRGELGIIHPFGMV

SEQ ID NO: 151196 - protein, 432 aa, Oryza sativa
  Clone ID: PAT_MRT4530_51361C.1.pep
SARGPIDPPRPNGTRTIEPPPQMQRTSTASSIGSSEGTSEQIKVASTISLIDFSADPEPSASVPPPQSTPTSQQQPASAQPEQPVNAPAQQPAVEQGKNVSSVSSGGGDWASFDSFGQQQTPQTGNSVDPLESALAQLSFSETPSAPNSSAFPASVMPTSVPNDGGSSMMGQSHSSFFGAPPGVSGHQASTGMSIHGSSVQQTGLAAPALGLPFQVSANSRATSGIQEAAPNTDSRSIGRKELPADIFTSLYPPGPQTIGGWQRTPQFGMGYAMPYQTAMGMQAYPQMAFAQPAYQQPVYPQQQHAYPQPAKASNPFDLGNEPAPVQAHTQQPLPGPLGASAGMTPPGLLGTSSFGVLPQQPQQLYQSPAPPNHYMMQQVPNMSEQLPNTMLPMQQGGLGSLNMGFDQQAAPRYPQPSTPPSYGSVGGNPFG

SEQ ID NO: 151197 - protein, 230 aa, Oryza sativa
  Clone ID: PAT_MRT4530_51362C.1.pep
MNDADVAKQIQQMVRFIRQEAEEKASEISVSAEEEFNIEKLQLVEAEKKKIRQEYERKEKQVEVRKKIEYSMQLNASRIKVLQAQDDLVNSMKEDATKQLLRVSHNHHEYKNLLKELVVQGLLRLKEPAVLLRCRKEDHHHVESVLHSAKNEYASKAEVHHPEILVDHDVYLPPSPSSHDSHERFCSGGVVLASRDGKIVCENTLDARLEVVFRKKLPEIRKLLFGQVTA

SEQ ID NO: 151198 - protein, 1857 aa, Oryza sativa
  Clone ID: PAT_MRT4530_51363C.1.pep
MHVVDGDSIWHTMEVLCAYGMRSRIWKESKFERSNKVVIYFESSSICVSLGFGGLTGISAAVRPAASQRSDRRRKGGQTGGGDSKRQLIRRSDRSSNLSQTGGFQMVRPARLPRRMQSYIMAENYDIWRKVSLPYVIPEAINTDALKTEFENNCKARNILLSGISRSDYDRVAHLETAHEIWNALKNFHQGTNNIKELRRDLFKKEYIKFEVKSGEALDDYLSRFNKILSDLRSVDSSYDVNYPQSDISRHFLNGLDMSIWEMKVTSIQESVNMSTLTLDSLYTKLKTHGMNILSRKVDSKSSALVSSSSSLVIDASSSMPSFLAAFNATSDDQLEQIKEEDLALVANRIARAMNNARNRKRGGPNRCFECGSIDHLRSHCPKLGRGKREDKDGEKTNNNKPNNYKSKGSNQGRKMENLRKAFQQVCAAFEPLSDVDGESGDDDKGKNVSDVCFMVRGESDTEYEDNEVCAFEEAINILSAKNKKCEKIYKKQEFIIKSLKSEINRLKSLIPNDDDCENCEVLMNEISKIRDVNAAHDLKNRSSLACCFALHTRTLDELFLTKKLLQKYQIAFHASLMFNMISAKKLKQPHDVLDCSTCNLNKMKLKDALGRVEYMEDVVKNNEVLSCPKCRKSKGVMVDCENCANLKKEVSYLKNSLLRFSDGKNNLNMILDQSKVSTNNRGLGFDPYAHNSRHPPVVLGVGAKSGEILIKHDTNKTVFKSAGIMLTMNVSSSKSNVVHAKPPVSACVAKSSCSNNVSKQREKYTCSFCGKDGHIVGFCFRLAHKQKKEREIAFAKSKWQKSGFPSRKPVRPQWISRSDRRPVRPAAEPRSDQTPVRPAVQRWSDRPPALVARKENVWIVDSGCSRHMTGDKNCFSSLKKASKTESIVFANASTSAVVATGLVKVNENFELKNVALVKDLKLGHIGFDHLTRLSGLDLVRGLPKLKKDLDLVCTPCRHAKMVSTSHAPIVSVMTDAPGQLLHMDTVGPARVQSVGGKWYVLVIVDDFSRYSWVFFMATKDEVFQHFRGLFLRLELEFPGSLKRIRNDNGGEFKNASFEQFCNERGLEHKFSSPRVPQQNGVVERKNRVLVEMARTMLDEYKTPRKFWAEAINTACYISNRVFLRSKLGKTSYELRFGHQPKVSHLRVFGCKCFVLKSGNLDKFEARSIDGLFLGYPAHTRGYRVLILGTNKIVETCEVSFDEASPGTRPDIAGTLSQVQGEDGRIFEDESDYDHDDEVGSAGQTGRQAGQTAGTPPVRPAHEERSDRPGSSGSDTVDADRDGPLENSTSTSTETERGSTSEVAAPLHNQRRHPPEQIIGNIGERTTRFKVTTHDVCANSAFVASFEPKDVSHALTDESWINAMHEELENFERNKVWTLVEPPSGHNVIGTKWVFKNKQNEDGLIVRNKARLVAQGFTQVEGLDFDETFAPVARIEAIRLLLAFAASKGFKLYQMDAKSAFLNGFIQEEVYVKQPPCFENPDFPNHVFKLSKALYGLKQAPRAWYDRLKNFLIAKGFTMGKVDKTLFVLKHGDNQLFVQIYVDDIIFGCSTHALVVDFAETMRREFEMSMMGELSYFLGLQIKQTPQGTFVHQTKYTKDLLRRFKMENCKQISTPIGSTVVLDPDEDGEAVDQKEYRSMIGSLLYLTASRPDIQFAVCLCARFQASPRASHRQAVKRIMRYLNHTLEFGIWYSTSSSICLSGYSDADFGGCRIDRKSTSGTCHFLGTSLIAWSSSKQSSVAQSTAESEYVAAASCCSQILWLLSTLKDYGLTFEKVPLFCDNTSAINIAKNPIQHSRTKHIDIRFHFLRDHVEKGDVELQFLDTKLQIADIFTKPLDSNRFAFLRGELGVIHPFGMV

SEQ ID NO: 151199 - protein, 94 aa, Oryza sativa
  unsure (1)..(94): unsure at all Xaa locations
  Clone ID: PAT_MRT4530_51364C.1.pep
RFGLAPSGIRKSPAGLXLEGRDSGLQTGAPPGFTLADPLAFGPVGPILGVGVVPGPQNMGVLGPVFGLSNSFTQSPGSIPPCGIHALVPVLWPM

SEQ ID NO: 151200 - protein, 1209 aa, Oryza sativa
  unsure (1)..(1209): unsure at all Xaa locations
  Clone ID: PAT_MRT4530_51365C.1.pep
MPPLLGVYVFTDRLAFAAADWCFCLHGWPIMPPLLGVYVFTDRLPSSAADWCLRLHGWPIMPPLLGIYVFTDRLPSSATDWCLRLHGWPIMLPLLSVYVFNDRLAFVAADWCLRLHGRPIMPPLLGIYVFTDRPPRLLSTVFIMHTLASRKLLELQYLLNSLMDYCHWHHHQHLYFIGPDVFAVAKGRVPSTVFIFGKSTREIMAKMIEALGFRVIADLSFYVTGQTGLCMPVRPAVIERSDRPVRAVRPAASRRSDRWVTYGLTGGDIRRDRDSRAVQPVGRGKREDKDGEKTNNNKPKGSSQGRKLENLSKAFQQVCAAFEPLSDVDGESGDDDKGKNISDVCFMARGESDTKYEDNEALVARKENVWIVDSGYSRHMTGDKNWFSSLKKASKTESIIFGDASTSVVLATGLVKVHCKKTGSKVFDSCGDSVLIISRYGRVFKADFENPVSPVITCLAAKFDKDVMFWHRRLGHVGFDHLTRLSGLDLVRGLPKLKKNIDLDEAFQHFRGLFLRLDLEFPGSLKRIRSDNGGLEHEFSSPRVPQQNGVVERKYRVLVEMARMMLDEYKTPKKFWAEAINTACYISNRVFLRSKLGKTSYELRFGRQPKVSHLRVLSCKCFVLKSGNLDKFEARSTDGLFLGYPAHSRGYRVLILETNKIIETCEVSFDEASPGTRPDIAGTLSQVQGEDGRIFEDESEDDNNDEVGSAELENFERNKVWTFVEPPSEHNIFGTKWVFKNKQNEDGLIVRNKAGLFAQGFTQVEGLDFDETFAHVARIEAIRLLLAFAASKGFKLCRMDVKIAFLHDFIQEEVYVKQPPGFENPDFPNQVFKLSKALYGLKQAPRASYDRLQNFLLAKGFTMGKVDKTLFVLKHGDNQKKPLCLLFVRIYVDDIIFGCSTHALVVEFVETMRREFEMSMMGELSYFLGLQIKQTPQGTFVHQMKYTKDLLRRFKMENCKPISTQIGYTAVLDPDEDGEAVDQKEYRSMIEFLLYLTASRSDIQFAVCLCARFQASPRASHRQAVKRIMRYLNHTLEFGIWYSTSSSXICLSGYSDTDFGGCRIDRKSTSGICHFLGTSLIAWSSRKQSSVAQSTSESEYVAAASCCSQILWLLSTLKYYSLTFEKVPLFCDNTSAINIAKNPVQHSRTKHINICFHFLRDHVEKGDVELQFLDKMLQLADIFTKPLDSXNHFAFLHVELGIIHPFGMF

SEQ ID NO: 151201 - protein, 1419 aa, Oryza sativa
  Clone ID: PAT_MRT4530_51366C.1.pep
MELLCAYGMRSQIWKESKFARNILLSGISRLDYNRVAHLQTAHEIWTALSNFHQGTNNIKELRRDLFKKEYIKFEMKPREALDDYLSRFNKILSDLRSVDSSYDANYPQSEISHHFLNGLDMSIWEIKVTSIQESVNMSTLTLDSLYTKLKTHEMNVLSRKVDSKSSALVSSLDVDASSSKSSFLAIFNATSDDQLEQIEEEDLALVANRIARAMNNARNRKRGGPNRCFECGSIDHLRSHCPKLGRGKREDKDGEKNNNNKPKGSYQGRKMENLRKAFQQVCAAFEPLSDVDGESGDDDKGKNISDVCFMARGESDTEYEDNEVSAFEEAINILSEKNKKCEKMYRKEEFIDESLKSEIARLKSLIPNDDNCKNCEVLMNEISKIRDINAAYDLKNRSSLACSFALHTRTLDELFLTKKLLQKYQIAFHASLMFNMISAKKLKQPHDVLDCSTCVGARRGEILVKPDTNKTVFKSAGIMSTMSASSSKSNVVHALVARKENVWIVDSGCSRHMTGDKNWFSSLKKASKTESIIFGDASTSAVLATSLVKVNEKFELKNVALVEDLKYNLLSVLQIVDENFEVHFKKTGSKVFDSCGDSMLNISRYGRVFKADFENHVSPVITCLVAKFYNDVMFWHRRLGHVGFDHLTRLSGLDLVRGLPKLKKDLDLICTPCRHAKMVASSHTPIVSVMTDAPGQLLHMDIVGPARVQSVGGKWYVLVIVDDFSRYSWVFFMATKDEAFQHFRGLEHEFSSPRVPQQNGVVERKNHVLVEMARTMLDEYKTPRKFWAEAINTACYISNRVFLRSKLGKTSYELRFGHQPKVSHLRVFGCKCFVLKSGNLDKFEARSTDGLFLGYPAHTRGYRVLILETNKIVETCEVSFDEASPGTRPDIAGTLSQVQGEDGRIFEEESDDNDDDEVGSADVSHALTDESWINAMHEELENFERNKDWTLVEPPSGHNIIGTKWVFKNKQNEDGLIVRNKARLVAQGFTQVEGLYFDETFAPVARIEAIRLLLAFAASKGFKLYQMDVKSAFLNGFIHEEVYVKQPPGFENSDFPNHVFKLSKALYGLKQAPMAWYDRLKNFLLAKGFTMGKVDKTLFVLKHGDNQLFVQIYVDDIIFGYSTHALVVDFAENMRREFEMSMMGELSYFLGLQIKQTPQGTFVHQTKYTKDLLERFKMENCKPISTPIGSTAVLDPDEDGEAVDQKEYASRPDIQFVVCLCARFQASPRASHRQAVKRIMRYLNHTLEFGIWYSTSSSICLSGYSDADFGGCRIDRKSTSGTCHFLSTSLIAWSSRKQSSVAQSTAESEYGAAASCCSQILWLLSTLKDYGLTFEKVPLFCNNTSAINIAKNPVKHSRTKHIDIRFHFLRDHVEKGDVELQFLDTKLQIADIFTKPLDSNRFAFLRGELGIIHPFGMV

SEQ ID NO: 151202 - protein, 76 aa, Oryza sativa
  Clone ID: PAT_MRT4530_51367C.1.pep
LHRPRRWLRPARGCPVTALRPQRPNGAQTPHPSSSATVPASPPGGSIPSRRVHARRQGYAPVDRRAVAAAQAPNSS

SEQ ID NO: 151203 - protein, 514 aa, Oryza sativa
  Clone ID: PAT_MRT4530_51368C.1.pep
MARMGWELCHVFRPYTVVLGRGKREDKDGEKTNNNKLKGSSQGRKLDNLRKSFQQVYTAFEPLSDVDGESGDDDKGKNISDVCFMARGESDTEYEYNEALVARKENVWIVDSGCSRHMTGDKNWFSSLKKASKTESIIFGDAATSAVLATANTSRPAGARRSDRRRLQARQAISAVRLEIQHRSDRRHPLGQTDFRRFRGPQWSRHRSDRRYRSGQTGHRPLYLALAARKDNVWIVDSSCSRHKTGDKNWFSSLKKASMTESIIFGDAAISAVLATALVEDLKYNLLSVSQIVDENFEVHFKKSGSKVFDSCGDSVLNISRYGRVFKADFDNPVSPVITCLVAKFDKDVMFWHYRLGHVGFDHLTWLSGLDLVRGLPKLKKDLDLGEDGRIFEDESDNDNDDDEVGSAGQTGRQVGQTAGTPPVRPAQDVRSDQPGSLAEDPVDAVPDVSRSTVDREHPRLTSRRRGPHASAHPRAWAADGRASRGGHTARPERPRRRGWREAAPVPLWSPAGP

SEQ ID NO: 151204 - protein, 709 aa, Oryza sativa
  Clone ID: PAT_MRT4530_51369C.1.pep
MSASTSTFSFFPYTSSHFPLGLWTSRRREAAVIAGFIILCDRSDRAVHAGQTGSDRDLRLAKFLLMRLVQVQGEDGRIFEDKRYYDDDDEVGSAGQTGRQAGQTAGTPPVRPVQEERSDRPGSSSSGTVDADRDGPPKTSTSTSTGTERGSTSDVTTPLHIQRRHPPEQIIGNIGERTTRSKVTTHDVCANSAFVASFESKDVSHALTDESWINAMHEELENFERNKVWTLVETKFGHNIIGTKWVFKNKQNEDGLIVRNKARLVAQGFTQVEGLDFDETFAPVARIEAIRHLLAFAASKGFKLYQMDVKSAFLNGFIQEEVYIKQPPGFENPDFPNHVFKLSKAFYGLKQAPRAWYDRLKNFLLAKGFTMGKFDKTLFVLKHGDNQLFVQIYVDDIIFGCSIHALVVDFAETMRREFEMSMMGELSYFLGLQIKQTPQGTFVHQTKYTKDLLRRFKMENCKPISTPIGSTAVLDPDEDGKAVDQKEYRSMIGSLLYLTASRPDIQFAVCLRARFQASPRASHRQAVKRIMRYLNHTLEFGIWYSTSSSICLSGYSDADFGGCRIDRKSTSGTCHFLGTSLIAWSSRKQSSVAQSTAKSEYVAAASCCSQILWLLSTLKDYGLTFEKVHLFCDNTSAINIAKNPVQHSRTKHIDIRFHFLRDHVEKGDVELQFLDTKLQIADIFTKPLDSNRFAFLRGELGIIHPFGMV

SEQ ID NO: 151205 - protein, 123 aa, Oryza sativa
  unsure (1)..(123): unsure at all Xaa locations
  Clone ID: PAT_MRT4530_5136C.1.pep
FTPSKTNSEECLFARGHAENQEMWCHAAMQRRSFCQPQHMGTNQSSIRGVRIARNTIYLYGSHDVRRTNDGFGACVRVRACVRPSVTVTTAXDQTNRERETNCCRDPCRHVHHHQFIMPTFAL

SEQ ID NO: 151206 - protein, 1286 aa, Oryza sativa
  Clone ID: PAT_MRT4530_51370C.1.pep
MENLRKAFQQVCAAFEPLSDVDGETGDDDKGKNISNVCFMARGESDTEYEDNKMSAFEEAINILSAKNKKCEKIYRKQEFIIESLKSEIARLKSLIPNDDDCENCEVLMNEISKIRDVNAAHDLKNRSSLACSFSLHTRTLDELFLTKRLLQKYKIAFHASLMFNMISAKKLKQPQDVLHCSICNLNKMKLKDALGRVEYMEDVVKNNEVLSCPKCLKSKGVMVDCENCANLEKEVSYLKNSLLRFSDGKKNLNMVDCENCANLEKDVSYLKNSLLRFSDGKKNLNMILDQSKVLVLEVALVARKENVWIVDFGCSRHMTGDKIWFSSLKKASKTESIIFGDAATSTVLATGMVKVNEKFELKNVALVEDLKYNLLSVSQIVDENFEVHFKKTGSKVFDSCGDSVLNISRYGRVFKADFENPVSPVITCLVAKFDKDVMFWHRRLGHVGFDHLTRLSGLDLVCGLPKLKKDLDLVCTPCRHAKMVASSHTPIVFVVMDAPGQLLHMDTVGPARVQSVGGKWYVLVIVDDFSRYSWVFFMATKDGAFQHFCGLFLRLELAFPASLKRIRSDNGGESKNASFEQFCNERGLEHEFSSPRVPQQNGVVERKNRVLVEMARTMLDEYKTPRKFWAKAINTACYISNRVFLRSKLEKTSYELRFGHRPKVSHLRVFGCKCFVLKSGNLDKFEARSTNGLFLGYPAHTRGYRVLILGTNKIVETCEVSFDEASPGTRPDIAGTLSQIQGEDGRIFEDESDNDNDDDEVGSAGQTRRQAGQTAGTPPVRPTQEVRSDRPGSSAEGSIDAVRDGPPEITTSTSTNTERGSTLEVAAPLHIQRRHPPEQIIGNIGERTTRSKVTTHDVCANSAFVASFEPKDVSHALTDESWINAMHEELENFDRNKVWTLVEPPSGHNIIGTKWVFKNKQNEDGLIVRNKARLVAQGFTQVEGLDFDETFVPVARIEAIRLLLAFATSKGFKLYQMDVKSAFLNGFIQEEVYVKQPPGFTMGKVDKTLFVLKHGDNQLFVQIYVDDIIFGCSTHALVVDFAETMRREFEMSMMGELSYFLGLQIKQTPQGTFVHQTKYTKDLLKRFKMENCKPISTPIGSTAVLDPDEDGEAVDQKEYRSMIGSLLYLTASRPNIQFVVCLCARFQASPRASHRQAVKRIMRKQSSVAQSTAESEYVAAASCCSQILWLLSTLKDYGLTFEKVPLFCDNTSAINIAKNPVQHSRTKHIDIRFHFLRDHVEKGDVELQFLDTKLQIADIFTKPLDSNRFAFLRGELGIIHPFGMV

SEQ ID NO: 151207 - protein, 1276 aa, Oryza sativa
  Clone ID: PAT_MRT4530_51371C.1.pep
MINSNKIEEEDLALVANRISRAMNNARNRKRGGPNRCFECGSIDHLRSHCPKLGRGKREDKDGEKTNNNKPNNNKSKGSYQGRKMENLTMAFQQVCAAFELLSDVDEYEDNKVSAFEEAINILSAKNKKCEKMYKKQEFIIESLKSEIDRLKSLIPKDDDCENCEVLMNEISKIRDVNAAHDLKNRSSLACSFALHTRTLDELFLTKKLLQKYQIAFHASLMFNMISAKKLKQPHDVLDCSTCNLNKMKLKDALGRVEYMEDVVKNNEVLSCPKCRKSKGVMVDCENCANLEKEVSYLKNSLLRFSDGKKNLNMIWINQRLAHKQKKEREIAFAKSKWQKSGFLSRKPALVARKENVWIVDSGCSRHMTGDKNWFSSLKKASKIESIIFGDAATSAVLATGMVKVNEKFELKNVALVEDLKYNLLSVSQIVDENFEVHFKKTGSKVFDSCGNSVLNISRYGRVFKADFENPVSPVITCLVAKFDKDVMSWHRRLGHVGFDHLTRLSGLDLVRGLTKLKKDLDLVCTPCRHAKMVSTSHAPIVSVMTDAPGQLLHMDIVGPARVQSVGGKWYVLVIVDDFSRYSCVFFMATKDETFQHFRGLFLRLELEFPGSLKRIRSDNGGEFKNAEFEQFCNERGLEHEFSSPRVPQQNGVVERKNRVLVEMARTMLDEYKTPRKFWAEAINTACYISNRVLLRSKLGKTSYELRFGHQPKVSHLRVFGCKCFVLKFGNLDKFEARSTDGLFLGYPAHTRGYRVLILETNKIVETSEISFDEASPDESDDNADDEVGSAGQIGRQAGQTASTPPVRPPQEVRSDRPGSSAEGSVDAVRDGPPEITTSTSTDTERGSTSEVAAPLHIQRRHPPEQIIGNIGERTTRSKVMTHDVCANFAFVASFEPKDVSHALTDESWINAMHEELENFERNKVWTLVEPPSGHNIIGTKWVFKNKENEDGLIVRNKARLVTQGFTQVEGLDFDEAFAPVARIEAIRLLLAFAASKGFKLYQMDVKSAFLNGFIQEEVYVKQPPGFENPDFPNHVFKLPKALYGLKQAPRAWYAPRAWYDRLKNFLLAKGFTMGKIYVDDIIFGCLTHALVVDFAETMRREFEMSMMGTFVHQTKYTEDLLKQFKMENCKPISTPIGSTAVLDPDEDGEVVDQKEYRSMIGSLLYLTASRADIQFPILWLLSTLKDYGLTFEKVPLFCDNTSAINIAKNPIQHSRTKHIDIRFHFLRDHVEKGDVELQFLDTKLQIADIFTKPLDSNRFAFLRGELGVIHPFGMV

SEQ ID NO: 151208 - protein, 1437 aa, Oryza sativa
  Clone ID: PAT_MRT4530_51372C.1.pep
TRCKGGQTGVSDKRQELISAVRPEIQSRSDRRQPGDQTGATPSVRLRSVEFEGTNNIKELRRDLFKKEYIKFEMKPGEALDDYLSRFNKILSDLRSVDSSYDVNYTQYEISHHFLNGLDMSIWKMKVTSIQESVDMSTLTLDSLYTKLKTHEMNILSRKVDSNSSVLVSSSTSLDVDSSSSKSSAFALFNAMSDDQLEQFVEEDLVLLSNRLSRAVTNLGRARGEDNGDEKTNDNKPKGTFKGRKIKENLKKAFDQVYTAFEPLSDVDGESGDEDKGNNISGVCFMARGELDSECEDNEVSALEEAINILSAKNMKCEKLYRKQEFIIESLNSEIARLKYLIPNDDDCTNCEVLMNEISKIRDVNAAHDLKNRSSLALSFALHTRTLDELCLTKKLLQKYQIAFHASLMFNMICAKKLKQPHDVLDCSTCTLNKLKLKDALGRVGYMEDVVKTNEVLSCPKCGKSKGVMVDSENCANLEKEVSYLKNSLQRFSDGVGARSGEILVKPDTNKTVFKSAGFVKVNEKFELKNVALVEDLKYNLLSVSQIVDEDFEVHFKKTGSKVFDSCGDSVLNISRYGRVFKADFDNPVSPVITCLVAKFDKDVMFWHRRLGHVGFDYLTRLSSLDLVRGLPKLKKDLDLVCTPCRHAKMVASSHAPIVSVMTDAPGHLLHTDTVGPARVQSVGGKWYVLVIVDDFSRYSWVFFMATKDKAFQHFRGLFLRLNLEFPGSLKRIRSDNGGEFKNSSFEQFCNERGLEHEFSSPRVPQQDGVVERKNRVLVEMTRTMLDEYHTPRKFWAEAVQGEDGHIFEYESDNDDDEVGSAGQTGRQADRTAGTPPVRPAHDVRSDRPGSSGSGTIDADQDGPPEITTSTSTDTERESTSEVAAPLHIQRRHLPEQIIGNIGERTTRSKVMTHDVCANSAFVASFEPKDVSLALTDESWINAMHEELENFEINKVWTLVEPPSRHNIIGTKWIFKNKQNEDGLIVRNKARLVAQGFTKVEGMDFDETFAPVARIEAIRLLLAFAASKGFKLHQMDVKSAFLNGFIQEEVYVKQPPGFENSDFPNHVFKLSKALYGLKQAPRAWYDRLKNFLLTKGFTMGKVDKMLFVLKHGDNQLFVQIYVYDIIFGCSTHTLVVKFAETMRREFEMTMMGELSYFLGLQIKQTPQGTFVHQTKYMKDLLRRFKMENCKPISTPIGSTTVLDPDEDGEAVDQKEYRSMIRSLLYLTASRPDIQFAVCLCARFQASPRASHRQAVKRIMRYLNHTLEFEIWYSTSSSICLSGYSDADFGGCRIDRKSTNGTCHFLGISLIAWSSRKQSSVAQSTAESEYVVAASCCSQILWLLSTLKDYGLTFGKVSLFCDNISAINIAKNPVQHSRTKHIDIRFHVLRDHVEKGDVILQFLDTKLQLADIFTKPLDSNRFAFLRGELGIIHPFGMI

SEQ ID NO: 151209 - protein, 117 aa, Oryza sativa
  unsure (1)..(117): unsure at all Xaa locations
  Clone ID: PAT_MRT4530_51373C.1.pep
PTRPRTSEMSAVGLLPAALQGIDIKEMLVGAAXMDEETRNTEIKENPAALLALCWYXASDGXGSRLPYKDSLLLLSRYXQQXVMESLGQEXDLDGNRVNQGLTRYGXKGSTDQHAYI

SEQ ID NO: 151210 - protein, 244 aa, Oryza sativa
  Clone ID: PAT_MRT4530_51374C.1.pep
MAGKMSTIVMMVDLECDRCYRKIRRVLCKLQDKASIKAISYDEKNNTVTVAGPFDADEVSDRLCSSAGKVITDIRVVGGAKPMPGGGGGGAKAHANKPAGKDGSAGGGGGGGGGKPEMIKKHVKFEMADDMDDGRHHHHHDNRKPKVVTTTNHAAGALARMEGPPRRGAEHGHGGGDGAGAHADDGAGDGHAVHLAGTGAIGAGAAGVGAQRPDAYENNMTKNVVTKAFVILWFVYETIQIYKI

SEQ ID NO: 151211 - protein, 693 aa, Oryza sativa
  Clone ID: PAT_MRT4530_51375C.1.pep
MLRRRHHLPAVLRLFSTSCRRGHPTQPPQHPSPAPLPLPPPVAKKVPFTASAHGRSWSDPYHWMRDTSDPDLAALLEAENAYADAFVDSAGEGGGGLRARLAAEMRARLPPSAASPPQPWGPWLYYQYVPEGKEYPVLSRRLRSSGGLARAALDFISGSKKEQVLLDWNEIAEKFGVCYIYAVLSGLCMLNKLSYSLLIIIVYVMESGHVRGGLWPVQKRSDKVQYFLEHHNGFFYILTNAPLEGTETANGGYYLARCRAEKSEMDKWQVVALPGSYYTFQDMDIFHEQLVLFIRKSGLPLICSINLPIDVDFQEQKELDDLDPWFFPVPSDLCSIVPGSNNDFMSSTYRLVLSSPVLPDLTVDYNMRMRTFAILHQEEVTGLSSNLCTVGLQSNITGIQQNLQLIEDSQSWSDLSKLFSCERVQVISHDGVSVPLVILYSREAHRRGESPGVLYGYGAYGEDLDKSWCSDRLSLLARGWVVAFADVRGGGDSSWHLAGTKANKINSIKDFAACGTHLIKEGFVHKNRLCAIGCSAGGLLVGAVINMLPDLFSAAVLKVPFLDICNTMMDSTLPLTILDYEEFGDPNISTEFDTIRSYSPYDNLSPDICYPPVLVTASFNDTRVGVWEAAKWVSKVRDITCQSCSWSVILKTNMQSGHFGEGGRFMHCDETAFEYAFLMKALGLDDNDSCKIV

SEQ ID NO: 151212 - protein, 279 aa, Oryza sativa
  Clone ID: PAT_MRT4530_51376C.1.pep
GNEKRSKSPIFRFESYWLKVLGFLEVVQHSWQKPILSSNRLAIFRLKLRRLARDLKRWSRCNVGDIKLQLAVAAEVIFQLELARESRWINWITHILATSSSQVLLNGSPGHSINHARGLRQGDPLSPMLFILAMEPFHRILKAAEDASVLQPVNGRNARFRCSLYADDVAIFANPDSAELSSLSQFLDFFAKISGLHPNINKTEIFPIRCDEIDLNNLLSSFPGMIKSFPCRYLVLPLHYRKLRKIDFIPLIDKIGSRLPGWKGRFFTSAGRKTQSIRF

SEQ ID NO: 151213 - protein, 109 aa, Oryza sativa
  unsure (1)..(109): unsure at all Xaa locations
  Clone ID: PAT_MRT4530_51377C.1.pep
MQLNPKVRTRRNKTKAKRWRCAEIVLNVTLSMCGNHLEAPQFNPMSYIKLHCRNRLHRLTXSDSDPADPXIVADLDSSRFLLCFRXDLRLRLCFDLIFFPDADITKFGC

SEQ ID NO: 151214 - protein, 76 aa, Oryza sativa
  Clone ID: PAT_MRT4530_51378C.1.pep
MGGGGLIVGGRHGRMVRCQHGVRAMGMKDDAADNGRSGNSEKPKMRKTTGGGLLTIGGFRMRRGRKGVFSGAVRAF

SEQ ID NO: 151215 - protein, 77 aa, Oryza sativa
  Clone ID: PAT_MRT4530_51379C.1.pep
MAACAIFSFARFFTPVTGCTLCLSIFFVGLKTSLTGHNIRCWSPLTDLHPSKMRTVISDHLSLTRAKSVRALIKGDK

SEQ ID NO: 151216 - protein, 159 aa, Oryza sativa
  Clone ID: PAT_MRT4530_5137C.1.pep
MKVAIAGNVVVAVLFVAVIVWRLFFFGGRDRAGGAAASAAADADGESSSAGSSPCASPRAGGGLGREDLMALPVYVHGASAAADGGAKAEECAVCIGELRDGDTGRLLPRCGHRFHAECVDKWFRSHATCPLCRAAVAAADGDSGGEGDTKVAVVQQDV

SEQ ID NO: 151217 - protein, 80 aa, Oryza sativa
  Clone ID: PAT_MRT4530_51380C.1.pep
LYPCAAIILKHLNSTQCHTPNYTVRIGCIGSPSPTQIQPILIVADLDFSRFLLCSRINLRLRLHLDLISFSDADITKFDR

SEQ ID NO: 151218 - protein, 113 aa, Oryza sativa
  unsure (1)..(113): unsure at all Xaa locations
  Clone ID: PAT_MRT4530_51381C.1.pep
LGIPRARGFGRAGGTSKXAATRTGDGEARRRDAGXSRRRREGEVRAPRNVAGTTGRHEGEARRGXQANAGEAHARPTVVGTADRSLLEASRRKGGRLLISRAVSTLRQRLRQP

SEQ ID NO: 151219 - protein, 229 aa, Oryza sativa
  Clone ID: PAT_MRT4530_51382C.1.pep
MARRQATPVTTRGMRCWSAAAAEVVIDEEMPTDFSRLFDFFLPCCCGLDKIRTIMCSKGIGLASFNTSISKFWSDEELVRFLAERKEAHSLPENVFVGMNISLIDPRNSDDPQSPKNGENAIIKSKTGYWKVVGTVRIPTSTVIVGMKVSLDHYKAKHHLNDEANLPQDYKNLCTIFFQGDDILNAGDKQICLNANVPNERKEFYLQYLAELEEQNAAWSNQCKVYLDP

SEQ ID NO: 151220 - protein, 82 aa, Oryza sativa
  Clone ID: PAT_MRT4530_51383C.1.pep
CTHILVLYKIQPSIKLADNETNFTMPPIGDEKNLIKAHCQSNKHKSIKRLEHNTREKKGKEQRKERILSHKGVLPPARRGEC

SEQ ID NO: 151221 - protein, 96 aa, Oryza sativa
  Clone ID: PAT_MRT4530_51384C.1.pep
MNFGKALLRVINRVLMYRVPCSCMIIISHHVGKVYKLCRVKTNRLAVLAVMSGVWICIEYRLVFILLNAEIYLQIVMRFENDLLAAMDGNEVNIYT

SEQ ID NO: 151222 - protein, 209 aa, Oryza sativa
  unsure (1)..(209): unsure at all Xaa locations
  Clone ID: PAT_MRT4530_51385C.1.pep
VRFHPKLPPSPILILPRVNRTMTYRTVELKINSGFPSHNSNQSPPSRPFXPSPPPRVVPGLALTRRQPFLPAVKSILRRILSPNRSPASSFTSPHRAEHRRPCSALFFAAAKFFRPQFFISAYLAASPSTHQINPSAATLRRRRTLARSPPRPQPLFSSIAAFGERLEVEEEKXLRERERLTGLEDSSDILDNISQSQDIEQGKLLYTF

SEQ ID NO: 151223 - protein, 114 aa, Oryza sativa
  unsure (1)..(114): unsure at all Xaa locations
  Clone ID: PAT_MRT4530_51386C.1.pep
QLVTRCRSTIYNRYATIQDKESLRSDQQLPMRSAXQMSLHTTLTDYNTAYMLMLDLELRRDCRLMTPSLQALRLSRDRDTMICPXLHARMHPTAVNDQFETCGHSNQLSSHMEI

SEQ ID NO: 151224 - protein, 157 aa, Oryza sativa
  Clone ID: PAT_MRT4530_51387C.1.pep
MITRAKLVEQLREHQIRSAQSYSAALAVFSPSPHIASRRDLKVALFYAILFCFVMVSCYVALYLRWPETVQSKRTVWLPEGIRPSSLSMVRHRATDTVLLAPSLALVGAKLCAMIGTFDAGCRMRLSAAGAAVAISPMPLSHQPLPSGASATPPAIS

SEQ ID NO: 151225 - protein, 207 aa, Oryza sativa
  Clone ID: PAT_MRT4530_51388C.1.pep
MRKRLAGLLEGRRILIVLDNIWESDQFKLDNLKIMLNVGKKGSEVDVIVTTRTEEIAKRICTVKPYKLEPLNDDICWAIIKIYSAFEGRGDKQQVEVIGQEIATKCGGMPLAARALGYTLYSKAVDRWLALNNSEIWNECSSEEASLPHHLVLPSLKLNYYNMQSYLRMCFAYCAIFPKGGNITKYNLIHQWIALGFIEPSITFSAA

SEQ ID NO: 151226 - protein, 247 aa, Oryza sativa
  Clone ID: PAT_MRT4530_51389C.1.pep
MDEIRSLMLQQGWRKGPWTALEDRLLTEYVQQHGEGSWNSVAKLTGLRRSGKSCRLRWVNYLRPDLKRGKITPDEETVILQLHAMLGNRWSAIARCLPGRTDNEIKNYWRTHFKKARPSRRARAQLLHQYQLQQQQQHRQYLHSLNLLQQQQQQLQQQQQQQQQQMMLLQEQEQQSPQEEAADDSMVMMMMNDLQSKERCCTAVSVVPDDCVLPADDDAIWDSLWRLVDGDGSCGEGSSGGEYWATS

SEQ ID NO: 151227 - protein, 398 aa, Oryza sativa
  Clone ID: PAT_MRT4530_5138C.1.pep
MGGSHHLFRFLAADDHPFFPTFPTSSSSFLLDDTHPFFFPPSSSCPLGFTSPPSSSCPLGFTSSYDLDAAFHHHLDLDLDLDLFLPTPTPPVTTSCPALRDPFLLHHSLAHRVSALELAAPRSKYTYEAESAGRKIKWTTHDKPDGDRTFKWEAQIDTPNDDGFDRKWKWESKASAAGTTKLKWAKEVKGKGFLHPWSHAYSVEEVFGDDDHHHKADKTAENKVKQHNKDTSAKEEKKKTNKSNVQIVEIDDNTAGCVAINKAFASSYAKGKRKQLSPQDAALLIQMNYRAHLAHRSQVLRCLRHLAVAKAKLKDIRSLFYNISYRRRISHDSEERQRFADKIIALLATVDALEGPDYMVRNAKRSMLEELEGMLEIVGPQSLGKPRTLSRRKFENHI

SEQ ID NO: 151228 - protein, 105 aa, Oryza sativa
  unsure (1)..(105): unsure at all Xaa locations
  Clone ID: PAT_MRT4530_51390C.1.pep
RRSPRGNHXVRVVQXPXHRDLPLHFADGDAAGEKSGEVEDLDGEXEAGAAVASLPNLREXPRPRTRTSSYRSSSSRCCSSPPPPPPPPPTPRRRRPASSIASLSV

SEQ ID NO: 151229 - protein, 127 aa, Oryza sativa
  Clone ID: PAT_MRT4530_51391C.1.pep
PPKTLVGLPHHYCAVTFQLEAELVQAAGTALVSDPVWNSWTCVTLQCVPKLIPIVAVPVISGSLWRVQIHWVPISFVFPWWFGHICVIPRVPPNSHPPNITQPWTSHLHSCLTALGWWLVLKLSWML

SEQ ID NO: 151230 - protein, 104 aa, Oryza sativa
  Clone ID: PAT_MRT4530_51392C.1.pep
RLQQQAGNPPRPQLCTCNCHDTLKLICCAFLVAGRRPGYLRRLWTSPSPRCKRRGRGQRIRPSPSQIPANHPVVPPNLNLQLKSVSLGWNTPTWNLVFWLFFCC

SEQ ID NO: 151231 - protein, 116 aa, Oryza sativa
  Clone ID: PAT_MRT4530_51393C.1.pep
MTSLPLAARHLMLAGERWRGGANGGHQCVERDAANSLMARTTTDGDNQRRWLPERCNGAGLMYDLSAAICRVHRYRVVFSKVINHQSWERMSIKNENIFCKRWEKRRRARGLTGYI

SEQ ID NO: 151232 - protein, 85 aa, Oryza sativa
  unsure (1)..(85): unsure at all Xaa locations
  Clone ID: PAT_MRT4530_51394C.1.pep
SQGFYIEKFRPGSDFHRLIYHLDRLLGDNMSIPSREIIFVLGXKRRTAPNFSCLAEHSKIQAFPLSRLYXNGHVVKSFAKIEGLM

SEQ ID NO: 151233 - protein, 203 aa, Oryza sativa
  Clone ID: PAT_MRT4530_51395C.1.pep
MDEFGGGSVGPFSKKPRHLSRSLTYHHHHHPYQGQGRSPSFNARRQHHPQQQDHAVVLYTTSLRGVRRTFADCAAVRAVLRGLRVAVDERDVSMDASLRRELQSLLAARGRPFSLPQLLVGARLVGGADEVRQLHEAGELRRLLEGAAGQDPAFVCGGCGGVRFVPCPACDGSRKVFVQEEGCARRCGDCNENGLVRCPNCCS

SEQ ID NO: 151234 - protein, 1388 aa, Oryza sativa
  Clone ID: PAT_MRT4530_51396C.1.pep
MKMVKLLIKRNIESSSICVSPGFGGLTGGAPAVRPAAHRRSDRRHLGGSTGGHTAVRPVATGVSNRHFRRFDRSIYIGQTDVHQAVRPAQLLRKVSHPYVIPEAINTDALKTEFENNCKARNILLSGISRSEYDRVAHLETAHEIWNALRNFHQGTNNIKELRRDLFKKEYIKFEMKSGKALDNYLSRFNKILSDLRSVDSSYDVNYPQSEISRHFLNGLDMSIWEMKVTSIEESVNMSTLTLDSLYTKLKTHEMNILSRKVDSKSSVLVSSSSSLIVDASSSMPSFLAAFNATSDYQLEQIEEEDLALVANRIARAMNNVRNRKRGGPNRCFECGSIDYLRSHCPKLGRGKREDKDGEKTNNNKPNNYKSKGSNQGKKMENHRKAFQQVCAAFEPLSDVDGESGDDDKGKNVSDVCFMVRGESDTEYEDNEVSILKNSLLRFSDGKKNLNMILDQSKVLVLEVALVARKENVWIVDSGCSRHMTGDKNWFSSLKKASKTESIVFADASTSAVVATGLVKVNENFELKNVALVKDLKYNLLSVSQIVDENFEVHFKKTGSKVFDSCGDSVLNISRYGRVFKADFENSVSPVITCLVAKFDKAVMFWHRRLGHVGFDHLTRLSGLDLVRGLPKLKKDFDLVCTPCRHAKMISTSHAPIVSVMMDAPGQLLHMDTVGPARVQSVGGKVENRVLVEMARTMLDEYKTPRKFWAEAINTACYISNRVFLRSKLGKTSYELRFGHQPKVSHLRVFGCKCFVLKSGNLDKFEARSTDGLFLGYPAHTRGYRVLILGTNKIVGTCEVSFDEASPGTRLDIAGTLSQVQGEDGRIFEDESDYDDDDEVGSAGQTGRQASQIAGTPPVRPAHEERSDRPGSSGSGTVDADRDGPPENSTSTSTETERGSTSEVAAPLHIQRRHLPEQIIGNIGERTTRSKVMTHDVCANSAFVASFEPKDVSHALTDESWINAMHEELENFKRNKVWTLVAPPSGHNVIGTKWVFKNKQNEDGLIVRNKARLIAQGFTQVEGLGFHETFALVARIEAIRLLLAFAASKGFNLYQMDVKSVFLNGFIQEEVYVKQPPGFENPDFPNHVFKLSKALYGLKLAPRAWYDRLKNFLLAKGFTMGKVDKTLFVLKHGDNQLFVQIYVDDIIFGCSTHAVVVDFAETMRREFEMSMMGELSYFLELQIKQTPQAVLDPDEDGEAVDQKEYRSMNGSLLYLTASRPDIQFAVCLCARFQASPRASHRQAVKRIMRYLNHTLEFGIWYSTSSSICLSGYSDADFGGCRIDRKSTSGTCHFLGTSLIAWSSRKQSSVAQSTAESEYVDAASCCSQILWLLSTLKDYGLTFEKVPLFCDNTSAINIAKNPVQHSRTKHIDIRFHFLRDHVEKGDVEL

SEQ ID NO: 151235 - protein, 1608 aa, Oryza sativa
  unsure (1)..(1608): unsure at all Xaa locations
  Clone ID: PAT_MRT4530_51397C.1.pep
MATPVRFSTKPHVFDGTDFSHWCSRMQSYIMAEDYDIWRKVSHPYVIPEAINTAAEKTAFEQNCKARNILLSGISRSDYDRVAHLQTAHEIWNALSNFHQGTNNIKELRRDIFKKEYIKFEMKPGEALDDYLSRFNKILSDLRSVDSSYDANYPQSEISRHFLNGLNMSIWKMKVTSIQEFVDMSTLTLDSLYTKLKTHEMNVLSRKVDSKSTALVSSTSSLDVDASSSKPSFLAVFNATSDDQLEQIEEEDLALFANHIARAXIMLGTGKEXGPNRCFECGSIDHLRSHCPNLRRGKREDKDVERTSNNKPNNNKPQGSSQARKFKENLRRAFDQVYAAFEPSSDVDGESGDDGKGKNISGVCFMARGESDIEYEDHEVSAFEEAINILSAKNMKCEKMYRKQEFIIESLKSEIDRLKSLIPNDDDCSNCEVLMNEISKIRDINAAHDLKNRSSLACSFALHTRTLDELFLTKKLLQKYQIAFHASLMFNMISAKKFKQPHDVLDCLTYCENCANLEKEVSYLKNSLQRFSDGKKNLNMILNQSKVLVLEVVLVARKENVWIVDSGCSRHMTGDKNWFSSLKKASKTESIIFGDASTSAVLATGLVKVNEKFELKNVALVENLKYNLFSVSQIVDEEFEVHFKKTGSKVFDSRGDSVLNISRYGRVFKADFENPVSPVITCLVAKFDKDVMFWHRRLGHVGFDHLTRLSGLDLVRGLPKLKKDLDLVCTPCRHAKMVSTSHAPIVSMMTDAPGQLLHKDTIGPARVQSVGGKWYVFVIVDDFSIYSCVFFMATKDEAFQHFRGLFLRLNLEFPGSLKRIRSDNGGEFKNASFEQFCNERGLEHEFSSPRVPQQNGVVERKNRVLAEMTRTMLDEYKTPRKFWAEAINTAFYISNRVFLRSKLGKTSYELRFGHQPKVSHLRVFGCKCFVLKSGNLDKFEARSTDGLFLGYPAHTRGYRVLILGTNNIVETCEVSFDEASPGTRPEIAGTLSQVQGEDGRIFEDESDYDDDDEDVWSDRPGSSAEGSVDADRDGPPEITTSTSTDTEHGSTSEVTAPLHIQRRHPPEQIIGNIGERTTRSKVTTHDVCTNSAFVASFEPKDVSHALTDESWINAMHEELENFERNKVWTLVEPPSGHNIIGTKWVFKNKQNEDGLIVRNKARLIAQGFTQVEGLDFDETFAPVARIEAIRLLLAFAASKGFKLYQMDVKSAFLNGFIQEEVYVKQPPGFENPYFPNHVFKLSKALYGLKQAPRAWYDRLKNFLLAKGFTMGKVDKTLFVLKHGDNQLFVQIYVDDIIFGCSTHALVVDFAETMRREFEMSMMGELSYFLGLQIKQTPQGTFVHQTKYTKDLLRRFKMENCKPISTPIGSTAVLDPDEDGEAVDQKEYRSMIGSLLYLTASRPDIQFVVCLCARFQASPRASHRQAVKRIMRYLNHTLEFGIWYSTSSSICLSGYSDADFGGCRIDRKSTSGTCHFLGTSLIAWSSRKQSSVAQSTAESEYVAAASCCSQILWLLSTLKDYGLTFEKVPLFCDNTSAINIAKNPVQHSRTKHIDIRFHFLRDHVEKGDVELQFLDTKLQIADIFTKPLDSNRFAFLRGELGIIHPFGMV

SEQ ID NO: 151236 - protein, 89 aa, Oryza sativa
  unsure (1)..(89): unsure at all Xaa locations
  Clone ID: PAT_MRT4530_51398C.1.pep
MVPKKLLLQLLLGPLDSCWHDGVLDVHCSIGIGITRSPQRRQPTAYSGSPAPHISMGAGXRRRCGGGRGRSSGGDASEKWAVRVVTVEL

SEQ ID NO: 151237 - protein, 354 aa, Oryza sativa
  Clone ID: PAT_MRT4530_51399C.1.pep
MAGGGDELKLLGMWASPFALRAKLALSFKGLSYDYVEEDFKNKSELLLSSNPVHKKVPVLIHNGKPICESQVIVQYIDEVFPDAGVTLLPADPHDRAVARFWASYIDEKLFGAWIPVFRGKTEEEKAEGVKQTFAVAEKLEGALSECCKGKPFFGGDTVGYVDVVLGGFVAWVHAIEEVFGLNQFDAAKTPLLAAWLERFDELDAAKEAMPDIGRLVELEKMRQAQAQAADEGRRANGSDSPGDSRLWRIAAAATGGAAGQRTRAAQTAQARQGRGHAVARTGLLSWLHGTEELCGAKILDAAKTPLLSAWARRFGDMDAAKVALPDVCKLVEFAKMKRVQLEAAMAATTVSRN

SEQ ID NO: 151238 - protein, 127 aa, Oryza sativa
  Clone ID: PAT_MRT4530_5139C.1.pep
GYITEGQIHIDRQPHNRQTYPPTKVLPPLSRPTKRAIGEGTTRRDHPDVPNQPHANYAIRKDAQATKAVVGEEAPPPEDPLHPETPDKTERKPGTQGAYDTRNIPQTPDLAWAQLRTPPRKPPHRTP

SEQ ID NO: 151239 - protein, 176 aa, Oryza sativa
  unsure (1)..(176): unsure at all Xaa locations
  Clone ID: PAT_MRT4530_51400C.1.pep
HAWNITNNGIYSVASAYKAQSLGSIKRNYEWSIWXLRPHANANSLPSSCKIDFDVLQASGKGXSNKTYCPLYQRVLKASFHLLVEXRYTIRIXNMIATWITQEQLKPASWKPTMFHEWWEVLVLCKGVPKQGTRTLLLLTYWEIWEIWKERNQXIFQHKELSMMSFITKIKEEGKT

SEQ ID NO: 151240 - protein, 330 aa, Oryza sativa
  Clone ID: PAT_MRT4530_51401C.1.pep
MAPLSWRHHTLLQALLSRGPLSERDFHALFSAISGGKNPATHRQLFDDTLLKINKELAYLQFELRAGINQYDGTVYYGVVNNIADEESKLGSKFSVPQIAFYKGLLEAIVHEAGNDGSITNIDALNTRIENQVVIADASQGSQSRLPTSITNFSLSQKEKTLNELIQDRWLSYTPTGKIGLGIRSFLDLRSWLRSNDIPSCEASCCPNEGCNVRIHGYCLKKKFSQRKASRACGCGTEWPRLEGEDDGAEDEDVNEPEEDQVPSANQHSRTRRRGVKSELVEENERAGPSARMTRRSLRSSKAEAVEAAQEVPSAAGPSQSTRASKRRKN

SEQ ID NO: 151241 - protein, 89 aa, Oryza sativa
  Clone ID: PAT_MRT4530_51402C.1.pep
MKIIFFFALLAIGGCNASAQGDADTQVYRQYQLQPHLMLQQQMLSPCGEFVKQQCNTKATPFFQSPVFQLRNCQVMQQQCCQQLKMIAQ

SEQ ID NO: 151242 - protein, 46 aa, Oryza sativa
  Clone ID: PAT_MRT4530_51403C.1.pep
HSLYGKLLLLQLPLLNSLIYPLFSFPLAIDRMTWLMKRRHFFLPYP

SEQ ID NO: 151243 - protein, 34 aa, Oryza sativa
  Clone ID: PAT_MRT4530_51404C.1.pep
FRILVLCGYCHWAMSCLGPKRAYFMWFSASSIAV

SEQ ID NO: 151244 - protein, 172 aa, Oryza sativa
  unsure (1)..(172): unsure at all Xaa locations
  Clone ID: PAT_MRT4530_51405C.1.pep
TSPGIVTLNDNQFGSAAPNNTQLHQPSSPHASQPAQVAPRTLFGTVQKNPPQRSLSAPIALQGQQDQSASSYQXKSWQDIIDSLASDLEVPDYNMGAAESQQPDRTISQPLDSITFQGVGLHSEPVVALANLMPCNGQNVANGMIGSNCLAQTTQILPHLNHQPSLVPNESH

SEQ ID NO: 151245 - protein, 553 aa, Oryza sativa
  Clone ID: PAT_MRT4530_51406C.1.pep
MDVVDISSDEEGFAAAAVAVATTTKKASVDSLGWIADLLREEDERALSDEFDDLEVMSELSAPPVMAQQKGGKPDCGGEEDDDDCVVLDGDPDDVVAVAGEKGSEGDGSSDELQIVAEKGPVACRDFPHSRHLCSNLPFSTTSHVKYCSMCHCFVCDTPAPCNYWGKGTEIYDHCHATDKEKKWKAMRHTFKSKGLPTSHPEKRQNVVYPTTTSFVQQDTQCEISLIQSHMTTYFPNQSHLANVVNQGLTQTRHTSVRVSPSVGRTVSATRTTPATRAGRGMSNAPSIQIPQSRTRFKRVGATSPGIVTLNDNQFGSAAPNNTQLHQPSSPHASQPAQVAPRTLFGTVQKNPPQRSLSAPIALQGQQDQSASSYQAASNGTHGTGPQFSRCISLTAQRTQLLPEPALDVYSKSWQDIIDSLASDLEVPDYNMGAAESQQPDRTISQPLDSITFQGVGLHSEPVVALANLMPCNGQNVANGMIGSNCLAQTTQILPHLNHQPSLVPNESHLNNSVSSTADGLLMEAAHQRDTQGSDSLDLLFDFEFEDWDSAEP

SEQ ID NO: 151246 - protein, 274 aa, Oryza sativa
  Clone ID: PAT_MRT4530_51407C.1.pep
MGLLSNRIGKETLKAGDHIYSWRAAWVYAHHGIYVGDDKVIHFTRGRGQEVGTGTFIDLLLMSSGPNTNTPCSICNNEGATTNTETNGVVSSCLNCFLSGGALYRFEYAVNPALFLAKARGGTCTLAPTDPDEVVVRRANHLLSNGFRCYNLFKSNCEDFAIYCKTGLLVAEQGVVGQSGQAISIIGGPLAAVISTPFRLVTTNIYGMAVMAVGVYCASRYAADIGNRRDVLKVEVEDLTAGLASGRIRAVENISQLVAPAEAQGLAVTAPVAA

SEQ ID NO: 151247 - protein, 71 aa, Oryza sativa
  Clone ID: PAT_MRT4530_51408C.1.pep
HIQSSLKPMPLLSWFRTSIASHPSSSSPPNSAHCAPSNVAADFRFRSLPSLLLQLLISTGKFFTELPQLLC

SEQ ID NO: 151248 - protein, 57 aa, Oryza sativa
  Clone ID: PAT_MRT4530_51409C.1.pep
TTSSVIYKAANDSRGGGLCRCCRAHGGAARVKGQGSGDLWGGEVSLTDVWFDWYYMI

SEQ ID NO: 151249 - protein, 278 aa, Oryza sativa
  Clone ID: PAT_MRT4530_5140C.1.pep
ETKRSSSIAESAGRKIKWTTHDKPDGDRTFKWEAQIDTPNDDGFDRKWKWESKASAAGTTKLKWAKEVKGKGFLHPWSHAYSVEEVFGDDDHHHKADKTAENKVKQHNKDTSAKEEKKKTNKSNVQIVEIDDNTAGCVAINKKLKRSYAKGKRKQLSPQDAALLIQMNYRAHLAHRSQVLRCLRHLAVAKAKLKDIRSLFYNISYRRRISHDSEERQRFADKIIALLATVDALEGPDYMVRNAKRSMLEELEGMLEIVGPQSLGKPRTLSRRKFENHI

SEQ ID NO: 151250 - protein, 68 aa, Oryza sativa
  Clone ID: PAT_MRT4530_51410C.1.pep
MGHAEEDDGGNVGDNWLEEVGFEVRAAASDEALNGESGQWRTALATAAMSGSGWGKKDEEGGGRGSGN

SEQ ID NO: 151251 - protein, 91 aa, Oryza sativa
  Clone ID: PAT_MRT4530_51411C.1.pep
ILIGKMLASYLEKTRRRQSTISLGFAGMQVLVCTFVAVRFEGATPAEAIYKNLSYLEVFFKTSLLAVGDAVKLWVQQQPSHDCDINDGFST

SEQ ID NO: 151252 - protein, 583 aa, Oryza sativa
  Clone ID: PAT_MRT4530_51412C.1.pep
MEADDSGGGGGRARRSVEVDFFSDEKKNMKKSRVSGGVAAEADDAKGPAAAGLAIKKEDLTINVSRRRLLRSSIARHLFNSRRSNACARPCSLQLLPAGNNARSDRSMVVDDDAASRPDHEEKSRSSNELAAMQAELGRMNEENQRLRGMLTQVTTSYQALQMHLVALMQQRPQMMQPPTQPEPPPPHQDGKAEGAVVPRQFLDLGPSSGAGGEAAEEPSNSSTEAGSPRRSSSTGNKDQERGDSPDAPSTAAAWLPGRAMAPQMGAAGAAGKSHDQQAQDANMRKARVSVRARSEAPIIADGCQWRKYGQKMAKGNPCPRAYYRCTMATGCPVRKQVQRCAEDRSILITTYEGTHNHPLPPAAMAMASTTSAAASMLLSGSMPSADGAAGLMSSNFLARTVLPCSSSMATISASAPFPTVTLDLTHAPPGAPNAVPLNAARPGAPAPQFQVPLPGGGMAPAFAVPPQVLYNQSKFSGLQMSSDSAEAAAAAAAAAQFAQPRPPIGQLPGPLSDTVSAAAAAITADPNFTVALAAAITSIIGGQHAAAAGNSNANNTNTNTTSNTNNTSSNNTTSNNTNSETQ

SEQ ID NO: 151253 - protein, 51 aa, Oryza sativa
  Clone ID: PAT_MRT4530_51413C.1.pep
MSSTGTSPRWHSCGRFSGRVDGFSCAMQLQHPRQVSQTVRAGITTSLRITH

SEQ ID NO: 151254 - protein, 674 aa, Oryza sativa
  Clone ID: PAT_MRT4530_51414C.1.pep
MSRFRVVEDEAEADLQALARRFSFSSSSSPSPSPSPPSSSRKPPLPPRRSPQKRPGLPTIPENGPPAGMATATATPKRTRTPTSTCAPPPPPHARHAPMTGQTPVAGSRSSRPPRGRGQMEVDSPQPSRALHTPPTGQRQVTRHPPPAARTMFQESPVASVSPPQQQQVAVPVSAALREFERRRAAAAAEAALRQLQLQVWEAARQQSQQLRLYTVEGRAAGYGTKWVELHPQSQELLLHIEYGLLRILDLLLGDWGDVHRVLHFWGNPSWGSLSRLPCIFPFFRNKMREYKHESDLLDQCSRLYDPSVSSRSFELYATQISQEIGSTSTIMDREMVSIRSLMAVVEEMMRNTDSAIRSYQKLRPNFIRRYSGTANTGFAHHAGPSGAPTYFNQPSAIVPTFDFYSGVAMRPSPFMQHTVSKFENRLEECSRMVGELEQLIQIKNDKNYSNAFESLSTVVPNVYDYLIHVATQIHSEVVQFKFVIKVVKVENLHQYAEVMRTHYRNAWRLMGDCSDPFLEADRREAAKQEATARIVHPTGVDVSVLASQPLQLSSPTGVTSSSTRAILRTPLSALPWFSIQTSPAPSPSPFSSSGSMLQPTPFGSASTLALGSTPARFASSALGGTSLFRTPPGDALVFQTYSTQSVNCDYCTILSLTMPEKCQPTLTKSVTRQ

SEQ ID NO: 151255 - protein, 39 aa, Oryza sativa
  Clone ID: PAT_MRT4530_51415C.1.pep
ETFTVHSNNAIACNSNIYMIKAYYIRIGNLRGVRHIINL

SEQ ID NO: 151256 - protein, 121 aa, Oryza sativa
  Clone ID: PAT_MRT4530_51416C.1.pep
MVRETGYYDVLGVSPTATEVEIKKAYYMKARKVHPDKNPNDPLAAAKFQELGEAYQVLSDPTQRQAYDSYGKSGISTEAIIDPAAIFAMLFGSELFEDYIGQLAMASMASLDIFGDEEEIG

SEQ ID NO: 151257 - protein, 168 aa, Oryza sativa
  Clone ID: PAT_MRT4530_51417C.1.pep
MWYLCVFYHRLLDYRRPEVQSLAELFGGPGAGDAVEWRMPENHHVDSPFHLVRLPGDERLAAQIANRSLLVKGIYELWGQGTTYEELERVVMAYPEERKLPYLTPESTFKIVVDSFGKVISFQEQNDIMKSLTYIPFKGRVNLKKPDHKFFVMETDDYGCNNGPPPVA

SEQ ID NO: 151258 - protein, 62 aa, Oryza sativa
  Clone ID: PAT_MRT4530_51418C.1.pep
QTHVYETRKGTPGAEKRRNTGRPRESFRVGISCMSEHAEFQPNVIICSERSPKSRAHGSENS

SEQ ID NO: 151259 - protein, 501 aa, Oryza sativa
  Clone ID: PAT_MRT4530_51419C.1.pep
MWYPRVFYHRLLDYRRPEVQTLAELFGGPGAGDAVEWRMPENHHVDSPLPRVRLPGDERLAAQIANRSKSASPDRLIHHHSLAKLLNPGLLVKGIYELWGQGTTYEELERVVMAYPEERKLPYLTPESTFKIVVDSFGKVISFQEQNDIMKSLTYIPFKGRVNLKKPDHKFFVMETDDYGCNNGLPPVAQRTVFFGREVGAADRHLLPTYQLKSRKYIGPTAMDAEMAFLMANQGLARPGKLVYDPFVGTGSILVAAAHFGAMTMGADIDIRVVRDGRGPDCNIWSNFEQYKLPEPLCILRADNNVPPWRPGLKEVFDAIICDPPYGVRAGGRKSGGRKLIKGTVAPYTVPDEKRDSHIPSTAPYSLAECVHDLLHLAARMLVMGGRLVFFFPVVREDGVANPAKYPEHPCFRLLASCEQILSMRYSRVLLTMVKVGPYTEEVEKAAEERRREFRENHHKWMEEGNLHSAVFSPADQAAAAADGKPAIDRDSKPKYRGKYV

SEQ ID NO: 151260 - protein, 140 aa, Oryza sativa
  Clone ID: PAT_MRT4530_5141C.1.pep
MDVASSLPDDVLAAVLRRLPPRGLAQRPAAPARSGAALVVDSRRLLRADLLPLSLGGILLNCHDSRHGENEYLVFDPTLTPNYELFIVPDHVPYKLREEEECEECEWPPWTYIDPTCVFIQDCVDTGEEHFIYAAPIDLS

SEQ ID NO: 151261 - protein, 108 aa, Oryza sativa
  Clone ID: PAT_MRT4530_51420C.1.pep
MRGSHIYSSDAVVATTRAAEGMAAQRYCETDCDSLRSVVPARHEPGGVPSCAHPKHESHLASSGCSGNVEGVCEPDLRICRVREWLNKYCMWKEVDEKDFGFEIGAFD

SEQ ID NO: 151262 - protein, 135 aa, Oryza sativa
  Clone ID: PAT_MRT4530_51421C.1.pep
MAFGGRRGSSRWGLPVVRSEALGKLGPSFGIGAGCGVGVCFGLIGGAGIGAGFPGLQLGLGAGAGCGIGIGFGYGFGKGIAYYENGRYSNIRRSFQNSRNLPYDEQFDILFDEMMESTRKLIKATSKEIDKWRRM

SEQ ID NO: 151263 - protein, 128 aa, Oryza sativa
  unsure (1)..(128): unsure at all Xaa locations
  Clone ID: PAT_MRT4530_51422C.1.pep
MLSSSVESPFSQEPIWRSLAPPXCHYFPWLVALKRCWTADRLCPRGLPHPDLCVLYEQYEERIDHIVVACPXSRKLWWMLXTIGHPNCLLVNESSFHSWLCESREQIARPLRTETDPVGTAASSTTPM

SEQ ID NO: 151264 - protein, 53 aa, Oryza sativa
  Clone ID: PAT_MRT4530_51423C.1.pep
SLIYYFFSMGFFHIGGGKTPSNQLIIAPYLIPWHSEIPHIQDHTKKPLLRFSL

SEQ ID NO: 151265 - protein, 94 aa, Oryza sativa
  unsure (1)..(94): unsure at all Xaa locations
  Clone ID: PAT_MRT4530_51424C.1.pep
MAREEEWAVSSSIALKATXQETARHKKTRNCGEDGHRGIWFERDVHMSQSHPLLPSLRGILAIDAVVGFAIDRCGSGDLNSSLRHRQTEKMAPG

SEQ ID NO: 151266 - protein, 101 aa, Oryza sativa
  unsure (1)..(101): unsure at all Xaa locations
  Clone ID: PAT_MRT4530_51425C.1.pep
PTRPPTRPPTRPSTRSPTRPPTRAPTRPPTRPPXPLTAAGTPPPPPPMTTTTTTWTPRGTPSCRRRARPPRRQWRPLRRRRRLPQGRRRRERATRRSERRR

SEQ ID NO: 151267 - protein, 412 aa, Oryza sativa
  Clone ID: PAT_MRT4530_51426C.1.pep
PRRPITLSPDRSLEGACGDPGPLFGDHDGSLLEHMGFHGDPQHVSPQLNEGLLVDSTDQISYLAADSPSFMNDQIPCNTMKSASTSPASPLKQADDHHVHIDSDMENDAAEQNLHDSYSEAQTTSLGYGIHRRTEVADAAQPTELHESNGNNDTSNFQEETTQSDTYLGDAMLNENGSRDYQLNNSGADDDEIPNSPALEMEDVDTRALHETSHDEKYEAEDDQMNGRNSSPCDEHDEDNCNSVIEPSYLDVMEHENPGTKNGMLTPSNQWDSPPESSARLEKGTPSPDRMVSLPVGRSPRTHSPKELDSPRPENEVGKLATSQNSPVRRRSRSPGKHETNRRRASSRELSPHGRQNSPSPPKKARREHRHGDGSPRRRSVSPRRRALPKRRDSPRRDSPSRRRDSPRRDSP

SEQ ID NO: 151268 - protein, 96 aa, Oryza sativa
  Clone ID: PAT_MRT4530_51427C.1.pep
MAVARRMVSSISVVFFMLLLIVADSTFSSCYALTPRQTCNDLGDLACTDETCKKIYGDRLEYYCKPGVTPTVCCCMNVTASVPSGVKNQNGDTLLN

SEQ ID NO: 151269 - protein, 587 aa, Oryza sativa
  Clone ID: PAT_MRT4530_51428C.1.pep
MAFSDTEEAWNFWVTYGGRMGFDVRKKYHNKNQVTQKTTSARFVCSKQGFRGKDKRDNLTKHPRAETRIGCNVRMGLTLNRVNEKYEISDLEVMHNHILQTPETSHLMPSQRKITEVQAFEIEMADDTSIQPRIAHELAARHVGGSSNLGYTCLDQQNYLRTKRQKELKYGEAGSLLNYFKNKAIDNPSFHYAVKLDSEEQITNIFWAEMIIDYAHFGDVVTFDTTFGTNKESWPFGVFVGFNHFRETVVFGAALMYDETCDSFCWLFDAFLSCHNHKHPQTIYTDQDVAMGKAITEVFTETRHGLCTFHIMQNANKHINRQKTSDGSNVLADFSACMCEHEDVEKFEEVFADMRTKVRKGTWLDSVYKLKEKWAECFMKNAYTLGMRSTQLSEGLNSDLKEYLNCELNIVRFFHHFDRVVQGKRDKEIKSEYESRKKLPRILMRIPMLLQTNFEECFAFVDNALETLGQQVEQMVEVNTNIQSNLETEFEIPENVSQAIGLKKKETRCSTSKRKKNWVDKLHKKRKKSLRYAKNGNEVAHPEPLEEDILENSTKESHQDFEFLGSYTQLLAGDSDGYELYSEGFHQ

SEQ ID NO: 151270 - protein, 190 aa, Oryza sativa
  unsure (1)..(190): unsure at all Xaa locations
  Clone ID: PAT_MRT4530_51429C.1.pep
MSHPQALAQCEQTLTKLGSRXREAVDDTAGAAKLIAEQKLQDTGAVASSLAAQLYGLDILAENIQDDTDNVTRFMMLAREPIIPRTDKPFKTSIVFSLEEGPGQLFKALAVFALRKINLTKMESRPHKKKPLRIADDNCSAPLKHFDYLFYVDLEASMADPNAQNALANLKEFATFLRVLGSYPTDVSEA

SEQ ID NO: 151271 - protein, 91 aa, Oryza sativa
  Clone ID: PAT_MRT4530_5142C.1.pep
MATASRPSALAPAAGGRGEEAPKQAQRGKRGRSDEDTLDRCIDGHMGRAFPCRPRVQILCEELRDSRASACKKLHLSIVCIKFHKKSIAVD

SEQ ID NO: 151272 - protein, 284 aa, Oryza sativa
  unsure (1)..(284): unsure at all Xaa locations
  Clone ID: PAT_MRT4530_51430C.1.pep
MWSRMSASPLFSFLVLFQPVLPHRAARQRVQRLSPPPFRLHVQGDVPQLKEICSSLATSKELVKALVGIWGPDDGLNPSTASLLSALCAELDLARAHVRHLATEDRRHGDETARMRTQLVEEAREWRSQQREKVAAMVRVAAAELDGEQRSRRRAERVNAKLGKALADAERELAASRRELERERRSRERLEKVCDKLVRGGLACGVDDVRGGEEEVRREAQRXQEELEKEREMPHLADELRRPSGAPPPRPSHPRRRSPPHHPRAHGLGAATSAATEGLPTSFG

SEQ ID NO: 151273 - protein, 99 aa, Oryza sativa
  unsure (1)..(99): unsure at all Xaa locations
  Clone ID: PAT_MRT4530_51431C.1.pep
MVCLTATVVVAVGVVVDDEAWRGGGAFPSLAAPPLDLIRVCGVELAAVTNFVSCAAXASTPLYMAQGDGGPPAIGLGAPDQGVGQGLLEPLGSRGGRSI

SEQ ID NO: 151274 - protein, 391 aa, Oryza sativa
  Clone ID: PAT_MRT4530_51432C.1.pep
MDGRLFEAAKSGDCRLMKELVAAMDPSILLRTTPQGNTCLHISTINGHEEFCQEVLMLDNSLLTVANSHGETPLLTAVTNGRTALASVLLRRCCEAGLREAILKQDENGCNALHHAIRNGHRDLALELIAAEAGLSQGVNKYRESPMYIAVMRDFTDIFRKLLGIPGSAHVGCHGRNALHAAVRNGNPVIAKELVEKRPGLAREFDDEMDTPMHHAAMWGKTHVLGALLQYDWSLGYVLSNNKDSVPLLNSAAYRGYVSVARELVHHCPDAPYYDANGCTCLHQAAFKGHLEFVEFILESPYLRKLVNMRDNGGNTALHYAVQDCNPRIVAALLSHGDTDVTVLNYTGNEAVWQLGGAADYAKTLNWELNTAILRSYTTYHALHGLLLLLL

SEQ ID NO: 151275 - protein, 144 aa, Oryza sativa
  Clone ID: PAT_MRT4530_51433C.1.pep
MALVKIGQWGGNGGSAQDISVPPCKLTSVTIRSGQAIDAITFSYVGMDGLEHVVGPWGGPGGSPTTFKIGPTERVKEFSGTHGPFGTLADIVTYLKIVTDATTYELGVKSGTPFNVPLQGNATVVGFFGRSGALLDAVGVYIRP

SEQ ID NO: 151276 - protein, 62 aa, Oryza sativa
  Clone ID: PAT_MRT4530_51434C.1.pep
MTVWQQPSLPIFLSLSASAAGKWARGRRRWIQEDDGSDGFRRIIFGRAAFWQGLHSAKLVFG

SEQ ID NO: 151277 - protein, 98 aa, Oryza sativa
  Clone ID: PAT_MRT4530_51435C.1.pep
NPSFVLQFMFCRNQLEYPFVGKVGVLSVIFHLRYQMSQLYILLPNLYRTASWFFVAHAPHADHIRLCVRQMPVIPCLCLWHNAGKNRCQLELQSHDMF

SEQ ID NO: 151278 - protein, 150 aa, Oryza sativa
  Clone ID: PAT_MRT4530_51436C.1.pep
RWRGSSCGASPGFTTDGHLRLPAHPVPASPPRRPRFLQRPARAVGAQPEVSCSRRGCDPAPPSRLAICYIHAHRAAGGSRRRRARRDALHDGGVSTPTLPLGYTPPDVRGAGGEGSEEAGEGVLTERRRHTTAQPWRSSAARRWRNEKKM

SEQ ID NO: 151279 - protein, 65 aa, Oryza sativa
  Clone ID: PAT_MRT4530_51437C.1.pep
KKKKKKKKKKKKKNFYKKKKKKKGREKKKGGGRFKKKSLPIFEYKVLVFLYCNLNSFHWRPFTTS

SEQ ID NO: 151280 - protein, 381 aa, Oryza sativa
  Clone ID: PAT_MRT4530_51438C.1.pep
MGAASCSSSSAKHLFLLCLLLGFCFAFAASQQEQQQSDSCSSAGVAVAHLVPFNSSAFRCLTVWKQEDFVLRYKNTGESQWSFILSAPDKGSYVAVGFSGKGLMVGSSAVVAWSSGGKGTVKQYYLTGKSPDECYPDKGRLTLVKNKAVAVSRSGRLYLAFQLSTDLPQPHLIYAVGPEGNLPPSDATLPMHRSMHSHAFNYTSGMASSSGGSGGGGFPPERKHGLLAMMAWGVLMPLGMMAARYFRRVDPYWFYAHMAIQAVAFTVGIASVVLGFRLNEDGLKNVDVHRALGIAILAMASLQVMAFLARPDKTSKVRRFWNWYHHYIGRAAILVAIGNIFLGLHIAQEVSAYIVSYGVFVAVWVIAVAAFEMNRCYSDDD

SEQ ID NO: 151281 - protein, 108 aa, Oryza sativa
  unsure (1)..(108): unsure at all Xaa locations
  Clone ID: PAT_MRT4530_51439C.1.pep
PQETQGNEPGKERTNKQKRGKRERAQGTKQRGKKKGXTRRPRSKGEEQPKPKGGGNQSGGFRNQAGGYGGGXRENXKTKRGAQPLKSSRPLWAKAPRGQELGWPLKLT

SEQ ID NO: 151282 - protein, 640 aa, Oryza sativa
  Clone ID: PAT_MRT4530_5143C.1.pep
MMLLSAVPGAIILLVGGSLLAQCLDPTLPAANTSSSWTNSADDQIRYGDGSIVRVVLLLSHSHGASSDDAAFACGFFCGAPCDRKSFLFGVFLVSTNSTGGVAAAAAAPPPVVVWSANRDRPVRDNATLQLSDAGDLVLRDAVGAFVWSTNTSAGHAVTGVRLSDSGNLVLFDDSGSPVWQSFDHPADVLLPGQYLRPGMRLTANASAADFSEGSLYVSVGNNAMSGFVGHDPSQLYFTAPVSDTMDTLANTMDAPVSISAFGRSPSSSSEILISLPVAHSVQYIRVESDGHMRLYGWNSSSWVIMYEVLQKYIAGGDCEYPMACGSYGICSGAGNCSCPSEIHSSPIYRDRPGLGCKLATPISCRDVRGIEMVELPNVTYFNYNGSGAIMRDKVTRSDCLSGCVANCSCKAAYFKLRMNDTNGTCFLQSQLFSLHKLQTTAPSLYNSRAFIKLNNITFAERVRPMKKTFGTRILVGIIIGTVSLLFSIALLIRMRTRRERVDGENIEHLPGMPRKFSFEELKVVTGDFSSKIGEGASGTVFEGKIEDENIAVKRLDSVGRRKEEFLTEVQTIGSIHHVNLVRMIGFCAEKNHRLLVYEYMPNGLLDRWIFDEKDGRPLYLYKRCVFCEQSYKSLCRMKK

SEQ ID NO: 151283 - protein, 181 aa, Oryza sativa
  Clone ID: PAT_MRT4530_51440C.1.pep
MLTELAQRRGDDGNAAATSSSRRHGDGGTPATSGESGGTTERQQDLGKGMAGLGGHEETPGGVNHRPEERRLAGAHRLRRGKSLPKGAESGGNRPATWGGDMELEGGQTGVIFGEKVGRQLPVPGDGVAGGLVEGPRGMPPTMSINATAIKRQSGGPLAALTEGGFALFGGRLQQGDEGGL

SEQ ID NO: 151284 - protein, 80 aa, Oryza sativa
  Clone ID: PAT_MRT4530_51441C.1.pep
GARMVRPVPQMPLARPHMIPQMAPDVATSHWQGGFAPFAGTSQGIPTYPKCLRHLSGGEVFHRAVAESGEDSSRDGGRAG

SEQ ID NO: 151285 - protein, 100 aa, Oryza sativa
  unsure (1)..(100): unsure at all Xaa locations
  Clone ID: PAT_MRT4530_51442C.1.pep
GEGRRGEALSDLASASLCTWSQRWWQMKAACIXCTGCHGLLWPKVAPLAPLSSPCPLPRHLRLLPIAAAHLGDLDLPLPLRRNKRREEKKRKRVFFFFFG

SEQ ID NO: 151286 - protein, 1103 aa, Oryza sativa
  unsure (1)..(1103): unsure at all Xaa locations
  Clone ID: PAT_MRT4530_51443C.1.pep
MATILDSLIGSCAKKLQEIITEEAILILGVKEDLRELQEKMEQIRCFISDVERRGMEDSSIHNWISRLKDAMYDADDIIDLVSFEGSKLLNGHSCSPRKTIACNGLSLLSCFSNIRVHHEIGNKIRSLNRKLEEIAKDKIFVTLENTQSSHKDSTSELRKSSQIAESNLVGKEILHASRKLVSQVLTHKEKKTYKLAIIGTGGIGKTTLAQKVFNDEKLKQSFDKHAWICVSQDYSPASVLGQLLRTIDAQCKQEESVGELQSKLESAIKDKSYFLVLDDVWQSDVWTNLLRTPLYAATSGIVLITTRQDTVAREIGVEEPHHIDQMSPAVGWELLWKSINIEDEKEVQNLRDIGIEIVQKCGGLPLAIKVIARVLASKDKAENEWKKILANYVWSMYKLPKEIRGALYLSYDDLPQHLKQCFLYCIVYPEDWTIHRDYLIRLWVAEGFVEVHKDQLLEDTAEEYYYELISRNLLQPVDTSFDQSKCKMHDLLRQLACHLSREECYIGDPTSLVDNNMCKLRRILAITEKDMVVIPSMGKEEIKLRTFRTQPNPLGIEKTFFMRFTYLRVLDLTDLLVEEIPDCVGYLIHLRLLDLSGTNISCLPKSIGALKNLQMLHLQRCESLYSLPSMITRLCNLRRLGLDDSPINQVPRGIGRLEFLNDLEGFPVGGGSDNTKMQDGWNLQELAHLSQLRRLDLNKLERATPRSSTDALLLTDKKHLKSLHLCCTEPTDEACSEEGISNVEMIFEQLSPPRNLEDLMIVLFFGXDCKSCVHLPPIGQLPXLKYLRIDGASAITKIGPEFVGCWEGNLISTETVAFPRLELLAIKDMPNWEEWSFVKEEELQEEKAAAAAQEGGKDGTAASKQKGEEAPSPTPRSSWLLPCLKQLQLVECPKLRALPPQLGQQATNLKELDIRRARCLKMVEHLPFLSGILFVQSCQGLEIISNLPQVRELLVNHCPNLRHVEMLGGLEQLWLSKNMQKISSLWVPGLEEQHRQLHGDEHKLERCRRAHEKKVEVKVDPIGRTAAGRRSKGDGIRNRPRIVAAAVVLASATGVVAAAGVIAAAVGVIIAVTGVVSAPLQGPWLQWISRTPSAAWSQESQR

SEQ ID NO: 151287 - protein, 83 aa, Oryza sativa
  Clone ID: PAT_MRT4530_51444C.1.pep
EMLNIDKHFLTAIHLLCSKVDLMTALQPCCRPSCRGRSSSRSGGRAVRLPSDHLRRQSGWVCKDRGDRDFVRAEESSGRANDG

SEQ ID NO: 151288 - protein, 40 aa, Oryza sativa
  Clone ID: PAT_MRT4530_51445C.1.pep
MPAKILLGFSLQLCKMINVNSLGDDRLKSQHNDICFTEVT

SEQ ID NO: 151289 - protein, 1023 aa, Oryza sativa
  unsure (1)..(1023): unsure at all Xaa locations
  Clone ID: PAT_MRT4530_51446C.1.pep
MMATILDSLIGSCAKKLQEIITEEAILILGVKEDLRELQEKMEQIRCFISDVERRGMEDSSIHNWISRLKDAMYDADDIIDLVSFEGSKLLNGHSCSPRKTIACNGLSLLSCFSNIRVHHEIGNKIRSLNRNLEEIAKDKIFVTLENTQSSHKDSTSELRKSSQIAESNLVGKEILHASRKLVSQVLTHKEKKTYKLAIIGTGGIGKTTLAQKVFNDEKLKQSFDKHAWICVSQDYSPASVLGQLLRTIDAQCKQEESVGELQSKLESAIKDKSYFLVLDDVWQSDVWTNLLRTPLYAATSGIVLITTRQDTVAREIGVEEPHHIDQMSPAVGWELLWKSINIEDEKEVQNLRDIVIEIVQKCGGLPLAIKVIARVLASKDKTENEWKKILANYVWSMDKLPKEIRGALYLSYDDLPQHLKQCFLYCIVYPEDWTIHRYYLIRLWVAEGFVEVHKDQLLEDTAEEYYYELISRNLLQPVDTSFDQSKCKMHDLLRQLACHLSREECYIGDPTSLVDNNMCKLRRILAITEKDMVVIPSMGKEEIKLRTFRTQPNPLGIEKTFFMRFTYLRVLDLTDLLVEEIPDCVGYLIHLRLLDLSGTNISCLPKSIGALKNLQMLHLQRCESLYSLPSMITRLCNLRRLGLDDSPINQVPRGIGRLEFLNDLEGFPVGGGSDNTKMQDGWNLQELAHLSQLRRLDLNKLERATPRSSTDALLLTYKKHLKSLHLCCTEPTDEAYSEEGISNVEMIFEQLSPPRNLEDLMIVLFFGRRFPTWLSTSLLSSLTYLKLKDCKSCVHLPPHNRTATNLKYLRIDGASAITKIGPEFVGCWEGNLISTETVAFPRLELLAIKDMPNWEEWSFVKEEELQEEKAAAAAXEGGKDGTAASKQKGEEAPSPXSKLQLVECPKLRALPPQLGQQATNLKELDIRRARCLKMVEHLPFLSGILFVQSCQGLEIISNLPQVRELLVNHCPNLRHVEMLGGLEQLWLSKNMQKISSLWVPGLEEQHRQLHGDEHKLEVNEWF

SEQ ID NO: 151290 - protein, 1472 aa, Oryza sativa
  Clone ID: PAT_MRT4530_51447C.1.pep
MEELAAAAAPPRHRERRRHRRKASSTDAAAAYGDVFGGPPQFAVAFDGVPADYGEVFGGVAASCSIPYLDLPPAAARDDGAGAGAYGEIFGRFDFGDFAEPYEDLLAEAVALAAEIASSSESSRSSVRKESGQLDADPSILHQHYSTVGYDQHFDEDEFSPISSPPDSGKQFSMSYNKATRGRPDDIVKMTTCMVEPPISYVVDSRNISNKSAMDQVVVVDCDTFANGEKGSMGLTFPSSSSLKSASSDSVADQNLHTPICHPISKNDCEDEDYHKRLSTHSASSEEVPSPDYPFLRVSNNSLHTQPIKVQPPLLAPSKLLNKKESKANGEKGSTGLTFPSSSSVKSASSDPMADQNLHTPTCHPISKTDCEDEDYHKRLSTHSASSEDVPSPDYPFLRVPNNSLHTQPIKVQPPSKLLNKKESKANGDSEVSTNSAAAAAAIKEAMEFAEARLKAAKELMERKGDSFKLRKKPGHHRGTKSTELKESMAPEEVRVYDEKLTMRRIVKEEKTYEETALVNKNGDSSAVNLTHCDHNEKGVLQPRKPQHTAQSGSKLEQLGKWTSGAEFYVLISPDQKCKTNSVTCEGDNVQTTNPSSKLGQFEKGKGETTSGDFVGCGKSWDGGDIAELRMEHVNLREYAIGSTEDGCKAPTAPEISFSNEKPTYQESTETHFKECVGAQNYQERYGDDGAFEISCVDSSKLHAPEIPGASLESCISGGHCNGNKSPSDASTKETTSLGESNKENNNIEALEVPCADEMQSQILQEYHEFRNENIDEKKASQVKVSKLEESVEYYETPNFQKSSSTAHGETETVEKEKMFSFSDELRPQNKNIGITEAPPESLIHKEIKKFGTEEKAYITLEGDVVQKSGSLEREANITLESASANENEEAEEANAFVEGINVMETHVSTYGTSVEDSDQIQDSENRMDGMGDLVSHGNEEAAKDPWLDNSEKSQVEEIFSHEEGQLSVEGGIDGGPNDAYAGVNAINDGNGNDSETKVIIDDGTDFNTKMSTCSKELSASFLESSASMQHLSQIDKSIAAQTSDKSTPLENLGEDCREREFPEENSTALEQGQAIGSKMEGDDKDKQSKLNVKDQKYFHLDSYIVPKFTENTTLNFVQKLIDETPDGQRIEGRENVKKTLRETEKEVLHRLDEDKEIYKMEREKEQAKERSRRELEEEKERERERAKDRLAVQRATKEAHERAFAEARAKAERIALERITLARQRASAEAREKEEKATAEAATEKASREARLKAERAAVERATAEARERAIEKAKAAADAKERMERFRSSFKDSFKSTNQDNQLDKQFQKTASNNYERSTDSSNQVVEFESALRHKARSEREHRTAERAAKALAEKNMRDMLAQREQAERHRLAEYLDPEVKRWSNGKEGNLRALLSTLQYILGSDNGWQSVPLTDLITATAVKKAYRRATLCVHPDKLQQRGATIRQKYICEKVFDLLKEAWNKFNSEER

SEQ ID NO: 151291 - protein, 98 aa, Oryza sativa
  Clone ID: PAT_MRT4530_51448C.1.pep
GREFAARINTTNETEGEKIKPREPYEKRKPQEKRGAKQGGPQERKKPSQANGGKGQPKKREKRGKQAQQRNEPPPEKGKTDEGPAEDGPFREEGREAL

SEQ ID NO: 151292 - protein, 79 aa, Oryza sativa
  Clone ID: PAT_MRT4530_51449C.1.pep
WAALISRFGLSALPFFATGAFTTCFSWPGAGFFPAGLFSALGAIGAASRGLGSNGERQSQRATEIERAPGFVRRRETFT

SEQ ID NO: 151293 - protein, 679 aa, Oryza sativa
  Clone ID: PAT_MRT4530_5144C.1.pep
MAPKMVISLGSSRRRKRGEMLFRFEAFCQPGYPANFAGAGGFRDNVRTLLGFAHLEAGVHGETKCWSFQLELHRHPPTVVRLFVVEEEVAASPHRQCHLCRHIGWGRHLICSKRYHFLLPRRESAAEADGLCFAINHGGGGGAEKASSKGTTTTASSRGHLLHGVVHLNGYGHLVALHGLEGGSDFVSGHQIMDLWDRICSALHVRTVSLVDTARKGHMELRLLHGVAYGETWFGRWGYRYGRPSYGVALPSYRQSLHVLGSMPLCVLVPHLSCFSQELPMVVTKYQAISGHKLLSLGDLLRFMLELRARLPATSVTAMDYRGIMSEASCRWSAKRVDMAARAVVDALRRAEPAARWVTRQEVRDAARAYIGDTGLLDFVLKSLGNHIVGNYVVRRTMNPVTKVLEYCLEDVSSVLPAVAAGGGVPAQGKMRVRFQLTRAQLMRDLVHLYRHVLKEPSQALTGGAFGAIPVAVRMVLDIKHFVKDYHEGQAAASSNGGGGFGHPHINLCCTLLVSNGSPELAPPYETVTLPAHATVGELKWEAQRVFSEMYLGLRSFAADSVVGVGADQEGLPVLGLVDVGSAVVVQGSVGEQINGEDHERKEEAAAAAVCEGSGGGERVVDCACGAVDDDGERMACCDICEAWQHTRCAGIADTEDAPHVFLCSRCDNDVVSFPSFNC

SEQ ID NO: 151294 - protein, 35 aa, Oryza sativa
  unsure (1)..(35): unsure at all Xaa locations
  Clone ID: PAT_MRT4530_51450C.1.pep
MWCQSCKEEYEEEDAGTCKECYXQASHTEEEFKRE

SEQ ID NO: 151295 - protein, 70 aa, Oryza sativa
  Clone ID: PAT_MRT4530_51451C.1.pep
MGKTEAAGSASLYPGSKSDPCGEPYKYTLQCLSSNDWKIGNCRSLMDTLAKCRANNEKIYLLDDICPILH

SEQ ID NO: 151296 - protein, 94 aa, Oryza sativa
  Clone ID: PAT_MRT4530_51452C.1.pep
MLVNPSESSLRCTTEPTMMRWPAMKTFADLSTRKDTAAAASPVVARRSRMQELELARQLIDPVEELEEGQSQSPPSCLFAPRATACRRVAFVTP

SEQ ID NO: 151297 - protein, 90 aa, Oryza sativa
  unsure (1)..(90): unsure at all Xaa locations
  Clone ID: PAT_MRT4530_51453C.1.pep
AAPQRGERIGDCLSAHPNELVAVSARLINLGEVVRDAHEIIXETPTPSADSXVDRKLNDGAFEDALTSAQDGIDISQWVALGIRPRPGVS

SEQ ID NO: 151298 - protein, 160 aa, Oryza sativa
  Clone ID: PAT_MRT4530_51454C.1.pep
MESSTRRSAKTLCFPEAMQRARSAPKPILTRRPMVRLHAAAGLHHPPPLPPPPPPSSRSRRGCVPSSSPSMASPWTCRRSASSWRSSCSARTSTRSRRASSSRPAPPTTSALSSPPKREKRAASTKPAAAAAAAEKSSRKRHAVAARREGRSRRGTRACR

SEQ ID NO: 151299 - protein, 122 aa, Oryza sativa
  unsure (1)..(122): unsure at all Xaa locations
  Clone ID: PAT_MRT4530_51455C.1.pep
RKEADPNRTRFHELPKRISRXFQRRKGRGDPGECFPSIDLAGNGKGRPDWKETAAVARRRRARVSARGRRRXLTGGTHLSAXNARARGRLRTGPTWAGEREXGFGPTFGPKPKEDFLKTFSI

SEQ ID NO: 151300 - protein, 140 aa, Oryza sativa
  Clone ID: PAT_MRT4530_51456C.1.pep
MQPPGLVLLIQSRKETVRLMKQIWALLCGGSETQEIRSNGERGDEEIESEKRGTGRTGQDELAAGAQKPASRAGVVGRQRGMSRRKLQSDEWWRIHARPCWYGLSDGYRRVVAEDIVADRSEREQYTRMCKNLSNNTSKL

SEQ ID NO: 151301 - protein, 167 aa, Oryza sativa
  unsure (1)..(167): unsure at all Xaa locations
  Clone ID: PAT_MRT4530_51457C.1.pep
MASNKVVFSALLLIIVSVLAATATXMADHHKDQVVYSLGERCQPGMGYPMYSLPRCRAVVKRQCVGHGAPGGAVDEQLRQDCCRQLAAVDDSWCRCSALNHMVGGIYRELGATDVGHPMAEVFPGCRRGDLERAAASLPAFCNVDIPNGTGGVCYWLGYPRTPTEEH

SEQ ID NO: 151302 - protein, 95 aa, Oryza sativa
  Clone ID: PAT_MRT4530_51458C.1.pep
LTGMVQGAGQHQINNCLFKAILQGSFWQPTQSTGTPNARGVPQAARRGGLGAAAGRRAHHQAVLQQWTSHTNGHWWCHATGLGILGPQEPVTRLL

SEQ ID NO: 151303 - protein, 296 aa, Oryza sativa
  unsure (1)..(296): unsure at all Xaa locations
  Clone ID: PAT_MRT4530_51459C.1.pep
LFLKRKRGLLRQRLRFAVNRVHGSGSRERTVEIXLSKTDGRDRTVHDRLTGKGDDDVGDDVTTGDGSXSASSPANDGARTQTEGTNGXSATRRTHRXPKKKRRRFSGRRXGGAPAVSGGDEEADEDGGDLTXHDGDLPERRRRLKRRRRTAGAAATTAARSYTALGHYGRREAKAKVAAGARRRRRRPTAAGDGKERSGFEGKRPIRFDLESTSFQTELGDDSIREKEEEIEKIISPLLISPDRERIGGPHLSAAPRERREQRLELGRLGRGERERGGFGPAFGPKPKETFKNLFQ

SEQ ID NO: 151304 - protein, 367 aa, Oryza sativa
  Clone ID: PAT_MRT4530_5145C.1.pep
MAPINSSNMEQHSQKLLEPDLPVQVRLQLAMEVRDSLEMTHTPDYLNFLRCYFRAFSAILSNFTAPQGTENAEHKLRNVVIEILNRLPHSEVLRPFVQDLLKLSLRVLTQDNEDNALLAIRIVFDLLRNFRPTVEAEVQPFLDFVVTIYRNFPNTVTHFFDNPNVSANIAAAVPNQHLDPTADAPGTVAVPGGGQLNPSARSFKIVTESPLVVMFLFQLYAKLVQTNIPYLLPLMVSAISIKGPDKVPPHLKTPFVELKGAQVKELLVGLKQVLNTEYRRGLFPLIDTLLDERVLIGTGRVCIETLRPLAYTLLAELVHYVRGDLSLPQTQKYTVFFLDPAFCKIMKTRHFIGGDITITSTNSTLGG

SEQ ID NO: 151305 - protein, 163 aa, Oryza sativa
  Clone ID: PAT_MRT4530_51460C.1.pep
MASNKVVFSVLLLVVLSVLAAAMATMADHHQVYSPGEQCRPGISYPTYSLPQCRTLVRRQCVGRGAASAADEQVWQDCCRQLAAVDDGWCRCGALDHMLSGIYRELGATEAGHPMAEVFPGCRRGDLERAAASLPAFCNVDIPNGPGGVCYWLGYPRTPRTGH

SEQ ID NO: 151306 - protein, 467 aa, Oryza sativa
  unsure (1)..(467): unsure at all Xaa locations
  Clone ID: PAT_MRT4530_51461C.1.pep
MDLDKSTSTTTSLKKLQDDDALPGCGTMERESGGTEPEPILGRMVAVEDYISCGFLPPPSEFLLLVLNFYGLSLLHLNPNSIAFLSIFSYLCEAYIGVEPFLDLFRFYYELRWMESNRDRIVTSYTQALPLTDVIGPLADHQAAASLKEGVAKEASDIAFATATTSGSNVPKRGRKFSSMLGTRRKAPXPIGREIEEARAAAAASXNERADKLACDLAEVLEDLQKMRELVAGNERQRQGLEHRMSELENNLSEIRGSLRVTYTGLHQLARECGVTTTIPENPDEFSLTSSLAELATAMEEIPSKHAARIGEETSNGIYTGACHILACVRLTHPDLDLRRILDQGAANDAHKGVMEEVGDLGESILPLFQEDVDVEDVQQRGQPETSVIVPALVLEPTKFEVAELERTMVEVKKEQAVEALRGRXEVWFNSYLKSCCTAXWLKSTGSSEYLTGIPRSRRPDTSMKVH

SEQ ID NO: 151307 - protein, 287 aa, Oryza sativa
  unsure (1)..(287): unsure at all Xaa locations
  Clone ID: PAT_MRT4530_51462C.1.pep
MTSAMTSPPATAARRLGRAXLAGERLHYGTNGGHQRVEGDAANSPATKKAAEEQRTATATRLKRRRRSGRRXRRCSGGLRRRXSGGRGRRRLDDHDGDLPERRRRLKRWRRTAGAAATTAARSYTALGHYGRREAKAKVATGRGELGEPFKGARRRRRRPTAAGDGKERSGFEGKRPIRIELDSTXLPKRISRRFQRGKGRGDPKDCFPSINFTGNGKERPDFXGNGGGAKLGFRAAAARGXTTTLTGGPHLSAGGRARXRRTGPDWAEEREKGFGPTFGPKPKEDF

SEQ ID NO: 151308 - protein, 146 aa, Oryza sativa
  Clone ID: PAT_MRT4530_51463C.1.pep
MAGSVGYGCVGEARAPGGREAAVGRGAAGEEGGGRSSSCGCSKLRHPLHRPKRRLGTGAQRCGGRKAAAAGVPSSAAPSTAPSADGARRCGRRKAVTTGVPISTAPSADGARWEESCGITGRPAAPRRMVEAAGCNEEDNKGAAGV

SEQ ID NO: 151309 - protein, 95 aa, Oryza sativa
  Clone ID: PAT_MRT4530_51464C.1.pep
QETIQILIPESSLDSINMQVNRHTSILNNGRTWKKTSSTAARGAPSIWAGDRKEVVVADRAAAELDPMGETLNLGTPAAGKEVLVARLWEGEGEE

SEQ ID NO: 151310 - protein, 80 aa, Oryza sativa
  Clone ID: PAT_MRT4530_51465C.1.pep
TSTATISATSWSSLSAMITSSLRTATTVSTSLPTTSTIASWSLLSINPWSSSSVTATAWTSTATWVSGNSVSPAKESSTT

SEQ ID NO: 151311 - protein, 500 aa, Oryza sativa
  Clone ID: PAT_MRT4530_51466C.1.pep
MENSQVWLLWGALSVAVLFYLSTLRRRHAGGKPLPPGPTPLPLIGNLHLAGGTSFHHKLRDLARVHGPVMTLKLGLATNVVISSREAAIEAYTKYDRHLAARATPDTFRACGFADRSMVFIPSSDPRWKALRGIQGSHVFTPRGLAAVRPIRERKVGDLMAYLRAHAGEEVLLGQAMHTGLLNLVSFSYFSIDIVDMGSQMARDLREVVDDIISVVGKPNISDFYPFLRPLDLQGLRRWTTKRFNRVFSIMGDIIDRRLAHIRDNKPSHNDFLDSLLELMAAGKIDRVNVLDMLFEAFVAGADTMALTLEWVMAELLKNPGVMAKARAELRDVLGDKEVVEEADAARLPYLQAVLKEAMRLHPVGALLLPHFAVEDGVEIGGYAVPRGSTVLFNAWAIMRDPAAWERPDEFVPERFVERAPPLDFRGKDVEFMPFGSGRRLCPGLPLAERVVPFILASMLHTFEWKLPGGMTAEDVDVSEKFKSANVLAVPLKAVPVLIK

SEQ ID NO: 151312 - protein, 168 aa, Oryza sativa
  Clone ID: PAT_MRT4530_51467C.1.pep
MAAAAAAAANGAGGGGGVPRPTNPMVTPLLTDLYQFTMAYAYWKAGKHLDRAVFDLYFRKNPFGGEFTIFGGLEECIRFIANFKLTDTEITFLRSAMPTCEDGFFEYLSSIDCSDVEVYAIPEGSVVFPKVPLMIIEGPVAVIQLLETPFLSLVNYASLVTTNAARHR

SEQ ID NO: 151313 - protein, 100 aa, Oryza sativa
  unsure (1)..(100): unsure at all Xaa locations
  Clone ID: PAT_MRT4530_51468C.1.pep
GNWXMENGXXNDTXXPXKKVSXVTXRTEXXXMXXGSGXXAPXRGSLLICTHSQFCXNKGXXXLCILRXXSREQETRPAXTCXMXSYXXSXHXVXWRILTK

SEQ ID NO: 151314 - protein, 77 aa, Oryza sativa
  Clone ID: PAT_MRT4530_51469C.1.pep
LKNQWKYRDHILHITSHACMLAFGLISCITSGAAILLKRLVPLDAMHVYAHGLMGATTEYITGSVCVCVCGSCLARD

SEQ ID NO: 151315 - protein, 344 aa, Oryza sativa
  unsure (1)..(344): unsure at all Xaa locations
  Clone ID: PAT_MRT4530_5146C.1.pep
SFSASPLPERAPAKPRGRGDDGGKASPSMCSGGPGSWPVGDGGXPSGSAPARPDPAGRRLAAGRSGGGDPRRFGXDLVGLTRGGGGRRGSVRASGGEEAVAATVVWPGAGEAERRQAAVEAGRWQRXVAQRPVRMGGSGAWQARGGGGTAELAAMSAAATAREHGATATVATTRSSWRWWQQRLVGGDNTVAGRRHWRLSAAVALGLSRRRQRRGACGDVCGSGWTXVMGLRLAGGEVAVGSNGCGGGGRXHGGLDWLAEGVVDGCIWPVRESTEEGSETGLAQRGAANGSGGRLGARGTGGGDGGWLGVRGAADGGRPDWRERRVRWRRLVWHERRGWRWRRR

SEQ ID NO: 151316 - protein, 60 aa, Oryza sativa
  Clone ID: PAT_MRT4530_51470C.1.pep
LWVRLVVLVRNFGKSRVFPLAFLSRQAITVTDGAELWKYAHVCNQFETEPFPTLLSGFLT

SEQ ID NO: 151317 - protein, 538 aa, Oryza sativa
  Clone ID: PAT_MRT4530_51471C.1.pep
MANARVMRDGEMIDGDGDRSSVRSRGGADPDAEVIALSPKTLLATNRFVCEICNKGFQRDQNLQLHRRGHNLPWKLRQRSGKEVRKRVYVCPEPTCVHHDPSRALGDLTGIKKHFCRKHGEKKWKCDKCSKKYAVQSDWKAHTKTCGSREYRCDCGTLFSRRDSFITHRAFCDALAEESAKARAAPPPPADEDGTSASAGAPPPQAPLPPPAPVPAPAPPPPPAAAPAPAAQPEQRDRDAALDQFATPAPAPAPPPVTAPPPPPVAAPNDCVSSSSSGVAPTSQSLLSSMFAPPSVAQAPQYADPIGVGAGGHQERAVPAKPPALCLAPNASSSLFTAPVPADRQQFAPPPPPSPSPHMSATALLQKAAQMGATSSSSSFLRCVGLDMSSSSSAPPSSSGQQQQHHHHHHQETMQVPLPASSLPEWPPRLQPEPSPMLSSGLGLGLPYDATGGPVSLPELMMGQSTLFSAKPATLDFLGLGVSPTGASTSRGFPTFIQPIGGAVSLAGSATVAAETFGAAHGGQANPWERNPSSSPIL

SEQ ID NO: 151318 - protein, 182 aa, Oryza sativa
  unsure (1)..(182): unsure at all Xaa locations
  Clone ID: PAT_MRT4530_51472C.1.pep
DASRRSSPPSRPFFLCPRISLQGCAKLTPPLPDALPRPALASQPPRPTDAAPLPGATRRDEPDRXLPPSAGPPTXRLPSAKPMPLPPSLPPAKPASPRASLXPEPPTPPSANPVKPMPXSLPSAPLTSCFPPTPPPSTSTPKAXSPKPSDSPGTAAPPSCPAAEPTPSSRRLSELPSIPLRH

SEQ ID NO: 151319 - protein, 309 aa, Oryza sativa
  unsure (1)..(309): unsure at all Xaa locations
  Clone ID: PAT_MRT4530_51473C.1.pep
MATAEPVEPQSLKKLSLKSLKRSHDLFAPTHSLLFTPDPESKQVRVGCKVNAEYSAVKNLPTDQGRGQVKSAAAPSTALALPGTQDVKDADNKGSSTAIVPAPHMLPKAPDSTIPGKNTTITIPGSSDRFSTSALMERIPSRWPRPVWHAPWKNYRVISGHLGWVRSIAFDPSNEWFCTGSADRTIKIWDLASGTLKLTLTGHIEQIRGLAVSQRHTVXSRPGRTKQSGGARRPGSRTGCGATRAAPPSTTPPSPRPPRPPTGPRSSTPRRATRSCYCLALHPTIDILLTGGRDSVCRVWDIRTKAHRR

SEQ ID NO: 151320 - protein, 209 aa, Oryza sativa
  Clone ID: PAT_MRT4530_51474C.1.pep
MATAEPVEPQSLKKLSLKSLKRSHDLFAPTHSLLFTPDPERTLTALFAKLFPPFGLVVVADGSKQVRVGCKVNAEYSAVKNLPTDQGRGQVKSDAAPSTALALPGTQDVKDADNKGSSTAIVPAPHMLPKAPDSTIPGKNTTITIPGSSDRFSTSALMERIPSRWPRPVWHAPWKNYRVISGHLGWVRSIAFDPSNEWFCTGSADRTIK

SEQ ID NO: 151321 - protein, 66 aa, Oryza sativa
  Clone ID: PAT_MRT4530_51475C.1.pep
VCRCACDPGCNVLTVFPTSFPGTRNPCLLPPIDGEPTFHGTDCGFAYFLFGVHTRCLPIMSERACV

SEQ ID NO: 151322 - protein, 229 aa, Oryza sativa
  Clone ID: PAT_MRT4530_51476C.1.pep
GHLSGEYCLALHPTIDILLTGGRDSVSRVWDIRTKAHVSALTGHDNTVCSVFARPTDPQVVTGSHDSTIKFWDLVAGRTMCTLTHHKKSVRAMALHPKEKSFASASADNIKKFSLPKGEFLHNMLSQQKTIINSMAVNEDGVLATGGDNGSLWFWDWKSGHNFQQDQTIVQPGSLESEACIYALSYDVSGSRLVTCEADKTIKMWKEDLSATPETHPINFKPPKDIRRY

SEQ ID NO: 151323 - protein, 81 aa, Oryza sativa
  Clone ID: PAT_MRT4530_51477C.1.pep
PTRSWALWGFLFLTRNFLAVPLGVPLFFLKGFFLTWGKQGSNRFLWEKSFGFQIRKLIQLDGFRVNAGLPNGKPYFPFFFL

SEQ ID NO: 151324 - protein, 88 aa, Oryza sativa
  Clone ID: PAT_MRT4530_51478C.1.pep
QHHRVVTHKLNIIAKTCRRRRDGTRSHMYMCANQRIYHTAHHDTVVIIQNSKQQQAHRSERRRAVVVADSGDDGFDCGYFLRLPRTPG

SEQ ID NO: 151325 - protein, 54 aa, Oryza sativa
  unsure (1)..(54): unsure at all Xaa locations
  Clone ID: PAT_MRT4530_51479C.1.pep
VYTVELGSCKFPXNLTGCQDFAKQKKVPFILDDFEIECEGKEKYKCGSKVFWKW

SEQ ID NO: 151326 - protein, 87 aa, Oryza sativa
  unsure (1)..(87): unsure at all Xaa locations
  Clone ID: PAT_MRT4530_5147C.1.pep
CLGKTLPNMTFGSSVEEILIEKLIVKVVLPEGSKDIDILVPFXQSKXQEVKYSHLDISGRPVVXLEKHDVIPEHNLYFQVYYQFNNI

SEQ ID NO: 151327 - protein, 87 aa, Oryza sativa
  Clone ID: PAT_MRT4530_51480C.1.pep
KAEALDRSCRPIMSKPKPAPKPQTPPPPTPPTESPTTPEPQTPEQQQQSNGAGEAEEPTSEGGAQDQEPTAEQMDTDKPDGWAEPSA

SEQ ID NO: 151328 - protein, 42 aa, Oryza sativa
  Clone ID: PAT_MRT4530_51481C.1.pep
ERSRKRDAKMEEGLIFPNMKHSRCEEIKDRRKRRYQRTAIWR

SEQ ID NO: 151329 - protein, 245 aa, Oryza sativa
  unsure (1)..(245): unsure at all Xaa locations
  Clone ID: PAT_MRT4530_51482C.1.pep
MAAGPRAAARLAVDRAHGREDGGRGRLTGRRLDPVKRGRRLRWRQRGKGEEARRLIGRLTARGGIRRTAASRREMRAPAKGGGDGELIPWLGLERGDRTVAGCSDEVRRDADADERENGQRGAGLGLADAERNCDTHAVTRDPKVASDARAAALCGGXEGGTARKQRRRPAAGAAVRGESRGFKEGGGTRNXTKGKPTAADFDGNRRRRGKRESGGGRRGLDSGRREHHRDRGNAFPTSDGTEGH

SEQ ID NO: 151330 - protein, 97 aa, Oryza sativa
  Clone ID: PAT_MRT4530_51483C.1.pep
MDRIDVEADGELAVTSIYVHRRARWHGARAARGTSRARAYMRAGPGVPPPPPPPPARDGDGDARAGPFACSISLDKRTTATRDAGRALVCFSTKINR

SEQ ID NO: 151331 - protein, 258 aa, Oryza sativa
  Clone ID: PAT_MRT4530_51484C.1.pep
GRGSERRNSPTLLTLTVADDFVRRRRGEAMGGGDASGGDGPEQELKRAAAAAYNYEGDARWAEYWSNILVPPHLASRPDVVDHYKRKFYQRYIDRDLVVEPMSSTGSTQPSGPEVRSSSSSSSENVRARSSGSSSRSAAPPPPPPQTDSATNPLRFDARTIHFSINAWVLVVAGLGMLPILPKHLADRACKLSLLGTILSSAYSLYSTYGKPRAWNMPAVQGWLQAVLGTKDFIHLMFSLMLFTSQLHLKSNTWFPFQ

SEQ ID NO: 151332 - protein, 136 aa, Oryza sativa
  unsure (1)..(136): unsure at all Xaa locations
  Clone ID: PAT_MRT4530_51485C.1.pep
MALALLNVVLHRVQCPISSKILSNKGEELTGNSKGKIARHFPIPLDAGSPLHRNLRARHLRCLMHQQLDKLLRALVRRSRRDRGCGAGFAGRGXGLLPLASPDMEXNAATMDQLPAEPPELIALTPAPSRLAMGLQ

SEQ ID NO: 151333 - protein, 46 aa, Oryza sativa
  Clone ID: PAT_MRT4530_51486C.1.pep
LLIMLSDLACSYLRDSKFLTKRLSVSYFTVYYMLAAEKHHRRIRFS

SEQ ID NO: 151334 - protein, 135 aa, Oryza sativa
  unsure (1)..(135): unsure at all Xaa locations
  Clone ID: PAT_MRT4530_51487C.1.pep
LKMFAANSFGRVRGNDPTXTALGXCIRRLEEEMGXIXVFRRELPLCVRLLAXXIDXMKXEVEXXGGXXSDISIRRRLQVFIHRKPQKRNEKNARNSFLQFNLQDVGFKSFLPFFFLGLRNVVLITYYATLLLHTV

SEQ ID NO: 151335 - protein, 395 aa, Oryza sativa
  Clone ID: PAT_MRT4530_51488C.1.pep
MSSSLSLLLLPPSLSLPSLFLSRGAIGRQGQRRRQRARAGAASGKQRRQRAAETWSWRGSPRAAEMQEWHDVVDDDGGAQPLADESLLTNGHLDTTIIDWIPGMPPISLGDISSFVRTTDADDFGLRFNEDEANNCTMAGALVLNTFDGLEADVLAALRAEYPRIFTVGPLGNLLLNAAADDVAGLSLWKQDTECLAWLDAHEMGAVVYVNFGSLTVLTPQQLAEFAWGLAATGRPFLWVIRENLVVPGDGGGDALLPTGFAAATEGRRCVATWCPQDRVLRHRAVGCFVTHSGWNSTCEGVAAGVPMVCWPVFADQYTNCKYACEAWGVGVRLDAEVRREQVAGHVELAMESEEMRRAAARWKAQAEAAARRGGSSYENLQSMVEVINSFSSKA

SEQ ID NO: 151336 - protein, 591 aa, Oryza sativa
  Clone ID: PAT_MRT4530_51489C.1.pep
MAAMNEKVLDKCGRNISSLKRKRDNPAARCADAGNTSKLHKHPADNSVVRFYVDEGHKAKIKCHFKMQIIQSYQNFMTSALPKRILLRQGGEWKDFPKQIVKLAHSDFRTKKTITEGEHQTHLFLLDFVHMTFIDSKTGLQRPIAWIDENGKQYFPEFFIEDKTLYRKKELGNGNNVYIIVEPNGTQEMNDHFGTSESSAESSNFESSTDDVSSPKRAKAERSVAGNKTGGVKETIGENEPHALLPIPCRSLPQDKLGDHSRVQLAISAVQKLLLQGLGTVLGSKDIVGIYRTPAVDNHKEFRYNLFKKQAEHTKCKRGNANVRYAWLACSKDAVDEMMLNGVMHFEKTVKCPDYGIGTILAPANCSNTCVNYSDVDENGIVHMMLCRVVMGNVEIVHHGSKQHRPSNEYFDSGVDDIKNPQHYIVWDMNVNSHIYSEFVVTIKLPSRVKDSPATEEDCHNLSEVSSLILSSGSPDSVSQDMNLQASPALGGHYEAPMLGDKVERAPSTPWMPFSMLFAAISTKVSAENMDMVNSCYEEFKSKKISRVDLVKKLRHIVGDRMLISTIMRLQDKLPPMSRHEAPKHVGQDDG

SEQ ID NO: 151337 - protein, 69 aa, Oryza sativa
  Clone ID: PAT_MRT4530_5148C.1.pep
LRNLSMNVSTTPIHHIITPICWKMVTPSVHALHLPPYMEDHRRKLCPEGTSYDSLNTFTIGTHVGAVLR

SEQ ID NO: 151338 - protein, 66 aa, Oryza sativa
  Clone ID: PAT_MRT4530_51490C.1.pep
LRFGNVVREPLDLVHAAGAVHRQPRHGRRHVAAVPLLFYDVVLLRRPADRQPVARGGGGRRCSWPH

SEQ ID NO: 151339 - protein, 29 aa, Oryza sativa
  Clone ID: PAT_MRT4530_51491C.1.pep
LEPMKRTSAKLLENLPAHTPSFLATLTTR

SEQ ID NO: 151340 - protein, 149 aa, Oryza sativa
  Clone ID: PAT_MRT4530_51492C.1.pep
ASVVPAARAVAGGGGEPARRPSSVEVGVDGAVRLLMRLPKSEVARLMKDSKDAAEAVERIMQLCVYRDQGGAGAGSLVTLAASGPAVRDVGEEDVCHEEREADEVCGLALTRSSDDIMGPKCYSLSFYAIVISVIVGLYKHEELQGLRT

SEQ ID NO: 151341 - protein, 50 aa, Oryza sativa
  Clone ID: PAT_MRT4530_51493C.1.pep
HNDHNMLAIVQSSLYFNHTPTRNLKPELRTDQRLINTVLLVVINELVSSN

SEQ ID NO: 151342 - protein, 52 aa, Oryza sativa
  unsure (1)..(52): unsure at all Xaa locations
  Clone ID: PAT_MRT4530_51494C.1.pep
PKVKGFAGSSHIGENHKAAVQVWFPTSLVXMPSWLWGFPPITLKRHSCLAIG

SEQ ID NO: 151343 - protein, 1225 aa, Oryza sativa
  Clone ID: PAT_MRT4530_51495C.1.pep
MDTASSPVKINHGPTRSSSSSKRRLDLEEEHQKDATSDILLLESSEMVEKRTQGVQESGDEIQKMEEFGATSRDVKKQKMEGSIQELVCMVQTHRPKVVFLSETRQNQGFVENIKWQIGLRGCLAVNGIGKGGGIALFWDESVNVTIKSYNLRHIDAVITEQNQDPWRATFVYGEPKAQDRHLMWTLLRRIKQNTSDPWLMIRDFNEAMWQSEHLSQNRRSETQMREFRSVLSDCDLHDLGFHGIPWTYDNMQRGDRNVRKEEHIRYQRQQTMRYEEVWERESSLPEVIQSAWSDGNAITNLGDISAKMKNTMCKLSRWSKEKIGNVRKKIAALRDKLRECRSMGSLDSDVQVRQIKKELEELLHREEIWWKQRSRIMWLKEGDRNTRYFHLKASWRSRKNRVRKLKRNDGMATCEIGEMEELAHNFFQQLYLKDDRLNPENLLSFYAQNITEEMNGKLTEPFSEEEISDALFQIRPLKAPGPDGFPARFFQKNWGILKEDVVRAVKNFFVDGQMQEGVNDTAIVMIPKKSLAEDMKDFRPISLCNVVYKVVAKCLKCNRENQNFCALKLDLSKAFDHVDWQFLDGVMERMGFCDKWRSWIMACVTSVQYNVRFNGHLLEPFSPTRGLRQGDPLSPYLFLLVADGLSNIIKSNESEGLIQPLKVCRRAPGISHLLFADDSLLFFKADTEQASRIRDVLQMYESSTGQLINPSKCSMLFSDFCPQQHQEDIKRILGVTNSSFEEKYLGLPTPEGRMKAGQFQPIKDRLSKRMSDWNEKYMSSGAKDVLIKSVAQALPTYTMGIFKMTDKFCEEVSQMIRNFWWGHEKGEKKVHWIAWEKITSPKIHGGLGFRDMKCFNQALLTKQAWRLITTPESLCARVLKAKYFPSGSLLDTAFPTVSLPTWKGVQYDRLPTWDNKRKRNIERQGICQICGSSVEDGFHATVACPRAKALREAIREIWHLPPENKFVNSGPDWLLLLLDGSNEEEKAHTLFTLWRAWHCRNEIIHGKEMSPIASSVNFLMNYEDCTLMTRQQPDDVKGKGPMFVETHIQRQLNEKQVSKWQTPPEGVAKLNVDAGFKPDTGETGAGIIIRECRGLVLLASCKKLPRCSSAMQAEALACLEGIRLATEWVNMPLILESDNASVVAKLNATNVSRADWSGIISDVKAAMLCLVQVQVHRIKRDSNKIAHALAQLVMGSGTNAVWRLCSPAEILDLLNQECNPLFSH

SEQ ID NO: 151344 - protein, 1316 aa, Oryza sativa
  Clone ID: PAT_MRT4530_51496C.1.pep
MDTASSPVKINHGPTRSSSSSKRRLDLEEEHQKDATSDILLLESSEMVEKRTQGVQESGDEIQKMEEFGATSRDVKKQKMEGSIQELVCMVQTHRPKVVFLSETRQNQGFVENIKWQIGLRGCLAVNGIGKGGGIALFWDESVNVTIKSYNLRHIDAVITEQNQDPWRATFVYGEPKAQDRHLMWTLLRRIKQNTSDPWLMIRDFNEAMWQSEHLSQNRRSETQMREFRSVLSDCDLHDLGFHGIPWTYDNMQRGDRNVRKEEHIRYQRQQTMRYEEVWERESSLPEVIQSAWSDGNAITNLGDISAKMKNTMCKLSRWSKEKIGNVRKKIAALRDKLRECRSMGSLDSDVQVRQIKKELEELLHREEIWWKQRSRIMWLKEGDRNTRYFHLKASWRSRKNRVRKLKRNDGMATCEIGEMEELAHNFFQQLYLKDDRLNPENLLSFYAQNITEEMNGKLTEPFSEEEISDALFQIRPLKAPGPDGFPARFFQKNWGILKEDVVRAVKNFFVDGQMQEGVNDTAIVMIPKKSLAEDMKDFRPISLCNVVYKVVAKCLKCNRENQNFCALKLDLSKAFDHVDWQFLDGVMERMGFCDKWRSWIMACVTSVQYNVRFNGHLLEPFSPTRGLRQGDPLSPYLFLLVADGLSNIIKSNESEGLIQPLKVCRRAPGISHLLFADDSLLFFKADTEQASRIRDVLQMYESSTGQLINPSKCSMLFSDFCPQQHQEDIKRILGVTNSSFEEKYLGLPTPEGRMKAGQFQPIKDRLSKRMSDWNEKYMSSGAKDVLIKSVAQALPTYTMGIFKMTDKFCEEVSQMIRNFWWGHEKGEKKVHWIAWEKITSPKIHGGLGFRDMKCFNQALLTKQAWRLITTPESLCARVLKAKYFPSGSLLDTAFPTVSLPTWKGVQYGLDLIKQGIIWRRWWHRKDDAEEVLKIRLLECQPDDFPAWHLEKSGLFTVKSACRLAWNLSNHGRSDASSSDAPSDRLPTWDNKRKRNIERQGICQICGSSVEDGFHATVACPRAKALREAIREIWHLPPENKFVNSGPDWLLLLLDGSNEEEKAHTLFTLWRAWHCRNEIIHGKEMSPIASSVNFLMNYEDCTLMTRQQPDDVKGKGPMFVETHIQRQLNEKQVSKWQTPPEGVAKLNVDAGFKPDTGETGAGIIIRECRGLVLLASCKKLPRCSSAMQAEALACLEGIRLATEWVNMPLILESDNASVVAELNATNVSRADWSGIISDVKAAMLCLVQVQVHRIKRDSNKIAHALAQLVMGSGTNAVWRLCSPAEILDLLNQECNPPRSHPPLPLHGSRCPPSVLI

SEQ ID NO: 151345 - protein, 123 aa, Oryza sativa
  Clone ID: PAT_MRT4530_51497C.1.pep
MNNTKIPKSSFSARARHWPPPPHRAPWLRAAAGRAAVGERMGACGERRRHGNVGILLPRRPSPAHQHDGIENGDGGVEDDDEDDALALTAAAEAEVAWAAVGGAEEEVAIYKIMDLNNTRVQL

SEQ ID NO: 151346 - protein, 70 aa, Oryza sativa
  unsure (1)..(70): unsure at all Xaa locations
  Clone ID: PAT_MRT4530_51498C.1.pep
SEYKTTPLISFFITADTTNSLYSKTLSVRSHCDSTCQTSQPLKSIFYTTYILLCTLPHLTPSNXFFYLLL

SEQ ID NO: 151347 - protein, 66 aa, Oryza sativa
  unsure (1)..(66): unsure at all Xaa locations
  Clone ID: PAT_MRT4530_51499C.1.pep
XRXXXGXXXARRHRCQQLRPPPPPPWLWGGGGKIVKAGPVACLGPAVVLPHREQLPDRSKVWQLYA

SEQ ID NO: 151348 - protein, 61 aa, Oryza sativa
  unsure (1)..(61): unsure at all Xaa locations
  Clone ID: PAT_MRT4530_5149C.1.pep
IEYLDGNKPIVVVHAYGVDNKDLLNKETLRLVLGASLTYLMXKVDKIMESTVGHLVVCSEG

SEQ ID NO: 151349 - protein, 79 aa, Oryza sativa
  Clone ID: PAT_MRT4530_514C.1.pep
NRLPVHSKMYNFSKIKDKCTISSSYLLLLVQTFNSELILHMPATYVRLASSKRGFYKRCYSSDLHFIHAIVLSCIFYSL

SEQ ID NO: 151350 - protein, 132 aa, Oryza sativa
  Clone ID: PAT_MRT4530_51500C.1.pep
MAAATAYTVALLGATGARVPAAPRSAALLPRRGGVLQPLRLQDAPRLSLLRVRAASDDTSTSASGDELVADLKAKWEAIEDKPTFLLYSGGAVVALWLTTVVVGAINSVPVLPKILELRGLRYTGWFGYRYL

SEQ ID NO: 151351 - protein, 54 aa, Oryza sativa
  Clone ID: PAT_MRT4530_51501C.1.pep
FFFFFFRVKNPSGMSTRMRSNIQRVTTSPSVCLYYHFSSVSRIILPCPTIYVAS

SEQ ID NO: 151352 - protein, 64 aa, Oryza sativa
  Clone ID: PAT_MRT4530_51502C.1.pep
FLLTTQVIDFVFTFISSRVILNLFRTLHPIPLLSTKESTRRPVTYCAVTIAVVSTLAASIQQLH

SEQ ID NO: 151353 - protein, 84 aa, Oryza sativa
  unsure (1)..(84): unsure at all Xaa locations
  Clone ID: PAT_MRT4530_51504C.1.pep
CRXRXXPQSPSXXWAIXSCSRXSXEXLVXXTSSRRXXRXAGXGGXRDVXVGVVVXVAEXSWGLVXHXXTCCRFRRSXCAGGGFW

SEQ ID NO: 151354 - protein, 86 aa, Oryza sativa
  Clone ID: PAT_MRT4530_51505C.1.pep
MDAASLCEVRATGEELGGDNDQGARRGRLLAGKRWAATTAGEELGAGSGQRGKSWSDGTEGAAHGRWPNGENWATTAGKELGASGG

SEQ ID NO: 151355 - protein, 474 aa, Oryza sativa
  Clone ID: PAT_MRT4530_51506C.1.pep
RGALLALALLLTATAVVPLLLLGEAGDDGVGAVAAAPPFNASRVRAVSWRPRVFVYKGFLSDDECDHLVKLGKRKMQRSMVADNKSGKSVMSEVRTSSGMFLDKRQDPVVSRIEKRIAAWTFLPEENAENIQILRYEHGQKYEPHFDYFHDKVNQALGGHRYATVLMYLSTVEKGGETVFPNAEGWENQPKDDTFSECAQKGLAVKPVKGDTVLFFSLHIDGVPDPLSLHGSCPVIEGEKWSAPKWIRIRSYEHPPVSKVTEGCSDNSARCAKWAEAGECEKNPVYMTVNSSILFLQKQRLTSFAHGFEISSLLLVEVKTVKFARSARRVSATTLAILFGGLILVSLLVETSAKPPSPGSSVLGVGGRRMMINGGLVHSHRSLEDFNAGDAFSSMKRRVPNGPDPIHNRLSIPSFIYSGFLMVFTLNSSEELENQEDHQAERRKAHCKFAIEEKECSFEQPKLHPECGLKAKLV

SEQ ID NO: 151356 - protein, 324 aa, Oryza sativa
  Clone ID: PAT_MRT4530_51507C.1.pep
MAVALAASPDRSMGRESRFRHGWRSLTSSSEEKGALKDVPAAAMLKNRNDNEKKRSRRRKPGITILKNSGHRDGSIFKGNRGWKIDFRIANPDETQFEAMMLSDPGDCKPDEIACVMHQPCPMLQIFSLKLAKTSIDRFPVELYGYIAVRDLMDPLRNYVVRRSRDDTIAVKPGSLIGMTGPKRGIKFCSSALIEYDMRIKTGEQEEDDIQLIDGVLGIFDDLSKPSCKPFRSRIDGVGGAVDITVGLLPSAVEAIFEVSISEVQSCFDLTVCSYAGGLSQQFKIFQGTIDLPVTIPWGRGWYRKEPLLNFMEINGGGIEKNLY

SEQ ID NO: 151357 - protein, 55 aa, Oryza sativa
  Clone ID: PAT_MRT4530_51508C.1.pep
GPLYSSTLPRVLHLGASHGDNASRLVASGLVGRYGRLGLRWLLPRAWATRAGRTR

SEQ ID NO: 151358 - protein, 113 aa, Oryza sativa
  unsure (1)..(113): unsure at all Xaa locations
  Clone ID: PAT_MRT4530_51509C.1.pep
QYTYVLVCPKCEVKRFADLSSDETXELWVIVKDVDVQLLQYHKTSSLTFSIEDGPQASQTVPHVHIHIXPRKKGDFEKNGEIYDAIDVKERELNEKLDLDIERKDWTMEEDGS

SEQ ID NO: 151359 - protein, 432 aa, Oryza sativa
  unsure (1)..(432): unsure at all Xaa locations
  Clone ID: PAT_MRT4530_5150C.1.pep
AGQCSLVQPPRLITCLLLLLLLLLSPPALPCSASSSSSSSSVITHLPGFHGRLPFYLETGYIGIEEKTGTELFYYFVESETNPDTDPLVLWLVGGPRCSAFSGLAYEVGPLNFVLEAYNGSLPRLVYNQYSWTQMASIIFLDSPVGSGFSYARDSNGYDVGDISSSLQVVTFMKEWLNDHPRYRSHNFYVGGASYAGKVVPVIVQYISEGNQRYTXHLQGYIVGNPITGSKFDKNFHVPYSHGVGIISDQLYELMSEVSDGNILEDKCVKAAPKXYNRCFSKQGTAGSYGYYLSYCWMNDNTTRDALKIKKGTVGVWTRCNTEVFPYARDVPSTIQYHLNLTTRGYRALVFCGDHDLMVPFLGTQAWIRSLNFTIIDDWRAWHLDGQAAGFTVMYDNNLTFATLKGSGHAPISYKPKQGFAMGQRWLDRKPL

SEQ ID NO: 151360 - protein, 72 aa, Oryza sativa
  Clone ID: PAT_MRT4530_51510C.1.pep
VKGISSRTMCLCNWKTMSTNPNVMYMAFDCQHHLLFGFIQRSDEEYDVIDLLDPRTRYQWSIRCGLSEVGVV

SEQ ID NO: 151361 - protein, 111 aa, Oryza sativa
  Clone ID: PAT_MRT4530_51511C.1.pep
MGSAQMDSARVPRPAPAGSRACRGRRQAAAAAAAAAASSEPNHLNGSLQLQAGGGGIRPVFGVRWPGALCAARPPGRKGAAASLFEFCAERFGTSLVVGAVPERFRAAKFG

SEQ ID NO: 151362 - protein, 180 aa, Oryza sativa
  Clone ID: PAT_MRT4530_51512C.1.pep
MESAVQLPQYIFFDLSGSHLRCFCPPAPVMEHTGVPYDSQVVGLQALHRTRLSRAGGSSTIVSARPANQVDKAMVLCDRAAQIGDDDDDPDTVSDAGTSGVGVVDEEETAGDDEEDEVASLDELFCDERIVRKIDALAQLVGMDGAACQPAAVLGEVVRLIQETERKNGRCVCASGAVRS

SEQ ID NO: 151363 - protein, 124 aa, Oryza sativa
  unsure (1)..(124): unsure at all Xaa locations
  Clone ID: PAT_MRT4530_51513C.1.pep
ALSEVSSSGAAESLLVGSXWSVVDADSDSYDAVQVELGCTKGSGTLEVTYVVTLYPLSMATAVMVKNNGKKPVSLTSAMLSHIKFDKRRGTAVEGLRGCPYCSHPPPAVGFALLTPAEAMKRED

SEQ ID NO: 151364 - protein, 399 aa, Oryza sativa
  Clone ID: PAT_MRT4530_51514C.1.pep
MATSSLLPLHLPTRPSAVKASAAATAAAAPTPQSLEESFGRKGLRFAADPATGAPTAELSVRNGSSLQLRLADGLVTSYRPKVYWKDDGCREVLHTVAGAGAGGEVKGGVGLALSEVSSSGAAESLLVGSEWSVVDADSDSYDAVQLVNDNWVLDLHPVLSRQAQTELDSLMTILASQQLQHTEQDVELGCTKGSGTLEVTYVVTLYPLSMATAVMVKNNGKKPVSLTSAMLSHIKFDKRRGTAVEGLRGCPYCSHPPPAAGFALLTPAEAMKREDGGWFGGGGGEEPRQGVWTVEDNLYTILKKKVSRVYAAPPEERKKRIYSTAPSKFTTIDQNSGLGFRVVRMGYEDMYLCSPGEMYRKFGKDYFLCTGTASMLVPVVVNPGEEWRAAQVIEHDNL

SEQ ID NO: 151365 - protein, 67 aa, Oryza sativa
  Clone ID: PAT_MRT4530_51515C.1.pep
IAQDWKIIPLLKRTIQSYRQYPLQTTHKKVKDMIIWLSQLIHNKSCFYHGERHDHMSIRCLSQLIHT

SEQ ID NO: 151366 - protein, 91 aa, Oryza sativa
  Clone ID: PAT_MRT4530_51516C.1.pep
MAKTPGNRRLIPTKRLLKEAAAAATAVDPEAGGYDLQWRRLLPKVVAATCCGNGGGSGGDSRRQQIHQSRPQAMTVTGGRRRGLRVRSMED

SEQ ID NO: 151367 - protein, 53 aa, Oryza sativa
  unsure (1)..(53): unsure at all Xaa locations
  Clone ID: PAT_MRT4530_51517C.1.pep
FINLPPFFYRQKKHFLLELSYSNPSFTRPSTPMPVISEFXSLAMNTAMTESRP

SEQ ID NO: 151368 - protein, 161 aa, Oryza sativa
  unsure (1)..(161): unsure at all Xaa locations
  Clone ID: PAT_MRT4530_51518C.1.pep
DMFTIIHNCRILSCSRYKQAQPQPILILCKKKVHVPTTYFRFVELHSLYFSYSILNALLQLCGTEVKQILLWFFFPQLIISCNTYWXPYNYLWAKHPYWKINYDDRTQNQLKKPNKACSHIYLLTKXKINLPGKCSKGCRRERKSLXSSFFLSSAACATXF

SEQ ID NO: 151369 - protein, 72 aa, Oryza sativa
  Clone ID: PAT_MRT4530_51519C.1.pep
PRYMPGPFVLDYNTVHLLTCSVLLPGTGLIAMRRSYLSLGLSNPSPCAFFPVISTSHMMILNVCGRPDKSGI

SEQ ID NO: 151370 - protein, 495 aa, Oryza sativa
  unsure (1)..(495): unsure at all Xaa locations
  Clone ID: PAT_MRT4530_5151C.1.pep
MGSHRHRSAGQCSLVQPPSLITCLLLLLLLLLSPPALPCSASSSSSSSSSSSSVITHLPGFLGRLPFYLETGYIGIEEKTGTELFYYFVESETNPDTDPLVLWLVGGPRCSAFSGLAYEVGPLNFVLEAYNGSLPRLVYNQYSWTQMASIIFLDSPVGSGFXSYARDSNGYDVGDISFSLQVGTIMKEWLNDHPRYRSHNFYVGGASYAGKGVPVIVQYISEAIEEQRQRPLIDLKLQGYIVGNPITGSKFDKNFHVPYSHGVGIISDQLYEAAVTHCKGDFVNPTNQLCANVVYTINKLMSEVSDGNILEDKCVKAAPKPTIDVSASRALLEEYSRLSKPPIRPSMDCASYGYYLSYCWMNDNTTRDALKIKKGTIGEWLRXNRGVFPYAKDIPNALDYHFNLTTRGYRALVMSGDHDLKVPFLSTQAWIRSFNFFIVDDWRAWHVDGQAAGFTITYANNLTFATVKGGSHVATVNRPKESFAMGKRWLANKPL

SEQ ID NO: 151371 - protein, 327 aa, Oryza sativa
  Clone ID: PAT_MRT4530_51520C.1.pep
MDGNDGSMQVSLSLVTVAKNGSGDYRTIAAALAAAPKSTKKVRSSYTIRIGEGTYIEQLNITRRDVTLFGDGVGKTVITGNRGSLKHGDMPSSATVTASGRGFMARDLTIQNTAGPEGNQSLALRSSSNHTVLYRCELESFQDTLYAENGLQLYLDSVISGTVDFVFGNAKAVFQRCHLLVRRGREGAHNIITAQGRDKPGDDTGFSFQNCSIMAKPNENLTGVETFLGRPWKNHSHVIFMQSFLDGIVHPKGWVEWDKSKHVLETTKTVSYMKFNNTGPGSDTSRRVNWEGFSVVDASKAEEYTVDRFIHGTQWLPNALNYKPGLY

SEQ ID NO: 151372 - protein, 110 aa, Oryza sativa
  Clone ID: PAT_MRT4530_51521C.1.pep
RCVGGSSTNRLRLFFGTAGPPPLSAAPSSSGAFSQGAMNEGCKQGRLSVRPDLRFCHYRVFPRWGYFRGGYRLWCLCNLVLQCSRHPMALPSRCFPAKTLSGNVSSTKGI

SEQ ID NO: 151373 - protein, 65 aa, Oryza sativa
  unsure (1)..(65): unsure at all Xaa locations
  Clone ID: PAT_MRT4530_51522C.1.pep
MAVTRTALLVVLVAGAMTMTMRGXEAXQPSCAXAXTQLAPCXRVGVXXXPGXPLPAPXECCSALG

SEQ ID NO: 151374 - protein, 101 aa, Oryza sativa
  Clone ID: PAT_MRT4530_51523C.1.pep
MALRAIFCMSAKTAKKEFVDPFAAYETARVIVSGEGPSGTSHFFNEESSHSEESSDDEESDAPTENVPTDPNEAVDAAGQDIDSPHSGDTEIIPSDGDDEA

SEQ ID NO: 151375 - protein, 49 aa, Oryza sativa
  unsure (1)..(49): unsure at all Xaa locations
  Clone ID: PAT_MRT4530_51524C.1.pep
ELATGRLAILAFLGFLVQXPVTQKGPFANLVQXHLSHPWLNTIIHTLSG

SEQ ID NO: 151376 - protein, 198 aa, Oryza sativa
  unsure (1)..(198): unsure at all Xaa locations
  Clone ID: PAT_MRT4530_51525C.1.pep
MNGFDLPTNFVENLEKLARRVKPRVVPPQIRFSAPEPVIFAPSNSKPMAXKTLCDYSAPFGDANFEIKTGQITMLQATPSCGKANEDANAHLQQFLELCNTIIIKGVTXMRLRLFXSLLGRLKHWFYSKRGAVDNWERCSTAFIMRFFLMGKTNILXGKISSFXQATNDSIPEAWGDSMNTSWCVLTMGWTTSSSTKI

SEQ ID NO: 151377 - protein, 99 aa, Oryza sativa
  Clone ID: PAT_MRT4530_51526C.1.pep
SPPGWAKRWATPRFCPWGGSKKRRKTRSPPPPPSSTRGVTTRRKLIGRRGKNFFTTSIQPASGGGAKGLTSRFRKNQSFWSVGSKKTKNGGAMFFGLKG

SEQ ID NO: 151378 - protein, 58 aa, Oryza sativa
  Clone ID: PAT_MRT4530_51527C.1.pep
MDYASDADEEQCGNGDRRHHIQQRFHTHLAAVGLWVGVGVDRCMSVDAAGGNDECHRR

SEQ ID NO: 151379 - protein, 107 aa, Oryza sativa
  Clone ID: PAT_MRT4530_51528C.1.pep
VFRATTGSGAGPTWSVIRLSPRCSMFPFCKGKIIAFFGLSILWPRPCPLGVGRGGNFFGPPFPCFFCPKPTKLSPPLGKFNWRGFLGLPPVVFSMNRFPPLSFFFLP

SEQ ID NO: 151380 - protein, 186 aa, Oryza sativa
  Clone ID: PAT_MRT4530_51529C.1.pep
MASKLVTAVARQAAATSRAARLAAVARHDAAAASRSAGLAAAAASRAARLAAAAASRAARLKPRPPLDDAARLSFRYSSEPPDDGKCVTKEDLESDEAVWALFERYCKSYNRKYDHAQMVRRFRIFKFNAKRTYCWNQYLHKDVKELARAKKDRDLGLPVDSWYLQKELGEYDDGGEPLTEYWRKF

SEQ ID NO: 151381 - protein, 90 aa, Oryza sativa
  Clone ID: PAT_MRT4530_5152C.1.pep
MAQQARAQWPQKQNKLFEQALAVYDKETPDRWHNIARAVGGGKSAEDVKRYYEMLEEDIKHIESGKVPFPAYRCPAAAGYQAERLKHLKI

SEQ ID NO: 151382 - protein, 159 aa, Oryza sativa
  Clone ID: PAT_MRT4530_51530C.1.pep
MACAQQLARYKTLSRFRAASAVSSIPCRKRRPPRRSGQRTGSIPAVLTAQGATAEQQHSDPAARNSTSDLHTCPASPFIDTVPLSRTCRRWCRVAAALEPLDPDLMPSRADLVSPRQPSIPPPDLEDERATSGSCSPGCRQHAAIDSSAVITATLNYHH

SEQ ID NO: 151383 - protein, 205 aa, Oryza sativa
  Clone ID: PAT_MRT4530_51531C.1.pep
MGNSLRCCLACVLPCGALDLIRIVHLNGRVEEYGRPVAAGEILAANPNHVLSKPCCSQGGAVAVRRTILIVSPDSELERGEIYFLIPASSVPDKKKKSGGGAAAATPAASGRHGKSKQAAPSSDHGGNGRRHVRDVSSEKRSSSLHRRRMSAGSRTAAWRPHLDRSSPIRADCLAFSLEADPFRREPDPSAASQREVEESTMAQT

SEQ ID NO: 151384 - protein, 71 aa, Oryza sativa
  unsure (1)..(71): unsure at all Xaa locations
  Clone ID: PAT_MRT4530_51532C.1.pep
DEASGLVQPPVSPHNACCSHNXMVQKRGSQDCHCVYPVRVELFLRNVSLTSNWSDEFLGELASQLSLRVTQ

SEQ ID NO: 151385 - protein, 102 aa, Oryza sativa
  unsure (1)..(102): unsure at all Xaa locations
  Clone ID: PAT_MRT4530_51533C.1.pep
MARHDLHKDLNLRMDLTGGGQGSASQDRRGRHRMPEIGGVAEKXRDSHRRSGVTGFSSVVATASSRTRSQQVADADAASGGRARQRAAARGRSRQRGGVGRC

SEQ ID NO: 151386 - protein, 259 aa, Oryza sativa
  Clone ID: PAT_MRT4530_51534C.1.pep
MAKAQPPPAREPLLPSSASPPPYLDARAGADANADSYVLLVPVRLRRLRRGCRCRCLGPLLSTLALLSLAGFLLWPADPDVSVARLRLAHVSVSARPTVRVTISAALKVRVRNPDLFALDYGRLDVDIGYRGAPLGRVTSGGGRVRARAVSYIDANLSLDGISVVEDAIYLLEDLARGSVPFDTVAEVEGHVHLFFLSIPVKEGCDTMIGIFFVPNKGLISDHLSSSSRFTFHLEANVPYCGQCNTNSDSMRKADFLST

SEQ ID NO: 151387 - protein, 42 aa, Oryza sativa
  unsure (1)..(42): unsure at all Xaa locations
  Clone ID: PAT_MRT4530_51535C.1.pep
CSSPSPSSSLGSATVAATSSAALLAGLXGWRAQELVSSTLSV

SEQ ID NO: 151388 - protein, 73 aa, Oryza sativa
  unsure (1)..(73): unsure at all Xaa locations
  Clone ID: PAT_MRT4530_51536C.1.pep
RYFPYSXSRKTGPXPSFWXLNAXVPSDRXRPXXNLXXGGXWXGXXXXCNKIXASCPKXSSTRTEISCGTXGRP

SEQ ID NO: 151389 - protein, 222 aa, Oryza sativa
  Clone ID: PAT_MRT4530_51537C.1.pep
MARGACVVGRISAGVHGEAFARRHRCRRALQCGCMGDDLWRAFLTARSMENVCVLQPHATRLLSESHCREPPPRAVVPLVLPLPRATAVEPPPPVWFRCAPMAAAAPLVQPLPQLPSKKIEKREYRGGVTDRFVLRFVQVDKKKITTHTQAMNGALVHHTLRQCGRVSVVASSNAVKFTVIAVQIQVEAANRVDTIEATREIDVTKSREKLCVCGSMYTTAE

SEQ ID NO: 151390 - protein, 61 aa, Oryza sativa
  Clone ID: PAT_MRT4530_51538C.1.pep
ILCQSGKFSPIFIRYFCAHDGRTCISMFSLVSTPMYSDYQMSSRITFSIECMHKVLDPRTN

SEQ ID NO: 151391 - protein, 184 aa, Oryza sativa
  Clone ID: PAT_MRT4530_51539C.1.pep
MALLRAATADLLRRHLRVPLASLLHPALLPPPQSTESSCPDDPSTPGPVARRGDLFAAPLRRWPRPLIPVSSSSSVDSTGVRLYSHLSGAGSAGGDSTPPPQQSPPAKPPPPSWVDRSITMAAMPGELPDMRMLALFAYGSVLIRGVGCTINDLLDRDIDRKISVNVRPYMMRNFSPKPRAGDM

SEQ ID NO: 151392 - protein, 92 aa, Oryza sativa
  unsure (1)..(92): unsure at all Xaa locations
  Clone ID: PAT_MRT4530_5153C.1.pep
QLSPGQAHLHLAAFIGHILPSXTKISLFCTLCPYSCALGKNFSISHPSXIAPGXACLTSEFFRDWLLEKKLQLVXAMNVLLILLSPRPGCQS

SEQ ID NO: 151393 - protein, 59 aa, Oryza sativa
  Clone ID: PAT_MRT4530_51540C.1.pep
RVIFYSTTSHFLRSLPLTVRRLHLGENSVTGMQGGNRYFLPYRLSCLHSSHFYLYRNSC

SEQ ID NO: 151394 - protein, 159 aa, Oryza sativa
  Clone ID: PAT_MRT4530_51541C.1.pep
MGGEAAWSRVRFFFLYMLILMGFLGLCSYNGPHFKSQILVVFSLPWVFSYPLMKRFTYWDKEDDLKIGVKSTAIRFGDSTKPWISGFGAACIANLALSGYNADLAWPYYPFLAAASAHLAWQISTVDLSDPLDCNRRFVPNKWFGALIFGGILCGRLVS

SEQ ID NO: 151395 - protein, 320 aa, Oryza sativa
  Clone ID: PAT_MRT4530_51542C.1.pep
SSTSSGAGGDSTPPPQQSPQAKPPPPSWVDRWVPLAARPYAMLARIDKPIGTWLLAWPSFWSIAMAAMPGELPDMRMLALFACGSVLIRGAGCTINDLLDRDIDRKVERTKSRPLASGILTPTQGVGFLGFQLLLGLPILLQLNNLSQILGVFSLLLVFSYPLMKRFTYWPQAYLGLVFNWGALIGWAAMKGTIDPAIILPLYTAGICWTLVYDTIYAHQDKEDDVKVGVKSTALRFGDSTKPWISGFGAACIANLALSGYNADLAWPYYPFLAAASAHLAWQVSTVDLSDRLDCNRKFVSNKWFGALIFGGILCGRLVS

SEQ ID NO: 151396 - protein, 43 aa, Oryza sativa
  Clone ID: PAT_MRT4530_51543C.1.pep
CPLDEWSLFLIKPIAVMSSFKCLPPFMSIFMRFHSRILGFRPT

SEQ ID NO: 151397 - protein, 52 aa, Oryza sativa
  Clone ID: PAT_MRT4530_51544C.1.pep
MQTNGRRRTEDEEQSCRSTPQKPDHPPTRCRSQAKVWFQRPCSFRSLVHASD

SEQ ID NO: 151398 - protein, 1666 aa, Oryza sativa
  unsure (1)..(1666): unsure at all Xaa locations
  Clone ID: PAT_MRT4530_51545C.1.pep
MDISRANEGYTSCGPMAGSINRRGLDLTGFVLELRGMCVVLGYPHGVDYQGKQLLEQEVILTGSPERTSLAVTAGGDSFSAACQNAALLAIGTLHQRYPDELQHSPYRYHPRRGGARDYATFQDASSEDDATIMHLARMVEAYDAARIDFHQMVRRGLVKNNMKILELRQENLQLKKDLDAVEAQLCQLKIAQGEMVTTRRSAATGDGNQPEGSNPNIQGGPPPPPPPPPPPPPDTNSILTQILAQQANMMAAFLHHIQNPPQHNAPPPPPPPQHSKLAELLRIRPPTFSSSNNPVDALDWLHAVGKKLDTVQCNDEEKVIFAAHQLQGPASLWWDHFQATQPEGQPITWARFTAAFRRTHVPAGVMALKKREFRELKQGNRSVMEYLHGFNNLARYAPEDVREDEEKQEKFLARMDPELSVRLVSGDYPDFQRLVDKSIRLEAKHKELESQKRRLANLRNQQGANQRVRYTNPYPGGSSSQPQQQQSQQGTRVPRPPAPVVQPGQGRREVQGQQRLCFNCFEPGHFADKCPKPRRQQGQAPPRPNNGGKDVIRGRVNHVTAEDVLTTPDVIVGTFLIHSIPATILFDSGASHSFISVPFVGRNQLGVERLRNPLLITTPRGVMTAKYYSPAVPIEIQGIPFPSDLILLDTKNLDVILGMNWLAEFQGVVDCARRTVTLYRGPEQPVVFFAPPTSIGSSELHQIGLSEIPIVSEFGDVFPEELPGMPPKREIEFRIDLAPGTTPLYKRLYRMAANELAEVKKQLEELKEKGYIRPSTSPWGAPVIFVEKKDKTKRMCVDYRALNEVTIKNKYPLPRIDDLFDQLKGATVFSKIDLRSGYHQLRIREEDIPKTAFTTRYGLYEFTVMSFGLTNAPAFFMNLMNKVFMEYLDKFVVVFIDDILVYSQSEEDHQQHLRLVLGKLREHQLYAKLSKCEFWLSEVKFLGHVISAKGVAVDPETVTAVTDWKQPKTVTQVRSFLGLAGYYRRFIENFSKIARPMTQLLKKEKKFVWSPQCEKAFQTLKEKLVSSPVLILPDTRKDFMVCCDASRQGLGCVLMQEGHVVAYASRQLRHHEGNYPTHDLELAAVVHALKIWRHYLIGNRCEIYTDHKSLKYIFTQSDLNLRQRRWLELIKDYDVGILYHPGKANVVADALSRKSRCNTLGVRGIPPELHQQMEALNLSIVGRGFLATLEAKPTLLDQIREAQKNDPDMHGILKNMKQGKAAGFTEDEHGTLWNGSRVCVPDDKELKQLIVQEAHESPYSIHPGSTKMYLDLKGTYWWVSMKWEIAEFVALCDVCQRVKAEXRPAGLLQPLQVPEWKWDEIGMDFITGLPKTQGGXRFIPVKTTYGGNKLAELYFARIVSLHGVPKKIVSDRGSQFTSHFWKKLQEELGTRLNFSTAYHPQTDGQTERLNQILEDMLRACVQDFRKTWDKSLPYAEFSYNNSYQASIQMALYEALYGRKCRTPLLWDQVGESQVFGTDILREAEAKVRTIRENLKVAQSRQKSYADNRRRDLEFAVDDFVYLRVTPLRGVHRFQTKGKLAPRFVGPFRIIARHGEVANQLELPASLGNVHDVFHVSQLKKCLRVLSEQADSEQIEVREYLTYVERPVKILDAMERRTRKRVIRFCKVQWSNHAEEEATWEREDELKAAHPDLFASSSESRGRDSV

SEQ ID NO: 151399 - protein, 1332 aa, Oryza sativa
  Clone ID: PAT_MRT4530_51546C.1.pep
MKITARKSTSRPELVRQSLAWTCFVETPRAEPAPSMVTTRRSAATGEGSHPEGSNHNNHGSPPPPPPPPPPPPPPDTNSILTQILAQQANMMAAFLHHIQNPPQHNVPPPSPPPQHSKLAEFLRIRPPTFSSSNNPVDALDWLHAVGKKLDTVQCNDEEKVIFAAHQLQGPASLWWDNFQAMQPEGQPITWARFTAAFRRTHVPAGVMALKKREFRELKQGNRSVMEYLHEFNDLARYAPEDVREDEEKQEKFLAGMDPELSVRLVSGDYPDFQRLVDKSIRLEAKHKELESHKRRLANFRNQQGANQRIRYTNPYPGGSSSQQQQQQQPRSAPRPQFVVRVPQPQQQQSQQGTRAPRPHVPAVQPGQGRRDAQGQQRLCFNCFEPGHFADKCPKPRRQQGQAPPRPNNGGKDVIRGRVNHVTAEDVLTTPDVIVGTFLIHSIPATILFDSGASHSFISVPFMGRNQLGVERLRNPLLITTPGGVMTAKYYSPAVPIEIQGIPFPSDLILLDTKNLDVILGMNWLAQFQGVVDCARRTVTLYRGPDQPVVFFAPPTSVDNSELHQIGLSKIPIVREFGDVFLEELPGMTPKREIEFRIDLAPGTTPLYKRPYRMAANELAEVKRQLEELKEKGALNEVTIKNKYPLPRIDDLFDQLKGATVFSKIDLRSGYHQLRIREEDIPKTAFTTRYGLYEFTVMSFGLTNAPAFFMNLMNKVFMEYLDKFVVVFIDDILVYSQSEEDHQQHLCLVLGKLREHHLYAKLSKCEFWLSEVKFLGHVISAKGVAVDPETVTAVTDWKQPKTVTQVRSFLGLAGYYRRFIENFSKIARPMTQLLKKEEKFVWSPQCEKAFQTLKEKLEGHVVAYASRQLRPHEGNYPTHDLDLAAVVHALKIWRHYLIGNRCEIYTDHKSLKYIFTQSDLNLRQRRWLELIKDYDVGIHYHPGKANVVADSLSRKSRCNTLGVRGIPLELNQQMEALNLSIVGRGFLATLEAKPTLLDQIREAHKNDPDMHGLLKNMKQGKAAGFTEDEHGTLWNGNRSSWPFVMCASVSRESTNDRPDFSNLSKYQNGNGMKLGWISSPDFQKPRATWDKSLPYTEFSYNNSYQASIQMAPYEALYGCKCRTPLLWDQVGESQVFGTDILREAEDKVRTIRDNLKVAQSRQKSYADNRRRNLEFAVDDFVYLWVTPLRGVHRFQTKGKLAPRFVGPFRIIARRGEVAYQLELPASFGNMHDVFHVSQLKKCLRVPSEQADSEQIEVREDLTYVERTVKILDTMERRTRNWVIRFCKVQWSNHAEEEATWEREDELKAAHPDLFANAAASEDPLFVEVEADV

SEQ ID NO: 151400 - protein, 879 aa, Oryza sativa
  unsure (1)..(879): unsure at all Xaa locations
  Clone ID: PAT_MRT4530_51547C.1.pep
MALKKREFRELKQGNHSVMEYLHEFNNLARYAPEDVREDEEKQEKFLARMDPELSVRLXGILLAAAAAAATSLRAPTSIRGARPTAAATAESARDPCTXPPTPAVQPGQGRRDAQGQQRLXFNCFEPGHFADKCPKPRRQQGQAPPRPNNGXGLSEIPIVSEFRDVFPEELPGMPPKREIEFRIDLAPGTTPLYKRPYRMAANELAEVKKQLEELKEKGYIRQSTSPWGAPVIFVEKKDKTKRMCVDYRALNEVTIKNKYPLARIDDLFDQLKGATIFSKIDLRSGYHQLRIREEDIPKTAFTTRYGLYEFTVMSFGLTNAPAFFMNLMNKVFMEYLDTFVVVFIDDILVYSQSEEDHQQHLRLVLGKLREHQLYAKFSKCEFWLSEVKFLGHVISAKGVAVDPETVTAVTDWKQPKTVTQEGHVVAYASRQLRPHEGNYPTHDLELAAVVHALKIWRHYLIGNRCEIYTDHKSLKYIFTQSDLNLRQRRWLELIKDYDVGIHYHPGKANVVADALSQKSRCNTLSVRGIPPELNQQMEALNLSIVGRGSLATLEAKLTLLDEIREAQKNDPDMHGLLKNMKQGKAAGFTEDEHRTLWNGXSEFVALCDVCQRVKAEHQRPAGILQPLQVPEWKWDEIGMDFITGLPKTXGGYDSIWHRVSPADRWTDRASKSDPRRYAPCLCSRFRXTWDKSLPYAEFSYNNSYQASLQMAPYEALYGRKCRTPLLWDQVGESQVFGTDILREAEAKTKGKLAPRFVGPFRIIARRGEVAYQLELPASLGNMHDVFHVSQLKKCLRVPSEQADSEQIEVREDLIYVERPVKILDTMERRTRNRVIRFCNVQWSNHAEEEATWEHEDELKXPIPISSPVLPNLGVEIPF

SEQ ID NO: 151401 - protein, 1225 aa, Oryza sativa
  Clone ID: PAT_MRT4530_51548C.1.pep
MPHTTPAEKTNEKNTRASLLTARLLLQRARAEAEQQHILRATNARGSLLLRNRGRGLGARGLHEASPCQGLTNKLRPGGTLAGGDLQAAADAAALGVTDLCVSDLELTQLRLHCVQVLLQLQVLLTQLQDLHVVLDQPTAHHMMEVDTGRIVRLHHARQVHDGSVILRASIPEGGIVAGSFSARVVAVGRVLQLVRVALVKSADGEECGVLASGGERISTRGDCQRSPLGRAARRRETRGFSQIRKDFYFENIAKAWDLRLVLWSRRLESHKRRLANFRNQQGANQRVRYTNPYPGGSSSQQQQQPRSAPRPQFVVRVPQPQQQQNQQGNRAPRPPAPAVQPGQGRRDAQDVIVGTFLIHSIPATILFDSGASHSFISVPFVGRNQLGVERLRNPLLITTPGGVMTAKYYSPAVPIEIQRIPFPSDLILLDAKNLDVILGMNWLAQFQGVVDYARRTVTLYRGPDQPVVFFAPPTSVGSSELHQIGLSEIPIVSEFEDVFPEELPGTTLYKRPYRMAANELAEVKKQLEELKEKGYIRPSTSPWGAPVIFVEKKDKTKRMCVDYRALNEVTIKNKYPLPRIDDLFDQLKGATVFSKIDLRSGYHQLRIREEDIPKTTFTTRYGLYEFTVMSFGLTNAPAFFMNLMNKVFMEYFDKFVVVFIDDILVYSQSEEDHQQHLRLVLGKLREHQLYAKLSKCEFWLSEVKFLGHVISAKGVAVHPETVTAVTDWKQPKTVTQVRSLLGLAGYYRRFIENFSKIARPMTQLLKKEEKFVWGPQCEKAFQTLKEKLVSSPVLILPDTRKDFLVYCDASRQGLGCVLMQEALNLSIVGRGFLAMLEAKPTLLNQIREAQKNDPDMHGILKNMKQGKAAGFTEDEHGTLWNGNRVCVPDDRELKQLILQEAHESPYSIHPGSTKMYLDLKEKYWWKIVSDRGSQFTSHFWKKLQEELGTRLNFSTAYHPQTDLQTERLNQILEDMLRACVLDFGKTCDKSLPYAEFSYNNSYQASIQMAPYEALYGRKWRTPLLWDQVGESQVFGTDILREAEAKVRTIRDNLKVAQSRQKSYADNRRRNLEFTVDDFVYLRVTPLRGVHRFQTKGKLAPRFVGPFRIIARHGEVAYQLELPASLGNVHDVFHVSQLKKCPRVPSEQADSEQIEVREDLTYVEKPVKILDSMERRTRNRVIRFCKVQWSNHAEEEATWEREDELKAAHPDLFASSSESRGQDSV

SEQ ID NO: 151402 - protein, 104 aa, Oryza sativa
  Clone ID: PAT_MRT4530_51549C.1.pep
MSSSRRSRSRRAGSSVPSSSSSSRTSISEDQIAELLSKLQALLPESQARNGAHRGSAARVLQETCSYIRSLHQEVDNLSETLAQLLASPDVTSDQAAVIRSLLM

SEQ ID NO: 151403 - protein, 80 aa, Oryza sativa
  Clone ID: PAT_MRT4530_5154C.1.pep
SSPLYLSAHPKNQTWYFCACSTRQTYAPVMIILSGEPSRPQMKSRRWRTVHYCHLVLDAGGSAIRSIIVTPCDRCYSSPS

SEQ ID NO: 151404 - protein, 1812 aa, Oryza sativa
  unsure (1)..(1812): unsure at all Xaa locations
  Clone ID: PAT_MRT4530_51550C.1.pep
MMTAFLHHLQNPPQHNAPPPPPQHSKLAEFLRIRPPTFSSSNNPVDALDWLHAVGKKLDTVECSDEEKVIFAAHQLQGPASLWWDHFQATQPEGQPITWARFTAAFRRTHVPAGVVALKKREFRELKQGNRSVMEYLHEFNNLARYAPEDVREDEEKQEKFLAGMDPELSVRLVSGDYLDFQRLVDKSIRLEAKHKELESHKRRLANFRNQQGANQRVRYTNPYPGGSSSQQQQQQQQPRSAPRPQFVVRVPQPQQQQSQQGTRAPRPPTPTVQPGQGRRDASGPQRLCFNCFEPGHFADKCPKPRHQQGQAPPCSNNGGKDVIRGRVNHVTAEDVLTTPDVIVELHQIGLSEIPIVREFGDVFPEELPGMPPKREIEFQIDLAPGTTPLCKRPYRMAANELAEVKKQLEELKEKGYIRPSTSPWGAPVIFVEKKDKTKRMCVDYRALNEVTIKNKYPLPRIDDLFDQLKGATVFSKIDLRSGYHQLRIRDEDIPKTAFTTRYGLYEFTVMSFGLTNAPAFFMNLMNKVFMEYLDKFVVVFIDDILIYSQSEEDHQHHLGLVLGKLREHQLYAKLSKCEFWLSEVKFLGHVISAKGVAVDPETVTAVTDWKQPKTVTQVRSFLGLAGYYRRFIENFSKIARPMTQLLKKEEKFVWSPQCEKAFKTLKEKLVASPVLILPDTRKDFMVYCDASRQGLGCVLMQDGHVVAYASRQLRPHEGNYPTHDLELAAVVHALKIWRHYLIGNRCEIYTDHKSLKYIFTQSDLNLRQRRWLELIKDYDVGIHYHPGKANVVADALSRKSHCNTLNIRGIPPELNQQMAALNLNIVSRGFLAALEAKPTLLDQIREAQKNDPDMHGLLKNMKQGKAAGFTEDEHGTLWNGNRRNTEHQRPAGLLQPLQVPEWKRDEIGMDFITGLPKTQGGYDSIWXIVSLHGVPKKIVSDRGSQFTSHFWKKLQEELGTRLNFSTAYHPQTDGQTERLNQILEDMLRACVLDFGKTWDKSLPYAEFSYNNSYQASIQMAPYEALYGRKCRTPLLWDQVGESQVFGTDILRQAEAKVRTIRDNLKVAQSRQKSYADNHRRDLEFAVDDFVYLRVTPLRAVHSFRTKGKLAPRFVGPFRIIARRGEVAYQLELPASLGNVHDVFHVSQLKKCLRVPSEQADSEQIEVREDLTYVERPVKILDAMERRTRSRPFPSSPSTRGEPWTAVSLPPSLPSLGRRSAAPVVAGGDHRGAGVPPPVGCAGEAAFGRAPRLPCGARPSAARALGANEGYTSCGPVVEMSWHRAGVLLLGAQSCLPVPGVPAVGGIGSRFMENFSKIARPMTQLLKKEEKFVWSPQCEKAFRTLKEKLVASPVLILPDTRKDFIVYCDASRQGLGCVLMQDGHVVAYASRQLRPHEGNYPTHDLELAAVVHALKIWRHYLIGNRCEIYTDHKSLKYIFTQSDLNLRQRRWLELIKDYDVGIHYHPGKANVVADALSRKSHCNTLNVRGIPPELNQQMEALNLSIVSRGFLATLEAKPTLLDQICKAQKNDPDMHGLLKNMKQGKAAGFTEDEHGTLWNGNREAHESPYSIHPGSTKMYLDLKEKYWWVSMKREIAEFVALCDVCQRVKAEHQRPAGLLQPLQVPEWKWDEIGMDFITGLPKTQGGYDSIWVVVDRLTKVARFIPVKTTYGGNKLAELYFARIVSLHGVPKKIVSDRGSQFTSHFWKKLQEELGTRLNFSTAYHPQTDGQTERLNQILEDMLRACVLDFGKTWDKSLPYAEFSYNNSYQASIQMAPYEALYGRKCRTPLLWDQVGESQVFGTDILREAEAKD

SEQ ID NO: 151405 - protein, 893 aa, Oryza sativa
  Clone ID: PAT_MRT4530_51551C.1.pep
QVQTTTVDAAGHLQTKTKEKSNILKPGQGRRDVQGQQRLCFNCFEPGHFADKCPKPRRQQGQAPPRPNNGGKDVIRGRVNHVTAEDVLTTPDVIVGVVDCARRTVTLYRGPEQPVVFFAPPTSVGSSELHQIGLSEIPIVSEFGDVFPEELPGMPPKREIEFWIDLAPGTTPLYKRPYRMAANELAEVKKQLEELKEKGYIWPSTSPWGAPVIFVEKKDKTKRMCVDYRALNEVTIKKQLKGATVFSKIDLRSGYHQLRIREEDIPKTVFTTRYGLYEFTVMSFGLTNAPAFFMNLMNKVFMVYLDKFVVVFIDDILVYSQSEEDHQQHLRLVLGKLREHQLYAKLSKCEFWLSKVKFLGHVISAKGVAVDPETVTAVTDWKQPKTVTQVRNFLGLAGYYRRFIENFSKIARPMTQLLKKEEKFVWSPQCEKAFQTFKEKLVSPPVLILPDTRKDFMVYCDASRQGLGCVLMQEGHVVAYASCQLWPHEGNYPTHDLELAAVGKAAGFTEDEHGTLWNGNRVCVPNDKELKQLILQEAHESPYSIHPGSTKMCLDLKEKYWWVSIKREIAEFVALCDVCQRVKAEHQRPAGLLQPLQVPEWKWVEIGMNFITGLPKTQGCYDSIWVVVDRLTKVARFIPVKTTYGGNKLAELYFARIVSLHGVPKKIVSDRGSQFTSHFWKKLQEELDFGKTWDKSLPYAEFSYNNSYQASIQMAQYEALYGRKCRTPLLWDQVGESQVFGTDILREAEAKVRTIRENLKVAQSRQKSYADNRRRDLEFAVDDFVFLRVTPLRGVHWFQTKGKLAPRFVGPFRIIARRGEVAYQLELPASLGNVHDVFHVSQLKKCLRVPSEQADSEKIEVREDLTYVERPVKILDTMERRTRNQVIRFCKVQ

SEQ ID NO: 151406 - protein, 1275 aa, Oryza sativa
  unsure (1)..(1275): unsure at all Xaa locations
  Clone ID: PAT_MRT4530_51552C.1.pep
MSWQRVGALLLGGSVLPACPGCPGRRGIGSVLLFMARMGWELCHVFRPYTVVMVMTRRSANTGDGNQPEGSNHNHQGNPPPPPPPPPPPPPDTNAILTQILAQQANMMTAFLHHLQNPPQQNAPPPPPQHSKLAEFLRIRPPTFSSSNNPVDALDWLHAVGKKLDTVQCSDEEKATQPEGQPITWARFTAAFRRTHVPAGVVALKKREFRELKQGNRSVMEYLHEFNNLARYAPEDVREDEEKQEKFLAGMDLELSVRPVSGDYPDFQRLVDKSIRLEAKHKELESHKRRLANFRNQQGANQRVRYTNPYPGGSSSQQQQQPRFAPRPQFVVRVPQPQXQQSQQETRAPRPPAPVVQPGQXRRDVQGQQRLCFNCFEPGHFADKCPKPRRQQGQAPPRPNNGGKDVIRGRVNHVTAEDMLTTPDVIVGTFLIHSIPATILFDSGASHSFISVPFVGRNQLGVERLRNPLLITTPGGVMTAKYYSPAVPIEIQGIPFPSDLILLDTKNLDVILGMNWLAQFQGVVDCARRTVTLYRGPEQPVVFFAPPTSVRSSELHQIGLSEIPIVREFGDVFPEELPGMPPKREIEFRIDLAPGTTPLYKRPYRMAANELAEVKKRLEELKEKGYIRPSTSPWGAPVIFVEKKDKTKRMCVDYRALNEVTIKNKYPLPRIDDLFDQLKGATVFSKMDLRSGYHQLRIREEDIPKTAFTTRYGLYEFTVMSFGLTNAPAFFMNLMNKVFMEYLDKFVVVFIDDILVYSQSDEDHQQHLRLVLGKLREHQLYAKLSKCEFLLSEVKFLGHVISAKGVAVDPETVTAVTDWKQPKTVTQVRNFLGLAGYYRRFIENFSKIARPMTQLLKKEEKFVWSPQCKKAFQTLKEKLVSLPVLILPDTRKDFMVCCDASRQXIGRVKAEHQRPAGLLQPLQVPEXKWDEIGMDFITGLPKTQGXRFIPVKTTYGGNKLAELYFARIVSLHGVPKKIVSDRGSQFTFHFWKKLQEELGTRLNFSTAYHPQTDGQTERLNQILEDMLRACVLDFGKTWDKSLPYAEFSYNNSYQASIQMAPYEALYGRKCRTPLMWDQVGESQVFGTDILREAEAKVRTIRDNLKVAQSRQKSYADNRRRDLEFAVDDFVYLRVTPLRGVHRFRTKGKLAPRYVGPFHIVARRGEVAYQLELPASLGNVHDVFHVSQLKKCLRVPSEQADPEQIEVREDLTYVERPVKILDTMERRTRNRVIRFCKVQWSNHAEEEATWEREDELKAAHPDLFACSSESRGRDSV

SEQ ID NO: 151407 - protein, 49 aa, Oryza sativa
  Clone ID: PAT_MRT4530_51553C.1.pep
NNQRKKRTPLLCYIWLTLTLGGCSSIDKHSETGKEPTSPHTVISHTRKI

SEQ ID NO: 151408 - protein, 67 aa, Oryza sativa
  unsure (1)..(67): unsure at all Xaa locations
  Clone ID: PAT_MRT4530_51554C.1.pep
FFFFLTKFFFIIXAGSSAQQKPPRFFIIIIITNMTAKPAKFXILKPLLXLXLAXPLXRXIXKPNEXE

SEQ ID NO: 151409 - protein, 1378 aa, Oryza sativa
  unsure (1)..(1378): unsure at all Xaa locations
  Clone ID: PAT_MRT4530_51555C.1.pep
MAGSINRRGLDXLRGMCVVLGYPHGVDYQGKQLPEQEGDDAEPHAAWEVTVVILTGSPERTSLAVTAGGDSFSAACQNAAPLAIGTLHQRYPDELQHSPYRYHPRRGGAHDYATFRDASSEDDATIMHLARMVDTYDAARIDFHQMVRRGLVENNMKILELRQENLQLKKDLDVVEAQLCQLKIAQGEVCRPKRRRVYRSLKITARKSTSRPELVRQSLAWTCFVETPRAEPAPVVPQEEGASGVGXHGGCATAHLPPWPVAESVLSLGXVLYGIFQMVTTRRSAATGDDNQPEGSNPNIQGSPPPPPPPPPPPPPDTNSILTQILAQQANMMAAFLHHIQNPPQHNAPPPPPPPQHSKLAEFLRICPPTFSSSNNPVDALDWLHAVGKKLDTVQCNDEEKVIFAAHQLQGPXSLGWXHFQATQPEGQPITWARFTAAFRRTHVPAGVMALKKREFRELKQGNRSVMEYLHEFNNLARYAPEDVREDEEKQEKFLAGMDPDLSVRLDSGDYPDFQHLVDKSICLEAKHKELESHKHRLANFHNQQVANQRVRYTNPYPGGSSSQQQQQQHPRSAPRPQFVVRVPQPQQQQSQQGTHAPRPPAPVVQPGQGRRDIQGQQRLCFNCFEPGHFADKCPKPRRSXGQAPPRPNNGGKDVIRDRVNHVTAEDVLTTPDVIVGTFLIHSIPATILFDSGASHSFMSVPFVGRNQLGVERLRNPLLITTPRGVMTAKYYSPTIPIEIQGIPFPSDLILLDTKNLDVIIGMNWLAQFQGVVDCARRTVTLYRGPDQLVVFFAPPTSVGSSELHQIGLSEIPIVSEFGDVFPEELPGMPPKREIEFWIDLAPGTTPLYKRPNRMAANELAEVKKQLEELKEKGYIRPSTSPXGAPVIFVEKKDKTKRMCVDYRALNEVTIKNKYPLPQIDDLFDQLKGATVFSKIDLRSRYHQLCIREEDIPKTAFTTRYGLYEFTVMSFGLTNAPAFFMNLMNKVFMEYLDKFVVVFIDDILVYSQSEEDHQQHLRLVLGKLREHQLYAKLSKCEFWLSEVKFLGHVISAKGVAMDPETVTAVTDGKQPKTVTQVRSFLGLAGYYRRFIENFSKIARPMTQLLKKEEKFVWSPQCEKAFQTLKEKLVSSPVLILPDTRKDFMVYCDASRQGLGCVLMQEGHVVAYASRQLRPHEGNYPTHDLELAAVVHALKIWRHYLIGNRYEIYTDHKSLKYIFTQSDLNLRQRRWLELIKDYDVGIHYHPGKANVVADALSRKSRCNTLGVRGIPPELHQQMEALNLSIVGHGFLATLEAKPTLLDQIREVQKNDPDMHGILKNMKQGKAAGFTEDEHGTLWNGNRVCVPDDKELKQLILQEAHESPYSIHPGSFHPLRPLSP

SEQ ID NO: 151410 - protein, 1296 aa, Oryza sativa
  Clone ID: PAT_MRT4530_51556C.1.pep
MAGSINRRRLDLTGFILELRGMCVVLGYPHGVDYQGKQLPEQEGDDAEPHAAWEVTVVILTGSPERTSLAVTAGGDSFSAACQNAAPLAIGTLHQRYPDELQHSPYRYHPRRGGAHDYATFRDASSEDDATIMHLARMVDTYDAARIDFHQMVRRGLVENNMKILELRQENLQLKKDLDVVEAQLCQLKIAQGEVCRPKRRRVYRSLKITARKSTSRPELVRQSLAWTCFVETPRAEPAPVVPQEEGASGVGSMEDALLLTFRPGPSQKVVWGMVIPMVTTRRSAATGDDNQPEGSNPNIQGSPPPPPPPPPPPPPDTNSILTQILAQQANMMAAFLHHIQNPPQHNAPPPPPPPQHSKLAEFLRICPPTFSSSNNPVDALDWLHAVGKKLDTVQCNDEEKVIFAAHQLQGPASLWWDHFQATQPEGQPITWARFTAAFRRTHVPAGVMALKKREFRELKQGNRSVMEYLHEFNNLARYAPEDVREDEEKQEKFLAGMDPDLSVRLDSGDYPDFQHLVDKSICLEAKHKELESHKHRLANFHNQQVANQRVRYTNPYPGGSSSQQQQQQHPRSAPRPQFVVRVPQPQQQQSQQGTHAPRPPAPVVQPGQGRRDIQDVIVGTFLIHSIPATILFDSGASHSFMSVPFVGRNQLGVERLRNPLLITTPRGVMTAKYYSPTIPIEIQGIPFPSDLILLDTKNLDVIIGMNWLAQFQGVVDCARRTVTLYRGPDQLVVFFAPPTSVGSSELHQIGLSEIPIVSEFGDVFPEELPGMPPKREIEFWIDLAPGTTPLYKRPNRMAANELAEVKKQLEELKEKGALNEVTIKNKYPLPQIDDLFDQLKGATVFSKIDLRSRYHQLCIREEDIPKTAFTTRYGLYEFTVMSFGLTNAPAFFMNLMNKVFMEYLDKFVVVFIDDILVYSQSEEDHQQHLRLVLGKLREHQLYAKLSKCEFWLSEVKFLGHVISAKGVAMDPETVTAVTDGKQPKTVTQVRSFLGLAGYYRRFIENFSKIARPMTQLLKKEEKFVWSPQCEKAFQTLKEKLVSSPVLILPDTRKDFMVYCDASRQGLGCVLMQEGHVVAYASRQLRPHEGNYPTHDLELAAVVHALKIWRHYLIGNRYEIYTDHKSLKYIFTQSDLNLRQRRWLELIKDYDVGIHYHPGKANVVADALSRKSRCNTLGVRGIPPELHQQMEALNLSIVGHGFLATLEAKPTLLDQIREVQKNDPDMHGILKNMKQGKAAGFTEDEHGTLWNGNRVCVPDDKELKQLILQEAHESPYSIHPGSFHPLRPLSPPSNPI

SEQ ID NO: 151411 - protein, 693 aa, Oryza sativa
  Clone ID: PAT_MRT4530_51557C.1.pep
MAGDEMASPSPPVAALTNDLIAEIFLRLPTPEDLVRASAACVSFRRLVTTDRSFLRRFRSLHAPPFVGFLDHRGFHPALPPHPSAPVARAVADAADFALSFLPSPAGSWMVRDVRGGRVLVDRDTKAETGGSEKPLVFTEIAVCDPLRRRFLLLPPIPDDLAASVDRPVRVHLDRWCEPFLAPHIEEEEDDTSFKVIWMAQCKAKIIAFVFNSSTGQWLAGASPSTTDLFNGAGLSPPPSSSSPSLVFSSPGRVFSSRRYACGCFCWGILRTMLLVLDTRLMKFSIAEPPPVCLGGPTAIVEAGEGMTGIFALRGSVGGTFDLHYSIWGKEGATRREQMEKIIPLDHGYRYYIRGAMEKHLLLARSRGEGEEDTPEEPDLECFSLDVKTLQLEPDLTYPGTTILDKPFRARLYPTLDGVSVMVIVMVIETLYDLDIYVHKIASGELCKRFSYTTSFVVPKANELKIQLKHRYVFPKANNLKNVGFGAVGSWLRSGGEVGSGGESASDGSGGVRRLGGLEAAEVDEPEEERRVVDGAVAAEEVAAGDESAEGDVGGGGAGEVRGRADTEEDLLQELVSEGGKPTGRRKILATWVCAELQRIAPARETRRNFQEQLPAGRTQDAEFVERHDHGSLKTPFAGSSFPFILHLCRIDLECIACDVITESEHPNLAFSFLYDGAFHNVMARRARWELEN

SEQ ID NO: 151412 - protein, 136 aa, Oryza sativa
  Clone ID: PAT_MRT4530_51558C.1.pep
MGAWLIHLPSEDHRTPIDISSLTELQIRRLQTPSSNTHSTAVEDDSRKRATKSSSSTYGGGGGGGSGGGVLRRRQRHRDEATPSGEAELAEDTCAGRSSSAMTTASLAHPFVELGGSKLELYSMSSGHASIRLSTS

SEQ ID NO: 151413 - protein, 39 aa, Oryza sativa
  Clone ID: PAT_MRT4530_51559C.1.pep
IPNRVIQLHGSNYNAGIPLHNPRIRITCPSRIQTSSQPI

SEQ ID NO: 151414 - protein, 79 aa, Oryza sativa
  Clone ID: PAT_MRT4530_5155C.1.pep
SCKAFLSATNTADDILLQYLPQGTIQGNRSPANSSVTLRSEVKKKKHKPRVGAETEVISYLKSGQLPFAAQVQGTGSLL

SEQ ID NO: 151415 - protein, 54 aa, Oryza sativa
  Clone ID: PAT_MRT4530_51560C.1.pep
TTTLTFKISYIEHSAVYHLTRNTFIQERDTQDNNWPYENHKTNGRDNGPGPHQS

SEQ ID NO: 151416 - protein, 308 aa, Oryza sativa
  unsure (1)..(308): unsure at all Xaa locations
  Clone ID: PAT_MRT4530_51561C.1.pep
MEMEMEMEELILHIRKEVEKGKLPADVAANLEELYYNYKDANPFTFPPYHKAVREPFDYYMFGQNYIRPLVDYRNSYVGNISIFQDMEQKLQQGHNVVLMSNHQTEADPAIIALLLERSNPWISENIVYVAGDRVVTDPLCKPFSMGRNLICVYSKKHMXGGSQIIWIAPSGGRDRPDPLTGEWHPAPFDASAVDNMRRLLEHSGVPGHIYPLSLLCYEVMPPPQKVEKEIGEQRVISFHGVGLSVTEEIKYSDITVHTQNVDECREKFSESLYNSVVDQYNALKSAIFRGRGADSSDSAISLSQPWR

SEQ ID NO: 151417 - protein, 52 aa, Oryza sativa
  Clone ID: PAT_MRT4530_51562C.1.pep
MRRKSRPSPLTLLCLSRMAATMCLTATVVVVVGVVVDDKAWGGGGAFPSLAA

SEQ ID NO: 151418 - protein, 56 aa, Oryza sativa
  Clone ID: PAT_MRT4530_51563C.1.pep
MAGVGVGEGEVRYRGVRRRPSGRYAAEIRDPAKKTPIWLGTFDSAEAAARAYDAAA

SEQ ID NO: 151419 - protein, 91 aa, Oryza sativa
  Clone ID: PAT_MRT4530_51564C.1.pep
MAIPKQTHRLVVADVEMEDAVASGTPDMPFEQTTEAGAQLVSYLVHNTSIHPFHLIGSPYNDGGDVSYGWDGEVGIEALDSVNEKVDILDA

SEQ ID NO: 151420 - protein, 181 aa, Oryza sativa
  Clone ID: PAT_MRT4530_51565C.1.pep
MAAAAAYPTAATLPPRRAPPPSLRPSPPLSWSASIAHLALSPPPVPSNRASLVVRAAWTRRSRKEAEERPNRKSWKQRTDMYMRPFLLNVFFSKRFVHAKVVHRGTSKVISVASTNAKDLRTTLPSLVDDNACRTIGRLIAERSMDADVFAMSYEPKKNERIEGKLGIVIDTIKEHGIIFV

SEQ ID NO: 151421 - protein, 144 aa, Oryza sativa
  unsure (1)..(144): unsure at all Xaa locations
  Clone ID: PAT_MRT4530_51566C.1.pep
WRRIPSALAAEDDGGEVAQRAGVGGKRRRRWSTASSTAKHDGGGAALAEKTTAEGWRTGAAPAEERHRGVAPAERCAGVLDLGERRRGSVGVVHGREREEKRGTCVGPTNGXAFLAGQIWPARGAPWPAGWLGLSIGARILVKI

SEQ ID NO: 151422 - protein, 63 aa, Oryza sativa
  Clone ID: PAT_MRT4530_51567C.1.pep
YSGVHTRAPFRVHTCVRKRDRSFFSLCPLVKTPFFHKTQTQRNTVRLCSYSSKKKTTLFKKKR

SEQ ID NO: 151423 - protein, 101 aa, Oryza sativa
  Clone ID: PAT_MRT4530_51568C.1.pep
SSRRATGRPRRRRSRSRSTRRRRPRALARAPAATRTGGATGSRTPARPRPCRPPAPAAPPPPPTRGSSSSSSPPPPPPPSDEGEGRSPATRRPRPSQLPSP

SEQ ID NO: 151424 - protein, 105 aa, Oryza sativa
  Clone ID: PAT_MRT4530_51569C.1.pep
VRSPSVPSTGSKVVVRRQVRPNAVLRLTRGTSLPFPLKCMETLVDSPCTWGALGSVPMGRGISTPTPPDTGWDVGALSLVLSACDSATWWPVRASRQYASRARGV

SEQ ID NO: 151425 - protein, 89 aa, Oryza sativa
  Clone ID: PAT_MRT4530_5156C.1.pep
DVGHSLGSLDLTHCVNSFVWRVICSPMDHVDVHKKNVHSEELFSSPSKQWGRNGCCVRFGIPYFLDCCIQKDMGLAIKVREFYCAFHFA

SEQ ID NO: 151426 - protein, 82 aa, Oryza sativa
  unsure (1)..(82): unsure at all Xaa locations
  Clone ID: PAT_MRT4530_51570C.1.pep
GGQGASGRHVTPLGPVRHTASRPSPATXGGVSGRSRRCHPASXCAAPQPSLTTFNVVWADVRCRPIDACQSTLTGLRQIAGG

SEQ ID NO: 151427 - protein, 32 aa, Oryza sativa
  Clone ID: PAT_MRT4530_51571C.1.pep
TRASSFLYIHLSSKSELVSSKLTIPNHLQLKT

SEQ ID NO: 151428 - protein, 130 aa, Oryza sativa
  unsure (1)..(130): unsure at all Xaa locations
  Clone ID: PAT_MRT4530_51572C.1.pep
TKISRLVSSAPCACAKTSRGSRWRAEQWRGKGRGRRXGEXXGXLAFXPXDSLLPCXXXXXDAGPSCXIHYQDIMDKCGXEISDLRRRRWSPQERCLDFYFIILLLVIVGFIYLFIVMSTNXXXFSLIPGG

SEQ ID NO: 151429 - protein, 43 aa, Oryza sativa
  unsure (1)..(43): unsure at all Xaa locations
  Clone ID: PAT_MRT4530_51573C.1.pep
HASAHASAPFSSSATVVXRTVKKPRTPRSSEGQARVPHRRRSL

SEQ ID NO: 151430 - protein, 268 aa, Oryza sativa
  unsure (1)..(268): unsure at all Xaa locations
  Clone ID: PAT_MRT4530_51574C.1.pep
MLGHTRAAAVTAADPALAALVESGALVRVPRRRFGPVPAWRPPEFVEPEDVWILGTSHLSEESVADVERVLRAVRPDNVVVELCRSRQDRRGQTALALRLLLAVFSSKISSGANRPFGEELXRAWKSLSWDEKTKLVVSLFRGITSTTDTSQDEKAAGSPYELYEKLSISYPSLLQPLIHERDMFLAWSLKRSKAVNKSKTVVGIIGKGHMNGVVYALISDQGDLRFRDLVGRASSDTWASSLIKGLVRDTIIGIVLWGLYEQLHAVF

SEQ ID NO: 151431 - protein, 172 aa, Oryza sativa
  Clone ID: PAT_MRT4530_51575C.1.pep
MQLYHHPYSLDSQKVRMALEEKGIDYTSYHVNPLTGKNMNVAFFRMNPSAKLPVFQNGAHVIYRAFDIIQYLDRLSVHLSGEIVPVNTEVYQWMQKVDSWNPKMFTLTHTPIKYRTFVSKFIRRVLIARMAEAPDLASMYHAKLREAYETEDKLKDPDIMKQSEEELSKLLD

SEQ ID NO: 151432 - protein, 60 aa, Oryza sativa
  Clone ID: PAT_MRT4530_51576C.1.pep
KNVPTASKMKFMFPYGQVNAEARFSTLFTHTSHQSGHKLVPLNKVIQFDHIRDPFPTRES

SEQ ID NO: 151433 - protein, 44 aa, Oryza sativa
  Clone ID: PAT_MRT4530_51577C.1.pep
SYTPITQTINLKTYSLLTMRDLYKDSQTDKQKPNAFNCFFTQQD

SEQ ID NO: 151434 - protein, 201 aa, Oryza sativa
  Clone ID: PAT_MRT4530_51578C.1.pep
MPSKIEPTKPQELPSPSKESTIRGQSMADQDVAEPWGLSAWPPLTSLLLRAMRKRRTWAALFLAVYASLLCSSWRLVESVRAWYYSAAGGAGAVAAWPAAFYASVMYGAVFGLLSMGAALAVAAPAMLITWITVLVLLAFAGKPRRSLVAEGRRATADIARLALRVLLREGNAVAALCAAASFAALLLGRRDDDPAEGSGS

SEQ ID NO: 151435 - protein, 58 aa, Oryza sativa
  unsure (1)..(58): unsure at all Xaa locations
  Clone ID: PAT_MRT4530_51579C.1.pep
MPGGQVAANVVTDFMGTSFLLCLLGGFLADSFLGRYLXIAVFALVXSIGTASSRLQPR

SEQ ID NO: 151436 - protein, 65 aa, Oryza sativa
  Clone ID: PAT_MRT4530_5157C.1.pep
GQKKNAFPVCKLGTPGQLGRKEGKGFKKGVKGGHQPVLLVSSVEVSCQGFEDLKFVLTYKKNGLK

SEQ ID NO: 151437 - protein, 592 aa, Oryza sativa
  unsure (1)..(592): unsure at all Xaa locations
  Clone ID: PAT_MRT4530_51580C.1.pep
MEDLEVEKKTSAWSGGGGGGGNMVRDAVDYRGCPADRSATGGWVAAALVLGIELCERLSTMGIAVNLVTYLTGTMHLPSAAAANVVTDFMGTSFLLCLLGGFLADSFLGRYLTIAVFALVQSIGTALLAASTLVTHLRPPPGEQPTPVQMAVLYACLYLIALGTGGLKSSVSGFGTDQFDDRDGRERAAMGLFFNRFFFFISLGTLLAVTVLVYVQDHVGRSWAYGICSAAMLAAIAVFLSGTRRYRYKRSSGSPIVHILQVLVAAARKRGVVKRPPTAAELYEDDRPEHARIAHTAQFPCLDMAAVVAGEEDNEVAGPGGPAAPNPWKLCSVSRVEEVKMVARLMPVWATTILFWTIYAQMITFSVEQATTMDRRVGAGFEIPAASLTVFFVGAIMLTLAVYDRVFIPLCRVLTGKQGFTNLEKIGIGLALSILGMAAAALCEKKRVAVVVAATTGXSTPISVFLPPHVLNGARGSELAGEAFIYTGQLDFFITRSPKGMKTMSTGLFLTTLSLGFFFSSVLVSLVKGATTWLGDTIDRSRLDYFYWLLAVLSVLNLAAYLVCAKWAATAAATSREQQQQHTAVADADEKC

SEQ ID NO: 151438 - protein, 38 aa, Oryza sativa
  unsure (1)..(38): unsure at all Xaa locations
  Clone ID: PAT_MRT4530_51581C.1.pep
TWPNTDHXCHRASYILNEEQTVPIRVIHNTCVXQKHTS

SEQ ID NO: 151439 - protein, 756 aa, Oryza sativa
  Clone ID: PAT_MRT4530_51582C.1.pep
MAAAKLTASAVFRSNQELTSLARSGQLAAARRLFEEMPRRNVVSYNAMVSALAHHGRLAEARRLFDEMPRRNPVSWNTMMVACSQHGRVEDARGLFDAMPARNEYSWTIMVSCYVRAGELTLARELLDRMPGEKCAACYNTMISGYAKNGRFEDAIALLQEMPAPDIVSWNSVLGGLIRNEEISRSVQFFDEMPDKDLVSWNLMLEGYVRAGDLDVASAFFSRIPSPNVISWVNLVNGYCQAGRMGEARELFDRMPERNVVAWNVLLSGYVQFSQVEAAYNLFIEMPEKNSISWTTMVSGFVRSGKLQEAKDVLSKMPSDNVGAKTALMHGYLKSNLIDDARQLFDGIVVRDAVCWNTMISGYVQCGMLDEAMVLFQQMPNKDMISWNTMIAGCAQGGQIRKAASIFRKMKRRNTVSWNSIISGFVQNGLFVEALQHFMLMRRDAKSADWCTYACCLSASANLATLQIGRQFHSLLVRTGFISDSSPGNALISAYAKCGRMLEARQVFDEMVVQDIVSWNALIDGYASNGNGSEVIAVFREMEANSVRPDEITLVVVLSACSHAGLIDEGLHFFNSMIKLYSLKPVAEHYTCMVDLLGRAGRLREAFELVQGMQIQPNAGVWGALLGACRVHKNHEIAWLAAEKLFELEPCKASNYVLLSNICVEAGKWDDADKVRVLMKESILRSCNIHISNKMLDNSGYRCYGASWKPRHCLWKWQEQKDFKALLELSLEFGSKKDDAVQQYDDHGLMDGRIKQ

SEQ ID NO: 151440 - protein, 41 aa, Oryza sativa
  Clone ID: PAT_MRT4530_51583C.1.pep
DVSERSLIRVGPPQRRVPCPTLPLWRGASRSYGARKHEWHP

SEQ ID NO: 151441 - protein, 191 aa, Oryza sativa
  Clone ID: PAT_MRT4530_51584C.1.pep
MEKSPAMHFLLELESQEPVCLLILFTMFTWFISKVQMILPSSCQHCNYAVTKVTSTPVLADRKISKNLSKHKDDGIEMTHEDVESVMTKMGPDFDHGKTMVYKEIGSNCMSELFDDDEPSLDEVKQAFLVFDEDNDGYIDALDLYRVLRNLGLREGVGVDECEQMIAKYDMNRDRRIDMVEFIRVLEASFF

SEQ ID NO: 151442 - protein, 166 aa, Oryza sativa
  Clone ID: PAT_MRT4530_51585C.1.pep
EKCHLRSRSQVSQHILQKQLHLLWSHLMILQHPFVAFILKIFHAENNRSPCEVAEGVEVVDSLREDGLHVQDPLGKQPAGGAAREALGVPAVELHGVVDVAGLDGGQVPYVSRRELRQPPGLHRELHAVASPQLHHGQPRPRPRPRRRRRALHRGRGRGRGRDSCR

SEQ ID NO: 151443 - protein, 97 aa, Oryza sativa
  unsure (1)..(97): unsure at all Xaa locations
  Clone ID: PAT_MRT4530_51586C.1.pep
LPCQLPPAVTTLALDGGEEPRRREQVSDAEPNRLLLRLAQRLQELLTPPEAALPMMARSVKSVSVPMIXVVPMESLTVRPAIEVEALGLGARRRPSS

SEQ ID NO: 151444 - protein, 290 aa, Oryza sativa
  Clone ID: PAT_MRT4530_51587C.1.pep
MSSSLFLLPPPLSPFSLSLPFHRPRGARLERRQGGGRSAGGRRELKRRQLPPAVTTLALDGGEEPRRREQVSDAEPNRLLLRLAQRLQELLTPPEAALPMMARSVKSCRQRRRWRQRAHPPKSILTVVPMESLTVRPAIEVEALGLGARRRPSSILAFGHDAIHILLLARLLLCCYIGVFVVLLLDSAEADPWSIVGVGRIAGLGSWTASSETAAITHADTPRSRSMAMGKLAPARCYRVSHRRRRRRHSGSRLPSPPLHADYATREKVKRNGGDKERERGEREGEGESE

SEQ ID NO: 151445 - protein, 156 aa, Oryza sativa
  Clone ID: PAT_MRT4530_51588C.1.pep
MEPKSSASAAHQGGDAPAEAPRRRGGGGKRKSGGSSFTPSKRHAKERNAAFHVPPHLLHSGPLTRAARQSPHKLAEEAAAAAAAGTGGSEAGGGKGGGDVIRLEGEEAPTEETPLVDEVFEAVRSRGAGVHVVPTFAGWFSWKEIHPIEKQMLPSF

SEQ ID NO: 151446 - protein, 286 aa, Oryza sativa
  unsure (1)..(286): unsure at all Xaa locations
  Clone ID: PAT_MRT4530_51589C.1.pep
MSSSLFLLPPPLSPFSLSLPFHRPRGARLERRRGRGRSAGGRRELKRRQLPPAVTTPAPDGGEEPRRQEQVSNAEPSRLLLRLSQRLQELLTPPEAALPXMMARSVKSCRQRRRWCQRAHPPKSIPTVVPMESLTVRSAIEVEAPGPGARRRPSSILAFGHDAIHILLLARLLLCCYIGVFVVLLLDSAEADPWSIVGVGRIAGLGSWTASSKTAAITHADTPRSRSMAMGKLAPARCCRVSHRRRHHSGSRLPSPPLPANYTTREKVKRXGGRERGEREGEGESE

SEQ ID NO: 151447 - protein, 78 aa, Oryza sativa
  unsure (1)..(78): unsure at all Xaa locations
  Clone ID: PAT_MRT4530_5158C.1.pep
TKLSTINLSEIQEAPLLSGESEIAKKGSWTTTNLKDTIHHVVEELMAPPTLSAIXGFVFGLVPWLKSLVIGDGAPLRV

SEQ ID NO: 151448 - protein, 141 aa, Oryza sativa
  Clone ID: PAT_MRT4530_51590C.1.pep
KVNARTPSKAIHNRSGMMQPFTTSPVAHAPRAGRLSWTGASCRPSRCWVRVRSMRNGSTESLDHLQRASKARPRQSRGLPAPGGESSKPRHLGRGAAARWRGRFDLVLPSLGRVWVGGGDKPPTASAASPLPDRKKCPSLV

SEQ ID NO: 151449 - protein, 98 aa, Oryza sativa
  unsure (1)..(98): unsure at all Xaa locations
  Clone ID: PAT_MRT4530_51591C.1.pep
CFPRHYIYRHTHYHQHTHYLPRHGRRGPHTLHVASVGGHFERTYTGTRGGVGKFGINXTHTTTSRPHFTFIRXFLTTQHTXLWTHTSTPQHXPTTXIT

SEQ ID NO: 151450 - protein, 289 aa, Oryza sativa
  unsure (1)..(289): unsure at all Xaa locations
  Clone ID: PAT_MRT4530_51592C.1.pep
MSSSLFLLPPPLSPFSLSLPFHRPRGARLERRWGRGRSAGGQRELKRRRVGANVTTPAPDGGEEPRRREQVSDAEPSRLLLCLAQRLQELLMPPEAALXPMMACNVKSCRQRRRWRQRAHPPKSIPTVVPMESLTVRPAIEVEAPGPSARRRPSSILAFGHDAIHILLLARLLLCCYIGVFVVLLLDSAEADPWSIVGVGRIARLGLWTASAETADITHADTXRSTSMSMGKLAPACCCRVSHRRRRHSGSRLPSPPLPADYATREKVKRKGGDKERERGEREGEGESE

SEQ ID NO: 151451 - protein, 270 aa, Oryza sativa
  unsure (1)..(270): unsure at all Xaa locations
  Clone ID: PAT_MRT4530_51593C.1.pep
SSSPLPPPLQLAPVSAPARPVTTPAPDGGEEPRRREQVSDAEPSRLLLCLAQRLQELLMPPEAALPHDGVQRQVGQRPGDLPAHVQCRQRRRWRQRAHPPKSIPTVVPMESLTVRPAIEVEAPVGPACRRRSSPVRGPDPPWTALSRVADRWAPHVGAALXSVLTSAPGWSWTGILMHILLGILFGNFWAXTETAAITHADTPRSRSMAMGKLAPACCCRVSHRRRRHSGSRLPSPPLPPSDIYSYSGVGKNRARPHSSQGSGQSPLMPR

SEQ ID NO: 151452 - protein, 673 aa, Oryza sativa
  unsure (1)..(673): unsure at all Xaa locations
  Clone ID: PAT_MRT4530_51594C.1.pep
MATPPPLRRVAALLLLLVAAASTPTARADLVVTRADRKVDLTSHIVRVLTSLKVENSGPEAVSQFLLAFPNVQAKNLAAIRAFGTEEKVKGPSMVLPIEVVQPSGVPPELTFFSASLSKPLEKGKTLHLDVLTVFTHSVQPFPEEITQAESQLVVYQDSAQYLSPYPVKVQTLSIRLPGGRVESYTKYPNTKLAESELKYGPYEDLPPFSYSPMGRETHRSALRPPTWRRHRRSXRVAALLLLLVAAASTPTARADLVVTRADRKVDLTSHIVRVLTSLKVENSGPEAVSQFLLAFPNVQAKNLAAIRAFGTEEKVKGPSMVLPIEVVQPSGVPPELTFFSASLSKPLEKGKTLHLDVLTVFTHSVQPFPEEITQAESQLVVYQDSAQYLSPYPVKVQTLSIRLSCRSLMLYTKQTLYLQSQNYRFNNISLLREPMMLITGFFLLFMACIVYMRTDMSISKNSPSYLAKVQWDEVEELVAKERELQDKLMTRHSTVVDSFEKKLRGQDVENRIAAQQQKVAALRQERYFARDICISLHLTLPLGGRLRLQRYLHLGAPHPRRGRRLLLLLLLGDACDGDGHTECSVAVATAAAEATRAATAGIGWARAARAMAAAIEQVVKVQNGEDGGGESGENGAAVDPFPTKQEQEVKYSHLDISGRPWLSWRSLMFSRA

SEQ ID NO: 151453 - protein, 832 aa, Oryza sativa
  unsure (1)..(832): unsure at all Xaa locations
  Clone ID: PAT_MRT4530_51595C.1.pep
MATPPPLRRVAALLLLLVAAASTPTARADLVVTRADRKVDLTSHIVRVLTSLKVENSGPEAVSQFLLAFPNVQAKNLAAIRAFGTEEKVKGPSMVLPIEVVQPSGVPPELTFFSASLSKPLEKGKTLHLDVLTVFTHSVQPFPEEITQAESQLVVYQDSAQYLSPYPVKVQTLSIRLPGGRVESYTKYPNTKLAESELKYGPYEDLPPFSYSPMVVHYENNNPFAVAKEVIREIEISHWGNVQITEHYNIAHGGAKLKGEFSRIDYQSRPYIRGVSSFRHLIARLPPRAHSIYYRDEIGNISTSHLWSDSKKTQLEVEPRFPLFGXGWQTTFTIGYGLPLQDFVFNSDGKRFLNITFGSPVEXEILIEKLIVKXVVLPEGSKDIDISVPFPTKQEQEVKYSHLDISGRPVVVLEKLDVIPEHNLYFQVYYRFNNISLLREPMMLITGFFLLFMACIVYMRTDMSISKNSPSYLAKVQWDEVEELVAKERELQDKLMTRHSTVVDSFEKKLRGQDVENRIAAQQQKVAALRQERYFARDICISLHLTLPLGGRLRLQRYLHLGAPHPRRGRRLLLLLLLGDACDGDGHTECSVAVATAAAEATRAATAGIGWARAARAMAAAIEQVVAHNGEDGGGESGENGAAVEQESSGKREGYPTPSDYYGTITLSCSRRVKWNEDNLYEIESNKPVRQKITEPKTPYHPMVDDDGSLSPTRPFDKCLDETVNAEAILTALNGVASSSKTDPKDDGWASSDDDADAMEQDDDPEAEKSRLSFKEHRRAHYDEFLKVKELMRSGSLIDDEADEDDRGAKGSQAKAVGKKPAGCDSTPPPQT

SEQ ID NO: 151454 - protein, 155 aa, Oryza sativa
  unsure (1)..(155): unsure at all Xaa locations
  Clone ID: PAT_MRT4530_51596C.1.pep
LPGLLPVRHRREDGGGRSSWWRHRRRLLPSYGLCRAALSVADAAHPITAAEGEGRRREGDDXSWWSSSSSEMRXSSSDFPRPXPAAFSRWPSSFSCLPGRSVPELAHAETSPPSPVSSSSPPRPLPPCRRLPTPSSPPAGRPGMWGPRGSYDESA

SEQ ID NO: 151455 - protein, 487 aa, Oryza sativa
  Clone ID: PAT_MRT4530_51597C.1.pep
MPEDVEMNDSQPQPAAAPPPAASTLQHLKEIASVIEAGSLTKEVRRISRAVRLTVALRRRLAARDVAAFLAFALPHSSEAFARLSSLLPKEDGSEMDVDLAAPAAQVSIKHGLPEIEIYCYLLVLIFLIDNKKYDEAKACASASITRLKNLNRRTVDVLASRVFTYYSYVHELTSSLAEIRGTLLALHRMATLHRDELGQETLLNLLLRNYLHYNLYDQAEKLRSKAPRFEAHSNQQFCRYLFYLGKIRTIQLEYTDAKESLLQAARKAPTTARGFRVQCNKWAIIVRLLLGEIPERTVFMQKGMKAALAPYFELTNAVRVGDLELFRAVAEKFASTFSADRTRNLIVRLRHNVIRTGLRNISISYSRISLADIAKKLRLDSENPVADAESIVAKAIRDGAIDATIDHANGWMVSKETGDVYSTNEPQIAFNSRIAFCLNMHNEAVKALRFPPNSHKEKESAEKRRERLQQEEELAKHMAEEDDDDF

SEQ ID NO: 151456 - protein, 50 aa, Oryza sativa
  Clone ID: PAT_MRT4530_51598C.1.pep
GDSGRVSDSRRKALGSWWCRLLRRHSKGRGGMLTGLCLEKRGLNYEKEKE

SEQ ID NO: 151457 - protein, 211 aa, Oryza sativa
  Clone ID: PAT_MRT4530_51599C.1.pep
MGTTRTMAIMIRTMTRQQNEEEGKDMAENRCAQWDKDNNSELLFSVDNVAVMTLCGKSTDAVREIRRCRPSPTHAGSPTAAVGHCRPMHAESLPPPDITDTVRGTRSRRLRSSAARLLDGGALTLGRVHTPARGPGLHWSSSSSSSDGKWTTATTRAGWTGSRRQLEDGERIVAATRGGRLDDTNDARRISKRWTARGASTCPGGRVAGGG

SEQ ID NO: 151458 - protein, 97 aa, Oryza sativa
  Clone ID: PAT_MRT4530_5159C.1.pep
TFVLFKGCINNIHIQRFRDQHLLMPQKSSILADFLLPKAGEKLASGGESAAAGESAVLPSRRHAVDTRTRACVAAAAFSSPPCEMYFSTCAEFLQPG

SEQ ID NO: 151459 - protein, 86 aa, Oryza sativa
  Clone ID: PAT_MRT4530_515C.1.pep
PATKGTTAIEERKLQWQHGDKTNNTVASGFGAFSRYILLISVLNVFLDAIVTGSIFMCTTMVESLSFSHVMFITSHVYYDYILIHK

SEQ ID NO: 151460 - protein, 104 aa, Oryza sativa
  Clone ID: PAT_MRT4530_51600C.1.pep
MAFGGQNPRPSTSRGTQCLYVRLNTLHFMLSHVHALDKSLSFFSRGRCSSSPSSAATARLLAPCSHFDRARAVAQSAVGHVAEVAAYRLIFLDLHHSFYDGLYV

SEQ ID NO: 151461 - protein, 31 aa, Oryza sativa
  Clone ID: PAT_MRT4530_51601C.1.pep
NNRVLSIEANFFNREIILWFLIKTHRSRHLS

SEQ ID NO: 151462 - protein, 63 aa, Oryza sativa
  unsure (1)..(63): unsure at all Xaa locations
  Clone ID: PAT_MRT4530_51602C.1.pep
GRWRRSFQGGDPSVSSKRPRSRKTXRKNDEEEVDIGGSASSTGTSKKKKRGCCVDIPSSESDE

SEQ ID NO: 151463 - protein, 159 aa, Oryza sativa
  Clone ID: PAT_MRT4530_51603C.1.pep
MDGDDDQIDPSSFRLALSLMRSSPPVSTFSSALSPPKSPRPMADDIQCYCFETHRRWRCSCYENTTSRLISMLAAAARPSWRSGSISGLVVKGLCGHGDHLGLRRAEQREQIERRWDNEGRRPEKKEMDGKRDGSDELYVKLMKLEKTYNFVIVDNVFI

SEQ ID NO: 151464 - protein, 130 aa, Oryza sativa
  unsure (1)..(130): unsure at all Xaa locations
  Clone ID: PAT_MRT4530_51604C.1.pep
PPPTCSISTPSPSPSXSKMPPRQWRPMLASATARAWPPSSTPSSACRASRTWPSPSASGPPTPPSPAGTPSPPRSAPRSEAPAPAAARPRGGGAPPPSCPDRPRAFVGAPRHREYVFVYVYVCVYTLAAV

SEQ ID NO: 151465 - protein, 118 aa, Oryza sativa
  Clone ID: PAT_MRT4530_51605C.1.pep
WHSPYKITCKNIYWKTHFHIQQKCLFSCGFSMLLDLRYGRVHNDCPLCCLSPPSIGGHRQQICCYRQRRSQEIFLSSPSSHGMSRGKIFFCTIKLIYKYKFSENVIEIISSNIHKQLT

SEQ ID NO: 151466 - protein, 185 aa, Oryza sativa
  Clone ID: PAT_MRT4530_51606C.1.pep
MPAPLLLLEEMAEVVRHQELELEVVRQELEPVPRTTTPTEAILPHNPAEGHSRVGMDNHVMCPFYTQEPKTSNHILMECAVARQVWHKLLIETPWVPLPPIVSTLHSSNQLSEQGTTEQVPSVRDMASTAKQAAGGGADRVDGGASGNGGKVRTVRSISHNPTLSFFTPFVEDLVDPVVKHIWRW

SEQ ID NO: 151467 - protein, 151 aa, Oryza sativa
  Clone ID: PAT_MRT4530_51607C.1.pep
GPPLDCEAELPPLVLLFAPPAPAPGAPPPAPAPSGAPPPAPAPGGAPPPPSPPAAAAAAQAPGADMSCGSTPQKPDHPPTRCRSQAKVWFRRPCSPAYSVQISGEAVVPEALLVSISHARKRSEAGKQNQLDTRGGDTTEHERAREMGKTK

SEQ ID NO: 151468 - protein, 58 aa, Oryza sativa
  Clone ID: PAT_MRT4530_51608C.1.pep
MAVAESTSAKVEAGGSKDAEEEMRCSNTAGSFKILLADDGRRNQRCDTMYPTGADAQD

SEQ ID NO: 151469 - protein, 76 aa, Oryza sativa
  Clone ID: PAT_MRT4530_51609C.1.pep
LHFGLSQLLICIRYFSTVKSSIVCMYCDVHYTPWPVPSLSRWVCACVFNLAYLVLQMHPGGLNSQLNKFFFLSRGA

SEQ ID NO: 151470 - protein, 473 aa, Oryza sativa
  Clone ID: PAT_MRT4530_5160C.1.pep
MEDCSSWIHGYANANATAGNNGFMCGYAASCSPVEFQQQQQLVGSQIEHHLNQASLICNLFDQETMHKIKEILGFNLVGVAFYYGMQISMQMGMDDESAVYDGASMVDVLLMASSSPHHHAGAGSFQYSSPTSSSASFRSASVSCSPESSAAATTHFLGPPAPSAAAAGFHYPEVSSQAPLPLPLPPYEPQHGQYTTVLSPPPPAPELPATTTPATGGAFRRYARHLRPRRLPKPGGCGQRMFKTAMSVLTKMHVAATYNRQYYYQQAAAAAASASAAEAPPSGNQLQHMISERKRREKLNDSFLALKAVLPPGSKKDKTSILIRAREYVKSLESKLSELEEKNRELEARLASRPAAAAKNDKGETAAAPAPEAGDETKRKDLVEIEVTTSGGGAGAADAAAAAGGDQETCTLNVDLRGGGGGGGMSTTDVVLRTLQCLREQIGDGASLVAMSTSAGSGGRPPRANLTLQLKV

SEQ ID NO: 151471 - protein, 68 aa, Oryza sativa
  Clone ID: PAT_MRT4530_51610C.1.pep
MLLRLLQRRRLHEAGKVVTATRGWEGGDGKLRRQAVPLVAGYRHDPIHPSDAANTAVSFGPTTAGATH

SEQ ID NO: 151472 - protein, 284 aa, Oryza sativa
  Clone ID: PAT_MRT4530_51611C.1.pep
MSRFCCFGAGCSEFSGHASTSSGKGKGIQGQVKVSYGFYLVRGMTNHPMEDYHVAELAEEKGNELGLFAIFDGHLGDTVPAYLQKNLFANILNEEEFLTQPDRAIIKAYEKTDQAILSHTPDLGQGGSTAVTAILLNGRKLWVANVGDSRAVLLKGGRPIQMSTDHDPNVERSAIENRGGFVSNMPGDVPRVCGQLAVSRAFGDRNLKSLLKSEPDIKVEDIDYTAELLVLASDGLWKVMNNQEVVDVAKRFKDPQAAAKQLTAEALKRDSKDDISCVVVRFRM

SEQ ID NO: 151473 - protein, 307 aa, Oryza sativa
  Clone ID: PAT_MRT4530_51612C.1.pep
TRRDLPYGYDVLVENLMDPAHVPYAHKGLMRTRKKEDPGRVEFDKEGGGPLKMEIEETNVEGFLSMLDRGFFKFVAPCTFYGSPLQTPSQDDQGKEKKKKQPTVMLVFLCIPVSPGRSRLVWAFPRNVGVWMDKIIPRWYYHIGQNAILDSDIYLLHIEERNFATVGLDNWQKACYVPTSSDNMIITFRNWFRKYCKHQIGWATPITNQLPPTPSKDQLLDRYWSHVMQCTSCSGALKKMKALEVALQVASVAVVGFLAVAKGTVVTSVVQRSAVVAAAVLCFAASRWLANFIEKNFYFQDYVHAYK

SEQ ID NO: 151474 - protein, 585 aa, Oryza sativa
  Clone ID: PAT_MRT4530_51613C.1.pep
TPSSKLTLTKGNKSWSSTAVPAALELVDPPGCRNSARGPARPALHLRDAAAAAAAARVPPPRLPWSRAVARRLLSTSVAAVAAETPRAEDAPSASGKEERFDWLDQWYPVAPVCDLDPGAPHGKTVLGLRIVAWFDRTTAAADGGGGEWRVFDDSCPHRLAPLSEGRVDDKGRLQCVYHGWCFDGRGACQFIPQAPALGPAVHKNSKACVASYPCVVQNNILWFYPRSEPEYKEILQRKRPPYIPQIDDPSFVTVYGVRDLPYGYDVLVENLMDPAHVPYAHKGLMRTRKKEDPGRYNIHLLYTVEFDKEGGGPLKMEIEETNVEGFLSMLDRGFFKFVAPCTFYGSPLQTPSQALFKLIEPSYKISIDDQGKEKKKKQPTVMLVFLCIPVSPGRSRLVWAFPRNVGVWMDKIIPRWYYHIGQNAILDSDIYLLHIEERNFATVGLDNWQKACYVPTSSDNMIITFRNWFRKYCKHQIGWATPITNQLPPTPSKDQLLDRYWSHVMQCTSCSGALKKMKALEVALQVASVAVVGFLAVAKGTVVTSVVQRSAVVAAAVLCFAASRWLANFIEKNFYFQDYVHAYK

SEQ ID NO: 151475 - protein, 759 aa, Oryza sativa
  Clone ID: PAT_MRT4530_51614C.1.pep
MPPSRRHGHGGARLLVFLLPVLLLLRTAASNTLSTFAMAKAESTTIVCALLPSAASPLLVDLNCTEAGGDHERQETYPSSHPFSALAGGDHFLCAVGPSALRAGDVAMRWWDLSKNRTNTPETNGTKDGGGRSKRVYLGPPIQALSSGGYRVCGVLSSGELHCWRWRGLKIPDGLRFVSVAVGDWFVCAIQAARPASIRCFGNDTEAVSSAPEGGSFDVVAAHGRRACALSTSGALSCWGHGAPLVGGGEDEATTGYAALALGTDGVCGLRTNGTIRCFGDGVAPPPDSLAGFQYVDVQAHGSVFCGVLMANYSLVCWGGHEFNATNRLVFDRVLPGPCVTMSSCRCGVLPGSANLCASGRCICVDCAFELNVATPNASSLGPGPGKSSSKRSRIIWVAVAAGAFLVLLVALQFALLMWCRRRRRRGRGGQADQAAAMSLMLPRHGSSKGPGSVVEHFALEALQAATDGFSDERRIGSGSFGSVYRGTLTDGREVAIKRAEDQAKSSSSAARPARRRDRETAFNSELTALARANHKNIVCLLGCCADAGERVLVYEYMANGTLHDQLHGRSPMAPPVSAWRGRLTIALDAARGIEYMHGSSSRPLYTGGTVGYMDPEYYRMQHLTDKSDVYSFGVVLLELMSGCRVVQRYAESVTPKNVVEFAVPHILADEVARVLDPRIPPPTPHEADALAYVGYLAADCVGPVGCDRPSMTEVVDALERALAACAAASLSRSGTVTGAGRRALSRSGTDQFDLTDTD

SEQ ID NO: 151476 - protein, 898 aa, Oryza sativa
  Clone ID: PAT_MRT4530_51615C.1.pep
MEKKITGYTTVDISQWHRKEHFEAFQSVAQCTYNQTVQLDITAFLKTVKKNKHKFYPAFIHILARLMNAHPEFRMAMKDGELVIWDSVHPCYTVFHEQTETFSSLWSEYHDDFRQFLHIYSQDVACYGENLAYFPKGFIENMFFVSANPWVSFTSFDLNVANMDNFFAPVFTMGKYYTQGDKVLMPLAIQKFDDKLSNMRIGRRPGRPQGVRVGRFINAAGTTGFPTGKRANTQACPERYSHYKQPDSAAILKKCDGQPLALVTIGEFLQANGWPTGPNCEDLCNRLHYHLENDKTLERMRRVLVRNYTSLPGHALKACLLYFGMFPSDHPIRRKSLLRRWLAEGFVEPVSSSSNLDSTAAFDVLMDRNIIEPINVSNNDKVKTCQTYGMMREFISHMSISQNFVTFFCDDKFLPKYVRRLSLHGDTVVNGDNFNGIDLSLVRSLVVFGEAGTTVLDFSKYQLLRVLDLEKCDDLNDDHLKEICNLVLLKYLSLGGNISKLPKDIAKLKDLEALDVRRSKVKIMPVEVFGLPCLIHLLGKFKLSDKVKQKTEVQEFLSKGKSNLQTLAGFASNGSEGFLHLMRYMNKLRKLKIWCTSSAGSTDWTDLREAIQQFILDEKEANIGTRSLSLHFTGCSEDAINSLKEPCYLSSLKLHGNFPQLPQFVTSLRGLKELCLSSTKFTTGLLEALSNLSYLQYLKLVADELEKFIIKVQGFPRLLCLCIVLQCPTFPVIEEGALPFLVTLQLLCKDLHGLSDIKIECFKHLQEVTLHSGVTPATRQEWVKAAKEHPNRPKVLLLKSVDTAESEHTDVDSVMEAVKSETTEYSIAPEGPEQVIDMNNKMQLDHGLESSSVLNKQNNFADQSSSKDQLHYSFNNMGLSDVSPAVSELPNGMVPSCT

SEQ ID NO: 151477 - protein, 163 aa, Oryza sativa
  Clone ID: PAT_MRT4530_51617C.1.pep
KTLTGKTPVTLRLSRPDTIVQREGEDPGQGGGHSPPPGTSVSVVILFAGKQLEDGPRPNPPLFAPGIFYPYPNFPPGRESTLHLVLRPPWWPSKSSAMEPAAVLGFTSLPIVFPNGAMVVWSGPLVVSRFIVYYLPVMCILKSGLMVSETFCCGRAAWKNYNE

SEQ ID NO: 151478 - protein, 457 aa, Oryza sativa
  Clone ID: PAT_MRT4530_51618C.1.pep
MQIFVKTLTGKTITLEVESSDTIDNVKAKIQDKEGIPPDQQRLIFAGKQLEDGRTLADYNIQKESTLHLVLRLRGGMQIFVKTLTGKTITLEVESSDTIDNVKAKIQDKEGIPPDQQRLIFAGKQLEDGRTLADYNIQKESTLHLVLRLRGGMQIFVKTLTGKTITLEVESSDTIDNVKAKIQDKEGIPPDQQRLIFAGKQLEDGRTLADYNIQKESTLHLVLRLRGGMQIFVKTLTGKTITLEVESSDTIDNVKAKIQDKEGIPPDQQRLIFAGKQLEDGRTLADYNIQKESTLHLVLRLRGGMQIFVKTLTGKTITLEVESSDTIDNVKAKIQDKEGIPPDQQRLIFAGKQLEDGRTLADYNIQKESTLHLVLRLRGGMQIFVKTLTGKTITLEVESSDTIDNVKAKIQDKEGIPPDQQRLIFAGKQLEDGRTLADYNIQKESTLHLVLRLRGGQ

SEQ ID NO: 151479 - protein, 142 aa, Oryza sativa
  unsure (1)..(142): unsure at all Xaa locations
  Clone ID: PAT_MRT4530_51619C.1.pep
RRKSAAGKKPSDDGGGGGSTRAATAMACPRAFEAAASAWRGRPSSAAXSTMVDPCMRXGVPDDERRCRPRPLRRPCIAPHPPPSMPRPSKSVVSAPSLTHGRHVPLRRPIACLPPPLVPPPTTLRHLPAISTSVGASHRRRR

SEQ ID NO: 151480 - protein, 68 aa, Oryza sativa
  Clone ID: PAT_MRT4530_5161C.1.pep
GTEWPTHATGSLLLTIRHEETICCHLLLLSAPTHPAELHLRRADRVEPTRGAADNATRRGERGRGGYR

SEQ ID NO: 151481 - protein, 533 aa, Oryza sativa
  Clone ID: PAT_MRT4530_51620C.1.pep
MQIFVKTLTGKTITLEVESSDTIDNVKAKIQDKEGIPPDQQRLIFAGKQLEDGRTLADYNIQKESTLHLVLRLRGGMQIFVKTLTGKTITLEVESSDTIDNVKAKIQDKEGIPPDQQRLIFAGKQLEDGRTLADYNIQKESTLHLVLRLRGGMQIFVKTLTGKTITLEVESSDTIDNVKAKIQDKEGIPPDQQRLIFAGKQLEDGRTLADYNIQKESTLHLVLRLRGGMQIFVKTLTGKTITLEVESSDTIDNVKAKIQDKEGIPPDQQRLIFAGKQLEDGRTLADYNIQKESTLHLVLRLRGGMQIFVKTLTGKTITLEVESSDTIDNVKAKIQDKEGIPPDQQRLIFAGKQLEDGRTLADYNIQKESTLHLVLRLRGGMQIFVKTLTGKTITLEVESSDTIDNVKAKIQDKEGIPPDQQRLIFAGKQLEDGRTLADYNIQKESTLHLVLRLRGGMQIFVKTLTGKTITLEVESSDTIDNVKAKIQDKEGIPPDQQRLIFAGKQLEDGRTLADYNIQKESTLHLVLRLRGGQ

SEQ ID NO: 151482 - protein, 458 aa, Oryza sativa
  unsure (1)..(458): unsure at all Xaa locations
  Clone ID: PAT_MRT4530_51621C.1.pep
MQIFVKTLTGKTITLEVESSDTIDNVKAKIQDKEGIPPDQQRLIFAGKQLEDGRTLADYNIQKESTLHLVLRLRGGMQIFVKTLTGKTITLEVESSDTIDNVKAKIQDKEGIPPDQQRLIFAGKQLEDGRTLADYNIQKESTLHLVLRLRGGMQIFVKTLTGKTITLEVESSDTIDNVKAKIQDKXEGIPPDQQRLIFAGKQLEDGRTLADYNIQKESTLHLVLRLRGGMQIFVKTLTGKTITLEVESSDTIDNVKAKIQDKEGIPPDQQRLIFAGKQLEDGRTLADYNIQKESTLHLVLRLRGGMQIFVKTLTGKTITLEVESSDTIDNVKAKIQDKEGIPPDQQRLIFAGKQLEDGRTLADYNIQKESTLHLVLRLRGGMQIFVKTLTGKTITLEVESSDTIDNVKAKIQDKEGIPPDQQRLIFAGKQLEDGRTLADYNIQKESTLHLVLRLRGGQ

SEQ ID NO: 151483 - protein, 179 aa, Oryza sativa
  Clone ID: PAT_MRT4530_51622C.1.pep
MRKGEGGVEVDGQMGKGEEMVVELEVSAPNSVAKIFHWKTRCLRLLPPPVASTPMATTRSVDAFGYHPPLRSAPYHYPLATTPPHHPPGSTIGGGLEYRTFPHHRHGREEFEQKCASLREWITSGNLAGRRHHDISARVFSDSADRIWRDVLLNKELNLTSYYAAESWCIEDVTVLNGP

SEQ ID NO: 151484 - protein, 138 aa, Oryza sativa
  unsure (1)..(138): unsure at all Xaa locations
  Clone ID: PAT_MRT4530_51623C.1.pep
TKPVEIQSHIWGRLAEWVSIISKTVDIALSNEKNCFIWSLHKNSHFSVKSMYNGIINFNIRIHKRILWDVKVPLKMKVIFMXSNWLHSWCMMLSQEQQDTMRSGATRLELVAKELLLKFGLCELFSDREGSIFRKKPL

SEQ ID NO: 151485 - protein, 125 aa, Oryza sativa
  Clone ID: PAT_MRT4530_51624C.1.pep
PSHNTWPQTQIIPQSKTSPSFLQFLLFFCMVICMFWTALRRTGALPIYSMGEPPFAEVPRETQAANTIGCFLSRSIQISSGNIVSVSHRSVRFFINSLALVFQSIACFCCQSLRIEKTCATEGLI

SEQ ID NO: 151486 - protein, 92 aa, Oryza sativa
  Clone ID: PAT_MRT4530_51625C.1.pep
MAIGLSINATPNDQDGSPNADRTPLMAGSVLRSGERRTAAATAKRLYCCPAATGMNGGGTRGGGAGFNAATRSSQIGANWSKMRAKIGGGEI

SEQ ID NO: 151487 - protein, 177 aa, Oryza sativa
  Clone ID: PAT_MRT4530_51626C.1.pep
MGRKLGFEKVLDCFSLALCTNACVCIHSVEDDEEEAIEREALVSSQLEELVKLKDLVGGAKTLAFHLEPKTVELRVSMHCYGCAKKVQKHISKMDGVTSFEVDLESKKVVVIGDITPYEVLASVSKANSQCTVSLASLLFPVLPQTTGAPLCRPPTAIVAFVIISPTTPLISSPMSS

SEQ ID NO: 151488 - protein, 90 aa, Oryza sativa
  Clone ID: PAT_MRT4530_51627C.1.pep
MDGDSLPVASASTTGACPCPTPSSILCPACRHAAGTLARLTGATEARDYLPLHDMCGSDEQQVPHSRSEPRRRMHWCMGSEYSDPLWDFS

SEQ ID NO: 151489 - protein, 134 aa, Oryza sativa
  unsure (1)..(134): unsure at all Xaa locations
  Clone ID: PAT_MRT4530_51628C.1.pep
IARSIANGGAAAVYDIRVFPXQPTSSGSHKTELSILNIPVVSKGIVPGXLFCSLGKGIFSSIDVRSAATPGPDAKLHKARIVHRTYSQVGGDDTEDNNYTVITKQHRQIYKLIDRTRHLAHPSPVVAALTMEAE

SEQ ID NO: 151490 - protein, 764 aa, Oryza sativa
  Clone ID: PAT_MRT4530_51629C.1.pep
MDEKDGNNGRCNFSTEDPGEDKAFAASLVDQDQDPDPTDAALLDNECSRVVDQDPPPDAAALLYDECSAAYGAHVAKKNKSEAMHAGVGLAMKIDLPLELQSYNLVKGANVENWACVNFSLMGTTETQKFASELKKACVAIGMDLKSVHAVFVDLNSPNKLESTLHDVQELFGGQGVEVNQINLLIVILPEFRRSDAKVKDICKNLGFLYQCCLPEHARTPSKLYLNNVAHNIRSKEKRVNGDSEKVYGSDEMREDSESDLSDLEDMGDADSDIIYLEAFPTSDEEMDDDDDYGDDDEYVPVSPDEEMDDDGSVQQMRENDELCKQLQRLEENGHEQAANSAEGCLKTYKEIETHTALAGSTYSELSEPPSFEAFLCPGEREHILKTGWETQHPYKKPSGVSWDEYSKVFDTNGYYKLSNMPVEDKDLVAAECNTPEVRRWENHISHDYDELQVERGIVRRWACVNFSPKRKHAARVVSDIIGKCIDMGMEFGTLPKMDVDVPLTSLHIRRTLLDVPKKIDILIVIMADDRSYDGEIEEMCESLRIVYVFCLPCLSKRNLKRVARQIQLKVVKSYKSQRFFGAHTIHYDLGEDSEAGVDSEGIASQVLSVLLQNDKRKTQEDNLLQCNILHRGGLMEGEMERICLQEIDAIKQACAYSYKEDQPSLTYVVVVPTASIGTEADTAKYKFFCRHTTHKSTSRVVRYHVVHDDNNFLAGELQSLTLKLFTFRHRREYPKIDAVVPAYYAERAAFKAYRAECAASKAS

SEQ ID NO: 151491 - protein, 196 aa, Oryza sativa
  unsure (1)..(196): unsure at all Xaa locations
  Clone ID: PAT_MRT4530_5162C.1.pep
MGTQGIMQMVLDLSNLLHSSQELEALSEIPSNDELDLIIKHLPLDRAPGPDGFNAFHLVEHEAILQILQAKGFNQSWINLVNNVLKSVSTSVMLNGVPGKTFKCKRGVRQGDPLSPLLFVLTADLLQSIVNKAQTLGLLTAPIPNGDSQFPILQYADDTLIIMKADQKENFTLKALLNTYALCTGXPKINFHKSCM

SEQ ID NO: 151492 - protein, 642 aa, Oryza sativa
  Clone ID: PAT_MRT4530_51630C.1.pep
MSNPFDLLGEADGESGEAAVAILVGKKKAEADAFAAANPQPTKKGAKDVKGKNNGQENGSGGRNYDYDYYNRGYSNNNGGYQNYNYNGNNSNGYQNYNYNGNGQGHYNGGYQPIHQGNGQYQNNGNYHGDYGYDGQYAENYNNGQRQVYNGGQYRKKNLQYRPKEKQLSETASACSAENKSEDKLDSASETGKKESVAGDAVAKPVSGPEESTGDVAQDNSKKDGGDPEKKKVRNTLSGSAKRKLKKKHDSKVSGKTEKEAEKAEVLKEEERKDMTLEEYEKVLEEKRKALEDSKSEGRKVTAEVFEGMQLLEKKKLDDENASKKAENEQRKEPAKQVKAPKAINLNDLLKPADGQAYRPRPPPRRVQEDGFSQGYYNGGGGPGRGNGGFRQNSRDHSAEPHGNARGNGGYQERRDIGYNGGYQGRGNGGYQQRGYNGNNNGGYQQRGYNGNNNGRFQQERAVNSGNGGYRQGGYRGDGGYQQGRGYSGNGNGGYQQGQGYSGNGGYQQGRGYSNNGGYRRGGNQGNGRNESDSILSPAHFPALTGTIPATPEKVQSQSQASSSPAPAQAQPQAQTLSSSSSSGAAPAPAQAKSQAPPPAPAQAKSQAPPAQAKSQAPAQVKSQAKAPAPAARTKAPSKAQA

SEQ ID NO: 151493 - protein, 51 aa, Oryza sativa
  unsure (1)..(51): unsure at all Xaa locations
  Clone ID: PAT_MRT4530_51631C.1.pep
NPNPRRKTNKGPGRXSXRGRNGSXPTPRGDKEGXXXITLGPDPPEGVRPRG

SEQ ID NO: 151494 - protein, 53 aa, Oryza sativa
  Clone ID: PAT_MRT4530_51632C.1.pep
MKRRPLVEKMTRQAAADIVEMCHLAGGNVVDRPKPEKGTHASQLRWAAEDVKN

SEQ ID NO: 151495 - protein, 303 aa, Oryza sativa
  Clone ID: PAT_MRT4530_51633C.1.pep
MAGIVEKEGETGHLTSPTAPTLTTPTNQAFVNIITVLMMVSLMEEEAMAMETMATTTTKRMSVAEVSLVEAVLFDIDGTMCVSDPFHHRAFSELLQALGYNSGVPITPEFGMAHMAGRSNHQIGSFLFPDWPQHRLDAFFADKEALFARYAAEGLREVAGLTDLCRWAAARGLKRAAVTNAPRANADLMISILGLSDFFQVIVAAADDCDLPKPSPEPYLRALSLLGASPRHTLVFEDSVVGVQAGVAAGMPVIAVAEEAREAKVVAAGASLVIRDYKDHKLWAALDKLQAAAAAQSNGQLGA

SEQ ID NO: 151496 - protein, 73 aa, Oryza sativa
  unsure (1)..(73): unsure at all Xaa locations
  Clone ID: PAT_MRT4530_51634C.1.pep
LRLVAHQSGSQEIEVVQPIGQQLPPQQFGDLHIGRNLAQAQGLLAFALPCTXGIPPRSYSARGSIPPLAGVLW

SEQ ID NO: 151497 - protein, 109 aa, Oryza sativa
  Clone ID: PAT_MRT4530_51635C.1.pep
VGEEEITPRRDVLNPQTSRPFLEKIIFYKPLYVRVFKKSAPLAPTLFQSIFKKNPCKKPPKCNKGFFSNPKRTFFLKKKAQGPQMLINLGKTSLSNDLYYNPVVPFVIR

SEQ ID NO: 151498 - protein, 1445 aa, Oryza sativa
  unsure (1)..(1445): unsure at all Xaa locations
  Clone ID: PAT_MRT4530_51636C.1.pep
VQGIKIHHQHTHHSLRNPCSNVSQYPNHPVYEYHSLTVARQVGELGAQGSTNMTSSHPDNSTNTGVNQGASTSTSLVWTQVGTIVFPVYTVMPISTSPITIGNENGTAMTSRNDASLTIPPTQVENGTSTALVPGRNPQAAEFCPLNKRPEPTRIPIQKPRSWCPVHKTSKHTLEDCLVILHAKAELYACWKRGIQRTSPTGTTYCPIHRSRSHDLTSCIIFLRTFKSSHPHIPQPRDQSQCVVEERDAATLDRFVGFIGVNPSEPSMLHLLKDYESSSDSPRDVNVINGVETSASAAARTPPQQLRNLDAILRESPFDPVLNPDVDQWAARLRETVTNLNSAFVDAAVEPPPQDPPGGNGEPANGNAEAQNPTREPPARDPTPSRRENRDLHEHLDDRRRDRRDWNDNDRHQHRSPSRRGENXRSRQHHNGDNNXERRRGSNNGRERSSRSPASRRDRRRDHRSRSWAPNPSXHRSRSWAPNPSDPSSSSWSSSSSDKPPRRHHNRGPPFAQGGVCRAFARTLRDVRWPEKFRTGAIEKYDGSTDIEEFLQVYSTILYAASAYDNALANYLPDALKDSARSXLVHLPPYSISSWEDLWXQFVVNFQGTYKCHAIEDDLHALTQNPDESXRDYIRHFNECRNTIPEITDASVIRTFKSGVRDXYTNQELATRRITSACKLFEIIDRCAHADDALRXKEGKSSVGEEKKSANKDAPESSKKRSRKSGKRKPSGEVLAAKQTDPPKRSNPQNDDSKKXWCPIHKTNNHSMEDCYVFKKELARQLALXRGKRVRVVETAEEAATPDSNSAFPEYDLHVLHIIATTPGRYLIVIEPTIRNVKVARALIDGRSSINLLFASTLDAMGIPRSELTPTDQPFHEITPESSSKPLGKITLPVTFGQADNFRTEQITFNVAEFDTTYNTIIGRTALAKFMAASHYTYQVLKMPGPKGTITIQGNAKLAVQCNKRSLDMVEHTPNPPATIEHPKKVSKPNKKPKLDGAIKIIPLSNSNPDKTELAFITFLRNNANVFAWQPSDMSGVPREAIEHKLMVQPDAKPVKQKLWRFAPDRTQVIRXDKLLKIGFIKEALHPEWLANPVMIHEANGKWRMCVDFTDLNKACPKDHFPLPRIDQLVDSTAGCXFLSFLDAYSGYHQINMAKEDVEKTAFVTSFGVFCYTKMPFGLISAGNTYQCGIQGALGDQLGRNAEAYVDDIVVKTKTGDSLIDDLRKTFDNLRRYQTKLNPEKCTFRVPLGKLLGFLVSGRGIEANPEKFKAIENMKSPTRLKEVQRLTGCMASLSRFIARMGERGQAFFALLKKQDKFEWTQEAESAFIALKRYLSNPPXLVAPQNNEELFIYITATPYSMSTFIVVERERVQYPVXYVSKALHDAKTKYPQIQKLFYAVIMTSRKLHHNFQAHKVIVISSSPLGEVIRNKDVVGRIAKWVVKLSQ

SEQ ID NO: 151499 - protein, 492 aa, Oryza sativa
  unsure (1)..(492): unsure at all Xaa locations
  Clone ID: PAT_MRT4530_51637C.1.pep
MKKQVINAQTNKAELEVVCLKEALAQQNTEKEAIVLQCQQSTARLQNLKSEILHTQEKFNRLKEEMQSGFQPFTTADERSVLLEKANQEMNLELNKLKHMLKQKHEELNEKQAELEKLNISTEEEHLKCMQAEMAQLSLEKQLILAQDKMRLLALEKQIEVSKAKDTETEKVMLEKELEKIQKESTSLNDQIHSSSSMIIRLQDEIITMKNAQRRLEEDVCRHVDEKKTLQNELCHLKEDRSDLDKKHSSIKEQIQAVDLNVESLQALVQELKDGNVELKGIIRNHESTEVLHIENLRRLERMSEKNSYLEKSLSAVTTELEVLREKKAELEESCKHLSSKISSHQSERAVLVAQIEAISQTMAELFEKNVFLENSLSDANAELESLRGKLKELEESSEALYSQNSALQHEKSTLACQVDRISDTLQNLEAHYAELEKRHSDLXEEKGSVLDEVIKLQEQIRFERKEHNDLEHSRKSQLDALHEKINVLSAE

SEQ ID NO: 151500 - protein, 90 aa, Oryza sativa
  Clone ID: PAT_MRT4530_51638C.1.pep
MAPTKEGIQVREVLAMINFMEERLMAVMEQLDTKVNEMEIIGKQVYMIASKLEQQGSGWTSCIPSLKLDKANSRHLGHYLSANDDGVETL

SEQ ID NO: 151501 - protein, 90 aa, Oryza sativa
  unsure (1)..(90): unsure at all Xaa locations
  Clone ID: PAT_MRT4530_51639C.1.pep
LMMSSPSATGRKRWIMEMTNCIQTSLLPEKNFQFXIFFSALRNAGQXSYKKHGTRCCQELGGGRRRTSLYMQFYLCYCCHADVVSIDPPL

SEQ ID NO: 151502 - protein, 46 aa, Oryza sativa
  Clone ID: PAT_MRT4530_5163C.1.pep
PNCFTGHTFKKYTVSLTHKVIVEAKHEVCITNALEKNHVIKYKMIH

SEQ ID NO: 151503 - protein, 78 aa, Oryza sativa
  unsure (1)..(78): unsure at all Xaa locations
  Clone ID: PAT_MRT4530_51640C.1.pep
MSEEGGGNCRPRRMKALKGLSFYTTEEEQKKVFSPYGAGEEARLVRDNQTGRPKGSGPAKHPSQADARXKAAKAMDGR

SEQ ID NO: 151504 - protein, 80 aa, Oryza sativa
  unsure (1)..(80): unsure at all Xaa locations
  Clone ID: PAT_MRT4530_51641C.1.pep
ATVPXRRRRPPSREGGRVIAIXXXKITXRRIXESNHSIKEEEEDLDLDLXXELGLVIPHFFKGNRSSLARVGCDDGGGVV

SEQ ID NO: 151505 - protein, 95 aa, Oryza sativa
  Clone ID: PAT_MRT4530_51642C.1.pep
PADPAASIHPGIATTGSLSLTDPVAAPRHPEDIQRDWQTNKWRPSSYSSVKRRRHPRRGAGLPSRRVHLSGNFGGLDSPTRPRMLGRQCGSTKRL

SEQ ID NO: 151506 - protein, 45 aa, Oryza sativa
  unsure (1)..(45): unsure at all Xaa locations
  Clone ID: PAT_MRT4530_51643C.1.pep
FFFXFFFFXFFXFFFFLLLMHILTSRINYNKKESTTFPXKIRRPS

SEQ ID NO: 151507 - protein, 70 aa, Oryza sativa
  Clone ID: PAT_MRT4530_51644C.1.pep
WLASKLSKEVQLSNFRCKKVCHDGWGSPLRLSLGLSLYTPFKYASSHCRNPFIARNCECGGIYFVHGSRC

SEQ ID NO: 151508 - protein, 321 aa, Oryza sativa
  unsure (1)..(321): unsure at all Xaa locations
  Clone ID: PAT_MRT4530_51645C.1.pep
MTGFNLPENFKENAEAFFRSVRPRVVAPQKTLPTEKPAVPAPPTFRTMADKTLCEFAAPSTDNVAIGPQINMGDVDFDLKSSLITMAYASPLCGKPNEDANAHLQQFLEICSMYTTKGVSPDAVXLRLLTFSLLGRAKQWFYTNRAAXQHLGQVFYNIPLEVLYNGLTPMFHNHLDVAAGGAFFSKTVRGAVDLIEKMVSNMGWSEERLQTRLRGMHTVKETELLATKLNLLMKHLDDHDKWPQGIVKAMDSHVTCEVCGSTSHSGNDFLETREEAMYMGNINGYHPQGDQGRNQPXPPYYQGGNNNGNFSNQPSLEYNVT

SEQ ID NO: 151509 - protein, 173 aa, Oryza sativa
  Clone ID: PAT_MRT4530_51646C.1.pep
PPQTSRHSTRSSATRRSSHPRRLALLFSRASPPCPPPAAGSPPSPLFPVRPPQLPMREASLPTDGSNRPDERDVSRLHLLLRPSWCSARSVGGPSMVWSPASGSGCSGPWKRGSKPSLPPSTTLLLCTSTTPLLSAPPGVRFGLYRSPDLVGGEGRNSAAGDACIGVTSRSPE

SEQ ID NO: 151510 - protein, 723 aa, Oryza sativa
  Clone ID: PAT_MRT4530_51647C.1.pep
MALITPASGGGGGGGDKAPPSASDPSLGFLTKRDTEVKLPRATRVKNKTPASVQITAEQILREARERQEPEIRPPKQKITDSIELSEYRLRRRKEFEDVIRRVRWNVNAWVKYAKWEEQQRDFARARSVYERALDVAHRDHTLWLKYAEFEMRNRFVNHARNVWDRAVSLLPRVDQLWYKYIHMEELLGAVANARQVFERWMAWRPDTAGWNSYIKFELRYGEVERARAIYERFVAEHPRPDTFIRYAKFEMKRGEVERARQVYQRAADLLADDEDAQVLFVAFAEFEERCREVERARAIYKYALDRVPKGQAEELYRKFLAFEKQFGDREGIEDAIVGKRRFQYEDEVRKNPLNYDSWFDYIRLEESVGNNDRIREVYERAIANIPPADEKRYWQRYIYLWINYALYEELDAKDVERTREVYSECLKLVPHKKFTFAKMWLMAAQFEIRQRNLKAARQILGNAIGMSPKGKIFKKYIEIELYLGNFDRCRTLYEKYIEWSPANCYAWRKYAELEKNLSETDRARSIYELAIAQPALDTPEVLWKEYLQFEIDENEFDRTRELYERLLDRTKHLKVWISYTEFEASAGLAGEDGESEEIKKEVSYHEQQIERVRRCRAIFERAFEYFRTSAPELKEERAMLLEEWLNKEVSFGDLGDVTLVQKKAPRKVKRKRPIPTEDGSTVAYEEYIDYIFPDEVALAPNLKILEAAYKWKKQKTDDTDDV

SEQ ID NO: 151511 - protein, 72 aa, Oryza sativa
  Clone ID: PAT_MRT4530_51648C.1.pep
LCTVRAAAAAFWYTLHYTIDELAIEYETYWIRRTACTAEQAAERSIKESKPINTSIANVCLAIASCGPGACR

SEQ ID NO: 151512 - protein, 110 aa, Oryza sativa
  unsure (1)..(110): unsure at all Xaa locations
  Clone ID: PAT_MRT4530_51649C.1.pep
ARGWCQCLSPGGFGDDAKGRNGVGNAVVVAAEPRGVGIPLGXAIRALSSGHIPPTPFILVAMGSTWVLLTGWRALVSLLFSTGQSQQDDVYRRGSPFELFELLTSLVRRW

SEQ ID NO: 151513 - protein, 783 aa, Oryza sativa
  Clone ID: PAT_MRT4530_5164C.1.pep
MITFADLAEPAPGAERCVDRQLWLACAGGMCTVPPVGAAVYYFPQGHAEHALGLAAPELSAARVPALVPCRVASVRYMADPDTDEVFARIRLVPLRAAEDGDVEEDGAAAGEEHEKPASFAKTLTQSDANNGGGFSVPRYCAETIFPRLDYAADPPVQTVVAKDVHGVAWNFRHIYRGTPRRHLLTTGWSTFVNQKKLVAGDSIVFLRGDGGDLHVGIRRAKRGFCGGGGGAEEASLPGWDQYGGLMRGNASPCAAAKGRGKVRAEDLVEAARLANGGQPFEVVYYPRASTPEFCVRAAAVRAAMRVQWCPGMRFKMAFETEDSSRISWFMGTVASVQVADPIRWPQSPWRLLQVTWDEPDLLQNVKRVSPWLVELVSSMPAINLSSFSPPRKKPRILAYPEFPFEGQLLNPAFPPNPLAHGHHHYHHNHPSFFPFPDVSAPAGIQGARHAQFGPSLSDLHLTHLQSSLMYPGLRRPDHVGPTSIPPPRISTDLTMGSSPPARALSMGAKKPDDAKPPGLMLFGQRILTERQMSLSGTTSPAATGNSSLNWNTEKGASEGSGSGVIQNSPTDNTSSERLQWFRENSTVSELGLEPGQCKVFIESDTVGRNLDLSSLASFEQLYGRLSEMFCIDSAELRSRVLYRGATGEVRHAGDEPFSRDFNKKAQSAQVSYCSPVSFFIIINNDQLRVLVDSRVLRCKNPVTTHQRLECRGPLAQGTSACSMQTQTQRCAISDLSGGLTSRLQPPGEAIPLGSLALAASSLTHDDEICDLHRAAYPWLVES

SEQ ID NO: 151514 - protein, 67 aa, Oryza sativa
  Clone ID: PAT_MRT4530_51650C.1.pep
LPAQKLGVGFPYGIHCCRTSRKAIHSFWWQLFINVTSRRVSRACCDSSCHTAFVLPYVCKSIVCIRN

SEQ ID NO: 151515 - protein, 36 aa, Oryza sativa
  Clone ID: PAT_MRT4530_51651C.1.pep
MVAKIDYTCEADSPTLFAVEIPNSISNDADLLSSVK

SEQ ID NO: 151516 - protein, 515 aa, Oryza sativa
  unsure (1)..(515): unsure at all Xaa locations
  Clone ID: PAT_MRT4530_51652C.1.pep
MSRFVDNQEKSAASVESLVRREDTSGCAIKDVMALVKECGAVFGTKEHFIATEIFTKKSEREMFMTLDNSEERFAWLTMKHESKNFLSMCQMSSSETDGNETFSESDGTDLHEDDEVSIQSVIRHHQALEANLFSAACLLGQYYMTYYDKNKPRTSVLSGYAWVQETLRTPGESHHMFRMNTDLFYKLHDLLVSTYNLKATNHMNSMESVAIFLFILGGGESNRRVQNRFKHSXNTISRKFEEVLLSVVSMCKDYICPKDPNFPRAHSRIKNDKRLWPHFKKCIGAIDGTHITANPPREDYVRYIGRSKSPTQNVMAAVDFDMRFTYSSIGQPGSMHDTSVLYHVLDVDKDIFPHPPQGKYYLVDAGYPNRPGYMAPYKGQRYHIPEWRRGPPPSGEQEYSNQCHSSARNVVERTFGVWKMKWRILLKMPTYAMDKQEMIIAATMCLHNFIRQNSTTDKYFRRCDRDPNYVPTIPTRYARYVVSQNASDTSTPKSSDRSMDRFRDDLATALWQSR

SEQ ID NO: 151517 - protein, 52 aa, Oryza sativa
  Clone ID: PAT_MRT4530_51653C.1.pep
MAVDSSLRAALQCAAASWAPGSCLPYLFALLGLNLYFNLVPQSTGDGPGLNR

SEQ ID NO: 151518 - protein, 218 aa, Oryza sativa
  Clone ID: PAT_MRT4530_51654C.1.pep
MAATVVEENQGANNVEWTDENTRIVCELLAEQVRIGNRSNTHLNKVGYDNVIAKFEEKTGLRYQKLQFKNKWSKLRNEYNLWKKLIARETRLGWDQARATIVASDDWWARAKKDLPGCAKFKLRGIQNEHLLQQIFEDLRNTGDDHCNPTSGNLPQSSTQPSSTINVDTKAVNEGDDDDSNDEDFSPPPKREKSAASVESLVKREDTSGCAIKDVMAL

SEQ ID NO: 151519 - protein, 198 aa, Oryza sativa
  Clone ID: PAT_MRT4530_51655C.1.pep
MMVQMEKLVRQCDMEVMKMAMLKHEETFKQQVYELHRLYRVQKQLMSDLNRSPPELTCRRRQRRKQHTRRRALNLQLPADEYIVVADAGGQATPLPPPPASSREDELALTLAVGGGGAAGRRNNKRRESSPFTSNCSGGSLTTATSTSTSSSTDSDGSLRQPPPCPRAMAFDVLHDGSTAAAAAAAPWLQQRLSLRMA

SEQ ID NO: 151520 - protein, 66 aa, Oryza sativa
  Clone ID: PAT_MRT4530_51656C.1.pep
SCAVFRTHTEATTKITTHNRKSCAPLNLPPYSARKHPNICSCPFPCFSSCLRLFNLLDSSGDLHWQ

SEQ ID NO: 151521 - protein, 685 aa, Oryza sativa
  unsure (1)..(685): unsure at all Xaa locations
  Clone ID: PAT_MRT4530_51657C.1.pep
MARSGELPKVSAAATAAVRHEGWMLRYGRRKIGRSFVRTRYFVLDNKLLAYYKKQPKDNMVPVKALQIDGNCRVEDRGLKTHHGQMVYVLCIYNKKEKENHITMGAHDIEDALVWKKKLELLIDQQQDTMTAKNRKAFASLDFDMEFGGPLSFSDRDSGQXPPDSVHDWTKEPDIGLSDQNDTNHAYSRKNWRLLRCQNGXSCSRAMRAVGVVEATCESIFGLIMSMDVTRYEWDCSFQYGSLVEEVDVVLFRSTEHQNCGPQPGFVRAFIESGGFKISPLKCVNGRPRTQVQHLMQIDLKGWGVNYFSSFQYYSLLQMLNCVAGLREYFSQTDDIHPVPRIPVMSTMATVSKLKKDKKLQETDLKTKQADFGQVDNKNLDMIDEESEEDDDYQVPEANLEEAPTRSDSDAKYTDPIDLSCFSGIIRRDANEKSRNCWTVPDSKLFKVRSESFPHDKSKVPATKYLMELVAIDWLRDIKRMDHVARRKGCAAQVAAEKGMFTFVVNIQFSLEKYQFSFCDSIRARLLYFGHADQVCLHLQIPGSSHYSLVLYFVTRTLEKGSLLQRFADGDDDFRNSRLKLIPSVPKGSWIVRQSVGSTPCLLGKAVDCSYMRGQEYIEVDVDIGSSAVANGVLGLVFGVVTTLIVDMAFLIQANTYDELPEQLLGAARLSNIEPSSAIVPVLDK

SEQ ID NO: 151522 - protein, 61 aa, Oryza sativa
  unsure (1)..(61): unsure at all Xaa locations
  Clone ID: PAT_MRT4530_51658C.1.pep
GFNAFARVPKGKGFSPFSPKXGTKCXGPTPKKPPERGFSPGDVYVGGKAGLLFWGIPFGGI

SEQ ID NO: 151523 - protein, 110 aa, Oryza sativa
  Clone ID: PAT_MRT4530_51659C.1.pep
MSVLIVTSVGDIEVDLHTDMCPLTTKNFLKLCKMKYYNGCLFHKVEKDFLAQTGDPTGTGAGGDSVYKFLYGDQARFFDDEIRPDLRHSKKGTIAMASAGENCNASQFYI

SEQ ID NO: 151524 - protein, 339 aa, Oryza sativa
  unsure (1)..(339): unsure at all Xaa locations
  Clone ID: PAT_MRT4530_5165C.1.pep
LVDPRAAGPAPPPAPRSSPWRPRRTTTTATTTTSTTTTTPTPTAAATTSSPPTAPRFRPPPPPATPSPPXAPTAPPPKPSPTPPPASPPPAPTPPQTRPPSPPPQQQQPRPVSPPPVAEPYYWPKPYDYGDAPREQPAYATPEVFRGWPFFAGARCHSRCGGRDYWRQFMRGLDYLFGHADGYGERRIGVDYHGVPVYANRKGGVEEAVVIQVEPPATGTVEWHHAADDPEYNYNNGNNYQHVYKEEESQYQFSEQPLHVLVEPPETVYSQKLEYYEVCLSSTNAVYSQIFATLLDLAQLGPPVRAFNGNLESEEPIIKIEVLKLHMTATRNGDIYSST

SEQ ID NO: 151525 - protein, 1042 aa, Oryza sativa
  Clone ID: PAT_MRT4530_51660C.1.pep
MASSSSTAVSNPLFGVQVSEKLSKQNHALWRAQVLTVIRGARLEGHITGETAVPAAQLSKTVEGKEVKFSNPAHDEWIAADQQFLGFLFSSMTRETLAQVATAATAAEAWKTIQRMFTAKTHAQTMNVRLALITMKKGNLSVSDYVGRGRNTNSNRGRGSGRGRGSSQQRGNDGRPLCHVCYKRGHVAANCWHRYDEDYVPDDKLVAAATYSHGADSNWYVDTGATDHITSQLEKLNTREVYKGHDQIHTASGAGMKIKHIGHAIVHTPTRPLHLNNVLHVPQAAKNLISATKLASDNSVFVEIHSKYFLIKDRTTRSTVLKGPRRHGLYPLPSTSSTKQAFAVAPSLERWHSRLGHPSIPIVMKVISSNKLPCLRESNKESVCDACQKAKSHQLPYSNSMSVSNKPLELIYSDVWGPASTSFGGKKFYVSFIDSYRKFSWIYFLKHKSDVFEKFHDFQQLVERLFDRKIIAMQTDWGGEYQKLNSFFEKIGISHHVSCPHTHQQNGSAERKHRLIVEVGLALLAYASMPLKYWDEAFLAATHIINRIPSRILQYDTPLECLFNHKLDYSSFRIFGCACWPNLRPYNAHKLQFRSMQCVFLGPSHTHNGYKCLDIATGRIYICRDVVFDENVFPLSKFHSNAGSRLRSEIALLPSHLLSHTSHQGGEHNNHMLDFYNVSSDQTDENADIDGGNTTDTTNDDLGNQLHELRSSVMQDMHFGGEAATHATEDQSMVAAKPRTRLQSGIRKEKVYTDGTVKYSCFTSSGEPQNLHEALNDKNWKHAMDSEYTALMKNKTWHLVPAKSDRNVIDCKWVYKIKRKADGSLDRYKARLVAKGFKQRYGIDYEDTFSPVVKAATIRVILSIAVSRGWSLRQLDVSNAFLHGILEEEVYMRQPLGYEVSSLPNHVCKLDKALYGLKQAPRVWYSRLSTKLQELGFQASKADTSLFFYNKGVVSMFVLVYVDDIFVASSMQSATAALLQDLNKEFALKDLGDLHYFLGIEATKIGQVVYMTEDQFADGFTKSLTERQLKLFRHNLNLRSLD

SEQ ID NO: 151526 - protein, 290 aa, Oryza sativa
  unsure (1)..(290): unsure at all Xaa locations
  Clone ID: PAT_MRT4530_51661C.1.pep
MASSSSTAVSNPLFGVQVSEKLSKQNHALWRAQVLIVIRGAGLEGPITGERQDNPAQSTKRWKEKRKRWGKLVLPQRRAKPGKRIQQMFTAKTHAQTMNVRLALITMKKDEIATAGKSMDSDELIAYILNGLDEDFDPVVSALVAKTESVTVAEAVSQLLSFESRLALRHAXSANAASRNRGGFSSRGGAGRGRNANSNRGRGSGRGRGSSQQRGNDGRPLCXDCWHRFDEDYVPDDKLVAAATYSHGANSNWYVDTGATDHITSQLEKLNIREVYKGHDQIHTASGAGR

SEQ ID NO: 151527 - protein, 49 aa, Oryza sativa
  unsure (1)..(49): unsure at all Xaa locations
  Clone ID: PAT_MRT4530_51662C.1.pep
LTGIEYEASSCNSFSAISMGTSCYAILIXFILFFLEWAREAXFCFIHPQ

SEQ ID NO: 151528 - protein, 840 aa, Oryza sativa
  Clone ID: PAT_MRT4530_51663C.1.pep
MASSSSTAVSNPLFGVQVSEKLSKQNHALWRAQVLIVIRGARLEGHITGETAVHAAQLSKTVEGKEVKFSNPAHDEWIAADQQILGFLFSSMTRETLAQVATAATTGEAWKTIQQMFTAKTHAQTMNVRLALITMKKGNLSVSDYVGKMKSFADEIATAGKSMDSDELIAYILNGLDEDFDPVVSALVAKTESVTVAEAVSQLLSFESRLALRHARLRECSQQKPWGLLLTWWRRKRPEHQQQPRPRLRPWAWLKSTARQRRPPLMPDCWHRFDEDYVPDDKLVAAATYSHGANSNWYVDTGATDHITSQLEKLNIREVYKGHDQIHTASGAGHALWRRSSHSCHKRSINGRSKAQNKVTKWYPQGKGRNVIDCKWVYKIKRKADGSLDRYKARLVAKGFKQRYGIDYEDTFSPVVKAATIRVILSIAVSRGWSLRQLDVSNAFLHGILEEEVYMRQPPGYEVSSLPNHVCKLDKALYGLEQAPRAWYSRLSTKLQELGFQASKADTSLFFYNKGAVTMFVLVYVDDIIVASSMQSATAALLQYLNKEFALKDLGDLHYFLGIEATKVCNGLILSQEKYVTDLLKRVNMDKCKPVSTPMSVSEKLSLHQGEVLASGDATRYRSIVGALQYLTLTRPDISFLVNKVCQYLHAPTTVHWAAVKRILRYFQQTTKLGLKITKSPSFLVNGFTDADWAGYLDDRRSTGGFAVYLGSNLVSWSARKQATVSRSSTEAEYKALANVIAELMWIQTLLRELRVQAPQAAKVWCDNLGAKYLSANPVFHARTKHIGVDYHFVREWVSRKLLEIEFISSEDQVADGFTKSLTERQLKLFRHNLNLRSLD

SEQ ID NO: 151529 - protein, 819 aa, Oryza sativa
  unsure (1)..(819): unsure at all Xaa locations
  Clone ID: PAT_MRT4530_51664C.1.pep
MASSSSTAVSNPLFGVQVSEKLSKQNHALWRAQVLTVIRGARLEGHITGETAVPAAQLSKTVEGKEVKFSNPAHDEWIAADQQFLGFLFSSMTRETLAQVATAATAAEAWKTIQRMFTAKTHAQTMNVRLALITMKKGNLSVSDYVGRGRNTNSNRGRGSGRGRGXSQQRGNDGRPLCHVCYKRGHVAANCWHRYDEDYVPDDKLVAAATYSHGADSNWYVDTGATDHITSQLEKLNTREVYKGHDQIHTASGAGMKIKHIGHAIVHTPTRPLHLNNVLHVPQAAKNLISATKLASDNSVFVEIHSKYFLIKDRTTRSTVLKGPRRHGLYPLPSTSSTKQAFAVAPSLERWHSRLGHPSIPIVMKVISSNKLPCLRESNKESVCDACQKAKSHQLPYSNSMSVSNKPLELIYSDVWGPASTSFGGKKFYVSFIDSYRKFSWIYFLKHKSDVFEKFHDFQQLVERLFDRKIIAMQTDWGGEYQKLNSFFEKIGISHHVSCPHTHQQNGSAERKHRLIVEVGLALLAYASMPLKYWDEAFLAATHIINRIPSRILQYDTPLECLFNHKLDYSSFRIFGCACWPNLRPYNAHKLQFRSMQCVFLGPSHTHNGYKCLDIATGRIYICRDVVFDENVFPLSKFHSNAGSRLRSEIALLPSHLLSHTSHQGGEHNNHMLDFYNVSSDQTDENADIDGGNTTDTTNDDLGNQLHELRSSVMQDMHFGGEAATHATEDQSMVAAKPRTRLQSGIRKEKVYTDGTVKYSCFTSSGEPQNLHEALNDKNWKHAMDSEYTALMKNKTWHLVPAKSDRNVIDCKWVYKIKR

SEQ ID NO: 151530 - protein, 114 aa, Oryza sativa
  Clone ID: PAT_MRT4530_51665C.1.pep
RQNWNSTAVAAALNYWIPRAARIRHHGYYGEHHGHLHSFPHQRFTDHLFPSLSMRVRNCHMLLCTSKPGLSILRIMFTHHIPMSPFWTYYNKLIFSLTSVTLHGTNLKSEKFSH

SEQ ID NO: 151531 - protein, 120 aa, Oryza sativa
  unsure (1)..(120): unsure at all Xaa locations
  Clone ID: PAT_MRT4530_51666C.1.pep
LYNLQSISFKHYIIHELTKMTDQHKIAVHDAQSPFALLDCYLYSHNWKSVTPQNHFFRQVQCHQLQHHSSKLVPPVXIWWQHSITCLATPGISTSIPSVMLNMHLRSINLQTGQFPTPFC

SEQ ID NO: 151532 - protein, 132 aa, Oryza sativa
  Clone ID: PAT_MRT4530_51667C.1.pep
MPPRVENTTPAGIVVASPKARLLTVVFLPSCECLSGSAANHHLKPFNAQPPHQRLAVGRPSKQDFNLRRTLDPSMPSHGAPVAIDAAHTDHGVMLVLTLLALSRRPQPRVMRRVVPAPVLHHRPHRLLPSQF

SEQ ID NO: 151533 - protein, 79 aa, Oryza sativa
  Clone ID: PAT_MRT4530_51668C.1.pep
ELGTLPNLSEILSWKMALAISIGIFVAWLGGRGINLMATQPLIITGLLIGTIIGIAFFGGIPVGPLIAAGIMSLLVGKL

SEQ ID NO: 151534 - protein, 76 aa, Oryza sativa
  Clone ID: PAT_MRT4530_51669C.1.pep
MGQQLKELTYHGLGPRGRSTVGSRNRQPSGGTARQHGGNMARCGRGDSVQHGATVAASSQQRRQRRGKTSVAAGAH

SEQ ID NO: 151535 - protein, 89 aa, Oryza sativa
  Clone ID: PAT_MRT4530_5166C.1.pep
SPGHVHRCFIESDTVGRNLDLSSLASFEQLYGRLSEMFCIDSAELRSRVLYRGATGEVRHAGDEPFSEFIKLARRLTILTDAGSDNLGS

SEQ ID NO: 151536 - protein, 110 aa, Oryza sativa
  Clone ID: PAT_MRT4530_51670C.1.pep
QGDYCAHMIKEPWVPHVRASPALFYPLFFPAPLLDLSSRSPLCSSPPSGAGRRPAWARGAAAAAGVPTADEAGPVPARQRQPMRRRGMQRGRGAREEAVLDAVWRHNGGR

SEQ ID NO: 151537 - protein, 93 aa, Oryza sativa
  unsure (1)..(93): unsure at all Xaa locations
  Clone ID: PAT_MRT4530_51671C.1.pep
ILLFFFLFLFCKSFYFPVSDLRKHPFSPQTNRKTTFLPGPPNLKTSFWGRNPGGGCFGNPPPGFTMXKIEMSRPPEWPPKPNNGRWLITITGG

SEQ ID NO: 151538 - protein, 379 aa, Oryza sativa
  Clone ID: PAT_MRT4530_51672C.1.pep
MGEGGILLGPSALGRWGPFRRTLFPAWSAAALDTVSGLGLLLFLFLVGLELDFRSVRRVGPRSVAIAAAGIAPPFLAAAGLVPLLDVAVPAPRRASFLPLCVFVGAALSVTALPVLACILKELSLLGVPFGDTAMAAAAVNDVFAWVLLALALAVSGGGGGEPKGPPLAPVYILASGAAFVAFMLGALRPLMARLARRLGPDRAGDLACTGAVACVLLAGAATDAIGVHPVFGAFVFGLAMPREGGLGSARARSGLHTDIDNVRGAAAWGMVALVVAVAIGGKFAGTFAVAAGTGMPRREAAALGVAMSAKGLVELIVLNIGKERKVLDDTTFAIFVIMALTTTVLATPFMTALYRRTPTATTPESDDVELNGGDACPA

SEQ ID NO: 151539 - protein, 453 aa, Oryza sativa
  Clone ID: PAT_MRT4530_51673C.1.pep
MAAAAVTVKMASDGMWQGENPLDFALPLLALQVAVILVITQGLALALKPLRQPRVVAEILGGILLGPSALGRWGPFRRTLFPAWSAAALDTVSGLGLLLFLFLVGLELDFRSVRRVGPRSVAIAAAGIAPPFLAAAGLVPLLDVAVPAPRRASFLPLCVFVGAALSVTALPVLACILKELSLLGVPFGDTAMAAAAVNDVFAWVLLALALAVSGGGGGEPKGPPLAPVYILASGAAFVAFMLGALRPLMARLARRLGPDRAGDLACTGAVACVLLAGAATDAIGVHPVFGAFVFGLAMPREGGLAERAGEKVAPLVSGLMLPLYFATSGLHTDIDNVRGAAAWGMVALVVAVAIGGKFAGTFAVAAGTGMPRREAAALGVAMSAKGLVELIVLNIGKERKVLDDTTFAIFVIMALTTTVLATPFMTALYRRTPTATTPESDDVELNGGDACPA

SEQ ID NO: 151540 - protein, 133 aa, Oryza sativa
  Clone ID: PAT_MRT4530_51674C.1.pep
MPVDATQVSELIQASLSGDNERIKQATKLLKTYTKHKASIRVLTYILVNSTQLAHRQMAAVLLKRNLINLYEGLSVEEKAEFRSLLLQQYAKEPHLLVQRGIATLISILLPVVEIKNWVELQQLLDTAVQSAP

SEQ ID NO: 151541 - protein, 95 aa, Oryza sativa
  Clone ID: PAT_MRT4530_51675C.1.pep
MPTNAKKSSMNKTSKERKLKKLKSLEMKRKECMLYRQKYRSLFRHFTNLPKHQRKMQIQMEREKQRRKDELLRNQKEFNLLKNEEQQIKIKTMYG

SEQ ID NO: 151542 - protein, 264 aa, Oryza sativa
  unsure (1)..(264): unsure at all Xaa locations
  Clone ID: PAT_MRT4530_51676C.1.pep
MVVTRSPPAAVPKRSSIHPQMSRPTQHHPTAAATAVILLLLAVSPAPSGADPDDERCLSSLQQSLSGLRNWSKASFSAPCEGFISHLQGVTCNNGRVYKLSLPGLSLAGTIPPDLSNCTNLQSLDLSSNALSGAIPPELSGLLNLAVLNLSANRLSGAIPRDLARCAYLNVIDLHANQLTGSIPDELGLLVRLSTFDVSYNRLSGPIPVLLANRSGTTGRFNATSFVGNKDLYGYPLPPMRXHALSVLAIVGIGLGSGLLSLVL

SEQ ID NO: 151543 - protein, 1088 aa, Oryza sativa
  Clone ID: PAT_MRT4530_51677C.1.pep
MTAGGGMKVEVRVVGGARSCFAALPLHLIHALSRTSVSGDLPPVLALHLRAAATATAARWSLAWSGAASRSSAIEVAQELAECISLPDGTVAQLSVARSLAKADSVCIEPFSEDDWEILESRADLAEETILTQVGVVYEGMKFPLWLDGHNIVKFVVTSSSPKKSLVQLVPGTEVAVAPKKRRENSSQDVQKQSALKEEAQTKALLRVQAADRKYVHKFKYKGVELGVILSYAVLVHPDTAARASISNLQLVTVSSKSSPKRLAQKGKEVTQKKGILLPKERVREVVVYILFSDSVSKGHVMLPHSIRHYISADIHSWVYVKTFSANVKNDQPILTISPLHFKMQEKVAHDGSELGSQEANIWRKTSIPSENRDPFQEAHFGNNDDVLSTDVDNTSESILEHKILIKQWLVGQLKDMGLHVGNSEISPVVLPTKVLLHFEAVDQKHNRGKEFLYLLKVGFENSSYSNSQGNAELSWSIQTDDLENLELKFGRLELDDGFSNGFKLTRSSLGWMENAMSDVTKRLSVLLSSTSLRLFDQLKLPFPGHVLVLGPRGSGKTALVRAAAKYFEDHKEILAHVIYIDCSKLTVGKAKETKQTIEDSISEALLHAPSVILFDDMDNVVSVSSDPQAPQSSSSSDSIVRYLADIMDEYKDKAQNACGYGPIALMASAQSLQSLPQDLTSSGRFDFHVELPVLAIPEREALLKHHVEEHELQCSKEVLSEIASKCDGYDAYDLDILVDRAVHAAASRFVLPSSASVNCAEPTLVKEDFLKAIHDFLPVAMRDLSKYAPADGEGGWEDVGGLNEAVTIIKETLELPSKYPNIFTKAPVRLRSNILLYGPSGCGKTHIVGAAAAACSLRFISVKGPELLNKYIGSSEQSVRDFFAKAAAAAPCLLFFDEFESIAPQRGTQSAGVSDRVVNQFLTELDGVESLTGVFVFAATSKPQSIDAALLRPGRFDRLILCDFPGWHERLEILKVHSREVSLASDASLEEVASLTEGFTGADLAAILRDAKLAAVHKVLEDRNNGISDTQPCISKELLISTAREARPSTSAEQKMQYDMDFGQFVSSRKSVSTKARESKGKKVTLA

SEQ ID NO: 151544 - protein, 114 aa, Oryza sativa
  Clone ID: PAT_MRT4530_51678C.1.pep
MAAVWRRRRFSTPPQRRRNPLPSSASTTSEEVFGRLLQRPSFRRSRAEFDIHILKRTYFIVYTLSESSVYTQEPSRQIMCLMHQITFLLHGFYLLRVKQLGEPLEFLPLYPASK

SEQ ID NO: 151545 - protein, 148 aa, Oryza sativa
  Clone ID: PAT_MRT4530_51679C.1.pep
MAHHVELELVAVVMKVVNLIEGHKQKGGNTRGKERKVWLHRSRAHTGSCNVRPRRGRKQPSSEACGGGLEYATRGAPRYFYVFAPSFVRRETEPWTAERRRRDKWTWPRPAGGKESGPRAASHFPFSPLLVDGGLLLVGQRQMGVGPF

SEQ ID NO: 151546 - protein, 64 aa, Oryza sativa
  Clone ID: PAT_MRT4530_5167C.1.pep
MMTSMSKSAQGATKDKSGEKKIPSATGDQAKQFRVGKFCWASLLKKTQRKKSDQKRRPPNLSSC

SEQ ID NO: 151547 - protein, 151 aa, Oryza sativa
  unsure (1)..(151): unsure at all Xaa locations
  Clone ID: PAT_MRT4530_51680C.1.pep
MTRIESSDVLKMQILVKTLTGKTITLEEESSDTIDNVKAKIHDKEGIPPDQHRLIXSGKQLEDGMTLADYNIQNELTIHLGLQLRGGMHIFVKTLTGETITLEGESCDTIDNSNAYIQDIEGIPPDQQRLIFVCKTLEDGTTFADYIIQSE

SEQ ID NO: 151548 - protein, 118 aa, Oryza sativa
  Clone ID: PAT_MRT4530_51681C.1.pep
MDDDDDEVAAGEAGPAPAAAATGGHADRVFRALALASLYILFRRWRAGGAGLAERPSPAEIAAAVALCASVAWLYALPAFGIRRSSEISTRRSEAYIATAANIVTWVLTAIAQLSLVK

SEQ ID NO: 151549 - protein, 43 aa, Oryza sativa
  Clone ID: PAT_MRT4530_51682C.1.pep
SDSQLNIWTKSTPVMRTLSYLRILFSVFLDIRNQKLRMIGKAT

SEQ ID NO: 151550 - protein, 368 aa, Oryza sativa
  Clone ID: PAT_MRT4530_51683C.1.pep
MLWAARVSGFFSAAMVMVVLSPSLQSFPPAEAIRSSQFDSHVRFPGQIAGGARGLAFRRAPAFRNAADCGNATGNVCDPSLVHIAITLDEEYLRGSVAAVHSVVQHATCPESVFFHFLVSDPALGDLVRAVFPQLQFKVYYFDPDRVRGLISTSVRQALEQPLNYARNYLADLLEPCVRRVIYLDSDLVVVDDVAKLWRTDLGGRTVGAPEYCHANFTKYFTDRFWSDKQFAGTFAGRRPCYFNTGVMVLDLARWRRTGYTRRIERWMEIQKSPAGRIYELGSLPPFLLVFAGHVAPIEHRWNQHGLGGDNVFGSCRDLHPGPVSLLHWSGSGKPWARLGAGRPCPLDALWAPFDLYGPADSAAEGSR

SEQ ID NO: 151551 - protein, 55 aa, Oryza sativa
  unsure (1)..(55): unsure at all Xaa locations
  Clone ID: PAT_MRT4530_51684C.1.pep
METYDRKHSLPQXVRXXATXXHGHSXFCTXXLXXAXXLAXEVGARXNHLXSSGXX

SEQ ID NO: 151552 - protein, 1212 aa, Oryza sativa
  unsure (1)..(1212): unsure at all Xaa locations
  Clone ID: PAT_MRT4530_51685C.1.pep
MGGIAECGVNIDQKASPRRAAIEKAQEELRQEYDVREERRRELEFLEKGGNPLDFKLGHVASLSVQSTSVADHITEQNVISEAKGSFAFAASPHGDSVESSGKPGSSSCRDANTADNLMLLDGDTSNTGGEKLVKCGTKRTNVSQPDVSLRCDGQNNVKEAEDSSLFRPGAKNQAYARRRSKSSRENATASVGSLPVSPLYSQGKDAKGIIQETKSEDHGASSIGNSKPASPDRNNTSKVASLGDHDAMEMDNTNEGNQAATHETTNFKDGVETPEISPNSVNGNSQLIGDGLVVTATTSAESPDTSPKEAALMATSSFPSSCNEVLEEACAAEEADDMVSKSSVPPSEVEIASLNENEADIPCADVSKTVDEHPGKSENLSGKVSDEDLGDAIPSDKDGNKDGQPEGGDMPTVVDGVSNSVQPEVSNTIYAKDDVDVHNKMVDAQKDTGNLATSGLDKVDKEACSNLKKNNKCSPDSNIADKLDSVTVASGLLMKDVPSSVSLMNPDNDVNKTGENIPMMEKKECEDSTVAKKEHEDTILRRARLIEVNIKKAGERSLCNISLEKKPKSHWEFVLEEMAWMANEFMQERLWKSAAASQMCHWIALSGRATFEEANIQRKQKSIARILAKSIMKFWCSAETLRATSGEMRKEKQAEESIGIGETKLAGINAEKEQCNEPLEQEKLQSPIQSYALKFLKDNCNISECLSLAEAPATPDRLNDFGILKVPDQLSECLPSRXTNNSRQKNDYEPSTTGSVADAHRGHAYEDDDVEASTYVLHGTYDDGLPSKSSHKKKHLMQQRMNGTRHYSTGVDMPYDPYVESKPGNQPFLSNGKRPSDFFNIPTKRIRTAARQRVVSPYPANASGATAFTSKTDASSGDTNSCQDDQSSLHGGSFPRKNVDIESTVDFDRQLYDGSEVSTKSKKKKKSKHPGYKTPQSVAESCSLIAGKGIACDPRPQVDLIAQYEQKDYLKKRSEVHQFDSNGNIVINGQHAAKKPKLMNQAPDVSLEALTPVGPMVSPAASQMSNMANPTKIIKIITNRDRGRKNKVLKKRIIANTNSTYKSPKQMSKPHNHILPVKLHSLKAAVLENCSSFCITLSNWLGLLVDITILPFYINKVPSTGGNRSEASDWAKTVHAGGNHLRWHSLMTCSPVVHASVAYIIWAPYLGAEVHCHDAGVISAEGWCYWLWHSCQPRSPQSDGDCMHLRSGRRC

SEQ ID NO: 151553 - protein, 323 aa, Oryza sativa
  unsure (1)..(323): unsure at all Xaa locations
  Clone ID: PAT_MRT4530_51686C.1.pep
FNIEKLQSPIQSYALKFLKDNCNISECLSLAEAPATPDRLNDFGILKVPDQLSEANLFYGVAPGAMQAYREFVEGPFVANKKTNNSRQKNDYEPSTTGSVADAHRGHAYEDDDVEASTYVLHGTYDDGLPSKSSHKKKHLMQQRMNGTRHYSTGVDMPYDPYVESKPGNQPFLSNGKRPSDFFNIPTKRIRTAARQRVVSPYPANASGATAFTSKTDASSGDTNSCQDDQSSLXHGGSFPRKNVDIESTVDFDRQLYDGSEVSTKSKKKKKSKHPGYKTPQSVAESCSLIAXKKDYLKKRSEVHQFDSXGNIGINGQHAAKKP

SEQ ID NO: 151554 - protein, 127 aa, Oryza sativa
  unsure (1)..(127): unsure at all Xaa locations
  Clone ID: PAT_MRT4530_51687C.1.pep
DAWVNIQSYTCTFAXLAVYTGLLPKDPTGLELPSGGHVSCRYCTPSGKLSSASVFIEMEMSYMVNPQTGYVNKLKERAXDFYTKILIFTPERDFTWMRLIADKCGAVLCCAHVRPGAHQQACHHDGK

SEQ ID NO: 151555 - protein, 64 aa, Oryza sativa
  Clone ID: PAT_MRT4530_51688C.1.pep
ALGLSTGGTPPFGPGKPEPLDVAVPKSVIRWGSCPHLLRTPSLRASLVCYPFVYLCNSPCVLWL

SEQ ID NO: 151556 - protein, 685 aa, Oryza sativa
  Clone ID: PAT_MRT4530_51689C.1.pep
MEKGSEEYISFYDSELEEVLKKIEKVSSRRFDKLLVWHNEDREEFNVVRKSQEFEFFQEHLRSYEVQYTRVIPTIKRCRMKLPKLLFSVLHKTFHKHFQSQLIEFVKRQIKDRDKDKRVRNRWIFEAEAGYLKTDFDMIPLSYSGLKIEKLKCSSTDYLNGDAQLNYFNMECLSTEIEAIASSSTKSEETCAGKRSDTSEPILDNSEVLLEINVSTKDGASVGAAEEVFTCERSSQSTCGPTTMVFGQNNGRQIDFPVAAQSNVGDAELSYASQSHISAASAHANVVAADSENANLLSRAKGRCPSSTYNVSLGSCSGSQRKLPFESASSPCETALLHKEAPCADHQISLNTVSPQEAPCANHQISLDTVSPQEAPSASPPSTNVIQMEQSEDISNVIRVEQSEDIRSEEAPNGQASSFAQVTEQPNMQANTSTCQAVTHQPPDGSIHSVRTEFINPRASNIESYSVNQILTRSIFEQRPNEAGFQSDPVAVELSRLQMLRCLMTKRHEEKRQQIILAREIEMAETKRKYDELIHKLEMETSQRKKGIQILADKVYKRQTLAEGFQTMFVSHGSRARRSMQPNRSSGQQALQIPASVSAPASAVMCQPSQQDAQSSMGSSPRHPFVTINHHSMDYLGRSATPLAHSRGAGMGSGIAYHAPESHLHSVVNPLPASGLQLGIASLEQ

SEQ ID NO: 151557 - protein, 240 aa, Oryza sativa
  unsure (1)..(240): unsure at all Xaa locations
  Clone ID: PAT_MRT4530_5168C.1.pep
MSSVRLIMKNIVKLTHNRGHGYSNSFTLIRGTPLYPQDTAPXMSPCASIPPRYLGXNCDSTPYTTQLTTVHRSWIVISPSKPEAMDSPATPTDFSPLHSLAPRNEXYYTKGAGDATTGARGVGRAIXGHLRVEDDDVNSPVQENTTDDDERRPATSSDGCTARVGNGGSSPATGDGGKGAAGVPLLRVHPTTATDGNGNGYRGGAARLDGRQWRRRLGQSGGGATGDEGARDLGQTEEDD

SEQ ID NO: 151558 - protein, 173 aa, Oryza sativa
  Clone ID: PAT_MRT4530_51690C.1.pep
MDLYGAAAGGGPVARRPWSKVEDKVFESALVLCPEDVPDRWALVAAQLPGRTPQEALEHYQVLVADIDLIMRGAVDAPGSWDDNDGNDRRGGGGKPRGEERRRGVPWSEDEHRLFLEGLDRYGRGDWRNISRFSVRTRTPTQVASHAQKYFIRQANAGARDSKRKSIHDITTP

SEQ ID NO: 151559 - protein, 43 aa, Oryza sativa
  Clone ID: PAT_MRT4530_51691C.1.pep
LEINGTGNGYKHGQNNPGHNILLNGACPPSYLNGKIKVGKGHF

SEQ ID NO: 151560 - protein, 603 aa, Oryza sativa
  Clone ID: PAT_MRT4530_51692C.1.pep
MAASPEQFRGQARLPRCASPLSYDLRLRPDLAACAFSGSAAVAVAVSAPTRFLVLNAAELAVDGSSDLVPSEVVQFEEDEIVVIGFGQDLPIGEGVLKMDFTGTLNDQMRGFYRSKYEYKGESRNMAVTQFEAADARRCFPCWDEPAFKAKFKLTLEVPSELVALSNMPVIKETVHGPLKTVYYEESPLMSTYLVAIVVGLFDYIEGSTLEGTKVRVYTQVGKSNQGKFALDVAVKSLDLFKDYFATPYPLPKLDMVAIPDFAAGAMENYGLVTYRETALLYDELLSSASNKQQVSYLAVEALFPEWNNWTQFLDETTSGLRLDALAESHPIEIWKYMKAVDINHASEIDAIFDSISYDKGASVIRMLQSYLGAERFQKALASYIKKYAYSNAKTEDLWAVLEEESGEPVKDLMTTWTKQQGYPVIYAKLDGHDLHLEQKKFLLKGKTDKVHIDLTASQNAGGEKGENCWIKLNVDQTGFYRVKYDDELAAGLEKAIKANKLSLMDKIGIVEDSYSLSVARKQTLTSLLRLLNAYRNESDYTVLSHVTSVCLGIDKISVDATPELSRDIKQLLINLLLSAAKALGFDGKDGLGHREGMLGSVL

SEQ ID NO: 151561 - protein, 63 aa, Oryza sativa
  Clone ID: PAT_MRT4530_51693C.1.pep
MAINNSHIVLQTRCIVELLVFRRRGKEGGGLALQAILFLTVLRMDALRNTPSVSQCPSIWRQV

SEQ ID NO: 151562 - protein, 108 aa, Oryza sativa
  unsure (1)..(108): unsure at all Xaa locations
  Clone ID: PAT_MRT4530_51695C.1.pep
PINVITALTVNKKSLEKIGKQCXRFIWVGSGNFIGAKCKIDXKRTHLPMANEGLRTLDLEKFXKSLRLKWLWHKWVESWKPWVGMETPCDETNKTLFVVASKINISDQ

SEQ ID NO: 151563 - protein, 637 aa, Oryza sativa
  Clone ID: PAT_MRT4530_51696C.1.pep
MAGSEAAAAQEAEMDPDFSGGGGGGPSFEFAFNSVNFSDRVLRIEVVAGDDDDDDDHAPGSSRDGGAASSSSSSSYRGRRPGSEAAAAQEAEMDPDFSGGGGGGPSFEFAFNSVNFSDRVLRIEVVAGDDDDDDDHAPGSSRDGGAGSLSDWARHRKRRREELLKEKESEAVMPDQINCKVEPEECDAYEENQEEPVAMMDDSPPSVGPDGDDGPSMDSPWSGGVSTPVLRVKNIYISSAILAAKSPFFFKLFSNGMKESDERQATLRITDSEENALMELLSFMYSGKLTSTDPTLLLDILMAADKFEVISCMRYCSQLLTSLTMTTESALLYLDLPCSISMAAAVQPLTDAAKEYLSNKYKDLTKFQDEVMNIPLAGIEAILSSNDLQVASEDAIYDFLIRWARAQYPKSEERREILSSRLLPLVRFSHMTCRKLRKVLICTDLDHEQATKCVTEALLYKADAPHRQRALAADVTTCQKFAERAYKYRPLKVVEFDRPYPQCIAYLDLKREECSRLFPSGRMYSQAFHLAGQGFFLSAHCNMEQQSTFYCFGLFLGMQEKGSMSVTVDYEFAARTRPSGEFVSKYKGNYTFTGGKAVGYRNLFAIPWSTFMADDSLFFLDGVLHLRAELTIKQPTV

SEQ ID NO: 151564 - protein, 107 aa, Oryza sativa
  Clone ID: PAT_MRT4530_51697C.1.pep
MAIVGDALKANIMAIRPPGVWLARLLAKLRGEETDAVTLKIDNQSAIMLNTRYQYIRECIEEGRVKVEFIGTDGQLADILMKALGRDRFIELRSQIGFVEIQTPCKV

SEQ ID NO: 151565 - protein, 257 aa, Oryza sativa
  Clone ID: PAT_MRT4530_51698C.1.pep
MLPGARSLVVLRRRAGLALLRRGCGEGGTCGKGEAPANARRAAATLAGLGGRGPLGRWADPTGPPRGEAERAGGVWRAGTQTRSFLGCGDGDEGSVLSKVYEERRVMGYSPEQMFAVVAAVDLYEDFVPWCQRSRIIRRHENGSFDAELEIGFKFLVESYVSHVEMEKPKYIKTTASESGLFDHLINVWEFKPGPVPGTCDLYFLVDFKFQSPLYRQVASMFFKEVVSRLVSSLSDRCYRIYGPPIPVLENTYGQGR

SEQ ID NO: 151566 - protein, 118 aa, Oryza sativa
  Clone ID: PAT_MRT4530_51699C.1.pep
PKKRIQKKELTTRAKAKTFKTPNLNLSGVFFNWGPQTGGQKELTKTNLGRPTGLNFETQKGKPQNWGPVSQKKKVYDHWGKNWGETFFKSKICPQKKPTPGGGFLGVFLLTLPGGPPP

SEQ ID NO: 151567 - protein, 38 aa, Oryza sativa
  Clone ID: PAT_MRT4530_5169C.1.pep
AVSAPAGFPDHPHRGFETVTYMLEVGRVFYHSSHSVRR

SEQ ID NO: 151568 - protein, 318 aa, Oryza sativa
  Clone ID: PAT_MRT4530_516C.1.pep
MAAAGILPVSGGGGASSARPVSMAERARMAKIPQPEPGLKCPRCDSTNTKFCYFNNYSLTQPRHFCKACRRYWTRGGALRNVPVGGGFRRNKRGTKPSNSKKPAAAVAGGVMAPPHAQLQLPFGFDGGGGGGHGSIIGGGGGGGASRLGFPELSSLHAAAAVDYQLGGGGGGDGLGLERQRLPHFPFLARSNAAVHPPPLMSTAAGVSYPFGDVAAGGLGGDMPANAASVAGSAGLITQMASVKMDDIDNHPPPSAATTTASSPIEFLGLRGSLQFWGGGGGHRGGGDGAGGSAAPGGGGGGWSDLPAFDLSTSGNIL

SEQ ID NO: 151569 - protein, 47 aa, Oryza sativa
  unsure (1)..(47): unsure at all Xaa locations
  Clone ID: PAT_MRT4530_51700C.1.pep
GDEGTGARHKSQQARRRRRSTNRTIGXNIPPKLCPSALPFPLKTLQV

SEQ ID NO: 151570 - protein, 89 aa, Oryza sativa
  unsure (1)..(89): unsure at all Xaa locations
  Clone ID: PAT_MRT4530_51701C.1.pep
XLRVKKGNSDLDNSQCHYHIQDARRWMSSPSVISYRSINWKIRCTIADGWWAARRQVGWQRSAAASRVVAPGVGSARLWRGIHAFTDXS

SEQ ID NO: 151571 - protein, 130 aa, Oryza sativa
  unsure (1)..(130): unsure at all Xaa locations
  Clone ID: PAT_MRT4530_51702C.1.pep
VRVTDRAYLLSYDLWNIPIRYTFTYTDCSHVYRXNPSQIMENISTSQAISKVLLGIFLGGQDDPRYKRDPRGGXKASNSIANTPTIVYEAEXHGAKSPGDLVEAIDYDLTLVPTYPNTQLIWSTSITRRH

SEQ ID NO: 151572 - protein, 96 aa, Oryza sativa
  Clone ID: PAT_MRT4530_51703C.1.pep
MDLIRVVVVSMSNAHEQSAGMYGHLILSAARRMVLNHGAAPGYCASAPIKGPSMITLLTMEKVKKKRGKLQNVLREQKARLYIIRRCVVMLLCWSD

SEQ ID NO: 151573 - protein, 93 aa, Oryza sativa
  unsure (1)..(93): unsure at all Xaa locations
  Clone ID: PAT_MRT4530_51704C.1.pep
MSFPGRVRLYLTAFIGHRLPGPTYICLFCTLCPHSCAPEKNFPXVGHPSQITPNQARLTSEFFGDWLPEKKLQLIDMSILLILLSPRLGCHNP

SEQ ID NO: 151574 - protein, 513 aa, Oryza sativa
  unsure (1)..(513): unsure at all Xaa locations
  Clone ID: PAT_MRT4530_51705C.1.pep
PPSPWPPSRRPNQTPPHPNPRNPPPPRLHRRALTPPPPPLGRRWPPLLRPAAGKEPEPTATTASLPTPPPPPPLRLCLPSFASPRPPPPPPPPPPPPPPPRRPPPSRAPPTSSAPAPTPPPXPSNPTPSRPAAPRREAAASARPPSSGFAPYSPLISTSSRRTDPPAGAGAGEDDAVACPSCAEPFPSELAVSDHLDGCLAAAGGARPRAAAYLAGDPPASAVEVVKRLLGNLLSDPRNDKYRKVRLGNPRIKEALADREGGVDLLEAVGFRVADEGGELFALMDEVPGDARLGGIRQAVLLLERARPSTPPQTQADAKETCPNGVSEEQGIKKPVDRQIRVFFSVAASSVAENDLPDSFYSLSNEEIRNEAKMRRERLEQSRLLIPKSYKEKQALAARQKYKQALIRIQFPDGVILQGVFLPAEPISSLYEFVASSLKQPSLEFDLICPAGPRTRVIPPFPKPGEQARTLRDEDLVPSARLTFKPKETDSVVFTGLLDELLETSEPFTSASS

SEQ ID NO: 151575 - protein, 138 aa, Oryza sativa
  Clone ID: PAT_MRT4530_51706C.1.pep
FFFFFSEMMILYSRVLISSVAHDSMQHLITRVHVTNVDQQQPQEESWTVDQGPMLPHVMASASPCSSSICCCPSPSTKSTCCIALHPSGQLGVHSCTEAIMPCSCMPTIAASRGSPLAVHHEHGCGSYPCPTFASCHC

SEQ ID NO: 151576 - protein, 112 aa, Oryza sativa
  Clone ID: PAT_MRT4530_51707C.1.pep
MEGMMMIVAVSGAASSRSPMDAIIIAAIMPSSRRGNPKTQTKRTATTAVAAVTTIVVADALPRPTAVIPAVASDESGLPAVACDGSGLPAVAGDGSGLPAVAGDGSAPQPPP

SEQ ID NO: 151577 - protein, 73 aa, Oryza sativa
  Clone ID: PAT_MRT4530_51708C.1.pep
GILDESYRYVMPVDSSAELARRAISRATSRDGASGGCVSVTHVGPLGWRRLSAYNVGELHFKYYPVEPSPVDQ

SEQ ID NO: 151578 - protein, 93 aa, Oryza sativa
  Clone ID: PAT_MRT4530_51709C.1.pep
KPRFFSSKLYPGFQIRGAITEDPKDPSFYACRTGTIGSGPSAHSADERESEQVSSRIWISCLPRTTASPPNGLLSPLTRARPHRNLRFRKLSG

SEQ ID NO: 151579 - protein, 87 aa, Oryza sativa
  unsure (1)..(87): unsure at all Xaa locations
  Clone ID: PAT_MRT4530_5170C.1.pep
TRANQRLGGPRDVRRPPSLPRRARWSPPPPPTVRRALPHHRRVPSPPPPPDLAGXSARGALPSTGSXRRRRAGSATTATRTRRPPSI

SEQ ID NO: 151580 - protein, 60 aa, Oryza sativa
  Clone ID: PAT_MRT4530_51710C.1.pep
MGLKETMDMVDGGGEGGMGFEEGFDSQQWAAVNGEEGKREGEQGGEREFIRELDHPHSKF

SEQ ID NO: 151581 - protein, 111 aa, Oryza sativa
  unsure (1)..(111): unsure at all Xaa locations
  Clone ID: PAT_MRT4530_51711C.1.pep
MERSGAQDRPAGSVDGGDGRAAWRGSSAAAREWGPGGGTLYPHGAGRDRSGLGPGKRRKTXRPESPSRALRTLRLSRRGAGADGGGDWPVGHHGARAREATARGDDLGRFC

SEQ ID NO: 151582 - protein, 40 aa, Oryza sativa
  Clone ID: PAT_MRT4530_51712C.1.pep
LVNTRWAQHILTFLQDQSVKIDTRECNKFPVRKTRYYKLA

SEQ ID NO: 151583 - protein, 154 aa, Oryza sativa
  Clone ID: PAT_MRT4530_51713C.1.pep
IPATGRSPSPEHYRPSPRAIGLASMGSFLSPRAGGKLMPRRAIVIFTEAQFSLKTSGTPELLSLLITLRSERMGTRVHGTVDTVKHVGFRILRFGTRQCSVRGARAAKTKKNTNLNTPLKLLISPPGQHKNHKSNRPIALISRNTSSRHEVQNQ

SEQ ID NO: 151584 - protein, 75 aa, Oryza sativa
  Clone ID: PAT_MRT4530_51714C.1.pep
HASAHASEKRSSKSTSEVSSVSSICDMDTNRTVQAVFTGVEVKPCGKAGRGLRMIKHKSECYSLDKNSSTIECSK

SEQ ID NO: 151585 - protein, 967 aa, Oryza sativa
  unsure (1)..(967): unsure at all Xaa locations
  Clone ID: PAT_MRT4530_51715C.1.pep
MARNAADKGTSIDAQLRILAPKKLSEDDKLVEYDALLLDRFLDILQDLHGEDIRETVQECYELAAEYESKVDPKQLDAIGNVLTRLDPGDSIVMTKSFSHMLILANLAEEVQIAYRRRIKLKKGDFADENSATTESNFEETLKRLVGELKKSPHEVFDALKNQTIDLVLTAHPTQSVRRSLLQKHGRIRSCLTKLYAKDITPDEKQELDEALKREIQAAFRTDEIRRAPPTPQDEMRAGMSYFHETIWKGVPKFLRRVDTALKNIGINERVPYNAPLIQFSSWMGGDRDGNPRVTPEVTRDVCLLARMMAANLYYAQIEDLMFELSMWRCSDELRVKADQLHRCAKKNTTKHYIEFWKQVPPSEPYRVILSNVRDKLYNTRERARHLLASGFSEIPDEATFTDVEQFLEPLELCYRSLCACGDNSIADGSLLDFLRQVSTFGLSLVRLDIRQESDRHTDVMDAITQYLGIGSYREWSEEKRQEWLLSELNGKRPLFGPDLPQTDEIADALDTFHVIAELPYDSFGAYVISMATAPSDVLAVELLQRECHVKKPLRVVPLFEKLADLEAAPAALARLFSVDWYRNRIDGKQEVMIGYSDSGKDAGRFSAAWELYKAQEELIKVAKQFGVKLTMFHGRGGTVGRGGGPTHLAILSQPPDTIHGSLRVTVQGEVIEQSFGEEHLCFRTLQRFTSATLEHGMHPPISPKPEWRALMDEMAAVATKEYRSIVFQEARFVEYFRLATPELEYGRMNIGSRPSKRKPSGGIESLRAIPWIFAWTQTRFHLPVWLGFGAAFKHVLQKDIRNLQILQEMYNEWPFFRVTIDLVEMVFAKGDPGIAALYDKLLVSEDLWPFGARLRANYEETKQLLLQVAGHKDLLEGDPYLRQRLRIRDSYITALNVCQACTXLKRIRDPGFHVSPRAHLSKDIMDSGKPAAELVKLNTTSEYGPGLEDTLILTMKGIAAGMQNTG

SEQ ID NO: 151586 - protein, 556 aa, Oryza sativa
  Clone ID: PAT_MRT4530_51716C.1.pep
MCSYLLMRRGKAALWRPRHGEGETSRRGGDGDGEAADRLSALPDGVLHHVMSFLKAWEVVRTCVLSRRWRNLWASAPCVDLRIRYFRLDSEPPEEPRDFVNRLFRRREASAPVDTLRLQLSDPDNLFDNDDANAWIRTAIKRNARFIHLTGHRKEIGVLKHRALVSTHLKILKLSYVLIDDKILKQLSSGCKSLEELDLKDCVMTGHQISSASLKTLKMDRCKINVDLSITAPNLVFLNIVTPYIRVPSFKNLESLVTCSIILDDLFLGDDYQHISDEDDIDETTDDDDFGYQKNDKAGYRINYAKKGFVFGGNEDGYGYGSDIESDDNTYEYSEIANECGELQYGNNGDGHNSSKDGEYDNAETFGGQNVIHSLSNVRSLELLAGAGEVVLSRELKSCPIFINLKTLSLGEWCMDAEFDALVFLLQRSPNLERLFLEPQLISLFCKKNFNTRKALESGVKPTGRSFTCKDLQMVKIRCSKDDARVHMLAHLFRANGIPFDKIYVHRSGSSRLRSEKVMRDLAKQELEFWGSDEFWGSDYEYCGPDPEFGDSDLEF

SEQ ID NO: 151587 - protein, 220 aa, Oryza sativa
  Clone ID: PAT_MRT4530_51717C.1.pep
MASTGVKLIGECSTLSLSLSLSLAALMLLPGLTRPSSTPPLIFFSISGATATSRHRRQLHRGIYHGKQCHAADIPAVIARAWAAGVDRIIVTGGSLKESREVLEIAETDGELSCLDAGCFDYVMLGAFKEFEESGDPEGHFQALLALAKEGIAKGKLCQVNSNKVIVQQVLEVVAGCKGISDIEGLSKTLYHNTCRFFFPQDLDASADAQLESGAAIQNS

SEQ ID NO: 151588 - protein, 356 aa, Oryza sativa
  Clone ID: PAT_MRT4530_51718C.1.pep
MASTGVKLIGEGIYHGKQCHAADIPAVLARAWAAGVDRIIVRCFAAGHSPFRLLSCLVSTFLWLGFGVLNLLLSLVWSGRKVTGGSLKESREALEIAETDGRLFCTVGVHPTRCGVGFEESGDPEGHFQALLALAKEGIAKGKVVAVGECGLDYDRLHFCPSDVQKKYFKKQFELAEAVKLPMFLHMRAAGEDFCEIVSENLYRFPGGVTHSFTGTAEDRDKLLSFEKMFIGINGCSLKTSENLEVLQGIPAERMMIETDSPYCDIKNTHAGIKFVKSVWPSKKKEKYEPDSTVKGRNEPCLVRQVLEVVAGCKGIADIEGLSKTLYHNTCRLFFPQDLDASADAQLESGAFIQNS

SEQ ID NO: 151589 - protein, 134 aa, Oryza sativa
  Clone ID: PAT_MRT4530_51719C.1.pep
SLEQARQQLDQFLLQATPLQRHPDLSQSQLLDLSIQGTGLATSGITGIGLLVVILIIIGRRHILVGLKRWVRHRQRLVVTGIGLLAVIGIRIRFRLLVVRRRRWRWRGDEGGFLGGRPMRHKFLEDSSSTSSSH

SEQ ID NO: 151590 - protein, 158 aa, Oryza sativa
  Clone ID: PAT_MRT4530_5171C.1.pep
MTGGRRRKIKRKRKADRRQIYAAKGNIVIFTEAQVPLMSVIEKLCHDKANVFGTSWITGILDGSDETNFFETSSTEKDFNSGVGEKRARLSTTHCTQQVIPEEKMRPQQRLRGTADRRNDRNLRDKQSTQAKHAISLLKQETKPFLMDSIHFYEFNET

SEQ ID NO: 151591 - protein, 83 aa, Oryza sativa
  Clone ID: PAT_MRT4530_51720C.1.pep
MAPGTEVVVFVVNSERFKLYHHGAAVADPRGTLLGFLCSRTRFTSAKPHHCAAIGVGHPAASPPPPTSSSPLCQSGGDGGCPP

SEQ ID NO: 151592 - protein, 110 aa, Oryza sativa
  Clone ID: PAT_MRT4530_51721C.1.pep
FVFFFFFFFFFFFFFFFFNTQAETVFLLGELGVGFLGVFFHLPAYLSRGGDYHANTGRHTTGGFTLLFYSQTGGFSRVLYLTLGGQGTGGGAKLHTEGMGILAVRRGCPL

SEQ ID NO: 151593 - protein, 41 aa, Oryza sativa
  Clone ID: PAT_MRT4530_51722C.1.pep
MSKTVSMTISSKVGLWGTRYHGTHGLTARPWAKKHGVGREP

SEQ ID NO: 151594 - protein, 94 aa, Oryza sativa
  Clone ID: PAT_MRT4530_51723C.1.pep
MTVVTVGMVGNTLQQSLGSHLSRPEEPWIKWSCGGFGRTMGWADLAQFRQAASSFALIRRLVHFGPIHRVNSEFLAHSYISLIADIVRLIYRLS

SEQ ID NO: 151595 - protein, 51 aa, Oryza sativa
  Clone ID: PAT_MRT4530_51724C.1.pep
KTGVNELYYAQYMMMLQETNSRIVRYNINSTMVSHYILLYHKHPTLRGETR

SEQ ID NO: 151596 - protein, 212 aa, Oryza sativa
  unsure (1)..(212): unsure at all Xaa locations
  Clone ID: PAT_MRT4530_51725C.1.pep
ASSIIFKNNAPXAAPGAHGGQAVALRVFGSKVAMYNCTIDGGQDTLYDHKGLHYFKNCLIRGSVDFIFGFGRSLYADCTIESVTKEVAVVTAQQRSKNIAEAIDTGFSFLRCKISGIGQIYLGRAWGDSSRVVYSYTTMGKEVVPIGWDGWEVQKPEHSGIYYGEYKCSGPGALPSKRIGWSLVLSDIQAKPFTGSHFVYGDSWILPPPKSM

SEQ ID NO: 151597 - protein, 368 aa, Oryza sativa
  Clone ID: PAT_MRT4530_51726C.1.pep
MHSRRSSWGHRSGTSESMDSIAVQMGTEANWGSISSGHGGYRGIYITVPRGKSGNRAVTDEGDQEQAVGGLFLFSMDHLWASVFGILGNIVSFLVFLAPMPTFLRVYRKKSTEGFSSVPYVVALFSCTLWILYAMVKTNSSPLLTINAFGCVVEAAYIAVYLVYAPRPARLRALTSFLLLNVAAFSLVVVVTVAAVAQPHRVRVLGSICLAFSMAVFVAPMSVIMVVIKTKSAEFMPFSLSFFLTLSAVAWFFYGLFTNDLYVTLPNVGGFFFGCVQMALYFKYRKPNTAAGGVMILPTTAAAAAVDGAVAEPAAAAQQLAEELEMELAAAGAHAVAVLPASALPVLAELHKMEQEIGTPRKGATKTV

SEQ ID NO: 151598 - protein, 767 aa, Oryza sativa
  Clone ID: PAT_MRT4530_51727C.1.pep
MDVEKPTSKGHGFFSLFDWGKKSKKRLVSGNGSDSPAPRVSENFRESDGGTPSTRPNSFLEDAPSLKESSEHSCSSSVVDDEALVRRGPTVVARLMGLDSMPAASSSGSYTMPLTVQQSPQNSTIHDEFIGRSYVGSPHKMPGSPHKMPGSPIDRFRMEALPPRFAKRTLSVAQNKLSPMKNPNHISSRNAADIMEAASRIIGAGVEVISPYRVRDVGYANTVRVYSQREIAIVQQRPPRMNEALKKHDGLTSYRLPTGKPLDGSLKSSGNTSASVVSQSNGGAPVGPKVKASSRSSPDSRATNVQGREDISKISRKLATRDPERRMVERNGINQGKNNNQVGMASSSNVLVQNNRKQNAMVGTAGTPSENNTQGNRNVELRSTGHANRRQNSTAKSIPKPGRLPDGRIHSVKTRPSDKDIADRSQRRVRHNIVIDEQSPFSMNKKKISTDIVSFTFTAPVEKPLSVPNSSETSSAKFDSIDGDYLGLLLEQKLRELTSGVRSPYCKPAKDVRIYAPSSVLEDSQSACETSSIASTDYDRESVQSYKDGKGSFTQTDLASKSGQSSQSVKYDNDAMDQMEIERLHLSPLSTWDASVSTETGSSTESWRSANGTKVFSSTEGATTSNSACFSKFLEADAFSEYSDTASSITGKTLRINRRLLFECVDEILSVRWAYYFNAGYGSWCLGMAILKKLTAEEIYAEMTDLKVAEEWMVDELVYKEMSSPLGSWVDFKLESYESGIDITTELLGSLIDEMVADLLLVSDTSL

SEQ ID NO: 151599 - protein, 79 aa, Oryza sativa
  Clone ID: PAT_MRT4530_51728C.1.pep
SRASSQPLCSRVIYMLLRRSIVHQLSVLALPLQVPFCLYTALAGSFDYLLGQQRGWFVHRSSAPPPRVFAEIVHHWRIY

SEQ ID NO: 151600 - protein, 114 aa, Oryza sativa
  Clone ID: PAT_MRT4530_51729C.1.pep
AYEAKTGGALEGAPPRRRGGYGQDSSHLGKWQENFVSSQGRQGGGRFGYSGKVGGPGKGGGGSQRDRGSQGSRGGYGGGSRFQNGGRFPNQFGFMAKGGYGGARMVSLNRFGKG

SEQ ID NO: 151601 - protein, 62 aa, Oryza sativa
  Clone ID: PAT_MRT4530_5172C.1.pep
GRVGSFPVLSTVLIWPNNSAESCYVDELLSRSTAMDTLRLPACYLRKEECQGLCKARSDGSY

SEQ ID NO: 151602 - protein, 144 aa, Oryza sativa
  Clone ID: PAT_MRT4530_51730C.1.pep
TYLPLQYRRRIIAEDRSIDHITSSFNFSKLLALALVDVEAAASAVRLAPAGAGAVARRLALREPVVAGVPAVVEDPPPRVRCLLLLHHARHHVLDVSHPAAQHVHRQQGAAAADIHRRHQHQRRGDDGGGEEEHQLHTVCQYLG

SEQ ID NO: 151603 - protein, 177 aa, Oryza sativa
  Clone ID: PAT_MRT4530_51731C.1.pep
MPPQPRLHITTIFFFQMPPPPPLPGSAFSHAHRIRYLLRPVAVASAPQHALPSSPHHPINKLSLFLEVDGTLSSVLMSFELLASSWSCIVPPQLSDNLTNSMPSVQEISVHRVAKIEPTTPTTVANAVKTPAPPAGGGIDAAAAGYIAKMKRRWAAESAAAAAASSSSSTRATAKKR

SEQ ID NO: 151604 - protein, 875 aa, Oryza sativa
  Clone ID: PAT_MRT4530_51732C.1.pep
MERGGEMDPPITASLGAIHIVFGKLVRLLSEPGLRLHKEEMKALGVLKDGLQANYWMKEVRELCYDIDDFVDELFHAAANAKIQRALQFKASPLRKKLPLFKTSQLQEKLSRFNASQLQKKLSWRQKIVDEVSSFSSCLKELIMLYKRYDLGSLERRSGWESNGTMSLTLPLAEETSQRCYLGMDKDMDKLVGLLNDGQQECKVIAIIGLCGVGKTTLAEELYQKFGFQFQCCAFLRLSRKPDMKRVLGSLFSQVRQHDPPGTGTVEVDNLSHEIKSYLNDKRYFIVIDGVWSSYIWNTINQTLPKNFYSRILITTEIDHVAQRCCVDNRKYIFKKEPFNKVESDEFFSRVHEYLKEISSEIAQLFSGLPLMMAIVASILTRLPPSTEQWNVLISYGLIQPVETRFDNEVLSFRVHYMIIDSIRSKAVQHNFAIAIDNHQTDVRIADKIRRLSLRFGNANDVTTPIGLRWSQVRTLVFFGPLRCTPSIAEFRVLRVLILRLSADDDDVTYDLSEIAELLGLKYLYIDACHLNIRLPMQMRQLQYLAKLKIEARLSYVPSDIFYLPRLQQLILPSETTLPHFTEPMKSLHTLGCFDLSGSSTESIVDLGKMVNLQNLHMTCSSGQPANLKLLGSVLNKLKNMKSLILVFTGSLDDADSSIMEISSDDFSVSSPPVLLTSVLPALTSLSVYIQRAPEERISFGKGGFVALKYFKLKCTVPWLKVEVDAMPNLEKLKLRFNVGLSLQRVGLHGNNLINIEHLSRLKEIYAKVESEGSVDAGSALMTGVWNDPRNPTITIQLICGFYGEMTRLMTKDDIILEENPDSITEDEVRQKDEKKQVDDHRFQFFASLLWFHFLNLITRVIPIIMQLIGVVIRT

SEQ ID NO: 151605 - protein, 65 aa, Oryza sativa
  unsure (1)..(65): unsure at all Xaa locations
  Clone ID: PAT_MRT4530_51733C.1.pep
VICDGPPATPSTEPGTAAXFADSSLAESEAAATEAAASTEPPTPDAASTEPATPDARRRPPGESS

SEQ ID NO: 151606 - protein, 35 aa, Oryza sativa
  Clone ID: PAT_MRT4530_51734C.1.pep
DAFNESIRQIDHSVPTITMLLELSLGLRRAHCDSV

SEQ ID NO: 151607 - protein, 88 aa, Oryza sativa
  Clone ID: PAT_MRT4530_51735C.1.pep
KQSVEGPHFFPSKPTLTPFLAPLREKNPFSPPSPFIWGLNPSPPPGGKPQASKTIWGKSPGPPPPNFSPKFPPVFLISPKIYLPRNFS

SEQ ID NO: 151608 - protein, 147 aa, Oryza sativa
  unsure (1)..(147): unsure at all Xaa locations
  Clone ID: PAT_MRT4530_51736C.1.pep
SRSPKIQNHSKSSISIKKSDKLMNIDVWSCMDIEPFGHVWTLSTGDTRRLDIKGIGVRWYEDLRSTTSSKQKTRIILVQAPWXVIALIQLVWDYIMETTDYKGXAELDDTVEIVVELAVVGVLAVSFDALGPXPGAPLYTAGQLISK

SEQ ID NO: 151609 - protein, 107 aa, Oryza sativa
  unsure (1)..(107): unsure at all Xaa locations
  Clone ID: PAT_MRT4530_51737C.1.pep
PAANYPGVGGRAARASTAEAPWGGRVPGPAGALSGGGQEEKRPXGKRGGPGKGNQPGPPPPEGQAPRRKAGGPPRPEEEEQKKKKKNKQEKKKKKKKKKKKKKKKPK

SEQ ID NO: 151610 - protein, 27 aa, Oryza sativa
  Clone ID: PAT_MRT4530_51738C.1.pep
EKSCARKYPGLFHLLNPCIINNQVFPA

SEQ ID NO: 151611 - protein, 464 aa, Oryza sativa
  Clone ID: PAT_MRT4530_51739C.1.pep
MAHVMAASELVTATIKRPFQNDDDNSSNGNGNADGKPKARRREADPAAALAAARHEFGEHGGVNMSIEASATFTVMEPDTMRRLFSGELGPERGDLYIYSRHFNPTVLALGRQMAALEGTEAAYCTASGMSAISSVLMQLVGAGGHVVASRCLYGGTHALLSRFLPRASGVRATFVDADDEAAVRAAVRPGETRVVYVETMSNPTLAVADIPMLARVAHDAGAKLVVDNTFTPMVVSPARLGADVVVHSVSKFISGGADIIAGAICGPASLVNAMMDLQEGALMLLGPTMNAKVAFELSERLPHLPLRMQEHSRRAAEYASRMRRLGLRVAYPGLPDHPHHARLLAIANPGYGAGGMLCVDMGTEDRANRLMHHLQNTTRFGLMAVSLGYYETLMSCSGSSTSSEMPPEDRARAGISPGLVRMSVGYNGTLEQRWAQFERALSLMQQQQQQHPDRDAAAKYCKV

SEQ ID NO: 151612 - protein, 180 aa, Oryza sativa
  Clone ID: PAT_MRT4530_5173C.1.pep
MRRFPPAGAILLLRQGTRRGARMRRLGLASGGVAAWTCGCGGGARSSRLPSSEFCRGNLTKITNKKRLPTKRSEKTPYHFRYHFRKRLPFPFPIPTITDTDNYQYRLKRLVQTGNGSQNSRKFPYRFHPYNYCAHRYPIRNMYSTTSKAESDATLSRQAQLCPSIASCCYYYYTIVANQK

SEQ ID NO: 151613 - protein, 166 aa, Oryza sativa
  unsure (1)..(166): unsure at all Xaa locations
  Clone ID: PAT_MRT4530_51740C.1.pep
PRHHPQSPPRAXAAAHKHPLXHAIAPTXIRARSHTPXRXRYPTPPAXSSPPIPAQTFTRAXARLRISHHRHPPPVAPRTXHPHTRRPHQLHHSCXXMLLNAAYQDRRRSPXSHNLITHEXADRSCGESLVRRSXSLHXVXGAHHRSHPGASSHSQVRXXNGWKRPV

SEQ ID NO: 151614 - protein, 121 aa, Oryza sativa
  unsure (1)..(121): unsure at all Xaa locations
  Clone ID: PAT_MRT4530_51741C.1.pep
AKFSPNGKFVLPATLDSKLRLWNFSAGKFLKTYTGHVNTXYCIPAAFSITNGKYIVSGSEDKCVYIWDLQSRKILQKLEGHTDTVIAVSCHPNENMIASGGLDGDKTVKVWVQKEEDQMEV

SEQ ID NO: 151615 - protein, 63 aa, Oryza sativa
  unsure (1)..(63): unsure at all Xaa locations
  Clone ID: PAT_MRT4530_51742C.1.pep
DQPVTLALKVLSMSMDSTNFTSYKLDLADFFLQPVTGEVQYQVCSPXAIGKLLPKAGLCHPAP

SEQ ID NO: 151616 - protein, 132 aa, Oryza sativa
  Clone ID: PAT_MRT4530_51743C.1.pep
MDDGDTHSKPRTCAMTQWSAKGDGGCTTPELKEEQGEAGVHPHAVCQVRARDGDEDEGGKIEREVAARGFLATRMVWEVRVVEAEAEKVARKVEAEAKALRRNRGSHAAAALAQRGLRRNGVLALQDTIDAL

SEQ ID NO: 151617 - protein, 582 aa, Oryza sativa
  Clone ID: PAT_MRT4530_51744C.1.pep
MVTTTNINDYINNNKDSTEDEVTFAQVEMVYDNEQTGYTQMLQLPRDLVILFKILHPEDQDNIHIIWYQSFRCHGRMYIHLPFYGSADPEEYFGWVNQMEIELEAQCFCEEKKLQRATLELKHVKQGTKSVQAYYDELSSCLCRANAIDDLDAIEYFKRGLSPKIATAIEGRYARSVRGFLIYAIKEEKKWEYYCKKKRSISPSKKMKVDDSTPTPNCLRPLENTIVDGGTFAPGVQVALEEVAVDDHCSIDAPCYADLEMQQNPSENESHIAKLSERDKKSVLSDSTKYEVESIHNESERNTPHKKRGLECKACEDVFDSNKLISTFSVVSPNVQVCKEKDEEIVVNPMKCQEDKRIEKIDLMENYPTTALSINHDDKGGKNSETTPTFDTSPQELKGNKDESYFCKHEELVSEFVDTLDQRDILIANKFDLVELITHDEVFTKILPVEILCYIILDKHVEIHDMLEKVSEIASLKSLNSIHVCKYTFNLIGGYAENKFYMCAICITCDKLADLRLKLVNNHAFEPSYAQPSHQPVAYTPGTPFDNSINALSHTLELEHIYLILTISNVAFTVIQVEYQLT

SEQ ID NO: 151618 - protein, 60 aa, Oryza sativa
  Clone ID: PAT_MRT4530_51745C.1.pep
YVIESLVSSGEKKYSPRWATDSELVVNLFAMDIRLAGLVFVITSNWRFNMLCLVMLPGQS

SEQ ID NO: 151619 - protein, 105 aa, Oryza sativa
  Clone ID: PAT_MRT4530_51746C.1.pep
MAESKKRGIRDWIGDSRRKRNHKPGRLFFLLSLSSQPPRLHLAAVKPTEADRASLRDVAAAARWREMNSGKEKNSKHLPVGFRKIMGRRWIIYGLKLRSSTCWKE

SEQ ID NO: 151620 - protein, 719 aa, Oryza sativa
  Clone ID: PAT_MRT4530_51747C.1.pep
MEINSSGEEAVVKVRKPYTITKQRERWTEAEHNRFLEALKLYGRAWQRIEEHVGTKTAVQIRSHAQKFFTKLEKEAINNGTSPGQAHDIDIPPPRPKRKPNSPYPRKSCLSSETSTREVQNDKATISNMTNNSTAQMAGDAALEKLQRKEISEKGSCSEVLNLFREVPSASFSSVNKSSSNHGASRGLEPTKTEVKDVVILERDSISNGAGKDAKDINDQEMERLNGIHISSKPDHSHENCLDTSSQQFKPKSNSVETTYVDWSAAKASHYQMDRNGVTGFQATGTEGSHPDQTSDQMGGASGTMNQCIHPTLPVDPKFDGNAAAQPFPHNYAAFAPMMQCHCNQDAYRSFANMSSTFSSMLVSTLLSNPAIHAAARLAASYWPTVDGNTPDPNQENLSESAQGSHAGSPPNMASIVAATVAAASAWWATQGLLPLFPPPIAFPFVPAPSAPFSTADVQRAQEKDIDCPMDNAQKELQETRKQDNSEAMKVIVSSETDESGKGEVSLHTELKISPADKADTKPAAGAETSDVFGNKKKQDRSSCGSNTPSSSDIEADNAPENQEKANDKAKQASCSNSSAGDNNHRRFRSSASTSDSWKEVSEEGRLAFDALFSRERLPQSFSPPQVEGSKEISKEEEDEVTTVTVDLNKNAAIIDQELDTADEPRASFPNELSNLKLKSRRTGFKPYKRCSVEAKENRVPASDEVGTKRIRLESEAST

SEQ ID NO: 151621 - protein, 783 aa, Oryza sativa
  Clone ID: PAT_MRT4530_51748C.1.pep
MEINSSGEEAVVKVRKPYTITKQRERWTEAEHNRFLEALKLYGRAWQRIEGLIARSMNGEEHKQGRHNPLEKEAINNGTSPGQAHDIDIPPPRPKRKPNSPYPRKSCLSSETSTREVQNDKATISNMTNNSTAQMAGDAALEKLTYIQKLQRKEISEKGSCSEVLNLFREVPSASFSSVNKSSSNHGASRGLEPTKTEVKDVVILERDSISNGAGKDAKDINDQEMERLNGIHISSKPDHSHENCLDTSSQQFKPKSNSVETTYVDWSAAKASHYQMDRNGVTGFQATGTEGSHPDQTSDQMGGASGTMNQCIHPTLPVDPKFDGNAAAQPFPHNYAAFAPMMQCHCNQDAYRSFANMSSTFSSMLVSTLLSNPAIHAAARLAASYWPTVDGNTPDPNQENLSESAQGSHAGSPPNMASIVTATVAAASAWWATQGLLPLFPPPIAFPFVPAPSAPFSTADVQRAQEKDIDCPMDNAQKELQETRKQDNFEAMKVIVSSETDESGKGEVSLHTELKISPADKADTKPAAGAETSDVFGNKKKQDRSSCGSNTPSSSDIEADNAPENQEKANDKAKQASCSNSSAGDNNHRRFRSSASTSDSWKEVSEEVVVYQHSAYSHLSYSLNIHHCFSNSHFCCQGRLAFDALFSRERLPQSFSPPQVEGSKEISKEEEDEVTTVTVDLNKNAAIIDQELDTADEPRASFPNELSNLKLKSRRTGFKPYKRCSVEAKENRVPASDEGETGCQSGKNVFNVPTCKHGQAGAVYNFFSATQQGKMRDYERLM

SEQ ID NO: 151622 - protein, 262 aa, Oryza sativa
  Clone ID: PAT_MRT4530_51749C.1.pep
MEAHQDNHPSQRQPRPLSYGSSRPLLATKFSSRGEISQLFADVIYQDAVVVTVLGAGNPNTTKISAMIGFVCDCQIDDFALLPFRHKIVPNPLRQRVILALEGIPPELWNKQAMKELLDGSCMVEELYEEHHIQNLSIFRLSAWTTDRNLIPKLMDWNIEEVQGEEQSSDQGWKRNADLFVILIHIEKLFDYTDEDSDNEIDGEVLKQYEKDNRRLPVIKTFQWVSRQTDTDSGPVEGGSPARPPRRLPLEFRRRHPYHPAP

SEQ ID NO: 151623 - protein, 99 aa, Oryza sativa
  Clone ID: PAT_MRT4530_5174C.1.pep
PRVGGSFLETGWAQSFLPSFPSLVPGAPFAPSFFFKGPFSIWAPFWDPPLPLNRSYLPFLLGKLDLFFGGQNFFPYVPPSLGLFFEVVPPCKTKFRFRL

SEQ ID NO: 151624 - protein, 184 aa, Oryza sativa
  unsure (1)..(184): unsure at all Xaa locations
  Clone ID: PAT_MRT4530_51750C.1.pep
KAPTATWCTVHLAVHKHDYSFAGFANRSGHWHVFPGXLPFRNTYRDLIGGLENIPGLPLRRAASLRAIGALSSYDAGATGEEAMRRGVATLSMVLTQALRLRPVGETVSSRWESGEARVAAEHLPYIEHWYTMSFEVLWWRRTGRWDSPFTELLRRRAGEALAVVRVIANKSFVQLLRAHSHGA

SEQ ID NO: 151625 - protein, 711 aa, Oryza sativa
  Clone ID: PAT_MRT4530_51751C.1.pep
MSYASGGGGGGELATKRSAFHIDYGGGVSLRRLAQPEALARGMITQGSAQLRTLGRSLRTGAAMAVVFQEDLKNTSRKIFDPQDRLLVRLNRSFVVSCIVSIAVDPVFFYAPQVTANGGNLCVGISRDLAISASVVRTVVDLFFAARIVLQFRTAYIAPSSRVFGRGELVIDTAQIAARYFRRFFAADLLSVLPLPQIVIWKFLHRSKGAAVLSTKDALLIIVFLQYIPRVVRIYPLSSELKRTSGAFAESAYAGAAYYLLWYMLASHIVGASWYLLSIERVSDCWKKACNEFPGCNKIYMYCGNDHQKGFLEWRTITRQYINETCEPRDGVMPFNYGIYTPAVRSDVIKSNDFTSKLLYCLWWGLANLSTLGQGLQTSIYTGEALFSIFLATFGLILMAMLIGNIQTYLQSMTVRLEEMRVKRRDSEQWMHHRLLPQELRERVRRYDAYKWVNTRGVDEEVLVANLPKDLRRDIKRHLCLGLVRRVPLFANMDERLLDAICERLRPALYTERTFIIREGDPVDQMLFIIRGCLESITTDGGRSGFFNRSLLEESDFCGEELLTWALDPKAGLSLPSSTRTVRALSEVEAFALHSDELKFVAGQFRRMHSKQVQHTFRFYSQQWRTWAATYIQAAWRRHLKRRAAELRRREEEEEEAAAIRSSTGLKTTMLVSRFAANAMRGVHRQRSRRADEVLMMPMPKPSEPDFGADY

SEQ ID NO: 151626 - protein, 72 aa, Oryza sativa
  Clone ID: PAT_MRT4530_51752C.1.pep
VWVSWLALAVGVLALEVVVKCLFSFWSAPKLLAVVKLTSLVLLLYGSLASPAVKRHRRCGFQVKARSLTFSL

SEQ ID NO: 151627 - protein, 102 aa, Oryza sativa
  Clone ID: PAT_MRT4530_51753C.1.pep
MAAELTAAQLRAYDGSDPSKPIYVSVRGKVYDVTSGRGFYGPGGAYAVFAGREASRALGKMSKDDADVSGDLSGLSDKELGVLADWETKFQAKYPVVARLTE

SEQ ID NO: 151628 - protein, 479 aa, Oryza sativa
  Clone ID: PAT_MRT4530_51754C.1.pep
MAIGGGGGGGSWSIHGRPDVTSRYEVLGRAGSGAYADVYRGRRRSDGAPVALKEVHDAVSARREADALLAAAPSRHVVALLDHFPGGDHDDDVLVLEWLPLDLSAVVRAAAAARPSALPAAQRKRWMLQVLEGVAACHSAGVVHRDLKPANLLISEDGVLKVADLGQARILQETGTYQGMHPYEQSSGVEPWVSQQRAVLHGVKENHPSHDSETQTGQEPERLTAADYLHEMDQLRAKSTHGDVDKMSLQDGNASCLATCSTADIDDDPFRASYSYDAEEGMLEEESGAFTSCVGTRWFRAPELLYGSTNYGQEVDLWSLGCILAELFNLEPIFPGTSDIDQIGRIISVLGNITEETFPGCSNLPDYNKIFFNKVEKPIGLEACLPDRSASEVSIIKRLLCYDPTKRASAADLLNDPYFAEEPLPVPIEGLQVPESKDEDDDSTEEWANFRGGDSDSDFDEFGSMDVTKTDKGFSIRFS

SEQ ID NO: 151629 - protein, 54 aa, Oryza sativa
  Clone ID: PAT_MRT4530_51755C.1.pep
NENHICMSARSLSGGVSFAMTKKGLYWSKNVNINWQGIKKVHLNIRAWTRHCCS

SEQ ID NO: 151630 - protein, 135 aa, Oryza sativa
  unsure (1)..(135): unsure at all Xaa locations
  Clone ID: PAT_MRT4530_51756C.1.pep
GPPAGGQFPFFKKKNRGPPSPRGRFSFLVALVFFFFFPAGFLCGNPTGPPPFLLVGSLLFSLPPRYLFFLGLGLVVFFAGENFFAGASAPPFTSTLFNSCSSKKKFFVNVSGSRSWVHQSLRXKKKKKKKKKKKK

SEQ ID NO: 151631 - protein, 193 aa, Oryza sativa
  Clone ID: PAT_MRT4530_51757C.1.pep
MLIGLPRFRPRHRHLLMIATTSTLQSKLPMTKTTVSSHRRGGAPRRGRCLAGKNGRHAVTTTQLLLDHRRCPALVVVVPRTSTLLPPSMHHKELQNVQAVGRSPLAARMLARPVARIPTPSEDAPDPVAHRGRAAVAVDANLNSQEHSLNHRPRGPLLRLGRPPNAHAAALPTALEQSPQRSGGSNPEAPHPA

SEQ ID NO: 151632 - protein, 190 aa, Oryza sativa
  Clone ID: PAT_MRT4530_51758C.1.pep
LVTTTPFLLQFPGIVCHAKSRCRPSLLHCHQARQRPPAGARSFPFFHPDGTITRPFVPDASPCSGSPMRCRALAPRHTAVLWLPDAPPCSGSVVLWLCDAAAGDPWIAVPARKVAGAGAVAAGCPARSSPPHSGGLRSLPATIRPPPLLPRPTPVAATPPRRSAGEKRERDGIKRRDSEDDRWGPRGPHH

SEQ ID NO: 151633 - protein, 102 aa, Oryza sativa
  Clone ID: PAT_MRT4530_51759C.1.pep
MAGVQPNLAMEDQRTCSLRRLSSEEEPPPPLAASTTQAPPPRRCCPLRVPVEAVEKPRGRQGGAHQRRLRRSRLHCSSPLAASATHHSYSFAPPLVVPSLVD

SEQ ID NO: 151634 - protein, 530 aa, Oryza sativa
  Clone ID: PAT_MRT4530_5175C.1.pep
VYRPLLNISGEFTAEDLEEALITPNSTLDDVHMPLLKSIPPVTRMAMGRGTWVTVLCRKLRDWWHWVAEGDIPIVASHGTEIEAYKVLEPATRLIILKAICDIRVEQEDIRNFIDSSLKHGYDLSTFRKERIGGDAYGISYWYEDDPILGHRLYREIRRVEQLKKEPGKRSRGKGGSIILPVVSYQWETVASNFDEFDDVAEKLFSSRNRTEANLGKKLKIEYLPDIEKIHKKKERLLKKQQREALLIDSFLAPDGFTTGRSLRDRKPVTYTFDEYDRSISEAIKITKKGENSAEPAAPANRRILTPRPEASSNGKVNGLSPTTNEYDGNSSKSDDYRDSDGEEESETLDRSNRRRRRSQRYTRDFVEAVSDIDPNFDSDDEIMGEAVYDEEYLRTRKQQKTSNTEGGKEGKSDASDPDAGFDAENDTELSTSSQEQEEDEDDGPEEQKDNSDDNKMDEDHVMVENKEEQEEQPQPPPLPPQQPVEKMEAPSREIETVGRTFLDLNELAPGGGFDDGPSLTMKDEDMDNS

SEQ ID NO: 151635 - protein, 56 aa, Oryza sativa
  Clone ID: PAT_MRT4530_51760C.1.pep
KVSLHLQVSIFKFNYHLKQHCHQRITLVLFKYFPPFSKSLRSEFTTTALPMIEFGP

SEQ ID NO: 151636 - protein, 60 aa, Oryza sativa
  Clone ID: PAT_MRT4530_51761C.1.pep
IGLTYVFTECDVSNKRKADQPQQHMTAFQDTISYMYPEPPACIFHSSVTGIATHGMLRRM

SEQ ID NO: 151637 - protein, 135 aa, Oryza sativa
  Clone ID: PAT_MRT4530_51762C.1.pep
SSPSTSGSLRLECSHSAETTGSVLVSAVVPSEAADLQVELQRAVIPNEPTPASAAGTQALHRNWAPSWPARAHQALPPLGRQEDSMWCERAPRRETALAAADRKSSVTPRCPVLGGSRRFANGLVAQARGRRAIT

SEQ ID NO: 151638 - protein, 406 aa, Oryza sativa
  Clone ID: PAT_MRT4530_51763C.1.pep
MKLLQRVNPTAAASLTALAVVVLLTASASRPSFLRRFEPSIASLPRAARRAAPADCDIFRGEWVPATAADDGAAPYYTNATCGEIQEHQNCMKYGRPDLGFLRWRWRPERCELPRFDAAAFLDLLRGKSMAFVGDSLSRNHMQSLLCLLSKVENPREVPKTADPEFRAVRYESHNFTVAVFRSPYLVTANQSDPAGGMWDLYLDEPDAAWATAVAGFDYVVVSTGIWFNRPTMFYERGRLVGCYSCRLPGVPDLTLRYSLPLAFRTALRALTAASVFNGTVIVRTLSPTSHFEGGEWDKGGDCRRTRPTAASEARMSGLDVDFHAAQVEEFRRAEAAAAASGSAVRMLLMDATAAMVARADGHPSRYGHWAHENVTLYNDCVHWCLPGPVDVWNEMLLQMLLRHQS

SEQ ID NO: 151639 - protein, 505 aa, Oryza sativa
  Clone ID: PAT_MRT4530_51764C.1.pep
MVISVATPRRSIRDAVLGGVLGAGGRQLYQPLRCAFYDGAAGGGLTAALSEDGAEGGVPLPCGRKTAAAKNVLILMSDTGGGHRASAEALRDAFRLEFGDAYQVFVRDLGKEYGGWPLNDMERSYKFMIRHVRLWKVAFHGTSPRWVHGMYLAALAYFYAKYARTQPSQLDRPIQITFCFRLCSSDRFAKTDMVDFSEVVAGIMRYNPDIIISVHPLMQHIPLWVLKWQSLHPKVPFVTVITDLNTCHPTWFHHGVTRCYCPSAEVAKRALLRGLEPSQIRVYGLPIRPSFCRAVLDKDELRKELDMDPDLPAVLLMGGGEGMGPVEETARALSDELYDRRRRRPVGQIVVICGRNQVLRSTLQSSRWNVPVKIRGFEKQMEKWMGACDCIITKAGPGTIAEALIRGLPIILNDFIPGQEVGNVPYVVDNGAGVFSKDPREAARQVARWFTTHTNELRRYSLNALKLAQPEAVFDIVKDIHKLQQQPATVTRIPYSLTSSFSYSI

SEQ ID NO: 151640 - protein, 102 aa, Oryza sativa
  unsure (1)..(102): unsure at all Xaa locations
  Clone ID: PAT_MRT4530_51765C.1.pep
IHPSKGGRDGADRXLRRPLSLPDSPRHERGLPAAFXEVGVKPEVWCAWLERVMLRVLSRPLSDMDLYVNIVVCVPWPVLDKSFNAHSAWNSIWEFLGVTSWY

SEQ ID NO: 151641 - protein, 347 aa, Oryza sativa
  unsure (1)..(347): unsure at all Xaa locations
  Clone ID: PAT_MRT4530_51766C.1.pep
PFKDIAAVAVARRPVAEEYGDVVAALPSRLYPPQQRWREYQGAWFREXTWVPGIVALQRRFEPRAGDVLLASLPKCGTTWLKALAFATAARGVYPPAAAGGDGRHPLLRLNPHECVPFLEGIYLDEEEAKLDAAPTPRLMSTHASYPNLPASITEDDRCKIIYICRQPKDMAISLWHFMNCSKAKTSSLSDDQWESITMSLSDVWESIREGAYLGGPIWEHILGYWNTSKAKPDKVLFLKYEEVLRDPTKNIEKITEFIGSQPFSDAEKEAGIVESIIELCSFEKMKASGANSTGSLHMMANEYPHESFFRKGVIGDWVNHVTPEMADSLDKFLSAKFYGSGFTFAE

SEQ ID NO: 151642 - protein, 58 aa, Oryza sativa
  Clone ID: PAT_MRT4530_51767C.1.pep
MMDLKTLFTRTLENNPFGPVIMLELIACVLKTIGLYLRLSGYIHVRTIDVIKLSRHIP

SEQ ID NO: 151643 - protein, 75 aa, Oryza sativa
  Clone ID: PAT_MRT4530_51768C.1.pep
STKPGVLVYSSQKDHKMSRYTHHTCTKKESKFQYNFQHLLCSGILLIFYPTHWICYCYKSTFLMFLPLTKQTNFL

SEQ ID NO: 151644 - protein, 66 aa, Oryza sativa
  unsure (1)..(66): unsure at all Xaa locations
  Clone ID: PAT_MRT4530_51769C.1.pep
IAXGGSLQKLFPQGILSKNGGPQKVPSGKAPKPKLFTAIPTRCVRNHHHSPPNSPEKPRLSILRNP

SEQ ID NO: 151645 - protein, 149 aa, Oryza sativa
  unsure (1)..(149): unsure at all Xaa locations
  Clone ID: PAT_MRT4530_5176C.1.pep
MEQGSETLDERLPLPCANGCGFSGSANTRGLCSKCYRDSLRQTVMSQAPSSSSSTELHGAVPXPEGIPVDEGAMPPPPPPRAKTKSRCAACGRRVGLMGFECRCGAVFCGAHXRYSDRHDCGYDYRGXAGRDAIARANPVVSADKVDKL

SEQ ID NO: 151646 - protein, 84 aa, Oryza sativa
  unsure (1)..(84): unsure at all Xaa locations
  Clone ID: PAT_MRT4530_51770C.1.pep
YLXSTXVXSHVQCNVHLGRDKTDQRYQLTGKVWNLQWVTTYQYHPRGIGGHRNRVHYAQYKYYNRTXGXTTTGTPFPQSANGTP

SEQ ID NO: 151647 - protein, 88 aa, Oryza sativa
  Clone ID: PAT_MRT4530_51771C.1.pep
PGFWNRHLGGFGEEVQYQPMLFTLRAETPDLVACITYPTLPFAYMHWSHKGAGAKREMICLWCHVVFWVMKTCSHLEQFHCTTIDQDL

SEQ ID NO: 151648 - protein, 98 aa, Oryza sativa
  Clone ID: PAT_MRT4530_51772C.1.pep
LNFTWLQLSKAFQSMCSQSGLDLVEHLNHFFHGWPVLRALLRATPCHIQIRYHFILVSLSPFPLDPHLTVQDLQCLALVYLIPSPFQHLYLFPFHVDL

SEQ ID NO: 151649 - protein, 162 aa, Oryza sativa
  Clone ID: PAT_MRT4530_51773C.1.pep
REQPWPEEQVKVVELSAKAQDFPVQLTKLEQQIPRSPSRSTAQGADRNKIKHRNGRSPNQIDSIRLHTSLLSFTVPKTHPIPAAQKERQSHRSEREREREREREVSTGPWGRGGGDRGGIWRRRLRSPSRSASRARRRGWFALRWGLVDGGRRGERAKLLVK

SEQ ID NO: 151650 - protein, 155 aa, Oryza sativa
  Clone ID: PAT_MRT4530_51774C.1.pep
ASVVETLGYPREKEIGKELTGVGEERLTGASSIKLQVVIERSRVASGGGGELGRSAVEEEVEHTVRANRRIIFLDPRCLHSSPSPSSAPLYHPQLAGFAPASAVLNSLLPVSDGGGDYGGYGGCTSRWPSSKHIGRLYTATRALHRLPPPLKLEL

SEQ ID NO: 151651 - protein, 73 aa, Oryza sativa
  unsure (1)..(73): unsure at all Xaa locations
  Clone ID: PAT_MRT4530_51775C.1.pep
MGGFNSKIGNGVFGYKKLKGKKLWGGFKPGFFQFFKPXXKKKKKKKKKKKKKKKKKKKKKKKKKKKKKKKKKK

SEQ ID NO: 151652 - protein, 66 aa, Oryza sativa
  Clone ID: PAT_MRT4530_51776C.1.pep
ECLTLNTLCTQLRCSDGNINVCLPLDQDVIKGVHNSLLAIRTYIEGKIPSTVKFNVREPCSRCHGW

SEQ ID NO: 151653 - protein, 595 aa, Oryza sativa
  Clone ID: PAT_MRT4530_51777C.1.pep
MLLRQVNQKSWNLLKQHSRPVCLHFSSDSSANSTANIDLDAEAICMNPLKPYSKCWFYVPPWINLPPINKDNDIKKLISSNPSTVMKAYETSKLEMLFEKKVRSFLVSRCILACESINGPDIKKLHFMNKSIIGHFPVYVTSLSLMKCLIKHREEYWIAILQSLAAEKVMVLPDWKQELTPIEVSFFDHGLQLPSKSETSLDLITCELESDASYYKVPDSEATNPDVAGGQEAAITTTEGSASAEVGMATIASIIWNNRAILEGRITCGLRCEDSEHAEAIGILSGLQLARKLKIKKIDVVTDNMEIYEVLIGRKDVFQHKHRDVLLMAIEVAKEFDVCRFRWEPRELLCLVNEMANATREDYRAKTLSLRRIWEGKVAYCLWSLPVIRINQSTKKIALKLEKGWAGEVNMKLVQSKGYHVNVREQMLKIDALEGLLDSLDPPLLIVLVGSEEAASKVSLELNWRFRSVLLRGSGQVSGSISNANGDCSPIPEGTALVLNSETNIPPFSAQKVLLVVYDTPSSELQFSKDQDTTGVITVRIVAPHEEDSLPDTSTEVNPFVLGFFNSGTYFLRLNLHFGSLLNVIFVYPTCKLFT

SEQ ID NO: 151654 - protein, 46 aa, Oryza sativa
  Clone ID: PAT_MRT4530_51778C.1.pep
RVRYPFLRLSSFLQLQTSTSWFSICTLFKLSNDVSFTKKKFYIEAV

SEQ ID NO: 151655 - protein, 78 aa, Oryza sativa
  Clone ID: PAT_MRT4530_51779C.1.pep
SVVVLSFIIACMIIANTTYDRQFDVPLCNIQLLSFSLHSQENAAVWSAASTRYTCFPFDFVLANHRVYLVHAKIKSLI

SEQ ID NO: 151656 - protein, 746 aa, Oryza sativa
  Clone ID: PAT_MRT4530_5177C.1.pep
MAASPSSSSSPPASPSHPNPSPPPHADPRSAPPMPSSADADAPSSPPPPQQEAAAEGEEEEEKKQQREEEEEAPAPAPAPAPEPAPRKARLPRACNSKPKPPPPPPPERPRRRAAAGGGAGGAEESPQCRVVTPLVSEPEAPAEMPRWRLRCMWELASVLNFLHVYRPLLNISGEFTAEDLEEALITPNSTLDDVHMPLLKSIPPVTRMAMGRGTWVTVLCRKLRDWWHWVAEGDIPIVASHGTEIEAYKVLEPATRLIILKAICDIRVEQEDIRNFIDSSLKHGYDLSTFRKERIGGDAYGISYWYEDDPILGHRLYREIRRVEQLKKEPGKRSRGKGGSIILPVVSYQWETVASNFDEFDDVAEKLFSSRNRTEANLGKKLKIEYLPDIEKIHKKKERLLKKQQREALLIDSFLAPDGFTTGRSLRDRKPVTYTFDEYDRSISEAIKITKKGENSAEPAAPANRRILTPRPEASSNGKVNGLSPTTNEYDGNSSKSDDYRDSDGEEESETLDRSNRRRRRSQRYTRDFVEAVSDIDPNFDSDDEIMGEAVYDEEYLRTRKQQKTSSASEEDEEFRLEEDDDEEEEEYSLSTSEDLEEPQQRKKLQTRGRRGAKLRSVDEIQTGLRRSKRSSRQRINYQQYDYSDTDTEGGKEGKSDASDPDAGFDAENDTELSTSSQEQEEDEDDGPEEQKDNSDDNKMDEDHVMVENKEEQEEQPQPPPLPPQQPVEKMEAPSREIETVGRSF

SEQ ID NO: 151657 - protein, 154 aa, Oryza sativa
  unsure (1)..(154): unsure at all Xaa locations
  Clone ID: PAT_MRT4530_51780C.1.pep
KKGLPPLCQKPGPPLPPNQWPAINFLSFSFPPTPPKRIPPHXTPREPPXLGWGGSPPPPPPFFPGPPDPLPLKTHCPWLNPPWGNPRKRTPSPQGGPPKNKDGPXTPRNPPPFFGPPFHPERGGGKKPPAPGKPPRGTPAFPGGGHPDPGPGPE

SEQ ID NO: 151658 - protein, 69 aa, Oryza sativa
  Clone ID: PAT_MRT4530_51781C.1.pep
HMIIAGAGIDSKEGRAPKSDKRLTPDVHYQERYICTAEDATEPLCYDLVNVLGTQLFCISGERHVTISH

SEQ ID NO: 151659 - protein, 122 aa, Oryza sativa
  Clone ID: PAT_MRT4530_51782C.1.pep
MDILYQCKEFLKIQKFRRTASYAGFYCFTALMTYAYTSNTTRAGISRGDQFYASYPAGTELLTDTAKLYKAALGNCFEIDDWGPIEFSIMAKHFDRQGKPPYAYHAQYMAHLLSHGQLDGSG

SEQ ID NO: 151660 - protein, 815 aa, Oryza sativa
  Clone ID: PAT_MRT4530_51783C.1.pep
MVATFLLPLLLSTLLPAAVPLPPRPPVRCGGSGGAGGDGAGCVLSNAYGAWSSDRADCPVSAVAYPASEADVVAVVADASAKNMPVKVVSGFAHTIPKLACPGNGSSGAASSLLISTARYDGVAVDAAARTVTADAGAPLRAVIDAAEASGLSLTAAPYWEGVSVGGLVSTGSHGSSWWGRGGAVHDHVVALRLVVPAGAADGWAKVVALRRGDALFNAALVSLGLLGVISKVTLALEPRFKRSISYEYRDDSTFQDDFARHAANHEFADITWYPSQHKAVYRIDDRMPLNATGDGVNDFIGFQSTLIAVSSGIRALETALEASRNVKGKCKMAAAEIAAKRLVGNGLRGAGGRLFTGYPVVGFQGRMQTSGSCARSPPTDTLSACPWDPRYKGLFFYESTAMFSPAARFRDFVLDVKRLRDVDPDSMCGVDAYNGLLVRFVKASEAYLGQPEDTVVVDFNYYRASDGSSPRLSQDVWEEVEQLAFVKHGARPHWAKNRLAAFRGVRGKYPSWDKFGAAKRQLDPRGLFDSRWSDEVVGGEEQLPKADGCALEGRCVCSEDRHCSPSKGYYCRPGLVYSEARVCRQAGRSALRLQFFATAMSCFPFTTSSLGLALALRCPSFGSANTAPPQSLAQATTLSFQFNPLKENIIETLSVKAPSAESKLKVLKAIAHEYGLEWDSSNTEAALTKKYEDLLDGSGSSARQGQLPIIENSPVASISRDMPSLSISPVEDTGKYQAAPQSPSSPAGSAVMHAATKSNMVSQEHHRSPADEISCATPSSSDVLEKARAAIAAANRASAAARAAADLVKVKITS

SEQ ID NO: 151661 - protein, 42 aa, Oryza sativa
  unsure (1)..(42): unsure at all Xaa locations
  Clone ID: PAT_MRT4530_51784C.1.pep
LTLCSXPFLXWWMXRYCRIXAPXHFGVIWXNSYVLNVNMLVX

SEQ ID NO: 151662 - protein, 103 aa, Oryza sativa
  Clone ID: PAT_MRT4530_51785C.1.pep
TRSPRGESAGRPAGGASMGIPATGRRHASMGSPAPGSTSMGRPATGHAARRWGSRRPAAAACRWGARCPAARRWGAERSATRRGLGQPAARRGLGRPAFHRWE

SEQ ID NO: 151663 - protein, 47 aa, Oryza sativa
  Clone ID: PAT_MRT4530_51786C.1.pep
MKEYNPSERCPVPELWNYKEKRKATLEEAIQPSGNNSYMLLKELVNK

SEQ ID NO: 151664 - protein, 51 aa, Oryza sativa
  Clone ID: PAT_MRT4530_51787C.1.pep
MDPTTARACRVWAGPNLRAVDRGGDSINPVNRRKPGTLAKSRDFPTFIKTQ

SEQ ID NO: 151665 - protein, 601 aa, Oryza sativa
  Clone ID: PAT_MRT4530_51788C.1.pep
MSLTTVSFSYPAKPLPKWPCTLPKPPPRARCRFVVRADVKVISSGEACRRGLAAGIDKLADAVAVTLGPKGRNVVIDQDDVPKVINDGITIAKAIELPNAVEHAGAMLLQEHVNQIASKTNSSVGDGTTTAIILAREIINLGLLAVATGANPVALRKGIDKAVHELIGILKTKCIPVSTKEDIKAVASISAGNDEYVGDLIADALEKIGPDGIIKIESSSSIYTSVEVQEGMKIDKGYISPHFITNQDKAIVEFENARVLLTDQRVDDVQEILPLLEKTTQLSVPLLIIAEDVSHTVYSTLVLNKLNGLLNVAVVKCPGLGDEKKAILQDIAIMTGADFFASDLGWCLQGATSDQLGMAQKITITSDTTTIIAHPSMRPEIEARIQQLKKDLEETTSAYLKERFSSRIAKLSRGIAVIKFVSGDLIRVDFFQVGAATEAELEDRKLRAEDAKNATFAAISEGITPGGGVTYVQLSKYIPSIMDLVDDSEEKIGVNIVGKALLVPAMTIARNAGADGPAVVEKLLASEWRVGYNAMTDKFEDLVDAGVVDPCRVARCVLQNSASIAGLILMTQAMMFDKIKKKKSTIPQIPGIPPLQINQNA

SEQ ID NO: 151666 - protein, 58 aa, Oryza sativa
  Clone ID: PAT_MRT4530_51789C.1.pep
HLGVILRGCPSLTRLLMCCIGDSRVQTNRDDLKINSPPQLIERLIGKFYGNVCLCLIV

SEQ ID NO: 151667 - protein, 395 aa, Oryza sativa
  unsure (1)..(395): unsure at all Xaa locations
  Clone ID: PAT_MRT4530_5178C.1.pep
GGWIVHGYTNGATATGAGNHGFTCGYAASSYVYGYSCGSWEFEQREQQFISSQIQHXSMHLSMDDDDDQSAGYGVAMVDDLLTPSPSTHHAVAAAAGSFPSSSSSSASFRSASVSYSPDTSSSAAAAAATGFYPELSSQVAPLLPPPPLVRNEPQPGRYTAGLPPPPPPPVTGGAFRRYARHLGPRRAPKPGACGQRMFKTAMSALAKMHMETTYRRRQYYYQQAAAAAEAAPPPPSGNNQLQHTMSERKRREKLNDSFVALKAVLPPGSKKDKTSILIRAREYVKSLESKLSELEEKNRELEARLSTRPDDTKNDEEEVAAPPEAGGEPLSKTFHNALRWHPAPTCHQGDSLPFPCNVEAPFSHGHSICVACPANGLTMSMSLLWGEDVKILLG

SEQ ID NO: 151668 - protein, 95 aa, Oryza sativa
  Clone ID: PAT_MRT4530_51790C.1.pep
AGLGGCQPHPDGWHNSWSSVGGAVFLSGQPVEGRSDCGHFGLVVLGARVRIRCQAILALKAPAKRSVVVAIWPRLLLPEASPSWALGELKVRPLL

SEQ ID NO: 151669 - protein, 132 aa, Oryza sativa
  Clone ID: PAT_MRT4530_51791C.1.pep
YREASFRRDRRFDRASLASGAGSEPRTSCLASASFCNSWLVSRWRWRIRIRSAASAFGISDRAAVLLCVRIVLQLVAGVAVAQQVLVVVLVLVYDDLAAVPLEVRTLSSLGQTPWKRPHNPLAPAKKPVHKL

SEQ ID NO: 151670 - protein, 101 aa, Oryza sativa
  unsure (1)..(101): unsure at all Xaa locations
  Clone ID: PAT_MRT4530_51792C.1.pep
TAARERHDEEEKPARTQGELSRERTGGSSARRAAXAAASRPAPAPAPDRRRXAAWWKERXAAEEGMKLPEXIGKNKEVVATPXPAFALGVFVSTXLFSRNN

SEQ ID NO: 151671 - protein, 89 aa, Oryza sativa
  unsure (1)..(89): unsure at all Xaa locations
  Clone ID: PAT_MRT4530_51793C.1.pep
MQSLALTSPSLPAPETESGRRRRRLERIRATEVFDEPKLNKYSARITEPKSHGAVXAGLYGVGLTDADLRKLQVGASSVWDEGNTCNKH

SEQ ID NO: 151672 - protein, 269 aa, Oryza sativa
  Clone ID: PAT_MRT4530_51794C.1.pep
MAEQQQQQRDGDFEPVYEWLDAGAHYLLRVNVPEFKKEELQVHVDPAGRLTVRGQHGGLRLNKVFQLPPTCNLDAITGRLEASVLVLTVPKKPATTAAAAALPPKANQEEEKETKKADEHDVAGKPPPPPPKTDSDQSERRTQLSAREKKEEPPKATAPAAAPPQPAARERHDEEEKARAEHKARLSREADRRIEAARARLAAQQAASRPAPAPAPEPEKTAAWWKERAAEEGMKLAEAIGKNKEVVATAVAAFALGVFVSTKLFSRNN

SEQ ID NO: 151673 - protein, 98 aa, Oryza sativa
  Clone ID: PAT_MRT4530_51795C.1.pep
LGSNPHMIFLPFSVGACSAAFSMRGQPLHSSQRTCSGQHLVLIVCHHVKLQASKDAVLHPYCNYQGFQTQSPALLKDSAFQCSSGMNQWKVNKMMNPP

SEQ ID NO: 151674 - protein, 270 aa, Oryza sativa
  Clone ID: PAT_MRT4530_51796C.1.pep
ERMYKIFSNAIVVSYSHLLLVVPYNTFNPPPPEFALMKSDTPIAQRRSPRRHTGQASGGPKIQSDVQPNTSRSTNQSDSRKRKLVSSDDEGDDAEKTDNKGVIGKQPKQANPKKKTSSRPMPKIRKSSRKPSDIDPFGKDPMPTGTETSPSAETGPTAEDRPGNNQPATGNIDTSNEPPTGNQSAEAEVGADQEPPTGNQLGTEQNRDIPEVEAQANSPPKTDAAADPGTNSPVRVQGPARPRPEIIMGKQVLQICLDPTNFLQLLHHYS

SEQ ID NO: 151675 - protein, 460 aa, Oryza sativa
  unsure (1)..(460): unsure at all Xaa locations
  Clone ID: PAT_MRT4530_51797C.1.pep
MATAASRSGRRRGGGDDEDDRTAAMRRLRVLSLHLQDPSPSSEAGLAPAACAAAGRRRATGGADAAAALAAYLRGRHRDTQARVFEFFLSRPDLQTPVEMSTAAHRELCFRQLCALVREAGVRPLSLMANDPAEYFAVMEAAGGADISLGVKLGVQYSLWGGSIINLGTKKHRDRFFDGIDNLDYPGCFAMTELHHGSNVQALQTTATFDPVTDEFIINTPNDGAIKWWIGNAALHGKFATVFARLILPLQGKGGDPADMGIHAFIVPIRDLDTNAVLPGIEINDCGHKIGLNGVDNGALRFRSVRIPRDNLLNRFGDVSRDGKYTSSLPTINKRFAATLGELVGGRVGIAYSSVGILKVSVTIAVRYALLRQQFGPPKKPEISVLDYQSHQHKLMPMLASSYAFHFATRYLVDKYSEMKKTNDEDVMADVHVLSSGLKAYITSYTXKSISVCXESCGGH

SEQ ID NO: 151676 - protein, 46 aa, Oryza sativa
  Clone ID: PAT_MRT4530_51798C.1.pep
RNQNNKNFNLLSMYYIQMNIILVKTPHSNSMHTFYHHTYKQTDLER

SEQ ID NO: 151677 - protein, 108 aa, Oryza sativa
  Clone ID: PAT_MRT4530_51799C.1.pep
KEENEGGAKKRKTPRDKKKVGSKEMHGGQQRVPREKTGKNGPRKKDRGPQKRDQKPRKPRKESATQEKGTASLFEGSNIFFFSHFPLFFFFFFFLILFFFFFFFPRVR

SEQ ID NO: 151678 - protein, 244 aa, Oryza sativa
  Clone ID: PAT_MRT4530_5179C.1.pep
MAGGGGQSAIAAEDDDLERGAERDEEEEEGSQYFTDAEDHQSWASHSRHNSTAYEDYISTCASVRASSYDGEAEEEEDAGGGGGGVEHHRRKSSCVSECSLDDVDLEAGLAEVIKGSPEKAERCCRICHLGLETAAAESGAGITLGCSCKGDLSYSHKQCAETWFKIRGNKICEICSSTACNVVGIGDSESVEQWNESNSTAPAQAPPAETQRFWQGHRFLNFLLACMVFAFVISWLFHFNVPG

SEQ ID NO: 151679 - protein, 107 aa, Oryza sativa
  Clone ID: PAT_MRT4530_517C.1.pep
RFELPCPSDVIFHIISSSCINELQVGLQEGECCGFLTTKILGSNHMAIKKCSAQDAVIDKDKCNTLHDKVKLRTDSNQEGEDDEDITSSDITMTTLCINQIKVHIFY

SEQ ID NO: 151680 - protein, 67 aa, Oryza sativa
  unsure (1)..(67): unsure at all Xaa locations
  Clone ID: PAT_MRT4530_51800C.1.pep
FXFFFFNTNTPGYYYLEINEIDPESSIEMIMRRXXGEAQRSRGXXXXISLHATPNASAVAATRLPAT

SEQ ID NO: 151681 - protein, 63 aa, Oryza sativa
  Clone ID: PAT_MRT4530_51801C.1.pep
MARLSGVLTERRSLETVEAGVSYGERRLARNTSDQRSRAWDSTRMTLNDASFFHRIFTSTVDG

SEQ ID NO: 151682 - protein, 490 aa, Oryza sativa
  Clone ID: PAT_MRT4530_51802C.1.pep
MVSAAAGWAAPAFAVAAVVIWVVLCSELLRRRRRGAGSGKGDAAAAARLPPGSFGWPVVGETLEFVSCAYSPRPEAFVDKRRKLHGSAVFRSHLFGSATVVTADAEVSRFVLQSDARAFVPWYPRSLTELMGKSSILLINGALQRRVHGLVGAFFKSSHLKSQLTADMRRRLSPALSSFPDSSLLHVQHLAKSVVFEILVRGLIGLEAGEEMQQLKQQFQEFIVGLMSLPIKLPGTRLYRSLQAKKKMARLIQRIIREKRARRAAASPPRDAIDVLIGDGSDELTDELISDNMIDLMIPAEDSVPVLITLAVKFLSECPLALHQLEEENIQLKRRKTDMGETLQWTDYMSLSFTQHVITETLRLGNIIGGIMRKAVRDVEVKGHLIPKGWCVFVYFRSVHLDDTLYDEPYKFNPWRWKEKDMSNGSFTPFGGGQRLCPGLDLARLEASIFLHHLVTSFRWVAEEDHIVNFPTVRLKRGMPIRVTAKEDDD

SEQ ID NO: 151683 - protein, 117 aa, Oryza sativa
  Clone ID: PAT_MRT4530_51803C.1.pep
ALLMAPIPVTRPAGQALTGGTIGAPLITSRITALVITPRITAAARECARLLHLQPGGDRHSRARSRYSSRKLTYEDSSPTGGDRHSRARSSHSSRSLTYEDSSDDERNFKRRWGGKR

SEQ ID NO: 151684 - protein, 519 aa, Oryza sativa
  Clone ID: PAT_MRT4530_51804C.1.pep
MAMELAALCTDPVVLSAAFLCLLLHLSLRSYRPPSPGGGRRLPAGPPGLPVLGALPLVGPAPHAGLASLARKYGPVMYLKMGTCGVVVASSPCAARSFLKALDARFANRPAVASAVDITYNYQNMVFANYGARWKLMRKLASVHLLGARALADWAAVRRDEARRLLRGVAEASAAGRPVVIPEVLVCALANIVGQITVSKRVFDVQGDESNSYKDMIVSLLTGAGLFNISDFVPALAWLDLQGVQAKLRRIHDQFDVLITKLLADHAATADDRARAGRTDFVDRLRAAVGVDDEDGETISEVNIKGLIFDMFTAGTDTSSIIVEWAMAEMMKNPAVMARAQEEMDRVVGRGRRLEESDIASLPYLQAVCKEAMRLHPSTPLSLPHFSFDECDVDGYRIPANTRLLINIYAIGRDPSAWEDPLEFRPERFMPGGAAERVDPLGNYFELIPFGAGRRICAGKLAGMVFVQYFLGTLLHSFDWRLPDGEDKVDMSETFGLALPKAVPLRALVTPRLAPAAYA

SEQ ID NO: 151685 - protein, 375 aa, Oryza sativa
  unsure (1)..(375): unsure at all Xaa locations
  Clone ID: PAT_MRT4530_51805C.1.pep
SVFYIQITNVFLHGILEEEVYIKQPLRYEDKVHPXYVCKFDKALYGLKQTPRAWYAKLIYVDDIIVASSRQDAVPALLKDLXKDLALKDLGDLHYFLGIEMNKASSGIVLTQEKYVTDLLRRVGMTDCKPVSTPLSTSEKLTLHEGDLLGPNDASNYISVVGALQYLSLTRPDISFPVNKVCQFLYAPTTVHWAAVKRILRYLKQCTKLGLKISKSKSMLVSGYSDADXVGNIDDRRSTGGFAVFLGDNLVSWNAKKQATMSRSSTKSEYKALANATAEIIWIQTLLEELSVPSPPMARLWYDNLGAKYLSSNPVFHARTKHIEVDYHFVRERVQRKLLEVEFAPTGDQVADGFTKALSVRQLENFKYNLDLGRL

SEQ ID NO: 151686 - protein, 55 aa, Oryza sativa
  unsure (1)..(55): unsure at all Xaa locations
  Clone ID: PAT_MRT4530_51806C.1.pep
VVGNSAPVSLLGSSHAATTDTASVRQHAVSREVDGAQYHCQAFAXGAVYHAASAV

SEQ ID NO: 151687 - protein, 1256 aa, Oryza sativa
  Clone ID: PAT_MRT4530_51808C.1.pep
MASSSQSSASGSLGGITVTEKLSKGNYLIWKVQVLAVIRGARLDSYLTGATKKPSATIIIKKNEKEVEVSNPAVDEWIANDQQVLGYLLTTMSRDVLSQVATCSSAASLWSTIEGMFSSATRARSINTKIALTNTKKGDLGIAEYVSKMRVLADELATSGKPVDEEDLISYIIAGLDEDFEPIISSLVSKSEHVSLGEAYSQLLSFEQRMKMRQEHSANLANRGRGRGNPGRGRNNKQPQQQQRGHGGNSRGRGRGNNSNQRQGGNGVDYRPKCQLCYKRGHTVIDCWYRYDEDFVPDEKYAGTTASYGVDSNWYVDTGTTDHVTGELEKLTIRDKYKGQDQVQTANGADVWGPAPVAGGGKKYYVSFIDAFSRFTWIYFLKYKSEVFQKFQEFQCLVERMFNRKIISMQTDWGGEYQKLNTFFNKIGITHHVSCPHTHQQNGSAERKHRHIVEVGLSLLAHASLPLKFWDEAYQSGVYLINRMPTKVLGYSSPLECLFKQTPDYQALRTFGCACWPDLRPYNSHKMHFRSKRCTFLGYSPLHKGFRCLDSSTGRIYISRDVVFDESVFPFAELNPNAGTNLRKEVNLLPADMLNPGDVQLNDHVNYYPTAPANMVAAENPVENTEENLASTRDDAADSGGSDTGTISNADPADDAAGDMTANPNLNDSSTHESSISASASPASQSSVATAPEATLPNPQQHQQALRSSTPEGEASRPVTHLQKGIRKEKIYTDRTVKYGCLTTTGEPRDLHDALHDTNWKHAMDAKFTALLHNKTWHLVPPQKGRNIIDYKWVYKIKRKQDGSLDRYKARLVAKGFKQRYGIDYEDTFSPVVKAATIRIILSIAVSRGWTLRQLDVQNAFLHGILEEEVYMKQPPGYEDKVHPDYVCKLDKALYGLKQAPRAWYAKLSQKLQHLGFQGSKADTSLFFYNKGGLIIFVLVYVDDIIVASSRQDAVPALLKDLQKDFALKDLGDLHYFLGIEVNKASSGIVLTQEKYVTDLLRRVGMTDCKPVSTPLSTSEKLTLHEGDLLGPNDASNYRSVVGALQYLTLTRPDIYFPVNKVCQFLHAPTIVHWAAMKRILRYLKQCTKLGLKISKSKSMLVSGYSDADWAGNIDDRRSTGGFAVFLGDNLVSWNAKKQATVPRSSTESEYKALANATAEIMWIQTLLEELSVPSPPMARLWCDNLGAKYLSSNPVFHARTKHIEVDYHFVRERMQRKLLEVEFIPTGDQVADGFTKALSARQLENFKYNLNVGRL

SEQ ID NO: 151688 - protein, 38 aa, Oryza sativa
  Clone ID: PAT_MRT4530_51809C.1.pep
MDGGQNRRSLNINTEAGDEASEDPYAYYQEGDEDDGAQ

SEQ ID NO: 151689 - protein, 94 aa, Oryza sativa
  unsure (1)..(94): unsure at all Xaa locations
  Clone ID: PAT_MRT4530_5180C.1.pep
KYTFIFHILHLYTCLRLICKNIPNPHDGCVRAPVPHAGDAIPHRSRRIGERHHGLFASRCGPAELERSRIWMHGTAAPAPTSSSPPXPPARTLG

SEQ ID NO: 151690 - protein, 99 aa, Oryza sativa
  Clone ID: PAT_MRT4530_51810C.1.pep
MVAGGDHRVATDAGKRRARARGLGPRAASRPVVLARLFLFACSSRRRRLAEGTVEQRSTGMRTSYGGTQPRRARLGGATSTPSCAASPSSSSRSPSPRA

SEQ ID NO: 151691 - protein, 84 aa, Oryza sativa
  Clone ID: PAT_MRT4530_51811C.1.pep
MATAVRRSSGRRGVGMARRGGPVAGSVTVAGGGELDLSIPVEASFGVLLNFGARMCVASGDSGGEVQGSFTGWAKVGIWSGPAE

SEQ ID NO: 151692 - protein, 129 aa, Oryza sativa
  unsure (1)..(129): unsure at all Xaa locations
  Clone ID: PAT_MRT4530_51812C.1.pep
MISFYIGGHPRLGPLRELMLALASFREGKSSHEDKEKDATDRRGSIRKNKADPGNKNIPSNTAPDYEEGADPAARHGAAPERDTRTGGETGASTHPAMARRRGNXPAQEETKRWDTNXHPTVLQPGPNT

SEQ ID NO: 151693 - protein, 53 aa, Oryza sativa
  Clone ID: PAT_MRT4530_51813C.1.pep
SRATFYRAFQLLLINAALKPHTSCVLFPSDIKGILLGKTEIFISTILNLTYYT

SEQ ID NO: 151694 - protein, 57 aa, Oryza sativa
  Clone ID: PAT_MRT4530_51814C.1.pep
SEFDTISLSLELYMNTPMKIWQPFLNCRFTWVPEHSVAQSFFGGFWSGLFRAMALPV

SEQ ID NO: 151695 - protein, 203 aa, Oryza sativa
  Clone ID: PAT_MRT4530_51815C.1.pep
MAAQEQEQEKQQVKTSTTSSLPSSSERSSSSAPNNLKEGGGVESDEEIRRVPEMGGGGGSASSGAGADERQGKEDGKQQGGGGGGAAAAGGGQEQAPPARKRGRSAGDKEQNRLKRLLRNRVSAQQARERKKAYMTELEAKAKDLELRNAELEQRVSTLQNENNTLRQILKNTTAHAGKRGGGGGGKGGDGGGGGKKHHFTKS

SEQ ID NO: 151696 - protein, 64 aa, Oryza sativa
  Clone ID: PAT_MRT4530_51816C.1.pep
LPFTSGAGGGRRLGPDSGGSKRGGPGIGTLGRAIYTAGKWIRGTGQAMDRLGSTIQGGLRVDEQ

SEQ ID NO: 151697 - protein, 303 aa, Oryza sativa
  Clone ID: PAT_MRT4530_51817C.1.pep
GDRGVLLVARHRAFRPFLVVGLLRHDLLRRRREASGAAATAAHAAVQPAAVVPAGDATADETPPGRAVCSSGCGRPTTVCLCPYLPATPLPTSTTVVILHHPHALRRNPLSTLPLLARSLSNLRLIPGRRLLPSSAPVISRSPVLLLFPSPDAADLASWCRSTPPPARANPTLLLLDGTWKQAKEMHAASLPFLSSFAVPVSLPVDCGVDGDSMFEGELVVKKEPHKGCVSTMEAVARALRLLEPEGRGEEIEETMVGVLRAMVAFQAEHLQHRPMKPRVKMRKKKDIKREEEMKRNTLDWSD

SEQ ID NO: 151698 - protein, 136 aa, Oryza sativa
  Clone ID: PAT_MRT4530_51818C.1.pep
HGAGWGDCWASIWLRFGGREAFSRASGARFSGIRERQWRRAGVRRGYGRGTRGAGDFARTGGGNFARTGRRGRGTRGVAGDFARKGAEKISRAGSGEDARPRSEEEREGRGGGAMGFSVVEMRWRRGSGIFLVGTT

SEQ ID NO: 151699 - protein, 108 aa, Oryza sativa
  unsure (1)..(108): unsure at all Xaa locations
  Clone ID: PAT_MRT4530_51819C.1.pep
MDNLALLRGILGPGVAGAVFGVGWWFWVDAVVCSAVQVSFLHYLPADIIIFIKSSEALALCGIAGAVGLLVQDALTDKGPSVWTGVAGVLQCVLVLISXGLIYWTCHS

SEQ ID NO: 151700 - protein, 165 aa, Oryza sativa
  Clone ID: PAT_MRT4530_5181C.1.pep
VDPGLSSYAGRPQEAAKSIMPLLDKANHAIPIWLMNKTPLELGVPQLLDSDLLEMTRQTRFLKRLGGDYSKTVGVIDLGGGSVQMAYAISSGTAANAPEMPDGQDPYIIKEYLKGRDYNVYVHSFNGVWNGGGGAGQDELYVATSFYYMASDHEQGRLQQILAQR

SEQ ID NO: 151701 - protein, 73 aa, Oryza sativa
  Clone ID: PAT_MRT4530_51820C.1.pep
AFSHLRISIFLCVFALSTHLVLHVDSRRFRFGTNRTRLSVKWMIYMQEDPICLIPYYLCTIFSTFVVRLLYLS

SEQ ID NO: 151702 - protein, 406 aa, Oryza sativa
  Clone ID: PAT_MRT4530_51821C.1.pep
MNMLVPAAVSDIAYRLTTFAIKKYQQLPDAEVALETLNRLLLRAQTIIEEAEGKCIANEGMLHQLQMLIEGMYRGHYLLDRYKYPALQEDRKDEEVLSFLLQTDGLGDEDFPVLPIIGPRKCGKSTLVEHACRDYRVRNHYSLILFLRGNNLKDARVANLRENGVVKHQNYSSCKRLLIIIELACDISEQTWQSLKSSMSCWARGSKIIITSRSDKIENLGTAAAIRLDLLHPEAYWYFFKKLAFGSRDPDEHPKLASVAMEIATEYSGSFLAAYTIGGLLRDNFNAQFWCSTLKYLRAYIRNQLRLHGDHPNNLLLKGQWVHCLRFAEASNPLWMSDYYETDSCPDQAPNISDIMLGSATPRGRFEALGWKSRMAPYYSYMICCSTEAPGHAVGRKKRSYDRFLV

SEQ ID NO: 151703 - protein, 39 aa, Oryza sativa
  Clone ID: PAT_MRT4530_51822C.1.pep
RQPPPARSSDPKKTPSTDMAGFLVAPRKASCQNSLQPGD

SEQ ID NO: 151704 - protein, 135 aa, Oryza sativa
  unsure (1)..(135): unsure at all Xaa locations
  Clone ID: PAT_MRT4530_51823C.1.pep
KKAGSRSVKAGLQFPLGRIGRYXLKKGRYAQRIGTGAPVYLAPVLEYLPAKGLELPGNPAKGTKKNRIIPPPVLLGIRKNKELGKLLAGVTLAHGGGLPNNNPGVLPKKTAEKAPPPGKKAKSPKKAPGKSPKKA

SEQ ID NO: 151705 - protein, 183 aa, Oryza sativa
  unsure (1)..(183): unsure at all Xaa locations
  Clone ID: PAT_MRT4530_51824C.1.pep
FFFFFFQGNTNITINIVKKXHGAPPHHPNHQGHSIIQHCQHFHTNSSTAKHTTHSRQFRCHFTPHQFSQAIQHTAGHSGQQHAXVATHNXRGINLSFQIPNMHSHTLHPKXSWSHSPSVAHTHQHRLRHSTGIASTWAPMGCTLATPGAXIPTNXGRAKSXTTDTLNKRSTPPLFFKIKIGQP

SEQ ID NO: 151706 - protein, 49 aa, Oryza sativa
  unsure (1)..(49): unsure at all Xaa locations
  Clone ID: PAT_MRT4530_51825C.1.pep
VASKFLPGEKTGFPXEELPKGLVAIKEGKPIAPVLEFPKEWNGPPLPLC

SEQ ID NO: 151707 - protein, 438 aa, Oryza sativa
  unsure (1)..(438): unsure at all Xaa locations
  Clone ID: PAT_MRT4530_51826C.1.pep
MSNVTVCVRFRPLSHKERKTNGDKIRQDEREEDVIFSFDRVFYEDAEQSDVYNFLAVPIVADAISGINGTIITYGQTGAGKTXRMAGASLFHSNKQRTGLVQRGVHELFQSLPSXGSLRTEEEELXMHEYILVKVLNLDDLTKDNLKICXSKTQGISIAFKAEIEDDIIFDFERVFYEDAEHSDVCDLLQLPIVSDAIIGINETIITXWSGXEKKKKSIGGGRVLDEAKTINKSLSVLGNVVNALTTEGKPNHVPYRDSKLTRILQDALVGEXRFSQEFLNRRHLSRTKLIKTTPKSISPEVDSIKKPIPDSHGQNDLRDRILNKLRLSLKEEDVDLLEELFVQEGIIFDPNYSVADIDSACQDAASQEVSLLTQAVEELKETVEELTDENERLRGELELAQEAAAAAAAARADGALLGFVPAVAISSLLRPFGFVPD

SEQ ID NO: 151708 - protein, 67 aa, Oryza sativa
  Clone ID: PAT_MRT4530_51827C.1.pep
TKRRSPFIHAIWTNSCSVTKESTLEAASPRCTSPTAFDRHPKAGSWGSWVPTAEADTTWPRGDAHDL

SEQ ID NO: 151709 - protein, 49 aa, Oryza sativa
  unsure (1)..(49): unsure at all Xaa locations
  Clone ID: PAT_MRT4530_51829C.1.pep
MKIIFFFALLAIAACSASAQXDAXTQXYRKYXLEPXSMLQQQMLSASAV

SEQ ID NO: 151710 - protein, 472 aa, Oryza sativa
  Clone ID: PAT_MRT4530_5182C.1.pep
MAAHHVMSIAAAAVAMLLLMASSPAVAGTAVLGRKGGAMTDDDVVGGQAATGPGKYAVILDAGSTGTRVHVFRFDRMMDLLKIGDDIEVFAKVDPGLSSYAGRPREAANSIQPLLDKAIHVVPNWLMKKTPLKLGATAGLILIGDEKANQILEAVRDVVHTKTKFQYNPNWINVLSGSQEGSYMWVALNYLLDRLGGDYSKTVGVIDLGGGSVQMAYAISTGTAANAPEVLDGQDPYIIKEYLKERDYNVYVHSYLHYGARASRVEILKRKNGTFSNCMLRGFSGKYIYNGEQYDATAAPQGADYHKCRDDVVKALNLDAPCETNNCSFNGVWNGGGGAGQDELYVATSFYYMASDHEQGRLQQIGFIDSEAPSAKSTPAAYKVAAEKVCSLSVEEAKAAYPRACDHAYLCMDLVYQYTLLVDGFGLEATKEMTLVEKVKHGEYYIEAAWPLGTAIEAVSPKKKHQETPLYN

SEQ ID NO: 151711 - protein, 480 aa, Oryza sativa
  Clone ID: PAT_MRT4530_51830C.1.pep
RRSDRRVHGGQTGGDDRRGKQLQRSDRLIYTGQTDDIRAVRLARQLRSDRSPSILRAHVTARLAVLGHCHHAAIARLLGVSASPNGSLFLAYELLLDASPLFALHRNPNNPSFTLLASWQSRLKVAADVTDVLHYVHLQADTVHLHNRLRCVAKDAAARAGDVVGRRQVPHPHQQLHLHLHRSINLGFRHLGQSEEDGASTAASAQSEEGGGDRRPPPPPPPFSPAPAAAAALLPCPESHRDKSAPNPTAAVVKDDAGVVEAEAARWRRRAGGGGGGADAVGRGRTKAVPARTARARRRPWLAPSLPSPPHGRRARAPAEGYAVAAGAGVGSGGLEGCAVAAGAVDGGGRGLRRRAAWWRLAWSTAAAAGSGGGRPGGGRRGRLRLATRWQRGGGGGQELRHRPHAHARWLDPHVVAGVLPRRPHLHRRWRGWQGGQRPNRHQQGGIGAAVEMAMAVGELFTRGMEEEEEPGAFPSGMAF

SEQ ID NO: 151712 - protein, 48 aa, Oryza sativa
  Clone ID: PAT_MRT4530_51831C.1.pep
SIIKNLALIDLQKLEIASNSFASTKYSSYPHKRTLKLQIHQPILTAPR

SEQ ID NO: 151713 - protein, 92 aa, Oryza sativa
  Clone ID: PAT_MRT4530_51832C.1.pep
METGPPSLPTRPPFVAAANPTPVRRRRQCLCGPCSWSQSGLFPRQQTSIAAAGAVVVQQRALGLGPFREQQQIGNSQQQKYIVAKFSTTSVV

SEQ ID NO: 151714 - protein, 85 aa, Oryza sativa
  Clone ID: PAT_MRT4530_51833C.1.pep
TGQGFSQPKIDAVEARWPTLPILYQSLGLVVASFIQELKGVQADALTILVSMVIVWCPPSCISNNRLTLFQLLRECCQLMGTSHV

SEQ ID NO: 151715 - protein, 424 aa, Oryza sativa
  Clone ID: PAT_MRT4530_51834C.1.pep
MEYDDRERRRGRRAPGEALPDDLVEEILLRLPAPSIGRCHAVCKAWLSRTSQPDFLRAHAARSCTATVVTAAATVETRTTTPCGRSCTTVRIRRLGRKCSGAVAASLAVSFVSASEPVRSMTAVIGLWDGILCAAHILFGPGRGVERYVLCNPLTEACTIVPAPATDGFLVGGYAHPTTSRFHIMHTNFFTTMETFWILRLGENSVWRETARLSSLAGLVIIGAVSRGRLQQFNMEREEFRLMEAPGGQGVRDGNLSHSHTMMGIHITHCHGKLCALADEPGANALGLWVLEDYSDPTSWRLQRKIDYYYSCGSAAGAALDDDPHAAAAQTFRARFSTADVVEVLPNGVDDDDEGEEILLQLGDEEVVYNVGRAAWRRRGILPLTTRCLMMHRQCILPREVSFGDASQVPWEKDIGGHCFYRIY

SEQ ID NO: 151716 - protein, 115 aa, Oryza sativa
  unsure (1)..(115): unsure at all Xaa locations
  Clone ID: PAT_MRT4530_51835C.1.pep
NNFKLLWDRLKICRRSRXFSSCCSLNSANSFQVLLVLHLGHPRAGAHCRLAASVNYALHTTPAACPCPSPGRRGAARRRLELRDRLRSARIKDPSRSHPADHPXSRSSDSELQNT

SEQ ID NO: 151717 - protein, 174 aa, Oryza sativa
  Clone ID: PAT_MRT4530_51836C.1.pep
QLHSPSTLPRVVNCVTYGLPPHQYPQWSGSPSSSAWHCYNKPNQQLCSLQPSISASTSQQHPPQHLHCAVVFKLAMAAHCALVTPTCVIKLVPLPSRLQASVYSQAKPRHACSHSYAHSHICACVFSQVRPHNRQLCILPSTVGHIARDHCPHHSALARFTQLPYHHVGLQATH

SEQ ID NO: 151718 - protein, 440 aa, Oryza sativa
  Clone ID: PAT_MRT4530_51837C.1.pep
MDYDDRERRRGRRAPGEALPDDLVEEILLRLPAPSIGRCRAVCKAWLSRTSQPDFLRAHAARSCTATVTAAATVETRTTAPRGRSCTTVCVRQLGRKCSGAVASLAVSFVSASEPGRSMTVVIGFWDGILCAAHILFGPGRGVERYVLCNPLTEACTIVPAPSTDGFLVGGYAHPTTSRFHIMHANFFTTMETFWILRLGENSVWREVRRPALATMRVCIKFLHAPPVRLHGCLHWLASSASSAQFLVAVFNMEREEFRLMEAPGGQGVRFGSHSHTMMGMHITHCHGKLCALADEPGANALGMWVLDDYSDPTSWRLQRKIDYYYSCGAGGAGAALDDDPHAAAAQTFRARFSTADVVEVLPNGVDDDDEGEEILLQLGDEEVVYNVGRAAWRRWGILPLTTRRLMMHRQCILPREVSFGDASQVPWEDIGGHCFYRIY

SEQ ID NO: 151719 - protein, 78 aa, Oryza sativa
  Clone ID: PAT_MRT4530_51838C.1.pep
GGFKLSNHACFKTEAARTKASPGAFRGPQGLRREALQRKKGGKKKLLEGAGAQFSAGALRKKEEKKRARPIKKSLPQV

SEQ ID NO: 151720 - protein, 1033 aa, Oryza sativa
  Clone ID: PAT_MRT4530_51839C.1.pep
MDVVWPHGHGVWGSSSASRRSAMLHGSLDIWIHEARNLPNMDIVSKTVVDILGTKKKKKAANGAMTSDPYVTVQLASATVARTYVVNDDENPVWAQHFLIPVAHEAPAVHFLVKDSDVFGAELIGEVVVPAEQLEAGEHVEGVYPVLDPAAGKPCAPGAVLRLSVQYIPVARLTMYHHGVTPGPDFAGVPNTYFPLRRGGRVTLYQDAHVPEGSLPEIRLGNGALYRQGQCWHDVYDAISQARRLIYITGWSVFHTIQLVRDGGAGVSLGDLLKRKSQEGVRVLLLVWDDPTSRNVLGIQMEGYMGTRDEETRRFFKHSSVQILLCPRSAGKRHSWVKQQETGTIFTHHQKTVILDADAGNHKRKIVAFVGGLDLCGGRYDTPTHPLFRSLQTLHKDDYYNPNFAVLDAQGPREPWHDLHSKIDGPAAYDVLTNFEERWLKASKRSGVKKLSKANNDTLLWIGRIPDIASIDDEVYSSDNDPERWDVQIFRSIDSNSVKGFPKNPREATSANNLIPIEIALKIANKIYANERFSAYIVIPMWPEGNPTGAPTQRILYWQDYLNFFCLGNREAGGSPSTCRGSSSANNPQDQAKKNRRFMVYVHSKGMIVDDEYVIIGSANINQRSMEGTRDTEIAMGAYQPQYTWANMLSAPRGQIYGYRMSLWAEHIGAVEESFSCPESLECTRQVRHIGEQNWRQFASSEVSEMRGHLVKYPVSVARDGKVKPLPGCAAFPDLGGNICGTGRVYTASRRRSQAAAHGLQPLPGCREDRTLKGESSESNGDEGITSRVAKSLHSLMPPKRKRAAAMETAGGDAAPPPQQQRRNKSSAANKGKKGGASGGGGGGRWPPVKPKKDLQVNRLKGTHLLTVPNFFTSAEAKAFVDIAENIGFTHQGSLGPLKGEAYRDNDRISVTDPLLAQTIWESGINKIFEDISISGKVATSLNPNIRFYRYTEGQRFGRHIDESVDLGDGSRTLYTLLIYLSGKGSAKESSGQALVGGETVFYDHRGGVVAECKDWLYSIFMVPNACCMKHGL

SEQ ID NO: 151721 - protein, 80 aa, Oryza sativa
  Clone ID: PAT_MRT4530_5183C.1.pep
QRFLKKIWISICGCNCGCVCNTVAGMALLMTLLTIADAIYVRICHSIVSCKVSRDISFGFHLSSQRQPHGVGGRVGGRVG

SEQ ID NO: 151722 - protein, 107 aa, Oryza sativa
  Clone ID: PAT_MRT4530_51840C.1.pep
MALNSAEDTHNVLLPDPPSDQDHGFGEPFSSTSPSILEAVARASRHRCKTKVVKCSVLASASAASTGVLTTGENGTGIFRPPAWPEAHKNMGEKMDIRYYPSSNPNS

SEQ ID NO: 151723 - protein, 1086 aa, Oryza sativa
  Clone ID: PAT_MRT4530_51841C.1.pep
MALGLLVWIYIVLLIALSTVSAASPPGPSKSNGSETDLAALLAFKAQLSDPLSILGSNWTVGTPFCRWVGVSCSHHRQCVTALDLRDTPLLGELSPQLGNLSFLSILNLTNTGLTGSLPDDIGRLHRLEILELGYNTLSGRIPATIGNLTRLQVLDLQFNSLSGPIPADLQNLQNLSSINLRRNYLIGLIPNNLFNNTHLLTYLNIGNNSLSGPIPGCIGSLPILQTLVLQVNNLTGPVPPAIFNMSTLRALALGLNGLTGPLPGNASFNLPALQWFSITRNDFTGPIPVGLAACQYLQVLGLPNNLFQGAFPPWLGKLTNLNIVSLGGNKLDAGPIPAALGNLTMLSVLDLASCNLTGPIPLDIRHLGQLSELHLSMNQLTGPIPASIGNLSALSYLLLMGNMLDGLVPATVGNMNSLRGLNIAENHLQGDLEFLSTVSNCRKLSFLRVDSNYFTGNLPDYVGNLSSTLQSFVVAGNKLGGEIPSTISNLTGLMVLALSDNQFHSTIPESIMEMVNLRWLDLSGNSLAGSVPSNAGMLKNAEKLFLQSNKLSGSIPKDMGNLTKLEHLVLSNNQLSSTVPPSIFHLSSLIQLDLSHNFFSDVLPVDIGNMKQINNIDLSTNRFTGSIPNSIGQLQMISYLNLSVNSFDDSIPDSFGELTSLQTLDLFHNNISGTIPKYLANFTILISLNLSFNNLHGQIPKGGVFSNITLQSLVGNSGLCGVARLGLPSCQTTSSKRNGRMLKYLLPAITIVVGAFAFSLYVVIRMKVKKHQKISSSMVDMISNRLLSYQELVRATDNFSYDNMLGAGSFGKVYKGQLSSGLVVAIKVIHQHLEHAMRSFDTECHVLRMARHRNLIKILNTCSNLDFRALVLEYMPNGSLEALLHSEGRMQLGFLERVDIMLDVSMAMEYLHHEHHEVALHCDLKPSNVLLDDDDCTCDDSSMISASMPGTVGYMAPEYGALGKASRKSDVFSYGIMLLEVFTGKRPTDAMFVGELNIRQWVYQAFLVELVHVLDTRLLQDCSSPSSLHGFLVPVFDLGLLCSADSPEQRMAMNDVVVTLKKIRKDYVKSISTTGSVALPAYTKE

SEQ ID NO: 151724 - protein, 58 aa, Oryza sativa
  Clone ID: PAT_MRT4530_51842C.1.pep
VNNFATMKAPGGQRGGPFGTFLVIATVLLGIAILVGANNYSGIIWPHKSALTQSLPIL

SEQ ID NO: 151725 - protein, 188 aa, Oryza sativa
  unsure (1)..(188): unsure at all Xaa locations
  Clone ID: PAT_MRT4530_51843C.1.pep
MISNRLLSYQELVRATDNFSYDNMLGAGSFGKVYKGQLSSGLVVAIKVIHQHLEHAMRSFDTECHVLRMARHRNLIKILNTCSNLDFRALVLEYMPNGSLEALLHSXHHEHHEVALHCDLKPSNVLLDDDMTAHVSDFGIARLLLGDDSSMISASMPGTVGYMAPGTSSFCTLAQSSGIFIIIVWCNQ

SEQ ID NO: 151726 - protein, 184 aa, Oryza sativa
  Clone ID: PAT_MRT4530_51844C.1.pep
LIQLDLSHNFFSDVLPVDIGNMKQINNIDLSTNRFTGSIPNSIGQLQMISYLNLSVNSFDDSIPDSFGELTSLQTLDLSHNNISGTIPKYLANFTILISLNLSFNNLHGQIPKGGVFSNITLQSLVGNSGLCGVARLGLPSCQTTSSKRNGRMLKYLLPAITIVVGAFAFSLYVVIRMKVKKHQ

SEQ ID NO: 151727 - protein, 394 aa, Oryza sativa
  Clone ID: PAT_MRT4530_51845C.1.pep
MATTAAAAAEEAVVALDKETLMLMGCGDAPPAAPCAEWETFKENVRPLKRGRNVGLLNRALKAHADPAQRAALLAARRKMIEAIDEYSGEDPLQPWIDCIKWVQESFPTGGDCSGLVVIYEQCVRAFWHDDRYKNDLRYLKVWLEYAGNCADSEVIFRFLEANQIGQSHTNYYLSYASVMESKNKLKKANEIFNLGIARKAKPVEKLETTYRAFLQRSSKKKAHPEDDTTTDDHPVRNFGTVLNRGEIRGQHAENSHLVKTLQRVDVNRPLAVYTDENSLPSHGLARTRSNNTAWQTLGSQADRNKENNMRPAKWTSHKIPQKVGSRAAVQPTRVSSIEVFVDDECAEEPVPQVPKSTKPSILKLRQATSRNLKQETELLMENPLRNFPLTSLR

SEQ ID NO: 151728 - protein, 639 aa, Oryza sativa
  Clone ID: PAT_MRT4530_51846C.1.pep
MTNSNNGNGGTNAAASGWLGFSLSPHMASSTMDEHHHVHHHQQQQQQQQQQQHHQQQQHGLFFPSVTTAAAAAAYGLAGDVVAATNGYYSQLASMPLKSDGSLCIMEALRRTDQDHHGPKLEDFLGAAQPAMALSLDNTSSFYYGGGGAAAAGHGQHGYLQACDLYGGPAAPSLVTAADEEAAAAAAAMASWVAARGAATAYATGAADANAAENVLPSATAAQHLHHPLALSMSSGSLSSCITAGEYGMAAVAAADGGRKRGGAGGGGQKQPVHHRKSIDTFGQRTSQYRGVTRHRWTGRYEAHLWDNSCKKEGQTRKGRQGGYDMEEKAARAYDLAALKYWGPSTHINFPLEDYQEELEEMKNMTRQEYVAHLRRKSSGFSRGASMYRGVTRHHQHGRWQARIGRVSGNKDLYLGTFSTQEEAAEAYDVAAIKFRGLNAVTNFDITRYDVDKIMASNTLLPADLARRNAATTTSKDDHSAAGAGAIVSVHSAADIAVADTLWKATTAPRQQQQHHDDVVLSGADQAAFSVLHDLVAVDAAAAHQQQQQQQHMSMSAASSLVTSLSNSREGSPDRGGGLSMLFAKPSPAVAASAQQQASTKLMAAPLPLGSWVSSPPASARPPAVSIAHMPLFAAWTDA

SEQ ID NO: 151729 - protein, 1122 aa, Oryza sativa
  Clone ID: PAT_MRT4530_51847C.1.pep
MAKPVKYDEEEEEVSSSGEEEEEQSDGAGSGSGEEEDEEEEEAPAAAAGEAAGGEEEEVDEEEIEAVTTGAGADEEEEESGAAAAAPGEGDEESQSTEDDEAVVGEDDDADEAEGGAVVGKREKARLKEMQKLKKQKIQEILDTQNAAVDADMNNKGKGRLKYLLQQTEIFAHFAKGNQSKEKKPRGRGRHASKMTEEEEDEEYLKEEEDALAGSGGTRLLSQPSCIKGKMRDYQLAGLNWLIRLYENGINGILADEMGLGKTLQTISLLGYLHEFRGITGPHMVVAPKSTLGNWIKEIQRFCPILRAVKFLGNPEERNHIRENLLQPGKFDVCVTSFEMAIKEKTTLKRFSWRYIIIDEAHRIKNENSLLSKTMRIYNTNYRLLITGTPLQNNLHELWSLLNFLLPEIFSSAETFDEWFQISGENDQQEVVQQLHKVLRPFLLRRLKSDVEKGLPPKKETILKVGMSQMQKQYYRALLQKDLEVINAGGERKRLLNIAMQLRKCCNHPYLFQGAEPGPPYTTGEHLVENAGKMVLLDKLLPKLKDRDSRVLIFSQMTRLLDILEDYLMYRGYQYCRIDGNTGGEDRDASIEAFNKPGSEKFVFLLSTRAGGLGINLATADVVVLYDSDWNPQADLQAQDRAHRIGQKKEVQVFRFCTEYTIEEKVIERAYKKLALDALVIQQGRLAEQKTVNKDDLLQMVRFGAEMVFSSKDSTITDEDIDRIIAKGEETTAELDAKMKKFTEDAIKFKMDDTAELYDFDDDKFGSLLNSIYILDFLKEENKLDFKKLVSDNWIEPPRRERKRNYSESEYFKQALRQGAPAKPREPRIPRMPHLHDFQFFNNQRLNELYEKEVRYLMQANQKKDTIDGEDEDQLEPLTAEEQEEKEQLLEEGFATWTRRDFNTFIRACEKYGRNDIRSIAAEMEGKTEEEVQRYAKVFKERYKELSDYDRIIKNIERGEARISRKDEIMRAIGKKLDRYKNPWLELKIQYGQNKGKFYNEECDRFMLCMVHKLGYGNWDELKAAFRMSPLFRFDWFVKSRTTQELARRCDTLIRLVEKENQEYDEQERQARKDKRMAKNMTPTKRSALRVSEGETTPSNSFKRRRQSLMDDYVGSGRRKRG

SEQ ID NO: 151730 - protein, 67 aa, Oryza sativa
  unsure (1)..(67): unsure at all Xaa locations
  Clone ID: PAT_MRT4530_51848C.1.pep
CRVXLXFIXXYSXEXHXTXXPGXXGXRRGGALWRGXAEEXRRXSVDLGXGEXIXRQARDGRGGEXVT

SEQ ID NO: 151731 - protein, 141 aa, Oryza sativa
  Clone ID: PAT_MRT4530_51849C.1.pep
MSTPAAGEKPALRKPVFTKVDQLKPVTSGHTLTVKVVSATPVPGRARPGVAAPSRPPRIAECLIGDETGAIVFTARNEQVDLLKPGATVIMRNAKIDMFKGSMRLAVDKWGRIEATEPASFTVKEDNNLSLVEYELVNVTE

SEQ ID NO: 151732 - protein, 53 aa, Oryza sativa
  Clone ID: PAT_MRT4530_5184C.1.pep
ISAFNSQVPGTQSLAMTLFAASPEVPDGVLTKAFQVGTKEVEKIKSRLAPKKR

SEQ ID NO: 151733 - protein, 52 aa, Oryza sativa
  Clone ID: PAT_MRT4530_51850C.1.pep
MSTATAVVFMADGKDEGSGGEAIPLSRFGLHRSGVGRGEGKPKWLPSGPRSW

SEQ ID NO: 151734 - protein, 190 aa, Oryza sativa
  Clone ID: PAT_MRT4530_51851C.1.pep
FGDWALECEQFAVVTRCTWGTAGRRLWGRHVDALVGSPSQNIHLKADATDNNATEGIVVGNLTHPLFDSGRAPTGRDRESIGRRRKGVDADDPSNARKIAFAVFELIHRIFDPASQVEFSIGVDDELVVPSPPHVAHGGNPLARKIGPGVRYVHLIALHYSGKHHALVGWVGWLVGWLVGWKSELVVFQL

SEQ ID NO: 151735 - protein, 513 aa, Oryza sativa
  Clone ID: PAT_MRT4530_51852C.1.pep
MAGSTLFRWLFLLLAIVSLAAADSGSGEAETTVPGQIRLSCGASASATDGDGRAWDGDAVSTFAPSVTGVAADASYQDPSLPSPVPYMTARVFSSSYTYSFPVKPGRVFLRLYFYPSAYGNLGAAAAAADALFGVTAGGITLLRDFNASQTALAVGYAYIVREFSLNVSSGATSLNVTFAPSPRGAPGHGSHHYAFVNGIEVVPTPDMFTTPVPAFANGGRPNPMPLRADTAFQTMYRLNVGGEAITPRDDAGGFYRTWDNDAPYIFGAAFGVTFAKDSNVSVRYNPPSVPKYAAPEDVYATARSMGPNAQINLNYNLTWILPVDAGFYYLLRFHFCEIQYPITKVNQRSFFIYINNQTAQSQMDVIVWSGGIGRAVYTDYLVVTAGSGQMDLLVALHPDLSSRPEYFDAILNGLEVFKLHKYGTHSLAGPNPPIPLKQVFSTVDGSRSESRKKSVVCAAVGGVAAGCFLAVLVAFAVAWAVRRRQRKAAAEKPADGLLGPTKGSALYDPVQK

SEQ ID NO: 151736 - protein, 387 aa, Oryza sativa
  Clone ID: PAT_MRT4530_51853C.1.pep
MADAPPPVLTLQVKKGRRGGETRQWRAGAVLRVGRVATGNDIAVRDAGASQRHLSIEFLPPPASRWAVSDVGSSNGTLLNGSPLVPTVPSPLSDGDVIKIGESSMLVVSIAPDSDPNPGPRRSSRQSAAVPPKPDEEEEQEKGKDEEQEEKEEEEVPVVTRRGRSRKAAPEAAVAPPPPRARSTRAAARRGKAVDTSLDERESEMAGKGRGRATRSNARKCRMAVPEDDDDDGEQQEGATAVAEEQIKDQPRAMAVTDGEEEDDKVEAMDGEVEQNDKASEEEEVPVARRGRARRAPKGKATASSNAHAASDNAVEEEDGGRGEGAAVEVEGESSGSSSLETMTLREWFQRMNVYLPRMINEAAEEALSALRERHRRIDEYISTLED

SEQ ID NO: 151737 - protein, 137 aa, Oryza sativa
  Clone ID: PAT_MRT4530_51854C.1.pep
MWSIAHNRGHGYSNSFTLARGIRLYPEDTIHRHVTVSSCTHDENVTMSSGCDKTLHITPSDQSHHTSGFTPTSRKAADSSLSCHGESGSRSTEHPGQPNSITPTLAWERQLDESYTSSQAVTHSRLWQALYVFQCIP

SEQ ID NO: 151738 - protein, 60 aa, Oryza sativa
  Clone ID: PAT_MRT4530_51855C.1.pep
VRMWSQRDDGLCWREAGMGLDVRGGDFLAAGRGDQGLVFAICYGRGVVMSLPRSSGAGRV

SEQ ID NO: 151739 - protein, 65 aa, Oryza sativa
  Clone ID: PAT_MRT4530_51856C.1.pep
MAFDGALNSQGVGAGFILTSPTGDKFKHTIHLDFRGTNNTAEYEGLLARIRAAAALGVKRVKPAI

SEQ ID NO: 151740 - protein, 490 aa, Oryza sativa
  Clone ID: PAT_MRT4530_51857C.1.pep
MEAAAAAAKKRRFGRSTGKGSLGSDGLDHISCLPEAILGEIISLLPTKDAARTQAVSRRWRPLWRSTPLNLDVDSLSTQERKRTMFVSRILASHPGPARRLSLPFFRLRDRYAKLDGWLRSPALADLQELDFSYDIEDEEALYPLPPSALRFAPTLRVVELRTCHFPNGMAPALHFPRLARLTLYRVTISEDTLHGLLSRCSALESLLLVGNFGIRRLRINSPFLRSLGFSASSWEGYRDANFQEVVIEDAPCLERLMPLYPNHGPATIRVIAAPKLEVLGVLSDGISQLHLGTTFFQKMIAVNLTTSIRTVKVLVLDSNGPNLDVVVDFLKCFPCLERLYVVIDYNFVKYYIAKCQPSRPHKVIKNIRSYDPLHPIECMELHLRKVVIRYYEGKRPDVDFAKFFVLNAKVLREMDFCSPSNRNLKWQDNQHRRLSLENKASQVAQFTFKTTSRTRNELTRNRHTHELSMSDPFDFSSCLCSSCRFFFQL

SEQ ID NO: 151741 - protein, 99 aa, Oryza sativa
  Clone ID: PAT_MRT4530_51858C.1.pep
GIGIGEMEFGKEIPDLRFHFTFVSPKHLYLKLVILPSFSLKILTVGIVLHQFSQAIKVDLFTYFDRPNIYSRIYIQPMDGSIGNILNYVLLRSSSCLEQ

SEQ ID NO: 151742 - protein, 54 aa, Oryza sativa
  Clone ID: PAT_MRT4530_51859C.1.pep
RKEQLCLKNFSVLPVVNTFGTQVCHFQILSMVNLYAKPKCKKPPTTNHNKNFIT

SEQ ID NO: 151743 - protein, 144 aa, Oryza sativa
  unsure (1)..(144): unsure at all Xaa locations
  Clone ID: PAT_MRT4530_5185C.1.pep
YVIVGAGNGGGYFHRTSVXHGMADGRLCIVSKEPAPPYERSALTKGYLFPPDKKPARLPGFHTCAGSGGQRQTAEWYKENGIEVPDEDPAVAFDGKTQTLKTSSGKVLKYGSLIISTGCEASRIPEKIGGELPGVHYLPDAADA

SEQ ID NO: 151744 - protein, 76 aa, Oryza sativa
  Clone ID: PAT_MRT4530_51860C.1.pep
NAPPYYFFFFFTNFFFFFFYFFLFFFFFFFFFFLFSKNVTKLIKDQAFIYSTITHHARACDPSHVFCTYARTAGKR

SEQ ID NO: 151745 - protein, 93 aa, Oryza sativa
  Clone ID: PAT_MRT4530_51861C.1.pep
GKSPETPKRPDPGGKNPPNENPKPRGGKTKRYNYPRQPQFRGKTGPEGGPLPGFRPPPLAEEKKKAPGRTNRPRAPPPLGGGGCPPLNRAREG

SEQ ID NO: 151746 - protein, 61 aa, Oryza sativa
  Clone ID: PAT_MRT4530_51862C.1.pep
YGTYGVDTVLWFHSRALLSVEAVGWVLCDHAARSIRHFPWKHVFISRRVCWCKVIMVCLDL

SEQ ID NO: 151747 - protein, 108 aa, Oryza sativa
  Clone ID: PAT_MRT4530_51863C.1.pep
MWLTSLSASPLAAVILTTAQAGSSPQPESIGPLEKRFINGDGRIRAEDFSEGGAVNSQSARLALAHERHVGDVVGGDSTGCCYRRHGPIRELTLAGVLGALALGGEFH

SEQ ID NO: 151748 - protein, 392 aa, Oryza sativa
  unsure (1)..(392): unsure at all Xaa locations
  Clone ID: PAT_MRT4530_51864C.1.pep
MASATLLKSSFLPKKSEWGATRQAAAPKPVTVSMVVRAGAYDDELVKTAKTIASPGRGILAMDESNATCGKRLASIGLENTEANRQAYRTLLVTAPGLGQYISGAILFEETLYQSTVDGKKIVDILTEQKIVPGIKVDKGLVPLAGSNNESWCQGLDGLASREAAYYQQGARFAKWRTVVSIPNGPSELAVKEAAWGLARYAAISQDNGLVPIVEPEILLDGEHGIDRTFEVAQKVWAETFFYMAENNVMFEGILLKPSMVTPGAECKDRATPEQVSDYTLKLLHRRIPPAVPGIMFLSGGHSXELEATQNLNAMNQGPNPWHVSFSYARALQNTCLKTWGGXTPENVKAAPGRAAPPQPRPNSLAQLGKYTSDGEAAXEAKEGMFVKNYVY

SEQ ID NO: 151749 - protein, 56 aa, Oryza sativa
  unsure (1)..(56): unsure at all Xaa locations
  Clone ID: PAT_MRT4530_51865C.1.pep
QRCGWEGIVCSFXHTKRDRETKRSSCNHCLGXQLXXMTRWXXXDFTSHLYYTXLSX

SEQ ID NO: 151750 - protein, 232 aa, Oryza sativa
  Clone ID: PAT_MRT4530_51866C.1.pep
MTVVDAESRFHVLAVDDSLIDRKLIEMLLKNSSYQVTTVDSGSKALELLGLRDEGDDSSSSPSSSSPDHQEIDVNLIITDYCMPGMTGYDLLKRVKGSSSLKDIPVVIMSSENVPARINRCLEDGAEEFFLKPVKLADMKKLKSHLLKRKQQLPMAAAAPDKPPHKPDEAAASAAAIAEAATAQTDGIISDCSCSGSSKRKAAAMEQEVISSPDQRTKPRLSSTSSGLAVET

SEQ ID NO: 151751 - protein, 72 aa, Oryza sativa
  unsure (1)..(72): unsure at all Xaa locations
  Clone ID: PAT_MRT4530_51867C.1.pep
LSACGPSLCGVRGTYVWNPLALLLEFILRKVVPFFIRKRDXXIYVFGWNVIISVPLIMFLGLPNFGRPESMP

SEQ ID NO: 151752 - protein, 197 aa, Oryza sativa
  unsure (1)..(197): unsure at all Xaa locations
  Clone ID: PAT_MRT4530_51868C.1.pep
CSCWCRHWSTTSSVARRASSPRTASSAGRRRGGGDTGEGEGGGRARXASTGERGGGXGEAATVAGEHGCGWGAAAPTTSRRSASSSSAAPGAGXDSSDRRWRPRSPRRRLLVARPLGRGAALAPAARIGXRTEVASIDDDEACELVSGADLVIGGDVDNEGEGVRAYLLRLPRRLQPRAAIADRTRGMRTVTNASDL

SEQ ID NO: 151753 - protein, 154 aa, Oryza sativa
  unsure (1)..(154): unsure at all Xaa locations
  Clone ID: PAT_MRT4530_51869C.1.pep
HEGERSPARVHPSTPRDVRGPHRRSPLAATPSAAAGRRRGSGGRDGVGGVDEHGADAARLLRQRPLHRLRLHPPRLLPPPPPVAAAAAPASPPPPPTSSPPSTSXPPPPPPPXPASTPPPSPPSPPAPSSVLPHADTPRPPPPPPPPTPPPIRM

SEQ ID NO: 151754 - protein, 170 aa, Oryza sativa
  unsure (1)..(170): unsure at all Xaa locations
  Clone ID: PAT_MRT4530_5186C.1.pep
GGPTSLVIEEAERSLQYALCVNRCLVNKRFLIAGGGAPEKEMSMQLPAWAKELQGMESYCIKEFAEALEXVIPYTLAEKAGLNPISIGTELRNRHAKGEKNAGITVRKGQITTILEANARKPXLISTXAVALVGECVTIISNNCLIIHPHVKVSLEHYFVCVPICVVPSP

SEQ ID NO: 151755 - protein, 44 aa, Oryza sativa
  Clone ID: PAT_MRT4530_51870C.1.pep
PHQCPDNNSYPSENLVSSHLKCSCYFASVIVNTRVAFASNNFGT

SEQ ID NO: 151756 - protein, 74 aa, Oryza sativa
  Clone ID: PAT_MRT4530_51871C.1.pep
HIDISFLDNDGNLAGSCIQILTTPIGVALRALFNYLIKRGNLESKFLLTSYWYCIQLSTPSLLIKVEIKNSGTG

SEQ ID NO: 151757 - protein, 132 aa, Oryza sativa
  unsure (1)..(132): unsure at all Xaa locations
  Clone ID: PAT_MRT4530_51872C.1.pep
RVAPRPVFLVRAVPFSAHRSASFLVSSGATATAGHLGLRDAXAAGXAXRDGFPVYADDIFLTGGACPGVHMMMLFLXWNEIDGVLCPVPXFPLCSASFVLSGGAFVPCYLNVSSGWGLVISVLLKHLXDSSV

SEQ ID NO: 151758 - protein, 324 aa, Oryza sativa
  Clone ID: PAT_MRT4530_51873C.1.pep
WRYNACMGDAFAFDGAVAMPRGAANMAATGKSGGWASAMLSGMRLMTRSMLPLWSKASLRLQWGMRVPPELKAVLMDDDYHQAASSPGTSPPTHRTEEAVVGVRRRRRRRRRRRSPGLAAEAEQRALASGRDAAVLEFYSPRLRQCASLQGLVRELEDGAGGWTGFAIADAEDDRWLPECWGRGIAAHWVSAAGSVKPEPLEMGGGRQGGGEAQQRPSLAERMGGTQIKVVMEGKGCNGWVLIDSMVNTWWRTCVSNNPSLQFLDIVDRAKTTIDASKQRGETTRIDQMHGSIRLKTTSVFLESYRWHFNQKVQTVCAWWIMHT

SEQ ID NO: 151759 - protein, 74 aa, Oryza sativa
  Clone ID: PAT_MRT4530_51874C.1.pep
LLFSCYISDSEISFVTMHVQVQPCADALINNGLNVFRQQHLLDWKRLLKYSLGMFFFSLYGFDEVLHQKILFGS

SEQ ID NO: 151760 - protein, 127 aa, Oryza sativa
  unsure (1)..(127): unsure at all Xaa locations
  Clone ID: PAT_MRT4530_51875C.1.pep
FGPSRGEEPSGERLPAGXAEKGXGEGXKRGGXKRKTLQTYXIYIFKVLKQVHPDXGISSKAMSIMNSFINDIFXKLAGXSAKLARYNKKPTITSREIXTSVRLVLPGELAKHAVSXGTXAVPKFTSA

SEQ ID NO: 151761 - protein, 83 aa, Oryza sativa
  Clone ID: PAT_MRT4530_51876C.1.pep
MRMTGMRLSLEMRPWMSFITGGVILWRMNFSLRTYLYLFITYAYIFFIFSYFLSSFLSLYFFLLLFFFYFLFFYFFYFTLYFY

SEQ ID NO: 151762 - protein, 420 aa, Oryza sativa
  Clone ID: PAT_MRT4530_51877C.1.pep
MEREVVVSEDAAASSSSSSSSAAAASFSLAETRVICRVCQKQFAQYTCPRCNARYCSLPCYKGHSVQCTESFMRENVMDELKQMQPEDESKKKMLDILKRFHLEEEDMDSEGEDESILSEELIQKVMSGDEIKLEDLSDDEIKRFRQALASGELSKMIEPWTPWWKKPSARSISLSPDGSQLIRQVSVEDTDTSDPMADPESSISEIPEGPESALPSLEQLTRAEPSPLLAVHLVDILYSYCFTLRLHNGDWRSDPFGASTVALSVSKVMGEDAKPETVSEALTACIEETCSPAYRHTGGFRFAIALVDDIISLLTLGGNALVCALCDFRRLIHIGERMLKAEKLGKAERSRSTQKLRAADRKLYFMTCWVHEQPNEAWSSLARLVEVQKASLEELDCGSQFQRAGRKNDAQSKVLIEEI

SEQ ID NO: 151763 - protein, 119 aa, Oryza sativa
  Clone ID: PAT_MRT4530_51878C.1.pep
MRRRRRRGVAARRAQADETVRDTGDQATAIAAGKSRPKASRPMRRDARLGHPIRPKKNMSAARRRQGPILAPPIRQNNNDRCAVRARIGTSDVQFPCGQGRGKLEEEDSRQYNCSSDEQ

SEQ ID NO: 151764 - protein, 115 aa, Oryza sativa
  Clone ID: PAT_MRT4530_51879C.1.pep
GERRRWRRRHRLQMAMWVLAAAPMPDGDGVGGCRERRRCARWGAAPWGLGNQAIGKGMHWSMVAARGPRASSSWLIISNELKCQLGLLGKSNEPSQACHEPSELTSHELPVHPYI

SEQ ID NO: 151765 - protein, 141 aa, Oryza sativa
  Clone ID: PAT_MRT4530_5187C.1.pep
VDSRGSPLPISNGKKRKPTRYELDVQAREEKKKRKHKGLPTGSRNVITEQKTASAKVKKDPRVGSRKKVPLMVEFVNKPEKGQMIKPVPLEPSNHATKATVSPEVELTQLENNECLNQLLDQLEAVCAYHISCPDRIYYGR

SEQ ID NO: 151766 - protein, 63 aa, Oryza sativa
  Clone ID: PAT_MRT4530_51880C.1.pep
MRLLLHGLLLAAAASDREEKVQSAEDQENRRKKGSFAPYVWRDLVWKVVRRVTVKVKCKYMTN

SEQ ID NO: 151767 - protein, 117 aa, Oryza sativa
  Clone ID: PAT_MRT4530_51881C.1.pep
MASLSSFLLAAAVATLFVVGSYATELTFKVNEGSSATSLELITNVAISEVEIKEKGASDWTALKESSSNTWTIKSGSPLKGPFSVRFLVKNGGYRVVDDVIPESFTAGSVYKSGIQL

SEQ ID NO: 151768 - protein, 185 aa, Oryza sativa
  unsure (1)..(185): unsure at all Xaa locations
  Clone ID: PAT_MRT4530_51882C.1.pep
LRRDAKERQQTGRPQREEARQRAPRRRRVRRSAGXKXRTETGQRQSRXQDRDEPPSTRTRQKAGREKEKTGDRTPPQAGGQGPREGKGGKPPSRGRGGPGASAQRTPTERGKSPGRGSRTKPQAQKTTRKRGDTGAGKKKGGREKETKGTGPLKKGAKGERPRKEEKGEDTSKGWEWTVHWKQEI

SEQ ID NO: 151769 - protein, 61 aa, Oryza sativa
  unsure (1)..(61): unsure at all Xaa locations
  Clone ID: PAT_MRT4530_51883C.1.pep
ARRQSXEEGLGFRRRPWQLRSRLREPNPAPGTARRGRSXGRTSXAXXSSTPXIAXRLSRSX

SEQ ID NO: 151770 - protein, 468 aa, Oryza sativa
  Clone ID: PAT_MRT4530_51884C.1.pep
MAQLASAQIGSGLSAQYQSKQTKNFILACIPFKKLEMPWWRKKSADESDSGTIAKDMHVLMAAGSDPILWQGPDSFGRFGTFQGKYVGETLMHALSELESAFKKLATDDDFQRELAGILKDYVGRLSPLYFVESLTEHYRRENGTGPLIYLKREDNNHTGAHKINNAVAQALSAKRLGKKRIIAETGAGQHGVATATVCASFGLECIIYMGAQDMERQALNVFRMKLLGAEVREVHSGTATLKDATSEAIRDWVTNVENTHYILGSVAGPHPYPMMVREFHKVIGKETRRQAMEKWGGKPDVLVACVGGGSNAMGLFHEFVDDQDIRMIGVEAAGYGVDTDKHAATLTKGEVGVLHGSLSYVLQDDDGQVIEPHSISAGLDYPGVGPEHSFLKDIGRAEYDSVTDQEALDAFKRVSRLEGIIPALETSHALAYLEKLCPTLPDGVRVVVNCSGRGDKDVHTASKYLDV

SEQ ID NO: 151771 - protein, 123 aa, Oryza sativa
  unsure (1)..(123): unsure at all Xaa locations
  Clone ID: PAT_MRT4530_51885C.1.pep
LVSTHGYXNMYTRGHSKLSQRSIQLLLAHRHRLYRGCIGFRSSAKGXVLCSVSLGHRIGYIGVVQGXSVHSTSWIALVQLIYLPIYLSYILVNLVEHLNLIILAEICFXGLCWYRLNYLARLD

SEQ ID NO: 151772 - protein, 137 aa, Oryza sativa
  Clone ID: PAT_MRT4530_51886C.1.pep
LSKTDGRDRTVHDRLTADDPDDVSNDVTDSGGGSAEQTARAAHARRRTTARRRERRAPTGRARRGELTGDQNNGGGAKDGAGDEEEAAETRRRSSRATATAGAAAAHGWSGGGDGKARVHGARAFPTTRGEGEGGDG

SEQ ID NO: 151773 - protein, 59 aa, Oryza sativa
  unsure (1)..(59): unsure at all Xaa locations
  Clone ID: PAT_MRT4530_51887C.1.pep
AYFYYLGAXWLAFFQLTMGVKGNXXXXPFDAFGXCCFRCQFVSPVLLXRPVLXPSFELP

SEQ ID NO: 151774 - protein, 293 aa, Oryza sativa
  Clone ID: PAT_MRT4530_51888C.1.pep
MTSPTAAAARRSRRLGRRTLAGERRLDDANGGHQRVERDAANSPVTKTTAEEQRTAPATKKKRRKPSGRRRRRRSGGLRRRRRGGRGRRRPCEPDGGLPERQRRLERRRRTAGAAAATAKLGYTVLGLFQRREAKAKGATGRGDIGGPYKGVGRRRRRPTAAGDEKERLKIRRKERNPIRPRIHKFPNRIRRRFQRRKGRGDREDHLPSTNSAGEGKTWPNLEGDGGGSRLGFAGGGGARRTTTLTSGPHLSATARERRAAARRIGPAGPRERERGKERGFGPAFGPKPKEDF

SEQ ID NO: 151775 - protein, 1484 aa, Oryza sativa
  Clone ID: PAT_MRT4530_51889C.1.pep
MASMLFLELVFVQPIFCNHLVFPMLFLFWPKDFSKQEKNSLLNFLTGLSKDGGLSMSWKDGVDCCEWEGITCRTDRTVTDVSLPSRSLEGYISPSLGNLTGLLRLNLSYNLLSSVLPQELLSSSKLIVIDISFNRLNGGLDKLPSSTPARPLQVLNISSNLLAGQFPSSTWVVMTNLAALNVSNNSFTGKIPTNFCTNSPSLAVLELSYNQFSGSIPPELGSCSRLRVLKAGHNNLSGTLPDEIFNATSLECLSFPNNNLQGTLEGANVVKLGKLATLDLGENNFSGNIPESIGQLNRLEELHLNNNKMFGSIPSTLSNCTSLKTIDLNSNNFSGELMNQGKEAENKLTFTGIVEATNNFNQEHIIGCGGYGLVYKAQLPDGSMIAIKKLNGEMCLMEREFSAEVETLSMARHDNLVPLWGYCIQGNSRLLIYSYMENGSLDDWLHNKDDDTSTILDWPRRLKIAKGASHGLSYIHNICKPRIVHRDIKSSNILLDKEFKAYIADFGLSRLILPNKTHVTTELVGTLGYIPPEYAQAWVATLKGDEMVSNGKQIEVLDLTFQGTGCEEQMLKACPGIASNSRRESPSRDGRLPGGGEAPAGGGGSPGEGDGTANPATLSPPDGGLSMSWKDGMDCCEWEGINCSQDKTVTEVSLPSRSLEGHISPSLGNLTGLLRLNLSYNLLSGAIPQELVSSRSLIVIDISFNRLNGGLDELPSSTPARPLQVLNISSNLFKGQFPSSTWKVMKNLVKLNVSNNSFSGHIPTNFCTNSPSFAVLELSYNQFSGGVPPELGNCSMLRVLKAGNNNLSGTLPDELFNATSLDCLSFPNNNLEGNIGSTPVVKLSNVVVLDLGGNNFSGMIPDTIGQLSRLQELHLDNNNLHGELPSALGNCKYLTTINLKSNSFSGDLGKVNFSTLPNLKTLDIDMNNFSGKVPESIYSCSNLIALRLSYNNFYGELSSEIGKLKYLSFLSLSNNSFTNITRALQILKSSTNLTTLFIAYNFMEEVIPQDETIDGFENLQALSVDHCSLSGRIPLWLSKLTNLNHNNLSGQIPQSVCSLTSLRVLDLSNNNLTGSIPGELNSLNFLSAFNVSNNDLEGPIPIGAQFSTFPNSSFDGNPKLCGSMLTHKCKSAEEASASKKQLNKRVILAIVFGVLFGGAAIVLLLAHFLFSLRDAIPKIENKSNTSGNLEAGSFTSDPEHLLVMIPRGSGEANKLTFTDLMEATDNFHKENIIACGGYGLVYKAELPSGSTLAIKKLNGEMCLMEREFAAEVEALSMAQHDNLVPLWGYCIQGNSRLLIYSYMENGSLDDWLHNRDDETSSFLDWPTRFKIARGASQGLSYIHDVCKPHIVHRDIKSSNILLDKEFKAYVADFGLSRLILPNKNHITTELVGTLGYIPPEYGQGWVATLRGDVYSFGVVLLELLTGRRPVSILSTSEELVPWVLEMKSKGNMLEVLDPTLQGTGNEEQMLKAPTEDIEGTRQSR

SEQ ID NO: 151776 - protein, 97 aa, Oryza sativa
  Clone ID: PAT_MRT4530_5188C.1.pep
WSSWRRPHFSVHIPYILPCLKLLSRGTKMSVGTPGLCCSFTLLIALSRLIYLYNGGAQRYVALLVSWGFGQNGGGDIVVIRLHLLLKTCYYVIVSGS

SEQ ID NO: 151777 - protein, 289 aa, Oryza sativa
  Clone ID: PAT_MRT4530_51890C.1.pep
YKSKLMAVARGVALAVVLAAAAAILAASPVAAQGGGGGGGSGSCMTEIISLASCLGYMSGNSSAPKPSCCTALSSVVTSKPACLCAVLGGGASSLGVTINNTRALELPAACNVKTPPASQCSTVGVPMPSPATPATPAAPAVPSETPAGTGGSKATPTTATTTTGQSASGGSVGKAASMATVVVSVAFALIHPAGGWGDGHRGMAGEDVRQPATREKGRVAAAGAQGEHGGGGGLRSPRPQPVFNTEHRRRSSPLLATGHAVSHQGRGRGGRAWRSEGSKPNPSVQRRI

SEQ ID NO: 151778 - protein, 73 aa, Oryza sativa
  Clone ID: PAT_MRT4530_51891C.1.pep
APLRQAVLVSAARHVHQMCVGPPGQVGHVSQDLRMLIRSNPLNALYKAQQVACQTAHATLLEPRGLCSQCVVY

SEQ ID NO: 151779 - protein, 43 aa, Oryza sativa
  Clone ID: PAT_MRT4530_51892C.1.pep
WPSHTMQLQDLCHAFWTTIVYKIDLSSLGLTHLEDVVIISCTH

SEQ ID NO: 151780 - protein, 420 aa, Oryza sativa
  Clone ID: PAT_MRT4530_51893C.1.pep
MVGASKKVAYVLLLLLALAAAALSVVVLHKVRERRAFAVLLRERDRQLISTRILLQKNGLMKEKAFNKEMKRKLEELKATTSSLRTQKTDLKTKIKGLEATATTLKNREKELEAVLAEKNSRVSQMEATLTDKNSHIRQMEERAAGTNPDQMAALMELLQQKEAELEEIKVRFQDYKTTERKSVGSKSTHVQSNNANARPDNAVVEKVTSSSDATPTRAEEKSSKNTTTAESRHPKDTSLEEKQVKSATSKEEDGLQDKTDDAIEDIDDIYGESHSKKIEFPRRNKKFLTNSGVDSQDEELHRIEHPGNSLDQDSDRVRYNKLLEKEIDKVSGETKNKKSIDGSLEKISKHSLGDANKNGLKQTVEDMAGGTAAVKPNMSVNDDGTQQQNKRPKKKKTRSKKKMIDSATTNSSSEVTKEK

SEQ ID NO: 151781 - protein, 89 aa, Oryza sativa
  Clone ID: PAT_MRT4530_51894C.1.pep
MGTEETSSGRRRRRQDRARTATRSRGLLSIARRMQEQKQKQTEPDKAKNGREGEELAASYVSPIVLDEPMALSYERWGLDLELGGGGGG

SEQ ID NO: 151782 - protein, 122 aa, Oryza sativa
  Clone ID: PAT_MRT4530_51895C.1.pep
MAFVAATEDEDEEGPIGAGPGAHRGGGGGSVMPAGGGACRSCGKLASLNKLSHRSESEAVEEKALATETPDQSSMLYGRAGAEELIMASSAEELVMALPAEYLVKRPRRRTWSWRHDAYLTS

SEQ ID NO: 151783 - protein, 326 aa, Oryza sativa
  unsure (1)..(326): unsure at all Xaa locations
  Clone ID: PAT_MRT4530_51896C.1.pep
MESNRQQYVHCFLLRQKAVVILLVLILVWLRNKNGKRSKCKGVRYGPLIHRDVWRTSELIRLIDTSDRICTQQLRMPRQLFYRLCSRLKNKGLLVDTFHVSVEEQVAMFLKKGGQHHSVPSVGFSFWRSGETGCIGALDGTHIKASVPAKKVDRFRGRKSYPTQNVLAAGDFDLRFTYILSXWEGSAHDSLVLQDALSRPNGKYFLADAGYAARPGILPPYRRVRYHLKEFRGPQGPKCPKELFNYRHSSLRTTIERAFGALKNRFKILMNKPFIPLKAQAMVVIACCALHNWILDDGHDEFVSDEDTWYARLPRSSNRVTDKGAD

SEQ ID NO: 151784 - protein, 947 aa, Oryza sativa
  unsure (1)..(947): unsure at all Xaa locations
  Clone ID: PAT_MRT4530_51897C.1.pep
MAGGGGGRGRGARVAAPAGDSGKGAQAEWLRIYDGIVAMLRKTQAQVEELVAERDHLAAFVKIQHDFMVSRVGRLQSSLQQARKADAIRKRYEAANMEILIGDKEREARSYQKIAELTENDLEDFRTSIAALAAENYELKEKLKEVERHAELAENTVDHHIHSPRDLRAELKKLKHAYKTLSSEKEKEVSALRAEKDFVWNQLRTMENDYTDLLKKKKIEAAQATEAAQKLQKNLEELQDQNKGNEIGRLQAEAVDAKMNISILEDKLQEMLSLVKEKDLEIEQLKHGQPMTSQINKKDINQKNRKCRSQDPPSRDKSTNLQATPPGRKVKISRQHASSSKQKQVQSRNNSRRQKLEGDKSEVGEKRKRALPSSSQYIVVMCRSVLILGKLRELHLVVNMDRKSFIHADNMSTMQGLQRCSARQQAKSSASPVVQPLLFSPIFRVPKMESNRQQYVHCFLLRQKAVVILLVLILVWLRNKNGKRSKCKGVRYGPLIHRDVWRTSELIRLIDTSDRICTQQLRMPRQLFYRLCSRLKNKGLLVDTFHVSVEEQVAMFLKKVGQHHSVPSVGFLFWRSGETVSRYFHIVLRAMCELARELIYVRSTDTHTKITSNPNKFYPYFEGCIGALDGTHIRASVPAKKVDRFRGRKSYPTQNVLAAVDFDLRFTYILSGWEGSAHDSLVLQDALSRPNGLKIPEGKYFLADAGYAARPGILPPYRRVRYHLKEFRGPQGPKCPKELFNYRHSSLRTTIERAFGALKNRFKILMNKPFIPLKAQAMVVIACCALHNWILDDGHDEFVSDEDTWYARLPRSSNRVTDKGADVIQHLLGVTKTVASSIPEKCATPKVSDKADSNHTKVSEDSAKTYHXLSVNRSQVHWHFRLCKEKCSWICAALGKSGYGFDATSCKFNIDPSDIFVFENILFPLWNILKDCFNCEEQAHVIVGSMQ

SEQ ID NO: 151785 - protein, 124 aa, Oryza sativa
  unsure (1)..(124): unsure at all Xaa locations
  Clone ID: PAT_MRT4530_51898C.1.pep
FHRLSVVRSLGADAAVRVLARAEDVGXEVERITAEMGGDIDVSLDCAGFSKTVSTALEATRGCGKVCLFVMGHNKMTVPLTSGAIREAYVVGILRNRDTLTLCIEFLLSFKIDLNPLMIHRFLI

SEQ ID NO: 151786 - protein, 124 aa, Oryza sativa
  Clone ID: PAT_MRT4530_51899C.1.pep
AISRRSKATLAGDTARSRAEPIALSTSIPGKLHRISTASLSPFSTAWQSGERPCVRTLIQATYAGEATTVGSSRLRTWRRSDVFLSSTIDSKRYVTRVPVFDELATVSREGAAAELVHSPAHYR

SEQ ID NO: 151787 - protein, 164 aa, Oryza sativa
  Clone ID: PAT_MRT4530_5189C.1.pep
KESYQEALEERVISLIASLFGGITKGSRRIRLLGKFVENECEKIDRLMEFYTRYSERVKAETERLDSLDLDDLEMDEDERYNRKLEAGLYTLQLIALILGHIWHSGNSQMRTRIELLLRQNKLTKDDVKDILEEYHDNIGDLDGPEEKERAQGRTKEIIASLSL

SEQ ID NO: 151788 - protein, 54 aa, Oryza sativa
  Clone ID: PAT_MRT4530_518C.1.pep
ATVHRMLCKEYHKNTLSWHLCKIDMIWDYYRRILTRSTFTVHSSSIQFWYYKWI

SEQ ID NO: 151789 - protein, 85 aa, Oryza sativa
  unsure (1)..(85): unsure at all Xaa locations
  Clone ID: PAT_MRT4530_51900C.1.pep
MAAVSRGLLARLRHLSIAGPRLPPCXRPFSAEPLXSHPDDDEXAAGGGXXXXXSEGGRFIEARAGVMGPDSRRTGXIXVKXGXXA

SEQ ID NO: 151790 - protein, 67 aa, Oryza sativa
  Clone ID: PAT_MRT4530_51901C.1.pep
GTIFYKLALIISYTDPVRWINQHSYTYVHIITTESDAHQDMSRHTGYTVYVSIVITDFRIGNIAIPH

SEQ ID NO: 151791 - protein, 1369 aa, Oryza sativa
  unsure (1)..(1369): unsure at all Xaa locations
  Clone ID: PAT_MRT4530_51902C.1.pep
MLPSLPPYEKPGLMQNWDRATWFGALDSSNLMRPRVFAVGKLHDKMGTPVNIIVGSHVWVEDPILAWIDGEVVSIKDNEVHVQTSNGKKVKTNKSKVFPKDMEAPPGGVDDMTRLSYLHEPGVLQNLATRYELNEIYTYTGSILIAVNPFQRLPHLYDTHMMEQYKGADFGELSPHVFAVADVAYXSNPVLEAFGNAKTVRNNNSXYTRYKLADARSFHYLNQSSCIEVEGINDAEEYLATRRAMDIVGINEEEQEAIFRVVAAILHLGNINFAKGTEIDSSVIKDDKSRFHLNTAAELLKCDCDNLEKALITRVIVTPEEIITRTLDPASALVSRDALAKTIYSRLFDWIVEKINVSIGQDPNSKQLIGVLDIYGFESFKINSFEQLCINYTNEKLQQHFNQHVFKMEQEEYTREEINWSYIEFVDNQDVLDLIEKKGGLIALLDEACMFPRSTHETFAQKLYTTFKNNKRFAKPKLSRTDFTIVHYAGDKVTYQADFFLDKNKDYVVAEHQDLLNASSCPFVAALFPALPEETAKSSKFSSIGSRFKQLSKSNKAVPLSQNLQLQSLMETLSSTEPHYIRCVKPNNLLKPAIFENTNVIQQLRCGGVLEAIRISCAGYPTRKTFYEFVNRFGVLAPEVLEGSNDDKIACQKILEKMGLENYQIGKTKVFLRAGQMADLDARRAEVLGRAARIIQRQISTYIARKQFVSLRRSATQLQSFVRGTLARKLYECMRREASAVKIQKNVRRHKARVSYLQLQEAAITLQTGLRAMSARKEFRFRKETKAAVHIQARWRCHRDYAHYKNLQGAALTYQCAWRQRLARRELRKLKMAARETGALKEAKDKLEKRVEELTWRLGLEKRLRTDLEEAKAQEIAKLQETLHDMQQQVEEAKAMIVKEREAARKAIEEAPPVIKETPVLVEDTEKINSLTAEVEQLKALLQTERQATETAKKEYAEAERRNEELSRNLKHRLEEKATNMESENKVLRQQAVAISPTAKSLAAYPKSPFQLKTPENGVAPYGEVKPLPDITPISLNPKEPETEEKPQKSLNEKQQENQDMLIKCVSQDLGFSSGRPIAACLIYRCLLHWRSFEVERTGVFDRIIQTIGTAIEGMRASPQSAGRPFLASRLMGGIGDLRQVEAKYPALLFKQQLTAFLEKIYGMIRDNLKKEISPLLGLCIQVPSFLISKVFTQIFSFINVQLFNSLLLRRECCSFSNGEYVKAGLAELEQWCIYATEEYAGSSWEELKHIRQAVGXLVIHQKPKKTLKEITNDLCXPVLSIQQLYRISTMYWDDKYGTHTVSSEVISSMRIMMTEDSNNAVSSSFLLDDDSSIPFSVDDISKSMKEIEVTDVDMPPLIRENSGFTFLH

SEQ ID NO: 151792 - protein, 42 aa, Oryza sativa
  Clone ID: PAT_MRT4530_51903C.1.pep
MDLMRETNGWCASDNSGRGGKAGGNISFMAIGSQELGGIAIQ

SEQ ID NO: 151793 - protein, 1538 aa, Oryza sativa
  Clone ID: PAT_MRT4530_51904C.1.pep
MLPSLPPYEKPGLMQNWDRATWFGALDSSNLMRPRVFAVGKLHDKMGTPVNIIVGSHVWVEDPILAWIDGEVVSIKDNEVHVQTSNGKKVKTNKSKVFPKDMEAPPGGVDDMTRLSYLHEPGVLQNLATRYELNEIYTYTGSILIAVNPFQRLPHLYDTHMMEQYKGADFGELSPHVFAVADVAYSRFGKFVEIQFDKTGRISGAAIRTYLLERSRVCQINTPERNYHCFYFLCAAPPEDTQRYKLADARSFHYLNQSSCIEVEGINDAEEYLATRRAMDIVGINEEEQGTEIDSSVIKDDKSRFHLNTAAELLKCDCDNLEKALITRVIVTPEEIITRTLDPASALVSRDALAKTIYSRLFDWIVEKINVSIGQDPNSKQLIGVLDIYGFESFKINSFEQLCINYTNEKLQQHFNQHVFKMEQEEYTREEINWSYIEFVDNQDVLDLIEKKGGLIALLDEACMFPRSTHETFAQKLYTTFKNNKRFAKPKLSRTDFTIVHYAGDKVTYQADFFLDKNKDYVVAEHQDLLNASSCPFVAALFPALPEETAKSSKFSSIGSRFKCYSKFLACEFSHILLTFPSYSPLVAIMAAYDNTVAHFPPAIHSDIVIRSALLLTFFVFTFLLSNSQLQLQSLMETLSSTEPHYIRCVKPNNLLKPAIFENTNVIQQLRCGGVLEAIRISCAGYPTRKTFYEFVNRFGVLAPEVLEGSNDDKIACQKILEKMGLENYQIGKTKVFLRAGQMADLDARRAEVLGRAARIIQRQISTYIARKQFVSLRRSATQLQSFVRGTLARKLYECMRREASAVKIQKNVRRHKARVSYLQLQEAAITLQTGLRAMSARKEFRFRKETKAAVHIQARWRCHRDYAHYKNLQGAALTYQCAWRQRLARRELRKLKMAARETGALKEAKDKLEKRVEELTWRLGLEKRLRTDLEEAKAQEIAKLQETLHDMQQQVEEAKAMIVKEREAARKAIEEAPPVIKETPVLVEDTEKINSLTAEVEQLKALLQTERQATETAKKEYAEAERRNEELIKKFEGAEKKIEQLQDTVQRLEEKATNMESENKVLRQQAVAISPTAKSLAAYPKSPFQLKTPENGVAPYGEVKPLPDITPISLNPKEPETEEKPQKSLNEKQQENQDMLIKCVSQDLGFSSGRPIAACLIYRCLLHWRSFEVERTGVFDRIIQTIGTAIEGMRASPQSAGRPFLASRLMGGIGDLRQVEAKYPALLFKQQLTAFLEKIYGMIRDNLKKEISPLLGLCIQAPRTSRASLIKGSRSQANALAQQTLIAHWQSIVKILTNYLNVLKANYVPSFLISKVFTQIFSFINVQLFNSLLLRRECCSFSNGEYVKAGLAELEQWCIYATEEVIHQKPKKTLKEITNDLCPVLSIQQLYRISTMYWDDKYGTHTVSSEVISSMRIMMTEDSNNAVSSSFLLDDDSSIPFSVDDISKSMKEIEGSQLTSGKVVVDSPTNDIWQIGRYEVHRSLASDASENHSFSVQQTAPKRMDCLDLTQFHYSLPPEFIVFALRPKEEKIDPYSI

SEQ ID NO: 151794 - protein, 67 aa, Oryza sativa
  unsure (1)..(67): unsure at all Xaa locations
  Clone ID: PAT_MRT4530_51905C.1.pep
WPCPLLXPLSSSVVLPVCVCVSRSLLAGSLACLRGSSLLLVLSSCTPAPSLPACPASSFTVPLFSSL

SEQ ID NO: 151795 - protein, 1443 aa, Oryza sativa
  unsure (1)..(1443): unsure at all Xaa locations
  Clone ID: PAT_MRT4530_51906C.1.pep
MLPSLPPYEKPGLMQNWDRATWFGALDSSNLMRPRVFAVGKLHDKMGTPVNIIVGSHVWVEDPILAWIDGEVVSIKDNEVHVQTSNGKKVKTNKSKVFPKDMEAPPGGVDDMTRLSYLHEPGVLQNLATRYELNEIYTYTGSILIAVNPFQRLPHLYDTHMMEQYKGADFGELSPHVFAVADVAYSRFGKFVEIQFDKTGRISGAAIRTYLLERSRVCQINTPERNYHCFYFLCAAPPEDTQRYKLADARSFHYLNQSSCIEVEGINDAEEYLATRRAMDIVGINEEEQEAIFRVVAAILHLGNINFAKGTEIDSSVIKDDKSRFHLNTAAELLKCDCDNLEKALITRVIVTPEEIITRTLDPASALVSRDALAKTIYSRLFDWIVEKINVSIGQDPNSKQLIGVLDIYGFESFKINSFEQLCINYTNEKLQQHFNQHVFKMEQEEYTREEINWSYIEFVDNQDVLDLIEKKGGLIALLDEACMFPRSTHETFAQKLYTTFKNNKRFAKPKLSRTDFTIVHYAGDKVTYQADFFLDKNKDYVVAEHQDLLNASSCPFVAALFPALPEETAKSSKFSSIGSRFKQLSKSNKAVPLSQNLQLQSLMETLSSTEPHYIRCVKPNNLLKPAIFENTNVIQQLRCGGVLEAIRISCAGYPTRKTFYEFVNRFGVLAPEVLEGSNDDKIACQKILEKMGLENYQIGKTKVFLRAGQMADLDARRAEVLGRAARIIQRQISTYIARKQFVSLRRSATQLQSFVRGTLARKLYECMRREASAVKIQKNVRRHKARVSYLQLQEAAITLQTGLRAMSARKEFRFRKETKAAVHIQARWRCHRDYAHYKNLQGAALTYQCAWRQRLARRELRKLKMAARETGALKEAKDKLEKRVEELTWRLGLEKRLRTDLEEAKAQEIAKLQETLHDMQQQVEEAKAMIVKEREAARKAIEEAPPVIKETPVLVEDTEKINSLTAEVEQLKALLQTERQATETAKKEYAEAERRNEELIKKFEGAEKKIEQLQDTVQRLEEKATNMESENKVLRQQAVAISPTAKSLAAYPKSPFQLKTPENGVAPYGEVKPLPDITPISLNPKEPETEEKPQKSLNEKQQENQDMLIKCVSQDLGFSSGRPIAACLIYRCLLHWRSFEVERTGVFDRIIQTIGTAIEGMRASPQSAGRPFLASRLMGGIGDLRQVEAKYPALLFKQQLTAFLEKIYGMIRDNLKKEISPLLGLCIQAPRTSRASLIKGSRSQANALAQQTLIAHWQSIVKILTNYLNVLKANYVPSFLISKVFTQIFSFINVQLFNSLLLRRECCSFSNGEYVKAGLAELEQWCIYATEEYAGSSWEALKHIRQADLCPVLSIQQLYRISTMYWDDKYGTHTVSSEVISSMRIMMTEDSNNAVSSSFLLDDDSSIPFSVDDISKSMKEIEVTDXDMPPLIRENSGFTFLH

SEQ ID NO: 151796 - protein, 53 aa, Oryza sativa
  Clone ID: PAT_MRT4530_51907C.1.pep
HTSIWKNEGNEFLIYNILIITICIMLCNMATIVNYLLLHMLLQYNVLLLLEAF

SEQ ID NO: 151797 - protein, 51 aa, Oryza sativa
  Clone ID: PAT_MRT4530_51908C.1.pep
LTFITTQGHILKHAQTILGVFYASQTRIIYAQTTGVGLVHLQKSLSSHSLN

SEQ ID NO: 151798 - protein, 221 aa, Oryza sativa
  Clone ID: PAT_MRT4530_51909C.1.pep
SRAAPSSPPSHASSPPSPRQRRLLPVDLAASSPSTAPSHARLAAPPPPRRPQAAAAKAPSRVVSVHRRRSLSAAVLAVELGISPAAATSSGTDSVGGGWPRLVRRQRLHVSRAGSWRAAASSWRRVLGGGEEEGRSPRRAAAGSWRAAAGSCRRRERQVLRHQRRSPPRRRPPRRRNRSRRGWCCRRSPIGPTQSPPSHLHEYCATVPHGPCGLGRETTWP

SEQ ID NO: 151799 - protein, 40 aa, Oryza sativa
  Clone ID: PAT_MRT4530_5190C.1.pep
MVKITRSAGHVRGMGGRRACGVEAADQMENGRILYGGGRP

SEQ ID NO: 151800 - protein, 87 aa, Oryza sativa
  Clone ID: PAT_MRT4530_51910C.1.pep
IKLNVTITPSVKLALIWLKAIAGDQPTPMLDSKRCFRSKKARVTCSLSQSKGSNTLQPKKHSNRMPQMSGLQCLQVHGNWEDLHAKV

SEQ ID NO: 151801 - protein, 76 aa, Oryza sativa
  Clone ID: PAT_MRT4530_51911C.1.pep
MNAAVHAGRISSEDAAARRQNIRGGGGASEEEKRSLRVWSDVLAGGGGAKYPAWRGWMDRAVVKSSAQMDGRDRFG

SEQ ID NO: 151802 - protein, 828 aa, Oryza sativa
  unsure (1)..(828): unsure at all Xaa locations
  Clone ID: PAT_MRT4530_51912C.1.pep
MDDDISYSPLQMIPHTTGQASSQAKSALNGSISTLLTRGLKLSQWGQKKISYFRLQIQIANEDILRLDVAQESRLLTDLERRLRAALKGKCLALASLERIRVRQRARIRNLKEGDAGTAYFYMKLRARRRKALIPRLEHNGKVATTQIDMQQLACEYFETIMGQAEGDSKQFNLQSIQMAKGNLASFDENFTEEEVWAAIKNLPTEKSPGPDGYTSLFYQKCWAVIKDDLLAAMGKFCTGNSQNLELLNSAQITLIPKKEAPTMLKDYGPISLIHSFSKLATKVMARRLATRLDDLVPHTQTAFIKGRSIHENFIFVKGMAQQFHRQKKEVLLLKLDISKAFDMVSWSFLLNMLKYRGFGPRWRSWLAALFLTAQTSITINGDDSRAIKPARGLWQGDPLSPLLFVLVMDTLQATLLQAKRQGILSELNTRKRLPNISAYADDAMLFVKPQRKEVLLIKAVLDLFGAASGLKVNLLKSSITPIHCNQQQLDMVSELLPCKVEEFPIIYLGLPLSMRKPTKAELQPVLDKLAGKVAGWKPKLLSPDGRLCLIKSVLMALPVHFLSALQMPKWAVKEIERKCRGFLWKGQEDVSGGHCLVAWKNVCAPVQNGGLGIRNLDAFGQALRLKWLAKSLEQKNRPWAKSGYKLGEDVEKIFNSAAEFCVGNGKDTKFWTANWLNGGSIAWRWPVLSTYVGRSQLTVAQALTNNRWVRDLQGALSNEAMAQFFQLWDEVHTVELNLEEDTIRWKLSSDGLFTVSSAYSLFFMAREICPFSELIWHIKAPSRVRFFLWLAAKGRCLXLTTWAREDGSMKIAAPFVRVKQRTAYICS

SEQ ID NO: 151803 - protein, 156 aa, Oryza sativa
  Clone ID: PAT_MRT4530_51913C.1.pep
MPERGAKNGSTASGDADAGGGALSAAAAAVMLLNLRRADCRGRLQLPQLSVNSAFVDGSSQHGGTLEAKGRQLGKNPSLDTITRTNCSREFRAETGTASSHDILSEKANQRSLFFGPALGAHHRGKARNHGPPKQALKITILPVDTCYGKITRLGK

SEQ ID NO: 151804 - protein, 1216 aa, Oryza sativa
  unsure (1)..(1216): unsure at all Xaa locations
  Clone ID: PAT_MRT4530_51914C.1.pep
RCYSYTLFGIFNFLCFFSILNYSFHRVLSNHFFENIRRYNSMFAMTSMGVNIINSINDGHGPYIFKISGQLCHRIGSLIPKHGARPEYCQLYIFDTENEIRNRVAVASHREMSFEPNEDIVASLMTMLNAHNPVVQLFRTARDRLHDQGTTEKGRDLIVEDHSLQLQRVNETHCKFMAMQYPLLFPYGEDGFHENLKYRQCHRSGMIKRKKVSLVEYFAYRLHDRDDDFNTPLRCKRLTQSYEVDGFCCVKDSRLNHYRKKKTFQLKYRSSPYKALLDTVSSGIIDASSVGQRIILPGSFTGSPRYYYQNYQDCVALCRRFGCPDLFITYTCNAAWPEITEALAFIPGQQPSDRPDIVDRVFEMKLKLFVDDIKKXEFFGPILGIVYTIEFQKHGLPHVHLIVWLKKDRPLDADQIDTFISAQLPDPSIDPIGYEAVSQFMIHGPCNIPGSSSPCMADGKCTKFYPKEFSDKTVVLPNGHVIDNPCNLITKLTAWFEANKTYPEARQHTFVEFPEHWTWHGDGKFWKPRRNARGKVGRIANVSPNQGERFYLRMLLHIIKGAQDFSDLHTMAGQLYPTFRAACQALGLLGDDCEWSNAMADAAQWALPYQLRQLFVTLLLFCEVTDPIKLLEDYIKPMGEDLAYRTIRPTQGISQPLVQQHIRSYVLDELDKLLKDSGYSLGHFNLPEPEHHDYNVLNNRLVVDELSYDLDATLVEANEQLXINSSQRSIYDAIEHSVLNGSGHTFFVYGYGGTGKTFLWNALLNNIRSRGKIALAVASSGIAALLLPGGRTPHSRFRIPIDIQEYSMCAIKKNTHVAELIERTSLITWDEAPVNHKHCFEALDRTLRDIMPSNNCYLPNKQFGGVTVVLGGDFRQTLPVIPNANKQQILNASITRSHLWQNCVVLHLTENMRLRCPTLSQVDRIELEQFSHWLLSIGDGTLPNSMPTDRPDTTWIQIPEYLLLPAQERNLTGLISFVYEXTPDASELPAYLCQRAILAPTNEVAAAINAQIIGQIANEEMSYYSFDTIDDTTANYCTLQDLYPPEFLNTVRMSGLPDHHLQLKIGVPIMLLRNLSPSKGLYNGTRLIVTQLTHRVIEAQIITGSAKGSKAYIPRIVSVSTDPKWPFKMRRRQFPVRVSYAMTINKSQGXRLSKVGVYLPSPVFSHGQLYVAFSRVTSSKGLRILIENNSAEYERKTHNVVYSDIFHDILSQCCQF

SEQ ID NO: 151805 - protein, 129 aa, Oryza sativa
  unsure (1)..(129): unsure at all Xaa locations
  Clone ID: PAT_MRT4530_51915C.1.pep
MVVAMVGGGAGGRRRAITCGAVGGRAIAPCISYVTGRGGLTQGCCNGVKGLNNAARTTADRPARXGRCLKTLAGTIKSPSTSARPPAFPGKCGVNVGFPISLSTDCSKVARSINPAWTDRSNIDRCWLQ

SEQ ID NO: 151806 - protein, 133 aa, Oryza sativa
  Clone ID: PAT_MRT4530_51916C.1.pep
PPMAASPASTAAAVVNAPAATGGLLLPRGRSSWSWSCCNNNNSSMGRRWRAAAVGEVAAEGNTYLIAGAVAVALVGTAFPILFSRKDTCPECDGAGFVRKGGATLRANAARKDLPQIVCPNCNGLGKLGQIDK

SEQ ID NO: 151807 - protein, 59 aa, Oryza sativa
  Clone ID: PAT_MRT4530_51917C.1.pep
SFNITSESQDMIHSLCCYSHPYIKPLISSSVPCPMVTIPTLIVCSSTASRSACPVAIAS

SEQ ID NO: 151808 - protein, 102 aa, Oryza sativa
  Clone ID: PAT_MRT4530_51918C.1.pep
MPAMSAPRQCRRLGHRPPWQSSSSPSRLTHEPSQPSPLLRREPPPPPPRALEPSPLPLDRWVDARRRPAATTAGTSSERPATVYTPAQCATADSTSSAAEAR

SEQ ID NO: 151809 - protein, 126 aa, Oryza sativa
  unsure (1)..(126): unsure at all Xaa locations
  Clone ID: PAT_MRT4530_51919C.1.pep
APAGPAQTRDREKAGXTSPTARXRSGQEEQPEXXXKGRGTNKIVXPHHTXXXPPXDPKDTKTPPNKLAVRKPTGGLSTTRGCTGPKSATEPPNGSTDPDSTVNQIEAPTKKKGNKEPPLVINSLHT

SEQ ID NO: 151810 - protein, 487 aa, Oryza sativa
  unsure (1)..(487): unsure at all Xaa locations
  Clone ID: PAT_MRT4530_5191C.1.pep
MDAAHKRKRPDADDDGAAGAVDLSSLEGADDVEVLDLRAAKRLLLAFERVRRDNLEARMKHPDDPARFADSEIALHAETDRLRLLAGAPDLFPDLVPLGLASSLSSLLTHDNADLAAAAASLLADLTDSDDPDDLAGLHSLADALVEANALDLLVHNLSRFSEADPDEAEAVHHTLSVVENLLELRPQLADIVCDRTKLLRWLLARLKAREFDANKQYASEILAILLQDSPANQKRLGNINGVDGLLQAVAMYKSRDPKTSDEEEMLENLFDCLCCVLMPMENKERFVKAEGVELMIIIMKQKKLAYSSAIRTLDFAMTRFPPACERFVDVLGLKTAFAAFMXIPVNKKNKKESYQEALEERVISLIASLIRLLGKFVENECEKIDRLMEFYTRYSERVKAETERLDSLDLDDLEMDEDERYNRKLEAGLYTLQLIALILGHIWHSGNSQMRTRIELLLRQNKLTKDDVKDILENITSWVGPRNCAA

SEQ ID NO: 151811 - protein, 177 aa, Oryza sativa
  Clone ID: PAT_MRT4530_51920C.1.pep
MASPATSSAVLVVVLVATLAAGGANAATFTITNRCSFTVWPAATPVGGGVQLSPGQTWTINVPAGTSSGRVWGRTGCSFDGSGRGSCATGDCAGALSCTLSGQKPLTLAEFTIGGSQDFYDLSVIDGYNVAMSFSCSSGVTVTCRDSRCPDAYLFPEDNTKTHACSGNSNYQVVFCP

SEQ ID NO: 151812 - protein, 677 aa, Oryza sativa
  unsure (1)..(677): unsure at all Xaa locations
  Clone ID: PAT_MRT4530_51921C.1.pep
MAPRVIVDTYPRACAHGVQRLAQLTALFAYHYKYRQLEKHKGINDDGEVVTINVAGVRRCRRAAACVLDGGHGRRRGGGGGGATVEVQPDAADAVRGAGAVWGAGAAGMLCTAAGTGGVPMRVRTEPQLCSSTPSTNHQSSANQQLPSPPQSHRLRLHPPRAIPLPPAIAARSKLASPRYRRGTGAPSFRRGAGAARIIPSVEPASDRPNGHGRSSNYLERAIVLDEMMKSTVFSAVAVSIGYTLLGWDFTTVLGNPSAEANIHMKKEFGLNNGPSIDGIILAVSVFGSMAITVFSGSLLEWLGRRIIFSDGQCFEMTLIPSPYXMMMIGAIFAPSXIYFALMVMYXAESPSWFIIYVKINDARNSLQWLRGKEVDFDRSTGQIALSANGLNTKTKTTVGGHAVGAVRSQSFLGTSTNQMSRHSTFYWHLSDPLVDLLGSIHESMSELGAGRNSYFPVFNSFNIVEQEQTSEQRGNDSLQQSREAYSAEEGNNGDNLQASLLSQVASAETNDINTSFTSEGSSSYLRRHGTSTSGLAQDLISSLHDHDIEEDDEEIHIAALSSQPALGAGLHPFRQQMVRLSETADIKPKWRVLLQPGVRHALCYGMLIQALQQTTFNLLLPGDAKYHWAQWGMCDLCIRVLLGSRVRLLKSSRDEGSSLGAHSKNQWPSPIHSSNS

SEQ ID NO: 151813 - protein, 80 aa, Oryza sativa
  Clone ID: PAT_MRT4530_51922C.1.pep
MPLLTLQQASRVRIHKLSESWSPWNRSSASGDENPILLVASWGEEDMTRTPAGRTRCGERLYSWRSSGTCASASVFHGIC

SEQ ID NO: 151814 - protein, 76 aa, Oryza sativa
  Clone ID: PAT_MRT4530_51923C.1.pep
CCRNASKGKVHTLSQISQLLPYQVINHIHPMICKLQTCAHSDNQPGIAICLSSLRFESLIMQETMYLNRKNQTQFH

SEQ ID NO: 151815 - protein, 112 aa, Oryza sativa
  unsure (1)..(112): unsure at all Xaa locations
  Clone ID: PAT_MRT4530_51924C.1.pep
GFLEKTAKLYSFGYMPLTSPSGSNLLNELMLEWSGTNFCFYVTSGVHEGLLSELQNHNWEVIAMGNEDVIKNSGVIHISMLQELLITLATSIKKGNFSWHQLMHXSGIMHLI

SEQ ID NO: 151816 - protein, 218 aa, Oryza sativa
  Clone ID: PAT_MRT4530_51925C.1.pep
MQAKPLGGCLDQTGTFRGNRLSTSQFGDMDDEYNEQDNWDNDRTENHVVENTTKLNYHSYMNRQTRAKWSKSETDKFYEGLQQFGSDFAMIQHLFPDKSRNQVRQKFKAEEKKHPMQVHDAIMHRSRDNLYFKEVIKKLNIEDVQPDINNTHEQEGTSNEEDPGNKNIPGGLINEEEENGLDWSDKELDMHRSEVEEKEHVSTNDDDDDDLGDVFDWY

SEQ ID NO: 151817 - protein, 87 aa, Oryza sativa
  Clone ID: PAT_MRT4530_51926C.1.pep
MVVTTVAAALDWPDLSPAPMRAADPSSPGMAGAAVAAYGLRGSGMLGKSGSATCGLWSDDDDDLVEGCNDGANKLPAASCDNDGLRR

SEQ ID NO: 151818 - protein, 973 aa, Oryza sativa
  Clone ID: PAT_MRT4530_51927C.1.pep
MACRLLLRRCLSAAAASSAAARFAVRHAHGELEVSGCSARIRDLGRLGRVGEAREVFDAMPRRDIIAWNSMISAYCHNGMPDAARDLYDAISGGNMRTGAILLSGYGRLGRVLEARRVFDGMLERNTVAWNAMISCYVQNGDITMARRLFDAMPSRDVSSWNSMLTGYCHSLQMVDARNLFEKMPERNLVSWTVMISGYGRIENHGKAWDIFCKMHREGLLPDQSNFASALSAVKGLGNLDVLESLRVLALKTGFERDVVIGTAILNVYSRDTSVLDTAIKFFESMIERNEYTWSTMIAALSHGGRIDAAIAVYERDPVKSIACRTALITGLAQCGRIDDARILFEQIPEPIVVSWNALITGYMQNGMVNEAKELFDKMPFRNTISWAGMIAGYAQNGRSEEALGLLQELHRSGMLPSLSSLTSIFFACSNIVALETGTQVHSLAVKVGCQFNSFACNALITMYGKCRNMEYARQVFSRMVTKDIVSWNSFLAALVQNDLLDEARNTFDNMLSRDDVSWTTIISAYAHAEQSNEAMGAFKTMFCEHELPNSPILTILLGVCGSLGASKIGQQIHTVAIKLGMDSELIVANALISMYFKCGCADSRRIFDLMEERDIFTWNTIITGYAQHGLGREAIKMYQHMESAGVLPNEVTFVGLLNACSHAGLVDEGWKFFKSMSQDYGLTPLPEHYACMVDLLGRTGDVQGAEQFIYDMPIEPDTVIWSALLGACKIHKNAEIGKRAAEKLFRIEPSNAGNYVMLSNIYSSLGMWGEVAEVRKIMKQQGVIKEPGCSWTQIKDKMHSFVTGDKQHEQIEEIVATLEELYTLLKATGYVPDTEFVLHDIDEEQKESSLLYHSEKLAVAYCLLATPKGMPIQILKNLRICGDCHTFIKFVSHVTKRQIDIRDGNRFHHFRNAVLIAHGLVCLYSCTPCQIRAVGDLNTRLQSHMVQANEWMKTPTNDKYVSEFPLSLKILS

SEQ ID NO: 151819 - protein, 75 aa, Oryza sativa
  Clone ID: PAT_MRT4530_51928C.1.pep
PTMVWKPWAFTNNPLFRGLSNTKSGDSAYSSYEGITQSEGRNNPSAYIGPPYHQGLSRLWVRGGLLFRVGYRRFR

SEQ ID NO: 151820 - protein, 446 aa, Oryza sativa
  unsure (1)..(446): unsure at all Xaa locations
  Clone ID: PAT_MRT4530_51929C.1.pep
GDRWRWGRARRGRGTSRRDEVERGSPSRRDGVGAXKEAELRATYCSFIRDVGLRLQLPQVTIATATLLXHRFYLRQSHAKNEWQVXKKMQFFRYGLRTICFAHLVVALSNVEXSSSQVIVTTRSXVLEKQKELILVGETLLLSTIRFDFNIQHPYEPLKLALKKLGIFQMEVKQVAVNLINDAIRTTLVVQFKPHYIAAGSLYLAAKFNNFRLPSDGKVWWHEFDVAPKQLQAVIQQMTELFMGRNPCSMGPAIRPPPTPSLMERQQVIRPPPTPTLMERQPIIRPLPTPTLMENQHITHSLGAVMRHTHSSIRSLSNNFDREASRSLPLNIPANRKSTVCPARNEGNQSLRMHMGHSNGSDARFEKQYSRGALKADHVYHVVSGQKDLHVTGIRDLVRQKRTFHEVGEHPAPIDKSDTKSWIRKRHGRNVIVFDTKSSSWKKQKL

SEQ ID NO: 151821 - protein, 152 aa, Oryza sativa
  unsure (1)..(152): unsure at all Xaa locations
  Clone ID: PAT_MRT4530_5192C.1.pep
GARRRRWRWWRWRRLHSALGGGAGQGERRRHSAAAVAAAGVEVAARGGGGGARGRAGGGSGGGGGARRRGRAGPXEEGEPPPPSPLLLARPGEGGEPPPPPSPFPPAGSGSPGASPSPTHASPSLTSRSPLPTGPAPCRRRPPERPRSLREL

SEQ ID NO: 151822 - protein, 171 aa, Oryza sativa
  Clone ID: PAT_MRT4530_51930C.1.pep
MEAHLRVLVQVMAVDFSSQQLQTAASRQDQRWKPCYKNIKWIEGDALDLPFTDCYFDAVTVGYGLRNVVDKPKAMREIFRVLKPGSRASILDFNKSSSLFTTSLQSWMIDNVVVPLASGYGLTEEYKYLKSSILHYLTEKELEELAKEAGFSAAKHYELGGGLMGDLVATR

SEQ ID NO: 151823 - protein, 95 aa, Oryza sativa
  Clone ID: PAT_MRT4530_51931C.1.pep
FSSLIIAAPELDTWALVRDVLPLLANSAPFAIYHQYLQPLATCMHNLQLEKMAIGLQITEPWLREYQVLPSRTHPCMQMSSFGGYILSGTKICST

SEQ ID NO: 151824 - protein, 172 aa, Oryza sativa
  Clone ID: PAT_MRT4530_51932C.1.pep
MEAAGGLRTGDLFLSLSVGLQPVARKSGRGELAAVAKGGSGGRPRVSGGDITDNTTPMTNWCRLENRHNGIHSSCPIFTRSGLEMLLTAAISWMVTMTVSVMAVWDGVLNGRPLASKRGASSEEVVEGGVLEAGEGLDVKLVADANDARKNKRRIAAEENDGTMITIAIGYR

SEQ ID NO: 151825 - protein, 296 aa, Oryza sativa
  Clone ID: PAT_MRT4530_51933C.1.pep
MAVSASAGEEEEAFEEVDPTGRFGRYADVLGLGSVKKVYRGFDQEEGIEVAWNRVRLRALADRDPAMVERLHAEVRLLRSLHHEHIIGFHKVWLDRDAGVLNFITEVCTSGSLREYRDRHRHVSVKALKKWARQILLGLDHLHTHDPCIIHRDLNCSNVFINGNTGQVKIGDLGLAAIVDKTHVAHTILGTPEFMAPELYTETYTESVDIYSYGMCVLEMVTREMPYAECDSVVQIYHSVTRGVPPAALKRIRDPELRAFIERCIGQPRNRPSAAELLRDPFFAGIDDDDSTGTLG

SEQ ID NO: 151826 - protein, 541 aa, Oryza sativa
  Clone ID: PAT_MRT4530_51934C.1.pep
MAAAVAASPAQSRKTETYTDTKRRDDVRGLNIAAGRAVAAAARTSLGPRGMDKMISSSSSGGDQAVIITNDGATILSRMPLLQPAARMLADLSRSQDAAAGDGTTTVVVLAGSLLRRAQSLLSAGAHPTAAADALHLLAARAVEVLHGMAIPVELSDRDALVKSASTALNSKVVSQYSTLLSPLAVDAALAVVDPAHPYLLDLRDIRVVKKLGCTVDDTELIRGLVLNKKASHVAGGPTRIGDAKIAVIQFQVSPPKTDIEHSVVVSDYAQMDRILREERNYILGMVKKIKASGCNVLLIQKSILRDSVTDLSLHYLAKAKIMVVKDVERDEIEFITKTLNCMPIASIEHLREDKLGHAHLVEEISVGDGNNNKIVKITGIKNMGRTATVLVRGSNQMVIDEAQRSLHDAFCVIRCLVNKRFLIAGGGAPEIEMSMQLAAWAKELRGMESYCVREFAEALEVIPYTLAENAGLDPISTVTELRNRHAKGEKNAGINVRKGRITNILEENVVQPLLVSTSAVTLACECVRMILKIDDIVTVR

SEQ ID NO: 151827 - protein, 433 aa, Oryza sativa
  Clone ID: PAT_MRT4530_51935C.1.pep
MVHETKLDLLLKKMEENERKRAEAEERTRADLAELKKVVEARLPLVEKRVEEVASVVGSLSTKVENMEGTLLKQGRMEKKPADVKEEQFTPQSSFQIQGMRDPTLNSANNFNFEPIASPGSGSARTNLGSSLSPMTCPQFNGDNPQMWRANCEVYFDVYGIPPNNWVKIATLNFVGNAAFWLQSVRNQLIGVTWYDLCERVCARFTRDRHQALIRQWLRVQQTTSVAEYVEKFDSIMHQLNAYENSAPIEYFVTKFIDGLKEEVRSVILVQRPQDLDTACSLAMLQEEALEGLKAGSYKKSEQMGNYIKSVPRSASQTTLFSPSPQKVNSSAALEATRAKEDKVASLKAYRKSKGLCFICGDRWGRDHKCANAVQLHVVQELMEAMNIDNEASPEVETPVEEEVSLLAISQQALNAQPNANRLELEVARVSVQ

SEQ ID NO: 151828 - protein, 113 aa, Oryza sativa
  unsure (1)..(113): unsure at all Xaa locations
  Clone ID: PAT_MRT4530_51936C.1.pep
YQSLALLNFDMGSFDSKLNQTDVSQAGRVLEELKWKDLSSMSTTCQGLIYGPKLGPDYLNQQQPLSLVRTAKCSEFEQQICLFTFIXHLLAQWVSPFYPITILTANRKHHCLL

SEQ ID NO: 151829 - protein, 1250 aa, Oryza sativa
  Clone ID: PAT_MRT4530_51937C.1.pep
MLAIVMVAVGLMFTASFCKEWEIMLIMPITWMNKRKSSGSAPSPLFLGTRPKRLRSKVWDDFKPIYIDGKVARAECMHCHQILISNSANGTSNLLKHQAKCSPHPQKRPMQQKLPFLLSSQKSLTAPNSDPTQKKLPFLPISQKKCSGPADAMPQKKDPALPNSMNDTNWKSQEVGKSGSPEELATPEQKNLALPDVPTNNNRKDQPHDENLVPKQKCNPTVVNLKNPEVDQSGSNGLIQTMAMCGYLPMMMYNNRFRKCVPCLNSMLPMPSNDSMFGDFMQLFHNEKAKLKEKFSTLSSRVCLSAHVWHHDPLSAYLCLSVHYIDNEWERQQKIIRFRQVDPSCNARELSDVILRAIEDWGLRDKVFSITLDDEFADDSVASNVKDHLQKWNSHYSNQSLFVVRYGTYLLDQVIQVGLDELDKSMEKSMKCSKFTEGFTSSAVRKANHNYAESAKDWSNARPICDTLESFHQYMDTMHDFPRPRHLFDKVEDTNSTSETRNEVGVNRDDDRLKYYHQHQSEISICERPMTELDQYLLEPRLSKGEPDVLRWWKGHNLTYPTVARMARDILAMPCRTNCNVAIRTAKFAKCESRSSHDIEELVCLQDWLTPDGFKYEKNAQTTTCSDNFGHYAKLIVVFVTDGVLLWFTRLKYISLSLLIPESSAPPYLQRLNPWTATGAPGLAVHTGMDDQECDCPSGVGKQGDKELNGMKNEVDDANDKVEQEESSGSAPSPLFLGTRPKRLQSKDTPTDTNTKNLQVDQNVTDKLVRISLMHGYVPSMRNHDEFSEFVASLNPKVELPSDVDLYLYFTRLFEEEKANLKKQFESSNSRVSLSVYVWHYDTHSPYLCLSVHYIDDQWESKRKIIAFRAVDSSCNAKELIKVILIAIKDWGLLGKVFSIALDDTFIDNSVASDVKDILQKWNLRHADQSLSGNQSLFVVIQVGLNELDKIMEKSRKFSKLDKFMEKSRKFSSYPKGPAPLALQYPNHRYAPSSEDWVKAENICEILDDFHKQKDEIPKHHSPLKLFDTIWHVKNVVHRKLLYHDDKETTYVWEKMQEQFKEQWKVCCLHICMPMIIDPKYRLEIIKSHIPLDLDNDMIDYIEEVNDILLRLFHEYSGQVEDPNCTSSSETSGGHSLYPDDKLVFHYLGSEFPQWWRPMTELDQYLQDPCLSNDRIDVLRWWKEHSMIYPTISRIARDILAIPYGADYEVATRTAKLALVESDGSHFVEELVCTQDLLRSGGYANRVVIR

SEQ ID NO: 151830 - protein, 101 aa, Oryza sativa
  unsure (1)..(101): unsure at all Xaa locations
  Clone ID: PAT_MRT4530_51938C.1.pep
SHHVAMVKSQALVPSSERERRFRGGGRSRRRRGRGKREAKAGRRRRIAVREARVPVSEEEANGCSSWPPGPPNSDTVQAVGRSLSXPLPXSARLXQKXLIT

SEQ ID NO: 151831 - protein, 119 aa, Oryza sativa
  Clone ID: PAT_MRT4530_51939C.1.pep
MRQCVDSVRAPAEPLAPYLGGALFDRLECACRKELEPHMRCEELDMLVLHEELGPSHQEKLQQAKMALEMDVFPPSFLLLTLAKFELLAQGQQSPIHFGASSLSLDRAMAALTDGGEAM

SEQ ID NO: 151832 - protein, 51 aa, Oryza sativa
  Clone ID: PAT_MRT4530_5193C.1.pep
KKRKTAIEGFIFPIPSHITSLKNSTYVYDSNRYAVKDDAMMGTKEKNACGK

SEQ ID NO: 151833 - protein, 108 aa, Oryza sativa
  Clone ID: PAT_MRT4530_51940C.1.pep
HNTVFTGSFLDATGADETIPRATPYVGYRFGNLALYQRHVSREDVQSDTGTVQAEGVSHGPVSSVSISFPGRYRITYTYQSFNHGGFPFSLFFAHHKLIEYQHAIEKA

SEQ ID NO: 151834 - protein, 344 aa, Oryza sativa
  Clone ID: PAT_MRT4530_51941C.1.pep
MLASISRSLTRRRPPLPLSAAAAAAAAAMSSSATGVNVSDRPISPDTTRVAWVGTGVMGQSMAGHLLAAGYALTVYNRTASKAEGLVSRGATLAESPRAAAAAADVIFLMVGFPSDVRSTSLDPSTGALAGLAPGGLLVDMTTSDPTLAAEIAEAAAAKSCAAVDAPVSGGDRGARSATLSIFAGGDAAVVARLAPLFKLMGNALYMGGPGAGQRAKLGNQIAIASTMVGLVEGMVYAHKAGLDVAKWLEAISTGAAGSKSLDLYGKRMLERDMAAGFYVRHFVKDLGICLSECQAMGLALPGLALAHQLYVSLLAHGEGGLGTQALILAIERLNNTCLDKKPE

SEQ ID NO: 151835 - protein, 114 aa, Oryza sativa
  Clone ID: PAT_MRT4530_51942C.1.pep
KSSSPVRNFIDLNDDALNEDNSESSVVSHECHVVSLQNNHGKRKFVIDLEVPACEEGVAWDFNQECSPSGKLDVTQEACDAHFTCTKIAAESIIAFAMHVPTIAETPDDMLQWF

SEQ ID NO: 151836 - protein, 54 aa, Oryza sativa
  Clone ID: PAT_MRT4530_51943C.1.pep
ADEGPGGREAGKGGGPRPGGGPAPARPPGRWQDGPGRQPPGGGPAPTRRQEAAR

SEQ ID NO: 151837 - protein, 152 aa, Oryza sativa
  Clone ID: PAT_MRT4530_51944C.1.pep
MIQVLLPNSTCDVGYLQHYSLHYNVALVSTHHSWNAPPGGIGGPLVDLDGNVLGMNFYDKKIGTPYLRWHVITALLKVFDQTACTSKYCFVLPQSPPVAPDWTIETGNSVTLNRWPVPLPYWRQPDDMEEEEPPRGFEDMYTYVDGVRLCNF

SEQ ID NO: 151838 - protein, 274 aa, Oryza sativa
  Clone ID: PAT_MRT4530_51945C.1.pep
MAVENGAALFGEEELRDVSGVRVGDRFVEVTCGCTSARYGDAVGRLRLFASGELQVSCDCTPGCDQDKLSPAAFEKHSGRETAGRWQNTVWVMVKGDKVALSKTCLLRYYHKKLKSSSANGGGRRPPCHRDEFVRCAGCGKERRFRLRTKEECRLYHDAMARHDWTCKDMPPAGRCRVRVSCEEEEERASRKASRGCTRAATCKGCVRTWVLGRQWHSMNVEAVASALCTFTCAADRDGFDVRTVVCSVQTVQTYRGSLQDIHVSIFSYMEEIK

SEQ ID NO: 151839 - protein, 557 aa, Oryza sativa
  unsure (1)..(557): unsure at all Xaa locations
  Clone ID: PAT_MRT4530_51946C.1.pep
MYADRRSKEFIDDVHYFLRVAETNKHKGFTRCPCTKCKNQKEYSTSRTIHFPLFETGFMPSYNVWTSHGELGVQAEEDEVEDENILDWAHYGGFEGNTTDEVDGAVEDNDAANDLGQMLRDVKENCESEKEVKKLERMLADHKTPLYPGCEQGHKNLGTTLEFLQWKTRNGFRXSDKAFGELLKLVKNILLEENKLPXTTHEAKKIVCHEAKKIVCPLGLEVQKIHACPNDCILYRGEEYENLEACPVCNALRYKIRRDDPGEVDGQPSKKRVPAKVLRYFPLVPRLKRMYLSTKLATHMRWHKEKLVDDGYKRHPANSKEWKDFDGKFSSFALDARNIRLGLASDGFNPFGNMSSSYSIWTVVLVIYNLPPWMCMKDPYMVMSMIILGPKAPGNDIDVYLXPYASTKQTFNLRAALLWTINDFPAFENLSGISTKGKYACPSCHTETCYHRLVNGHKYCYMGHRRFLPRRHVWRNNDASFDGQKEKRSAPKPLSEDDIISQYEKFEQVFGKSGKKRKHSSTLYGTXRKKSTFFFQLPYWSKLTIKHTGTLPFLTPS

SEQ ID NO: 151840 - protein, 158 aa, Oryza sativa
  Clone ID: PAT_MRT4530_51947C.1.pep
MAPAFVSDERAVAVSVERLWKVCLDVHSLPKVCAGFIDAVEVEGNGGPGTIHIMKLNPAADAGSVYKTKIVVCDSATHVLKVEVLEVKSRVGNLKSHSTETKLEATGDATCVAKLTVEYELEDGASLSPEQEKMIVDGYFSMLQMIEAYLVAHPAEYA

SEQ ID NO: 151841 - protein, 152 aa, Oryza sativa
  unsure (1)..(152): unsure at all Xaa locations
  Clone ID: PAT_MRT4530_51948C.1.pep
TGTKIRVWGDAWLGSRPFRXQYPSRXKHSTVAEVMSTIPLNISFRRAIIRPKLFCCNNLIWQLAMVTLSNEEXFVWSLHKSGSIFVSSTXNGGNEXKVPQFKVFIWFLRRKIILTKDNLAKRNXRRNKQCXFFNIQETIQHLFLDCHIAHFT

SEQ ID NO: 151842 - protein, 62 aa, Oryza sativa
  Clone ID: PAT_MRT4530_51949C.1.pep
QICFKKKKKKKKKKKKKKKKKKKKKKKKLKTKKIKKKQKKKNKILQKSKGGDTFSFQTKGGG

SEQ ID NO: 151843 - protein, 70 aa, Oryza sativa
  Clone ID: PAT_MRT4530_5194C.1.pep
PYISPQLLDFSQIETITLFLWYLCNILLLPSLFLSGSFAAHFLDLSCLSCFLYFSSLTTPSAMRSVLAII

SEQ ID NO: 151844 - protein, 155 aa, Oryza sativa
  Clone ID: PAT_MRT4530_51950C.1.pep
TSGSPGCRIRHEVSLFPLNSSLSLSLLRRLLLPLCSSPSWRLRLAARARPTAPTGASRGYTRSSAFPVSGCVVRSGGGGGEAATRRRHCGVWRTPHPPHRRWTGISACDCVREERGSRRACVPSASTAVLMRWSSVRIIPNHQNLHSFHPKGLIR

SEQ ID NO: 151845 - protein, 114 aa, Oryza sativa
  unsure (1)..(114): unsure at all Xaa locations
  Clone ID: PAT_MRT4530_51951C.1.pep
XGXVXXXGPRPPHQXXXXDGGPGGERGXXTHAFXSKSPPXXXVSXETTSAVXVXAWVSGVTGGXPDAAFMAQDLASCRTXXCVFHPRHQPAXTRDHHQSEXEXIIRLARQEVIW

SEQ ID NO: 151846 - protein, 409 aa, Oryza sativa
  Clone ID: PAT_MRT4530_51952C.1.pep
MGMDYYNILKVNRNATLEDLKKSYRRLARTWHPDKNPTGGAEAEAKFKQITEAYEARTCPCILTGSRRRWANDFTVLSDPEKRAIYDRYGEEGLKGMPPPGSQSRTSAAAGSSGPSNFRYNPSDPDDFFAEFMASNKPYSFDQERTRFQPRSQWTAGNTRGEASSASHKESSTSTSQLEKPPAIEKTLLCTLEELYNGTKRKMKITRNVANTDGWASGDRHGWAASGDGSDWNDGGEAGLTGVRITSGGRVVLLTLFVKFLFALKVEIETEVLPVEVLPGWKKGTKITFPNKGDRLSGQLPQDLTFVIDLKPHDVYLLEGNNLVATQVIPLVDALAGTTIHLKTLDGRNLPIRVEEVVRPGHEIVLANEGWPIRKEPGKKGNLKIKFDVTFPTRLSSSQRAAIRQIMGG

SEQ ID NO: 151847 - protein, 660 aa, Oryza sativa
  Clone ID: PAT_MRT4530_51953C.1.pep
MAAQVQAVPAAEGGGAPPQANGVVAAGSAAAAAATFQATSLYVGDLDVSVQDAQLFDVFSQVGSVVSVRVCRDVNTRLSLGYAYVNFSSPADAARALEMLNFTPINGKPIRIMYSNRDPSSRKSGAANIFIKNLDKSIDNKALYDTFSVFGNILSCKVATEMSGESKGYGFVQFELEEAAQNAISKLNGMLLNDKKVYVGPFVRKQERENVSGNPKFNNVYVKNLSESTTEDNLKEIFGKFGPITSVVVMREGDGKSRCFGFVNFENPDDAARAVEDLNGKKFDDKEWYVCRAQKKSEREMELKEKFEKNIKEAADKNQGTNLYLKNLDDSIDDDEKLKEIFADFGTITSCKVMRDLNGVSKGSGFVAFKSAEDASRALVAMNGKMIGSKPLYVALAQRKEERRARLQAQFSQMRPMVMPPSVAPRMPMYPPGVPGVGQQLFYGQPPPAFVNPQPGFGFQQHLIPGMRPSVGPIPNFVMPMVQQGQQPQRPAGRRAGTGGIQQPMPMGHQQMLPRGSRGGYRYASGRGMPDNAFRGVGGLVPSPYEMGRMPLSDAGAPPQVPIGALASALANSPPDQQRLMLGESLYPLVDQLEHDQAAKVTGMLLEMDQTEVLHLIESPDALKAKVAEAMEVLRNAQQQQANTPTDQLAALTLSDGVVS

SEQ ID NO: 151848 - protein, 127 aa, Oryza sativa
  unsure (1)..(127): unsure at all Xaa locations
  Clone ID: PAT_MRT4530_51954C.1.pep
MNANFILCSCYTDYTANLSRICIGTGIIFAYAITLCHDDVIKVVSGSLGVLWMRGRPLMVTAQYVYSSARVYSPKLISWGGYSSVFSPGCMVMTSCRKELGSXGWLLEVSGGHRIEGISFRPAGMQA

SEQ ID NO: 151849 - protein, 361 aa, Oryza sativa
  unsure (1)..(361): unsure at all Xaa locations
  Clone ID: PAT_MRT4530_51955C.1.pep
MAARVVVAFAVASAMFVAVSGQKFNAIFSFGDSMSDTGNLCVNGPPAGLTLTQPPYGXETFFGRATCRCSDGRLVVDFLAEKFGLPLLPPSKRGGSDFRRGANMAIIGATTMDSGFFQSLGIGDKIWNNGPLNTQIQWFQQLMPSICGSSCKTYLSKSLFVLGEFGGNDYNAQLFGGYTPEQAAGQSGTIVDGIGKGVEQLIGLGAMYVVVPGVLPVGCFPIYLTLYGTSNAGDYDQYGCLTRFNTLSSRHNSLLQAKVSSLQSKYPWARIMYADFYSHVYDMVKSPSNYGFSTNLRACCGAGGGKYNYQNGARCGMSGAYACSNPSSSLSWDGIHLTEAAYKQIADGWVNGPYCHPPIMP

SEQ ID NO: 151850 - protein, 53 aa, Oryza sativa
  Clone ID: PAT_MRT4530_51956C.1.pep
RITESINQVDYIINHHKQGPQPHTHMFQPHPSAAFLQWPTHTCCHHSATAHSA

SEQ ID NO: 151851 - protein, 51 aa, Oryza sativa
  Clone ID: PAT_MRT4530_51957C.1.pep
VQLHDFHYSLSSARATVKTEHTYLLCGPTNLRGNPFATDGLICVHPNDKVS

SEQ ID NO: 151852 - protein, 83 aa, Oryza sativa
  Clone ID: PAT_MRT4530_51958C.1.pep
LVWVSYLLPQLFKFIFPASLFCWVLTGFSFSPGCKFRPSYFNLCFPIKIAITLHACVVQLGFSRVPPRFFSFSFFFFFFFFFF

SEQ ID NO: 151853 - protein, 252 aa, Oryza sativa
  unsure (1)..(252): unsure at all Xaa locations
  Clone ID: PAT_MRT4530_51959C.1.pep
STPRKHDPAAPALHTVTRHTRLPRARPTPHPRXRKAQPPPRHNXPAHAEGTRGAQPHDTRTRAPSHTGXXPPAPGRRPPARRPAAPPAXGPPPGGAPAARGRPPPAPXAPAPPAAGAPRGGXPPRXPAAAPPPPAPPAPAAARAAPPPRPRGPPRXGGGPRPRPPPPPAAPRXXPPAPRPPPXPPAPPPAPPRPPPPPAPPPGPPGGRRRPGVGRRDGGRSPAASPSPPPDPAGGEAARWVAGRRRDGRPAG

SEQ ID NO: 151854 - protein, 131 aa, Oryza sativa
  unsure (1)..(131): unsure at all Xaa locations
  Clone ID: PAT_MRT4530_5195C.1.pep
RTRYCAETIFPKLDYRADPAAXTEIAKDDQGVSXKIHHIYRGTQCQDMLTTXWSTIVNQRKLAXGTMIVIVRTRHGELCXAIRWTKRMGCMIMXCMMASNAPSYAYSGFXELLTDEERKLPKGHDGSRTMK

SEQ ID NO: 151855 - protein, 255 aa, Oryza sativa
  Clone ID: PAT_MRT4530_51960C.1.pep
MGEAELSLAAVRDALVREEDSIVFALIERARRPRNAPAYAAAAAAGGRSLAEFFVREAEVLHAKAGQYQKPEDVPFFPQDLPSPLFPTKDYPKVLHSFASSVSVNDAIWKMYFNELLPLFTVDGDDGNYAETVALDFACLKALSRRIHIGKYVAEVKFKDASQDYSPLIRAKDTKALMNLLTFKAVEEKVKRRVEKKARIFGQNVTLEDNADKQEGNAGDSECKVNPEVLSKLYDLWVMPLTKDVEVEYLLRRLD

SEQ ID NO: 151856 - protein, 780 aa, Oryza sativa
  Clone ID: PAT_MRT4530_51961C.1.pep
MGTSTSQVLNHVRVTLEGFGLFQQDPSLEESDGEDIGVPEVGMVFNNHMEVNRFYRRYARRVGFGVSVRRSSFSQEGTCLYLELMCCKGGRPRYEPKFRKRASSTTNCPAKIRVKLWGDKLLHVELAILDHNHPVSPAMARFLNSYKQLSGPAKRRLRMGGPGAMPVEEPSKMPVDKLGALEELLFGESKHHSFVERGRLKLQPGDSEALRLFFTRMQAKNANFFNVIDLDDEGCVRNVFWADARSRSMYEFYNDVVTLDTSYVVGKYDMPLATFIGVNHHGQSVLLGCGLLSDETAETYSWLFKAWIACMSGNLPKAIITGHCRGIQSAVAEVIPGVHHRICLFHIMRKATERLGGLSEYAAISKAFQKAVYDSLTIDEFEGNWNALITYNGLQGNDWLRSIYECRYSWVPVFLKDTFWAGMSATQRNENIIPFFDGYVDLKTTLKHFLGKYEMALQSKYEKEAQADFETFHKQCPPVSKFYMEEQLSKEWIFLEDGKRTMSKIFTVTNNTDKNDLTCICGGFQFNGILCRHSLSVLKFQQVREIPPHYVLDRWKKDFRQLHVMGRPSSDVVPNNRVDRYDYLSMRCLQLVDSAVLSDKYRLALRLVREMEKFMLNSNTHDDTQPRIKSRIPKANKPNTVVGQNLVNVGTYNGNDRPKATTEASSLTQGLDVQKGGAEKGIVPAGYIGLPANVQQFVGSQTAIRPSIVYMVPSGVDPQAFGNGVLMPVVYQQMFQVPQQPNGTMPDTSANGKRKRPRAQKPTEASEQSNGTPATGPTSG

SEQ ID NO: 151857 - protein, 122 aa, Oryza sativa
  Clone ID: PAT_MRT4530_51962C.1.pep
MRKCGGANGINDGKQETISKRRLLGRADLVLTTISRGVVSGSGAPLTNGGEDGVCGQGKGGRTWWFAWTQFSSGHNVGQGFCDMILRALYPLRAIEGRNVELGLIWASCGERIKRQITSPFN

SEQ ID NO: 151858 - protein, 46 aa, Oryza sativa
  Clone ID: PAT_MRT4530_51963C.1.pep
MPLLCLKVSLGPGSVLGPGLTLALEGRSGLVGPTTHHVPWVLTGDA

SEQ ID NO: 151859 - protein, 833 aa, Oryza sativa
  Clone ID: PAT_MRT4530_51964C.1.pep
VPCSSEVTETSRKDSSGLEESDGEDIGVPEVGMVFNNHTEVNRFYRRYARRVGFGVSVRRSSFSQEGTCLYLELMCCKGGRPRYEPKFRKRASSTTNCPAKIRVKLWGDKLLHVELAILDHNHPVSPAMARFLNSYKQLSGPAKRRLRMGGPGAMPVEEPSKMPVDKLGALEELLFGESKHHSFVERGRLKFQPGDSEALRLFFTRMQAKNANFFNVIDLDDEGCVRNVFWVDARSRSMYEFYNDVVTLDTSYVVGKYDMPLATFIGVNHHGQSVLLGCGLLSDETAETYSWLFKAWIACMYGNLPKAIITGHCRGIQSAVAEVIPGVHHRICLFHIMRKATERLGGLSEYAAISKAFQKAVYDSLTIDEFEGNWNALITYNGLQGNDWLRSIYECRYSWVPVFLKDTFWAGMSATQRNENIIPFFDGYVDLKTTLKHFLGKYEMALQSKYEKEAQADFETFHKQRPPVSKFYMEEQLSKVYTHNIFKKFQDEIEAIMYCHVSFINVDGLISTFDVKEWIFLEDGKRTMSKIFTVTNNTDKNDLTCICGGFQFNGILCRHSLSVLKFQQVREIPPHYVLDRWKKDFRQLHVMGRPSSDVVPNNRVDRYDYLSMRCLQLVDSAVLSDKYRLALRLVREMEKFRLNSNTHDDTQPRIKSRIPKANKPNTVVGQNLVNVGTYNGNDRPKATTEMQASSLTQGLDVQKGGAEKGIVPAGYIGLPANVQQFVGSQTAIRPSIVYMVPSGVDPQAFGNGVLMPGWVPRKMFQVPHAARWNHARYFTHNGKRKRPRAQKPQRHLNSQMEPRQQDPHLGRLNQCAHVSQNSEQVFVNMQRK

SEQ ID NO: 151860 - protein, 62 aa, Oryza sativa
  Clone ID: PAT_MRT4530_51965C.1.pep
QTNTNCSPPRSKCSSMEHAQNVLEPDDKMRLGLHLCKPEFQAHRGFLISMGQENLERWVYKF

SEQ ID NO: 151861 - protein, 88 aa, Oryza sativa
  unsure (1)..(88): unsure at all Xaa locations
  Clone ID: PAT_MRT4530_51966C.1.pep
GDSIAGVVTCMDRTDSRVIGSTVFDKLEAAWAKAMLSLPASTAYXIGSGFAXTDYTGREHNDQYHMDQAGNVRTRTNRSGCAQGGISS

SEQ ID NO: 151862 - protein, 90 aa, Oryza sativa
  Clone ID: PAT_MRT4530_51967C.1.pep
MKKNKVQFFPKPAVLLPTELMVVLYVTIFRLIGYKSWEWLAIEVKVERGCVARCVHWLKVIVVPISISPTSTFSYLLPGGVRNAAHTSPC

SEQ ID NO: 151863 - protein, 71 aa, Oryza sativa
  Clone ID: PAT_MRT4530_51968C.1.pep
AWSLARVNECTQPSLWMVSLIPQQILHTYHTKRCSPDPSRSPESPRSLPQISPSALRSIPFHFALPVKSPQ

SEQ ID NO: 151864 - protein, 652 aa, Oryza sativa
  Clone ID: PAT_MRT4530_51969C.1.pep
MRTAIVNHSIQMLYSMMFRLLSTTVFQQLGDDKSPHAEDDEEHKAEPLLQWSTSRENELPLKVDPSNCKHCTPSYCLLPKNCVTLQSSYQTELGRSILNDSLVSVTSGREDCYKFRTKNQYEENMFKCEDDLFESDMLLQRFRATADFIEDLQYRFGSNVKIQEHLTPLHKRCIEQLYDDSGIDMLDALSESENTSSALAVILSRLNQKIGDFSEARLSLNKMCPDTVANNYYRSLDHCSPSFKQLDMERMSPKALLAEGPQISRIKSHTDIHIHEDVGVIINYAYSRSCSTEDKPMMNWTKLVKAFVSVKFQWPDLKDTVSRRNVCEHCGMSRDFLNNIPVAVLTNEFVFSSKEVESLRAKSNESTSSLDHFDAEVEEGEFIPDVENIQLRVRCLPTNNSMHSTYGHWSGSEEHKSSRDDSNNEVGSSEYFGRTSKECDANRGISCCTLAVLCRLLQVMYERLLVAKNLSEGASTHDSYAHFKEKLCSLIDGSTDNWNFEQHCLKFLGPNSYVLFTLDKLIDRVIKQICKIYPSREDSSVLQRQERSRRTFNILKDPALPARRTNSSKELLHHQNARGTSIELPKQGREEAKGGCESHGDTGKMKQNHFQRSPAEGYRFARIFQHKMCTAQQLFEDIWREAEIFMEKQDTA

SEQ ID NO: 151865 - protein, 140 aa, Oryza sativa
  unsure (1)..(140): unsure at all Xaa locations
  Clone ID: PAT_MRT4530_5196C.1.pep
MTTHCFVNVYFIFTNMSNAGDNSNTGDKEKEXSINTNGGNTASNSSGGPFSGRLQGAQKTDPATGRSMGEARGARPQGEQRRSSWCSRKGSCGDSDHGLWIWSRESLATDDGERTDPAVGGRCAGGEGEWRSRQIQRRLP

SEQ ID NO: 151866 - protein, 104 aa, Oryza sativa
  unsure (1)..(104): unsure at all Xaa locations
  Clone ID: PAT_MRT4530_51970C.1.pep
HLHATKQQQXLKLKLKLKXLRCFFPSSSAGSETAXRKQRRXKPNXPXTXXLKGXSTPSTPXXAXLHLLSGGGGPPLXLRSPGHAPRGAXSWLTXXDVSXGXGIT

SEQ ID NO: 151867 - protein, 219 aa, Oryza sativa
  Clone ID: PAT_MRT4530_51971C.1.pep
SSGNTPRLPAAAVKGATPVSGRLLASTGSLASPTPPPVTPPPPCDVVKGGEPPGGCEESSAHEPPVDSHNGFLGLTNTSTDGNATNRFMAVELDAVKQRVCVTACYSPPSLLPLSDPGANDPPSRNATKSLSDRRNIMSVERFTKIDPAALHLGGKLTWHAALVLFASEPLASLANFARGPDSQPQNDRHVSMCHVNLPPKWRAAGSIFVNLFADIIFL

SEQ ID NO: 151868 - protein, 66 aa, Oryza sativa
  Clone ID: PAT_MRT4530_51972C.1.pep
PWSKRPTRGERRFAAWALVRCLDAGPPGLGHPTAATGLRWLNRGGTGNTHDLGYARPNLRARGPTL

SEQ ID NO: 151869 - protein, 112 aa, Oryza sativa
  unsure (1)..(112): unsure at all Xaa locations
  Clone ID: PAT_MRT4530_51973C.1.pep
WLSFSRPRETNVVQARGKLRXYHKTIGVKGNKSVVPPQRDQRKKQDSQALVLGNILHPIQRGCETTSGQTPCGEQERGGVVRRKPVRAKLWACLLIISQATPSTKWPTTSLG

SEQ ID NO: 151870 - protein, 160 aa, Oryza sativa
  unsure (1)..(160): unsure at all Xaa locations
  Clone ID: PAT_MRT4530_51974C.1.pep
AQIANRKGRVNTKFFSIELSSWHLKGQDLSEIGIQETQTLQNQLELRIRCIRSEKYHLMIEDSNVLNRXEILIQQEIMDLYRKMTNCIGYTLNYLMTAYLSPQLYETGAENEANRDSTTPYNFAVIEEANTPARLELNPPSQQNDAEQTTPPKLGLQLHP

SEQ ID NO: 151871 - protein, 121 aa, Oryza sativa
  unsure (1)..(121): unsure at all Xaa locations
  Clone ID: PAT_MRT4530_51975C.1.pep
SRCAPVVFFVEQGKSFRLRFASPSSLSFVYVXFLGSSFRWWRLSGILVELFVVGVIYIYSGEWFSVLLRAVQLPASFWISVGVRGRLPKTVPALAILSYGFGFAVPLPLLCPAGVPPVLPA

SEQ ID NO: 151872 - protein, 105 aa, Oryza sativa
  Clone ID: PAT_MRT4530_51976C.1.pep
FPNRGNQLQYCQLPPTCPSLGPIAHLRTLDQSVANTKEKVKGWASSLRYSRSVTHTAYTYPPPLDDQSNVSETCSDRRRNTSARSDGAPEACRVAQAEVIHYGGS

SEQ ID NO: 151873 - protein, 99 aa, Oryza sativa
  Clone ID: PAT_MRT4530_51977C.1.pep
LFCVGFFLSSSPSPIVLRQSLPSFALGSARQQSSSLNMDSSGEVVPLLHVATRSLLQPLSLALPFSLQCVVLSLWSLSNDNVGLAGPCGPVPAPAGVPA

SEQ ID NO: 151874 - protein, 86 aa, Oryza sativa
  unsure (1)..(86): unsure at all Xaa locations
  Clone ID: PAT_MRT4530_51978C.1.pep
ARRPSRPTLGAQAPKGPCHRTSRPGRRARGRPPRGANRLKKVLRDNIHGIKKPAIRRLERRAGVKRISGLIYXETPAVLKIFLGGP

SEQ ID NO: 151875 - protein, 245 aa, Oryza sativa
  unsure (1)..(245): unsure at all Xaa locations
  Clone ID: PAT_MRT4530_51979C.1.pep
ACSRGTSSRRTSARTRRGCRPRRACRHRPPRARRCGVAGSRAASSRGGGCDAEDGDGTAYRRTTEEGEAAGGGRRHERERTTAGRGGVATGRRGRRLKRENGRRGFHFIGAGRELATGEGGTEAGMAAGGHGRWPGMARLFRAIGLEGGTALGFTGERGRRPAAGGRXTPDGRDPRGRCAVNARAARVRGRAXLGLGRGRPRREEERRELGRXGGERGGPREGREGDGILHPRFEKASKKIGGQS

SEQ ID NO: 151876 - protein, 41 aa, Oryza sativa
  Clone ID: PAT_MRT4530_5197C.1.pep
ICIVISSAVAYPVNEECVNIEVLVLSGDATARVNQRIAVRG

SEQ ID NO: 151877 - protein, 71 aa, Oryza sativa
  Clone ID: PAT_MRT4530_51980C.1.pep
MEPRVRFKNATPRNLITFPSSVICRTRSGENGQHGEVARDETERGGRQGHDNAPVAEQVQRLSSRGVEGSS

SEQ ID NO: 151878 - protein, 104 aa, Oryza sativa
  Clone ID: PAT_MRT4530_51981C.1.pep
PRWGPTHFHPRCISAWVHSQHSLSGHKIPANCFQGVSSFPLKWLGHLVPLSFLWSTPSSFNWQAFMRVLYVCLFCHFETENKLSLHILGVCAVWSAPWKHAWWL

SEQ ID NO: 151879 - protein, 603 aa, Oryza sativa
  Clone ID: PAT_MRT4530_51982C.1.pep
MSEEDDDQPPPLPAQKRPRASPPPDQVLDNVLETVLQFLDSARDRCAASLVCRSWSRAESATRASVAVRNLLAASPARVARRFPAARRVLLKGRPRFADFNLLPPGWAGADFRPWAAAVAAAAFPALASLFLKRITVTDDDLDLVSRSLPASFRDLSLLLCDGFSSAGLASIASHCRGLRVLDVVDCEMNDDDDEVVDWVAAFPPGTTDLESLSFECYVRPVSFAALEALVARSPRLTRLGVNEHVSLGQLRRLMANTPRLTHLGTGAFRPGDGPEDVGLDIEQMASAFASAGRTNTLVSLSGFREFEPEYLPTIAAVSGNLTNLDFSYCPVTPDQFLPFIGQCHNLERLYVLDSVRDEGLQATARTCKKLQVLHVLPLNALEDADELVSEVGLTAIAEGCRGLRSTLYFCQSMTNAAVIAISQNCVDLKVFRLCIMGRHQPDHVTGEPMDEGFGAIVRNCSKLTRLSTSGHLTDRAFEYIGKYAKSLRTLSVAFAGDSNLALQHILQGCSKLEKLEIRDCPFGDAGLLSGMHHFYNMRFLWMSGCNLTLQGCKEVARRLPRLVVELINSQPENERTDSVDILYMYRSLEGPREDVPPFVKIL

SEQ ID NO: 151880 - protein, 93 aa, Oryza sativa
  unsure (1)..(93): unsure at all Xaa locations
  Clone ID: PAT_MRT4530_51983C.1.pep
RFHWVLFLKDMDSYRVHVYDSMDKEESTFDKIFEVIDKAXARFRALDKGSWKEKLGRRFNIPCAKXDQGNNLCGYNVCEYSHTLNSGNDEERE

SEQ ID NO: 151881 - protein, 66 aa, Oryza sativa
  Clone ID: PAT_MRT4530_51984C.1.pep
AFPFVLTPKKNRLFRCQGGGVSNNVEGTPTKLGGIINHQGDLIRDSGPIPQGGPGFLKKKTPAFTP

SEQ ID NO: 151882 - protein, 64 aa, Oryza sativa
  Clone ID: PAT_MRT4530_51985C.1.pep
SSATMANHETCDFDYDKMEASCLLGKLMTTSHIFSALLMLKSLTNDNGYSLHHKTITIHKIQFF

SEQ ID NO: 151883 - protein, 103 aa, Oryza sativa
  Clone ID: PAT_MRT4530_51986C.1.pep
KVVISFHNNNKKKKLLCTTVILLSSIIFYTRCCISSVIFSHVAALVACYLPTFVCDYFICDKKKIHPITCSCICKDRKKMFQLTHRLGVLNGPIFISYVESLL

SEQ ID NO: 151884 - protein, 237 aa, Oryza sativa
  Clone ID: PAT_MRT4530_51987C.1.pep
MEGCTRNNSSSLARESCPLGCDDGVDDDDSINSLAGEPCPLGCDGSADDNGNISSSSPEGASSPIGCDNDSLTGVSSPIGCDDVEDGGQAAAGDDGISLLGEVNWAVHIGTYFPHHRAGARNGGTGDGGRGCVGDGGHVDNGEGDGSPDGVGAAIGYSGTGVSGAAGGKWEGSGRHIKGSSGEGTHAMACGDAAWWRTDIRRGGTGNVVLKEEKLGRADFMLSPRLVAQAGMMCDDR

SEQ ID NO: 151885 - protein, 132 aa, Oryza sativa
  Clone ID: PAT_MRT4530_51988C.1.pep
MRRQGGNCEVNSSIALLQERFRNLQKVREMREGREQLLQTPPSPTATATAIAGATTTGAAASSSGGEQPRWFSHPELVRPSSRPAAAQRATADDDAAAVRQPPAVSVGRAAAMVLQSSGCRSDVEVDTSLHL

SEQ ID NO: 151886 - protein, 89 aa, Oryza sativa
  Clone ID: PAT_MRT4530_51989C.1.pep
KPGKQTGAPQNSLGGPQKKPEPLFSTGGKKKKTPTQEQTKNPGGFKKKKNPLWGGLEPPGALPYWGGGKKNAKQRGIGPRQSLKGFRGL

SEQ ID NO: 151887 - protein, 74 aa, Oryza sativa
  Clone ID: PAT_MRT4530_5198C.1.pep
GPPGPKNPKPPGPPRPRAVGWGVPGFSPRCWLPSCKTVFGPQWSRKLTMGMHFFSFPFILPLFSLFFHFSPLHV

SEQ ID NO: 151888 - protein, 155 aa, Oryza sativa
  Clone ID: PAT_MRT4530_51990C.1.pep
MAAKLTQEQVDECREIFDLFDSDEDGRIAAGELVTALRSLGQNVDEAEARRFLADATASGGGGGGGGDIDFAAFLSVAARKMRRGATEKELAACLDVFDDARSGVIPAEQLRQAMVSHGDRLTEEEADEMVRKADPAGEGRVEYKEFVKVLMNNK

SEQ ID NO: 151889 - protein, 136 aa, Oryza sativa
  Clone ID: PAT_MRT4530_51991C.1.pep
SSSSSAGRIAAGELVTALRSLGQNVDEAEARRFLADATASGGGGGGGGNIDFAAFLSVAARKMRRGATEKELAACLDVFDDARSGVIPAEQLRQAMVSHGDRLTEEEADEMVRKADPAGEGRVEYKEFVKVLMNNK

SEQ ID NO: 151890 - protein, 42 aa, Oryza sativa
  Clone ID: PAT_MRT4530_51992C.1.pep
SHQPDHPARGDQPRRETSKCARKPRGVLSDTTPANPHVSRHH

SEQ ID NO: 151891 - protein, 60 aa, Oryza sativa
  Clone ID: PAT_MRT4530_51993C.1.pep
CAARAYGSPSATRKRGGAAGAGGFGWRARGKACARGRRASCLVGVGRMVYGRRTSTSHCR

SEQ ID NO: 151892 - protein, 54 aa, Oryza sativa
  Clone ID: PAT_MRT4530_51994C.1.pep
MKITHSRVQSSQPLPGYQNYFGKGQQPPSHYQPSQDHHPNSTRMMTQAIRQASK

SEQ ID NO: 151893 - protein, 24 aa, Oryza sativa
  Clone ID: PAT_MRT4530_51995C.1.pep
TNHTLIVLHIVHFHTYDLFTEPLS

SEQ ID NO: 151894 - protein, 579 aa, Oryza sativa
  Clone ID: PAT_MRT4530_51996C.1.pep
MDVLKSDVKKTGILNETLRPPLVPSEKHNASPVNRGRDVASRYKNGLSAHSAATTARRCTSPSPGRTSANECTPEPKRAQSADRRRPSTPSSRVSTPSTPASRSVTPVRNTVTEGHKSSRRITSTRNTDGLWPAMRNLSSSFQSESVVTPGNKKDKVVPSGSLDQTKGQASVIAERKRSPLRRKNIGEQCENAQPSEDQPRRVIEQHRWPAMQSGRVASNILSRSIDMSDKAGRSVPSTNISRGVSPRKTLASEGTGKGFNKSLDEVARRLAIHAGGRDDKVDSRCHAYSQSTERCKSVSRPSRAVTLPVPVLHRSSSPSKASSVTSSISRSFQSPSRTRPSTPSRSQSAGSIQSGVASPIISYMVDAKKGKKNSSQIENIHQLHLSYNRYLQWIFVNAYAEDTMSFQKVTAESIIYNVLRNTSNLRDVVNMRRIMVQCIQQELKLHGILKEQIDYLEQWPALEKENSISLFHATEALKASTLRLPVTSGAKADVVALKNAVSSAVDIMQGLGSAVRCMLPKVEDRTYLVSELSVIARQEKAMLDECRELLAMAAKLQVQESSLRTHLTQLRPGIAHMI

SEQ ID NO: 151895 - protein, 539 aa, Oryza sativa
  Clone ID: PAT_MRT4530_51997C.1.pep
MAAANGGDSKGFEVPKLEIKFTKLFINGRFVDAVSDRHHPPAPPKSSRRSSPSHRDGIPAAWPPRRAATEAWTTHRAMGWRRATRPSEEGRRYEEKKASPPPSLPATGFAAGGLQRRRGKTFETRDPRTGEVIAKIAEGDKADIDLAVKAAREAFDHGPWPRMSGFARGRILHKFADLVEQHVEELAALDTVDAGKLFAMGKLVDIPGGANLLRYYAGAADKVHGETLKMARPCHGYTLKEPVGVVGHIVPWNYPTTMFFFKASPALAAGCTMVVKPAEQTPLSALFYAHLAKLAGVPDGVLNVVPGFGPTAGAAISSHMDIDKVSFTGSTEVGRLVMEAAAKSNLKPVSLELGGKSPVIVFDDADLDTAVNLVHMASYTNKGEICVAGSRIYVQEGIYDAFVKKATEMAKKSVVGDPFNPRVHQGPQEEMSIAQEEIFGPVMALMKFKTVEEAIQKANSTRYGLAAGIVTKNIDVANTVSRSIRAGAIWINCYLGFDPDVPFGGYKMSGFGKDMGMDALEKYLHTKAVVTPLYNTPWL

SEQ ID NO: 151896 - protein, 229 aa, Oryza sativa
  Clone ID: PAT_MRT4530_51998C.1.pep
MNIFKKKVDPKEALRTSKREMSVATRGVEREIGSLQMEEKKLVAEIKKTAKTGNEAATKILARQLVRLRQQIVNLQGTRAQIRGVATHTQAMYAGTSISAGMKGASKAMAAMNKQMEPTKQIKVMREFQKQSNQLDMTLEMMSDAIDETLDKDEAEEETEELTNQVLDEIGVDVASQLSSAPKGRIAASNRKAESNQARNAAPPRNNVEPESSAEVDDLERRLASLRRI

SEQ ID NO: 151897 - protein, 89 aa, Oryza sativa
  Clone ID: PAT_MRT4530_51999C.1.pep
YDLSHPPYQANYIYLPTPTLYHINSTDHHTLDQIYIGLYRSYIRLHPKEPLSTSPASAHEISKSNSRASIYLLLLGKHQAHIIIHALTN

SEQ ID NO: 151898 - protein, 58 aa, Oryza sativa
  Clone ID: PAT_MRT4530_5199C.1.pep
HALPASEHRCIYSHNCQLSMAQALYTLDLKSCSDSFEHFTIPTCYCYHKHQHLPMCNA

SEQ ID NO: 151899 - protein, 326 aa, Oryza sativa
  Clone ID: PAT_MRT4530_519C.1.pep
MTLPGGEKQWRGQGDLEKDLESWRIIEDVQVKVEAPTKSTSSAIRSLGPVCTKTGTQLYSTLFLFVFFDSQTGISLLGEVIRVSTQDKSLRIRKLLWILRAPFGESRGDLFEHTRIMDESKRDMEKMSENVTAAAQVLALFSVLITTVTFASAFTLPGGYRSAGDDGGATGTPVLARHGSYAFDAFILADALAFVFSFVATAKLLYAGVPAFNLESRFHSIDCAYSLMMNCGRCLVAALALGLYVVLLPPVGRTIAIEIGVVMIMLAIAAFTKDSEGCVDPISISVSVMRRNSRKLSSRDVLLSILYLLERFWSFVLILGKGKGQD

SEQ ID NO: 151900 - protein, 102 aa, Oryza sativa
  Clone ID: PAT_MRT4530_51C.1.pep
MKRKKDLSIAPCMLEECSIDQALIISEDEKKGNDNGATATQEVLTWAKEKRPSVTNVWMIKEVDWGPNQELLQVYFYLTTSLLAHRRQEIKLYTFCIRIRAS

SEQ ID NO: 151901 - protein, 66 aa, Oryza sativa
  Clone ID: PAT_MRT4530_52000C.1.pep
FPLPVPKLAVLKIEVLEFTMSEKHAFGGQTCLPVWELNQGIRAVPFPVFRGPGSKSVRLLMRFDFL

SEQ ID NO: 151902 - protein, 502 aa, Oryza sativa
  Clone ID: PAT_MRT4530_52001C.1.pep
MAAANGGDSKGFEVPKLEIKFTKLFINGRFVDAVSGKTFETRDPRTGEVIAKIAEGDKADIDLAVKAAREAFDHGPWPRMSGFARGRILHKFADLVEQHVEELAALDTVDAGKLFAMGKLVDIPGGANLLRYYAGAADKVHGETLKMARPCHGYTLKEPVGVVGHIVPWNYPTTMFFFKASPALAAGCTMVVKPAEQTPLSALFYAHLAKLAGVPDGVLNVVPGFGPTAGAAISSHMDIDKVSFTGSTEVGRLVMEAAAKSNLKPVSLELGGKSPVIVFDDADLDTAVNLVHMASYTNKGEICVAGSRIYVQEGIYDAFVKKATEMAKKSVVGDPFNPRVHQGPQIDKEQYEKILKYIDIGKREGATLVTGGKPCGENGYYIEPTIFTDVKEEMSIAQEEIFGPVMALMKFKTVEEAIQKANSTRYGLAAGIVTKNIDVANTVSRSIRAGAIWINCYLGFDPDVPFGGYKMSGFGKDMGMDALEKYLHTKAVVTPLYNTPWL

SEQ ID NO: 151903 - protein, 131 aa, Oryza sativa
  Clone ID: PAT_MRT4530_52002C.1.pep
PSGRGDTLSDCRCSRASEPEFSAIPSIHLLWCLLRRSRTPAQRERASCCRRQLIEVSRVLVLSFFSLLQCNTHPMFRDTMMYTPPTSGDKISVAFCLLALSMYRTYIFHGAGRAGWRNRMPPPPLSVLLCT

SEQ ID NO: 151904 - protein, 97 aa, Oryza sativa
  Clone ID: PAT_MRT4530_52003C.1.pep
TNPVHAAAVLANSSRLVSTNNAHLIQAISDCCKRCVQQLQLHAMFSRCLTLDQTASCKPKLCWTFNLWPSMMVVSTLTTIVAAQEPWPLLVVSGTEL

SEQ ID NO: 151905 - protein, 97 aa, Oryza sativa
  Clone ID: PAT_MRT4530_52004C.1.pep
MVFTFQVSFTGSTEVGRLVMEAAAKSNLKPVSLELGGKSPVIVFDDADLDTAVNLVHMASYTNKGEICVAGSRIYVQEGIYDAFVKKATEMAKKSVV

SEQ ID NO: 151906 - protein, 71 aa, Oryza sativa
  unsure (1)..(71): unsure at all Xaa locations
  Clone ID: PAT_MRT4530_52005C.1.pep
GHINLNKIILPKKKKKKKKKKKKKKKKDKKKXQNLKKKKKQHKKLKKIKKKKKWGRSFLRTQLTYPAFAND

SEQ ID NO: 151907 - protein, 76 aa, Oryza sativa
  Clone ID: PAT_MRT4530_52006C.1.pep
PPFSKRVKLVNGFFVREKKDPRFFAVFWGCQWKQPLWGVASSPCSLRPFLPSGVPFQHSALVCCRVPKKKRRLAPK

SEQ ID NO: 151908 - protein, 38 aa, Oryza sativa
  Clone ID: PAT_MRT4530_52007C.1.pep
DIFANSSKKKKQKKKKKKKKKKKKKKKKKKKKKKKKKK

SEQ ID NO: 151909 - protein, 127 aa, Oryza sativa
  unsure (1)..(127): unsure at all Xaa locations
  Clone ID: PAT_MRT4530_52008C.1.pep
PRVRPRVRDEGDPPRVWARDGLYPGTAXTRSLGDQADEAVGVIAEPEVKSVEITPAHLFFVVASDGVFEFLSSQDVVDMVAAYEDPREACSAIAAKSYKLWLEHENRTDDITIIIVHIRDSENGARK

SEQ ID NO: 151910 - protein, 75 aa, Oryza sativa
  Clone ID: PAT_MRT4530_52009C.1.pep
MEQERGSGKGVGGVTSSAFGSNRPVPAAAYGIRWILAGGSGETAEEGDDDEVVEYPEVTSMVILTVHTLDKVAKL

SEQ ID NO: 151911 - protein, 121 aa, Oryza sativa
  Clone ID: PAT_MRT4530_5200C.1.pep
MAAMTPAGNSDTPPPRPVGSAVRDVGKLLFNHSASVSILAGRGRSRSPRSRTHAVSVQYHIAIVSPKPSRRHRRRPGRHHQPLGGSNSVVCELTVPRFLSSPLQPVGQLRGKRGLVSVSSS

SEQ ID NO: 151912 - protein, 138 aa, Oryza sativa
  Clone ID: PAT_MRT4530_52010C.1.pep
SDLSQFCSDQGCVDRKKEKKKQFPFGVVHLLITSLFPAARAAGVGLAGENALPRYDGTAHDQVVAAAADRAAEDRMVAFTYLRMGPDLFHPDNWRRFVAFVRRMSESGSPREAAESAAHGVAQATGSLVHEAAVALRS

SEQ ID NO: 151913 - protein, 93 aa, Oryza sativa
  Clone ID: PAT_MRT4530_52011C.1.pep
ASGIKMYLTIWCIYKLRQNFQIQTYSFSLLLKIAYYYFPGAVLNFLNNAHILDVLVIANNVIAQQEVQGYLNICWQMMCSVLRILLHCFKLWF

SEQ ID NO: 151914 - protein, 51 aa, Oryza sativa
  unsure (1)..(51): unsure at all Xaa locations
  Clone ID: PAT_MRT4530_52013C.1.pep
TCAKPFHSSTICINSGQTLRWLRRVVGMLPXTNLSYRHALLAKKKKKKRRP

SEQ ID NO: 151915 - protein, 172 aa, Oryza sativa
  unsure (1)..(172): unsure at all Xaa locations
  Clone ID: PAT_MRT4530_52014C.1.pep
MATTGDSAAAPGEVRRLLAHLDSHQQLLAACHDACFESLASLEACKAAVPVRLAEVETALSAAVAEAESAEPPPADVRGXLRWMCGRMDAPVLWRFTAARRRELAAVRKEVGPVVAAKDGAATPSISFWFHSTRRRSQRQPNSQPGASAAWHPAWRYLRRDVQTPAPVGCNF

SEQ ID NO: 151916 - protein, 1163 aa, Oryza sativa
  Clone ID: PAT_MRT4530_52015C.1.pep
MAARYIKDELKTMHAFLRAAEVTKEKDELVKVWAEQVRDLAYDIEDCLEEFTIHVKHQSLSRQLMKLRHRHRIAVQIRSLKLRVQEVSNRNMRYNFIKSAPSREMDDFSTNMEMTRYQAAHYVDEAKLVGFDGPKKEILKMISGSEDVEVQTIWIVGAGGLGKTTLAKKVYESSNITSMFPCRAWITVSQSFDVMDLLKDMIKQLLGKESLDNLFTKYKEVKIKENNLTDHLKEWLRNKRYFLVLDDLWSTKAWDCLKPTLWGNNREGSRLVVTTRNRDLAEGSSSPLVYPLQTLHREDATKLLLAKTNKSLCDINKDGMNETFEKILKKCGGLPLAIITIGGLLAAKDVKEWDGLYAQIPSELENNPSFEVMRQVLALSYKYLPSHLKPCFLYLSIFPEDFEIQRKRLVYRWIAEGFIRARDGVSIVDVAIKYFNDLINRSLMQPSRVNMEGTIKSCRVHDIIRDIMISISREEKFVCRIDDKETCLMEENIHHVAFYNSNSSEIAMDLNQVRSLTVFGERHKELTPLLCSPQVRMLRVLDFQGVRFGMTQKEMDHIWSVLHLKYMNIRCDYNLPNSSGYSKIYRIPRSIGKLQGLRVLDISNTCITSLPTEICELRSLNILRCTRKEYYEFFDPSKPIQCLFALSCIPVTMALADSDQRHEITAELHMACSTRWFSTCGVRVPMRIGNLKQLQELGYVDIRLTSSKAVKELGELSQLKKLRLRINGATQRKCKVLREAIEKLSSLQSLRINAFDVSSLRNLEWLHYISSPPPFLKNLTLEGCIKEIDWLREFTHLVKIHLFGSKLKEGKTVQILGELPNLMVLQLRWGAYVGVKLLFRAEAFPKLRKLEIRFLEDLREMRFEERTSPQMETIEISHCRLESGIIGIKHLPKLKEISLRWNCEVARLGQLLEEVKANPNRPVLLLYNDPSKHDLGDTQEGSGTPVEANEPPKNVGESSQSNQACVEFEYNGAQPDWFLNLTLLLMICFLRASSNTKNEVILLITACDRKYLGPYSSQGLVAQPQVQHCNWPTSLFSQSFFILWWCDNGNDRHPNSLVYFEGKKQQCFQQYKSKSWAEVAAAAAAELKKQQAAIQVASLANWGFSHSCCVSRLGWLREKAQLNMLNMVSVDQPLCLPVAAIGKFSLVGRSSYGADDEGMLQPN

SEQ ID NO: 151917 - protein, 561 aa, Oryza sativa
  Clone ID: PAT_MRT4530_52016C.1.pep
MAARRRLLLLLVLLLCRLAAVLPTSEVEALQGFMAGFAGGNAAFQSWDASAPNPCTWFHVTCGPGNQVIRLDLGNQSLSGELKPDIWQLQALQSLELYGNSISGKIPSELGRDLSHNNLSGIIPTNGSFSHFTPISFSNNPRTFANSSDSPSNNSGAAVPSGRSSASSIGTIAGGAAAGAAMLFAAPIVLFAWWWRRKPHDQFFDLLEEETPEVHLGQLRRFTLRELQVATDNFSQTNLLGRGGFGKVYKGRLLDGSLIAIKRLNEDRIGTGERQFLMEVEIISMAVHQNLLRLQGYCMTPTERLLVYPYMENKSLETRLRECSDSQQPLDWPTRRKIALGSARGISYLHEGCDPKIIHRDVKAANILLDEKLEAVVGDFGLARIMDYKVSHVVTGVMGTLGHIPMEYLTAGRTSDKTDVFGYGIMRFEVTSGQRGYDLVGHVDEEKVTVHFRVKKLLEEDRLEVLIDPNLLEIYNGGEQGVREEMRLLVQIALLCTQESAPSRPRMSTVVTMLEDGIAEHWDAWQRKTIVQASLQGGQGVSEARNDSVANLPPDTLSGPR

SEQ ID NO: 151918 - protein, 137 aa, Oryza sativa
  unsure (1)..(137): unsure at all Xaa locations
  Clone ID: PAT_MRT4530_52017C.1.pep
SPDPPPEPPRLRAVAGSALPPLLLIPELPLPXPPXPLSPPPPPRPPLPPPSPPPPPPSPPPPPSPAPPPPTGDXPPPSQAPLPPSPPPPPSSSLEPPTGISTDRRRPPLSPAPPPQAPPLPSPPPPPLSRPSSGESS

SEQ ID NO: 151919 - protein, 110 aa, Oryza sativa
  Clone ID: PAT_MRT4530_52018C.1.pep
GTRVDNFIPKDQANDPSMPAPLSLPPPPPPLSYSPEGASPGICYASSQGTAMQSVVTSTKHLETAPTFANHHVIPRVRLDGFHSAHSQAGSCMWEDDLQSVVQMGFRGNT

SEQ ID NO: 151920 - protein, 95 aa, Oryza sativa
  Clone ID: PAT_MRT4530_52019C.1.pep
MEMDQRLYKARSDLELEAVVVGADSDPPAGDEVVDDEVAGRLPGHLPQLDGAELDADRHARPHRAVIWYNKLGHRKTRRSTHAYTWAHAGQIISD

SEQ ID NO: 151921 - protein, 72 aa, Oryza sativa
  Clone ID: PAT_MRT4530_5201C.1.pep
MERTPLTWQQAKDKQEFASWTVKFESTKEENNQFVSAFSTQSELHGHERELAIWILEVLVPHLDAISAPPDH

SEQ ID NO: 151922 - protein, 49 aa, Oryza sativa
  Clone ID: PAT_MRT4530_52020C.1.pep
KSIQIVSSLSKLPIQFEEIWSLEPLLGDLSCLRFTAGEGRAGYGRAYRK

SEQ ID NO: 151923 - protein, 91 aa, Oryza sativa
  Clone ID: PAT_MRT4530_52021C.1.pep
SQTIYIQTGQVSIYGLLRRAILPQRYGCSSSICCSFAVIFNSIDGCRTLQKLLSCRSTMPCVVKVRILADTLPHAYYFLATKPGIIFTVQP

SEQ ID NO: 151924 - protein, 40 aa, Oryza sativa
  Clone ID: PAT_MRT4530_52022C.1.pep
MGQPRRWHIDPTWAGGCGQHDGKMDSQQGQPMQVLVLKTT

SEQ ID NO: 151925 - protein, 368 aa, Oryza sativa
  Clone ID: PAT_MRT4530_52023C.1.pep
MTKQEILLEKKRVITVQGRDKAGRPIVRIVGKNFPARELGGGGHAEAALKGYVRRRVTPAIGDAEFVVVYMHSGVDRRENFPGVGAVRTAYESMPAAVRERLHAVYFLHPGLQSRLFFSTLGRFLFSSGLYGKLRYVSRLEYLWAHVRKGELDVPEAVRRHDDELEQRPLMDYGIEASERTSKNGPKPHCTPPSPPKHRRHLNHMNMARSNLLCCLGTRREDNARQRQTRPTPRPRLRRLMSGMKRVFGRSPPCGQTAVAPDSGIVVVEPRRQTAARRVGKGARDGGVNNREEISREEAAAATIQAGFRGHLARRAFRALRSLVKLQALARGSYVRKQAGVAIRFMKVLVRLQVRVRARQLLHRSKDQ

SEQ ID NO: 151926 - protein, 109 aa, Oryza sativa
  Clone ID: PAT_MRT4530_52024C.1.pep
MGLESWHDGRPGLAQPGKWAILVPARYADKPIACEWLDSPTNTRPRLRGHPGQLTTAVSCARPSATAAHCVFSRDIDIEGRGVDGGGSNCREPFKMRKTVRLVHLTTNY

SEQ ID NO: 151927 - protein, 121 aa, Oryza sativa
  Clone ID: PAT_MRT4530_52025C.1.pep
YSSASLCTTHARFLRIARNPQSAGKKNTLAPPHIAAPLPLRHGSSSSSRVPSASAIRRGTTPPSRPAPPPRSPPPIPRPPPSLNPFCRAPIIGSSVVVISTSTVVESPAPHPRPRRFSTPH

SEQ ID NO: 151928 - protein, 86 aa, Oryza sativa
  Clone ID: PAT_MRT4530_52026C.1.pep
MSLAQGAPVHGRQSPRDQGRVAHHVALTGTAQAGPAAMAMRRRGMKQRQRGVGHRRRAAAMRRRGVVLREGDIGPHRGVRQCGRRR

SEQ ID NO: 151929 - protein, 49 aa, Oryza sativa
  Clone ID: PAT_MRT4530_52027C.1.pep
MATSSDGAGGTGGGRRHGGARAVTSGAAVVGDAMHNSYTVRKVMRKEFS

SEQ ID NO: 151930 - protein, 107 aa, Oryza sativa
  Clone ID: PAT_MRT4530_52028C.1.pep
MAPQNKEDKASAANIDPKLPISESDEARAHAANVATDKGECFRANRWLSLGLVVFLSAACVFFAFTDSVLYKGKVYYGFALPTRLNLFNLNKKEEQKLFKDLEPELD

SEQ ID NO: 151931 - protein, 189 aa, Oryza sativa
  unsure (1)..(189): unsure at all Xaa locations
  Clone ID: PAT_MRT4530_52029C.1.pep
AAENSPLCGKLKKKGYEALYMVDAIDEYAAGQLXSEFEGHELVYDTKEGLNLDESEDEKKLQEELKENFEGLCKVIKEVLGDKVEKDAVSDRVEDSPCXLVTGEYGWTANMERIMKAQDLRDSTMDGYMSSKKTMVTNPVNSIMDDLFIAASADMTYMNLNDLLYAALSILVLLNLEILSSKTPKTFCI

SEQ ID NO: 151932 - protein, 909 aa, Oryza sativa
  Clone ID: PAT_MRT4530_5202C.1.pep
MEDTAGHAAGRRGPPIRQDIMAEMISNPNGDGDCGKVLSVILVKQRTSTYGPDIPLLRLYVKHETKDRIRVQITDADKPRWEVPYNLLQREPAPPVTGGRITGVPFAAGEYPGEELVFTYGRDPFWFAVHRKSSREALFNTSCGALVFKDQYIEASTSLPRDAALYGLGENTQPGGIRLRPNDPYTIYTTDISAINLNTDLYGSHPVYVDLRSRGGHGVAHAVLLLNSNGMDVFYRGTSLTYKVIGGLLDFYLFSGPTPLAVVDQYTSMIGRPAPMPYWAFGFHQCRWGYKNLSVVEGVVEGYRNAQIPLDVIWNDDDHMDAAKDFTLDPVNYPRPKLLEFLDKIHAQGMKYIVLIDPGIAVNNTYGVYQRGMQGDVFIKLDGKPYLAQVWPGPVYFPDFLNPNGVSWWIDEVRRFHDLVPVDGLWIDMNEASNFCTGKCEIPTTHLCPLPNTTTPWVCCLDCKNLTNTRWDEPPYKINASGQTARLGFNTIATSATHYNGILEYNAHSLYGFSQAIATHQALQGLQGKRPFILTRSTFVGSGAYAAHWTGDNKGTWENLRYSISTMLNFGIFGMPMVGADICGFYPQPTEELCNRWIELGAFYPFSRDHANFASPRQELYVWESVAKSARNALGMRYRLLPYLYTLNYQAHLTGAPVARPVFFSFPDFTPCYGLSTQYLLGASVMVSPVLEQGATSVSAMFPPGSWYNLFDTTKVVVSRGEGAVKLDAPLNEINVHVFQNTILPMQRGGTISKEARATPFTLVVAFPFGATEAEAEGAVYVDDDERPEMVLAEGQATYVRFYATVRGKAVTVRSEVELGSYSLQKGLLIEKLSVLGLEGTGRDLAVHVDGANATAIATSRPYFAGAEAELHGHRDVEGHKKSVMVEVGGLALPLGKSFTMTWNMQIEA

SEQ ID NO: 151933 - protein, 169 aa, Oryza sativa
  Clone ID: PAT_MRT4530_52030C.1.pep
MARRNGGWWQHLSICFSKADRMASEANAATVVDGASPNDDSGERLWGQERDREIQTWSDEAKASNGEAHLLPELRSSRGGCRPTAVHACAGKVVVRPGDVFVTRRPMWLACVYAKCGHMVAMTKAFDEMPHRGVPSWNALIVGLRKERKVSSRLKGCFMELRRRDRKCR

SEQ ID NO: 151934 - protein, 524 aa, Oryza sativa
  Clone ID: PAT_MRT4530_52031C.1.pep
MMNVVAIGLVLSTLAAAGVWSPAPTPPPSTAGEHVVREGRRVVIVEYEREHPLYPGDAVKETHVLPPDSLDGGEGRLTDKARGAVSDAADRVADAAEGGKEKMSDAKESATGKVFGAVKRCKDRLCGAAREAEEGAKDKASAGEHGAEEAARGAEEALSHAKEIAEDKVFDAASKVKETAVGAKDKVSEAAGKAKERASHVQHGAAETVRNAKDKVSHAARHARESARERAMDAKDRVSDVAERAEQCTEDAAGRAAQKAARAEEAVKAKAGEAASNLSDIARRARDVASDAAAHLLGGGPREAARTATAVMHLLGFAAAYGASLWVTFVSSYVLAAALPRQQLAMVQSKLFPMYFRAVAYGVGLALAAHLLGRERSSLAARAQSVNLLAALALVLANMLLLEPKATKVMFERMKVEKEEGRGRDMADIVDPPTVTVAAGNTATTTTVPTAAARKPAGNNNMAAKSAAAAAPVDEQTSKSRVATLNQRLKKLNGYSSLCNVLCLMALTWHLVHLARRLQIASVC

SEQ ID NO: 151935 - protein, 190 aa, Oryza sativa
  Clone ID: PAT_MRT4530_52032C.1.pep
MARRNGGWWQHLSICFSKADRMASEANAATVVDGASPNDDSGERLWGQERDREIQTWSDEAKASNGEAHLLPELRSSRGGKPTPTLFLKNFHLASLPPPLLYQQHKVHACAGKVVVRPGDVFVTRRPMWLACVYAKCGHMVAMTKAFDEMPHRGVPSWNALIVGLRKERKVSSRLKGCFMELRRRDRKCR

SEQ ID NO: 151936 - protein, 92 aa, Oryza sativa
  Clone ID: PAT_MRT4530_52033C.1.pep
MTSGVGPKNATAVAVGPGSAGRQIDGWVPRAALEQLPLAGVTWRVSRKIISLKLKKEDILLSKGTVGAAKKLFFFPEDNTFGLVICDILVCV

SEQ ID NO: 151937 - protein, 182 aa, Oryza sativa
  Clone ID: PAT_MRT4530_52034C.1.pep
WRRSSQRRQADKDVCTLIEGEGAAGHELPAPTRSLPGRLRPRSLPPAARRPPPPTARRPPLPPRPAPAAPISPPRARRSWPPPSRPASAAASRPTQPVAAASISSPRARPPAAASIPSPRPGPPWPASITPPRRRGREGRRRWELAPSPIRSAPAPPAAAPFRRRARGPVCPPTSSGATGNP

SEQ ID NO: 151938 - protein, 253 aa, Oryza sativa
  unsure (1)..(253): unsure at all Xaa locations
  Clone ID: PAT_MRT4530_52035C.1.pep
GVTTGDGIPAKQRSSWRRGQRCDVDRRTGDVQEPAGGGEVLDADEEATPASFGRGGGDAGDEGSVTEPREVVATSAGAWETRQWRPEAEQWRQRHSCRRGRTSKGLRAKRRAGRGRGGCCDAGEGGGTAGRRVGEAVGAAGGWPAPRKEKEEAGRGGVVAGELGKGRAQRACGARAREGSGSAWAGRPAQEEMRERRPGGEREEEGVGQEGXPKRRERRRGREREGGREDFGRGPREREGGFGPDLAQRKRRI

SEQ ID NO: 151939 - protein, 826 aa, Oryza sativa
  Clone ID: PAT_MRT4530_52036C.1.pep
MAAARGGRRRRPWSSSSSCGSPFLMMLISCLLWLHREAAPSLAADTVTVGRPLSGRQVLVSRGGKFALGFFQPDNSSQRWYMGIWYNKIPDHTKVWVANRRAPLSDPDTSRLAISADGNMVLLDRARPPVWSTNVTTGVAANSTVGVILDTGNLVLADASNTSVVLWQSFDHFGDTWLPGGRLGRNKLTGEVTRLVGWKGYDDPTPGMFSLELDPGGASQYVMSWNGSSRLYWSSGNWTGGMFSSVPEMMASNADPLSLYTFNYVDGENESYFFYDVKGEVVLTRFVVDVTGQIKFMTWVDSAAQWVLFWSEPKAQCDVYSICGAFGVCAEDALPACSCLRGFHARQPRRWLQGDHTAGCARSTALQCGGGGGAQPAAQKTKSDRFFVMPNVNLPTDGVTAASASARDCELACLGNCSCTAYSYNGSCSLWHGDLISLRDTTGAGNGGGRSISIRLAASEFSGNGNTKKLIIGLVVAGVAAAVILAVVVTVLVRRSRRLKALRRVEGSLTAFTYRDLQVATKSFSEKLGGGAFGSVFKGSLPADGTPVAVKKLEGVRQGEKQFRAEVSTIGTIQHVNLIRLLGFCTERTRRLLVYEHMPNGSLDRHLFGHGGGVLSWEARYQIALGVARGLDYLHEKCRDCIIHCDIKPENILLDDAFAAKVADFGLAKLMGRDFSRVLTTMRGTVGYLAPEWITGTAITTKADVFSYGMMLFEIISGRRNVEQGQDGAVDFFPATAARLLFDGDLKGAVDGRLAGNADMGEVERACKVACWCVQDSEATRPSMGMVVQVLEGLVDVNAPPMPRSFKVLGDPSNYVKFFSALPSIS

SEQ ID NO: 151940 - protein, 272 aa, Oryza sativa
  unsure (1)..(272): unsure at all Xaa locations
  Clone ID: PAT_MRT4530_52037C.1.pep
MRCSSGAAGCTRPSISRKLTRAAAAEVEVDVAAAGGAPRRSRRGMLLLLLRGSAMRSPRPGCNDSRTAAPPAGARRAPPGPCTRSCRRRVPSSGPCSPGPRAPTSNATASASGPPPGAAGRPPRLAERPGPSSRRRLAKSGTATAAAAAGGRRRXPTTLRSSIEQEKLMDEEEHAASVRQRKSFSGVIKWRPPPAPAAAAARPPPPPAFPTRRSSSAASDPPLKRCSSARSESEGLIQGAIAYCKRSQQQLVLARKSVSDAALCSLQFQIQL

SEQ ID NO: 151941 - protein, 230 aa, Oryza sativa
  Clone ID: PAT_MRT4530_52038C.1.pep
MQPSPSLSYYSSMLSPRKLMQRAFRRSGSSKSSRRRNSKDDVGGDNSASRPRLTARSPSRGGARQDLLEVIPEKVKGSRVKTAMEKRLEEEQPRRWEMAWWSNDVIEEARSKLLEKRQCSRVKALLGAFETIMDAEPAGDGATTIAGKPQHYLHRRQTAALPPRHPAAYPNEKSERERERGERESRRGGERVMTWSADMWGPRGSHANSAATLDKTGLKTVKGPRVTGFD

SEQ ID NO: 151942 - protein, 64 aa, Oryza sativa
  Clone ID: PAT_MRT4530_52039C.1.pep
MPSVTVSVPGCPAYQTLEKKDNMALFFHAGALGTDHGTDDIRAACIAALPAARVAPPPHHRTTR

SEQ ID NO: 151943 - protein, 141 aa, Oryza sativa
  unsure (1)..(141): unsure at all Xaa locations
  Clone ID: PAT_MRT4530_5203C.1.pep
VKLGAPLLVPDPTGXFTVTAFDANHCPGAVMFLLRGASFGSVLHTEDCRLTPDFCFVAADXVFLDCTIAACSLHFPSKHDSIRQVINCIWKHPNAPVVYLVSDMLGQHXTLMEVSKVFGSKIYVDRDKNSECYHTLSLVAP

SEQ ID NO: 151944 - protein, 68 aa, Oryza sativa
  Clone ID: PAT_MRT4530_52040C.1.pep
NISRRIPRRAESISIHIYGHIHPFFFPPLLIYQLLLSSCSSALLATNPRSSSLEERAAAAGYIMVMVG

SEQ ID NO: 151945 - protein, 50 aa, Oryza sativa
  Clone ID: PAT_MRT4530_52041C.1.pep
SQPRKRWMSTLLAILESSSSQSLIFVTSLEYPYALKILASASSLTSAPSV

SEQ ID NO: 151946 - protein, 267 aa, Oryza sativa
  unsure (1)..(267): unsure at all Xaa locations
  Clone ID: PAT_MRT4530_52042C.1.pep
PLSSSPWPPRRRRRRRRGCRGARAARRPPRRRPAPTPRAATTSSRRGPRRRRPPPRRXSRHHLRSLSISCMTIRTDDDSPPPAATXRTRRRRPSRCPTTRRCCRRGSSCSARPARSAAASRLAGGRARTTSSSASAAAAATSRPRSTARAPSRRRACLPWMRSLPPTTTSMAAAQGKISRRSSRRRSYTRRTRRWXSPSRRWRKKSRTRSSRRSRRRRSRPPPPPSSKRRRWSTTTSPRKATPLLLQCPPTRLPPPPRRRRTSSSWW

SEQ ID NO: 151947 - protein, 227 aa, Oryza sativa
  unsure (1)..(227): unsure at all Xaa locations
  Clone ID: PAT_MRT4530_52043C.1.pep
RADTLRRRGQLGSPPSAPVDGEARLGQPGSPPSASPPATESPSSTLPTSPPAPSPPXPPPPVRSPSVAPPPPPPPRXPPRRRVPPPPPXPLPPPPLPPSPVTLPPARPPVPTPTTSTSTPTGRPTPTNSSPASLKPAPAAPTPPPPPPAASAVGGWDFXPVLRGAPLPPSPPPCPPPPSSRSAPSPPLPPPPPRAPLPSHRRLRAPPPQGRPSSAAALGPQTHRSPT

SEQ ID NO: 151948 - protein, 103 aa, Oryza sativa
  Clone ID: PAT_MRT4530_52044C.1.pep
MPPWRERGIIANAPKEVTTPKGVTAASPMNHQARLSPRTHATLLEVRRPSTQEPSRKQISTRPPPHHVGTPPPADHHTCCRELPPPLGTGPGLLRPTICRPPC

SEQ ID NO: 151949 - protein, 96 aa, Oryza sativa
  unsure (1)..(96): unsure at all Xaa locations
  Clone ID: PAT_MRT4530_52045C.1.pep
GPSPQAIQKACWAGPRPKRPSPTSAPGXLALSFPQSAPLWLALRXLSARLTGAEFPKVSAIFADAEVPARKPSRRLAGLGQGRNGQVPPQRQVGLR

SEQ ID NO: 151950 - protein, 42 aa, Oryza sativa
  Clone ID: PAT_MRT4530_52046C.1.pep
YMVFRQSKPEFLLRTYTTVCSSGRRAKNTGHPLRAITGAVGQ

SEQ ID NO: 151951 - protein, 317 aa, Oryza sativa
  Clone ID: PAT_MRT4530_52047C.1.pep
MVKEEEIITEAAGARGYMEMLGLGEEAADYLMCLSPSSYLSSPAASTTTAVASPTCASYLAPHPYHHLLSFSGQDQYHGDDVFGLQYYGGDQVIPAVVPQKSSPTTECSSSVSSMSSSPTATAISSSKSPAFKKKGSRGCDQRKATAPAAATTTNKRPRVRRERLGERIIALQQLVSPFGKSDTASVLHEALGYIRFLHDQVQVLSSPYLQRLPPSARVPEQERGTPAAEEQPPALRPSDLRSRGLCLVPISCTEHVAGAGAGTGHGNGADLWSVAAGMAKATATVTAAVERSKEAAAAAAATAALLRADRPGQQLA

SEQ ID NO: 151952 - protein, 71 aa, Oryza sativa
  Clone ID: PAT_MRT4530_52048C.1.pep
FFFMQHTNRTRLGGALLCISGANTRKQENTLEQHTRITAANPHTAHFAERTWQDRKPHMGGGPPPLEDKWA

SEQ ID NO: 151953 - protein, 97 aa, Oryza sativa
  Clone ID: PAT_MRT4530_52049C.1.pep
MMVATVGMVGNTIHPSLGINPSHPSKPCIHRRHGRFSQTPRDMGWLNPAHLRLAASFVVLLRRLVNFGPICCVISKFLTHSYISLVLDTVRLIYRLS

SEQ ID NO: 151954 - protein, 53 aa, Oryza sativa
  unsure (1)..(53): unsure at all Xaa locations
  Clone ID: PAT_MRT4530_5204C.1.pep
MAMEVEDGGGGAIEAGDRGGDKVGDGGGADPARGGRGGADXPVCGDCRGADQL

SEQ ID NO: 151955 - protein, 817 aa, Oryza sativa
  Clone ID: PAT_MRT4530_52050C.1.pep
MEEEKRARAAERDRAIVRSPRKGKAPRIEPLDADDSGWGGDASLEVYREAAAVATRGGAGGGGERCEHMTCSEHDVAEIVSKIASWGDPVCQDETCMCTERHLMMVCVECDMHFCIGRFAKKSKPRGHIEEHAFDDGHPVALWYEDPYTGYCFECEDPLTIGGEEGDKGMKVKGEEGCRASGSDSGHGCVIGASGSGSGHGCAIRGIPNFGNTCYLNAVLQCLLVLGKLRARMSGPDAPPPSGMLGIILHDLFVATESVSYTRDLLDPVMLLGCVRHYKSEFQGNTMQDSHELLCCLRDSLIEEESKTRPDNMQQDAPSAVVPTVIDSIFRGQLFVTTLCKYCSFESVSQGSQDAFYDLCVALPLQNERCISQQKIAIEQFPTIDKTNTEKIHAISGGSDPQVPASELGDMVMVKTSEPLVVDSNPLDQIAQSKDDVHCPLQSPIRKENVLITSDRELERTKSAILDSIKPEDSIEAKMDTLSGEVTTEDKGKDRNCDVVYDEADDINSLASIEELLGLHFKEMVEKRCENCSNVAQKASPISGKDGEQTVACTNVNRTVDGDQAEQSERKTCQSEQSSDLVRLDGECSSSSRQPHVADAQHQVMPTEDTMTKGDISGMSHGEKDSSSFSIVNQKPECLECAQEDVPDCHLGEKPVNLSSGQCQNANTEDQGRRKQVNLHQVEENQYDQQDRNEGAIKTSLISKLPPVLVIQLKRNTGPIKVRRHVSFKEILDVGLFLHPSSEDKDNSSYRLVGVVEHLGHSMYSGHYVAYVRPSPPQQTNGSSSWFWASDTDIREVSLEEVLKCEAYILFYERMEG

SEQ ID NO: 151956 - protein, 399 aa, Oryza sativa
  Clone ID: PAT_MRT4530_52051C.1.pep
MGRRFLNLVVENARSGLYSLRRIPANHLFYPSTRAAEEATAKSQESFNAYVKEHHGRKHPGLHTLEMLGKLPSPMLNFEPTPWDGQRRYRNLEFASLLGNENRILFADHSGHTIVFDADSSTVFAFPNLISDKGCAAISLSIKNNNTNKNISGGMWDEDSLYVMSQSADPETKDYCFEVLNYTSSCKDFRGRTPCWSSLQPPPFANYMHADITSYTVVDSSTIYVSSMEPDATYAFDTVGRQWRRLGCWTMPFDGKAEYVPELKLWFGLSVDHPYSLCACDLLSDAAKPPTVQQQHTWVDLDIPESWLPYNIDLINLGCGRFCVVKIFRPMADDCTGFSDYDDDDAMDSDLIQGKFAVLTGLQIVRPCGKDGDDQGGVRMIKHKSMYYNFWDYEIEWVI

SEQ ID NO: 151957 - protein, 67 aa, Oryza sativa
  Clone ID: PAT_MRT4530_52052C.1.pep
RPFFFFLKKNKYPKLKEPFINFPQPHFTHTIHTSRSKQLKIFYKHEYILIKQYSYTFLSFNNNNHKL

SEQ ID NO: 151958 - protein, 443 aa, Oryza sativa
  unsure (1)..(443): unsure at all Xaa locations
  Clone ID: PAT_MRT4530_52054C.1.pep
PLILELFFRKVEQNGLILSKKKMEICKEKXINFLGHEIGEGKIHLQEHIAKKILQFPDVMNDKNKLQQFLGIVNYARNHIDNLATLAGPLYAKLRKNGQKYFNSKDIKLVHIIKERVKELKPLELPLEENYFIIETDASQXGWGAILKQRPTKYSTKXEENICRYASGSYKVKIVNNTDREILAIINAINAFRLYLGFKEFTVRTDCESICGYYNQLNRKKSSTRKWILFEDIITGNGYKDIFEHIKGKDNHLPDLLSCLPLQQKPIYVVFDGKLLGVYISFEEIIAQKIYAKIMGGLLWKKKXDVDEALSQARKILGINYYMEPAAKEYIQKCKRAKNKKALETPYYMNTKVEGSSKKPTYKECLTKGMDPLDGEYIDWKIIENFEDASPQLKKELKEEILKELKKEMNDKFEEIKKAYDEEFDVFFLMLIPWIWAARPISN

SEQ ID NO: 151959 - protein, 249 aa, Oryza sativa
  Clone ID: PAT_MRT4530_52056C.1.pep
MTGFGSPCGACKFLRRKCVRGKGAAHFAAIHKVFGASNVSKLLAHLPLADRPEAAVTISYEAQARLRDPIYGCVAHIFALQQQVMTLQAQLASLKAAAAQGIHHQDVGATTKGGYMSAAATAADDQLGYGGYNQWCGSNGGGAPAASQPGAYSSNGGAGHGHDSITALLAAGSDYMQHSLYHAFEHSEGAGAVDDGHAAAAAFEAAAESSSCGMAASFAADESVWRSSSSGYQDCEDLQSVAYAYLNRS

SEQ ID NO: 151960 - protein, 108 aa, Oryza sativa
  Clone ID: PAT_MRT4530_52058C.1.pep
LVSIGPYHRGRDELRATKQHKWRFLRRFLQRAPTVPLSYFVDAVWAVEQCARCCYSESATIFDGDGDGNDFAEMLLLNSCFILEFLAKAEPRQSRDETTLSRNSGWLI

SEQ ID NO: 151961 - protein, 66 aa, Oryza sativa
  unsure (1)..(66): unsure at all Xaa locations
  Clone ID: PAT_MRT4530_52059C.1.pep
RQQATTPSQFGDLXFDRNLAXAQALLAFNVPSRYGIYPRYYGAPRTLTPLAVSCNEFYRIVVRKLK

SEQ ID NO: 151962 - protein, 772 aa, Oryza sativa
  Clone ID: PAT_MRT4530_5205C.1.pep
MGTSGSKGIDGVGGVGGGAAGLGGGEAGDGGGGVGGAASRSWHGGAQLYVSLKMENARITGDLVPHVYGSEPIIGSWDPARALAMERELASMWALSFVVPPDHETLDFKFLLKPKDADTPCIIEEGPTRHLTGGMLEGDVRIAWFKMNGDHETLEFRVFNKADIVSPLDLAASWRVFKENFQPSKVRGIPDVSINVAPAHGTEDTSTESLELDLEHYVIPTPSAATSEYAANLAANPASLIQTGALWTNDMLLSDGIQSPSSATADFEDHNNCNKDNVALPSDSFKKLQVSGIVESKSVDTLTTLQKQDGQKGLFVDRGVGSTKFGKSSSACSLASGLNFGTGKAMPEAAGAVAAAAVADRLHGSKEDRKLAIVLVGLPARGKTFTAAKLTRYLRWLGHETRHFNVGKYRRLKHGANQSADFFRDDNPEGIEARNEVAALAMEDMIDWMHGGGQVGIFDATNSTRKRRYMLMKMAEGNCKIIFLETICNDPNIIERNVRLKIQQSPDYADQPDYETGVRDFKERLANYEKVYEPVQEGSYIKMIDMVKGQGGQLQVNNISGYLPGRIVFFLVNSHLTPRPILLTRHGESLHNVRGRVGGDTVLSEDGELYSKKLANFIEKRLKSEKTASIWTSTLQRTILTASPIVGFPKIQWRALDEINSGVCDGMTYEEIKKVMPEEFESRKKDKLRYRYPRGESYLDVIQRLEPVIIELERQRAPVVVISHQAVLRALYAYFADRPLREVPDIEMPLHTIIEIQMGVTGVEEKRYKLMD

SEQ ID NO: 151963 - protein, 263 aa, Oryza sativa
  Clone ID: PAT_MRT4530_52060C.1.pep
MARGLKKHLKRLNAPSHWMLDKLGGAFAPKPSSGPHKARECLPLILILRNRLKYALTYREVISILMQRHVMVDGKVRTDKTYPAGFMDVVSIAKTGENFRLLYDTKGRFRLHSIKDEDAKFKLCKVRSVQFGQKGIPFLNTNDGRTIRYPDPLIKANDTIKIDLETNKIVDFIKFDVGNIVMVTGGRNTGRVGVIKSREKHKGSFETIHVEDALGHQFATRMGNVFTIGKERKPWVSLPKGKGIKLSIIEEARKRNAEAAAEA

SEQ ID NO: 151964 - protein, 280 aa, Oryza sativa
  unsure (1)..(280): unsure at all Xaa locations
  Clone ID: PAT_MRT4530_52061C.1.pep
ISIQKLVDEILIKASTSESLNHSVRFEKSPHNWLNGWCVKDIAPNLYKLAIRKNRMVSTELQDNTWITSFRQITEIETINELVQLGGLISQIQLQLGTEDDIIWTRNETGTCISKSAYLAQFIGSCSKQEFSHLWGSQAQPKQXFLGWLILHQKTLTAENLLIRHWPCHWICSHCSEDFEDTDHLFRDCPFTRQVWNRVSTMRGSDPKPPSQNLKIWVDDITANGSKKKHKREQLDLLVMTWWHIWLQXNTRIFQQQPSTTAQVVNLIIQDIDLRELALK

SEQ ID NO: 151965 - protein, 383 aa, Oryza sativa
  Clone ID: PAT_MRT4530_52062C.1.pep
MAHQMGWWRTTSLRVEISPKMKSPGNRYCVGEIAGEREDKAAKGGPVKKISKKKGLVDVARVFSDDKSSDGTQTSPADRSLHLSTAPILPLDAGGEGGSTAIGALASADRIVTAAARAKGKEAAVETSTSEYSLAGPHFAPGDFESRAELIPFVEGVSNLVLPASTPSLFTELNEFDEGCSAIKSLAVRKGKEARAEIDRLKAKLEKEKAHSAALTDYYNLTEPKMEALRLEVSKAEASAVEESRWFSREMAKATESARTACQTLRLALTDMAARTQQDDGAVSDYATAYGDCYERVSAAFTMGLLQQFGYEHVAEFPNYTKGDWEISAHNVSPALRSWRKQFWQKDGRSTAKARLLEQLAKAEAADRCEEEDAAAEGGGGDT

SEQ ID NO: 151966 - protein, 42 aa, Oryza sativa
  Clone ID: PAT_MRT4530_52063C.1.pep
MSFLCIVSLSISQGLELTDISCHDGPTGGLVYTTGLHAYEAV

SEQ ID NO: 151967 - protein, 72 aa, Oryza sativa
  Clone ID: PAT_MRT4530_52064C.1.pep
RSSIFDAKSGIPLSDTFLKLVSLCASPWAYSSCVLDIIRHMPGTDYTSPPHAGLQKQGSCVLPHRRVDVASS

SEQ ID NO: 151968 - protein, 420 aa, Oryza sativa
  Clone ID: PAT_MRT4530_52065C.1.pep
MTKDEDFKLVKIQTHVLRVNIHCDGCKHKVKKLLQKIEGVYSVALDVDNHKVTVTGNVDSDTLIRKLTRGGKHAELWSQQKGGSNQGHKGSNNQQKQQQQQGQQQHGQQHQKQGANPSKDGNKNNNILKDQGKQGGVGGLIQGLKAFKNQHSKNQLPELDSEDDDLYDDEDDEFDDDYEDDLRFLGDKMSQLGFLRQQAAAAAAANVKNKNANTATVNNHHNNVNGKKGGGGGGSAGGGNHHQNNHHQNQKNPNVINMAAANAKMANGAQKNTGAINGMMGLNHGLGTAGATPGFQGYTGFNHPSYASAGYGGLQQQHLQQQQQSNNLMASMQGYHHHPAATAAMMNNLRGLNNNMMMMHQPQQQPQMMYHRSPQISPYTAYYNPYSYYYHPGAAGYHPASNGDVETMFSDENTKGCVVM

SEQ ID NO: 151969 - protein, 164 aa, Oryza sativa
  unsure (1)..(164): unsure at all Xaa locations
  Clone ID: PAT_MRT4530_52066C.1.pep
GCSLVGPSGWRGAGGCSTGERGRRSSSPSPTEQHRSPIAEHHCHRGPPAAPSPTAPDLGSPAASGTVGGGGGGGGGARRAPSRAHLPSRSPPAXPPPPLPEPLPPPARAAIACVWGGRRGCWWLDLEEGDARGSGGRCEQSGGGRAGGGGGGRGSEPEEERNRR

SEQ ID NO: 151970 - protein, 60 aa, Oryza sativa
  Clone ID: PAT_MRT4530_52067C.1.pep
MRRGRVEGGGGGRKDQVLGPPSQAGQTGYMRPVRLPGCGRSDRALEAGQTAATRQVGQRI

SEQ ID NO: 151971 - protein, 130 aa, Oryza sativa
  Clone ID: PAT_MRT4530_52068C.1.pep
PKERQHQQERESRSSSPSPTEQHRSPISEHHCLRGPAAAPSPSAPDLVSPAASGSVGGGGGGEGGARRAPVSVAVPLPPRPPTTHPPPPPLPEPLPPPARSAIACQSGGGRAGGGGGGRGSEPEEERTRR

SEQ ID NO: 151972 - protein, 357 aa, Oryza sativa
  Clone ID: PAT_MRT4530_52069C.1.pep
MSIDNVRGFALATSSSAFIGSSFVIKKIGLKKAGDAGVRAGSGGYSYLYEPLWWIGMTAMILGEVANFAAYAFAPAILVTPLGALSIIFSAVLAHFILKERLHMFGIVGCILCVVGSVGIVLHAPKEKKIDSVNEIWHLATQPGFIVYSCMAVVVALILIFWVVHRTEQRKMLAYIAICSLMGSLTVISVKAVAIALKLSFNGVNQFIYVPTWFFIVVVVICCLVQLNYLNKALDSFNTAVVSPVYYVMFTILTIIANMIMYKDWASQNATQIATELCGFVTIVAGTFLLHKTRDMGNEQSESSSSSRPSWAAAASTSAASSRSSRTTRRAAANSPCAVEPLKWILDLARWKFRIYI

SEQ ID NO: 151973 - protein, 50 aa, Oryza sativa
  Clone ID: PAT_MRT4530_5206C.1.pep
LRPPPLLPPPLSPPNPAPTTGVPSTPQNRLPPPPPLLSPATSDSTRRSRR

SEQ ID NO: 151974 - protein, 244 aa, Oryza sativa
  unsure (1)..(244): unsure at all Xaa locations
  Clone ID: PAT_MRT4530_52070C.1.pep
MLDSFEPQAWTNSRCSNGSPEWDANKINSNLFTDGPLLGSKESLAYLDHLAASAKLAHSPLSLSPLSPKFMNRTKATGAQCRTMRDIEHHFLDSREKGGPDGIRMLSVLQETNILHDEYNVMTPKRSSCRRYQIWGPESTPTSPRVGYGRSLSLPVRRSLVGSFEESLLSGRLSYGKXNQIIDGFLAVLNITGGNFSPPTQKLPFAVTSIDEDSSLLHYSSIDLAGRSSATNCRNPKLERSLSH

SEQ ID NO: 151975 - protein, 384 aa, Oryza sativa
  Clone ID: PAT_MRT4530_52071C.1.pep
MATVAMDISKPPPAAGGDEAAAAKGRGGAGGGVRMLREELQLLQEPGSYVGEVVKVMGKSKVLVKVHPEGKYVVDIDKSIDITKITPSTRVALRNDSYMLHLILPSKVDPLVNLMKVEKVPDSTYDMIGGLDQQIKEIKEVIELPIKHPELFESLGIAQPKGVLLYGPPGTGKTLLARAVAHHTDCTFIRVSGSELVQKYIGEGSRMVRELFVMAREHAPSIIFMDEIDSIGSARMESGTGNGDSEVQRTMLELLNQLDGFEASNKIKVLMATNRIDILDQALLRPGRIDRKIEFPNPNEDSRFDILKIHSRKMNLMRGIDLKKIAEKMNGASGAELKAVCTEAGMFALRERRVHVTQEDFEMAVAKVMKKDTEKNMSLRKLWK

SEQ ID NO: 151976 - protein, 33 aa, Oryza sativa
  Clone ID: PAT_MRT4530_52072C.1.pep
MVAGQTDGIRPVRPPMVAGQTDGISQVRPPTGG

SEQ ID NO: 151977 - protein, 167 aa, Oryza sativa
  unsure (1)..(167): unsure at all Xaa locations
  Clone ID: PAT_MRT4530_52073C.1.pep
FGPAKSTSRYRYFTVPNHFQSNLSSCPLATTTTRPPASRCRSYATLFFTLSXRKMNNTAYLHHIVHRKGSFPSXKLANKVTDSPTYILDLLPFHNQCGTIQQSHPSYIGVPSPFSHGPSGIPAPQAPTVHXDGKRSFPPQXLANEVRGSPTYILGPXNQCGTIQPNI

SEQ ID NO: 151978 - protein, 424 aa, Oryza sativa
  Clone ID: PAT_MRT4530_52074C.1.pep
MATVAMDISKPPPAAGGDEAAAAKGRGGAGGGGGEGLRQYYLQHIHDLQLQIRQKTHNLNRLEAQRNDLNSRVRMLREELQLLQEPGSYVGEVVKVMGKSKVLVKVHPEGKYVVDIDKSIDITKITPSTRVALRNDSYMLHLILPSKVDPLVNLMKVEKVPDSTYDMIGGLDQQIKEIKEVIELPIKHPELFESLGIAQPKGVLLYGPPGTGKTLLARAVAHHTDCTFIRVSGSELVQKYIGEGSRMVRELFVMAREHAPSIIFMDEIDSIGSARMESGTGNGDSEVQRTMLELLNQLDGFEASNKIKVLMATNRIDILDQALLRPGRIDRKIEFPNPNEDSRFDILKIHSRKMNLMRGIDLKKIAEKMNGASGAELKAVCTEAGMFALRERRVHVTQEDFEMAVAKVMKKDTEKNMSLRKLWK

SEQ ID NO: 151979 - protein, 82 aa, Oryza sativa
  unsure (1)..(82): unsure at all Xaa locations
  Clone ID: PAT_MRT4530_52075C.1.pep
ERERAAPAIGGSSAAGPPXRPVGSEGWAAATTPAGSVSPRLPSHPCRIWRPGRRRPSRPGAAAPPLATAQRKRGEIEKKWRR

SEQ ID NO: 151980 - protein, 154 aa, Oryza sativa
  Clone ID: PAT_MRT4530_52076C.1.pep
TSGSPGCRAQVACILDELENSNKRKLDDEGGVGDNMKKPEDTCEKERPIGTKEAKKQRMGKGKNKTNDTGLDEEMKTYKNIQAAATKRHEEFIETQHRVSDAKVEAARLKKEASLLDSYKALMSMDTSGMDEEMKAEHKLGLKILREKLVGHTN

SEQ ID NO: 151981 - protein, 237 aa, Oryza sativa
  Clone ID: PAT_MRT4530_52077C.1.pep
MDMDSWERLAADARLQGSCFDALIGMEEAEGSEGEEEAAEVACPFCDEEFDGFGLCCHIEDEHQAENRAGVYKICHEVFLSCFHYKVLKVCPICYDAVGMDLVSHITSEHPSFFKGKWRNRRVSHGSHSSTRATLKKDAAYLQYRYGGSTRAASHNTDPDPLLSSFVGNFTDTDLPKDVQQEFRDETDEKSDSLVQKEQKPVESADEPLLPEVKEERTRRSQFVQGLVLSLMFDDIL

SEQ ID NO: 151982 - protein, 96 aa, Oryza sativa
  unsure (1)..(96): unsure at all Xaa locations
  Clone ID: PAT_MRT4530_52078C.1.pep
MKIIFXFALLAIAACSASAQFDALTQVYRQYQLQPQLMLQQQXLSPXGEFVRQQFSTVAXPFFXQSPVFQLRNCQXMQQQXXXXLRMIXXQSXCGH

SEQ ID NO: 151983 - protein, 64 aa, Oryza sativa
  Clone ID: PAT_MRT4530_52079C.1.pep
PNKCVIELELGISIIYFWKCIWCSLLFLLIINILLVGMLLRVCHASTCMCVPCFIAYFQPPQNK

SEQ ID NO: 151984 - protein, 49 aa, Oryza sativa
  Clone ID: PAT_MRT4530_5207C.1.pep
YNHSSHCHNRRIKHANCLISIKGSQGVTSGQLFTYETHNTKVKSSVTIR

SEQ ID NO: 151985 - protein, 551 aa, Oryza sativa
  Clone ID: PAT_MRT4530_52080C.1.pep
TCQSSLITAKKLKDVISLIFEKAVLEPTFCPMYAQLCFDLNEKLPSFPSEEPGGKEITFKRVLLNNCQEAFEGADNLRSEVNKLTGLDQEMERRDKERLVKLRTLGNIRLVGELLKQKMVPEKIVHHIVQELLGSESNRCPAEENVEAICQFFNTIGKQLDENPKSRRFNDVYFNRLKDLTTNSQLASRLRFMARDVLDLRSNQWVPRREEMKAKKISEIHREAENNLGLRPGSTASIRTGRTGTGGGGPLSPGAFSMNQPGIVGMLPGMPGARKMPGMPGLGSDDWEVPHSRSKPRADPVRNLTPSLANKPSPNNSRLLPQGSAALISGKTSALVGSGGPLSHGLVVTPSQTTGPPKSLIPAPSVDPIVEQPAAAPKPSSTELQKKTISLLKEYFHILLLHEAQQCIEELKSPDYYPEVVKEAINLALDKGTNSIDPLLRLLEHLYNKNVFKATDLETGCLLYSSLLDELAIDLPKAPVHFGEVIGRLVLSHCLSIEVVEDTLKKIEDSFFRAAVFEAMMKIMKANPSGQAILGSHVAKIDACSKLLSSE

SEQ ID NO: 151986 - protein, 419 aa, Oryza sativa
  Clone ID: PAT_MRT4530_52081C.1.pep
MSTAATAPPPAAVLPAAPPPSYPATSAPSASAAAAEDDDDLYGRLKSLQRHMEFVEIQEEYVKDEQKNLKRELLRAQEEVKRIQSVPLVIGQFMEMVDGNNGIVGSTTGSNYYVRILSTINRELLKPSASVALHRHSNALVDVLPPEADSSISLLGSSEKPNVTYTDIGGCDIQKQEIREAVELPLTHHELYKQIGIDPPRGVLLYGPPGTGKTMLAKAVAHHTTAAFIRVVGSEFVQKYLGEGPRMVRDVFRLAKENAPAIIFIDEVDAIATARFDAQTGADREVQRILMELLNQMDGFDQTVNVKVIMATNRADTLDPALLRPGRLDRKIEFPLPDRRQKRLVFQVCTAKMNLSDEVDLEDYVSRPDKISAADIAAICQEAGMHAVRKNRYVILPKDFEKGYRTNVKKPETDFDFYK

SEQ ID NO: 151987 - protein, 123 aa, Oryza sativa
  Clone ID: PAT_MRT4530_52082C.1.pep
MAAPSEGSDQAGVGVEVFGRDGVDKLLKISRYTAHFALAGAVVGEGERRKGRRQWGRGGPGAAALGMASFGAWRGGAWLGGTEAGGGGWERERGPAAMEVVGAKEATAGVGDIYCRRRRHLLL

SEQ ID NO: 151988 - protein, 192 aa, Oryza sativa
  Clone ID: PAT_MRT4530_52083C.1.pep
MNDQKLQPKTQSDKYFGTESHELTCIPQPYTLMNGDGDDGWRKMMATVDPCVYEVGSCARGDDGSVYLTEVAIARGDGDIFVRTPLVRSLAASSPILLAEALDPTVMKPRHSLLLGSGSGHERRMRESNGGQRRGYSSDKAEACFLPRGSIGHGRGRKGAGGMSLLAINLDAQLSRFITKNAYILRQREYIN

SEQ ID NO: 151989 - protein, 516 aa, Oryza sativa
  Clone ID: PAT_MRT4530_52084C.1.pep
MAIPLQGKAQQQQGEGGKGDGAVDDDGDDQPSVASELRELWGMAAPITALNCVVYLRAMVSVLCLGRLGPLDLAGGALAIGLTNITGHSVLFGLASGLEPLCAQAFGSKNYDLLTLSLQRAVLLLTLAALPIALLWLHVGPILVALGQDPTISASAAAYAAYALPDLAASAVLQPLRVYLRSQGITKPMAACSAIAVALHVPLNVLLVFGLGFGVRGVAAAQALTNTNMVLFLLAYIRWSRACDATWKGWARPAAVASGLAGLVRLAVPSCVGVCLEWWWYEVVTVLAGYLPDPAAAVGAAGVLIQTTSLMYTLPLALAAWVSTRVGNELGGGKPRRARMAAMVALGCAVVIGVVHVAWTAAFSREWVELFTREAAVVRLAAAAMPILGLCELGNCPQTTGCGVLRGTARPAVGARINLLSFYLVGTPVAVTLAFGARVGFGGLWYGLLSAQAACVALVLLAVVWRTDWHLEALRAKKLTGLEMIAAAAEGDDDEGLRLVPPLPPPAGHDVAVDVV

SEQ ID NO: 151990 - protein, 335 aa, Oryza sativa
  Clone ID: PAT_MRT4530_52085C.1.pep
MARKNEFPAASGKSTSGYCRSTGHTSTISSSGDYDQQASDVAMDDAEQIASTLLNSRCRAPRRGGGGRKVTINTKLVKKRARRERLDISFPQPFGKDAFPELRNEDDDCAMGQKRSNQNAANRAKQEMGSKVGTKSIAQIAHELRNKETGEWPTTMQVWKATYQKADGTWSVPNGERVLSKLNEVAQSQQENICSAAVPLVEHFALVLGKKANHSRGIGLRAINRVAEERLRLLAQVEAAEKHAATAQERVDAAEQRAVAMEDQVRKLDETNAQLQVEQQSQRDELNSQRRTVEGQATDVERMVQQKLDEQMAIYFSRFASSNGVSSSRSPSDDH

SEQ ID NO: 151991 - protein, 104 aa, Oryza sativa
  Clone ID: PAT_MRT4530_52086C.1.pep
PCSRLVVVVVVALVWVRVEEGLLLALWSAEGGSGLRPPRTVPLVTPFTGVRRVPRPASPRQSPSCPAAPSPLILGHPELQASRRRSVIQGQDRAARVGVGRTGG

SEQ ID NO: 151992 - protein, 51 aa, Oryza sativa
  Clone ID: PAT_MRT4530_52087C.1.pep
NMHHIFIQMCITRCFNLSHAMMHDFIFLSCTTILLQFNTRSPHGGMHMFSV

SEQ ID NO: 151993 - protein, 541 aa, Oryza sativa
  Clone ID: PAT_MRT4530_52088C.1.pep
MDAAAVMQKQLRRLRTLGRGASGAVVWLASDDASGELLAVKSAAGEGGAEQLRREGRVMSGLCSPHIVPCLGSRAAAGGEYQLFLEFAPGGSLADEAARSGGRLAERAISAYAADVARALAYLHGNSLVHGDVKARNIMVGADGRAKLADFGCARRTDSERPIGGTPAFMAPEVARGEEQGPAADVWALGCTIIEMATGRVPWSDMDDVFSAVHRIGYTDAVPEIPEWLSPEAKNFLSRCFTRNPSDRPTAAQLLEHPFLASASSDIDETAPKHGWVSPKSTLNAECWESDEDDEVEEGMSQSATKRISALAITCSALPDWDSEDGWIDLQSDPSEVSETPAPMVVTTADFGLWWEEALDAEIDLHFVDVDGDGYVTRTVRARGFIEYDRQLSVRVRGDMPLCPVDCHRSDTVKFGCHCNGNRVINFESAQICLLLPFILQSRAHRLHSVELPRIVSCSPTLEDCIVKCPIGFAATAGLPLGSPQPDYSHTCDTYVSYPSCVVHASMGTIGDGQREESERHREDMEDQELRICSGITTWKF

SEQ ID NO: 151994 - protein, 160 aa, Oryza sativa
  Clone ID: PAT_MRT4530_52089C.1.pep
MKNHRLEGGLLLLATVCCTTGDGMCAARQREPAAITLQSSVRIPVRFSSSRGQENLAEPAYRVDVREEIHARVRCQTANGGARWNGSDSSSISTENVSPCGLFTMRDETDRSAFAACFSIMAWQASRNVDVDLIEGDPGGASWIGYVIVDYIAETGYKTF

SEQ ID NO: 151995 - protein, 111 aa, Oryza sativa
  unsure (1)..(111): unsure at all Xaa locations
  Clone ID: PAT_MRT4530_5208C.1.pep
THAXEQTKEEKKHIHFYLIASIDPSNGLAEGRLSSAASASMAAHTRVILRQRSLIRVGDERSSDTARARHGGARTSPAWTPCASRLLRPGMLTRPERRLSAGYYSATLAAA

SEQ ID NO: 151996 - protein, 112 aa, Oryza sativa
  Clone ID: PAT_MRT4530_52090C.1.pep
VFHLPFAMSVSAAVGDVFTYRTLVLARHRSPSAFRVVADKPRASVILWPPSPCRLSRHPCPRHGHRRRRRRRRGRVEEEEGGAHLRRRGGPCGVPGEVHGGAVREARCREGR

SEQ ID NO: 151997 - protein, 101 aa, Oryza sativa
  unsure (1)..(101): unsure at all Xaa locations
  Clone ID: PAT_MRT4530_52091C.1.pep
RGEWDGLVPGEEYSSQIXDQPIREILADELVPVGTSERRDDALLVHSPCSSSGATAGGLDDGDHGGLDDGGHXGLGDGDRWGGAQRRRRRIQWWGGRWRWI

SEQ ID NO: 151998 - protein, 107 aa, Oryza sativa
  Clone ID: PAT_MRT4530_52092C.1.pep
PPFPPPPPPPSPSLSPPPPPPPPSPLPLSLPSPSLPPLPLSPPSPPLPPPPPPPLPPPPSPPPPPPPPPPPPPPLPPPPSPPPPPPPPPPPPPPPPTPPPLPPLEIC

SEQ ID NO: 151999 - protein, 220 aa, Oryza sativa
  unsure (1)..(220): unsure at all Xaa locations
  Clone ID: PAT_MRT4530_52093C.1.pep
EDRDRIFRSDRTPTLVIGILTLFGEASNLRTNYVKCSAIPINCSEKEVAVLGDSLLCPVEALSCKYLGLSLSIRKPHHEDLQPLADKIAQRXPLWRSDWIHPAGRLALVKVMLSAILVLSAHCNPPTPXWVLKAINEIRHGFLWCGCASAQGGHCRLTWSYICAXLEYEGLGIHNLELMGIALHTRWLLVLRCSGLAAAEVRPLSTLTRELVLLLIFSLK

SEQ ID NO: 152000 - protein, 301 aa, Oryza sativa
  Clone ID: PAT_MRT4530_52094C.1.pep
MASRSPPPPPPPPPFPDLETWDYFFGQYDHPSSPSSSATAMPHLPLSRVSSSSSFVSTELELPPPPPPPLPTLPAKPLLRRRVASPSSSSFSTELLPPPPPLLRREPSSSSSSFSTELLLLPPPPPPPPFLSSDYFISSDPDTPPHAGGPPTSSIHDSSFVSGPSSSRPALATVITVTVSDDAAAAAACAVCTDALQLASPASRLPCGHLYHAHCIAQWLSLRNTCPVCRRSVPMRTEETAPPWSPPTETDQEAVPSPPPTTTTATDHRRRSLPGERRIRRICRRLLNYMEISRQRQQHTD

SEQ ID NO: 152001 - protein, 362 aa, Oryza sativa
  Clone ID: PAT_MRT4530_52095C.1.pep
MWEAVGGGDGTALLPWPGSAAAAPLYMPPAAAAAAPFAAGEQLPVEQPFYFDGGGGVAGHNHHPHHHQYGMEAPPPMTMMQMGGGGSSSSRMVVSGLLGTLQAELGRMTAKEIMDAKALAASRSHSEAERRRRQRINGHLARLRSLLPNTTKFRKIHAFQSNNVHIFIMTDKASLLAEVIEHVKELKRQTSAMMEDGAAGGEAAAAPVVLLPTEDDELEVDAAADEGGRLVARASLCCEDRADLIPGIARALAALRLRARRAEIATLGGRVRSVLLIAAVEEEDPDEAGNDDDGEHGYGVAASHRRHELVASIHEALRGVMNRKAASSDTSSSGAGGGGGSIKRQRMISAHDQQGSFNSSGW

SEQ ID NO: 152002 - protein, 75 aa, Oryza sativa
  Clone ID: PAT_MRT4530_52096C.1.pep
MVAMWGGLHEFGDVASLPRRRMDGLLDVDGNRRPAGHRDLLSVNTVHQQREDCCEPADQQASGGVATSISHQQIS

SEQ ID NO: 152003 - protein, 846 aa, Oryza sativa
  Clone ID: PAT_MRT4530_52097C.1.pep
MTPSHGAAAAAASSSAGAGRRAATFAGASVFLSRSLVAPEVYDAVHDALRLNGAEVFLCADPARTGPLDFHVISSSSHERFADLRAKGCNLLDWLRFSWLTVLIALKLVGLELSYNRGPQCILSCAKEHRFLPKQGYTCCLAMDGVKILCSGFEKDEKAKIEQLVTAMGGTLQNKAYTDANFVIAKDVLAAKYKWAVNTLKKPIVSRNWLEQCWIEHRVVPHEPYRIPPFSGLNICITKLNVGDKYVVAQKWGNIHIVVPKWIDQSVARKVCLDESAYLVCQNSTNINGVKHSLKEQHNPEISSASFQPVPTTSVDDSVSTSQYVPASFDDASKICSTDIGAPSFQETKELQVDSHVAEDSEAEDDDLYLSNCRISLVGFEEKESSREKKEVRRLAAWGVINVVKATWLEDCNKAKKEVKVSPSYVANELLAKEFSCAVMEKTVMRETKAAKNSGGIFHIPTVNDLHDKQLGNDLSSERKSARGKHETMNSNRTATKSAISSQQNGVASTSEYHPKFQRAQVVDWVREGGGIMVDDAQSTVVDFIIESHGQNSMLRDSSHSTAVSTHWIRSCLEEGCFQDVGSHPIFSPLCCRIPFPGFEDFRFCVSQYEEKDRLLLKNLCFILGSKFTEKATKKVTHLICKFASGPKYEAYYSRGIPTITAEWLFECVRQNKLISVRLAGNASVNEEPNDPGVSKRRRLSEFGKANDTSGNIGRTEELQDSTPVPDVADAIEDLLVQSSKIFAPDDSVLNQDQENTHSFGISRHWLNMPQKLHSTPDTKVQSGNSATTSAAPPAAATAYYPFSETQTESQVVGYEEDLTGRQKIIDRVRSQSINVTPAAEMSSDT

SEQ ID NO: 152004 - protein, 121 aa, Oryza sativa
  Clone ID: PAT_MRT4530_52098C.1.pep
MSLALRRYRRARSLDVLAVRQVRRRDPEPLSTLSRGRVVLSPRAPTRPSSPVPRPHRDDQPSVHVLTFVTPAHTVFAGKLGHRARGRRRKELVRRAVDADDAAGRFVANARHLPATTRRAA

SEQ ID NO: 152005 - protein, 827 aa, Oryza sativa
  Clone ID: PAT_MRT4530_52099C.1.pep
MPGDAFVTLGATSNLGNSNFGLFTDHLDNMGKSESKNMDPCSTANGMLDSSNIFVGVPKPMSSSSFASEKESVFGDSKSLDGIYSMNHSIKMPKEKPVQQASAETISSILPEMHIHEAPGTTGFNNSDPLSTSMQDQLPEENQCSKMSDDVWLTVSDVVLVTQPTSAPPPSRPPPTLAAKKGPTESNTSNAYPHDHNQGYNPFISSTNTSKTPKIDELEDFVMAKPSSLANGCLQDLNHNGIGIGQDSSTSAAGFMDWAELKHSKGVNQGNFDSLFASSQYQEKEKAVLYASGMESRDEEELLEHEKKQREKEEEQRKLERDREEELEREREMMRRREHEERKRREKEREARHIVEKAMREARERAAAEARMQAEREARQRAERAAVQKAAREARERAAAEARERAAKAAAEAKERVAEEARERAAKAAAEARERAATEAREKAAAEARAKAERAAVDKVAAEARRRAERAAVERAAAEARQRAANEARKRAEAEARARESQQKTAQPDLDSFFGMPSRSSSVPRSQTATTNPFDVQPQGGSDFGSIRRTSSGSASPFAQPPSTNLMDDLSSIFGAPSSSAVFQEVDGESEERRKARLERHQRTMERAAKALAEKNERDLQVQWEQEERHRIGETLDFEIKRWAAGKEGNLRALLSTLQYVLWPECGWRPVSLTDLITAASVKKEYRKATLCIHPDKVQQKGANLQQKYIAEKVFDLLKDQHIVPKSRSERLVQVIFVCPLLPVVLCSKQDVHNLLLLFSIIIIALFLFLLILWSDSLDSFSCNHSLLPGTCVLYVSANFGTHGCVSRFIEKQPCKSGDVKHSILGE

SEQ ID NO: 152006 - protein, 154 aa, Oryza sativa
  Clone ID: PAT_MRT4530_5209C.1.pep
VRNSIFSPEKPFFLFFPHFFLAPLLGKFFPLRVPVRIFRGAPRARWKHPNFATPPPCWAPFSLLGLLPFFGPRAPVSPPPVWWFSLFWGFGPSPSFFGFLRAPLIWVSPLGFWGPPGPFPPWGGFLIGFSRLVVWEFKISPDFPFFCLLTFGGF

SEQ ID NO: 152007 - protein, 1857 aa, Oryza sativa
  unsure (1)..(1857): unsure at all Xaa locations
  Clone ID: PAT_MRT4530_520C.1.pep
MRLSFRQQLAPTVGTSERNHXERMPPKKVVKEKVTRRKESGAGVDMAVEEGAEPSTPVAEDGGAPSASAPAPSLPPSAPSTSVXVPNAADMAKAAAAARALQTRAEILSTSQLLVPQAAPSQPAAAQTALAAMQAQVNSDPETQTKADMEAMRXNMTRLQDMLHQMQEQQQAYEAARRSKVASAPIXQVYPQVPTQPLSPQVAQAPMYFAGQPSTVAAHPAPHVQLQAHPVAAQVHPQPPGHVPQTMVEGASALQAQLQAFLQQLSQPHNISSTTPSARPEGXTSQGAPSWLPSNQPGLGASPWSQGPQFDSINAAXAPTVRPQAPTPGFGANRAPNQVAMTWSQPTFGPFMAAQQASPIGARXPNEMAQPHAQAVILPFATPYPQQGAVNRAGGGKGLPLSGGTKTRPIPPQFKFPPVPRYXGETDPKEFLSIYESTIEAAHGDXNTKAKVIHLGLDGIARSWYFNLPANSIYSWEQLRDVFVLNFRGTYEEPKTQQHLLGIRXRPGESIREYMRRFSQARCQVQDITEASVINAASAGLLEGELTRKITNKEPQTLEHLLRIIDGFARGEEDSKXRQAIQAEYDKFSVATAQAQQVQVAEPPPLVVRQPQSVIQAQPPRQGQTPMTWRKFRTNRAGKAVMPVEEVQALRKEFDTXQASNHQQPVRKKYLNQQIFFGPEDAEGVMFPHQDPLVILAELAGFEVRRILVDGGSSADVIFAEAYAKMGLTTQALTPAPTSLRGFGGEAVQVLGQAQLIVAFGTGENRREEQVLFYVVDIPYNYNAIFDRATLNKFEVISHHNYLKLKMPGPAGVIVVKGLQPSVASKGDLAIINRAVHNVEAEPHDRAKHAPKLAPHGKIVKMQIDDADPTKLVSLGSDMGEEEAKNILEVLKKNIHIFAWGPDEVGGVSADLIMHRLAVKPDAKPRKQKLRKMSIDRQEAAKAEVQKLLKARVIQEIDHPEWLANPVLVRKSNGKWRMCVDFTDLNKACPKDDFPLPRIDQLMDSTAGCEPMSFLDAYSGYHQIRMNPADIPKTASITPFSTFCQLRMPFGLRNARATFTRLVYKILYKQLGRNVEAYVDDIVIKSRKAFDHASDLQETFDNLRAAGMKLNPEKCVFGVRAGKLLGFLVAERGFPFFKTLRGAGKFNWTPECQAAFDELKQYLQSPPALISPASRSELLLYLAASLVAVSAALVQETDSGQKPVYFISEALQGAKTRYIEMEKLAYALVMASRKIKHYFQAHKVIVPSQYPLGEILRGKEVTGRLSKXAAELSPFDLHFVARTAVKSQVLADFVAKWTPAFAPEPEPIEQPWVMYSDGSWSHWGTGIAAVLTSPNGVPIRYAARLQFDTTNNATEYEAILLGLRKVKALGVRRLLIRTDSKLVAGHVDKSFEAKEDGMKKYLEAVRSMEKCFTGITVEHLPRGQNEEANALAKSAACGGSHSPGIFFEVLYTPCVPMDSLEVMTIDQVELGEDPYDWRTPFVKHLETGWLPEDEAEAKRLQLRATKYKMVSGQLYRFGVLQPLLCCISFAEGEEMAKEIHQGLCGAHQAARTVASKVFRQGVYWPTMLKACVEQIKKCESCQRYGRSQTVPQYELQPIAPIWPFARWGLDIIGPFPMARNGYKFAIVAVEYFSRWIEAEPLGAIISAVVQKFVRKNTVCRFGAPKEFITDNGKQFDSDKFREMCERLNLEIRFASVAHPSQXGAERTNGKILEALKKRLEEAAKGKWPEEMLSVLSIRRTTSTRSSSATFALAAGAEALPPVAASASLVGGGDMRLPREVARRNTGEVGVPSDPSLSEKPWPTCTTFPFFFFLLTSITGFAAVLEITRRVFATTVSCGRVGETWEPAPDFAGVGLGV

SEQ ID NO: 152008 - protein, 67 aa, Oryza sativa
  Clone ID: PAT_MRT4530_52100C.1.pep
GLQEFGTREHMQLTYMITQSRRSLLLVLPPVYGQLKPHCTLKFCEQVQFDLNVNLQLKCSLNYGYLY

SEQ ID NO: 152009 - protein, 85 aa, Oryza sativa
  Clone ID: PAT_MRT4530_52101C.1.pep
TTVMIPGGHNLGRVGVLEDRERHLGGFDIVHVKDAAGNKFATRLTNVFVLGRGSSLVSLPKGKGIKLSILQEREKRLKNEKPVAA

SEQ ID NO: 152010 - protein, 532 aa, Oryza sativa
  Clone ID: PAT_MRT4530_52102C.1.pep
PGGTARRPTWEVTGGRPPRGGDPSLPPPPLPRSPRAPARPLRASGPLPLYPREFLACDAAGGARAGGAWRRRRGKSGARAAAAAVAGLIQRFFFFGYLFGLVRKIFLRATRPLRNSFFPDCYYKMVCMSGHFQMASVLKLVMMESHATPDDLTGDKGAAQILHRQLFDAHEPNLLDEDDMHIFGSKPMADPLDLVFCNTCKKPIKASQYAVHAERCSSGKVNPNDSMGTGIDDDCGTKKPPKKGRKIKLTSNGNQKVHIKLKAKSQSENKNIANGFELDNVLANKVQPIGSTIDQRLKSSANNPALTSVPQGHHRDAPVPLATKMYHSQGNYRLRLELGQLYRQSCSEHSGSYSIPNSSQENGLMVSHLSPRDNSSLNVAQKSFVPQTKSMDQLLASTPESCPVIPQQVAASVPNRQATKSQKAEVQVSAVKNEMARSRCSKDAVRHSKNTVYEKFILEDYAKFDHALVNGTEGVYQYLCNKKAHQQRNGTVDCWCSGSICEELFFSNEKTGSRNDLGLDNLITGSFWSVNS

SEQ ID NO: 152011 - protein, 447 aa, Oryza sativa
  Clone ID: PAT_MRT4530_52103C.1.pep
MREILHIQGGQCGNQIGAKFWEVVCDEHGIDPTGRYTGNSDLQLERVNVYYNEASCGRFVPRAVLMDLEPGTMDSVRTGPYGQIFRPDNFVFGQSGAGNNWAKGHYTEGAELIDSVLDVVRKEAENCDCLQGFQVCHSLGGGTGSGMGTLLISKIREEYPDRMMLTFSVFPSPKVSDTVVEPYNATLSVHQLVENADECMVLDNEALYDICFRTLKLTTPSFGDLNHLISATMSGVTCCLRFPGQLNSDLRKLAVNLIPFPRLHFFMVGFAPLTSRGSQQYRALTVPELTQQMWDAKNMMCAADPRHGRYLTASAMFRGKMSTKEVDEQMINVQNKNSSYFVEWIPNNVKSSVCDIPPRGLSMASTFIGNSTSIQEMFRRVSEQFTAMFRRKAFLHWYTGEGMDEMEFTEAESNMNDLVSEYQQYQDATADEEGEYEDEEQQEADDM

SEQ ID NO: 152012 - protein, 112 aa, Oryza sativa
  unsure (1)..(112): unsure at all Xaa locations
  Clone ID: PAT_MRT4530_52104C.1.pep
RKETLQHFKKPWAHEPEPGGNFLNASKTIKPTILIGTSGKGETFTXEGGGALSLINEKPGIFALAKPTXNLKGPVXQTYPWNKGPTGVGRGNSFDSGAYYGQIFLPGQANHR

SEQ ID NO: 152013 - protein, 150 aa, Oryza sativa
  Clone ID: PAT_MRT4530_52105C.1.pep
MAKALELIGEVVQDPVRLFWDAVETGNPLHGGGGEVGGLAAAQQYSGSVLIDYTNPLKPSSNNKAGTGSFTMAGDGSVEAAVVYVFCGPLINSVINFINPNWAEIKTKIERGGQVGFYKDDQTVTNVYAGVAATDPSMPGRYSVSIAFDL

SEQ ID NO: 152014 - protein, 362 aa, Oryza sativa
  unsure (1)..(362): unsure at all Xaa locations
  Clone ID: PAT_MRT4530_52106C.1.pep
MARRAPWLAGIGAVPFLIVVVVAVVGAAVPAMGRFVVEKSSVRVLSPEHIRGHHDAAIGNFGVPDYGGTLTGVVVYPDKKATGCAEFDAKFKSKSRRPVILLLDRGECYFALKAWNAQQAGAAAVLIADNVDEQLLTMDTPEESPETEYIDRISIPSALVNRAFGESLKRMSSPSPSSEAAVEVVVKLDWRESMPHPDERVEYEVWTTSNDECGARCDEQVGEGRGVHGVAQMVERGGCALVIGPDITWDCPGGCRFTPQCKPQYCASYPKQDSGGGYHRRDVGVDNKWQELDEWVAKQAGRSPAWXCNVTWGNYECTSKGKKFSMRGADKCVAAIMLSFAKLLTRLGAPCVAGVGIACSVF

SEQ ID NO: 152015 - protein, 292 aa, Oryza sativa
  Clone ID: PAT_MRT4530_52107C.1.pep
MCLEQVATNRIIGVAQKVISPTQTAFIPERNIMEGVVILDETIHEMHRKNKSGVIFKIDFEKAYDKGGHVDIKVNDQIGNNFQTYKGLKQGDPLSPILFNIVADMLALLIKRAKDVGTINGAKDFYEQYSTIFGCLMKVKNTFLNMGSWILNNREQVRFWEDKWLDNLTFKGQRTDLGLGHCYKSVDVGTINGILKGVLQKIDYYRSTFFWQGDDHKKKYRLTRWDIICQPKDQGLMKVKNTFLNMGSWILNNREQVRFWEDKWLDNLVFKGQRTGSGLGYCYKSVMKRASV

SEQ ID NO: 152016 - protein, 96 aa, Oryza sativa
  unsure (1)..(96): unsure at all Xaa locations
  Clone ID: PAT_MRT4530_52108C.1.pep
MAPDAVFSPYASERDFTPHMGALLEKFGLMPDSXTSPENPSKPGQNMRKRXTEVQKLGLRPGIIPQVLAPKLAIHREASSGKGLHSLNNGLEAXKP

SEQ ID NO: 152017 - protein, 33 aa, Oryza sativa
  Clone ID: PAT_MRT4530_52109C.1.pep
SGKKEFSATKGLLAFHGRFTEMILPVYDPRENF

SEQ ID NO: 152018 - protein, 195 aa, Oryza sativa
  Clone ID: PAT_MRT4530_5210C.1.pep
PDSRLDPRVRRVLVAAGAASVILIIIVMGGAAVAYNASFGDGGSSSSSGSASGGGAQPSLHGVSKIIKAMCAQTDYKDTCEKSLAKAAANASASSSSSSPKDVVRASVAVIGDAIEKAFDKSSVIVSDDRTLAGIDAGGVDGLTKGGYQLRVWLSAVIAHQETCIDGFPDGDLKDKMRDAMESGKELTSNALALI

SEQ ID NO: 152019 - protein, 103 aa, Oryza sativa
  unsure (1)..(103): unsure at all Xaa locations
  Clone ID: PAT_MRT4530_52110C.1.pep
MASAAARSGLRSLAARAKATXAPXXXAXMSSSAHDDXHEXAKWEKITXXGIVTCTXXAAYXLSKGHXXFDEPPAXPYVXXRNKEFHWXPDGLFETRTLSIDRE

SEQ ID NO: 152020 - protein, 130 aa, Oryza sativa
  Clone ID: PAT_MRT4530_52111C.1.pep
FFFFFFYQVWSEYSITYKYRFDDLYKYIYYDVYVHMIQPGAQPFHHHACSSNPHVAYHHIMYHHHTPAEVDAQTQMQQHKQLQATNTGKGATPNARVARFERSKSCAKPHISINRVSSVIRAPRVSLAWL

SEQ ID NO: 152021 - protein, 116 aa, Oryza sativa
  Clone ID: PAT_MRT4530_52112C.1.pep
KTDHSRPGVNSCLTNKGPEIFLPPQNTEAFAMQAVFFFFERMIQIGCNFVPPPPCTTPGPQNIFLGQSWGDCRGPLNLEGGTKNFFLIWRNRSPLVFGVLIALKASKSFGIKAPLG

SEQ ID NO: 152022 - protein, 195 aa, Oryza sativa
  Clone ID: PAT_MRT4530_52113C.1.pep
MSKKKAPTSIPCELPLALDPSVSARPSDRPVASQSSARPPFPAASAAAAAPAAAPAVRSLVANSSGMDTRFDEDERTTAATRRRQSPSPSFAPSTSKATAVGLTRYGAVKSWGPRRELETGETSRCMEVLLLENPIDATKPSPLHVDEDKQGEVIGGTQQNAPESCVTERARLNLKSRSSAVGQSAGSPLKERCI

SEQ ID NO: 152023 - protein, 123 aa, Oryza sativa
  Clone ID: PAT_MRT4530_52114C.1.pep
MDMGLTEYSFPLGGEPVKLSGVSRELQKIKRADVERGIGILDCDNEKVPIAVVENVLKEVKVSADISVTSRTSECFSNDTDETVRLVRSDHVGRPPSFHDKAFREPTQESVLKCESGKPYTRF

SEQ ID NO: 152024 - protein, 202 aa, Oryza sativa
  Clone ID: PAT_MRT4530_52115C.1.pep
MVALGRDANNQMYPIAWAVVEKETNDSWDWFCALLFKDLVAGDVKAFMSTYEHCLEPVEGIHSWPVSKRPKPAAPSYVKMPGRPKKERRREPHEKPKATRVSKVGTIIMCRRCKGIGHNKTTCAKRNTGTTQASSSAQSRPIDKKSSSKVKKRAFTTDHLVQVQAAVAHKIHSPKFGHAIPVTTATQGPPRKKLQVRRLTVA

SEQ ID NO: 152025 - protein, 89 aa, Oryza sativa
  unsure (1)..(89): unsure at all Xaa locations
  Clone ID: PAT_MRT4530_52116C.1.pep
DGPAGVGDXGXVGLVARQVVDDQAGLAAAGLHVXRVLKALQARRNXAXGGAGRRXXAEEEAXRXSCHMVXLHXDGLETMLGLLXHGFNR

SEQ ID NO: 152026 - protein, 522 aa, Oryza sativa
  Clone ID: PAT_MRT4530_52117C.1.pep
MAVLPYFDEIDPSTIDLLLGPCCLSALLGKDDIKGRVFMTHATKAIYRLLLSDYVKARLYSAARRSHGSAALRTHDSRTAARHTRDCAANSAHAAAWHGLQLVFAMDVQNFLVVQFHYNGEFIYDGRQKHYCGGSEAIPRIDRDKVSLPEVKGHLKDHCAVEEPMLLHWLFPMKELKDGLRVLLDDKVCQLMSDCTSEAEVADIYVETQVAQEDSSDAEDVGSDNDSDFEDEIEEISSDEEAAKIFEVDTKGKKPVMIVTSIPDKTQGQIESLRQCHNLAKKDKEEAQVVAHNDQLVPYSAENDSFEEDSDGQLFDCKKEFKDAVIKHALANRRYVKFVKDEEKYEKMIRDNPTWSIKNMISTVSEEMFANASVPQCKRAKAHVLKKLYDATRRVVGLDGCFFKGSTNGELLCALGRDANNQMYPIAWAIVEKETNDSWDWFCALLFKDLVAGDGTAQASSSAQSRPINKKSSSKVKKRASTTNHLVQVQPAVAHKIQQLKDHQGKNFKLGGLLQVRRLTVA

SEQ ID NO: 152027 - protein, 231 aa, Oryza sativa
  unsure (1)..(231): unsure at all Xaa locations
  Clone ID: PAT_MRT4530_52118C.1.pep
MKLRRIPMPITRRVMKTMALSRSLYGRCLWQWRAAALIPLPYLFLLLGCIPDRPMADQDSPATWELGLPRSEGYVIELHRMMRRLRYSGFPTYRVRQCGSVWEARVEVHPQVPSELEYSFPTRHRRDLPETAMQDAAREAFLRLSSIHRAELASTEFAHHPFREESNSAEAVDDFYEEALLEIDDHQRRVGELETELTDLSVQQLQLKEEHQTWGSEXDSLKAQLQFQQLS

SEQ ID NO: 152028 - protein, 768 aa, Oryza sativa
  Clone ID: PAT_MRT4530_52119C.1.pep
MCRSSQQPCRVGWRGSRGVDEKMRLASPRSQPIDGVMAATIRGSGYRVAPNPTCGKGIGGLQGGGCDAQGGGGACGSDAGGDNGGGGGGARGSDAGGDSSGGVVESISSISHGEVNNPSYHQRTILEDDSDHKALFEKSLVGQINIEDMSGKAKDVINEEGSSEDGNSEEMKDSDDDVGMVFLIVIKVEIKRKGIMVVTSIYLQNLIHDINIVYNNKYHVSTICIQVEIKRKHMVDTSLEITSRKLMVGTSLEITSNLVILLISHCCFFSHCFIEPIRISSIFLHTRRARVEEDEGDAPPKSKTSAEKEFGYFTVDDFEAAEEEWSRFENFTTNFLLFHSNAVSLNEFRLRCTYEWADDRSYRNDQHVETWIRCGIKYYPEVLDIESLGSTISHIDRDKVSLPEVKGHLKDHCAVEEPMLLHWLFPMKELKDGLCVLLDDNVCQLMSDCTSEAEVADIYVETQVAQEDSSDVEDVGSDNDSDFEDEIEEISSDEEAAEIFEVDTKGKKPVMIVTSIPDKTQGQIESLRQCHNLAKKDKEEAQMVAHSDQLVPYSAESDSDSDSDYLGRDSCSSEEDEEANEIMKSFKEFQKKLKDGQVADLDDVFCGERASQRSEKALVQIEDDGNATPYDDSSANDSFEEDSDGQLFDCKKEFKDAVIKHALANRRYVKFVKDEEKYEQMIRDNPTWSIKNMISTVSEEMFANVSVPQWRDANNQMYPIAWAVVEKETNDSWDWFCALLFKDLVAGDGDGWVVISDQQKGIINVVET

SEQ ID NO: 152029 - protein, 664 aa, Oryza sativa
  Clone ID: PAT_MRT4530_5211C.1.pep
MSTTFSDFDPITERRHVERQRQERRRVMVAAGAASVILIIIVMGGAAVAYNASFGDGGSSSSSGSASGGGAQPSLHGVSKIIKAMCAQTDYKDTCEKSLAKAAANASASSSSSSPKDVVRASVAVIGDAIEKAFDKSSVIVSDDPRVKAAVADCKEIYENAKDDLDRTLAGIDAGGVDGLTKGGYQLRVWLSAVIAHQETCIDGFPDGDLKDKMRDAMESGKELTSNALALIGKASSFLAALHLPASSAASHRRLLSFAFDEDVTKQPEVNRSSGNSLRRLLSFAFDEDATKQPEVNRSSGNSLRRLLSFAFDENAPKQPKGNDDDVLVWVNRQERRLLKAKFQNKLKPNVVVAKDGSGKFKTINDALAAMPKKYTGRYVIYVKEGVYEEYVTITKKMANVTMYGDGAKKTIITGNRNFVDGLTTYKTATFNAQGDGFMGVALGFRNTARAAKHQAVALLVQSDKSIFLNCRMEGHQDTLYAHSKAQFYRNCVISGTVDFIFGDAAAVFQNCVIVLRRPLDNQQNIATAQGRADRREATGFVLQHYRFAAESALGDASRPAVRSYLARPWREYSRTLIMNSDIPAFVDKAGYLPWSGDFGLKTLWYAEYGNKGAGAATAGRVSWPGYKKVISKKEATKFTVQNFLHAEPWIKPTGTPVKYGMWA

SEQ ID NO: 152030 - protein, 82 aa, Oryza sativa
  Clone ID: PAT_MRT4530_52120C.1.pep
PTRTLVFFLSPESNSRPSSLHRSDPQSQASKAKVRLVLPDPGSSPSLLSPDPELVVAGVGVGGVLSLSSRLSLELLYRCASC

SEQ ID NO: 152031 - protein, 163 aa, Oryza sativa
  Clone ID: PAT_MRT4530_52121C.1.pep
MRRLRYSGFPTFRVRQCGSVWEAWVEVHSRVSSELDYSFPTRHRRDLPETAMQDAAREAFLRLSSIHRAELASTEFNHHPFREESNSVCTVQDTPCCYNPMVTRLSRWAEAVDDFYEEALLEIDDNQRRMGELETELTDLSVQQLQLEEEHQTWGSEIDSLKA

SEQ ID NO: 152032 - protein, 344 aa, Oryza sativa
  Clone ID: PAT_MRT4530_52122C.1.pep
MDFSGDIDDLISLQLLHDQLLGVEADACLPVAVHHDGVAAFAEHQQGFHPAAFLPQQPMTMTPAGYVDMANDQYLGAHAAAGEAEAVYRAAAAEPVMIRFGGEVSPVSDPRRPPLTISLPPTSHAWAAAEAVHPAALLQAQTAAAAADPNDFRKYRGVRQRPWGKFAAEIRDPKKRGSRVWLGTYDTAIEAARAYDRAAFRMRGAKAILNFPNEVGSRGADFLAPPPPPPPPTTSTHGKRKRHETAAADPDVEVIGESSKSVKTETYTSPASSSLASTTTSTVTSSSTSPSPSSEAAACGGGGGELFVPPMPSSWSWDQLEGFFGILSPLSPHPQMGFPEVAVN

SEQ ID NO: 152033 - protein, 381 aa, Oryza sativa
  Clone ID: PAT_MRT4530_52123C.1.pep
SSKKLYQTGHSGIRRVLEKAENMRKTKQGCGRFDTAGEGCERLDPMPEAAPFEGFASMAEFEAAAEQFRVFIQETKAKAEEAYQLAVLIQKAAAGGGSDVAAALEVCKKAAEATAAGGASSDAAKALEVCKAADVMHKEVAAPADLMQEGTTAEEVPEPADLMQEGTAPEEVAFCPPFLIPAPTIGDIGSDMRGLIPVVESISSISHGEVNNPSYHKRTILEDDSDHKALFEKSLVGQINIEDMSGKAKDVINEEGSSEDGNSEEMKDSDDDVGMVFLIVIKVEIKRKGIMVVTSIYLQNLIHDINIVYNNKYHVSTICIQVEIKRKHMVDTSLEITSRKLMVGTSLEITSNLVILLISHCCFFSHCFIESYEVIKWEVNF

SEQ ID NO: 152034 - protein, 408 aa, Oryza sativa
  Clone ID: PAT_MRT4530_52124C.1.pep
MADPDSPATWVLSLPQSEGYVIELHRMLRRLRYSGFPSYRVRQCGSVWEARVEVHPRVPSELDYSFQTRHHRDLPETAMQDAAQEALLRLSSIHRAELASTEFAHHPFREESNSVCTVQDTPCCYNPMVTRLSRWAEAVDDYYEEALLEIDDHQRRVGELETEVTDLTAQQLQLEEEHQAWGSEIDSLKAQLQVHGDQFQQLSDQYNDRRGMMDTLEGQLRESQEHVSQLEEQLRAAKISTTGASTSTAVGRDRYFFLTPPYPPAFHALLGEASMLATESAPYLVDSTAAQPPVLELVHTPLIPTPSPQLGSSLETPIQVDSETEGTDTEPEIEPDITDPSEDETPVPRITFLGGPRTLSTARKSTRPPGKRPKPDPEATTSEPWGLRFARASDHPLPAPGSCGWLED

SEQ ID NO: 152035 - protein, 787 aa, Oryza sativa
  Clone ID: PAT_MRT4530_52125C.1.pep
MDVQNFLVVWFPYNGEFIYDGRQKHYCGGSEAISHIDRDKVSLPEVKGHLKDHCAVEEPMLLHWLFPMKELKDGLCVLLDDNVCQLMSDCTSEAEVADIYVETQVAQEDSSDVEDVGSDNDSDFEDEIEEISSDEEAAEIFEVDTKGKKPVMIVTSIPDKTQGQIESLRQCHNLAKKDKEEAQMVAHSDQLVPYSAESDSDSDSDYLGRDSCSSEEDEEANEIMKSFKEFQKKLKDGQVADLDDVFCGERASQRSEKALVQIEDDGNATPYDDSSANDSFEEDSDGQLITKRSKYLRFRGSSSSTPTFTLGQLFDCKKEFKDAVIKHALANRRYVEFVKDEGDRVRAKCEWKLYPWVCLLKKTSRTNSWQITSFTDGHICPQRKDNPMVTSIRIAEKYEKMIRDNPTWSIKNMISTVSEEMFANVSVPQCKRAKAHVLKKLYDATRCEYSRIFDYQLELLRSNPGSTVVVTLDSDSPTHVFQRIYVCLNTCKKGFLAGCRRVVGLDGCFFKRSTNVVEKETNDSWDWFCALLFKDLVAGDGDGWVVISDQQKGIINAIETWIPKAEHRNCARHIYANWRKKFKNRFLPIISMLEAIRRKVMVRIHEHRTKMEKWIGPICPNILKKLNAYVTESGFCHAISNGNDKFEVKHHEQRFTVNLQSRTCSCRYWQLAGLSCCHAIACIHYKTNSLDDYIASCYSVKAFMSTYEHCLEPMEGIHIWPISKRSKPVAPPYVKMPGRPKKERRREPHEKPKATRVSKVGTIIRCRRCKGIGHNKTTCAKRNASTA

SEQ ID NO: 152036 - protein, 408 aa, Oryza sativa
  Clone ID: PAT_MRT4530_52126C.1.pep
MADPDSPATWELSLPQSEGYVIELHRMLRRLRYSGFPSYRVRQCGSVWEAWVEVHPRVPSELDYSFLTRHHRDLPETAMQDAAREAFLRLSSIHRAELASTEFAHHPFREESNSVCTVQDTPCCYNPMVTRLSRWAEAVDDYYEEALLEIDDHQRRMGELETELTDLSVQQLQLEEEHQAWGSEIDSLKAQLQVHGDQFQQLSDQYNDRRGMMDTLEEQLRESQEHVSQLEEQLRAAKISTTGASTSTAVGRDRYLFLTLPYPPAFHVLLGEASMLATESAPYLVDPTATQPPVPEMVHTPLIPTPSPQLGSSLETPIQVDSETEGTDTEPKIEPDITDPLEDETPVPRITFLGGPRTLSTARKSTRPPGKRPKPDPEATTSEPWGLRFARASDHPLPAPGSYGWLED

SEQ ID NO: 152037 - protein, 41 aa, Oryza sativa
  Clone ID: PAT_MRT4530_52127C.1.pep
MLQNKKKKKKILVFWWLAVRTDCRHLYNYKSLNCGEKFLQL

SEQ ID NO: 152038 - protein, 106 aa, Oryza sativa
  Clone ID: PAT_MRT4530_52128C.1.pep
MRNTLQQYDATPSDILRLTEMECDSIAESVREEENGDGGREERGGDERWILEGLGGFGLWGGGCVFVGYGSLGTPVVWVHLARWGGNVSSSSGFALENWILFYDHL

SEQ ID NO: 152039 - protein, 57 aa, Oryza sativa
  Clone ID: PAT_MRT4530_52129C.1.pep
VQDRQVNRGRHTSSTTELDMTAVAGRPRTRRWRTTWRRCPPSPWTSRAQAIPFSEVI

SEQ ID NO: 152040 - protein, 73 aa, Oryza sativa
  Clone ID: PAT_MRT4530_5212C.1.pep
MVHRVGWQKTTLVRAEISPGKKSPRNRLYAGRIAGEEREKERGFDQSGVGGGDRVRKQSKNRLESGSAMVRIG

SEQ ID NO: 152041 - protein, 113 aa, Oryza sativa
  Clone ID: PAT_MRT4530_52130C.1.pep
RDDGAPAGGCATGRGWLDAWMHASAVYAVSHMRHGATLLQEFFSSSKSALSTRTRSAAACQCKASYRPPPPPASPTSKTSQGRVDDFWFNINTVAYFEAVRIVCMKKSFYKPK

SEQ ID NO: 152042 - protein, 47 aa, Oryza sativa
  Clone ID: PAT_MRT4530_52131C.1.pep
MAAAAQAGSGGAGGREQATATAVEQAGGDMAVELGVIAVADASLGGK

SEQ ID NO: 152043 - protein, 143 aa, Oryza sativa
  unsure (1)..(143): unsure at all Xaa locations
  Clone ID: PAT_MRT4530_52132C.1.pep
GFSDNKLLDDFGXGEIQPNKIGTIIVIDNLVYRDHPSLKLRGVPKDVRSHDIERVRNKRFSHYFHFKWSGYDYHLVLDQRPPRNPRELRLGTPRADKALSDPSETKDHGLGSVLVQPRQVKGPRALSSENDSPTTRLGARESV

SEQ ID NO: 152044 - protein, 44 aa, Oryza sativa
  Clone ID: PAT_MRT4530_52133C.1.pep
PIRRTRQTDDYNVGGGSAVRHYSRVVRSGVPSARVLRVLTSLSR

SEQ ID NO: 152045 - protein, 142 aa, Oryza sativa
  unsure (1)..(142): unsure at all Xaa locations
  Clone ID: PAT_MRT4530_52134C.1.pep
SWCQKVPGXSSIEIDGVIHEFISGDKTXSSKEDIYEMLSEMCQXLKVAGYVPDTSHVLLDIDDEDVKESSLALHSEKLAIAFGLISTAPGTPIRIAKNLRVCGDCHNPVKLLSKIYGRCIIVRDANRFHHFREGSCSCGDFW

SEQ ID NO: 152046 - protein, 73 aa, Oryza sativa
  Clone ID: PAT_MRT4530_52135C.1.pep
MAKQTTATTQRAAPRVKGGRRRRRRHGRNRGGAARPSPRRERDCPGLLAGGGGWIPWLQPSAMRRVRWRWKES

SEQ ID NO: 152047 - protein, 336 aa, Oryza sativa
  Clone ID: PAT_MRT4530_52136C.1.pep
MESPPHPLLLLLTLLVAAGAASAGADDLVAELQSLRSRSPSGVIHLTDTSITRFLSAPAPRPYSVLVFFDAASLHSKTDLHLPQLRREFALLSASFLAHNPASADLFFADIEFSESQHSFAQFGVNSLPHVRLVRPEHTRLAGSEQMDQSHFSRLADSMAEFVESRTGLEVGPIVRPPLVSRNQMILLVILFLVSIPFLIKRIMDGETLFHDRRVWMAGALFIYFFSVSGGMYGIIRHTPMFITDRSDPNKLVFFYQGSGMQLGAEGFAVGFLYTLVGLMIAMVTHLLVRVESLQIQRFTMLAVMIIGWWAVKKVILLDNWKTGYSIHTFWPSSWR

SEQ ID NO: 152048 - protein, 126 aa, Oryza sativa
  Clone ID: PAT_MRT4530_52137C.1.pep
MRRRRRGHLSVGARQRLWWRGGRSARAGWWSELIAVRKPTVGGSARRGGSSTEFPPTPSQSSPLPPLCPASSPPPRPLPSPPPCPAAPPTAVGGARGPLPRTAPPPLLQAPRLDLCHPSSTTASPH

SEQ ID NO: 152049 - protein, 69 aa, Oryza sativa
  Clone ID: PAT_MRT4530_52138C.1.pep
VWPPGGYSPGVEQEGSTPQKKIGKGQRSIIWDKGGSGPFVNGRGLVPRALIKGSMGLWGVLSNRAFFCP

SEQ ID NO: 152050 - protein, 100 aa, Oryza sativa
  Clone ID: PAT_MRT4530_52139C.1.pep
TLVIWSKTKKQIKQKDVSKSYLVSPLCFSLQGETRSQPTSPTSYRSCIFIIPGMTTRILLMRIPICKMSNAAAIRARCSQCLIHSAFDSMSLRPAFSQTW

SEQ ID NO: 152051 - protein, 174 aa, Oryza sativa
  Clone ID: PAT_MRT4530_5213C.1.pep
WRRTRATAANTRPALACTRCHGRACTTQRATRPCTGHNQERRKRKENERAPMETSGRRLHTLAAARPRRPRHHTSAPPLAAARPRRPATPPSAPCRPPQGRAAAAAARQRSADPAIPRHTGVPPPRRSSALQQRRRAARPPRRLASGTAPESRRAVHGIASTMSKSWYFSTIIC

SEQ ID NO: 152052 - protein, 115 aa, Oryza sativa
  Clone ID: PAT_MRT4530_52140C.1.pep
TTAADDCRWCAPAAHAHDGCTASELAAGAGTRACAVGGPESLRQGRAQAQLYGQPENSLSYPGRLGIGQNIHTYQRCRAMCQFGGRMPFIWDDFLYTSIYVERNDNGDAFTYQEH

SEQ ID NO: 152053 - protein, 755 aa, Oryza sativa
  Clone ID: PAT_MRT4530_52141C.1.pep
MDDSTWLQIVGRLEEEPGSQLVVVQSPADEPDSGGSSPPTQGEQPQPEPHPPPIVDWENLQIIESLDEEGRVNIVDDDELYVLLGLRAEDEAAENAQAAATTEQGNGNNGNGAENRNHDENEVEVEPPVEDEVAGERMMVNDANKPSLVKGTVYPNMKVFRLAVRQFAINEEFELWVKATDRKKYVGACKGASDCPWHVNGRRQADERTVMVTKFTNYHTCTSSGRRKTTTPTSAWVASKAIHILRTDSGMGPKELQKRLQEDQKCKINYDTVAKGRSLAMIQLQGSWEENFHMLYRWRAAVMERSPGSVIEIDTIEVDGKVYFNRFFCALSPWITGFLTGCRPYLSVDSTALNGLWKGHLASAIAIDGNNWMYPIAFGFFDAETTDNWTWFMIQLLKAIGKVSPLAICTDACKGLEIAVHRVFPWAGHRECFNHLTQNLIKKYGGSVFQEMYPVARSYRAQVHEECMDTIKKACTDVALWLDTYHKLIWYRSGFNAEIKCDYVTNNLAECFNNWIRDIKALPICELADTCREMIMTLWNRRRRIGNKFTGTILPAILHQLRARTRGLGHLSVVHADITTAEQIRDVKLENYINPYYSVALFWNAYNSIIEPLPDKSQWPKVDLPFVLGAPLAKRNLGRKRKARWNTMRYGPAPAPNAPDVVYAPAPDAPDAPAAHVAPAPIPHTPTRPTVQTIIQESPTVVTRRRLAMLMEQGGTSTQPALASQVTCKRRLNIAESSSKRTCTKKLTPKKMKPT

SEQ ID NO: 152054 - protein, 1018 aa, Oryza sativa
  Clone ID: PAT_MRT4530_52142C.1.pep
MDDSTWLQIVGRLEEEPGSQLVVVQSPTDEPDSGGSSPPTQGEQPQPEPHPPPIVDWENLQIIEPLDEEGRGNGNDGNGAENGNHDENEVEVEPPVEDEVAGERMMVNDANKPSLVKGTVYPDMKVFRLAVRQFAINEEFELWVKATDRKKYVGACKGASDSPWHVNGRRQADERTVMVTKFTNHHTCTSSGRRKTTTPTSAWVASKAIHILGTDSGMGPKELQKRLQEDQKCKINYDTVAKGRSLAMIQLHGSWEENFHMLYRWRAAVMERSPGSVIEIDTVEVDGKVYFNRFFCAFSPCITGFLTGCRPYLSVDSTALNGLWKGHLASAIAIDGNNWMYPLAFGFFDAETTDNWTWFMIQLLKAIGKVSPLAICTDACKGLEIAVHRVFPWAEHRECFNHLMQNLIKKYGGSVFQEMYPAARSYRAQVHEECMDTIKKACTDVALWLDTCHKLIWYRSGFNAEIKCDYVTNNLAECFNNWIRDIKALPICELADTCREMIMTLWNRRRRIGNKFTGTILPANLHQLRARTRGLGHLSVVHADITTAEQIRDVKLEKYINPYYSVALFWNAYNSIIEPLPDKSQWPKVDLPFVLGAPLAKRNLGRYRKLRIKGCLKGGGSKPKDNAKEKATIRGKRCKKCGELGHGQTSYKCKLNGTKKKPKRKARWNTTRYGPAPAPNAPDVVYAPAPDAYAAPAAHAAPIPYTPTRPTVETIIQESPTIVTRRWCLPTQLPWNMEPVPVPEPPAEMRDWSELLLDALSVVFTKLGAVEVLIGAGLVCHSWLDAAKVPELWRTVDMAVLYRDMGSKNLGILTAMGKRAVKRSNWQLEVFKGRDFITNQLLKYVRRRSPCCLKSLHLESFTKLITKSPLLEDLVLNYCQSIRGDVYATVVEACPRLKRLEVRRRLGWWDDDDMLLTIAAMHGLRRLTLEGVRVRSRELTAIVDGCPRLELLDVSECFLRRDIVVDGALPAKCASIKTLKLPLFSDVDAAAAATAADDDGKVTRCLGRVFAVMDRESA

SEQ ID NO: 152055 - protein, 125 aa, Oryza sativa
  Clone ID: PAT_MRT4530_52143C.1.pep
PLMKSNPIACLIHLYKLWQRTAVSADATHLDASPAAPAAVTATENERSLSRTRLGLMPTSSRWVPDTAMELPDIVTLADGRLMKPNLQHHQHKHLAERVRYHPVSYPLNFKEDGDENAHSLKYMA

SEQ ID NO: 152056 - protein, 152 aa, Oryza sativa
  Clone ID: PAT_MRT4530_52144C.1.pep
MAAMRRRGESLATTNFELHFFDFFPNPLSFPFKQQGARCYLWIWEDLLREYVEEIVAYCHAGEFDSLWETCDELRWQLLDVQGRNIELCSILEAKEAQLQLYRDELNQSKREVAEMKHKMESEKAMLQWVLYMLMFICVLCVSVVVGKNYLG

SEQ ID NO: 152057 - protein, 79 aa, Oryza sativa
  Clone ID: PAT_MRT4530_52145C.1.pep
NKYQIQQQQQHKYTTKSKQQQQHKHTYSLLPSQAQAHLALQPCSLLHTGRAAAAVAVSGVDVASPPQPSTLPLHLSSRR

SEQ ID NO: 152058 - protein, 45 aa, Oryza sativa
  Clone ID: PAT_MRT4530_52146C.1.pep
MYIDKMFAKSSFTESQLPSSSLAEHTSYIPFYYRPSGHLLHSSSL

SEQ ID NO: 152059 - protein, 226 aa, Oryza sativa [sequence omitted]

SEQ ID NO: 152060 - protein, 41 aa, Oryza sativa
  Clone ID: PAT_MRT4530_52148C.1.pep
RAGRCFNFGGPEKNVLGFNDGGRRFGPLKRAAPYLSLSFMH

SEQ ID NO: 152061 - protein, 125 aa, Oryza sativa
  Clone ID: PAT_MRT4530_52149C.1.pep
MAARRVGLGDGAPRGAVVLSRQCRFREGGVEHEAAVHATRGSDNGGEGEVRVSIDGKRVAEVSCVGWGFRSNRATVLTDVEMMDVLWDVHFRDIPVLIEPMGWAVFGAPMGCHYCYFYDALHITI

SEQ ID NO: 152062 - protein, 490 aa, Oryza sativa
  unsure (1)..(490): unsure at all Xaa locations
  Clone ID: PAT_MRT4530_5214C.1.pep
NPLLWKMESNKAPRPNSFPTDFYKHFXEVIKNDLKAMIDDFHKGILDIKRLNYGVISLIPKXKDAAQIQKFRPICLLNVSFKIITRTLMKRLTYVIGDVIEKTQTAFLKERNIMEGVVIMHEVLNSVHMKKQSGVLFXKVDFEKAYDKINWPFLCQMREVKGFPSVWCDLIMRCVGGGKVAVKINDERGDFFFQTYKDLRQGHPLSPLLFDIAADALPLLMNRAMEQGMIKWLGQEYTEDEIVILXYADDTIFMLEDNLEYAKKNLKYILCLFEQMSGLKVNFNKSEVFCLGGGQEKEEMYCHILTCRREQGGLGLLDLGCMNVALLGKWLWRLENERGIWQDLLSAKYLGQKKNFISKKKPRPGDSHFWRGLMKVKKSFXFFCEKVGNGKKXALFWEDSWFGRRPLAEQFPNLYNVSLRKNVLVAKVIGEGLGSLRFRRSLVDRXIELTGEEDKVVLKLTKNGIFTVKSFYKAMMIQNTGFQFKNIWKF

SEQ ID NO: 152063 - protein, 619 aa, Oryza sativa
  Clone ID: PAT_MRT4530_52150C.1.pep
MAAAAAAAAAGDSPRRGTPDSDEEDYEEYVPVAKRRAMEAERLRRATKPPTTNAVAVAAPPPPPRSTSSPAVGEVAVKTSLLVKATKLKREAPEVTPAERLLQQEREMIEHLSDRKALMPVGEIAKGISYSEPITTGWRPPLRLRRMPRSRADALRRSWHILVDGDDVPPPSRSFGDLRLPEPILRALRGKGIEKPTPIQVQGLPVALSGRDMIGIAFTGSGKTLVFVLPLIMAALQEEILMPIVPGEGPFGLIVCPSRELARQTHEVIEMFLAPLMEAGYPEIRPLLCIGGVDMRTQMEVVKKGVHIVVATPGRLKDLLSKKKMNLDNCRYLTLDEADRLVDLGFEDDIREVFDHFKAQRQTLLFSATMPEKIQNFAKSALVKPIIVNVGRAGAANLDVIQEVEYVKEEARIIYLLECLQKTPPPVLVFCEHKADVDYIQEFLLLKGVEAVAIHGGKDDEERKDAFKSFKASEKDVLVATDVASKGLDIPDIQHVINYDMPAEIENYVHRIGRTGRRGKTGVATTFINKNQTETTLLDLKQLLIESKQRLPPILADLDDPQEDDKVAIAQQSGVKGCAFCGGLGHRIEACPKQQLQNSVTLARARSDYFGGGGYRGEI

SEQ ID NO: 152064 - protein, 84 aa, Oryza sativa
  Clone ID: PAT_MRT4530_52151C.1.pep
IIEKVSEGKQLKEKQTGSEEHRQSMIVFEEEKKNKVRRKKHGEQHKSMEDVGTTRGARIFGSGGYLWAEGTTGDVLEIPSKGGG

SEQ ID NO: 152065 - protein, 262 aa, Oryza sativa
  unsure (1)..(262): unsure at all Xaa locations
  Clone ID: PAT_MRT4530_52152C.1.pep
LICEQFPGSTWTLPEGDFPFSGIRGFNACTRESLGNALRRGNXAARDPLPPWMYMHLQHDXYFNRNGNEPRFFCDDGLDALWRVDWMVLLSDNYFVLGLFLVSRIERVLPRMFPCHDAAFHLLGRYLLHPRNXYHASYMAYTEXRVGIQVCSFYLARISTDELYGQIMLCAHGENILPRVQQELNFTTAGEQPXARPGRRKPVLVVSLHGAYSERIKDLYYEQDIAGRESMSVFQPTHLDRQQSGEKLHNQEEEEESLALSK

SEQ ID NO: 152066 - protein, 69 aa, Oryza sativa
  unsure (1)..(69): unsure at all Xaa locations
  Clone ID: PAT_MRT4530_52153C.1.pep
FLPRFRSFQVFNRGRRKNYIRKVATYHPNMEYAITSLIIGLELRRLILARAVHGLRXDSSLIICTHSNA

SEQ ID NO: 152067 - protein, 113 aa, Oryza sativa
  Clone ID: PAT_MRT4530_52154C.1.pep
MKRCGIIVVLLISVSADPDGPTTARGYSGQGKRKGPPRASLAGRHPSPYWLPPHTSLAVSPTGLSAFTMSSATELLPVGRCAPLTPERAISCRLPTLEVEAWREIEMGREGRE

SEQ ID NO: 152068 - protein, 140 aa, Oryza sativa
  unsure (1)..(140): unsure at all Xaa locations
  Clone ID: PAT_MRT4530_52155C.1.pep
KDSIWHPCAFLERPKIQGTREGHSPGTSSVSYFAGGGGEDGRTLADYNIQKESTLHLVLRLKGXGIQMFVKSLTGKTITLEVESSDSFVGVPAKIQGPEGLPPDQGNLIFAAKQLADGRTLVVYXVSXEXTLHLVLLLRG

SEQ ID NO: 152069 - protein, 62 aa, Oryza sativa
  unsure (1)..(62): unsure at all Xaa locations
  Clone ID: PAT_MRT4530_52156C.1.pep
FFFFFTXXMXVCIARKFYIVKRTKYYNTRGSLVIHFTRXWGSTPAVISQHIQHLHPSHPQAT

SEQ ID NO: 152070 - protein, 181 aa, Oryza sativa
  Clone ID: PAT_MRT4530_52157C.1.pep
MAVLLVVLLTDVSCDKVSLKVKFPDLYEISYHQEASVSDIFVKGLHLQGWQPTTNGAFWRERCTAADGEKLGGGRHGECGEAAARRRRAIWIRRYRDEEDDDDAATFHPDFTQISDKIAAAPPPVISSSRLDLGQWWHLGQELERVGRASLPPTSRGGVLLAGHRPHHPPSLLSSSPLAAW

SEQ ID NO: 152071 - protein, 141 aa, Oryza sativa
  Clone ID: PAT_MRT4530_52158C.1.pep
PPSSPPPTTPPPSSSAPTVAPSYNQPPPPSSPPPTTSPPPTSPPTVAPSYSQPPPPASSSPPPSTSPPPSSPPPTTSPPPSSPPTVAPSYSQPPPPPSSSPPPSTSPPPSTPPPTISPPSSSPPSVTPSSPPPQKEVIVIE

SEQ ID NO: 152072 - protein, 447 aa, Oryza sativa
  unsure (1)..(447): unsure at all Xaa locations
  Clone ID: PAT_MRT4530_52159C.1.pep
MADNSGDSQYTFHQPSSPPTVAPSYRQPPPPPSSSPPPSNSPPPSSPPPTTPPPSSSAPTVAPSYNQPPPPSSPPPTTSPPPTSPPTVAPSYSQPPPPASSSPPPSTSPPPSSPPPTTSPPPSSPPTVAPSYSQPPPPPSSSPPPSTSPPPSTPPPTISPPSSSPPSVTPSSPPPMTTPPQQFSPPMTPPTYPGNSHPPPPPSPKSTPPPYQPWGWSPPPFTLPSWTPPGYPTPAHPPPAQGFLSSQPAPQPHHHNXPPNPGPSPPPAPVQPPSAPXSPPPPPALSAPPPRPAPRRPSRRRPPPPPSPPPPHAIAVASPPVRSGGGDAAVPAVASLPSSHATAIASPPARSGKGEDTTRRCCLPSHRRMMLLSPLLPPDLTNGRAPPAASLLPPHAAVVAYPPARSGGGEATAARAVGRGGVLALWGGLFVIWTATSVSLTTPLKAV

SEQ ID NO: 152073 - protein, 291 aa, Oryza sativa
  Clone ID: PAT_MRT4530_5215C.1.pep
SAKIPMQRNMHLISKNNKGIFAKSQDPFPFFFFFPFFSPSLSLSSSPVDPAHAMYGTVGFRGGAGSQAARWSSGAAALLQGGRAARRRHSRVTGYGRVGGALPCGRQRRCDPCGGPHGADGGVARTAPAVRQPTVVRTCGGAACAAVRRRGCAADDPTSSSAPFRFLFFFFVLGSASFLCPLRFAVAIMAAGVGLPSGTMLVCSTWPVHGLVARCVVQARPWHRVHASAGRVFAAVARVRRHAVSRHANSVSVYRDFHQSAYTGDSKSAVVDFIGNDKNGTRTGRGIRFRD

SEQ ID NO: 152074 - protein, 67 aa, Oryza sativa
  Clone ID: PAT_MRT4530_52160C.1.pep
WRSDRRRRQARQVISAVRPEIHHRSDRRHPLGQTGRSISKSHIGSDGLTSFHQLKFLAQIMHHLKLN

SEQ ID NO: 152075 - protein, 108 aa, Oryza sativa
  Clone ID: PAT_MRT4530_52161C.1.pep
FSPPFVWGFPHPPPLKKALFPPSPRIGGANWISLGIMVPPLGWMAPRLVSGGTFWWGPLWPVFLSLPGQNLFFFQSSCFCVPGLSPVEKPPFPPPSVWGFLPRMFPLI

SEQ ID NO: 152076 - protein, 101 aa, Oryza sativa
  Clone ID: PAT_MRT4530_52162C.1.pep
MLKHWLFITIDFVACSLPAPAPAMLNDCSPITLSPSPSLSRRLAGKYFCGHSLGAAGLLLLGRFGHLRRRLIASGATSCRLRPFRRGAWHVVGCIVGGGVL

SEQ ID NO: 152077 - protein, 130 aa, Oryza sativa
  unsure (1)..(130): unsure at all Xaa locations
  Clone ID: PAT_MRT4530_52163C.1.pep
PLPPVCQTAEPLLAFPGVSPRTPPCLAPPPLFGPPFSSSEHXPCLAPTPPGAPPPRWGGPPHWAGRPTPTSVAPFRPPLLWFSPWAIWGPPAPSPPWRCFFFPFSQWRLRTLNYPPGFSYSPFAALGVLN

SEQ ID NO: 152078 - protein, 127 aa, Oryza sativa
  unsure (1)..(127): unsure at all Xaa locations
  Clone ID: PAT_MRT4530_52164C.1.pep
MDFQTKPPNFSWRQDLIDAKLAAWHKLLPHIDDLALITAQDEFHXNLTSSGVLSVKSHYLALVHTSVPHINKHIWKVKIPLKDFLWCLRRGVILTKNNLAKRKWNSSKMCYFCHEKEIPSNIYCSDV

SEQ ID NO: 152079 - protein, 335 aa, Oryza sativa
  Clone ID: PAT_MRT4530_52165C.1.pep
MSNVFARISAATLRGGGEEERGGGRGRRACYGIAATAAAVLRVGGRAAAGSVWKASVLAGMVLLAFGVADYLAPASWCRRRGGTNTRAAEREAQPGASSSSTFGLEKAAVDALPTFAYASGGAGAAQGGGDLEAGNGEPCSVCLEELHAGEIVREMPACKHLFHVECIDMWLHSHRTCPMCRCDLSPPREVAAKEATAAETAAPPGDDALPPDRIAQRGIFPLDDGWINPADLPGYSRPSARASGASDEVGHVTPLTMREQRRREGGSGMQARLPASGCECGGGSGKKGGSEPEGWRRRQRKEGVAASPKARDGGNGKKGRWRARRRMNHRRRLG

SEQ ID NO: 152080 - protein, 127 aa, Oryza sativa
  Clone ID: PAT_MRT4530_52166C.1.pep
SKVHHRSLNLYRCVIPVPKLANRPFRSSNLFDYVISVSKLVDHSFRSSNLFSCVTPVPKQDGLKTLYQKFRDRGDTTEQVGGAKRVICKFRERDDTVEQTWTLARLGLARQNSTGAWRDCTTTFLTT

SEQ ID NO: 152081 - protein, 651 aa, Oryza sativa
  Clone ID: PAT_MRT4530_52167C.1.pep
MMGGVAAEVVVEDAAAAAAAVPAAAVAGTGAGGGEEGRMRMEGWLYLIRSNRLGLQYSRKRYFVLEDAALRCFKAPPPPSSSSSSSKREDPVRSAIIDSCIRVTDNGRESVHRSVFYIFTLYNASNHYDQLKLGARSSEEAARWIRCLMESALKSPRKDEHIVACSHRRWQAFRLSRRSNRMHSIDWTVFSSVHNDPMASDVIAPSPWTIFGCKNGLRLFTEAKDGGSEGKYWDDHPAIMAVGVVDANSEAVFQTVMSLGQSRSEGMRKRDLLLRRYWRREDDGTYALREFFRAKNGNCACIEFSSGELTRDMRLQQGENERIKIEMLSASENNRLEDPTEGSLGGSNRHLSSAGSFIQLNDAADEFFDVPDDSEYDQREAMWPSDESTHSVDQRHAKLSTAAVFVKKLHDLAVQKRGYVDLQGAADFDNGPFCYGYTLPKDSNCTMPSTWAMTDPTTFLIRGESYLQDRLKIKANNTLMQMVGADWIKSDKREDDLSGRPGGLVQVPGSSTYSLALYYMMDTPLEKVPLLERFVNGDDAFRNSRFKLIPYISKGSWIVKQSVGKKACLVGQALEINYFRGSNYLELGVDIGSSTVARGVVSLVLGYLNNLVIEMAFLVQGNTQEELPEFLLGTCRLNYLDASKAVSIDEC

SEQ ID NO: 152082 - protein, 59 aa, Oryza sativa
  Clone ID: PAT_MRT4530_52168C.1.pep
LQKSSCSTHYQHKFLTLERIDNGTWISYQSNQLCKLGIFPYVIFIGKEQSLINFSGHNT

SEQ ID NO: 152083 - protein, 177 aa, Oryza sativa
  Clone ID: PAT_MRT4530_52169C.1.pep
MTGHEILIRDERKDDAGLITEVTIAAFAPLEISNHTEQFIIEALRSAGALTLSLVAQVNSRVVGHIAFSPVAISDGTKNWYGLGPVSVLPLYQRRGIGKALIQEGLSQLKGLGAKGCCLVGHPEYYKKFGFKNVAGLALEGVPDEVFFALSFDSHYPQGDVTFHEGFRANSSSNVKL

SEQ ID NO: 152084 - protein, 1038 aa, Oryza sativa
  Clone ID: PAT_MRT4530_5216C.1.pep
MVHSAYDAVELVSGVPGDIVAVAAYAGRLLVAGKDGSLRIYASPGHAGGGIPRDGPYALERQQPSLWRRGTPLAMEVSAGRELLLSLAECVNLHRLPGLETVAVIGKTKGANLFAWDDRRGLLAVGRWKRLTIFRLDSENSAALPIRFRCDLSVCGYDLTVTSFGFRWKWRWPVGGREFVEVKEFGVPDTVKSMAWCGDNICLGIRKEYMIINSMTGALTEVFSSGRNAPPLVVALPTGELLLGKDNIGVFVDQNGKLIQDGRIIWSDTPASVAIHRPYAVARLPRHVEIRSLRAPNALVQTVVLRDVQKLVETENCILAVLARSVYGLLPVPIGAQIVQLTASGEFEEALALCKLLPPEDSNLRAAKESSIHIRYGHFLFDNGSYEEAMEQFSDSHVDITYVLSLYPSLVLPQTHIIGEHDRLQDLPELARESSDVTDDMEPYSLQLHESDDKSPLEIKKMSHNALIALVKYLHKKRNGIIERATAEVTEEVVSGAVHHSSILSESYRSKKPNKKRAQTHTSSIAREMATVLDTSLLQALILTGQSSGAIELLKGLNYCDLKICKEFLEERSDYMVLLELYKSNEMHREALQLLNQLVEESKAEMGKNDFNKKFNPQMIIEYLRPLCRSDPMLVLESSLYVLERNPSDTIELFLSENVPADLVNSYLKQHAPNLQSTYLELMLSMSVSGINPNLQNELVQLYLSEVLDWHKILKEEGNWTEKTYSPTRKKLITTLENNSGYNTDILLKRLPQDALFEERAILYGKINQHLRALSLYVHKLQMPERAVAYCDRVYEEGAQQPSKSNIYFNLLQIYLNPRKAEKEFEQKIVPVASQYPGIQKVTKVRGARMGKKVVEIEGADDVRFSPSGTDSGRSDGDGDGDDVSDGGPIMLNEALELLSQRWDRINGAQALRLLPRDTKLQDLVLFLEPLLRNSSEHRRNYMVIKNLIFRANLQCYYDGIVFILIILTFYQVKEDLYKRRQAVLKIDGDSMCSLCHKRIANSAFAIYPNGQTLVHFVCFRESQQIKAVRGVNSVKRR

SEQ ID NO: 152085 - protein, 61 aa, Oryza sativa
  Clone ID: PAT_MRT4530_52170C.1.pep
STIKFVITTNKPDLELYKNPWNTFFSMRALNDDDDDVINNNFFLTKSYITNCFGSGSSLIN

SEQ ID NO: 152086 - protein, 72 aa, Oryza sativa
  Clone ID: PAT_MRT4530_52171C.1.pep
MAISYVYVRTGCFSESGPKAVLIGGASDSRRSCSGWKLSQIDPKMVMNSTSNADPSLLLLMFREFGKQGGMA

SEQ ID NO: 152087 - protein, 524 aa, Oryza sativa
  Clone ID: PAT_MRT4530_52172C.1.pep
MRTSTSNAALLLLVAAAQCLALLSVAAAAKPRTRQGDYLDRLRGSPSSWASLAEDRGAPAPSPSPSGGRHAAPAAAAVGSKEADRVAGLPGQPAGVGFAQYAGYVTVDAAAGRALFYYLAEADGGAAASSKAPLLLWLNGGPGCSSLGYGAMEELGPFRVKSDGVSLYRNPYSWNNVANVMFLESPIGVGFSYSNTTADYSRMGDNSTAEDAYKFLVNWMERFPEYKGRDFYLAGESYAGHYVPQLAHAILRHSSAAAGGKPSSSPINLKGIMIGNAVINDWTDTKGMYDFFWTHALISDEANDGITKHCNFTDGADANSLCDDATSLADDCLQDIDIYNIYAPNCQSPGLVVSPPVTPSIESFDPCTDYYVEAYLNNPDVQKALHANITRLDHPWSACSGVLRRWVDSASTVLPIIKELLKNNIRVWVYSGDTDGRVPVTSSRYSVNQLNLPVAAKWRPWFSNTQGVGDVGGYIVQYKGNLSLVTVRGAGHEVPSYQPQRALVLVQYFLEGKTLPDCEKCGEA

SEQ ID NO: 152088 - protein, 193 aa, Oryza sativa
  unsure (1)..(193): unsure at all Xaa locations
  Clone ID: PAT_MRT4530_52173C.1.pep
VSFGVAVATVTDLEFNFFGAVVALAWIVPSAVNKILWSNLQQMEIRLLLXLLWKTTPVDIFFILALMPXVRSPGLAAFCLEFREQLANIIFALFGFLLQWSGALALGATSALSHVVLGQFKTIVIMLSGYLIFXQDPGITSICGAIVALGGMSVYTYLGLKERRHTGKKPPLAQKPKAAGDGEKPGLEHEDSV

SEQ ID NO: 152089 - protein, 534 aa, Oryza sativa
  Clone ID: PAT_MRT4530_52174C.1.pep
MAAPLPPAGIIPVRHPSLARLWLAREASNTAFRQMNRLISDLYYVAPGVLDDPDFLERSVLVDGVAPSTSPRDLRESFSVLAVEAAVLVRDSSTGYRVGLVVFADAADSASAMNLTPRPGFYVACIPAASGRGDPRGYILDALDDEAERRRTTAEPEPGLLRSLVPPRYLLDDEDADLHLRCVFVVRVAGTSDGGGGGAYGLCRAARDHLAGAEYACAVVAWRGGDAGVLVYDDADATELVARRAPRLLVRTGLRMLDSSSLLLPDEGGTSSLLRLLLPPYVITQAAAAQQEEYRSRVILLRGLGTERWQCDAAQIADWLEHRVELRHQVEAVVIHRAMGVVVVVLGSPEDVELLLQEPPETWLHAPGMRWGDDDDDDEMRWGLSPHCLMMTWLHVSRFLTPPPQQPPQQLSFSTRDWAGPVAYCQAKNWLSDELMSPGPGYHVNRVVEARRIVHKLIALCALANPATVWSSSFPDRSLILSGIPMYTDRADLEARLSTTFGAMDDLVHARLKGGRSGRVQVLAWGSKAGTEAG

SEQ ID NO: 152090 - protein, 98 aa, Oryza sativa
  Clone ID: PAT_MRT4530_52175C.1.pep
SLIFRRRTRVGFLRSVSLRQGRGSGGEGGAAPGGAVGKDLGGGGGHPAYQHPFWTFHNSTIQDLAATAANYRRRDLTAWLPRPSTYWCLVDYLIFALA

SEQ ID NO: 152091 - protein, 61 aa, Oryza sativa
  Clone ID: PAT_MRT4530_52176C.1.pep
EPNGGNVWHPDSYTHIMHTWPKYTRQNCSLAIQKGEAWLLACNLDCKEFKLWHVVQWVPNH

SEQ ID NO: 152092 - protein, 69 aa, Oryza sativa
  Clone ID: PAT_MRT4530_52177C.1.pep
YNPSIPPCFYLMSVTTASGGCPRRQQEGVKARGEGDYCGGGGGSGWNGDGDEIDLGRHHELEPTMRGEE

SEQ ID NO: 152093 - protein, 88 aa, Oryza sativa
  Clone ID: PAT_MRT4530_52178C.1.pep
IVKNTSNAQIISRAHGVERRFRAAVVVLALSSLRLVQWQWVDGVGRATARQGGRARASGPEADARRHGARLFGCPGGAREGEEEAKKA

SEQ ID NO: 152094 - protein, 166 aa, Oryza sativa
  Clone ID: PAT_MRT4530_52179C.1.pep
MGFGESTQGNQRKLDGPGKVSTELSLVNLEAKNLHPKPECNQPIEHIPTKGMKCTPLLPLPTEHADDEPIYVNAKQYHAIIRRRQRRKIVGSEDKVAAIRKRILVEARQKQAKLRHRGKGGRFISIEHPLELSMDDQISKNGGSASPSSSTVSENSSNVNGFTGDL

SEQ ID NO: 152095 - protein, 172 aa, Oryza sativa
  Clone ID: PAT_MRT4530_5217C.1.pep
MKCRPGRRDVAASFRTVPSTHAPTHRTRAASRQSRNKPRPRRAKPQIPAESDHVPRSGFSLGDTVPRHPPFHHGVPLPPPHDTMSSGPELPWTRVSSNHRTASMSSTSSWEVTEPAPLSLSHIASPPLRDVALVPSPSIRCCVRHLASHHHRCMTSRHRLAISSIPEYRPSL

SEQ ID NO: 152096 - protein, 44 aa, Oryza sativa
  Clone ID: PAT_MRT4530_52180C.1.pep
KTLSNHKTGYAGSLNYTQPVTRGTSVVLNPFLVYVAAESAWDPA

SEQ ID NO: 152097 - protein, 325 aa, Oryza sativa
  Clone ID: PAT_MRT4530_52181C.1.pep
MADELQHTDAMPKDLTFDLIKRITDDFSKKNQIGHGGYGIVYKGVLENGKEIAVKKLHDIESLDDEKFMNEFVNLMSAQHKNIVQLVGYCYDTRRKVVLHNGKYVVVHVEERALCFEYLQRGSLDKYLSDFGLSRLFSDTLTRHTTKKYIGTVGYMPPEYIQICHITEKFDVFSLGVIIIEIMTGTKETSKRADMSPQQFIELVHENWRRRFEQATPMYTSEEVESLRLQMKTCIEMALQCVEAQRLKRPTIAEVVSRLNILDDMVRKISPSLLLYKPPIDPLSSGDQFRKGCACKDWALGRKCRESSQHQGGVPSSAKCHSLVC

SEQ ID NO: 152098 - protein, 44 aa, Oryza sativa
  Clone ID: PAT_MRT4530_52182C.1.pep
ERDHARARTGNTLKNLRAGPGLLPETLGSHQTAADASGRVLVSA

SEQ ID NO: 152099 - protein, 73 aa, Oryza sativa
  Clone ID: PAT_MRT4530_52183C.1.pep
TVIRIPPTCPYKCEPLSRCNSMQGKLTQILQRSTSSNSVLVLQNTSTRSSPPSLLVLLHASTRGDAWSTGIRR

SEQ ID NO: 152100 - protein, 873 aa, Oryza sativa
  unsure (1)..(873): unsure at all Xaa locations
  Clone ID: PAT_MRT4530_52184C.1.pep
MGPPKGSRTITKITIKGYYDRQHDEDQNMSIKIKLKKLNISILDHLWSHEELMRFNEAYRLHVKNWKKFSASVGGNLVDTVGALXSMHRTLLSLPERKGMAMGLVALVACQYTGSDVSKSHXKSDQTVKVFQKVRXSEATVQKXKETTHAHSSYHERRTPESSTLMKRYYGELVKIITRHPSRKRTPSVQDIFPADMNVAHAGIPETENAINCTKKASGATNNELECSSHGSPGISESAKFVQGQTFLEAKGTGSLKKRRIEQSMEQGQTIKDEHKTAMVAKEGNDLTEYQRLTNLFSPDEMLVLDVLESLVTVPSKISEPKINIPSGTLGRDDSALSHRREEGPSVKRSKQGKQVGECSASKTRNKRRKKLIAEEVPTEGVTSNHLDLPEERQVDATECALNSDLERGTVDLPESTANISTKIPDLPSQLKPEINMSRRSKRKSKSPCGSKYVVCNGADNLQARRLQHCLSSESLRRWCTYEWFYSAVDYPWFMDNEFVNYLNFANLSHLSRLTRSEWSTIRSSLGKPRRFSDHFLAAEKDKLENYRKKVRQYYALLSEDSWDSLPPDLARPFSIGQQDRYNVQFDRPDLGVDEVKDTDCMPVNWLDNLPDDLKKRSFLSNNSHNRVEVEQIPKFTSKENWDHISGEAEPSKTMHITSDEQVEVLLSKSIFKKHYDHSLSIHGQVEIAVDIERLSNKSTSGNCGPLQPLQSVDDNVRSRGLSEHRNGHNDELDSYITSFVQMSLAQAKQMVDEAMKEISENGKSSLEETGISNEATDCTGPEPESAANSELPRNLIFNCIATLLAIKHFSEGRHPPPNIAGVLERACLMLRPSCAENLPIYNEIENFIAVIKNQILALVPSASSNARLPMYM

SEQ ID NO: 152101 - protein, 189 aa, Oryza sativa
  Clone ID: PAT_MRT4530_52185C.1.pep
MTRTTLRLTSFFSTAPLAPLGVAGAGGSAATGASASVDRIVSAAARVFGSPACEPAISPLVKTKGKCAATEASTSEYSLATPHFAPGDFETRADLIPFVEGVSNLVLPTGTPSIFTELNEFDEGCSTIKSLAVRILAAHCSTERTVRARFDGFKSRLRAKDDEISRKNLEVESAVKLLALLPATTIRLQ

SEQ ID NO: 152102 - protein, 362 aa, Oryza sativa
  unsure (1)..(362): unsure at all Xaa locations
  Clone ID: PAT_MRT4530_52186C.1.pep
MAMWRAAAGHLLGRALGSRAAHTSAGSKKIVGVFYKGGEYADKNPNFVGCVEGALGIREWLESKGHHYIVTDDKEGLNSELEKHIEDMHVLITTPFHPAYVSAERIKKAKNLELLLTAGIGSDHIDLPAAAAAGLTVAEVTGSNTVSVAEDELMRILILLRNFLPGYQQVVHGEWNVAGIAYRAYDLEGKTVGTVGAGRIGRLLLQRLKPFNCNLLYHDRLKIDPELAKEIWAKYEEDLSAIEXTRGMFNKERIAKMKKGVIIVNNARGAIMDTQAVADACSSGQVAGYGGDVWFPQPAPKDHPWRYMPNHAMTPHISGTTIDAQLRYAAGVKDMLDRYFKGEDFPVQNYIVKEGQLASQYQ

SEQ ID NO: 152103 - protein, 71 aa, Oryza sativa
  unsure (1)..(71): unsure at all Xaa locations
  Clone ID: PAT_MRT4530_52187C.1.pep
QRRIGIQSLPFWAQVSRRVTFFLLGKSCIKRKGGPLLWFRRLITRSCRWFGFVPLSFLRRIVPGALLRXCP

SEQ ID NO: 152104 - protein, 48 aa, Oryza sativa
  Clone ID: PAT_MRT4530_52188C.1.pep
RNFTANEQLLQLRYAAGVKDMLDRYFKGEDFPVQNYIVKEGQLASQYQ

SEQ ID NO: 152105 - protein, 96 aa, Oryza sativa
  Clone ID: PAT_MRT4530_52189C.1.pep
MATAAPAADKRIRQPASNVPIMAQSFAPTRAKLGASNTVSVALCRTMDNDDGLIPSGNQTWCLCLFYKALKLSKNDASNQYCRSSASGKYIKDLRT

SEQ ID NO: 152106 - protein, 905 aa, Oryza sativa
  Clone ID: PAT_MRT4530_5218C.1.pep
MAASAPPPPPPLPHAHSDSGEAPVSLFIDTDLGTRFALLAAGDSTMRDLKSTVAAEHATAFPDIGPVAVKSFQVRRKGALYHLSDLMTIRSAFAKIKAGCFLHVKMTVVVTDSHCCRDTSMEDRGKSSEGCPGAEVHVDKCVLKIPALIPQIANRRLPGLENSSTAGMEKKRKRSEPEATREVVSAQEMVKPSSGAVEVPGSIGQVLLQKNNQELQVIKTETPRGSDVLGVHGNTVDKGALSAVLPLKYPAAIHSDAPISSPSHNKARGEKLEVLPTAHDSSHFSGGVPDENANAELRESVSLRPSDNTSVSNNISTENVVVQDDDKNKATKRQRKKISLKHVPTDNDKTIQSLDEQVNQVAIEDLNGSNATKADLVQGGSVIDGPAGTVENVQKKSRSTKIRTPKVQKANPSAHFEDSKSAKDSQGKCVSYIGESGTHSNDTAVGAPTQSFAVQEDATALRTLTPSALKGRKKSSKTGLQSQNASLDHGSDVDLMNYKAEHITASPKKSAVAVEPNEKINFLDHFSPKGTNDQYVSAENKENGREETVREVEDESNKREVDLQSQLADNAKPNDLLQSHHIEKTTSTNNSPGDVGVPSDSTQNVDIADGNVKKGKQKKRKKKSDLLNSVPQKVDPNSDHRDIDNGVQDFSFSVAQEGRMEHDRKENNNNVIWNSSMLTQDPKDATCDSRVKKLNQSKSGSDNQGNLPIDKDHALMDKGQRKSSSQTKPHAESKNFDRFSNGKADPNSKSIRNLVKSFSMSPPASSDSTQGTPQNSRFRLAARKVPRKRYEQTSGKSKKDKGTGTIFNDASSDGSDDELGIGSEKAAIETSSDDASSSADSGISSAAHDSGEPDDDGNASLSQKSRKGGLGSILRGSCSYKKAKQKQAVQLDDTEVPDSQPMDIF

SEQ ID NO: 152107 - protein, 397 aa, Oryza sativa
  Clone ID: PAT_MRT4530_52190C.1.pep
MAMWRAAAGHLLGRALGSRAAHTSAGSKKIVGVFYKGGEYADKNPNFVGCVEGALGIREWLESKGHHYIVTDDKEGLNSGELRMIFIWLMEGGKEVLDVCELEKHIEDMHVLITTPFHPAYVSAERIKKAKNLELLLTAGIGSDHIDLPAAAAAGLTVAEVTGSNTVSVAEDELMRILILLRNFLPGYQQVVHGEWNVAGIAYRAYDLEGKTVGTVGAGRIGRLLLQRLKPFNCNLLYHDRLKIDPELEKEIGAKYEEDLDAMLPKCDVIVINTPLTEKTRGMFNKERIAKMKKGVIIVNNARGAIMDTQAVADACSSGQVAGYGGDVWFPQPAPKDHPWRYMPNHAMTPHISGTTIDAQLRYAAGVKDMLDRYFKGEDFPVQNYIVKEGQLASQYQ

SEQ ID NO: 152108 - protein, 82 aa, Oryza sativa
  Clone ID: PAT_MRT4530_52191C.1.pep
GSIPVGLPGGVPRVPLKKGAPPQSLPSFKFGKKNGPPPKGARTPGIFGKLVPPPLLGGFSKVLKPIREPPSPWVPRKTKFFL

SEQ ID NO: 152109 - protein, 60 aa, Oryza sativa
  Clone ID: PAT_MRT4530_52192C.1.pep
MMARDPTSPSELAALTSRSPNPELLGAAARVSSSPKPRMWEQRGAPPNTTLSFIVNVLNF

SEQ ID NO: 152110 - protein, 535 aa, Oryza sativa
  Clone ID: PAT_MRT4530_52193C.1.pep
MAATPTLSGSLRALACGVTRDSTPACYSFSRVLIMDPTSVPWSSMVYGLLGLALLWQVHRLLVRLWWQPRRLERALRAQGVRGTSYRFLTGDLKDYGRLSKEAWARPLPLRCHDIAPRVAPFVHRTIAEHGKACLSWFGPIPKVTIADAEIAKDVLSNKMGHFEKLKFPVLSKLLADGVANYEGEKWAKHRRILNPAFHLEKLKLMLPAFSACCEELVGRWAASLGSDGSNEIDVWPEMQSLTGDVISRTAFGSSYLEGRRIFQLQAEQQELFMGAIQKISIPGYMSLPTKNNRRMYQIKNEVESIIRDLVQKRMHAMKDGERTKDDLLGILLESSTRHADENGHSGPGMTIEEVMEECKVFYFAGMETTAILLTWTMVVLSMHPEWQHRAREEVTMILYEVLRLYPPGIGFVRQTYKEMEIGGVKYPAGVMIELPLLFIHHDPDIWGSDVNEFKPERFAEGISRASNDHGAFFPFGWGPRICMGQNFALLEAKMALCMILQRFEFELAPSYTHAPHIVLMLRPMHGAPIKLRAI

SEQ ID NO: 152111 - protein, 45 aa, Oryza sativa
  Clone ID: PAT_MRT4530_52194C.1.pep
FFSFFSLCYLGGLTAQGTSCVFLRLEPLFDIHDAPVAEDVHLHQK

SEQ ID NO: 152112 - protein, 119 aa, Oryza sativa
  Clone ID: PAT_MRT4530_52195C.1.pep
LISYWFHYREHGVVGDMRDAWPNARVRKNVSLIHTYHGFKGEKQGALEFLKLIFRALCLCWDRQTQDLHIDWILFRGRPLVPALCEVINDNIDGVYPSSHFPIFAEFLLPRSVRLVETP

SEQ ID NO: 152113 - protein, 79 aa, Oryza sativa
  Clone ID: PAT_MRT4530_52196C.1.pep
MSEQVSESDLYDEELIRNRLEELRRRREEGSLRDVVFCMRGDLVRNLGNMCNPELHKGRLEVPKLIKDYIDEVSAQLKM

SEQ ID NO: 152114 - protein, 64 aa, Oryza sativa
  Clone ID: PAT_MRT4530_52197C.1.pep
DILQRSELVNKIIAIQSPFCKSMAITQVVHLQTQLLRERTCVCNIWLSSNNPVIFKQELLRLLL

SEQ ID NO: 152115 - protein, 741 aa, Oryza sativa
  Clone ID: PAT_MRT4530_52198C.1.pep
MPPQELHGDDHGRHHHHQTPAGSGGGGAGDGHHRDFSSPPSTTSSSSSSSSSSSTNSPTATAASSSSTNTSGAAIVHPTTSSHPSVASGHHSAANSYPLVLKFEEVVYKVKIGKPAAGWCARMSSAIGGGGEGRRKKGAAAVAKEKTIISGMSGVVRPGEMLAMLGPSGSGKTTLLTALGGRHGGGGGGGRGMLSGKITYNGQPFSGAVKRRTGFVTQHDVLYPHLTVAETLWYTALLRLPRALGAGEKRAQAEEVMLELGLGKVAHSMIGGVRGVRGLSGGERKRVSIGLEMLVDPSLLLLDEPTSGLDSTTAARIVGTLRRMAAGGGRTVVVTIHQPSSRLYHMFDKVLLLSSDGCPIYYGLAADALSYFASVGFASPLSLNPADLMLDLANGIAPQISGGGGDGDVGGGAAAAAANGGGSEAELKEVRGKLAAAYERHIAPAVKLDICAREGGGGGGQGAAAAAAVAGRRRRGGGKAAAEQWTNGWWAQFTVLLRRGVLSVASLAGLLWWRTPAAHLQDRTALIFFFSVFWGFFPLYNAVFTFPLERPMLVKERSSGMYRLSSYFAARTAADLPMELALPTAFVVILYWMGGLDPRPGPFLLSLLVVLYSVLVAQSLGLAIGAVLMDVKQGTTLASVITMVFLIAGGYYVQHIPPFVGWLRWLNYSFYCYRLLIGIQFGDGAAHYDCGGGGARCLVADFPAIKAVGLNNHWVDVCVMALLLVGYRVIAYLALDRLKPR

SEQ ID NO: 152116 - protein, 56 aa, Oryza sativa
  Clone ID: PAT_MRT4530_52199C.1.pep
GPKRGNRPPKFSPVNPGELRSFNKNGPGLVKISQGCPVGIPPCHKAFQGLSLYPES

SEQ ID NO: 152117 - protein, 74 aa, Oryza sativa
  Clone ID: PAT_MRT4530_5219C.1.pep
MEVSTTTASLIHEVLLLLDCNPCVYPPDVFPFILLNIDPLYDHHVIPSPNTKVGLPHLEAPNIKHHGTKNNIQI

SEQ ID NO: 152118 - protein, 1828 aa, Oryza sativa
  unsure (1)..(1828): unsure at all Xaa locations
  Clone ID: PAT_MRT4530_521C.1.pep
MVKTRKQGRREAGNHAGTSPSQRPPRRRMXGEEYTPKGVDFAIAXSASGGPKKPSWPIKSKGXWVDNHLTARXGPMKHNYTVYPCKCPFHKGNHVSFRQQLAPTMGISERNHXEQMPPKRVVKEKVTRRKESEAEVEMVAEEGAEPSAPVAEDGGALSASAPAPSLLPSAPATSAQVLNAADMAKAAAAARALQTRXEILSTSQLLVLQAAPSQLAAASIALAAVQAQVNPDPETQIEADMEAMRQNMTRLQDMLRQMQEQHQAYQAARRSKVASAPVLQYLASYVPPQVYPQAPIQPLPPQVTQAPVYFTGQPSTAAVHPAPHVQLQAQPVAAQVHPQPPGQVSQAMAEWASALQAQLQAFLQHLSXPHSISGTAPSVHPEGNTSQGAPSWLPSNQPGLGASPWSQRPQFDFINAPQAPTVRPQAPTPGFGANQAPNQVAIAWSQQTFDPSMAAQQASPIRAGXPNAMAHPQAQAVISPFATPYPQQGAVNRARAEKRLSLSGGIKTHPIPPQFKFPPVQRYSGKTDPKEFLSIYESAIEAADGDENTKAKVIHLALDGIARSWYFNLPANSIYSREKLRDVFVLNFRGTYEEPKTQQHLLGIRQRPGESIRXYMRRFSQARCQVQDITEASVINAASAGLLEGELTRKIANKEPQTLEHLLRIIDGYARGEEDSKRRQAIQAEYDKASVAAAQAQAQAQVAEPPPLAIRQPQPTIXGQPPRQGQAPMTWRKFRTDRAGKAVMAVEEVQALCKEFDTQQASNHQQPIRKKYLNQQISFGPGDAEGVMFPHQDPLVISAEIAGFEVRRILVDGGSSADVIFAEAYAKMGLPTLALTPAPASLRGFGGEAVQVLGQAQLLVAFGTGENRREEQVLFDVVDMPYNYNAIFGRATLNKFEAISHHNYLKLKMPGPAGVIVVKGLQPSAASKGDLAIINRAVHNVEAEPHDRAKHALKSAPHGKIIKMQIDDADPTKLVSLGGDMGEEEAANILEVLKKNSDIFAXGPNQVGGVSIDLIMXHLAVKPDAKPRKQKLRKMSADHQEAAKAEVQKLLKAGVIQEIDHPEWLANPVLVRKSNGKWCMCVDFTDLNKACPKDDFPLPQIDQLVNSTAGCELMSFLDAYSGYHQIHMNPADIPKTAFITPFGTFRHLRMPFGLRNAGATFARLVYKVLYKQLGRNVEAYVDDIVVKSCKAFDHVSNLQETFDNLPAAGMKLNPEKCVFGVHAGKLLGFLAAERGLSFFKTLRGAGKFNWTPECQAAFDELKQYLQSPPALISPAPGIEPLLYLAASLVAVSAALVQEIESGQKPVYFVSEELQGAKTRYIEMEKLTYALVMASRKLKHYFQPHRVIVPSQYPLGEILRGKEVTGRLRKWAAELSPFDLHFVARTAVKSQVLADFVAEWTPAFVPEPEPVEQPWMMYSDGSWSHKGAGIAAVLTSPSGVPIRYAARLQFNTTNNAAEYEAILLGLRKEKALGIRRLLIRTDSKLVAGHVDKFFEAKEEGMKRYLEAVRSLEKYFTGITVEHLPRGQNEEAEALAKSTAYGGPHSPGIFFEVLYAPXVPMDSLEVMAIDQVKLGEDPCDXRTPFVKHLETGWLPKDEEEAKRLQLRATKYKMVSGQLYRSGAIQPLLRCISFTEGEEMAREIHQGLCGAHQAARTVASKVFRQGVYWPTVLKVCVEQVKKCESCQRHGRSQNAPQYELQPIAPIWPFARWGLDIIGPFPVARNGYKFAIVSVEYFSRWIEAKPLGAITSAAVQKFVWKNIVCRFRVPKEFITDNGKQFDSDKFREMCEGLNLEIRFASVAHPQSNGAAERTNGKILEALELLEEVRVEA

SEQ ID NO: 152119 - protein, 635 aa, Oryza sativa
  Clone ID: PAT_MRT4530_52200C.1.pep
MSSAIGGGGEGRRKKGAAAVAKEKTIISGMSGVVRPGEMLAMLGPSGSGKTTLLTALGGRHGGGGGGGRGMLSGKITYNGQPFSGAVKRRTGFVTQHDVLYPHLTVAETLWYTALLRLPRALGAGEKRAQAEEVMLELGLGKVAHSMIGGVRGVRGLSGGERKRVSIGLEMLVDPSLLLLDEPTSGLDSTTAARIVGTLRRMAAGGGRTVVVTIHQPSSRLYHMFDKVLLLSSDGCPIYYGLAADALSYFASVGFASPLSLNPADLMLDLANGIAPQISGGGGDGDVGGGAAAAAANGGGSEAELKEVRGKLAAAYERHIAPAVKLDICAREGGGGGGQGAAAAAAVAGRRRRGGGKAAAEQWTNGWWAQFTVLLRRGVKERRYESFNKLRIFQVLSVASLAGLLWWRTPAAHLQDRTALIFFFSVFWGFFPLYNAVFTFPLERPMLVKERSSGMYRLSSYFAARTAADLPMELALPTAFVVILYWMGGLDPRPGPFLLSLLVVLYSVLVAQSLGLAIGAVLMDVKQGTTLASVITMVFLIAGGYYVQHIPPFVGWLRWLNYSFYCYRLLIGIQFGDGAAHYDCGGGGARCLVADFPAIKAVGLNNHWVDVCVMALLLVGYRVIAYLALDRLKPR

SEQ ID NO: 152120 - protein, 83 aa, Oryza sativa
  Clone ID: PAT_MRT4530_52201C.1.pep
MAADEALLQLVGALRKRRDRRGVAKEGRKEAKCMEGGEDGGKVWYFWHHCRGCSKQLVVFKSSEENIENIVETGTVYLYSKDL

SEQ ID NO: 152121 - protein, 51 aa, Oryza sativa
  Clone ID: PAT_MRT4530_52202C.1.pep
MLGEAPFQSKVPADDNKVGRLMMHPENCKAVRGEKERVSQTARAGVTAPQR

SEQ ID NO: 152122 - protein, 55 aa, Oryza sativa
  unsure (1)..(55): unsure at all Xaa locations
  Clone ID: PAT_MRT4530_52203C.1.pep
MKMGSKRSTRWRSLRKQKICFGQKSAAKTYGILEFVRDKSXIKSTGTLIHLKASF

SEQ ID NO: 152123 - protein, 335 aa, Oryza sativa
  Clone ID: PAT_MRT4530_52204C.1.pep
PRLLALYHPRNLYILHLDAEAPDSDRANLAADLADHPVIAAAANVHVIQRANLVTYRGPTMVANTLHAAAAFLYTNQHPHLEWDWFINLSASDYPLLTQDDLIHVFSKLPRGLNFIDHTSNIGWKEYQRAKPVIIDPGLYMKKKADVFWIPQRRSVPTAFKLFTGSAWMALSKPFVEYCIWGWDNLPRTVLMYYANFISSPEGYFHTVVCNAEEFKNTTVNHDLHYISWDNPPKQHPHYLTIEDLDRMVASDAPFARKFHADDPVLDKIDAEILLRGPDMLTPGGWCGGTRENGSDPCSVIGNTTHLQPGRGAVRLQRLMTSLLSEEKFHPRQCK

SEQ ID NO: 152124 - protein, 137 aa, Oryza sativa
  Clone ID: PAT_MRT4530_52205C.1.pep
RNLSPSRLASRRRRRRRRASSRRPRAFRSSISAEDTTRVPWKQRRRRRRRREQAEAAEGTGRRRRRRRRRATWRRCASASRRTRATAPSARTTSTPSAPPAPPTPRRLAGPRAFAQSAKATLCLSFFLFCFYYPRSE

SEQ ID NO: 152125 - protein, 40 aa, Oryza sativa
  Clone ID: PAT_MRT4530_52206C.1.pep
HQHKVLKQRQNTIFIFDLVNFLDIRSGNNTTGRWGILIYV

SEQ ID NO: 152126 - protein, 232 aa, Oryza sativa
  Clone ID: PAT_MRT4530_52207C.1.pep
MDYWKTKVLPKIKVVFAKGGNAKKAAAAELIKSFDESKEGINGEFEEKKADLQPKVVEIYEAAPAPLKVLIKDRAKVSGIKKNSAAVTKFVDDLAKIEFPGAKQLSEGIAKVGPALLSGPVFATFEKVSTLLPADEEEIKPKEATAAAAEEEKKEEAAAAAAATDAAGEEKKEEAEEKKEEEAAAPADEPAAAAGESAPAAAEAEPPVEAAATPAAAEAAPAKAEEEEAPKA

SEQ ID NO: 152127 - protein, 585 aa, Oryza sativa
  Clone ID: PAT_MRT4530_52208C.1.pep
MAQDAGDTVLPASRIMADRHLSLPRKTMPEGTVVRAGELRPRPRYPEGSVHLLSFAMVGLIPPFFGFFHEVLDFYEIHALHLAPNAVMTLPIFAHLCEMFIGVRPMMRLFQSFFIPQLLQGAVDRSRGAWEYTGPNDPMRTHVGERWEWGEEDAKTVIRRVLGLDSAEQTLIPDGILPLCCDRDRESILAVMSAGRSRSYRGGAGGSAAGVSGGDATVCGSRTSGPGGGGSSGAPGPSHGPRDDSASDLKGKRKMPKSRPPSPPRGGGAERVADRPPAGHKRPVEPEAGRKKKRLRKIGQTEPCWGSFIEPLKWTFNRPPRSEILSQGISGSDPLQGMKSERMEWPGLGRSRAVGPSQPLGGAHGPHTGSDPGLTSAGTRPTASDSGGDVPPGGGSETGIHAERHSGSGGEGGRGSEAEAGGGLEPEVEAEIGGGHEPEAEAESTRGPEAGAERDGRSPLHLGRPRGWSRRRGAESSPQSRGGSSSTLSSWGRTAAFSSPTPASMEPLLQVLAAADSTVREGLNANVQALAEERAALEAEWAQLAADRARVDEGRGAVDDMVKVGRKMRQAQLAEIQAGLARPRL

SEQ ID NO: 152128 - protein, 566 aa, Oryza sativa
  unsure (1)..(566): unsure at all Xaa locations
  Clone ID: PAT_MRT4530_52209C.1.pep
MAQDAGDTVLPASRIMADRHLSLPRKTMPEGTVVRAGELRPRPRYPEGSVHLLSFAMVGLIPPFFGFFHEVLDFYEIHALHLAPNAVMTLPIFAHLCEMFIGVRPMMRLFQSFFIPQLLQGAVVGGCYFQPRPATAGQYIESHLRKKXVDWRKDWFYIALPDHPRLRLPAGPPERSAAWLAVSELGEEYDAVQDRLRGLXSLGLTAAMVFGDYFRRRIAPLQDRSRGAWEYTGPNDPMRTHVGERWEWGEEDAKTVIRRVLGLDSAEQTLIPDGILPLCCDRDRESILAVMSAGRSRSYRGGAGGSAAGVSGGDATVCGSRTSGPGGGGSSGAPGPSHGPRDDSASDLKGKRKMPKSRPPSPPRGGGAERVADRPPAGHKRPVEPEAGRKKKRLRKXVKRSRVGGASLSPXSGLSTALPAGAESSPQSRGGSSSTLSSWGRTAAFSSPTPASMEPLLQVLAAADSTVREGLNANVQALAEERAALEAEWAQLAADRARVDEGRGAVDDMVKVGRKMRQAQLAEIQADQETVDAHSGHRPQSREESFVFRHVVQETLGGTGSSTGVH

SEQ ID NO: 152129 - protein, 98 aa, Oryza sativa
  unsure (1)..(98): unsure at all Xaa locations
  Clone ID: PAT_MRT4530_5220C.1.pep
SQCTGSWGRADDDGAAACSGMDXGGRATMMPKRRRSEAPVGTVAFRRHHCMSRGEIRSRDDRGTMAMATVVVSTAAGENEDDREAEGLSPSASSALEC

SEQ ID NO: 152130 - protein, 100 aa, Oryza sativa
  unsure (1)..(100): unsure at all Xaa locations
  Clone ID: PAT_MRT4530_52210C.1.pep
VPHDIQWGHNQPPRSSGMPPSPGEWRSSSSRWDLGEITRRMVNVQTGEIXYNLMEHIAQTQEWQQTADAQFANINNMTQQQHDDLQAYFRFQRFNPYQGS

SEQ ID NO: 152131 - protein, 42 aa, Oryza sativa
  Clone ID: PAT_MRT4530_52211C.1.pep
KTTDLDGYKGGRYTTIGILSGFQIHVHNLRKMVLMDTISSIH

SEQ ID NO: 152132 - protein, 113 aa, Oryza sativa
  Clone ID: PAT_MRT4530_52212C.1.pep
AVARLKAKLLLSNGQYVLAAAKSELDRSERHLLHWGTVDASCIPSALQEKGIVCSFSADADYSAPSDRERVISITSPGEALVKVTSERTTIYCDDEETAERVYDALRSICNGI

SEQ ID NO: 152133 - protein, 69 aa, Oryza sativa
  Clone ID: PAT_MRT4530_52213C.1.pep
KCIAFLALFTDLSRLLARFLCTRGVYLIMASGLRSAVSVQPMGGRKDHGGLLLLMPPSSFLSPPDDREM

SEQ ID NO: 152134 - protein, 101 aa, Oryza sativa
  Clone ID: PAT_MRT4530_52214C.1.pep
QKGRRRRRSPLRQRPPPAAAAADLAEGEAAAACRRPSGGGTLPSTRSSRRGAAGGQPSLRRRRRWFGDDGGGGDPLRSNFLFLFGYICVLCIMLSSILLCD

SEQ ID NO: 152135 - protein, 114 aa, Oryza sativa
  Clone ID: PAT_MRT4530_52215C.1.pep
MGAGKAPLRRKWGGDQAAAVRGQGRGPALPPSSLAMEAAGRRGASAPGLTAAGLPPQSRRGARLPPTYPVATAGQALWPRPRLVGVLHFPGAGNPAPSGIGTFAGLELCRQPCS

SEQ ID NO: 152136 - protein, 201 aa, Oryza sativa
  Clone ID: PAT_MRT4530_52216C.1.pep
FSILFQILCIHLLRASVGLDGEFVKRGGHISFPLLLDLSPFAGGALIPGQGPKPSAMNKQRHGQQTLHLWRQLNAEMPVNMFPAATDGDSSSHHCGDESINTLGRSFYVGNRDADSRFLSSSSLTDKLYGLSSVVEHYGVCGGGHYAAYRRVTPNSDSNEPVQSLASFRKEWLYVSDDHVSHVSECEVLAAEATLLFYERL

SEQ ID NO: 152137 - protein, 42 aa, Oryza sativa
  Clone ID: PAT_MRT4530_52217C.1.pep
LLTAGFCSTQRRRWIETVSFFHSAGLAVAQDGRAAPPCSHSL

SEQ ID NO: 152138 - protein, 166 aa, Oryza sativa
  Clone ID: PAT_MRT4530_52218C.1.pep
MEAAFRALQNASLPGDERAACAACRDTYYAQARSSTVAAMNLLAECSLGQLGGEYAAAADAIKACRDAQSKLQSPAIYGLAVSDLMVAALASGLGELVICQAVTWCQFFTISTRGGGKRPIGAGFSTIGTYSGDTYLMFCSSGSKVHMVRISKKHVFVVELYENMV

SEQ ID NO: 152139 - protein, 121 aa, Oryza sativa
  unsure (1)..(121): unsure at all Xaa locations
  Clone ID: PAT_MRT4530_52219C.1.pep
TPPPEETRGATLPPTTAPPAGHGGPRTAPARLTRRTRSGRRRAPTRRREASETHRRRRPRRRTGAXRSATTPTRRRRGHRRQTATETAPSPETRTTRCPNRRRGRRTTGRRRQRTAENTGR

SEQ ID NO: 152140 - protein, 171 aa, Oryza sativa
  Clone ID: PAT_MRT4530_5221C.1.pep
EKRWRKEGEKRDKEKKRKKKKGREKNKKKREKKKVEWGEKEENLGAGRDGKSRNRRKKAWACEGGGEEEEYGRWKEREVVGHSGRQGRAGRRHGREKERHEEKDDRDEDKKENRKKEKTRGTTEQKKQERDSRKSKKMREKEKQGKGRLQHPAEPPPPHPPPPPLPSVKKF

SEQ ID NO: 152141 - protein, 599 aa, Oryza sativa
  unsure (1)..(599): unsure at all Xaa locations
  Clone ID: PAT_MRT4530_52220C.1.pep
RNHPAFDYSGXEDATQFSPRGPDSDTVPRRVGQVMISAPATVSDIPVPLCEKGPAEREAAINAFPLTDIIGPLADHXAVASLKEGVTKEASDVVAAATTSGSNVPKKGRKFSSILGTRRKAPNLVASDASPPPQRRQRLVTIGENAVRAKAAQDGTGATSSASPAAASIDVMVSTEDREATPSSPAVGLVPARGLPADALTWGELQAKMERILQAGARGVGREIEEARAAASSANQRADKLARDLAEGLEHXMSELENNLSEIRSSLRVSYLGLHXLSGECGVTTTIPANPDEFSLTSSLTELATAMEEIPSKHAARIGEETSNGIYTRACHVLACVRLVHPDLDLKKALDQGAADDARKGVMEEFSDLGESVLPLFEEDVDVEAVQQCGHPEMPVIVPALALEPNVPRXEVSENLPAEANMGLTSLEVEDALADQDRRIQYWKTKLEVAELERTMVEVKKDQAVEALRGHEVWFNSYLKSCCTAMAGVCTELRVPRGNPEELATGYISWLNGASRXLEGIGKRIDEALKQECRHASRYAGGHVLAYIRDHCPXLHLEFLHEGFSRSRRTPAEIDDLVQLMAPFVEKVFRSMDWRWPSW

SEQ ID NO: 152142 - protein, 77 aa, Oryza sativa
  Clone ID: PAT_MRT4530_52221C.1.pep
KVHQLHHLPPHLMTMLVYNKRNHEVPFFRYTRKRPIPVTHSNNKRVEANSHQQWGIKISQWSIKISEILSSYSNLTT

SEQ ID NO: 152143 - protein, 76 aa, Oryza sativa
  Clone ID: PAT_MRT4530_52222C.1.pep
NLNSRDALGSAKHTRSNLNYYQTLKGAQNSRLNCEEDGSDQQLTNRCLMNIKRVKTELLRTQGHLTVRQSWTALST

SEQ ID NO: 152144 - protein, 85 aa, Oryza sativa
  unsure (1)..(85): unsure at all Xaa locations
  Clone ID: PAT_MRT4530_52223C.1.pep
IVPPAFIGYRLPSXTNTSLFCTFCPHSYALGKNFPIGHASXIALGQARLTLELFRDWLPEKKLQLVDMSILLIILSPRPGCYTLV

SEQ ID NO: 152145 - protein, 42 aa, Oryza sativa
  Clone ID: PAT_MRT4530_52224C.1.pep
ASPPNPFSYVYSKHKCLCYGRCIDHVNCGWDQCLPRLLLFLS

SEQ ID NO: 152146 - protein, 76 aa, Oryza sativa
  Clone ID: PAT_MRT4530_52225C.1.pep
PTRCGYAKSRPLYHCACPLTERHTSSSFPPVYRLGFGKRPLPCARVKSVAAIIRVFCQRKHCVYLLFKCNGSPNSV

SEQ ID NO: 152147 - protein, 364 aa, Oryza sativa
  unsure (1)..(364): unsure at all Xaa locations
  Clone ID: PAT_MRT4530_52226C.1.pep
KRDSIPNXXVPPPPPPPPAATPVAPPHQLRLRHQHRPPPLPHPLLPSRHPSVSAAPPCPLAAEQRLLGAPPYSVLPPPRPPPPPPPPAGAPXPSPTTTKAPSIPSSPPSPPPPXPPPPLPTPRLLPPPPPPPARRRHLPPPPPPRRRSPPSPPLPPPPRRPAPRALPLPRPLPPPHPPTAPPXPSTPPTPPCSPPPPPSPPTPRSRSPTTSSSLPASAMDSRSRPWRPTRKWARTACSRTSSPTPPSSAPAPPPSPASPTPPPRPPPLCLPEGVGPLPPRPRGPRRPDPLPRPIPSGREPPSTRPXPEPPNPRRRARTPPPPPPPPVPVWQLRPPPGPPPPTRPGSRPRHRCRPHRRHRTPRWS

SEQ ID NO: 152148 - protein, 102 aa, Oryza sativa
  Clone ID: PAT_MRT4530_52227C.1.pep
TGTSCYACCCTQAQVAGRVVRSPRPTASAGKELKDEGCGEADERRQGSVEHDQHPWPTAALAGAQTIAGRATVGSAGVGRAGAGGHGAHRETALIMRWSGRG

SEQ ID NO: 152149 - protein, 508 aa, Oryza sativa
  Clone ID: PAT_MRT4530_52228C.1.pep
MDGNAKGGGHSEALKNYNLGRTLGIGSFGKVKIAEHKLTGHRVAIKILNRRQMRNMEMEEKAKREIKILRLFIHPHIIRLYEVIYTPTDIYVVMEYCKFGELFDYIVEKGRLQEDEARRIFQQIISGVEYCHRNMVVHRDLKPENLLLDSKYNVKLADFGLSNVMHDGHFLKTSCGSPNYAAPEVISGKLYAGPEVDVWSCGVILYALLCGTLPFDDENIPNLFKKIKGGIYTLPSHLSALARDLIPRMLVVDPMKRITIREIREHQWFQIRLPRYLAVPPPDTAQQAKMIDEDTLQDVVNLGYGKDHVCESLRNRLQNEATVAYYLLLDNRFRATSGYLGADYQESLERNFNRFASSESASSNTRHYLPGSSDPHASGLRPHYPVERKWALGLQSRAQPREIMIEVLKALQDLNVSWKKNGQYNMKCRWSVGTQATDMLDVNNSFVDDSIIMDNGDVNGRLPAVIKFEIQLYKTRDEKYLLDMQRVTGPQLLFLDFCADFLTKLRVL

SEQ ID NO: 152150 - protein, 509 aa, Oryza sativa
  Clone ID: PAT_MRT4530_52229C.1.pep
MEGNARGGGHSEALKNYNLGRTLGIGSFGKVKIAEHKLTGHRVAIKILNRRQMRNMEMEEKAKREIKILRLFIHPHIIRLYEVIYTPTDIYVVMEYCKFGELFDYIVEKGRLQEDEARRIFQQIISGVEYCHRNMVVHRDLKPENLLLDSKYNVKLADFGLSNVMHDGHFLKTSCGSPNYAAPEVISGKLYAGPEVDVWSCGVILYALLCGTLPFDDENIPNLFKKIKGGIYTLPSHLSALARDLIPRMLVVDPMKRITIREIREHQWFQIRLPRYLAVPPPDTAQQAKMIDEDTLQDVVNLGYEKDHVCESLRNRLQNEATVAYYLLLDNRFRATSGYLGADYQESLERNLNRFASSESASSNTRHYLPGSSDPHASGLRPHYPVERKWALGLQSRAQPREIMIEVLKALEDLNVCWKKNGQYNMKCRWSVGYPQATDMLDVNHSFVDDSIIMDNGDVNGRLPAVIKFEIQLYKSRDEKYLLDMQRVTGPQLLFLDFCAAFLTKLRVL

SEQ ID NO: 152151 - protein, 93 aa, Oryza sativa
  unsure (1)..(93): unsure at all Xaa locations
  Clone ID: PAT_MRT4530_5222C.1.pep
MAMSTTFYVCADALPVFVQERHIHIRXETAHNAYRRLSYVIANTAVAFPPLVSLSLAFAATTFFAVGLSGGGAASPVASRCSTARRSSGCRRP

SEQ ID NO: 152152 - protein, 77 aa, Oryza sativa
  Clone ID: PAT_MRT4530_52230C.1.pep
PCWAPVAPQPLLPPVLLKATYFKNPFPGCGVYPTRVSMAAPPKTIFLLLARVPPPIFPRGGGKDFFYPELNGPASLP

SEQ ID NO: 152153 - protein, 54 aa, Oryza sativa
  Clone ID: PAT_MRT4530_52231C.1.pep
SVMPQCASSSQAFLSPVREHGPVMLIGASPASCSRHRLDHHLQAIQYQQADDRH

SEQ ID NO: 152154 - protein, 60 aa, Oryza sativa
  unsure (1)..(60): unsure at all Xaa locations
  Clone ID: PAT_MRT4530_52232C.1.pep
PVRKYIHSPMMLRTVCRVTYGIGICVIITQMLPSWLWGVNGRSQMELHPXCXRVRVSLGQ

SEQ ID NO: 152155 - protein, 72 aa, Oryza sativa
  unsure (1)..(72): unsure at all Xaa locations
  Clone ID: PAT_MRT4530_52233C.1.pep
SRAXSEXSLLXSTLARASACAERARRSAEGXRARSLRYDGTDHVVXVAEESQCXHRMIESSMNGVEFLIVXT

SEQ ID NO: 152156 - protein, 79 aa, Oryza sativa
  Clone ID: PAT_MRT4530_52234C.1.pep
GLQVELHDDSFVLKAMSSCGEEQIDGIHDLISNGGESSSMPNIYRQQVQQPARSTNGTARLPSSPPIPGILKGRVKHEH

SEQ ID NO: 152157 - protein, 85 aa, Oryza sativa
  unsure (1)..(85): unsure at all Xaa locations
  Clone ID: PAT_MRT4530_52235C.1.pep
ANWVPGPPFEASXDEXGLPPATAXXXEEEAGAGEPEDAIGXGGQIWGXEDEIGGGXXDGFAXTLPXAVAAAAAAAXWDXXXFEAX

SEQ ID NO: 152158 - protein, 255 aa, Oryza sativa
  Clone ID: PAT_MRT4530_52236C.1.pep
MAPVQFSAAGVGAVAFATKGMASRDALRLPPPAAVRVLRQAPRPSRGLVVRAAAASVAPKYTTLKPLADRVLVKIKSAEQKTTGGILLPSAAQSKPQGGEVVAIGEGRTVGDNKVEVSIQVGSQVVYSKYAGTEVELNDSNHLILKEDDIIGILETDDAKDMKPLSDRVLIKVAEAEDKTPGGLLLTETTKEKPSIGTVVAVGPGPLDEEGKRIPLSVSAGSTVLYSKYAGSEFKGSDGTSYIVLRVSDLMAVLS

SEQ ID NO: 152159 - protein, 68 aa, Oryza sativa
  Clone ID: PAT_MRT4530_52237C.1.pep
VQDYVLMPRLSTSPIKHGSMYLTDWQSMQQSLLEYLQAIHKYTHLSKLLISCYCCKYGTKKFKLIYFS

SEQ ID NO: 152160 - protein, 130 aa, Oryza sativa
  Clone ID: PAT_MRT4530_52238C.1.pep
MDKKNRSTCTQIRRGTVRKESERNENDTCLVANASEVPNGIGDAGAWSRKMQVRRTQAIQFIDKHYHHMRRPSDWGTMGEEVAPHTDAWAFDSTVSTSGENSRRQFSCMGGGAEPRERKRSGGGGGARRG

SEQ ID NO: 152161 - protein, 250 aa, Oryza sativa
  Clone ID: PAT_MRT4530_52239C.1.pep
MAMAEAAEGQRPRQRQRRQPQPQRQQHPSCGICMEPMPPSEAHRGGGGGCAHAFCRACLAGHVRAKVESGGGAGAVRCPDPSCGGALDPELCRGALPGDVFERWCAALCEAMFAGARRTYCPYPGCSEMMVADADDEGCAGVTQSECQACRRLFCARCGVPWHAGVSCAEFGRLGEGERGREDLLLVQAARNGGWKRCPRCRFYVEKSHGCLHITCRCGFEFCYGCGRQWQLIHDGCCSLMTQQAGEVPN

SEQ ID NO: 152162 - protein, 159 aa, Oryza sativa
  Clone ID: PAT_MRT4530_5223C.1.pep
MSHIQHGEGCPTGRAMPDQRVAGRRTTTNLERVATDGRKRVARGGEKDSADLEKGRGCTRGWSHGGAIRHGHRRRHPLPPNSSLVGRSRREPKVQRRPGVGVRWSITEARYRLAPLPLAIGLLPVGRRRAGEMGNQRCGERPRVAGSPPRKRAALPASR

SEQ ID NO: 152163 - protein, 428 aa, Oryza sativa
  Clone ID: PAT_MRT4530_52240C.1.pep
MGGIYPFRAQGVGLPRPLLAVTTWPPSCDRYVTGRITDGMVASHARPSRMSGGMRQVVLTVHVGNPLEYKRRSISSEEGVRKTEDCNEEPAGMPPCMIRSRRCTRAMLIVEKGDDEEIQQLMVVRGIINNSSKIFRVVKFCCKAIRVLNRAFEMYFVVIDDMSAERWCDIEPAFPVDDGISITIVVTTNIQSIDNACSTADGYVYKMGNSTLNIRKICSSKVLLLRIVHQTWREAQNNFGRNSMEYKLLQVLDLEECDGFMDGYLDSICKLLLLKYVSIGGAVTTLPKTIAGLKLLETLDFRRNKVEVVIISVEVLVLPKLIHLFGKFELPGSVSNKIQKKIEPGKSNLQILAGFIAANNHGFVKLMCHMKNLRKVNIWCKSITKGNKLNSLSIAIEKFIENSNDPNDARTLSVDFSQCSEDILQISI

SEQ ID NO: 152164 - protein, 303 aa, Oryza sativa
  Clone ID: PAT_MRT4530_52241C.1.pep
MPRARGLSCLMSPLSGKRHAGDARRSSAACICCIGPHHKPSSAVGGGGGCVPCLAPHADHSVRAPLTSCCGSGGGGGDNNLRGRSSTTTSARTPRTPKTPCTPTARRLCGVRSRTPRRGQVGCFQSSAPAAARTPRTPTTQRACYVRGTGTAQGNAKLGRRRRWLRSTGQTPRRTARAGGDVGNGGDVKVYNTGLVEAAAEESVTKEEETSSNDEYALLCRQGFPREDVAAVTIQAYFRGHLARRAFKALKSLVRLQAVARGAYVRRQAEVAIHCMQAMVRLQMRVRARQMLTKPKEGQLLPS

SEQ ID NO: 152165 - protein, 84 aa, Oryza sativa
  unsure (1)..(84): unsure at all Xaa locations
  Clone ID: PAT_MRT4530_52243C.1.pep
TXARRNARXRYAALIXXLXXXXXXRXPRSXSXRXFXXAXAGXGAXHTARRRRRHAELRRXIPKAPPWMQTKXCFLSSSVHFLNF

SEQ ID NO: 152166 - protein, 229 aa, Oryza sativa
  Clone ID: PAT_MRT4530_52244C.1.pep
METRKGTIVQRYKMKLVADVPRTNSSKDGEVQQVSDGTTQSGDKGAADGSGDKGGGSQGAQGDGSQGFHGENLNQDGNTTQLQFNNFQYRIDYALQHALINQSGMLVNTLSNMVKSMVDGSIAEYQATGPVYLPGGVFPNYWPLITNNQPAVQPIPPNAPSAQPTAPVSAPAPATPSSTPGQLINPRLLPTVDLVQQQPIQQTPPRQQVVQPIQQTPPRQQVVQPIQQQ

SEQ ID NO: 152167 - protein, 45 aa, Oryza sativa
  Clone ID: PAT_MRT4530_52245C.1.pep
LLSLCLMFTGTNQSTFGVRILLMLNPFFFFFCFSKPPLDYYNLDY

SEQ ID NO: 152168 - protein, 239 aa, Oryza sativa
  unsure (1)..(239): unsure at all Xaa locations
  Clone ID: PAT_MRT4530_52246C.1.pep
VXAVAGGGXAGRSAAEVREKMRGTGPPGXXRAIRQXSNRAEPPPSLXTRRATSVGARGEKHGAPPRRQSGAEAAXTRAGYPAAAAALATPPAAASARQDGRTXXRWPQAVRRQLPHEHPCGTRSPGGSHGGGPPXQGAAGAGHXTGVHSCYTTYQRSVTPQSRGPRTRRRQGSPKRQAQXSANPKGESRRHIXXILSXYGERVWGGRRSGWMLGVALAGRGDAVWMGGGGVGGARVGEC

SEQ ID NO: 152169 - protein, 88 aa, Oryza sativa
  Clone ID: PAT_MRT4530_52247C.1.pep
MPSLAPTSGKDDLNFVLFSVQYPFKIFQLVRMDREFRMVVGNLLQNCRSMMHGKVLLGLEKFGLNQCNGQFIEDFKQWKKETSTTATG

SEQ ID NO: 152170 - protein, 74 aa, Oryza sativa
  Clone ID: PAT_MRT4530_52248C.1.pep
NKITLHLLASSLLACPSPLQHCPMAGQLLVPSCQVAHLEHLLQASRAYAISPILIHCCCCCCTLLHCQHTPSTA

SEQ ID NO: 152171 - protein, 579 aa, Oryza sativa
  Clone ID: PAT_MRT4530_52249C.1.pep
MALVAMASSSGSGSSRSTNGMLEETVADVAALVEKWRSDDDGRRRRRSSLFLDGGFADAGRFMSAAVELHRGMLVLASSDVEDARGRGDRGDERLVRAQGVLEDAMRRLQLELEILLSAVRSNTADDGDGDGAAMSGHGLDGDGAVVVGHIRLVAEAMVAAGYGMECVTTFMSHRRAEFAGAVRRLLGYAPSQHARFRKLAWDDVDGKVRSWHTAAGFAFNFAFSGERVLCHRVFAAADAGVADRVFEGIASDHAADLLAVAEAAVARARRAPERLFHVLDVHATLVEIFPAIVCVLGDKSEAAVRATAALRNAGEAARGILVSFEEAIQKATSKSSAAATGGAVHPLARYVMNYLVLLADYDDTLARIYQQGRGSTSPHSPSSSSSSSNPIGRLVSVLLRKLDAMAGRHRSPAARSLFMANNTHYVSKKVRGSSKLVGIVGGEGWAVAQSAETRRHVDAFVHAAWRDVLVVGGEGADAAVREAVASQRRWVAVADDEMGDAVRAAAAAAVVPAYRALYRRHGMAAWMTPGDVNAMIGRLFGGPRNAAAGARPVAAGGATPRRHRLRLTSSSQKLAHKQ

SEQ ID NO: 152172 - protein, 335 aa, Oryza sativa
  Clone ID: PAT_MRT4530_5224C.1.pep
MAGSQSSVHGENRDEPDAPVTWAKVQQMGKNLLQAMEWLLNARLPITGGGVVQPLLVDPVDEILDAHSADDADDELHLHGPLNGGAPWRRTQQTTTFVGARSQGASTRASPPAATAKPQPSSASSPAACIDSRQPATPTTTSLSRSHDIVCHKCHGRGHIAAESPSRRTMIVNETGELDSASDTEDDGLRDQELVNEQRIVLLFAQIMETILVSSLVECLVCKLHRKNMVSDTIFLTLEWLNDYGALRVKTIVTVHFSIIPKKYGSWRMCVDCRAINNITMHYRHPIPRLDDMLDELSGSTIFSKIDLRSGYHQIRMKEGQGVEVDEEKIKAVRE

SEQ ID NO: 152173 - protein, 73 aa, Oryza sativa
  Clone ID: PAT_MRT4530_52250C.1.pep
ASGKLAGCISSSQSPSTLSMRWWSWIDVCHIAQSGASNVRQPYCKRGRRKFLKGQPWNRGDGANYLLSFQSTG

SEQ ID NO: 152174 - protein, 152 aa, Oryza sativa
  Clone ID: PAT_MRT4530_52251C.1.pep
VSVYPLFLKKIFSRPLRVVLQFAVVNFCSLILNRSCHLHFSMVNLDDVYQWKDEKEHGEKLSETPDCLALVFQLDGWMAKCLGQQNDSNSCANSDGCHRNQPGNLDSLVEPLLFAVEVPSSQTKDDAVAGDDDDCPNIRQSSHRRSSCTINF

SEQ ID NO: 152175 - protein, 77 aa, Oryza sativa
  Clone ID: PAT_MRT4530_52252C.1.pep
LYSGKEPVPRFLSRGEFFCLLTNASLTAAWAVGFSASANLCSTILCGLGCRPLRFVMSSMVHMPKKLRLPFRVTALA

SEQ ID NO: 152176 - protein, 144 aa, Oryza sativa
  unsure (1)..(144): unsure at all Xaa locations
  Clone ID: PAT_MRT4530_52253C.1.pep
RRHRPPSPSPPPSPPSPPPPPCPPSPSLPPLPPTPRPRPPPPSLSPRPPPPSLLGPPFGPPLPPHRRPPPRPPPARRRPARPASPPTGAXPPPSPPPPPRTPPSPSPPPPPPRPLPPPSPVPPPPTXRRPPPSPVPPPPSPTGH

SEQ ID NO: 152177 - protein, 162 aa, Oryza sativa
  Clone ID: PAT_MRT4530_52254C.1.pep
MVSRTARLIAVGGAVFGVALLQGLPHGPAVQLVSLPARAGLHAARRRRRRVLFGKDGDRVTENVASEGILSPAGDSYDHRSLIICPWQMLGAGAWRPLNLLQQHLLRGPGSRYPISIALQHANRSYSHIDQYINNLQPGGSISQDVSPPELSFAALCSVGRR

SEQ ID NO: 152178 - protein, 305 aa, Oryza sativa
  Clone ID: PAT_MRT4530_52255C.1.pep
MKRPSCRGSSMAIIHDTSDQQEDNMRSYMDGGGAAAYEEEEEEVEDDDGGGGGGGGGGGGGLGEKKRRLAAEQVRALERSFEADNKLDPERKARIARDLRLHPRQVAVWFQNRRARWKTKQIERDFAALRSRHDALRLECDALRRDKDALAAEIADLRDRVDGQMSVKLEAVAADEHQPPPPPPPPPLAYNSKVVDGSTDSDSSAVFNEEASPYSGAAIDHHHHQTPASYDTAGFTSFFAPSTTLTSSLSFPSMFHASSHFDGHQELLVGGGGAGAVADADLGGAGFFAGDEHAGGLSWYGAEGW

SEQ ID NO: 152179 - protein, 48 aa, Oryza sativa
  Clone ID: PAT_MRT4530_52256C.1.pep
FFFFFFIPIFFICITYITIPYRFLLIHTFQDITIFNTTYYHLDTSSTH

SEQ ID NO: 152180 - protein, 74 aa, Oryza sativa
  Clone ID: PAT_MRT4530_52257C.1.pep
WRTPATRRDHDDRERRMPGDTGRGRRQNDEDDGDRRRDNNGGRRQDPREPGRRPRNRTPEPSDPSSSSSSSSSS

SEQ ID NO: 152181 - protein, 97 aa, Oryza sativa
  Clone ID: PAT_MRT4530_52258C.1.pep
LIRNTFRIRHWDANFLHSTPLRPPTSVLVVVRPFAAACVPVHPPVPPRSCPSASAAHPRPRPSAGTSDDSCISPRPSAAAATACSTRPLRANTRHAA

SEQ ID NO: 152182 - protein, 151 aa, Oryza sativa
  unsure (1)..(151): unsure at all Xaa locations
  Clone ID: PAT_MRT4530_52259C.1.pep
PLRGDCGGGPAPFVSGLEFTTFGVKEELACLQVDSRGSPAKAKVVADRGELGGPFKGASERRRRPTATGGEKERSGIRRREVDPIRDRIHEFPNRIRRRFQKRKGRGDLGDHFPSIDLAGEGKTRPNLEGDGGGLXLGFRAAAAARGRRIR

SEQ ID NO: 152183 - protein, 188 aa, Oryza sativa
  Clone ID: PAT_MRT4530_5225C.1.pep
CRRGGEGSRRGGTPPGRPWSGASSPRYSPPSSSPASSRSCSGSSSAPSPSSTPSPAPPCATSTSRRATAARAAAPPPSTPPSTSTSRRATAARAAAAPPSTPPSTSPSPSTTPTAASPCATKTASRSACSTAAPSWSSPPATSCRGSTSPTATRRRCRCAPWRARRRSRSRSRTWSPGSWSTTSPPAS

SEQ ID NO: 152184 - protein, 93 aa, Oryza sativa
  Clone ID: PAT_MRT4530_52260C.1.pep
MTVVTVGMVGNTLQPPLGSHLSRPGEPWIKRSCGRFGRTTRFSRTWGRPNLAQFRLAAFSVVLLLRLVNFGPVCRVNSEFLAHSYIRLVLDIV

SEQ ID NO: 152185 - protein, 99 aa, Oryza sativa
  Clone ID: PAT_MRT4530_52261C.1.pep
IGNGAGPPPQSPRRGHRATPSTSRLGGGNLQEAIIEPTQPGRSDRSVVAGQTVHGLVRPPSARSDRLRLWQLCIATKNQTSATDQWGRSDRPYHAGQTG

SEQ ID NO: 152186 - protein, 498 aa, Oryza sativa
  Clone ID: PAT_MRT4530_52262C.1.pep
MARHKSSPPAIRRRGVGMLRWAVRVASSIVLWTALLHLSSLLGLPRPPLLAARPSCLGGGGGSNSSASSAVTVAAADEVGRLAPPAVPRRTSDTLTLCQNLRSSHVGTWNLEAICDMVTVARYMNLTMVVPELDKQSFWADPSDFGDIFDVNHFINSLQDEVKIIRELPQKFSRKVPFSMQPISWSSEKYYLRQILPLVRKHKVVRFSRTDSRLANNGLPLKLQKLRCRVNYNALQFAPSIEALGKKMISALRKTGSFIVLHLRYEMDMLAFSGCTHGCSDEETAELTRMRYAYPWWKEKEIDSEKKRLEGLCPLTPGETTLLLKALGFPRDTRIYIASGEIYGGEKRLTELKTEFPNIIRKEMLLSADELRPFQKHSTQMAALDYLVSIASDVFIPSNDGNMAKVVEGHRRFMGFHKTIQLDRKKLVELIDLLEDQELSWDEFSTAVKELHEGRMSEPTRRKAIAGQPKEEDYFYANPHECLGAARKRREKLKHTEI

SEQ ID NO: 152187 - protein, 80 aa, Oryza sativa
  Clone ID: PAT_MRT4530_52263C.1.pep
ADDGEGGLTTRDVWKCRVAGRRRAGERVYPGMLASSYSAQIVLHIYSSPFFVMCAWMDGCKSEVEAMQLNILAATRNIWC

SEQ ID NO: 152188 - protein, 166 aa, Oryza sativa
  Clone ID: PAT_MRT4530_52264C.1.pep
VSAKEQLATAAVLAALDDAIHDGVDILSLSLGVDENSFGALHAVQNGITVVYAGGNRGPRPQVLYNTAPWVITVAASKIDRSFPTAITLTAQPAKGGARPWGRKPLPPSAGRVGRPGKGAVRRRPKSVHNAFTAREAGKMVLSIDNSGSRKRKVTAYRYFVRKPSA

SEQ ID NO: 152189 - protein, 544 aa, Oryza sativa
  Clone ID: PAT_MRT4530_52265C.1.pep
MAAAAASSTPLFSPCCAAATAKLGAACPSSYGSRRRPCTRRGRLSVVAVQTGPQKPSPSSSSQAGTESETLQNLLKREYKYGFVSDFESFSIPKGLSEATVRRISELKAEPAWMLDFRLAAYRRFLTMVQPTWSDNVYEPVDLQSICYYSAPKTKPKLNSLDEVDPELLNTFDRLGIPLSEQKRLANVAVDAVIDSTSIATTHREELMKKGVIFCSISEAIREYPDLVKRYLGSVVPPADNYYAALNSAVFSDGSFCYVPKDTVCPMEISTYFRINDKETGQFERTLIVADERSTVSYLEGCTAPAYDSNQLHAAVVELVCEEQAEIKYSTVQNWYSGDEEGKGGIYNFVTKRGRCKGRGSKISWTQVETGSAITWKYPSVELLGDDTVGEFYSVALTKDYQQADTGTKMIHKGKNSRSRIISKGISAGKSRNCYRGLVQINSGAENAYNSSQCDSLLIGDNAAANTYPTIQVGCISSRVEHEASTSKIGEDQLFYFQQRGIDHEKAVAAMIGGFCRAVFENLPYEFAHEMDALMNLKLEGSVG

SEQ ID NO: 152190 - protein, 106 aa, Oryza sativa
  Clone ID: PAT_MRT4530_52266C.1.pep
MRQKVRASAVSPPPAKWAPQRWARRQRQRWGLGAVAVAAEVEARPGTMELDSEPWLAPAPHLPFSACRDGLGDGEHTLREEHATVGDLGALSRERVDDERHQYKQK

SEQ ID NO: 152191 - protein, 28 aa, Oryza sativa
  Clone ID: PAT_MRT4530_52267C.1.pep
YNYPIVISPPEKRLSRSPPCPPVDRSRK

SEQ ID NO: 152192 - protein, 124 aa, Oryza sativa
  unsure (1)..(124): unsure at all Xaa locations
  Clone ID: PAT_MRT4530_52268C.1.pep
DDGIAPAKRHQLAPXLKKLDSPAYQRTRDHLPTKHRKESKELLDMNVEQEGWAWAITKRLITLVGXTRTDELHDASYVNRVKRLTRSEKRLKLKXDIEAQHAALHATELTELCSRGQGQHTNTL

SEQ ID NO: 152193 - protein, 413 aa, Oryza sativa
  Clone ID: PAT_MRT4530_52269C.1.pep
MAFAARRSLASRLSHHLTRRLHPATAPHLLASHSDDDPSPPPELPPFPHSPSPRHPRAGQALDRHLLPFSLHHLAGLRRRGFSSAAGEVDAAAGVLADAAAAAEAVPAPFPGEVAAAAADSFFPVAALQHVIDYIHTFTGLNWWACIALATVLIRSATVPLLVNQLKATQKLNAIRPEMEAIKEEMNAMDPKSAKEGKAKMTALFQKHGVSPFTPLKGLLIQGPIFMSFFFAIRNMIDKVPSMKGGGSLWFTDLTTPDPLYILPVLTALIFLVTVELNLQEGMEGNPMARKMKNFSRGMAVLTVPFTMSFAKGIFCYWITSNLFTLTYGFVIRRPAVRKFCNLPALEAQSASAKKQMFNLFGGSKALTTAESPVAITGGPQSSLEQPDAAALGYRVKNPEKKAKSRGKSRRRR

SEQ ID NO: 152194 - protein, 91 aa, Oryza sativa
  Clone ID: PAT_MRT4530_5226C.1.pep
MAMLTTGRRRCTGTSIVTREWAQPPPLLLAPQSVPAVTQALSAAGTCQQGAITLTQQSQGSSSTGCRRMYDCEDKGVGDSDLRHLISQVYY

SEQ ID NO: 152195 - protein, 46 aa, Oryza sativa
  Clone ID: PAT_MRT4530_52270C.1.pep
ILNILQNGSFVRSFLCYREEQILFILHKYCSYLHEARKPYINSFNM

SEQ ID NO: 152196 - protein, 194 aa, Oryza sativa
  Clone ID: PAT_MRT4530_52271C.1.pep
MAGDYDSVIICLGARASSLPELTNKLPLRTCRGVIAEFQLPSDTIETYGSQSPSILSDAWLAFQGPRTVSIGSTWQWKSENYSSSVSDDEALNAMEELLPKASAVYPGITKWKFVQARAGIRAMPPLTANGSLPLLGCLNDVIGKRSNCSFWLVGGLGARGLLFHGLAGKLTAKAVISCDENLIPPEFTCWKEP

SEQ ID NO: 152197 - protein, 38 aa, Oryza sativa
  Clone ID: PAT_MRT4530_52272C.1.pep
ALSISIFQRSGTKEVRFSDGSTEQGFPNRLGRGYRVPA

SEQ ID NO: 152198 - protein, 167 aa, Oryza sativa
  unsure (1)..(167): unsure at all Xaa locations
  Clone ID: PAT_MRT4530_52273C.1.pep
NYSRIIAQLLLIFSKEKAVLTSSRGRGGAGKQAPPVSDTRASIHRGPGPPRRSTAGPREPTARIGPKPIRWPRGGAAGARARHETGSAEPWCGAACGLRRQQPAAPNGGEXAEDGGAHGQWRCTRKGRGVGGGAHRACGRRRPGGGRGRAGRGEGGDAAGASRRQLG

SEQ ID NO: 152199 - protein, 262 aa, Oryza sativa
  Clone ID: PAT_MRT4530_52274C.1.pep
MSGSRLVTTAPSTLSLRISTGPLPTSESFSASPIPSPLPPLPTSFAVVREDIIFRPDSKASAAPRAAIADWIHLHLNHLHRAAAAATEEVIAWTRTPPLPLGSPASYETTFAGTAFSLPRTGHQRLRRRSPQHPPSPKESCRRRLADPPPHCLPTPPLLRARCGSANAARQLARLRTSGPPPQPRSARPATAAHGPVTFHATRFWGPEPQTRYSPQPRRGLRRKAPLSPSSLPLGTPAACSGGGKARRQGSEKETRKRCEAR

SEQ ID NO: 152200 - protein, 138 aa, Oryza sativa
  Clone ID: PAT_MRT4530_52275C.1.pep
FFFFFFFFFFFFFFFFFFFFFFFFFLKNQKERGVKSTELGGASKKKKKKKKNGLGEKGGKKSRGEKKKNCLGRGSKGGNYVGGQKRGNRLFKGFLKIGPPKIGYGKFRGGELILFWHRFGELESREIPDGTRGGNHFS

SEQ ID NO: 152201 - protein, 99 aa, Oryza sativa
  Clone ID: PAT_MRT4530_52276C.1.pep
PPRGRPTRPPLSHPRSNRPGGGDGEAASRRLRLPRSSARHPRASKLRRHMHAELPRDLDTPLLLSPSRSCAPILFWSTTPRGGPLLQLLHVVPWLISCH

SEQ ID NO: 152202 - protein, 265 aa, Oryza sativa
  Clone ID: PAT_MRT4530_52277C.1.pep
MEKIRLKYDRFNLADKSGESSWSDDLSVNVRKGKDEKNESEAFVISQKKINMIKQMTSKYKIGCSAAVLVWYEQVVQCRAHEQQTAEAAWLVVTAPETERAANYNQQFSTRMGRTVVQCSTPCGGLNRSMATINRETTRRGARVDGGGSDWRSSRWVGHSGRVARTFRCWRRSSRAVSGEGKQHVPVWGGGGEGSCGGCAFQVGHGFLVQAGRGAEEIDSNMWSQEKEIIGIAESLVHGEPGGDLSGLLDGRSARNQCPRDVGLG

SEQ ID NO: 152203 - protein, 57 aa, Oryza sativa
  Clone ID: PAT_MRT4530_52278C.1.pep
PLDVLTDGDRRIPLVLEGARSALVVAPLVGNCRRLPRSVPRVRVRHPLDWILHWTIT

SEQ ID NO: 152204 - protein, 79 aa, Oryza sativa
  Clone ID: PAT_MRT4530_52279C.1.pep
FFFFLKGHDIDAARGETSCMFAAASRILQAAGNTKQGRLCLQGVHGFAPVPSSHASAADPFQSISSRGRAARRLIHPAI

SEQ ID NO: 152205 - protein, 1414 aa, Oryza sativa
  unsure (1)..(1414): unsure at all Xaa locations
  Clone ID: PAT_MRT4530_5227C.1.pep
GHHRGCQDHDDPDNVAWVKLSVPKFIGKEDSDAYLNWDEQCDQIFRVHNLLSQRRVNLASVDFSSYALSWRNQMQENQYVLGHDPIETWDVMLXECFESSSYRRDLHSQLQVLRQGTHTVDACYREMELLLIHAQIREDDESKMARFSHGLNDEISDFVEMFPYNTLQDLFDQAWHTEMSIRQEXHNRSSNGRSNAAPWRRTQQTTTFVGARSQGASTRASPPAATAKPQPSSASSPAACIDSRQPATPTTTSLSRSHDIVCHKCHGRGHIAAESPSRRTMIVNETGELDSASDTEDDGLRDQELVNEQRIVLLFAQIMETILVSSXRRVLSVQVAQEEHGQRHNISHTRGTINNIVCHIIVDNGSCNNIVSLKLVKILGLRQRHHPAPYKLQWLNDYGALRVKTIVTVHFSISKYEDQVECDVVPKQACQLLLGRPWLYDHDVQISGRNNKHVLIYKDEHISLLPLTPQEIKPDDLXKTIARKMPKPNKTPQLQMTKLRGKEGLVMMARNGNIKEMSEPNAIFFVLLXKESLLSTNDLPSTLPSIVLYLLQTYENVFSDTVPPGLPPKRGIEHKIXLIPGAQLPXRPPYRTNPXETKEIQHQVRELLNKGFVKESRYPCVVLVLLVPKKYGSWRMCVDCRAINNITMHYRHPIPRLDDMLDELSGSTIFSKIDLRSGYHQIRMKEGDEWKTAFKXTKFSLYEWLVMTFDLTNAPXYTFMRLMNHVLRPFIVKFVVIYFDDILIYSKSIHEHVEHIKCVLAVLREEKLYANLGXAKCTFCTVKVVFLGFVVSGQGVEVDEEKIKAVREXLPPQNVSQVRSFLGLTGFYHQFVKDFXPINELTNKDVPFQWGEAQHKTFELLKDKLTSAPLLALPDFGKTFEIECDSTSVGIGGVLMEEGKHIAYFSEKLSGPTLNYSVYDKELYALVQSLEMWQHYLWSKEFVIHSVHESLKHLKGQLKLNRRHAKWSEFIXSFPYVVKYKKAKDNIVADALSRRHVLLSQLDAKILGLESIKELYAHDIYFSNPYAKSSDGKGWDKHDLHDGFLFXANKLYIPDCSVRLLLLQEAYIGGLMGHFFAKKIEHVLTDHFFRPKMRHDVERYVLHCATCHKAKSFLXPHSLYTPLPIPSITCEDISMDFVLGLPQTKRGRDSIFIVVDXFNKMTHFIPCHKSNNASHIAALFFXEIVHLHGVPRTIVSDRDTKFLSYFWKTLWGKLGTKLLFSTTCHPQTNGQIEVVNRTLGMLLQAVHKKNLKLWXECLPHVEFAYNNAIHSTTHLCPFEIVYGFKPNAPIDLLPLPLQRHLNFDASKQADYVKKIHEKTRTNFEKMTRLYEKRANKGRKNMLLESGDFVWVHLLNDRFPNQHNYKLQPRGDGPFKVLKRINDNAINDNAYKIDLPSIYSVSDTFNVSSLFVFLL

SEQ ID NO: 152206 - protein, 301 aa, Oryza sativa
  Clone ID: PAT_MRT4530_52280C.1.pep
MARTNAAPCLGTSTAADPSAQELQEPDALLSGELLSSTALKEPITASTSSSPQTVRRDGIDASTPSGSSPGSSILVRRPPGWYFVFYIRMDPGGRLHMYPDVGNGPYRSLPEVDDAINQHLHNLRIPEMGEELDRLPLIEIGGYEKDNRCLVQALVEKNDGKSGLKHPNNSDAYSGGHLDGCLPFGLNDSRSKYDGLNPEDEEAMLRSLYKKNVTAFSTKISNSLASQRQPLSKALLYYLLSVTGCFLQQQPQKTTEKRKEKGRDRRSHPDLSEAPNTLKKKTIWIACLSCFNFFSSHIHF

SEQ ID NO: 152207 - protein, 137 aa, Oryza sativa
  unsure (1)..(137): unsure at all Xaa locations
  Clone ID: PAT_MRT4530_52281C.1.pep
LKQDHGGSPTSLKLKGRGQDTSAESPRTSDALDTRHTCLAPLDLSKQVEKQRWHCFGQVGSRQAHHAPRGEHTGEILTVSDGARGNXIARLKGFLEDCVREPAGDNKTADKTRLIVDCLKRSPLYLADLEKTTNTNI

SEQ ID NO: 152208 - protein, 373 aa, Oryza sativa
  Clone ID: PAT_MRT4530_52282C.1.pep
MARIEAVIATKVVVAPLLGGGRGGRRRCLRGRRGRARQLQQQRSSAATASMGARPGGDGGGWQRGEKGWLAVVGRKQHEEKAAPGDGFACNANGFEENDRHSGGRAMWRASIGWTAAARARVSTSTQWRGERGCEAWTRSSDAHAGDVLGGGEVTIGHKASLEHVSSADGLDGDNVSPECRHRYKKEAYKGMPGHGFGARRGACDARGGRACDRRGARPGFGGSVQERNAAWHGSTRRGARNEEEQRGTTRWLGGLVRQPCPTRHFAEHVAGGVRAPPPFQSSSSLGEIAVVVAKSPPSSVVRCFSAASLVTGEFAASPSTRWCPPFASPRRRSPASMRVRAAAAGGDVIADVIVPISREPVVDRSISAVRFG

SEQ ID NO: 152209 - protein, 108 aa, Oryza sativa
  Clone ID: PAT_MRT4530_52283C.1.pep
HLAHPPSVWVSFLRVMHGVVNFFGRVAFLVEQNTQAFYLFITAMLQLFDRSGMLYGELARFVLRMLGIRTKSKKGKVQGPDTPAFEGPAQQFIEAPKGNNSWDNVWGN

SEQ ID NO: 152210 - protein, 394 aa, Oryza sativa
  Clone ID: PAT_MRT4530_52284C.1.pep
MPTRPWGEALAAAQRAFCLPLAGRVLAAAGTGNAAVSAPAVHVSLALAAGGARGATRRQVLQALGCGGGGRGGAADAANVASRVVKRVLRDRSTSGGPRLAFAGGVWADASRSLSPEFVGLAGNVYGSAAKKADFKNKPEDAPDQINSWVKDSTKGTVTTLLPAGTIDQNTGLVLGSALYFRGRWLDRDDLRRTTEQKFYCLDGTSVEVPFVEYDRTRLFAVHDNFKVIKLPYKQGKNERKFSMYIFLPDDHDGLFELTQKIFSEPMFLEQHLPTEKCHVGISVPNFKISFQIDVKDFLKDMGLELPFLREAEFSDMIKEDDSSGPLFLSDVLHKAVLEVDQKGIEETSVSMGLGKPLPAQHFKADHPFFFMIREEVSGTVIFMGHVLDPSSRT

SEQ ID NO: 152211 - protein, 60 aa, Oryza sativa
  Clone ID: PAT_MRT4530_52285C.1.pep
VVLFLPQGDRTTVQQFTCTRKEWVNTQKEKKSYKNSFMKDKNISTKVSTWKALQNNKFQE

SEQ ID NO: 152212 - protein, 245 aa, Oryza sativa
  Clone ID: PAT_MRT4530_52286C.1.pep
MPLLPPVRYYVPFEEADDRSHDLEDEEPYCPPPLSPPYSPAQSPPPPTSPAYHDDHADHTTNSCTFTSAGGAYSYTITSANVGDYFYLDDDADAMDEEQPDEPENRPDPLVVLQQAESLAECALQHYNGDAANEVKYELVAATATATASDFMDCWDAFYYHVNFFARAAAGADDQAAPRFFFAELRHRTAMLPTCLVSLDNDDEIQLDPQPLCCFDDVPFGVVIKHPKGWKMIDRDNTLISSPSV

SEQ ID NO: 152213 - protein, 129 aa, Oryza sativa
  Clone ID: PAT_MRT4530_52287C.1.pep
SPDLDSELSANRIGAEVLTAVSKRRSETAHVVNVSANRIGADLRDLSANGTGAEVAPYPSGPSRPQATPSSSSLLSAEKGRRPPLSLLPISQGGCANQTGAGMAHLSANASGAKVAHVSRRRYTERNGR

SEQ ID NO: 152214 - protein, 224 aa, Oryza sativa
  Clone ID: PAT_MRT4530_52288C.1.pep
MARALVRRALSLAAAASSPAKPSFSTVVAPLRSPMDDRLLRLLRSEINYISERRPPYPPPKAFKSFGVEDRPGEQWVRLRATRGAQDEEVKVDATMFDGAAAPPPDAPLFRRVESLERGPRLHLSLIVEVSRADRVLGFICSAWHDELVVRHVLTLRDADGSSTSSGGRDFVKLEARERESVRKFLQEREVDDELAEFLHDYMANKEKMELLRWLKTVESFVEK

SEQ ID NO: 152215 - protein, 85 aa, Oryza sativa
  Clone ID: PAT_MRT4530_52289C.1.pep
RVRIREVLDGVPWIPKNSFLRHFNLWLRDIDAGRTGKVFIGTLGYGIFSYDLNTGKLENLATEDGMQYGHPILPYFSAPVDAGSD

SEQ ID NO: 152216 - protein, 123 aa, Oryza sativa
  unsure (1)..(123): unsure at all Xaa locations
  Clone ID: PAT_MRT4530_5228C.1.pep
CISPPTHHRGFCSSSRQAASLALVHADVDDGKVLFVPWVERVNSXDFHHFLHLLEPFRLAAMEKPKERLAAWISSRGRGFAAATSAAPHLATPPPLSAVKLSSAPNHLPPMKVSVPSAKLSSP

SEQ ID NO: 152217 - protein, 66 aa, Oryza sativa
  Clone ID: PAT_MRT4530_52290C.1.pep
RVAAAAGARGVAVLRPLLLSTWTCCCKCGWQEAARKTSSQVSEPFDLPAEAPRNQRTSMEQSKERI

SEQ ID NO: 152218 - protein, 162 aa, Oryza sativa
  Clone ID: PAT_MRT4530_52291C.1.pep
PSLTKIDWQQHQKLKSWSSYPYTISAAAGGAEAALLGKGRYKAWALAAIALLALWSMFAASVTIRWSSGDLAAEFGDLPDPLIDDLDPLEMEDREKLVRRMWDVYTRTGVDRVRLPRFWQEAFEAAYEELAGDDTQASETAVSEIARMSVHRPELEQSSNKY

SEQ ID NO: 152219 - protein, 82 aa, Oryza sativa
  Clone ID: PAT_MRT4530_52292C.1.pep
PYQPVAGAAAHGRRVRRSGRPPQGVSCDPAPRPRDGPPQPRAPPARAAGAHTPRAPRRGQVPPFSSADSSRSGLSPRTPPPS

SEQ ID NO: 152220 - protein, 109 aa, Oryza sativa
  unsure (1)..(109): unsure at all Xaa locations
  Clone ID: PAT_MRT4530_52293C.1.pep
XCSYXQLFAGYGPFXPXFLWXXVXRYYHHWAXYAPYXGXXFVDXSRLCPXXLXVXSXAVALLGSXRCAXIKQLRXNTXYSAMTNLFDCPXXLFXIXDLVRACLILXXRL

SEQ ID NO: 152221 - protein, 67 aa, Oryza sativa
  Clone ID: PAT_MRT4530_52294C.1.pep
SFASYTSFVLISVKTSTCSASSVYTNISYKFFAVAPLFGYILILSPVLFFNLSAVLSVRELCCFHGN

SEQ ID NO: 152222 - protein, 54 aa, Oryza sativa
  Clone ID: PAT_MRT4530_52295C.1.pep
LIFLPQSWLKKTKWYLYLAFKPPSGLGMGLLSCWRNNQKKKNPIKKNKKKYSHS

SEQ ID NO: 152223 - protein, 644 aa, Oryza sativa
  unsure (1)..(644): unsure at all Xaa locations
  Clone ID: PAT_MRT4530_52296C.1.pep
MPPFHDYRDGGVLVMEPAASAALFGGVRSRKRARVTAVPPCGFVSAAAEAVEVVEEEGLTAAKRQKQQQQQREAPSLDALPDECLFEILRRVKGARARCASAAVSRRWLALLGGIRSSEIKREPAAAAVPDLNQVFVDEDEEEEDEFEVPLGGGCSSERCLEGREATDVGLMAVAVADALRGSLESLVIRGSHPTRGVTDAGISAAARGCPSLLSLALWHVPQVTDAGLAEIAAGCPSLARLDITGCPLITDKGLAAIAQGCPDLKVVTVEACPGVADEGLKAIGRCCAKLQSVNIKNCAHVGDQGVSGLVCSAAASLAKVRLQGLSITDASLSVIGYYGKAITDLTLARLPAVGERGFWVMANALGLQKLRFMSVSSCPGVTDLALASIAKFCPSLKQLNLKKCGQVSDGRLKDFAESAKVLESLQIEECNKVTLMGILAFLLNCSPKFKALSLVKCNGIKDICSAPAQLPLCKSLRSLTIKDCPGFTDASLAVVGMICPQLENVDLSGLGAVTDNGLLPLIKSSESGLVHVDLNGCENLTDATVSALVKAHGSSLARLSLEGCSRITDASLFAISEGCTDLAELDLSNCMVSDYGVAVLASAEXLKLRVLSFSGCLKVTHKRCVCVCVSACVCKGGCLLWCL

SEQ ID NO: 152224 - protein, 625 aa, Oryza sativa
  Clone ID: PAT_MRT4530_52297C.1.pep
MAAAAAEAFGTAAATSTPPVQATRQDVQAAIAKAVELRALHAALLQRGGGGVGGGASASRSPAIIRLPPAASPALSRAGAAAAAVATVDEDYPVFTPLIPDAPTITLQLIGHAYDEEQMAGLSHICQDNRSRSENWSGIALGGGGSGDDDDDAAFSDYDNLNAFSSSNSELRFPSSTDHHRRHKVHPAFLHSAPSADRFLASAGRATMAGTAELLKAPSTCGSAFRPATIGRDHGIDVGALKFLASSGAPLSAAAAAAQPRPAKHRRAQILSWLFPRAKKKAKPMSPSAIERENMSQLLKEWGLLSLDSLRRELADANAHRDAALQEAAEMRSSLGELTTKLAGLEAYCSELKKALRLATSSTSNAQPSSSSMSRRSTRSIGASQELPGPVSHEAMVEGFLQIASEARLSVKQFCKALIQQVEEPDNGLIEKLNILLQPYQLMITDNKHCSKLVLYHLEALMNQAMYQDFENCTFQKNGSPRCLDPKQGSQESFASFVALRNLSWNEVLRKGTKYYSEDFSRFCDQKMSCIVSTLKNWSRPWPEQLLQCFFVAAKCVWLLHLLAFSFTPALTIMRVEESRVFDQMYMEDILPDKQQLHNPCQVKIMVMPGFYVQYRVLKCRVLTT

SEQ ID NO: 152225 - protein, 103 aa, Oryza sativa
  Clone ID: PAT_MRT4530_52298C.1.pep
LEGCSRITDASLFAISEGCTDLAELDLSNCMVSDYGVAVLASARQLKLRVLSLSGCLKVTQKSVPFLGSMSASLEGLNLQFNFIGNHNIASLEKQLWWCDILA

SEQ ID NO: 152226 - protein, 88 aa, Oryza sativa
  Clone ID: PAT_MRT4530_52299C.1.pep
WRRPGKQCHACGGAAKILCPNDLFGCWSYVAYYDVAGHQRACPHAPCSCSESRCDFLGSPPMLLAHLVADMWLVSIWNGVKWTGKRLL

SEQ ID NO: 152227 - protein, 126 aa, Oryza sativa
  Clone ID: PAT_MRT4530_5229C.1.pep
DAWRRVADAWASPSRLVTFGKDCLLMVVLRHRTQLIGSIANYIMAVLKKAERGRMPNDMPQMQDLTLTPSSSPTCREKLLVIPCPCTVDVSGLNAYRNAQGSKPEACKNNRGEEHGALHCLDFQHK

SEQ ID NO: 152228 - protein, 315 aa, Oryza sativa
  Clone ID: PAT_MRT4530_522C.1.pep
MANKGGEPAARAAVRHGGGPVAFKDAVDVDATPVRPPTELAAAVSALPAGVSYGQPMRCYGGTWVFESWAQGVVAMHRGGLVPRAGDVLLASLPKSGTTWLKALALFAAGRDALLDELPSPRLMCTHMPLSLLPPAVADGNSNTKIIYICRDQKDRLVSIWHFRKRNVPDLLLQEVYESICDGTGFAGPVWDHLLGYWRASKIDLGRVLFLKYEEVLRDPVNTVRELAQFVGQPFSDTEEEAGIVAEIVKLCSLESLRSQKANKEGIQGVYIKFSHDSYFRKGVEGDWRNHMTPKMGEHLDSIMREKFDGSGLTI

SEQ ID NO: 152229 - protein, 75 aa, Oryza sativa
  Clone ID: PAT_MRT4530_52300C.1.pep
RVSKLPISARLVFSAWSVIGQPRESPSHCSLYSKSPGYVSLIDAFALCTRCVLGTPARHMKSMVCLAYCQSKESG

SEQ ID NO: 152230 - protein, 249 aa, Oryza sativa
  unsure (1)..(249): unsure at all Xaa locations
  Clone ID: PAT_MRT4530_52301C.1.pep
ARTVRRTGSTTSRAAPRRRRGWCRPTANSCHGDXPGKQCHACGGAAKILCPNDLFGCWSYVAYYDVAGHQRACPHAPCSCSESRCDFLGSPPMLLAHLVADMWLVSIWNGSIKMKLYNVMPTDYMLFLLLLYKTYAATPAALNTILGRWGKKASPEWNISGELCSGFAADKTDWDNYRDINPFINVGSAWGSGGCRTDREVGANAIARRSGRGITRCVSLKKNATVGAPTTMVNVFRIIIEILIWLLLG

SEQ ID NO: 152231 - protein, 55 aa, Oryza sativa
  Clone ID: PAT_MRT4530_52302C.1.pep
STVCWVLGGVSSEGICCSVQLSLPMFIRAFTLLYFIVLFHVVLSDLLLARLIFMI

SEQ ID NO: 152232 - protein, 84 aa, Oryza sativa
  Clone ID: PAT_MRT4530_52303C.1.pep
PSRRGGWSSRALGGDGGCRESICGDGPGVGLGIRRCPDWSEIMVDTKARVQCTWKVKVPYGIGCGVEFGRSPIWWNWLCKDCFL

SEQ ID NO: 152233 - protein, 548 aa, Oryza sativa
  Clone ID: PAT_MRT4530_52304C.1.pep
MMATAAMAASSCDRGDTRKKLQITVVFLVRTLLLACIIARGVLALIRVAFRVAVVAPARSLVAVAGAAFSAVNARCAWCLEQAALGRSCTGTVLGDAVVGAMASSWRLLLQGITSLVFLCARGADEYVRPPPSPLVLTAHGKPASHPQQVHISMVGEKNMRISWVTDDLNAPSVVEYGTSPGKYTASATGDHTTYRYFLYKSGAIHHATIGPLEASTTYHYRCGKAGDEFTLRTPPARLPVEFVVVGDLGQTKWTASTLSHIGGGGGDYDVLLLPGDLSYADTQQPLWDTFGRLVQPLASARPWMVTEGNHEIEALPVVGIAPFAAYHARPRMPREESGSPSNLYYSFDAAGGAAHVVMLGSYAEFEEGSPQRAWLERDLAGVDRRRTPWLLALVHAPWYNTNEAHQGEGERMRRAMESLLYEARVDVVFAGHVHAYERFTRIYDNEADSRGPMYITIGDGGNREGLALKFIKGHKSAHLSEFREASFGHGRLRVLNETSAVWTWHRNDDQFATVRDEVWLHSLAAGEPAATVASAAGGGGGHPADEL

SEQ ID NO: 152234 - protein, 478 aa, Oryza sativa
  Clone ID: PAT_MRT4530_52305C.1.pep
MSVQEYLEKHLLSRKIEEAVNAAVRAKAPDPVLFISNHMRRAAPAVITSVRARQILDGRGEPAVEVSLHTNKAVHRASAAAADAPEGAAADAVRDAEKRKLLARAVADAVRVINDKVSEALVGMDPQQQSQIDQAIMDLDKAHHKAEIGVNSMLAVSIAACKAGAAEKEVPLYKHIAELVGKSATTLPIPAITVINGGTHAGNSLPIQEIMILPVGAKNFEEAMQMGSETYHHLKDIILEKYGSNSCNIGDDGGFAPNISSITEGLDLVIEAINRAGYNGRIKLAIDVAATDFCMGNKYDMEFKFAEKSGQGFKTADDLIEIYSQLCSEYPLVSIEQPFDKDDWEHSKKFTTLELCQVVGDDLLMSDPERIKRAVNEYTCNALVLKANQVGTVTEAIEVVRQAKDAHWGVMVSHRSGDTDDSFIADLAVGAAAGQIKAGAPCRGECLSKYNQLLRIEEELGSDGVYAGENWRTTASTS

SEQ ID NO: 152235 - protein, 244 aa, Oryza sativa
  Clone ID: PAT_MRT4530_52306C.1.pep
MAAATGSGREKPCLPPSTIAAKLLFHRLLSPSREPLRTPLPSPNSGRKSPTASHQSLLPPRRHRCRWLQTRSVMVHLHPNVDLVQEIRLSSSVLLLIVVSIVLPMLSPLLFVKYTYPVSRENGSGPSNPGRLVTATPAAGATVAADEATQQTKQQARGSSHHHHLLQSRRLPIGDDLPQSGGDLGGDKAVRQPRSPAEVDKLTVAIGGRGGGGRTTSKPMMTGPDNDGEGDSQSETISPRAAAT

SEQ ID NO: 152236 - protein, 82 aa, Oryza sativa
  Clone ID: PAT_MRT4530_52307C.1.pep
SIELRAPPTHALVLEDFNGDGLTDIILVTSGGVYGFVQTRHPGALFFSTLVGCLIVVIGVIFVSLHLNSSNSGKPRASTDYR

SEQ ID NO: 152237 - protein, 50 aa, Oryza sativa
  Clone ID: PAT_MRT4530_52308C.1.pep
GSTLKTQISPPLTFTMEPQPKKNVQTKKSLQIILTLDNVLFKHIHHLIMK

SEQ ID NO: 152238 - protein, 387 aa, Oryza sativa
  Clone ID: PAT_MRT4530_52309C.1.pep
QGFLTSGIWGILNAQARDYNDNAGFSPQIKLLKLLKLNNSRQSIETLSHWCVFHYRHCRQVVETWESDFHSAPRERRVSLLYLANDIVQNSKKDSGRYVNEFWRVIPAALNDVFVNGDDFGRNVVQRLVDIWEERNIFGSLNNSRQTPRERRVSLLYLANDIVQNSKKDSGRYVNEFWRVIPAALNDVFVNGDDFGRNVVQRLCFQRLLGGMISREQLWPLPSTWGFADVVLAEGNKKRAKVLLDGNMQGYNYAMACSSRTTTPLQLTSSILFFSLATCMHNHDCKCVHNHDCKCVNKPPKESKIRLSPQVWTGKAVNGGVLKSDTIEVDAPGFSRISNRSSYRKCGRQRRYCRRWAKKNNCGQLINQLISLVNASLGATTTPCSLQ

SEQ ID NO: 152239 - protein, 66 aa, Oryza sativa
  Clone ID: PAT_MRT4530_5230C.1.pep
MKSRRQPMPLHDQIMFMFGKAKKGTPGGRGNGRCPEHRSGLFVQGDYVIFNPGSPRVRGYQVLKDL

SEQ ID NO: 152240 - protein, 244 aa, Oryza sativa
  Clone ID: PAT_MRT4530_52310C.1.pep
RSPLSSLASRSRIPPFSFCPPPPQPRNPLLNPRIFSPPNAGDGAVARFLTSGIWGILNAQARLHNMNAGFSPQILAQKLLKLNNSRQTPRERRVSLLYLANDIVQNSKKDSGKYVNEFWRVIPAALNDVFVNGDDFGRNVCFQRLLGGMISREQLWPLPSTWGFADVVLAEGNKKRAKVLLDGNMQGYNYAMACSLRTTTPLQLTSSILVFSFATCMHNHECKCGHNNEWKWGNQPPKKSRGGY

SEQ ID NO: 152241 - protein, 752 aa, Oryza sativa
  Clone ID: PAT_MRT4530_52311C.1.pep
MAATVAAASSRKRGFSVADILDDPFPLPSHHLAKRGRCSSSAASAADLGVSLEFDPIEVLQLIFPHEDPQLLKSFFEASGNVLDAAIRGFKHRLQSHTDTEITEAASGDTGNEVVSPKVESDLSAMNIPSNGSEWAELVVKEMSSALDLVDAKNRAFRLLDLFEKSTAACISPVEMRKMREEHKILKLMLGGLLEQNGVLKRAFLKQHNRLNDYEKKMSQERSQIIDTYEKEIKALQFATTAKLKQRNMEQYLFLATLLILSLAFVKLRPRNNGENPPPGPWQLPVIGSLHHLAGALPHRALRDLATRHGELMLLRLGELPVVVASSPAAAREVMRTHDAAFATRPQTATLRALTRDGLGVAFAPQGEHWRCLRKLCVTELLGARRVRCLRRAREAEAAALVASLSTTTPEPVNVSSLVARYVTDAVVRAVVGDRISDRDAFLERLEEGVKVAAGFTLADVFPSSRLARALSGTARRAEAHSREMTRLMDGVIEEHRQRRAATGWRDEEDEDLLDVLLRIQKDGGLQIPLDMGTIRAIIIDLFSAGSETTGTTLQWAMAELMRNPAALRKAQAEVRGVLAGHSHVTEDALPDLHYLHLVIKETLRLHVAVPLLLPRECQEPRLRVLGYDVPERAMVLVNAWAICRDTAVWGPDAEEFRPERFDGGAVDFKGTDFEFVPFGAGRRMCPGVAFAVAIMELGLASLLFHFDWELAGGTAAGELDMAEGLGITARRKSDLWLHATVSVPVPNTETS

SEQ ID NO: 152242 - protein, 783 aa, Oryza sativa
  Clone ID: PAT_MRT4530_52312C.1.pep
MSRGGGGCCPSMDLMRSEAMQLVQVIIPAESAHLAVSYLGDLGLLQFKDLNADKSPFQRTYASQIKRCGEMARKLRFFREQMSKAAIATSTQFSGTSLEIDDLEVKLGELEVELTEVNANNDKLQRTYNELVEYNIVLQKEMVTDPSKQVKLGSLSGLVPKEKAMAFERILFRATRGNMFLRQEPVDETVTDPLSGEKVIKNAFVIFYSGERAKSKIVKICDAFGANRYPFPEDLGKQLQTIQEVSGKISELKATIEIGLAHRDSILKNISSEFEQWNTLVKKEKAIYHTLNMLSLDVTKKCLVAEGWSPVFATSQIQDALQRATVDSKSQVGSIFQVLNTQESPPTFFQTNKFTSAFQEIVDAYGIAKYQEANPGVFTIVTFPFLFAIMFGDWGHGICLLLATLYLIIREKKLASQKLDDIMDMMFGGRYVILMMSLFSIYTGLIYNEFFSVPFELFGKSAYACRDPSCGDATTEGLIKVRPAYSFGVDPVWHGSRSELPFLNSLKMKLSILIGVAQMNLGIMMSYFNAKFFRNAINVWYQFIPQLIFLNSLFGYLSLLIIIKWCTGSKADLYHVMIYMFLSPTDDLGENELFPGQKLVQLVLLLLALVSVPWMLIPKPFFLKKQHEQRHQGQQYTMLQATDESVTELEEHQDDPHHHEEFEFSEVFVHQLIHTIEFVLGAVSNTASYLRLWALSLAHSELSTVFYEKVLVLSWGYNNIFILIIGAVIFLFATIGVLLVMETLSAFLHALRLHWVEFQNKFYEGDGYKFVPFAFASIIEEED

SEQ ID NO: 152243 - protein, 681 aa, Oryza sativa
  Clone ID: PAT_MRT4530_52313C.1.pep
MAAATPASGGGGGGYSCETAEQTREWMEAISAFLHLHRPLLEAHVVNFFKEHWPSSLRDFVLTAKSLVLPREQKSPRSLLPDLHVASINTVLAQGMNSKKKHEVGCLMQIETLAGLVHAITKSCGAKTVIDVGSGQGYLAQALSFEYQLPVVAIDASSHHASVTNTRAERIKKYYTAKCVGKQQLRVPRTVTCHVLSSDTLAAVTLEACQDDHAEHVPESKNFNESSPQIEKPNDSIPPLVLAGLHACGDLSVNMLRLFVSCEQVKALISIGCCYNLLSEECHEDTNTCPGFPMSKAAKLSNLVLRKSTRDLGCQTFYFGGGPYLKSAERWRSLTKDIALQNFDIHAFRAAFQMFLEKHFPEVSRSSPSIGRQGKALRRQRLRKVMESPMAMAETDALSYSTQKEQIMTKDDPLPTGPNNFKEVHVDFLPELSTGFVDSAVSGAAVVPDDIYLDKSQKFTLFKDFTVSGLGRLGCDFVENVSLLEIWKDVQPFTEFIGPFWCLRVALGPLVETYILLDRICSQMAARTTVPVLPMMDQHQGGHSEPSRLFPSPNPYPDLYTRRCHAKPQAKSDGTGGNRRAVLGRAKEGEKWGEDCRRNISSRRGTGRDGDWGRVCVTVSGQLPPRLVCSTSYGGGVYWNVITSDSERISGGVPRRRRLDSWHKILHSLAWSSGVKMSAMG

SEQ ID NO: 152244 - protein, 41 aa, Oryza sativa
  Clone ID: PAT_MRT4530_52314C.1.pep
HRYCSVYTMRHHMVLIGSCCPTHCHSLESSHFSLVITTKSH

SEQ ID NO: 152245 - protein, 83 aa, Oryza sativa
  unsure (1)..(83): unsure at all Xaa locations
  Clone ID: PAT_MRT4530_52315C.1.pep
MSFVISLTLLIIIEDAITDNNLISSWFGMVYSWFGDRTVQPGWLFRMVGPMQQGMLYSVGLILFNYHXLFYNSQMFAKCCFCK

SEQ ID NO: 152246 - protein, 108 aa, Oryza sativa
  unsure (1)..(108): unsure at all Xaa locations
  Clone ID: PAT_MRT4530_52316C.1.pep
MQLNPKARTCQNKTKAKRXWRCAEIVLNVTLSLRGNHHEAHXLNPISHTKSYYRNRLYWLTPSDSNSVDPXVSVGYSRFFLCFRNDLRPGLHFDLTFFSDADTTKFGR

SEQ ID NO: 152247 - protein, 79 aa, Oryza sativa
  Clone ID: PAT_MRT4530_52317C.1.pep
TKELATEDPSSAAIPPYLSYNLSEIYIYIYKYIYVYYIVWTTIILQFHHAHHDFKSTACDRRRSSFWDLDLCGFLWLCC

SEQ ID NO: 152248 - protein, 101 aa, Oryza sativa
  Clone ID: PAT_MRT4530_52318C.1.pep
MAACWVNQTSMLANEWGMLIVVLCRYAAHLDLALLDGGRRPKVSGLPVLLLWAAYQLGGWAGTHTVRRVSPQGDEDQVARPLDGVHAHGVYEEQMPGFFQQ

SEQ ID NO: 152249 - protein, 44 aa, Oryza sativa
  unsure (1)..(44): unsure at all Xaa locations
  Clone ID: PAT_MRT4530_52319C.1.pep
LPSVQQRGLKXCHCLNRRRPLPSTDTVSSSSSMVCRRSVAGMVD

SEQ ID NO: 152250 - protein, 44 aa, Oryza sativa
  Clone ID: PAT_MRT4530_5231C.1.pep
LWSPFLLIGYLAQSNFKFTPLFAFSPGEARIIHIGYLDTQARSS

SEQ ID NO: 152251 - protein, 190 aa, Oryza sativa
  Clone ID: PAT_MRT4530_52320C.1.pep
MIDVIIPAPRCGRFRRGVSCKLQVQTCSFSGGWAGVRGEHRHISTFFLVSDYAVNNDIAVRCDILASMRTKCFGENYLVERGKIANCLEYYRNGYHCRVRFLLFAFLSRALASALLSRFPFTSSSNDKRLRPLANNLERRGLGGDDELLVAQQQQHKAVAALAAPNVVAAANDHRWPLHERACSLVVTVT

SEQ ID NO: 152252 - protein, 147 aa, Oryza sativa
  Clone ID: PAT_MRT4530_52321C.1.pep
MEPCQGGHGATTRVVHEDASGRFANGMLEFCGAWDTISFLGKGLLPDGQLVVGHWCDGRVLMPTIFPCLVTGVISHRDRQSGDYLIGAQAATSASVGLNAAFSGSDARGGDGEHHCSQVRMLPLGGSIKRHAMRAVSHRMTWTVDED

SEQ ID NO: 152253 - protein, 107 aa, Oryza sativa
  Clone ID: PAT_MRT4530_52322C.1.pep
MGIELVHEYQTFVPSFSSLVLCQALTLGGRIHRSPTVGGASTAEEEKGGSGEEASDKNDEEEERLEELDGEASRRRPSSAGAGGDGTAIVVVVVAVAASMLMGGSHI

SEQ ID NO: 152254 - protein, 322 aa, Oryza sativa
  Clone ID: PAT_MRT4530_52323C.1.pep
MRRPGARCREGHAHFNGNHIDGQYKNFFKVMIGRFRERMIIPNEFLQYFRGKIPRTIKLQLRDGCTYDVQVTKNLGKISLQSGWKAFVTAHDLQMGDFLVFSYDGISKLKVLIFGPSGCEKVHSRSTLKNATHCGEKWEEPLHISSNSHDLPVKSPQNVSKSEKQWDSSEQENDTANIEEVALQGDDLQGHPVLNCILPKHTRLTDMQKQQLESKVGAIHSEIPIYGCILRKSRVHGKSQTVDICREYADVYLPFKELNMTLQRHGKNWEVLCRTKDTRTKRLSTGWSRFAQENNLQVGDICLFELLKKKEYSMNVHIIPKK

SEQ ID NO: 152255 - protein, 89 aa, Oryza sativa
  unsure (1)..(89): unsure at all Xaa locations
  Clone ID: PAT_MRT4530_52324C.1.pep
MKQDGEKRLLAFTKRGTRIHSDFSYKPGDWLVFGSETKGLPQSALEDCSREGLGGGTIRIPMVETYVXRCLNLSVSVGVALYEAARQLN

SEQ ID NO: 152256 - protein, 62 aa, Oryza sativa
  Clone ID: PAT_MRT4530_52325C.1.pep
WRTITNIYQGGPNNPITELTPNNNQLTQGFKLFFIFLLYGNEKFQGEATYHLETPQKKRPSY

SEQ ID NO: 152257 - protein, 127 aa, Oryza sativa
  unsure (1)..(127): unsure at all Xaa locations
  Clone ID: PAT_MRT4530_52326C.1.pep
MPFSASLAISMPVAFTTFSVDRRGVAATTTVATNTMNVGLGLVAVATTLADALCGDTARRAMQYFPGDGVAAATNNRSFTTSTDTKPTPTPFPHSHATGVRQDRYPGCVHGXSRPSSIRQRLVVMPV

SEQ ID NO: 152258 - protein, 59 aa, Oryza sativa
  Clone ID: PAT_MRT4530_52327C.1.pep
MVSDSRNSLILFGLWELSVHLCKLITLTTIKVRVDGLNMEYCGGLVSNKQVDRLVPDSS

SEQ ID NO: 152259 - protein, 162 aa, Oryza sativa
  unsure (1)..(162): unsure at all Xaa locations
  Clone ID: PAT_MRT4530_52328C.1.pep
MDGSGDTARRAMXPFPGDGVAAATTDRPFTTSTDTKPTPTPFPHSRATGVRQNRYPGCAHGXSRPSSIRPRLVVMQVKPPFAVPASATPSSPFPMALLAVHSLTGCRGMASGLGRPPIPMRIGSRRPNPAGKPPADGGASVAPVYGGWRQRWVANCGCKRWW

SEQ ID NO: 152260 - protein, 256 aa, Oryza sativa
  Clone ID: PAT_MRT4530_52329C.1.pep
MGNGDEGVAEAGTANGGFTCMTTRRGRIEEGRLPRARSQDTARHGGNRRRRRRRSSRSSGHHDASARVVATATSPSPTFMVLVATVVVAATPLRSTEKMVKATGALIAREAENGIHNPMKGDAIFRNIASVVERDAKGRERSDLLFSTGTYTVRSTLASYNPDPNLPLELYYKYVPCIGALDELYKQRRGKMSSSAKTSWPEVVGLSIEEAKKVILKDKPDADIVVLPFGTAVPEDFRFNRVRIFVDTVAETPRVG

SEQ ID NO: 152261 - protein, 136 aa, Oryza sativa
  Clone ID: PAT_MRT4530_5232C.1.pep
MVGISHDDAPSTTGRSSSSDVDAERGRLLSGNDDEANAAESYEDAERLESWHLQHKRRETRRWSCLVMVISTIALITVLAIWVHNNTLTSGCEYDGSCNDISKLWGQYSSFFSVPSEIDSSTPDGCDVTIAVVLSR

SEQ ID NO: 152262 - protein, 165 aa, Oryza sativa
  Clone ID: PAT_MRT4530_52330C.1.pep
HALDLRQHSNKHRRRCPTGLHKLLSEARRRWPPNPSHRFPFPSLPHSTSMMKHHLRRCGAAAFTMVRCFCHFPHAVSTSPPIGWKCPSPRLYSTNEMNQQLPANLVGVMEQRMKLIEQRSAYLQEQINQVIFGWATSVSSTVQFLLSCGHVELSNFRLEVKIILI

SEQ ID NO: 152263 - protein, 164 aa, Oryza sativa
  unsure (1)..(164): unsure at all Xaa locations
  Clone ID: PAT_MRT4530_52331C.1.pep
AGRLHRPPPPLXPPRAPGFGSACHDKDPWTGSRTPPRARAQRPNSRNCRILPEKKNRSNGGSKNHHAFQRPREIIPNCSHGFAEFFKRMNERKKPPHEQRARLQFGSQEQKNNKTSLQNPFLGVTNATSTELRQSKNGTERERSLEAGRWRVGSEEPQEQEHIP

SEQ ID NO: 152264 - protein, 52 aa, Oryza sativa
  Clone ID: PAT_MRT4530_52332C.1.pep
MAVAARQQRQQLNDGGGGGSLGGHQLRLGHEHDHPTRFLLSPSAFHLTIPDE

SEQ ID NO: 152265 - protein, 292 aa, Oryza sativa
  Clone ID: PAT_MRT4530_52333C.1.pep
MEAAYKFGPYKIDAREVFHSTPLSYAMVNLRPLLPGHVLVCPKREVKRFADLSSNEISDLWVTAKEVGIRLEQYHKASSLTFAIQCLQDGPQAGQTVPHVHIHVIPRKKGDFEKNDEIYDALPLTSGKEQFDWQFGWLCSEVGCDCCTRPEDLVTVVCMLHLHQQEILICKCKSSSFGKKYSASGPPADTVHDNDHSHDDRDIDAWPDDEGEHVVAEADRSGHHAGVLPRDPRCLLAVAATDLAAPHGEAAVDSEAGAGRSIRAELFLMEKTCCCDTEGELVLSKPSSSCAL

SEQ ID NO: 152266 - protein, 206 aa, Oryza sativa
  Clone ID: PAT_MRT4530_52334C.1.pep
SPSPSRSRPTRASFSGRPPSASCPHRSSSSCPLPLHRAGYHRFPAASARCPRARPHLLPISSCPSRPRLLHPCRRRGSSQHPQPPPQLKIPSQSTPKSRLPITPSRGGHRWSECCRRRIIGLTSSIISPSAIASGASLHCRRFGVVLVRPGSGCSGGVGVGWSHEAQQGGILSSATRLLMLRAWRPGGALCPCTLSQLAANQSQWW

SEQ ID NO: 152267 - protein, 38 aa, Oryza sativa
  Clone ID: PAT_MRT4530_52335C.1.pep
GYSSGGQPRRKNQLFIYRDRYIEYKQIFVNDREMVKLC

SEQ ID NO: 152268 - protein, 105 aa, Oryza sativa
  unsure (1)..(105): unsure at all Xaa locations
  Clone ID: PAT_MRT4530_52336C.1.pep
FKVGTDKALXDGNGASSAADLPSNYLMNSKVVGLEKAVAFLWRGTHSRFEAAMDDARIRTTDIATHADVAXYIGPLSDLNYXHMRMIGTGPQTFVEIAEGRHAFC

SEQ ID NO: 152269 - protein, 774 aa, Oryza sativa
  Clone ID: PAT_MRT4530_52337C.1.pep
MSGAAAIATGEGGPLVAVGLGGGNDLHNGDAAVVLGKTWCWASRYPGDQYDRFWWQLGYSSPTWKNLSTVSAITQDSIYTVLLTIIQTAVEAVGNNTMLNITWQDQTPRGRGLKFFMYFADFQNSQLRQFNVSFNDVEPYQYSPPYLTTGVLYNSGWSTATDGNYNISLVPTAASKLPPMINALEIYTLISHDNPTTFPVDFETIMAIKLEYGIKKNWMGDPCFPEKFAWEGVKCSNSSSNTARIISLNLSCNQLNGPVPDSLRKNNTGSFIFSFNSDGNMCNKPIIVPSPPGKRSNRAATLAILIVVPATVIVVLVLVFLIWRQKRNSNYSTEDPTRDRSNQLENSLEKSQNHGDVLQIVENRQFTYIELEKVTNKFENHIGQGGFGPVYYGCLEDNTEVAVKMRSELSSHGLDEFFAEVQNLTKVHHRNLVSLIGYCWERDHLALVYEYMAQGSICDRLRGNIFVENQHASHYSILTITFHIYEGLDYLHKGCSLPIIHRDVKTSNILLGKNLQAKIADFGLSKTYLGETQTHISVTPAGTAGYIDPEYYQTGRFTESSDVYSFGIVLLEIATGEPPIISGQGHIVQRVKNKIVAGDISLIADARLDGAYDISSMWKVVDTALQCTVDVVAQRPTMATVVAQLKESLALEESREDSGFMGSTSTVEYVLILLYSVMSCCLVNKHLLSIWLTYTHGLISELSTASLGNLPANETSLKIVMDVSLSFEFKAAQAFLQLHDYRTLLAFGKKYHHSIWNLPQGVDNIGTSKTFICN

SEQ ID NO: 152270 - protein, 79 aa, Oryza sativa
  Clone ID: PAT_MRT4530_52338C.1.pep
LLLNLINYSWCGSSPSLVRILSFLDLSPTQQKEDLLGKCSLDEEVDAFLPAPATLVQQQERRRHLLRGPCRRRCSASGS

SEQ ID NO: 152271 - protein, 96 aa, Oryza sativa
  unsure (1)..(96): unsure at all Xaa locations
  Clone ID: PAT_MRT4530_52339C.1.pep
CNVPPLPGRARLHLAAFTGHRLPSQTNTSLFCTLCHSCAPRNNFPVCHPSQIVPDQARLTXEFFGNRLPEKKLQLVDMSILLILLSSGPGCHMCVP

SEQ ID NO: 152272 - protein, 141 aa, Oryza sativa
  Clone ID: PAT_MRT4530_5233C.1.pep
EDALVSFLRENSDVFTWKPSDMPGVPRAVIEHRLAVRPDARPVRQKVIHPGWLANPVVVAKANGKLRMCIDYTDLHKACPKDPFPLPRIDQIIDSTVGCDLLCFLDAYSGYHQIRIAREDEEKTAFITPVGTFVIQLCLSV

SEQ ID NO: 152273 - protein, 350 aa, Oryza sativa
  Clone ID: PAT_MRT4530_52340C.1.pep
MASFSTVFLLLSLVCLASPCAAQRVICEAPPCTTASQVKTTPTNRASHVRLPEGVTGAESLAFDSSNRGPFTGVSDGRVLKWGGDSAGWTTFAYNRNYRSNPTCASSSEETESTCGRPLGLAFHLKTGILYFADAYKGLMRVGPRGGQADVLATEADGVPFNYLNGVDVDQDTGDVYFTDSSTTITRRYQENIMRNRDATARLMKYDAKTKQVTVLKDRLPYANGVAVSHDGRYLVVAHTGPAQVFRYWLKGAKAGQYELFADLPGYPDNVRRDAKGGYWVGLNREKITFNVPAAASPAKHLVGVRLNGDGVEVEELTAASRAVTLSEVVERDRKLWLGSVDLDYVGLLQ

SEQ ID NO: 152274 - protein, 537 aa, Oryza sativa
  Clone ID: PAT_MRT4530_52341C.1.pep
MPQVTPPRSQYLRTTSEPIIVGTEPEAATNNDDSHRARGSEYLPPSASHPTQPAASVHHQTSYIPFLTALLCSMSPTAPSLVCDKPHSAAENDENGCSSGSSMSSPAGYIFMCNGVTKAECYRHRVMGLPLGSLDVVSRIRRGTALFLYDFDAKHLYGPYHADSNGGLTLVPDAFRGRFPAQRKRVFVVTIVHQVKFTVDGDFMPIPESSLRTAIKENYSNGKFSPELTLVQVEKLRALFRPIIVMPESALFHNDSDRHPVPPAVYLPPASHPSQPAAYVHQQHQTSYIPPLTAHPMPPESYAHSYAQMPPPNMQFTTPPYHMSTAEYPYQAAHTAYSSLPSANNISMANNLYGQQSLSDHVSATGYYTAPYYAAHQIGMHPVDPPRSHYLGTTSERITYGTEHEAATTNLQPISHYGSIPSGATAAPEAAATNSELVCNSGATPSASATGAAMTNLQLVRNYGSMPSSVIGAAAHSSEGSQFEQAATYITHAPGTYYCYGASSAIYSYPGNTASCDGNNVAAAPSVYAVAAPPAYQ

SEQ ID NO: 152275 - protein, 167 aa, Oryza sativa
  unsure (1)..(167): unsure at all Xaa locations
  Clone ID: PAT_MRT4530_52342C.1.pep
APLAAGKTSKIVHSERASARRFKDTRCVLSDFVGSVVWGGEFTGGWRRHCRRRAAAWCSAXAFVVARAGACGGGGGSRRGTGAGLRRRVLPGGRRRLPKAGDAAAPREVGAGDGGRRWRRPXRFPRRGGAVVPCGAGGTERWREEQEAAAHRENACAGGSGRVGGRD

SEQ ID NO: 152276 - protein, 167 aa, Oryza sativa
  Clone ID: PAT_MRT4530_52343C.1.pep
MVDNKGMGGSVDDNDCADCACSAKGPTRFSDGGAGTETMKAGSRRRRHSWPPRAWRGPLTDGVEDLDVPRLRPLDLVTARRGGVRALWWQSSSEGKSRHHDGNGVMATERAQQGWGRSQQRMKSGQWRPRRVVRPTIDMAKWLSKFGQCAVRFGQMENELQTVELEH

SEQ ID NO: 152277 - protein, 112 aa, Oryza sativa
  unsure (1)..(112): unsure at all Xaa locations
  Clone ID: PAT_MRT4530_52344C.1.pep
GWWIHTLSLPPRSGAADPCAGSLIPASTAPAAARLPSPPALFAHAPTPPEPASRXPLRRPLCSISPVLPSPPPSPFPASPPLLSPPSPRRPPTAADAARRTRGQRNDEAPPP

SEQ ID NO: 152278 - protein, 108 aa, Oryza sativa
  Clone ID: PAT_MRT4530_52345C.1.pep
MRRQVGHATARSGAAGRAAPARHSGEAAKWCGGQAARQLGGQAMWQRGGLQGAAARLFTGCRTCDDVRRATTRPCGGAAGYAALKWTRPCDGGEARPGEDRTVVARPC

SEQ ID NO: 152279 - protein, 80 aa, Oryza sativa
  Clone ID: PAT_MRT4530_52346C.1.pep
FCFGCKLTPGDRPLMRRRAERAPTAPDRGSLPCFRDLPWGTTYAGWGPAVVSLPRPSMHRWHLHLLDGGAHRPRRHRDTA

SEQ ID NO: 152280 - protein, 139 aa, Oryza sativa
  Clone ID: PAT_MRT4530_52347C.1.pep
MAAAAEPTDGPTLSVVSKWLHALRKKHNKIIQMEEPLADGRKLNKEQGEDLLALIYFGSLFDVKPQTEFIATMLVRPKEWDCCITFDYVRPCRLTRCRSLVPPPLAARQCGKKTGERRKKGKKEEMDGKHDGDGTVPIL

SEQ ID NO: 152281 - protein, 92 aa, Oryza sativa
  Clone ID: PAT_MRT4530_52348C.1.pep
LRDNNHRSQTIIKIDTPNRLTTLNKIAPPELQRAPKRRTPVLITVETHSNITLTYTRTHTPPRAPKLQAVALKKNQLNLLPYHLVLLLDLHQ

SEQ ID NO: 152282 - protein, 92 aa, Oryza sativa
  Clone ID: PAT_MRT4530_52349C.1.pep
MQKFPRDMPPTPGFVFGQSLKTGTFPGPTIVAPQGVPLPGEGQNHLPDAQILPGDPKVPTAFPKKGGVPTVVHLHGGAHPPEFDGHPFAWFT

SEQ ID NO: 152283 - protein, 273 aa, Oryza sativa
  Clone ID: PAT_MRT4530_5234C.1.pep
MRLQSAASTWSTAIGDGEVRRRQATALARWIAGVSERERDRRRRAAAAAAREPKPERMVFGRSKSSSSTASPPPAAAASSAAAAACSELRAAYHECFNRWYAEKFAKGQWHKDDCVGEWHKYRACLEKLHNGVVVLAFGLLVYGKQLGKNILEHLEDKNLRQILLESETSAYYAQFDADSSSRKVKATSLPLTQGSFVAKQSISLHLVQSPEKRDPLQAAVLHGQERQEQLYQKSLCFFFFFLCRSRWRWIAMAAADGLRRAHPPLGFLCISG

SEQ ID NO: 152284 - protein, 38 aa, Oryza sativa
  Clone ID: PAT_MRT4530_52350C.1.pep
VNQIPNHGEHNALVPGKFIVAVVPNTVCTCNTNPMNPN

SEQ ID NO: 152285 - protein, 302 aa, Oryza sativa
  unsure (1)..(302): unsure at all Xaa locations
  Clone ID: PAT_MRT4530_52351C.1.pep
MDKKKAHANTESSFTRFSVKYFSEVVSSLSDYQKSIIKKFEFDFLLMFNSSYVPIKFATWIANKVDVRTSEIIVKEKIILVIVESVHDILGLPLGGIPFSKDYERGRQCILSMFGQSVLPSVKFFGDLLIQQKDLSEDQIITSFLIVALACFLCPNSSLTPSVKYLTIFEDVSRLKYFDWSXKFTYDWLMTYIKKFQKNTTFGGCLFYWAVLYLDNVDFGSRNVDQSCPRISVWKDDMISTFSELDKIDENTFGLRPLKDFQDTCYFKVCTSRLFQDLTVSLTLRHFLNVLFNSFPLHTVHD

SEQ ID NO: 152286 - protein, 199 aa, Oryza sativa
  Clone ID: PAT_MRT4530_52352C.1.pep
MAMVASPDDIVKSPLPPPPPPPPPPLPPAHKDKAAYNPYSGCPAHGGDDGLDGIVLVLRAAAALLALVAMALVASCRHGDWMEFTRYQEYRYLLGVAVVASLYSALQAARTFRRMRAGTAYAATFLDFAGDQAVGYLLITASSAALPITIRMRSAVVNTFTDVVAASISFAFLAFAALAFSALIAGFRLSSSSSSAYNY

SEQ ID NO: 152287 - protein, 81 aa, Oryza sativa
  Clone ID: PAT_MRT4530_52353C.1.pep
SISCLQPSLQDKATKISHQGLTTGFTVHQKIYYVVLLELQITRVTKHCPNNSLNQEASILRKEHFSWHSNEREVPLNCYQY

SEQ ID NO: 152288 - protein, 84 aa, Oryza sativa
  Clone ID: PAT_MRT4530_52354C.1.pep
MTVGTAVRTEPGLAPIDPAPAFPTIGMRGEIDQRVTFLAQGLHEASRIYEKSLIDENPELIYGKGNGRGMYIRLFRAARAQPEC

SEQ ID NO: 152289 - protein, 192 aa, Oryza sativa
  unsure (1)..(192): unsure at all Xaa locations
  Clone ID: PAT_MRT4530_52355C.1.pep
GGGGDGELRGRRRRQAQPRRRPLVVVEGSGGGELRRWRRRDVQPRRRPYADERGPRPTTGXVPDHTVPGSPGVLPDTTPVNPHVSHSTHVVVLVLCLDEIPRKQSLSARAGNRTPDFKFEGIRXYSRRVHEYRDATRWLQGDMVACLARELKLDPRNPRTAGLRARKLHAKRDNSTNGENKALLMTSKRAIR

SEQ ID NO: 152290 - protein, 230 aa, Oryza sativa
  unsure (1)..(230): unsure at all Xaa locations
  Clone ID: PAT_MRT4530_52356C.1.pep
MHGELADVHGRNHAHDTKCDGQIHILAMDQIGRAPARNPVMQDRRHYDPYRHAERRREQHDADHREAAAYADERGPRPTTGXVPDHTVPGSPGVLPDTTPANPHVSRHQGSPDKLVTQPGVSHSTHVVVLVLCLDEIPRXNRSLSARAGNRTPDYKFEGVRRYSHRMHEYQDATRWLQGDMVACLARDLELDPRNPRTAGLRAPELHAKRNNSTNGENKALLKTSKRDTR

SEQ ID NO: 152291 - protein, 65 aa, Oryza sativa
  Clone ID: PAT_MRT4530_52357C.1.pep
GRIWEPWSSRDKGDMVKSTGWGAASGVALEHRVSSLACLRPERYLVAGLRWWGFTPVPPLSGGGG

SEQ ID NO: 152292 - protein, 78 aa, Oryza sativa
  Clone ID: PAT_MRT4530_52358C.1.pep
QCHPPKLLGRLCLQEGDPPLSTKPGGFFFVKSPKNFYPLKNSFLSQIGPPPGGPKKIFRGAIKREKPLAKRGRFALCF

SEQ ID NO: 152293 - protein, 66 aa, Oryza sativa
  Clone ID: PAT_MRT4530_52359C.1.pep
IKLYSYDISHSYLFIHICHVGSNGLQSNSASAVPYQKPFCAKLSLLLICRATLQIITAAFPTPKYD

SEQ ID NO: 152294 - protein, 119 aa, Oryza sativa
  Clone ID: PAT_MRT4530_5235C.1.pep
MVVLSPEQRVLTKLEPSTVRSGRLDNGGSGEDGSATKDGVGFTATGSLRSMGCSEKEDDGERTQLGVVSSVGHDDDASAGDLRCSLRDNDGEKLHRGGGIRQASEDVKWIKGDVVYGWV

SEQ ID NO: 152295 - protein, 67 aa, Oryza sativa
  Clone ID: PAT_MRT4530_52360C.1.pep
ALPPPAQGPMGGGPGPTQHPKILVKGGYGGGKTILGPLNRGGSGNRSPLSINFPQANPPRVSKGGGP

SEQ ID NO: 152296 - protein, 112 aa, Oryza sativa
  Clone ID: PAT_MRT4530_52361C.1.pep
MDRPTAFPLYQRAIGIVPFSLQFCAVMLGVECIGQTHMLELSQQRLDRLSKKIFPSNQVIFELGHFGVSRHCDAIFEWSCLRTRESVAGDRSESTWEKLMSRDQEIKRDTKG

SEQ ID NO: 152297 - protein, 433 aa, Oryza sativa
  unsure (1)..(433): unsure at all Xaa locations
  Clone ID: PAT_MRT4530_52362C.1.pep
MMSNTLSFSFVLIICVAALHANGSPEEARFREFVRSRRSSTVTVSGSNGYSAHEPGARVSSRLKEEYSVSDQSNLKAADKITALPGQPKGVGFNQYGGINSDNKTLSRNEYAWNNVANVLFLESPAGVGFSYSNTSSDYDKSGDQRTANDSYIFLVNWLERFPEYKGRAFYISGESYAGHYAPQLAATILTHNMESKRMIINLQGILVGNPCLDEFKNLKGQIDYLWSHGVISDEVLANITKNCRFSPSDGKACSDAMDAFDSGNTDPYDIYGPVCINAPDGKFFPSRIVPGYDPCSNYYIHAYLNNPVVQKALHARVTTWLGCKKSYNMKRRKYISAKMQACGKYSNRTVTSTIFLSGDLDSVCPLTATRYSVGDLGLAVTEPWRPWTANREVGGYVQQYTGGLVFICVRGAGHQXPYFQPEKALIVVSSFL

SEQ ID NO: 152298 - protein, 90 aa, Oryza sativa
  Clone ID: PAT_MRT4530_52363C.1.pep
DAWADAWGFFKKKTTLDKHLLPRGARNHNWGCPFTITTLTTASMTPLLSCMAQPQYNALVSVFKGVALKTRATSPIYDVRSTSPFSHRPY

SEQ ID NO: 152299 - protein, 474 aa, Oryza sativa
  unsure (1)..(474): unsure at all Xaa locations
  Clone ID: PAT_MRT4530_52364C.1.pep
MESRALKRLRNRPNKNGPGEDDQWADPGRFSHLATRSVSSPESTKEDDRIAALPGQPCGVNFAQFAGYVTVDRKNGRELFYYFVESPYDASTKPLILWLNGGPGCSSLGFGAMKELGPFRVNPDGKTLSRNKHAWNNVANVLFLESPAGVGFSYSNTSSDYDKSGDQRTANDSYIFLVNWLERFPEYKGRAFYISGESYAGHYAPQLAATILTHNMESKRMIINLQGILVGNPCLDEFKNLKGQIDYLWSHGVISDEVLANITKNCRFSPSDGKACSDAMDAFDSEEIQRVTSSMEYYLLESFVCVLKIVSVSKXVQVPGYDPCSNYYIHAYLNNPVVQKALHARVTTWLGCKXDLLHWKDAPVSMVPTLKWLMEHGLPVWLYSGDLDSVCPLTATRYSVGDLGLAVTEPWRPWTANREFSRQVGGYVQQYTGGLVFISVRGAGHQVPYFQPEKALIVVSSFLRGALPPYVKQQ

SEQ ID NO: 152300 - protein, 99 aa, Oryza sativa
  Clone ID: PAT_MRT4530_52365C.1.pep
MEVDGVVRLRLLYASRREAVKAAEGGELDDGTARRRFGGGEVASGSLTGECLGRHRWCGRAAAHREGASGVGVHKVFDGGGPTEREAAAQSSWAGWAVS

SEQ ID NO: 152301 - protein, 29 aa, Oryza sativa
  Clone ID: PAT_MRT4530_52366C.1.pep
DLLVACCSLIQSTIHGQSSGSYGHYLVEK

SEQ ID NO: 152302 - protein, 59 aa, Oryza sativa
  Clone ID: PAT_MRT4530_52367C.1.pep
IMNMYPGQNSGPSPSENWTHSTSNVSREGLGRVSAYQNLSGLHRSVQTWGLKPLTDQPA

SEQ ID NO: 152303 - protein, 193 aa, Oryza sativa
  unsure (1)..(193): unsure at all Xaa locations
  Clone ID: PAT_MRT4530_52368C.1.pep
PHPGPRVTQRFYTTKANELHYIPYXHPARTQPLRHGPNDPTARIARHTGRQHPVLEAHKVGRTIKSHNAARQLRRRTRHRYTPSRPPPKSNIHNVAAGGVRPYDPRPLSELGNDIPPSGRQREGWPRHPRARPPRGGQATWVIAATPASSHDTPSPMSPTASYETAISVPVPGHSAGTHGDKYGSLQILKTNR

SEQ ID NO: 152304 - protein, 89 aa, Oryza sativa
  Clone ID: PAT_MRT4530_52369C.1.pep
MSPISFVVVVTLKVVVIATTCYGTTTSCVRGEVEAIAVACCGITDLLATGVVVGLPLNLKEEMERKGGRGIERERAEEGWEVRQLRQWR

SEQ ID NO: 152305 - protein, 196 aa, Oryza sativa
  unsure (1)..(196): unsure at all Xaa locations
  Clone ID: PAT_MRT4530_5236C.1.pep
STLVGFPDRRREPPTPPQPWFADRSGSVEEVKNTLKNVFPSEKEIVVKSQILAGGRGLGTFKSGLQGGVHIVKAEEAESLAAKMLGQILVTKQTGPQGKIVSKVYLCEKLSLVNEMYFAITLDRNTAGPLIIACSXGGTSIEDLAEKYPDMIIKVPIDVFKGITDDDAAKVVDGLAPKTADRQSFVGQIKKLYELF

SEQ ID NO: 152306 - protein, 73 aa, Oryza sativa
  Clone ID: PAT_MRT4530_52370C.1.pep
ILKIQRKNSFSKIVIAFHPWTTNQSNWEGQLFWGLRRNYSTHAANPHPFHINLKPNGIRGSNSDQSYDFLNSS

SEQ ID NO: 152307 - protein, 77 aa, Oryza sativa
  Clone ID: PAT_MRT4530_52371C.1.pep
PYKAPPIITMKVETASNYADADRSLRTMSFSSSSYSYQTAVSQNVEHYQVNLSSLSGPTVIDCTGMRHTQITVSTTF

SEQ ID NO: 152308 - protein, 73 aa, Oryza sativa
  Clone ID: PAT_MRT4530_52372C.1.pep
NDYTPLVNSRQSAAFYTATAYYNTSTTFTVEKHFASPTYSEEPKKQSVGLCQLYTDGWTHLFGSRVRFALLLV

SEQ ID NO: 152309 - protein, 754 aa, Oryza sativa
  Clone ID: PAT_MRT4530_52373C.1.pep
MGKGEIVAVLQVGGEFSTDADGLMSYSGGEAHAMLVKSDWTFSAFKHEISSTLNNIRVDQFVFKYFLPKNKKTLISISNDKDLHRMVEFHAESETTYIYVMKKKVDNRASIVVADSGTPVDTTAVVPTTQDGSKRQKICATWKNVITGVGQVFDGPKDFRDALHKYAIAHKFHYRFIKNDSSRVTAECTGEDCPWRIHASKSPAKKQFMIKKISESHTCESETVKSHRLASQRWVASVIKEKLRDSPNYRPRDIASDLQREYGLCLNYSQAWRGRSIAQKELHSTHDEVTSQLPWFCGRIMQTNPQSVATVVPMEDSKFRLFVAFHASLHGFEHGCRPLLFLDVISAKPNKQWKLLTATSVDSEGDVFPVAFAVVDDESSEHWHWFLEQLKSSVSASRAITFISNGENGLWDEVPLVFPDSHHGYCVDYLIEEFKTQLDDAWTEEARDVMVEHLKKAIYACTVDEFNQYIELIKGESDKLAEWLLEIKPERWSDAFFKGSRHGQYSCNFPSTIVEWIPTRYELSIVQLVDMIRCKLMEMMYTRRESSNAWAELLTPAANQKLQEEVSKAHTLNVIPSESNENGNVFKVCDDSVNVVNIDAWECTCRKWHISGLPCMHAIAVIERIGHCPYDYCVKYFRTECYRLTYSMSINPIPDVMLPPAILSDQSQSPVTHATPIRTRRRVGRPKEKPADPRIAIKRAVRCSRLTYLVVKSHIVMDAIERLGRTWGHNEDEDDELFCSSVEPASASMLSPSS

SEQ ID NO: 152310 - protein, 83 aa, Oryza sativa
  Clone ID: PAT_MRT4530_52374C.1.pep
ECYRLTYSMSINPIPDVMLPPAILSDQSQSPVTHATPIRTRRRVGRPKEKPADPRIAIKRAVRCSRCQGYGHNKATCKVPLST

SEQ ID NO: 152311 - protein, 54 aa, Oryza sativa
  Clone ID: PAT_MRT4530_52375C.1.pep
FHEIISCMPAQSTNLVGVWINSLVIVHSNSYQTSRNLEPGCSYNSESQAAQLDM

SEQ ID NO: 152312 - protein, 46 aa, Oryza sativa
  Clone ID: PAT_MRT4530_52376C.1.pep
MQDFGHKILVMHEITRSSATGSDFVMGASTGEGGDAELFILVAIQR

SEQ ID NO: 152313 - protein, 61 aa, Oryza sativa
  unsure (1)..(61): unsure at all Xaa locations
  Clone ID: PAT_MRT4530_52377C.1.pep
HPDFWRRNVNTXGVVVDDGGVVGTSSGTVHGEDLLLRHASGHLADEQPHPLAVIILRISGH

SEQ ID NO: 152314 - protein, 353 aa, Oryza sativa
  unsure (1)..(353): unsure at all Xaa locations
  Clone ID: PAT_MRT4530_52378C.1.pep
MAARAGDTGLSKVRRYWPGRAPDWAWAGAAVAHDEDDARLVSTLDEIKHVEEEVLRSPRRRRVRRAPEIASAAPAVDDWHEPDPIEEEQDEDDDDDAREERRARIRERALLLRRHEEEQLLLLHPQHQEEEDEEASESEEXAESDSDVGEQMAVVYMAVPLLEDRKAQTRQILLQEIINEELLAANTASDEAAINGVDTDDEVDQAEEYESWRRREMARIKRIREESGIDDDKSIMEDENPVADRPKKKMKIKKQMRFMQRYYHKGCFFQQDADDAAQTAGSCEIYRRDFSGPTGLDKMDVSVLPKVLQVKHFGRRGGRKWTHLVNEDTTYRTPRTGDNNASLLRSCVETVLE

SEQ ID NO: 152315 - protein, 381 aa, Oryza sativa
  Clone ID: PAT_MRT4530_52379C.1.pep
MAARAGDTGLSKVRRYWPGRAPDWAWAGAAVAHDEDDARLVSTLDEIKHVEEEVLRSPRRRRVRRAPEIASAAPAVDDWHEPDPIEEEQDEDDDDDAREERRARIRERALLLRRHEEEQLLLLHPQHQEEEDEEASESEETAESDSDVGEQMAVVYMAVPLFIPKPRRDTIRLKEEERQRLEDELHRKRLEDRKAQTRQILLQEIINEELLAANTASDEAAINGVDTDDEVDQAEEYESWRRREMARIKRIREESGIDDDKSIMEDENPVADRPKKKMKIKKQMRFMQRYYHKGCFFQQDADDAAQTAGSCEIYRRDFSGPTGLDKMDVSVLPKVLQVKHFGRRGGRKWTHLVNEDTTYRTPRTGDNNASLLRSCVETVLE

SEQ ID NO: 152316 - protein, 161 aa, Oryza sativa
  Clone ID: PAT_MRT4530_5237C.1.pep
KWTNLLDLLLHRRRLHVVVCWQDNGLEQYNFSSLDNLPEIYKAVLFSRRPQETCSLYACLEALIKEEPLGPEDMWYCPGCKEHRQASKKLDLWRLPEILIIHLKRFSYSRYTKNKLETCVDFPVHDLDLSKYIGSRGQQISNHYRLYAISNHYGSMGGGHY

SEQ ID NO: 152317 - protein, 484 aa, Oryza sativa
  Clone ID: PAT_MRT4530_52380C.1.pep
MAAWQGRVGATNIGRLRHGKTSSSSAAAVAARGGGVTAWHLRVFAGVVGVMGCLLLVASLMMSAVHQVQFRNAAISRSFRGLQELKQNSVRTEKAEQIMHPRLLQMATSVVTKLLLMSNFPSLPVQNESDSDSVKFSLWEEPYKQARKWKPCAAKHSLPDEVPEENNNGFILISANGGLNQQRVAVCNAVVVAALLNATLVLPRFLYSSVWKDTSQFGDIYQEDYFVNYMKSDVHIVKDLPPHLQSLDLEAIGSQITDMDISKEAAPSEFIKAVLPILQQNGVVHFLGFGNRLGFDSVPVHLQRLRCRCNFHALKFVPEIQRAGSLLVQRLRRAGAMRTEMDKQLFGSNMLDVPALLAGGEPSRYLALHMRFEEDMVAYSLCDFRRGDSEREELQAYRETHFPTLAMRLRNTGRAPTLHPNRKRYAQILGEEEGIGWGGFERRVRNMVEEYKRVSARPRGRSVYRQPRTPGCMCRAAGDGSVDF

SEQ ID NO: 152318 - protein, 144 aa, Oryza sativa
  Clone ID: PAT_MRT4530_52381C.1.pep
RLSQRGTHMCMWPRRPPLSFPNSLPSSLSLSLFSWQAGRRLGRSDGGMVPESELKERSRIASGEEGDDWAEDGGPGDGELEEVGVGGELRRDGGPERCGRWYRRSCWLSPGTLSHSRTQTLVRETMNNGFYSDERRGADRSGRV

SEQ ID NO: 152319 - protein, 455 aa, Oryza sativa
  Clone ID: PAT_MRT4530_52382C.1.pep
RRWKTCAAKHSLPDEVPEENNNGFILISANGGLNQQRVAVCNAVVVAALLNATLVLPRFLYSSVWKDTSQFGDIYQEDYFVNYMKSDVHIVKDLPPHLQSLDLEAIGSQITDMDISKEAAPSEFIKAVLPILQQNGVVHFLGFGNRLGFDSVPVHLQRLRCRCNFHALKFVPEIQRAGSLLVQRLRRAGAMRTEMDKQLFGSNMLDVPALLAGGEPSRYLALHMRFEEDMVAYSLCDFGGGDAEREELQAYRETHFPTLAMRLRNTSVSPEEQRSLGRCPLTPEEAGLVLTALGYDRGTFIYVAGSQIYGGAARLRPLTRLFPNLVTKEDVLSSAELAPFKNFSSRLAALDFIACASADVFAVTDSGSQLSSLVSGYRVYHGRGRAPTLHPNRKRYAQILGEEEGIGWGGFERRVRNMVEEYKRVSARPRGRSVYRQPRTPGCMCRAAGDGSVDF

SEQ ID NO: 152320 - protein, 56 aa, Oryza sativa
  Clone ID: PAT_MRT4530_52383C.1.pep
WCPRRSARRRARIIVPTTTTLRCPTSAPSMLALSEAMGSSYMWTGDSGPTCLALSC

SEQ ID NO: 152321 - protein, 65 aa, Oryza sativa
  Clone ID: PAT_MRT4530_52384C.1.pep
MRSKKELVYFRAFYILNWIYRYFTEGHHSRWIPWIAGLVQTAIYADFFNYYFLSWNNNVKLELFD

SEQ ID NO: 152322 - protein, 157 aa, Oryza sativa
  Clone ID: PAT_MRT4530_52385C.1.pep
MSNSQASCILMLRASVVLTVPGCGAVEPTDGAVASGVNLILWVMGADQNADPLNNIFDQSLNILLLLLSKRRMAELSEEKYEQHIEIITKNPTYLLVGARGCTQAPQLIVVLNRMVRSVASPPLSRDEQRMRWRVCEINFLLIDSNISLNTEERPNT

SEQ ID NO: 152323 - protein, 90 aa, Oryza sativa
  unsure (1)..(90): unsure at all Xaa locations
  Clone ID: PAT_MRT4530_52386C.1.pep
PGIGYPTYLLPXCRSFVKRQCVCPGTVDHQVRRGCXTXLAAIDSIWCKCDALNHMLRIIYRESGAANAVHPMVEVYLGCRRGDIQRAAAS

SEQ ID NO: 152324 - protein, 98 aa, Oryza sativa
  unsure (1)..(98): unsure at all Xaa locations
  Clone ID: PAT_MRT4530_52387C.1.pep
LQDYHPRFITYVLSLXIIXXXRIXRRRXXXPYRXLAAXGXXXLLXXWFXVXXSCXNEQGXTLLLLXLFFNFHGFTTYPXVMVXMXXXXNXFNFLXKKK

SEQ ID NO: 152325 - protein, 224 aa, Oryza sativa
  unsure (1)..(224): unsure at all Xaa locations
  Clone ID: PAT_MRT4530_52388C.1.pep
WMYDVEIHSLPLTIHDRIPTHTQCRRMVAQAIQGNRWIRDICDALGXASDLGILVALGLYSLXSAYQGLFLGCVLPPYRFGEPLAPPHCRYFLWLVALXRCXMVDRLSNIGLPRSDHGILYDQHEETIYHILDVSLESXKLLCTVLGAIRQCYCMSINGHSFHLRLCNSQRKILKGQRRDFDTVVTLGAXMIWNEHNNHVFNQIEWSXPKVAKAMAEEAARWRL

SEQ ID NO: 152326 - protein, 86 aa, Oryza sativa
  unsure (1)..(86): unsure at all Xaa locations
  Clone ID: PAT_MRT4530_52389C.1.pep
KLHVAILSQWLCNFSQTSAGGSXIEFNKLWFFMLVCASISLVVSFIFRCXVIGLFPIFVIIGFSSVSKCWNFIPLSKKTIIQNVQS

SEQ ID NO: 152327 - protein, 245 aa, Oryza sativa
  unsure (1)..(245): unsure at all Xaa locations
  Clone ID: PAT_MRT4530_5238C.1.pep
MYSDGSWSHKGAGISVILISPGGVLIRYTARLQFNTTNNTAEYEAVLMGLRKAKALGVRHLLIRTDTKLVASQVDKSLEAKEEGMRKYLEAVWSMEKSFAGIMVEHLPRGQNEVANALANSELRSTGWSPDSYTELLYYSPCFIVSLSPKEFITDNGKQFDFEKFKEMCEGLNLQIRFISVAHPQSNGVAKRANGKILEALKKRLEGAAKRKWPDEMLSILWALRTTPRRPTXSALSCFSMEMRQ

SEQ ID NO: 152328 - protein, 90 aa, Oryza sativa
  Clone ID: PAT_MRT4530_52390C.1.pep
MAISPAGDPAATEVGVGGFSDPRSRGRGLQLGGGEARRDSARGGAAAAQRRRGVAAAHRHSTQAESVSETHVERNSERYFLVYISVFFHP

SEQ ID NO: 152329 - protein, 57 aa, Oryza sativa
  Clone ID: PAT_MRT4530_52391C.1.pep
TWQRVCSRIDVEESSGGVILRPKSLEPSRPDRWSADQSRERGPVCCAPKPRRRGAPP

SEQ ID NO: 152330 - protein, 1260 aa, Oryza sativa
  Clone ID: PAT_MRT4530_52392C.1.pep
MAHTSGVAARLNLVFMGRPLARSAQPPPSGPRFSGRAQRRRGSNEATACGKGRSRAGRAASPDVVATKPPPLHDEEEEEGGRMVRRGRKGKDAAAGAGGTGGRGGGAGRGGGRGGSGGGGGGGGVREATLVRVSKVLEDFQASDAQVYKFEPGISKQERAAIHEMCRKMGMISKSSGNGERRCLSVYKRKQNQGLETEEGPSHLGFSVEARNVLQDLFMHYPPDDAELNGHTVRNSSDKAVKIQWKPDGAFCRPALRKPDILKKVEMLASKIVQDRSKLPISSYKDAISSTLENHQVVLISGETGCGKTTQVPQYILDHMWGKGESCKIVCTQPRRISAISVAERISAERGESVGDTVGYKIRLESKGGKNSSIMFCTNGVLLRLLIGRRIAENIYQLFLCNSERAEHLDEIHERDRFSDFMLAILRDLLPLYPHLRLVKTFYLEDVLSILQSVGDNHLDPTTDDLKQSSLLTDDYKSSMDEAINLALDNDEFDPLLELISAEQNQEIFNYQHSETGVTPLMVLAGKGQVGDICMLLSFGVDCSTRDHDGKSALGWAEQGNQQEVCEVIKKHMECGSAKLTEENELLNKYLATINPEHIDTVLIERLLRKICVDSNEGAILVFLPGWEDINQTRERLLASPFFQDSSKFLVLSLHSMIPSSEQKKVFKRPPAGSRKIILSTNIAETAVTIDDVVFVIDSGRMKEKSYDPYNNVSTLHSSWVSKANARQRQGRAGRCQPGTCYHLYSRFRAASLLEYQIPEIKRMPIEELCLQVKLLDPNCRIADFLRKTLDPPIPETVRNAITVLQDLGALTQDEQLTELGEKLGSLPVHPSTSKMLLFGILMNCLDPALTLACAADYRDPFLLPMAPDERKRAAAAKVELASLYGGYSDQLAVVAAMDCWRRAKDRGQEAQFCSKYFVSSNTMNMLSNMRKQLQNELAQRGFVPVDASACSLNARDPGIIRAVLMAGAYPMVGRLLPPRKNTRRAVIETASGAKVRLHPHSCNFNLSFRKTSGNPLVIYDEITRGDGGMYIKNSSVVGSYPLIILATEMVVAPPEDDDSDEEDGDSSEDETEKVTLGQHKEIMSSPDNSVSVVIDRWLRFDATALDVAQIYCLRERLASAILFKVKHPQDVLPPDLGATMYAIACILSYDGLPAMITSDDVATSQGSNQSSAESSRFSQGRRVGYIPPGGFLMSLLSDKPLNAPHFQKSFNHPDGASGHIRSSRTSVGRFDQSRHPQRNNSGPGSSAARTFKRQRNGAQ

SEQ ID NO: 152331 - protein, 83 aa, Oryza sativa
  Clone ID: PAT_MRT4530_52393C.1.pep
SLGQHVKDGSRCPLRGVISFMSCWLPHDTPLLLGGAKPVALPVLHVKTPTRGFDVVCICFYGVYCECVRRVVNYLMSLGSEAK

SEQ ID NO: 152332 - protein, 168 aa, Oryza sativa
  Clone ID: PAT_MRT4530_52394C.1.pep
MAGLLGAGGVVTAAAGIGAAIRGLDNGVLDGADGWFQKIVSLMPHRPMSIAGSRGVKDSGDEGGENCVVEVGEKGQHATPYGGFRQNATQYIAKDKMPLNSVGKAMVGGGTDFVSVSESWYPQCGQGDGGRWDRGRAVGRWGWSIVDLAYRIGVVNSWIGVVNSFFLY

SEQ ID NO: 152333 - protein, 48 aa, Oryza sativa
  Clone ID: PAT_MRT4530_52395C.1.pep
SNGTVFFERVSPIHIIIHLLSLPLIMVAAWKQKWFLFHVNRSYEPSVI

SEQ ID NO: 152334 - protein, 146 aa, Oryza sativa
  unsure (1)..(146): unsure at all Xaa locations
  Clone ID: PAT_MRT4530_52396C.1.pep
DDRADAEPEHGPQREPRHRXAHQAXPXAXRGGXRREEEGVXQXXXRRRRRRQEEQDEGEEEEEAGGAAAGGGVVEQGRRVQRGRHQQQDEQHQQHXQRRPWKQQQQQHRKWPWRRQPEGSNNQEQEQKENWVLWFLQEKQKQKWRC

SEQ ID NO: 152335 - protein, 194 aa, Oryza sativa
  Clone ID: PAT_MRT4530_52397C.1.pep
FIFHLPPRCNTVKNQPKPSSRRGERSPSFLSPDLDPLALFLPVRSSRSRVVIVFVVLPGISNAVAASWTSPTPFSCTIRRFWRVTSHIQRMIVTTLSSKVRIPVMSYASCVVIALPRAARAMSDLLQLGSCPVGLPFSGVVAPPVLSFAYELYLRLPLLYLCVVCWDLGPYYVSCTSLHFNPIMVLAMFTNGLR

SEQ ID NO: 152336 - protein, 158 aa, Oryza sativa
  Clone ID: PAT_MRT4530_52398C.1.pep
MGELGLLKARRLFQDDEKAAPLPAERYVGTLFKKAGDEVVHKYTMPTATPTTPKKERFCIQGVRTPDDGYGKGLLRPLTASEKEGAAESRSPPLMKVKRHLTPPSNCLNTWKHYTLQKVAEGSGARVVRPNQSWPQSFSIFTGMSQFVPTELHISALE

SEQ ID NO: 152337 - protein, 36 aa, Oryza sativa
  Clone ID: PAT_MRT4530_52399C.1.pep
HIESNIITSLDRIHKIELIISRLYTEHLYSLTPLLT

SEQ ID NO: 152338 - protein, 422 aa, Oryza sativa
  Clone ID: PAT_MRT4530_5239C.1.pep
MVRGSLGKLASRALSVAGKWQHQQLRRLNIHEYQGAELMGKYGINVPRGAAAGSVEEVKNTLKNVFPSEKEIVVKSQILAGGRGLGTFKSGLQGGVHIVKAEEAESLAAKMLGQILVTKQTGPQGKIVSKVYLCEKLSLVNEMYFAITLDRNTAGPLIIACSKGGTSIEDLAEKYPDMIIKVPIDVFKGITDDDAAKVVDGLAPKTADRQSSIEQIKKLYELFCKSDCTLLEINPLAETADNKLVAADAKLNFDDNAAFRQKEIFAMRDTTQEDPREVAAAKADLNYIGLDGEIGCMVNGAGLAMATMDIIKLHGGTPANFLDVGGSASEGQVVEAFKILTSDDRVKAILVNIFGGIMKCDVIASGIVNAAKQVDLKVPVVVRLEGTNVDQGKRILKESGMTLITAEDLDDAAEKAVKASVK

SEQ ID NO: 152339 - protein, 61 aa, Oryza sativa
  Clone ID: PAT_MRT4530_523C.1.pep
MDPRSSQAQEDGFFHPRDGACPADSSPLGVQRGFSLFSLLNSDLGDQMLCQCAGGDPARDH

SEQ ID NO: 152340 - protein, 229 aa, Oryza sativa
  Clone ID: PAT_MRT4530_52400C.1.pep
MQIFVKTLTGKTITLEVEFSDTIDNVKAKIQDKEGIPPDQQRLIFAGKQLEDGRTLADYNIQKESTLHLVLRLRGGMQIFVKTLTGKTITLEVESSDTIDNVKAKIQDKEGIPPDQQRLIFAGKQLEDGRTLADYNIQKESTLHLVLRLRGGMQIFVKTLTGKTITLEVESSDTIDNVKAKIQDKEGIPPDQQRLIFAGKQLEDGRTLADYNIQKESTLHLVLRLRGGL

SEQ ID NO: 152341 - protein, 100 aa, Oryza sativa
  Clone ID: PAT_MRT4530_52401C.1.pep
MKTSSIQLPNGDNVHSSSPRYCESLITALATTYVAVATVQTLHVEDNGYMRLYVVMLRASIVKGEGRLYVGYGGEEILLFAGNDTTWATASTMTRLATVS

SEQ ID NO: 152342 - protein, 305 aa, Oryza sativa
  Clone ID: PAT_MRT4530_52402C.1.pep
MQIFVKTLTGKTITLEVESSDTIDNVKAKIQDKEGIPPDQQRLIFAGKQLEDGRTLADYNIQKESTLHLVLRLRGGMQIFVKTLTGKTITLEVESSDTIDNVKAKIQDKEGIPPDQQRLIFAGKQLEDGRTLADYNIQKESTLHLVLRLRGGMQIFVKTLTGKTITLEVESSDTIDNVKAKIQDKEGIPPDQQRLIFAGKQLEDGRTLADYNIQKESTLHLVLRLRGGMQIFVKTLTGKTITLEVESSDTIDNVKAKIQDKEGIPPDQQRLIFAGKQLEDGRTLADYNIQKESTLHLVLRLRGGL

SEQ ID NO: 152343 - protein, 381 aa, Oryza sativa
  Clone ID: PAT_MRT4530_52403C.1.pep
MQIFVKTLTGKTITLEVEFSDTIDNVKAKIQDKEGIPPDQQRLIFAGKQLEDGRTLADYNIQKESTLHLVLRLRGGMQIFVKTLTGKTITLEVESSDTIDNVKAKIQDKEGIPPDQQRLIFAGKQLEDGRTLADYNIQKESTLHLVLRLRGGMQIFVKTLTGKTITLEVESSDTIDNVKAKIQDKEGIPPDQQRLIFAGKQLEDGRTLADYNIQKESTLHLVLRLRGGMQIFVKTLTGKTITLEVESSDTIDNVKAKIQDKEGIPPDQQRLIFAGKQLEDGRTLADYNIQKESTLHLVLRLRGGMQIFVKTLTGKTITLEVESSDTIDNVKAKIQDKEGIPPDQQRLIFAGKQLEDGRTLADYNIQKESTLHLVLRLRGGL

SEQ ID NO: 152344 - protein, 97 aa, Oryza sativa
  Clone ID: PAT_MRT4530_52404C.1.pep
MVVAETAAHNYTATDNYWDWITDTGNLCTNGRPSHITFTYPPYGQTYIGSPTCRCCDGRVTTQHLPSNFGLSILTPGKMTSASYNKGANMANTGGTR

SEQ ID NO: 152345 - protein, 172 aa, Oryza sativa
  unsure (1)..(172): unsure at all Xaa locations
  Clone ID: PAT_MRT4530_52405C.1.pep
ELYSCVNLLCWHAVAGRGGREGAHVQRGQVLPSNRSPAPSGAGDARDGIPLPQRDSFSSTSISCKSTRHKGRAGGGGRAAAGAGAREPGEGAAVVAGAEGESDGGGRSRGAGSWSQRAEGWGGGGWSQRAEGGGSGGEGVVTVAEAGSXGDGRGWRWCVAGAGGGSGSGGRS

SEQ ID NO: 152346 - protein, 1633 aa, Oryza sativa
  Clone ID: PAT_MRT4530_52406C.1.pep
MVGAVEKVRSIVASHAHQHKGGGGDGDGEARRRYQGEGAPRPRSPESRSAFEPPTPPRARAPDARSGTKGDAAPCSPPPCRDIRRADEEIDEPRVQFFAPGTYFSHDSSDSDSSVSVANSMYRSVTPSPSESPTVRQNDASDHGATTMSDSDDAREHVGASIASWCEEEHKSFRIVDFDDDIWYPPPPEDESDDVESKLCAFDDEDDEYGDSSNFVVPNCFSADKFAGVDSSVNGSHIENVQNDLLRHFQALVAQLLTGEAISLARDKESKGWLEIVSSLAWQAANFVKPDTKKGGSMDPSDYVKIKCIASGKPSERFVLVCIVAYLFHASSHHHYKTLMDLIACSNFVKGIVCSKNVKHKRMVSEHQNATLLILGGALEYQKVSNKLASIGTILEQEKEHLRMIVGKIESRRPNVLLVEKSVSSFAQELLAKDISLVLNVKRPLLDRISRCTGGQIASSIDNIASARLGHCDTFKVEKVLESSTEHSEKKSTKTLMFFEGCMKRLGCTVLLRGACRDELKRIKRVMQLAVFAAYHLSLETSFFADEGATLPRVPSTSSVGAPEMQTNREHLSSCYANQGSPVSLRTEEEKYAHNASISQIFNGISGPPTFLPLDGESQGIVSEHREVESPANHIKGDNSFHSHHPNALCNVHSVSLGNNLGSMGVTPYYDPCNSLQSPVGVSANILGEVHNLENCGCPISLDDFHVGGLNDQNKLSGGYFPGTDNHQSILVSFSSTCIPKSLACERSHLFRIKFYGSFDKPLGRYLREDLFDQAYCCPSCKEHSESHVRCYKHQHGSLTISVRRLVSQKLPGEHDGRIWMWHRCTRCKLEDGMPPASHRVIMSDAAWGLSFGKFLELSFSNHATANRLASCGHSLQRDCLRFYGYGNMVAVFQYSPMVTLSVNLPPSMLDFNCHSTQEWVKGEAVAVFGEMESLHAEVYGFLSNTEKSIITMDESLKTGIERQIIEMKDLLNMERNEYEVTLLLPVIRGSTHSMKSSIDILELNRLRRGLLLDAYIWDCRLCNISSITKDGRASRIKGSEAELHQAITNHGEMHQEPSTCPQCSSGSLRKSLLSREGHSMDTEIILPEIDLPVGMVDSFVHDIGGLDLVFSKFDVSGIAQSLSKDSIKTEPVERLPSLASILSDKIDMAWSGSCELHNNLPESTTKGNENPSYSKAIPPVRIHSFDSIFRLHQRESTGLLPASLHLSSKSVDSFRDLTSLVKDPLTNMRRAFSHISPRERGNLNVLTHLPTYIRSAAHMVSDGARLLLPHIDFEGGVVVAVYDDEPTSIVSYVMTSQEYIEHITHKMDTKSSFHHPVNCAVASNNQFEESFLPQEGHSEFKGTHFSFSFDDEAFSADNTKFSVTCYFARQFAALRKKCCPGDIDYIRSLSRCKRWSAQGGKSNVYFAKTMDERFIIKQVTKTELDSFIGFAPHYFRHLAESLTSRSPTCLAKIMGLYQVNIKGLKGGREVKMDLMVMENIFFQRTISRVYDLKGSVRSRYNSDTSGHNKVLLDSNLIEAQHTNPIFLGSKAKQRMERAVWNDTSFLASLDVMDYSLLVGVDERKNELVIGIIDFLRQYTWDKQLETWVKASGILGGSKNEAPTVISPVQYKKRFRKAMSRYFLAVPDDWSSS

SEQ ID NO: 152347 - protein, 56 aa, Oryza sativa
  unsure (1)..(56): unsure at all Xaa locations
  Clone ID: PAT_MRT4530_52407C.1.pep
MASSSDPWMKEYNEASRLADDINSMIAXRVSSQSGPEIIRHTSAIRRKITXLCTRL

SEQ ID NO: 152348 - protein, 35 aa, Oryza sativa
  Clone ID: PAT_MRT4530_52408C.1.pep
QWSYYQAGGPTPRRRICLLEGQTAVSVTNVSSKHA

SEQ ID NO: 152349 - protein, 31 aa, Oryza sativa
  Clone ID: PAT_MRT4530_52409C.1.pep
LGRLLGYLSSLCLGRSFASMLSFSPSILLSL

SEQ ID NO: 152350 - protein, 232 aa, Oryza sativa
  Clone ID: PAT_MRT4530_5240C.1.pep
MAGAAAAVAGEGRSGVGQAEGGAQPQSTVTRSRGMTATSRPMRSVAAAFVLTTSPALNHLSFPFAHHHCHSVVPRWRPARCRAKPAVEDVVDDEKEKETWRREDKPEGKDGGEEVLGRGWFMVDEIGMDILTIALPAVLALATDPITALISTSFVGHAFLDNLPQQLGPQPLVCLLRRCSDEVRLLRRCLDEEKGEIKRTERDREKREREDEEGKEIDNDMWAPHGSHNYYF

SEQ ID NO: 152351 - protein, 282 aa, Oryza sativa
  Clone ID: PAT_MRT4530_52410C.1.pep
MAICRLRLTARLAGGQLEVGADLLATKTEWQEHGLMWSSCRCQRVSTQAGSCDWRRRLSRGAVVSVASGRSCGGALRRRQCRLTPCRDVHVDARTGTAYQVGVSLWPWEAEARSDSAVTKLHSESFSNGMKWDSTDIIIRNAVYGCRRSVDVGFISSVHKTTRKKGFSSCLVSLIYLFGDDIGLSGHGLDQVKFKTEDGGEHSLRGVYDVTAREKFNFAWQDDCGDMREGGALLQVESRGRNYKDSRSLLFNGEPGGGLSGRLGVSGEKGSTQVLVHEGSSK

SEQ ID NO: 152352 - protein, 33 aa, Oryza sativa
  Clone ID: PAT_MRT4530_52411C.1.pep
EQLSTQVGCGRVHPIIENDLDKCRVVAPNHDFR

SEQ ID NO: 152353 - protein, 98 aa, Oryza sativa
  unsure (1)..(98): unsure at all Xaa locations
  Clone ID: PAT_MRT4530_52412C.1.pep
XPTLTSSQAIAPMVHSQKLTSVSAHPKLVSHYKYISTFTRGQQXITWHSVGTHISXQVTIHPSIHPSHHQPSAGSPSTGAIVHWTSTHTPGNTAQTHI

SEQ ID NO: 152354 - protein, 50 aa, Oryza sativa
  Clone ID: PAT_MRT4530_52413C.1.pep
CWLLQLHGSLLSSGCLSFRVAFWCNGCLVPCALEAVNEECLSIGEDRACY

SEQ ID NO: 152355 - protein, 127 aa, Oryza sativa
  Clone ID: PAT_MRT4530_52414C.1.pep
VLVMMAASNGEEPPSTSMATSSSPLPMVAQLMVTTDRAVSQQLKDLVNKENSTTMVAALSLSREAYEVAMALKNGEEHRQGRCSGKGDAAAMLMMMASKKEDAAKPSTASMNPLLLSLASQGRLNDY

SEQ ID NO: 152356 - protein, 264 aa, Oryza sativa
  unsure (1)..(264): unsure at all Xaa locations
  Clone ID: PAT_MRT4530_52415C.1.pep
MADRLDRVKPTWRLCGDHVGGERRKKAGRRTNGWRRRLHRDMVRRLQLKGSTPDRWEPVCGVGWDGEAPWRSGDERRPPGAGGNGGEAVPGGDGAQWWGGTFRGTSEQPNGSGLIQDDANGKNLGEELTGVRKRYRRRFEDGKGWKADGGTRPSGGARRMTPRRRGVGASASGKMRGSAKMGRTGAPLWLLALAGSHGXATTTMAVKAAMVWWGEEARQRGRWEGSDFYSGARSVWEAWARPSPAPRKVEATNMLETLRSREGP

SEQ ID NO: 152357 - protein, 142 aa, Oryza sativa
  Clone ID: PAT_MRT4530_52416C.1.pep
MIRFILLQNRQGKTRLAKYYVPLEDSEKHKVEYEVHRLVVNRDPKFTNFVEFRTHKVIYRRYAGLFFSMCVDITDNELAYLECIHLFVEILDHFFSNVCELDLVFNFHKVYLILDEFILAGELQETSKRAIIERMGELEKLE

SEQ ID NO: 152358 - protein, 323 aa, Oryza sativa
  unsure (1)..(323): unsure at all Xaa locations
  Clone ID: PAT_MRT4530_52417C.1.pep
MKGRGRAADRLDRVKPTWHLCQATVSFLVSDGAEGLREKPVTARCGVGSSGVDGELMAASTALGNDLGGTSKQPNDSGLIQDDANGKNLGEELTGVRKRYRRRFEDGKGWKADGGTRPSGGARRMTPRQRGVEASVSGKIRGSVKMGRPGAPLWLLALAGSHGXATTTTAVKAAMAVQKRRRRGCKGAVEAVDRTARIKPRARAGAVKGTRRSRSLAILTATMTSAMTSPPAAARACKLAGERRRDGANRGHQHVEGDTANSPVTKTTAEDQRTAVLRRPTAKKEDGTRTATTWRTRRWPSRAATTTRATAAHGWTNGGDGGA

SEQ ID NO: 152359 - protein, 49 aa, Oryza sativa
  Clone ID: PAT_MRT4530_52418C.1.pep
QSINLANGQGKINRVMVRYALRIDKRRHHSINEPSINHRSFTSPLHTYM

SEQ ID NO: 152360 - protein, 268 aa, Oryza sativa
  Clone ID: PAT_MRT4530_52419C.1.pep
MARDFTATFLLLLSVASLLVISPCAAQQIKTTDTRWSYHLPLPDGVSGAESLAFDGKDGLYTGVSDGRVLKWGGSAAGWTTFAYNANYRKIPLCSSSEVPPEERESICGRPLGIRLFRKTGELYIADAYKGLMKVGPDGGEAQVVATEADGVPFHFLNGLDVDQATGDAYFTDSSSTYTRRFNGEITMNADATGRLLKYDARTRRVTVLKTDLPYPNGVAVSRDRTHLVVAHTVPCQAFRYWLRGTKAGEYELFADLPGYPDNVRRDT

SEQ ID NO: 152361 - protein, 46 aa, Oryza sativa
  Clone ID: PAT_MRT4530_5241C.1.pep
CIISAPTRCRCFSSQDLAFQKRKKDSSRQREIREQHLVPIHVTHTV

SEQ ID NO: 152362 - protein, 577 aa, Oryza sativa
  Clone ID: PAT_MRT4530_52420C.1.pep
MIPPQSEIVGENNASKSAAKEQILSSTNEKMTTSVPQGASSSKSPKGAQEKASFLGKGGEQPFYQPNVYAPQPQTIYSGGYLNHLGQWEEYPHYVNMEGLHSVSPGIYNDNQSIMLSPGYANNPQMMYGAYSPGVGDGQPYLPLHFPFSSPYYQPPASPSMGYSNSATGMSQGDPMLQQEYFLPDGLLYSPTPGYHQPFGSFDRASTQPSSTPGLFGQGNTPLAFGMHHGSMYAPGSYKPRQQGGKFGGTTPSWSSGRRFGTFDLSANQQKGSMPFGIQNGALEFLNEQNRGPRATKPKKQDTENSSIDDKNEKNVPLVDSELYNRPDFVTEYKDAKFFVIKSYTEDHVHRSIKYNVWASTASGNRKLDSAYRLAKEKEDYCPIFLFFSVNGSGQFCGVAEMIGPVDFDKSVDYWQQDKWSGQFPVKWHIIKDVPNNLLRHIILENNDNKPVTNSRDTQEVKLEHGLQMLTIFKNHESETNILEDFDFYEQREKALQENRRQQQPASPELQKPAENKALGELMAHISDTFGQTVQLKETENGESKPAVEGVSSADEASTATTKAEDGTASTNASPVE

SEQ ID NO: 152363 - protein, 65 aa, Oryza sativa
  Clone ID: PAT_MRT4530_52421C.1.pep
IINSQHHISLIRFRTCHRNTHYRLQTLTLSPILVHPSTRSTRIRYIYTAHATLHSTAPRYTHAHS

SEQ ID NO: 152364 - protein, 321 aa, Oryza sativa
  Clone ID: PAT_MRT4530_52422C.1.pep
MGRAPCCDKASVKKGPWSPEEDAKLKSYIEQNGTGGNWIALPQKIGLKRCGKSCRLRWLNYLRPNIKHGGFSEEEDRIILSLYISIGSRWSIIAAQLPGRTDNDIKNYWNTRLKKKLFGKQSRKDQRQQQHLARQAAAAASDLQIKQEASRGANEADGLAAGANYTWHHHHAMAVPVHPMSAPMVVEGGRVGDDVDESIRKLLFKLGGNPFAASPAPPCIPPPPMYEEAPSFVPPLAHGVPLNEGGMQCSSVLPALELDENFHFNHVKLDGLECLFGMGDHQNMRWNEVSPLVCPNNAVASSSQGMQQYCLVEEPADLGMQ

SEQ ID NO: 152365 - protein, 40 aa, Oryza sativa
  Clone ID: PAT_MRT4530_52423C.1.pep
WFKSGRTHKLNFLKAENLGPGEGFSPNGLPSFFMQSQQVF

SEQ ID NO: 152366 - protein, 94 aa, Oryza sativa
  Clone ID: PAT_MRT4530_52424C.1.pep
MSTSLVEEEGSAQGQQRPLSFVVASSARRGDSGASWSLKLHYTGNRMTPFLASDGHGTPIPSERGEGGTKEGEEPLVPSQLPTRYRPPRRQNCR

SEQ ID NO: 152367 - protein, 161 aa, Oryza sativa
  unsure (1)..(161): unsure at all Xaa locations
  Clone ID: PAT_MRT4530_52425C.1.pep
GPYLNANAAGAKVSGESFFLVLQGLVSPHGYXNMYTWGHCYRSLHNQYNLAHRHXFYVFYFLLSGGTWNLTRGCICFRSPARGKVQCSTSLGNCIVYVGVVQGCIXVHSTSWIALIWMIYLPAYLSYVLVNLVLVSQFRSIGCLSLXGFCRYRLNCFTILD

SEQ ID NO: 152368 - protein, 114 aa, Oryza sativa
  Clone ID: PAT_MRT4530_52426C.1.pep
MGLSACNCKASLLLAVLLAATLLRRGLGAAPPFHPAGGGDHARRLIGDGAAARPLLHGSAAAANGASAPGNAGAGSVLRRRPVARRVLLRGVNGEASKSKPSCGSNYEPPCRPD

SEQ ID NO: 152369 - protein, 136 aa, Oryza sativa
  Clone ID: PAT_MRT4530_52427C.1.pep
MARTKQTARKSTGGKAPRKQLATKAARKSAPATGGVKKPHRFRPGTVALREIRKYQKSTELLIRKLPFQRLVREIAQDFKTDLRFQSSAVAALQEAAEAYLVGLFEDTNLCAIHAKRVTIMPKDIQLARRIRGERA

SEQ ID NO: 152370 - protein, 40 aa, Oryza sativa
  Clone ID: PAT_MRT4530_52428C.1.pep
SIQNGPKLVLLAPFNLLPQHCIVSLIKASKFQPIHPWDIK

SEQ ID NO: 152371 - protein, 136 aa, Oryza sativa; identical to SEQ ID NO: 152369
  Clone ID: PAT_MRT4530_52429C.1.pep

SEQ ID NO: 152372 - protein, 450 aa, Oryza sativa
  Clone ID: PAT_MRT4530_5242C.1.pep
MACAPDPSNNKNSSSILHQQVKKISRIPFSWGAHAWGIGREDPRRAIHALKVGTALTLVSLLYILEPLFKGVGKNAMWAVMTVVVVLEFTAVSSFRQEDVVPLARDRLSTIAIGCAICLFMSLFVLPNWSGEDLHSSTVRKFEGLARSIEACVTEYFQDQDKDDKILDKQASRASIHIGYRAVLDSKSSDETLAHYASWEPRHSMQCYSYPWQKYVKIGSVLRHFAYTVAALHGCLESEIQTPPSVRSLFRNPCTRVAREVVKVLQELAVSIRDHHRCAPDVLSDHLHEALQDLNSAIRSQPRLFLGSKHACANSHVLMELNSSKHTATRTTLPSFKTDGTSLLERRNTKADQPSERNERGTLRPTLSKIAMTSLEFSEALPFAAFASLLVEMVVRLEMVIEEVKELERAANFREFTGHDYLTIDLTSNDKMRNPNGVPLDSHTISTAAE

SEQ ID NO: 152373 - protein, 38 aa, Oryza sativa
  Clone ID: PAT_MRT4530_52430C.1.pep
MAPKMLVVFLNDITRNIISAKAQKYFWYIMVTEFIRGK

SEQ ID NO: 152374 - protein, 136 aa, Oryza sativa; identical to SEQ ID NO: 152369
  Clone ID: PAT_MRT4530_52431C.1.pep

SEQ ID NO: 152375 - protein, 257 aa, Oryza sativa
  Clone ID: PAT_MRT4530_52432C.1.pep
KSKEITRRRRLAFSAAPSSPLLLLADPHEADGVQVRDSRKQLATKATCKSAPATGGVKKPHRFRPGTVALREIRKYQKSTELLIRKLPFQRLVREIAQDFKTDLRFQSSAVAALQEAAEAYLVGLFEDTNLCAIHAKRVTIMPKDAARKSAPATGGVKKPHRFRPGTVALREIRKYQKSTELLIRKLPFQRLVREIAQDFKTDLRFQSSAVAALQEAAEAYLVGLFEDTNLCAIHAKRVTIMPKDIQLARRIRGERA

SEQ ID NO: 152376 - protein, 633 aa, Oryza sativa
  unsure (1)..(633): unsure at all Xaa locations
  Clone ID: PAT_MRT4530_52433C.1.pep
LRCRGLVSPPTRLAYYAVVVARLRIHRPACLRRRRLVSSPIRLVGHTTVHGRPRLPRRPASIAADWCLRLHGWPVMPLLLGVYDFTXRPASVAADWCLRLHGWPLMPPLLXPGVYIFTDRXASSAADWCFRLHGWPIMPPLLGVYVFTDQXASSAADYCFRLHGXPIMPPLLGVYVFTDRPPRPPPTGVSACTADLLCRRCWASTSSPTGXPCPPPTVISACTADLLCRRCWASTSSPTGXPRPPPTGVSAYTVGLLCRRCWASTSSPTGXPRPPPTVVSACTADLLCRRCWASTSSPTGRLVHRRLLFPPARLTYYATVVGRLRLHRPAASSTADCCFHLHFTDRPPRPPPTGVSACTAGLLCRHCWASTSSLTSXPRPPPTGVSACTADLLCRRCWASTSSPTGRLVRRQLLFPPARLTYYAAVVGRLRLHRPAASSAADWCHRLHGWPVMTPTDAIFXSRLATSPSPLIGVSIFNTSCLRLLPTATTTDGHHRLPSPTGYAATDWCFYLHNCASSLPVCFYCRRLMFTSSRLCNFVTMVEQFHFYYLRHRQTLLPLLRKLCYFTNHDDYKSFDTLAYVNKYNAMLFYYNKWCSNIQDFYSDIFYAYIHSSNDYSTTRSYSSRLYVQLFLN

SEQ ID NO: 152377 - protein, 169 aa, Oryza sativa
  Clone ID: PAT_MRT4530_52434C.1.pep
VPVRDPGRRPTRAVIFRPEREREDRRPAATFLGRARTKQTARKSTGGKAPRKQLATKAARKSAPATGGVKKPHRFRPGTVALREIRKYQKSTELLIRKLPFQRLVREIAQDFKTDLRFQSSAVAALQEAAEAYLVGLFEDTNLCAIHAKRVTIMPKDIQLARRIRGERA

SEQ ID NO: 152378 - protein, 607 aa, Oryza sativa
  unsure (1)..(607): unsure at all Xaa locations
  Clone ID: PAT_MRT4530_52435C.1.pep
MIYHSTNMPDWCLRCRGLVSPPTRLAYYAVVVARLRIHRPACLRRRRLVSSPIRLVGHTTVHGRPRLPRRPASIAADWCLRLHGWPVMPLLLGVYDFTXRPASVAADWCLRLHGWPLMPPLLGVYDFTANRLGCFHGWCFRIHGFKLISYALGMDQSEHHRRFAFAATDWCHRLHSWXYIFTDRPPRPPPTGVSACTAGLLCRRCWASTSSPTSXPRPPPTIVSACTADLLCRRCWASTSSPTGXPRPPPTGVSACTADLLCRRCWASTSSPTGXPRPPPTVVSACTADLLCHRCWASTSSPTGRLVHRRLLFPPALHRPAASSATDWCFRLHGWPIMPPLLGVYVFTDQPPRPPPTGVSACTADLLCRRCWASTSSPTGXPRPTPTVVSACTADLLCRRCWASTSSPTGRLIRRRLVSPPARLACYDANXCYLLHGWXTSPSPLIGVSIFNTSCLRLLPTATTTDGHHRLPSPTGYAATDWCFYLHNCASSLPVCFYCRRLMFTSSRLCNFVTMVEQFHFYYLRHRQTLLPLLRKLCYFTNHDDYKSFDTLAYVNKYNAMLFYYNKWCSNIQDFYSDIFYAYIHSSNDYSTTRSYSSRLYVQLFLN

SEQ ID NO: 152379 - protein, 59 aa, Oryza sativa
  unsure (1)..(59): unsure at all Xaa locations
  Clone ID: PAT_MRT4530_52436C.1.pep
CIIFCEEFYNSMAYHREXILNIYALXKRCTWLNINFACIFIFEVVVYYECALEYLSMVY

SEQ ID NO: 152380 - protein, 81 aa, Oryza sativa
  Clone ID: PAT_MRT4530_52437C.1.pep
PPPLSIPPSVAAGLHPASAAAGVHPVLSRRRSPSRFSRRRSPSRSPSRPVAGARHLSFLGWDSPVAGEGEVEGNSPDTKKQ

SEQ ID NO: 152381 - protein, 412 aa, Oryza sativa
  Clone ID: PAT_MRT4530_52438C.1.pep
MEFTDGRSPTRSELGRHCVVFGLASPSPTWRQLTCGIKGTPWEDLRHRISEPTHPPQLTKPELWLHDHPQFLLSPLYIGGDSYSGIIVPTLALAIDESNDSGDKPILNLMGYVAGNPVTDSQFDEDGKIPCLHGMGLISNELYEHAKETCRGKYSAPGNARCEQSIQAIRNCTKDINMLHVLEPLCEEVWSPRIHNTSATDGMSRLMLESARAADDDIIEFNFPWIALDLRKSNLAYLLQKASYVVLKIWANDKTVRESLGVHKGTVGKWTRCNYDIDYIKDVYSTVEYHLTLMREGYRSLIYSGDHDCGIPFTSTQAWIRFLNLSVVDDWRPWYVAGQVAGTTQTLTTHANPTPISIFEDWASKIGEIDEVTIGVSLSLGTSPPTGSEPRTSGATEVLVTTRLQTLLHIMH

SEQ ID NO: 152382 - protein, 166 aa, Oryza sativa
  Clone ID: PAT_MRT4530_52439C.1.pep
LKDYIPLPTKIKIRETWGIPPYLETTKHPYKPGILVGNKGGKKGKPLKGKRGGGKAKAFTVFYPQKTNVVEGGGAKEKKTPAPRWMGSGGTQTRAFGFPNGRPPFQRGSGGGPTPGPGGSRRKRKVPAPGTTGKPPGTSPQGRDPPFGPMWTQGSCPESFWGGRGS

SEQ ID NO: 152383 - protein, 69 aa, Oryza sativa
  Clone ID: PAT_MRT4530_5243C.1.pep
GSYELPRTITSYSLTKNETGQSIPKQGGCNARVMGIDQFQSLKGSLNGSRCYINIFQRGKEIPVSHSPC

SEQ ID NO: 152384 - protein, 1084 aa, Oryza sativa
  Clone ID: PAT_MRT4530_52440C.1.pep
MPPPPPVAAAAAAARHALLLASVAVAVALLLVSPCHGVSEQGQALLRWKASLRPSGGALDSWRASDATPCRWLGVSCDARTGDVVGVTVTSVDLQGPLPAASLLPLARSLRTLVLSGTNLTGEIPPELGEYGELATLDVSKNQLTGAIPPELCRLSKLESLSLNSNSLRGAIPDDIGNLTALAYLTLYDNELSGAIPASIGNLKRLQTGMSGSLPDTIGQLSRIQTIAIYTTLLSGRIPASIGNCTELTSLYLYQNSLSGPIPPQLGRLAKLQTLLLWQNQLVGAIPPELGRCRQLTLIDLSLNSLTGSIPATLGDLPNLQQLQLSTNQLTGAIPPELSNCTSLTDVEVDNNQLTGAIAVDFPRLRNLTLFYAWRNRLTGGVPASLAECPSLQAVDLSYNNLTGVIPKQLFALQNLTKLLLISNELSGPIPPEIGGCGNLYRLRLSVNRLSGTIPAEIGGLKSLNFLDISDNHLVGAVPSAISGCSSLEFLDLHSNALSGSLPETLPRSLQLIDVSDNQLAGALSSSIGLMPELTKLYLGKNRLAGGIPPEIGSCQKLQLLDLGDNAFSGVIPPEIGTLPSLEISLNLSCNRLSGEIPSQFAGLEKLGSLDLSHNELSGGLDSLAALQNLVTLNISYNAFSGELPDTPFFQRLPLSDLAGNRHLIVGDGSDESSRRGAISSLKVAMSILAAVSAALLVAATYLLARMRRGGGAGGGGRVVHGEGAWEVTLYQKLDISMDDVLRGLTSANVIGTGSSGVVYKVDTPNGYTFAVKKMWSTDETTTAAFRSEIAALGSIRHRNIVRLLGWAANGGARLLFYGYLPNGNLSGLLHGGGAAAGKGGAPASDSEWGARYDVALGVAHAVAYLHHDCVPAILHGDIKAMNVLLGAAYEPYLADFGLARVLSKLDSAMPAPPRIAGSYGYMAPEYASMQRITEKSDVYSFGVVMLEMLTGRHPLDPTLPGGAHLVQWVRDHLQAKRDAAELLDARLRGAAGAGAGADADVHEMRQAMSVAALCVARRADDRPAMKDVVALLKEIRRPAPSAAGDDAKPPQPTQPPSLPTTVTATPASPVSSCSFAAVTDYSV

SEQ ID NO: 152385 - protein, 38 aa, Oryza sativa
  Clone ID: PAT_MRT4530_52441C.1.pep
QRIRPLKNSSLIALSILLFKGGVHKAVRLADVYVLVRA

SEQ ID NO: 152386 - protein, 1055 aa, Oryza sativa
  unsure (1)..(1055): unsure at all Xaa locations
  Clone ID: PAT_MRT4530_52442C.1.pep
LRVSLFRLSFLSQLLAYIIYPCHGVSEQGQALLRXRASLRPSDGALDSWRASDATPCRWLGVSCDARTGDVVGVTVTSVDLQGPLPAASLLPLARSLRTLVLSGTNLTGEIPPELGEYGELATLDVSKNQLTGAIPPELCRLSKLESLSLNSNSLRGAIPDDIGNLTALAYLTLYDNELSGAIPASIGNLKRLQVLRAGGNQGLKGPLPPEIGGCANLTMLGLAETGMSGSLPDTIGQLSRIQTIAIYTTLLSGRIPASIGNCTELTSLYLYQNSLSGPIPPQLGRLAKLQTLLLWQNQLVGAIPPELGRCRQLTLIDLSLNSLTGSIPATLGDLPNLQQLQLSTNQLTGAIPPELSNCTSLTDVEVDNNQLTGAIAVDFPRLRNLTLFYAWRNRLTGGVPASLAECPSLQAVDLSYNNLTGVIPKQLFALQNLTKLLLISNELSGPIPPEIGGCGNLYRLRLSVNRLSGTIPAEIGGLKSLNFLDISDNHLVGAVPSAISGCSSLEFLDLHSNALSGSLPETLPRSLQLIDVSDNQLAGALSSSIGLMPELTKLYLGKNRLAGGIPPEIGSCQKLQLLDLGDNAFSGVIPPEIGTLPSLEISLNLSCNRLSGEIPSQFAGLEKLGSLDLSHNELSGGLDSLAALQNLVTLNISYNAFSGELPDTPFFQRLPLSDLAGNRHLIVGDGSDESSRRGAISSLKVAMSILAAVSAALLVAATYLLARMRRGGGAGGGGRVVHGEGAWEVTLYQKLDISMDDVLRGLTSANVIGTGSSGVVYKVDTPNGYTFAVKKMWSTDETTTAAFRSEIAALGSIRHRNIVRLLGWAANGGARLLFYGYLPNGNLSGLLHGGGAAAGKGGAPASDSEWGARYDVALGVAHAVAYLHHDCVPAILHGDIKAMNVLLGAAYEPYLADFGLARVLSKLDSAMPAPPRIAGSYGYMAPEYASMQRITEKSDVYSFGVVMLEMLTGRHPLDPTLPGGAHLVQWVRDHLQAKRDAAELLDARLRGAAGAGAGADADVHEMRQAMSVAALCVARRADDRPAMKDVVALLKEIR

SEQ ID NO: 152387 - protein, 332 aa, Oryza sativa
  Clone ID: PAT_MRT4530_52443C.1.pep
MADVLGCYTIKSHGTKVARLHMYDWIILLLLAVIDGLLNIIEPFHRFVGRDMMTDLRYPLKGNTVPFWAVPLIGIVLPCAIFGGIYFKKKNFYDLHHGILGILYSVLITAVITDAIKDGVGRPRPDFFWRCFPDGKDRRVSSKKVTRAFQAGTLHELTIALRPQLGVGRDFLMQKLVWCNGGWEPAGNVDNYARSFAGLGFLAWYLAGKITVFDRRGHVAKLCIVFLPLLTAALVAVSRVDDYWHHWQDVFAGSLIGLTVASFCYLQFFPYPYDADAFWPHAYTFQLAEASRNNNTANSYSVRPTGFETVNVPEGHGGIALRDTNLEAGRRP

SEQ ID NO: 152388 - protein, 247 aa, Oryza sativa
  Clone ID: PAT_MRT4530_52444C.1.pep
MADVLGCYTIKSHGTKVARLHMYDWIILLLLAVIDGLLNIIEPFHRFVGRDMMTDLRYPLKGNTVPFWAVPLIGIVLPCAIFGGIYFKKKNFYDLHHGILGILYSVLITAVITDAIKDGVGRPRPDFFWRCFPDGKDVYDNVTTGVICHGEKSVIKEGHKSFPSGHSSWSFAGLGFLAWYLAGKITVFDRRGHVAKLCIVFLPLLTAALVAVSRVDDYWHYWQDVFAGSLIGLTVASFVSAFLTTIS

SEQ ID NO: 152389 - protein, 119 aa, Oryza sativa
  Clone ID: PAT_MRT4530_52445C.1.pep
MADVLGCYTIKSHGTKVARLHMYDWIILLLLAVIDGLLNIIEPFHRFVGRDMMTDLRYPLKGNTVPFWAVPLIGIVLPCAIFGGIYFKKKNFYDLHHGILGILYSVLIPAEATDALRMV

SEQ ID NO: 152390 - protein, 76 aa, Oryza sativa
  unsure (1)..(76): unsure at all Xaa locations
  Clone ID: PAT_MRT4530_52446C.1.pep
MVNSFFILVNNEIVNGTIHFVQKGDGPTTFSXIVSYHKPFLHXFHIHSLHYTTNFCFLTFPHFISYSIRSFITILF

SEQ ID NO: 152391 - protein, 85 aa, Oryza sativa
  Clone ID: PAT_MRT4530_52447C.1.pep
VGSCSLPSLLFEAPPHQIDSRQCRIEERPVGIELIVVAAEELVPARSWWIRVDLFAEGVGRMACSGEHLKPKHARKRGRNEEEGK

SEQ ID NO: 152392 - protein, 51 aa, Oryza sativa
  Clone ID: PAT_MRT4530_52448C.1.pep
MQLQQLAPDKKSLACSKTSQVGAIQLKSFEKIISVIVLMKHGVILLEWSKE

SEQ ID NO: 152393 - protein, 83 aa, Oryza sativa
  Clone ID: PAT_MRT4530_52449C.1.pep
MSGSTGERSFADIITSIRYWVIHSITIPSLFIAGWLFVSTGLAYDVFGSPRPNEYFTESRQGIPLITDRFDSLEQLDEFSRSF

SEQ ID NO: 152394 - protein, 76 aa, Oryza sativa
  Clone ID: PAT_MRT4530_5244C.1.pep
ARLLQALGLPVLPWNPWREALDRVPYQIRKGKIRPGVPSFFFPVVLSGSGVPCDMPRASFPFLVSLGMGNGGTRVS

SEQ ID NO: 152395 - protein, 66 aa, Oryza sativa
  Clone ID: PAT_MRT4530_52450C.1.pep
SATLPHRCFMPHPDPNTTCPMPAAPCLTPATRSTPSRADLERLFLQQVLPRNLGFCLLLLRNPAPV

SEQ ID NO: 152396 - protein, 187 aa, Oryza sativa
  unsure (1)..(187): unsure at all Xaa locations
  Clone ID: PAT_MRT4530_52451C.1.pep
GAGRRRRPWPNSPAHGADRSNGGGGGEVCDGARAVEGTGAGECKXEKEREEGTGVLYIGXQGPIVAGVATIWPAEWGEVGLRERRDSKIKSRPSRARARXEGEGEWVREARAHAQAWPTWPXEAGCGRGGGCGXRWRWLEVGEGPDRIKTHARMMHWHTEERKQDKMLRHRADGSQGQNIDITFQYF

SEQ ID NO: 152397 - protein, 215 aa, Oryza sativa
  Clone ID: PAT_MRT4530_52452C.1.pep
MESSSSAAAAVDGEDGGGSKRSWYAVGERAVLVPYLREHVPRYHGWMKDPALLEATASEPLSLDQEFDVHRSWTLDPLKHTFIVLDKDLIEGGFAVGDPHTEAMVGDVNIYMNDPDDLQLAEIEIMIAEHKSTFCYSRGKGLGQEAILIMMAFAVEKYGIHTFRAKINESNTASLKLFRKLGFKDASYSSVFKEVTLEAPATALPLVSPLTIGNW

SEQ ID NO: 152398 - protein, 240 aa, Oryza sativa
  Clone ID: PAT_MRT4530_52453C.1.pep
ASSPRRLPDNTNGPPSPRIYGETKQNRGTGGESVNSEALTEEGRGAAGLREAAGRGQRPPDLRFRVTPRGRSETAAPSPEEEEVEAEEDRRLLVTPAMSVGRAAEVEVEGGRGGIGGGGGGGGEDAAAAEAARVGGRAPWSFIGGRTGGDAETGARRAKWRASSEAGAGGQEEPTPVGARPRRGQPRGRKVARDGWEARAGCSCHLSSPRIGIPCGRRAEWLSLSLSLSLSRLDSSRFEF

SEQ ID NO: 152399 - protein, 306 aa, Oryza sativa
  Clone ID: PAT_MRT4530_52454C.1.pep
MAFAPRLLLPSRCPPPASSPARHGGRTAPELSGPTPRVVVVTSGKGGVGKTTTTANLAASLARLSLSAVAVDADAGLRNLDLLLGLENRVHLTAADVLAGDCRLDQALVRHRALHDLQLLCLSKPRSKLPLAFGSKTLTWVADALRRAANPPAFILIDCPAGVDAGFVTAIAPAEEAVLVTTPDITALRDADRVAGLLECDGIKDIKIIVNRVRPDLVKGEDMMSALDVQEMLGLPLLGVVPEDAEVIRSTNRGVPLVLNDPPTPAGLALEQATWRLVERDAMTAVMVEEQERPKKKAGFFSFFGG

SEQ ID NO: 152400 - protein, 79 aa, Oryza sativa
  unsure (1)..(79): unsure at all Xaa locations
  Clone ID: PAT_MRT4530_52455C.1.pep
VLINSRFGRSRDTNRSGFXNEHATEPCNRSTTSPLVINRAETAQRHKYGDAAPGQIMYVNLFGRFPLTRKEFGCGTKTI

SEQ ID NO: 152401 - protein, 369 aa, Oryza sativa
  Clone ID: PAT_MRT4530_52456C.1.pep
MTADGLTVDSIAGKGWTILPEAESDWRSHAAAVAQSVKLIKKRLKWGWILERSRQLSVVLERPDLWDDPVFAGKVSREHGELMGKIKSVNQFEQELMEHIDMLRLAREEDDNELETNYPLKLLLLHAFLVQAGAGGTESMDWAAMVMNMYSSWAQRRGYTVSIIEEMPGEIAGIKRATIKVDGEYAFGYAKAEVGVHRLVRISPFDSGKRRHTSFAAVAVVPILGDGSTRYQIKDSDLRIERFRSGGPGGQHANCTESAVRIVHIPTGITATCQNERSQHMNKASAMAVLQSRLDQLEIARQAQMNADHTQSLSEISWGNQIRSYVLHPYRMVKDLRTNYEVSDPDSVLNGDLDDFILNFLSTSLDEAD

SEQ ID NO: 152402 - protein, 665 aa, Oryza sativa
  Clone ID: PAT_MRT4530_52457C.1.pep
MAPHIHIAGSPPPEYKVDDLKVFWLLPGRGLANGLRRVKADVHTNSMAALAPRFRTLRLYVHNNVITEFAEMDSLGKHELNANINFRKAHISEDYQVDNISDNDDEGAEFTDSDYEIDKGDDDLFEKWVDKDVVDKLVSPKGKQLSSAAVEALRDAINEYSVKNRVAIKMPYNDKDRIRAHCDETCLWKLNASHDSRSKCFMIKTYIGEHRCNKKWELKTFTANYIANKYVETFRADDKMTIRNFARTVQKDFNLTPSRSKLARARRIALKKIYGDEIAQYNQLWDYAAELRRSNPGSCFFLNLSNGRFNTLYVSLDACKRGFKIGCKPLICLDGCHIKTKFGGHLLTAVGIDPNDCIFPIAMAVVEVESRSTWTWFLQTLKDDLHIVNTTPYTIMTDRQKGLIPAVGDVFNDAEHRFCVRHLYQNFHVLYKGETLKNQLWAIARSSNVIEWNKNMEKMKALNVQAHEYLEEIPPNTWYILHARELPILSMIEKIKTQIMTRVYMKQKEVEEKWSGNICPKIKQKLEKLEKNAELANTCYTLPAGKDAGNSQEYHVVMPYHALGMKGYNLRTWNNCELLGTAKKMRPKRKRSVQVMQDDKDVYINETSFSIVPEELVQERQHSTSVLTTLLEQKYTTTAKSDNIYTRGQSKDEEKQHKINNGQII

SEQ ID NO: 152403 - protein, 866 aa, Oryza sativa
  Clone ID: PAT_MRT4530_52458C.1.pep
MCAFQLALSIVLTFPLSICMAPHIRVAGSPPPEYSPKDGLFSLEIIHGGFFQGEGSDRGYISGNLDYFDGCEVDAWSMLWIEDILKQLGHAEVDDLKVFWLLPGRGLANGLRRVKIDVHTNSMATLAPRFRTLRLYVHNNVITEFAEMDSLGKHELNANINFKKAHISEDYQVDNISDNDDEGAEFTNSDYEIDKGDDDLFEKWVDKDVVDKLVSPKGKQLSSAGEEDEKCHLSSEEGLDPCDTSSHDEEAQLKFKSFMPKDMTNPQFFVGMVFPTVEALRDAINDINEHSVKNRVAIKMPYNDKDRIRAHCDETCPSKLNASHDTRSKCFMIKTYIGEHRCNKKWELKTFTANYIANKYVETFRADDKMTIRNFARTVQKDFNLTPSRSKLARARRIALKKIYGDEIAQYNQLWDYAAELRRSNPGSCFFLYLSNGRFNTLYVSLDACKRGFKIGCRPLICLDGCHIKTKFGGHLLTAVGIDPSNCIFPIAMAVVEVESRSTWTWFLQTLKDDLHIVNTTPYTIMTDRQKGLIPAVGDVFNDAEHRFCVRHLYQNFHVLYKGETSKNQLWAIARSSNVQFFPKPAVLLATLPVLLLAELMVVLYVTIFRLIGYKSWEWLANEVKVERGCVARCVHWLKEVLGMLPILLPVDFHYYYGVYMKQKEVEEKWSGNICPKIKQKLEKTAELANTCYTLPAGKGIFQVTDRDHQFIVDINVKCCDCRRWQLTGIPCSHAISCFRNERIQPEDMVSPCYSLESFRAAYKYNIVPSRDQSKWEKMNGVNVQPPKYEKKVGRPKKTRRKQSIELEGGTKLSKHGVVIHCSYCDGAGHNRNNCELLGTTKKMRPKRKRSVQVMQDDKDVYMNEV

SEQ ID NO: 152404 - protein, 117 aa, Oryza sativa
  Clone ID: PAT_MRT4530_52459C.1.pep
MAAAAAASSGWLRRAAGTVPRIPCGLVTALVPTPPPPAAAVVSEAPALALPSHAAVAMELMAVPKKKVSKYKKGLRNGPKALKPVPVIVRCKCCGRVKLPHFYCCSGERGNPGSESS

SEQ ID NO: 152405 - protein, 116 aa, Oryza sativa
  unsure (1)..(116): unsure at all Xaa locations
  Clone ID: PAT_MRT4530_5245C.1.pep
TPPNIDIRDKPRQNXYDACGGRQEGSSAISDLDEFVLEEEDYPVVDFIPMNKEQHRLRPTGXRAITCQIRGPDLYXNPCLHLFYLNLAYTLVPTISIPCKYRSRDLKSRHLPSHAA

SEQ ID NO: 152406 - protein, 87 aa, Oryza sativa
  Clone ID: PAT_MRT4530_52460C.1.pep
ANSRADMLNLGTKTEAHRANTLTHTCTTTVSHQPSRVVWTKHTHGVAQHHQCQGERHNLCHWTQRHTQAGDPDRAFKEFGAQPDQTL

SEQ ID NO: 152407 - protein, 334 aa, Oryza sativa
  Clone ID: PAT_MRT4530_52461C.1.pep
MAAAHGGGDGGGARRLRRRRETRHGQGAARRGGVVAASQRLYATTRRRGGGGVVEWVEERRNSERDCDSELVVQQGAGVYKCFDGSLNRHIARGENFRGNGLAQQASGYNVKKGVFLILEKPVLGCKSLDEIGKVSDQGRLINGQAESSNKTLLKLVKKKIEEHPKKWHEVLSEALWAHRISKHGATKVTPFMFVYGQEAILPVEVNLGSLRYIKQGDLSVEDYKTLMGVNLDDVIDKRLKALEEIEKEKKRVAKAYNKRVKAKLFQVGDLVWKTILPLGSRSKEFGKWSPSWEGPYRVCGIVRGNVYFLETLQGEHFQRAINGKYFSSVWQDA

SEQ ID NO: 152408 - protein, 89 aa, Oryza sativa
  Clone ID: PAT_MRT4530_52462C.1.pep
HQMNAYRSDLHIAYLTYFSVYSTNNHCHISLQEFWARVGSPSRTVYSISFCPKPFRVNFGWLLIKLSWLHMYLMKFSDDFFLLANIIRS

SEQ ID NO: 152409 - protein, 339 aa, Oryza sativa
  Clone ID: PAT_MRT4530_52463C.1.pep
MARAVVLLLLAVAALSCTSAAASGPSCHADDSAALLAVKAAFNNASFEYWTPEFPCCDWYGVDCGDDYLPSDDRVINLAITRDDNITGTIPGDAIAGLTRLRYITFFKVPGITGPIPAALANISGLRVLTISHTAVSGPIPSFIGDKFTDLGILDLSFNSLTGAIPASLAKPPKLNSIDLSRNRLTGSIPRLLLSKAGQQAFLTMSHNNLTGRIPAEFGAVNFVQIDLSRNQLTGDASMLFGSGKKELVSAYLSRNALSFNMSQLQLPEELNFLDVSHNSIYGSIPAQMANMTDMQLLNVSYNRLCGVVPTGGNMPSFDAYCFQHNKCLCGAPLSHCTH

SEQ ID NO: 152410 - protein, 445 aa, Oryza sativa
  Clone ID: PAT_MRT4530_52464C.1.pep
MAVEMVESSMVTAGEATPEHRIWLSNLDLLVARSHTPTVYVYRRTGSDSDAAFFSPDVLKAALSKVLVPFYPLAGRLAQDSAGRPEISCTGEGVLFVTARSGATIDDLGDLAPSDELRRMLVPAADVAAASILAMFQVTFFRCGGVCLGAAIHHTAADGLAALDFVNTWAAIARDVAGDGEAAAAAVQRPWLDRTLLRARSPPAVRFDHAEYSRRRGGGSKLPFDSAILPMSKNQLNALKGAGAGAGKRLSTFTAVVAHVWRCACKARGLAVAGTEAATRLYMTADARTRLHPPLPRGYLGNAIFRASAVSKVSDIVAAGPLGAVAEKVSAATARLDDGYVRSLLDHLEQTAAAASGGAAGLRKGEWVMPESDLWVISWQGLPLYDADFGWGRPAFMGRACLQFSGLVYLVPGRDDGDGRLDVVVAMDPESLAKFKDVFYEELKC

SEQ ID NO: 152411 - protein, 117 aa, Oryza sativa
  Clone ID: PAT_MRT4530_52465C.1.pep
YLWSNAMVTWAVLVYCWNSGRSALCYARLIILHASLNSPFLCPDFMSLYVALEVVASAAFCLMTYPREPRIIWLGLRYRLLSNTAMLFYLIGVALVKKNARSFAFSGLTQAPPEALL

SEQ ID NO: 152412 - protein, 288 aa, Oryza sativa
  Clone ID: PAT_MRT4530_52466C.1.pep
MLASTVLRNGCPRMMLASTVLRNGHPRMKVQLVKDVLRHDVDTGSKVVEDLVEVLCPNRASHVGDHLLNQLDYSSDRIGEKGPSSSIVQMVAGRSKLKPDIHYPIFTRKVKKTKWEGKRRGGGRGSGVAAVPSPLPDLAGGEVEATARRQLGSGGLTAREVVPSSPSNDGGGGGDVPMQSIQMVKLTTTAKVFTNEVDIKEGEGGVARSPRPSQTDLAPPVPGAARSEVSELCHILGRFTPALPNRRKTKGEGIRPKPDDEGRGGWCSSPDKGKRGGGASSLRRGEEA

SEQ ID NO: 152413 - protein, 92 aa, Oryza sativa
  Clone ID: PAT_MRT4530_52467C.1.pep
QPEFLRWFASARRVVPPTKLASLDEREQVAEAEPGVILSPSARPSRNSSRFSNLSPMMVRTAESEMSAVIRSLTFTASPGCAAATGTELEFA

SEQ ID NO: 152414 - protein, 291 aa, Oryza sativa
  unsure (1)..(291): unsure at all Xaa locations
  Clone ID: PAT_MRT4530_52468C.1.pep
IIIKNTFDFTDGMPLVSRHLRKLDLSSLELKECFLNFSSCPALKWLSFSDHCCFDSVKKIVFQSIEYLCFYFCQFSEYHHTHIYAPSLVGLHLEGFXGRTPFLESMPSLVAAIVTPHQNCDDRCSNTYSGYCEDENCHGCHGMLGETGNDSAXCVLLGGLSKAKSLKLVAGPEMRIFRSGLRWCPLFSKLKTLIPNEWCVATDLWPLACILKQCPVLNKLTLRNSKKAKCMIETXNALVKSAAISEHLKXVKIVCKEADDGVYKIVKCFSTXEVIIKRRNQSPKRKLLNLF

SEQ ID NO: 152415 - protein, 473 aa, Oryza sativa
  Clone ID: PAT_MRT4530_52469C.1.pep
MDAASRPAVVIDNGTGYTKMGFAGNVEPCFITPTVVAVNDTFAGQTRANTTKGNWMAQHSAGVMADLDFFIGEDALARSRSSNTYNLSYPIHNGQVENWDTMERFWQQCIFNYLRCDPEDHYFLLTESPLTPPETREYTGEIMFETFNVPGLYIACQPVLALAAGYTTTKCEMTGVVVDVGDGATHIVPVADGYVIGSSIRSIPITGKDVTQFIQQLLKMSLILHYCGSMPLRVQMSIITAQGNQRFMKITATNNERDKMHEIEERGEHIPPEESFDVARRVKEMYCYTCSDIVKEFNKHDREPNKYIKHWSGIKPKTGAKYTCDIGYERFLGPEIFFHPEIYNNDFTTPLHVVIDKCIQSSPIDTRRALYKNIVLSGGSTMFKDFHRRLQRDLKKIVDARVLASNARLGGDAKAQPIEVNVVSHPIQRYAVWFGGSVLASTAEFYEACHTKAEYEEYGASICRTNPVFKGMY

SEQ ID NO: 152416 - protein, 122 aa, Oryza sativa
  unsure (1)..(122): unsure at all Xaa locations
  Clone ID: PAT_MRT4530_5246C.1.pep
MIQSVIHDQINIFAYYIGIHSFTHKKKKNTMADPKFPSPETVNITLVCLLLPLFSPTTRSIPSAASTTDDRTYIADERAALLAIKATFFNPNSRRTSWKGEDCLIXRGATCTNTTGHVIKLT

SEQ ID NO: 152417 - protein, 646 aa, Oryza sativa
  Clone ID: PAT_MRT4530_52470C.1.pep
MAGGGSDSAVLEGQRRAQRGWEARVLAEIVFVELLFVFSKIIFAAVGIGDHVNIMLNISKCISSFRSSGAIYKQCALCANLCGGPVAHSLEHLVALVVWWWKKRAMTKQTDRTGHPSSDPLIADCNICLKSATSGTLDTISPSSPPPSSSPPYNLMPHSGEVQVVAVITDWDVRDRLRWGRRTARGGSLAAAGGGAAAGPPGRHALQPSGRACTMQEREIVPSSPGGWPGEIPALVQTLPPLTRRCTSSIAGRVAGKAAGGGTWPRPRLATALLQLKRSFTVNTASATAFRSWRAGTDCCHWAGVRCDDDDNDAAASGSTGRRATSLDLGGRGLQSGGLDAAVFSLTSLGYLNLGGNDFNASRLPAVGFERLTELTHLNISPPSFTGQIPAGVCQSASPYRAATTPHPVPRAIPRHHPTAPLPASPTGRKESTAPARTPEKRAHGYGERDALCLRLHHRPPELAASIAEKGRGKIAGFPDDLCLAGPHGVFCDDDDDDGNASHVVSISLGYVSDFSANPSCAGALRLRHRHTPHDLVLVNNPTLSGRLAISTASLPLLRRTRRRRAELGGEWRGGQTGHIVAELPGDLSEKIVEEARHRFVSGLEFTTFGVKEELPRVIEAWIVLSVGRLPPCPPLDEGGVRWLRG

SEQ ID NO: 152418 - protein, 73 aa, Oryza sativa
  Clone ID: PAT_MRT4530_52471C.1.pep
MTMTTTPPAPLNRDDDDDDCRQHDDYRDHDATTSPMLVGTAADGGGEPSLAGGRGWRWRVNLPLVNISSAWKN

SEQ ID NO: 152419 - protein, 82 aa, Oryza sativa
  Clone ID: PAT_MRT4530_52472C.1.pep
MAILHRRLRIAVSPRRIRRALAVAGRRSPPPSRAAPSSRAEEELCRFSWPRRRLPGWQRGFPAASSGGGEVARVGRGGGAGG

SEQ ID NO: 152420 - protein, 277 aa, Oryza sativa
  Clone ID: PAT_MRT4530_52473C.1.pep
MHRARLLVVVVTAVVTLLLLAPAAGAEEDDQFGYIPGTPRGPENWGSLKPEWATCSSGEMQSPINLGLLDLTLAPGLGDLNYTYRNANATVVNRGHDIMVRFDGGDDAAAAGGLVINGTAYRLRQVHWHAPSEHAVDGRRYDMELHMVHLNTQNQTAVVGILYAIGAQDEFLHKLEPYIIEVADQKDKEKIVNGGVDPNVAKEHDIVYYRYMGSLTTPPCTEGVIWTIVRKVHTVSLSQLALLKAAVVNGNEKNARPLQDVNNRNIGLFIPLPLINV

SEQ ID NO: 152421 - protein, 58 aa, Oryza sativa
  Clone ID: PAT_MRT4530_52474C.1.pep
PPADGVSVPLGLRRTWPTQPLVLPLCPPPLLQPSPPPPLPPPPPPSPPPLPPPLLAIL

SEQ ID NO: 152422 - protein, 42 aa, Oryza sativa
  Clone ID: PAT_MRT4530_52475C.1.pep
LKMTMLVAMSMSRATTARGLNTVWPIHGPKTPFLSQKTFFWK

SEQ ID NO: 152423 - protein, 258 aa, Oryza sativa
  unsure (1)..(258): unsure at all Xaa locations
  Clone ID: PAT_MRT4530_52476C.1.pep
GLTETRMFNIALLAKWLVKVESPDGSLCFELLRKKYLCSGGVFQCSTEGASQFWSGILNTRKXMMLGSELNXKIGDGSHIWFWLDVWYGSCPLKTSFHEIFEICNQQSITIXELKQIGIGGLSFRRTFGPLELDQWQQVRTILEELELTDSPDILKWGLTASKRFTTNSLYRAMAFRWVKDEMLQLIWKSPCPIKIKHFLWLASRDRIQSCEQLKKKGWDGSELCMLCNTIESTNHIGDPLESTCRHASLSTSIVSPK

SEQ ID NO: 152424 - protein, 956 aa, Oryza sativa
  Clone ID: PAT_MRT4530_52477C.1.pep
MAGGDVPARLRNHRTVAEAMTDRRWIQDIQFGVGAIGHSECLPINEHSFLSWLCDCRKRMVKEHRRGFDTIATLVAWTIWKERNNRVFNQKSRSWAEVVRVMTGEAELWRLARAAIPALVAHMMRHVFDQNGIKGAIAAVAKLPDNAVQADVVSTLKRKLDLFSLDIFLSFLPVLAGLLTSKAERHAIVSLELLLDLIKIFGPVIRSTLSAHSAVGVDIQAEQRRGGQSAQLAQELNLSLHDLVPLPPPPPTSAPWPLPRSSVAGLSSAPALSLFPRRRPTPPPPTSASKSAPLGRRRRGAGGTGGGGGGGGGGGGGVRVVVGGLVVPPATSVHELLECPVCTNSMYPPIHQGYGLRLAASSPGKQILGLTLPLPESEDLQLVSPSAAAGPPDFRGRGAEGNSTRPCLQGEEVVAAVVVAVAVGEAVEQLKLRHHKPLKFHERYRPYLRDAGLLGLSQICQKMPQLDKALITALVERWRPETHSFHLASGEMAVTLQDVAMLLALPIDGRPVCSTTDHDYAQMVIDCLGHDPRGPSMPGKSFLHYKWLKKHFYELPEGADDQTVERHVRAYILSLLCGVLFPDGTGRMSLIYLPLIADLSRVGTYSWGSAVLAFLYRSLCSVASSHNIKNIGGSLLLLQLWSWERSHVGRPLVRSPLCPETDIPQDVPPVGFRWALHRISRRGREHENWEETHHEYIQEWEARRQRIFPESEQYDPSSYEEYLHWYSGVTRRYLVPSISDDVEAGPSLQPDDSIDLQYQAKAPMIRKAVDKLHGMVKKAKMAMTSTADTTTQALVFEFLHGFQDVLHDLGEIKENGGSATSPHVESAAAQDMPLLLLEAEQNIVDADQEAQHQEEEELHMVDDATMTLEPMDEEDNGFNNVICPCPSLELEEHSHSATPAIDDTSAQALLENCEVAEAVNENVDPATQVTGSSTPEQGTDVIVDAEQENPATTEDN

SEQ ID NO: 152425 - protein, 84 aa, Oryza sativa
  Clone ID: PAT_MRT4530_52478C.1.pep
MHANMNNGKGEESGRDGAVAVAKHDGSLDPLLPRTVAEQCSLLPLRPKDLVERESVSKIWEREGRGSGRAVVGEDPSSCRCRCT

SEQ ID NO: 152426 - protein, 76 aa, Oryza sativa
  Clone ID: PAT_MRT4530_52479C.1.pep
LPWAIADIDDDVGDDVTTGGGSATHARRRTTARRRKRRAPSGSGRRGEPRRLGEPTGGLPERRRPPERRRRTAVVD

SEQ ID NO: 152427 - protein, 255 aa, Oryza sativa
  unsure (1)..(255): unsure at all Xaa locations
  Clone ID: PAT_MRT4530_5247C.1.pep
RPRVRPRVRPRVRPRVRDHESHRGGKVDVKGVSEQENSRDHTVSSKKGQNPQRESFVKQAEEDPMSDDENHEDSRRGRSKLERWTSHKEIDYSSIDNENAPTFSSIKSDVQAPTADELGKSEAAAAGNSELKSGGDNGQTSEKNAEERDRHLDTVERLKRRSERFKLPMPGEKDAPQSKKVDTEVXPPQIESASADLKVKPKRPXRKRRWTGTWELALADGHSKNYLRNIMTDCTLHTMFVLLQLEVESMYDFAV

SEQ ID NO: 152428 - protein, 168 aa, Oryza sativa
  unsure (1)..(168): unsure at all Xaa locations
  Clone ID: PAT_MRT4530_52480C.1.pep
KGKMIYCVSGXGFTVDRVHGDGLRXTDGRDRLGLPWAIADIDDDVGDDVTTGGGSATHARRRTTARRRKRRAPSGSGRRGEPYRGTNGGGLQPDGDGDEVEAAETIGSTTTAVLRRSSAEAEGWTKTATTWRTHRWPSRATTTTGAAAAHGWTCGGDGGARLDAEVAS

SEQ ID NO: 152429 - protein, 252 aa, Oryza sativa
  Clone ID: PAT_MRT4530_52481C.1.pep
MAVDGEMPALESQFNQCAITAEEEAAALPDSTEPPCTNVASQDEESGSAAGESESESDSDDLDEVIADILEGGDDGGSADYYTGPLLPEGTMLLTKTLVDKILALRRRRFPMPPATGGERLWWVSPEFREELIAAELAAAAVFDASQDKFVECQAMIAEKRHPEHGYAVVEETSEVMTTICRAFFGRYNESDDDDDDDLLCDCVDANECKCGGDDWANEFIDEEDDDCSEDVDEEEEEKDESCCQRMIYRLR

SEQ ID NO: 152430 - protein, 115 aa, Oryza sativa
  Clone ID: PAT_MRT4530_52482C.1.pep
MDMDRHGALTKLGFGALTFNSALAIYRSRGDPATVAFVAGAYAAIVLLFYFLLRFERRRDDRGRTKVVVWVLTTLLTAMFAARVAPLMPPLVAFVVWVMAAGTSVAGFWAFFLNL

SEQ ID NO: 152431 - protein, 725 aa, Oryza sativa
  Clone ID: PAT_MRT4530_52483C.1.pep
MEQWNAIESIFENNGRGSRVIVTTAILSVANSCTAYKSGANGGCCIRRHGCVYKMQTLGEAHAKELALGGGSDQRPPELEHGSATLMAKCDGLPLALVSVANHLRCLGNLTGRHCADLFARLRRVLMDSYAGLPDYAARTCLLYLAVFPNDGRRLKRSVLVRRWLAEGYARGGEDVLGNSTDVDVADGHFRSFVDQSIIVAHPADDDDDDDHRTRRCRTHGIVHEFVLHKSIAESFIFSSRAPPRRKRCTTALSDDHLADICKLWNLRYLSIGMSSNVTMLPDNIRRLKLLETIHLSKTKVTMLPLQVVGLPCLAHLVGKFKLLLPDQRGKKTVVISNELEKLAKKSNLQTLAGFVADESQQAFPQLMRHMRKLIKVKIWCEFGGEESDSVSTTATDHLADAIRSYIEAPKVEETDARSLSIDMEQCSKQLIRSCHGESKLLHSLKPPCRSYLTSLKLHGDLFRLHGLISMLKNLYELCLSSTTTTLTRDLVSAIGGLPLLLRLKLVANHIEHFAIGAGEFRSLQHLLLVVHRQNPILLPKIEEGALPQLVSLELLCKHLRGLSGIQIRHLQRLKEVALDSRVSEGTKREWEAEARRHPNRPSILLLKNSYSTVLPDDTDRLDDQMDGELAREKSAPDDDAGNQEQIAEVESESSAFQLANSTMNNSVAGKESTADDADEEGLGSTNAVPMEQINSTGSINETEVSNRGKFTMSYFEDCCPYHED

SEQ ID NO: 152432 - protein, 563 aa, Oryza sativa
  Clone ID: PAT_MRT4530_52484C.1.pep
MSLPRLAAFYWPRLRAADRDDVRAAGMGHGLDPEGITITPLMDMVLGFLYQSIPRPPVSASASLSAAAATGDGGGDDRISLLPDDILRAVVSRLPAKDGARTAVLSSRWRRLWRSTPLVLVDTHLLPRRGGGRPARAGAASRAVADAVSRVLEAHPGPFPFVSLSCSFIGDDAQRGVAARWLDLLAAKGVEHLVFVNRPCPLPGVTLPAALFNCSSLRRLYIGSWELPDTASIPLPRAAAAAAFPNLRELVLGCVVMVDGDLPFLLAASPALETLAVFGILNTLRARLSSGSLRCAQFCLSFMEEVAVLDAPHLERLFLWRNIKNTRVKIGHAPQLRMLGYLQPGVHQLEIGNTIIKARTIVRPGTTVPSVNMLALHLHFGVRNEVKMLPSFLRCFPNVETLCIEVESNPPFPALVVSSIIITALHQIVASVLHSALLSEEAPGRTSNIDVNFWQEAGPIECVQSHLKMMILREFQGEESELSFLKFVGENARVLEKMVIVMKLGRYSAPEEVAAKVMDLQSAKWAREGNKLGFLISRLRAGGSAWSLRDGTDLSCDDPFMCL

SEQ ID NO: 152433 - protein, 383 aa, Oryza sativa
  Clone ID: PAT_MRT4530_52485C.1.pep
MSTLWYLIVLDDISMEQWNAIESIFENNGRGSRVIVTTAILSVANSCTAYKSGANGGCCIRRHGCVYKMQTLGEAHAKELALGGGSDQRPPELEHGSATLMAKCDGLPLALVSVANHLRCLGNLTGRHCADLCHLLGSLLLDERNVPRLAGTAAAADSFARLRRVLMDSYAGLPDYAARTCLLYLAVFPNDGRRLKRSVLVRRWLAEGYARGGEDVLGNSTDVDVADGHFRSFVDQSIIVAHPADDDDDDDHRTRRCRTHGIVHEFVLHKSIAESFIFSSRAPPRRKRVRHLSIQGGGGNTTTAALSTTDLSCVRSLTVFGDGGDAVSNLRKCKLLRVLDLEQCTTALSDDHLADICKLWNLRYLSIGMSSNVTMLPDDELLA

SEQ ID NO: 152434 - protein, 146 aa, Oryza sativa
  unsure (1)..(146): unsure at all Xaa locations
  Clone ID: PAT_MRT4530_52486C.1.pep
RAIHIKAYTDYALDMNLNKKSHYDRINKIIPPXEFAIKLCGANGKASCMAAYMVWNSIVSSIMNLVGTXNYYDDRKECYRKLCYDFSSXENLIGDXADIVAIGGDDLECVICTTTADQATLTDWMRNLVFGIPALLADSINVHICA

SEQ ID NO: 152435 - protein, 114 aa, Oryza sativa
  Clone ID: PAT_MRT4530_52487C.1.pep
ASTSFVWETWAPPGPGFLRTSLVGWAFPAAAGNPTFSWGRATEEPFGNSFGVGSSNSPFELNGIKVKPIKGFIGSSEMTRGVLNDMDNLPHHELVVVGAGFGGVFWAYELFKGP

SEQ ID NO: 152436 - protein, 58 aa, Oryza sativa
  Clone ID: PAT_MRT4530_52488C.1.pep
EAQYQLQSLQNSIVQKHQSNRWQDLPKNCPKKHRGCIAGTKECYPFGKLTRSQNSRST

SEQ ID NO: 152437 - protein, 40 aa, Oryza sativa
  Clone ID: PAT_MRT4530_52489C.1.pep
QPSNDDLGLSQIPVNCADMLGRPQQLWADQFVGSSSTCPG

SEQ ID NO: 152438 - protein, 646 aa, Oryza sativa
  Clone ID: PAT_MRT4530_5248C.1.pep
MLPAVKLSPGPVAFAGTNLRPLYLAPLDGPRAAGQKAQRQPLEFRCAASAADDKESKTEVVPVRSEAAQKLKISIYFATWWALNVIFNIYNKKVLNAFPYPWLTSTLSLACGSAMMLVSWATRLVEAPKTDLDFWKVLFPVAVAHTIGHVAATVRFMGAMISNLAFVFRNIFSKRGMKGKSVSGMNYYACLSIMSLVILTPFAIAMEGPQMWAAGWQKALAEVGPNVVWWVAAQSVFYHLYNQVSYMSLDEISPLTFSIGNTMKRISVIVSSIIIFHTPVRPVNALGAAIAILGTFLQSSEFKKMVMFRAMDEEGIQMKNVSAKPVASTEANFACATYLTLPRTREAKRRAIELAMYAMTPRCHLPPPCRAASTTPATSTALSTPPPSRAGPDELRSTWAHRAWTLAGSAAVLSSLSTSATLAAADADANGAAAAFAAPLAAALAAYSLADLATGVYHWLVDNYGDADTPVLGPQIAAFQGHHRHPSTITRREPCNNLHALARAVALALPPAGAALAAAGAPASAHAFAAVFAACVVLSQQFHAWAHGNPRRLPPGVGAMQRAGVLVSRAQHGAHHRAPYDNNYCIVSGMWNATLDRHRVFEAMEMVVFLRTGVRPRSWDEPDAAWTEDYDDTAAVAGGDTSLDTQ

SEQ ID NO: 152439 - protein, 33 aa, Oryza sativa
  Clone ID: PAT_MRT4530_52490C.1.pep
MVQLNHSVQLQKKDKDLTEHFQPVIEYHKYGMK

SEQ ID NO: 152440 - protein, 86 aa, Oryza sativa
  Clone ID: PAT_MRT4530_52491C.1.pep
RRRHAPAHLPLVLTAGQATGGGYGKNGLQVMVLKVQTRVAPLEELGVASLASSGPFFFFAGLIFFFFPLGNLIHVSRPISGLVGYN

SEQ ID NO: 152441 - protein, 730 aa, Oryza sativa
  Clone ID: PAT_MRT4530_52492C.1.pep
MEAADLVKKIRELEEGQAELKREISRIVPERGYARRPPTLSAQHRRTELPHAEAAAPLSLILQRIFLFLLQPRNRYAEHLYGYSVPEAVGQNALELIVHPSDYGAANDIIQNIFMGKCWRGKFPVKHKSGERFNIVASNTPLYDDDGSLVGLICLSTDTRTLEEILGHSTSGKVYPSSAKPRVQLNGSKSGLLNKVSCDSQQPLQSAITSRITNLATRVTNRVRSRVKTGQNCDDQFGGACESHYSEHDAREEQTSSEGSTPSGDVLHGAFVSEDNYSGKSSKTNSDDSGEGKLGLHKILSSTAEALWANRGIPWPWRGHGNDDAGKNRTNLPQFHEIQENGQSHKEVPEPIILPDCQDTEFVQEVKYEVSGSWWSFNASTSSMSSTGSTNSSAIERADREADCLDFEILWEDLAIGEQVGQGSCGTVYHALWYGSDVAVKVFSKYEYSEDMILTFRQEVALMKKLRHPNVILFMGAVASLQRLCIVTEFLPRGSLFRLLQKNAGKLDPRRRVHMAIDIARGMNYLHNSSPPIVHRDLKSSNLLVDKNWTVKVADFGLSRLKLETFLTTKTGKGTPQWMAPEVLRNEPSNENYGVILWEIATQKIPWDNLNTMQVVGAVGFMDHRLDIPSDVDPHWASMIESCWDRCTYYIYFFDISTYYFFANSEETTVLNVKQLILVFNKPILSASSDPQRRPSFQELLDQLRDLQKQYNLQAQLQRTAAAKMSVDDC

SEQ ID NO: 152442 - protein, 120 aa, Oryza sativa
  Clone ID: PAT_MRT4530_52493C.1.pep
CWTLEEILGHSTFGKVYLSSAKPRVQLNGSKSGLLNKVSCDSQQPLQSAITSRITNLATRVTNRVRSRVKTGQNCDDQFGGACESHYSEHDAREEQTSSEGSTPSGDVLYGAFCSEDNYS

SEQ ID NO: 152443 - protein, 133 aa, Oryza sativa
  Clone ID: PAT_MRT4530_52494C.1.pep
MTADPLASGAGSALPTATAAAGPSGGGIRTKGAPEADSVGVPRPAASVTTTKKGMKVAAEWMEFGLGLGGRGPCDLDRGGIDGRRPYLGLPVANADGRCGCRSSVPGSLAATLLHPFSPPRLCPRYRANADRL

SEQ ID NO: 152444 - protein, 157 aa, Oryza sativa
  Clone ID: PAT_MRT4530_52495C.1.pep
MGGSEKDDGVPRFASLLAVECGKKDPSTRATPEVFAATRNQDHQYSQRNAGIVKGVYHKAPPLFHRVVVTPFAHLEEIKTDISNLSNDNKIIVYSTYEREAFGIACKMMRLSLVLPKNVMRHAIASWKILDETNNVHRYISNILEIISKFVPLNSLV

SEQ ID NO: 152445 - protein, 141 aa, Oryza sativa
  Clone ID: PAT_MRT4530_52496C.1.pep
RPESKRPPMYQYDRELDNHGSNRGLHHARTIYQASTVSYGNHTRKDAGKQSETSQNPYPPNPQRIQKPTMLPLEAASKTATPARRPREIPHGFRRGKSPVRSDRNECRRAEGKVLSPRGGGGGSREPGGRGEEGRRGRRRK

SEQ ID NO: 152446 - protein, 476 aa, Oryza sativa
  Clone ID: PAT_MRT4530_52497C.1.pep
ARVTQLNKLEDLNKPICRTVTDAVHVLDAIVGYDSRDAKATRAASKYIPPGGYRQFLKPDGLKGKRIGIPNGFFNFPNGTVQQIVYQQLLDTVRKQGAVVIENLDIANLAVIQDVLNNGEQIVLAAEFKSSLNTYLSDLSYSPVRSLADIIAFNNAHPIEERLKNFGQLIFLVAENTTGIGALEGAVIRQLNELSADGLEKLMQDEQLDAIITPNDLVSTVLAIGGMPAITVPAGYGKMGVPFGICFGGLKGYEPRLIEMAYAFEQATKVRKAPNENLVDCEKNIGGRGIPPNIVSGLSHIYGLGERGNLKQTSRAPAQNLAAIRDQARCRPPTATYRLLSPPLPPDPAEERAPLPAESRPAVSSCAAVTHHLLVRRSPASLLTPPARQLPRSAARSRGEIDGWMWPRGNAFRWMDGWMDTARGKRKRERGEREMLSDGWMDGWMDTARGKRKRERREEEREEEKMRTGFTRRRRG

SEQ ID NO: 152447 - protein, 229 aa, Oryza sativa
  Clone ID: PAT_MRT4530_52498C.1.pep
MKLMGRTDVHSGYVFVAAVTRDGEAGGGATSLIRCALLQLATTIAASRQQRRCRCSNSQWHCTPRRTPAGCVWGRSSPVAVSKSKLPLAAGFHRPVCARENEKRERAMDNGGRYHLVVRSSSSSECDGLMALSMPQCSDRSSRQSFYAESHPYHYNFLTFACLSGSRNYGSCYLPHHHHMPHLQFILHSPAGSPWRSPMQFQIQYQDTEDLLVLHHSEVTKYASGGSLT

SEQ ID NO: 152448 - protein, 688 aa, Oryza sativa
  Clone ID: PAT_MRT4530_52499C.1.pep
MAKSPSFGRHPSSRVYSLRHGARSFAVLAPLSLPCGFADFFGAVFFATVNSKTVVTPAGMKKTVFGSVNFNVRLERSDVWPVNAAMSKWRRGAISPNRKPKVAVDGAMEARFTLLRKICSRLSCGDLVEEFCMLRIFPLSQSWKVEINQDEEVDGLPKLVMPAGANVLTLAQADTEARKMIGDVSVTEFSQLLTRQAAGRVNRVYDGELPPRANTHKVDDDAGPSRKRMRGQVKKAPRKRRAPDSDADDEETVKENDGEEEDVRETEAASEKAAGEVADTRAETPGYTPTPSPELVETRVESNCSPLRQKDVEGAKAVVAIAAAKVAKGGSIKKTSRKRLVDVGRVFSDDKSSNETPTSPAGRSLGLSTAPGVKVDTGRAGGSAAGASASTDQVVKTAARVFGSPGVSNLVSPAGSSSLFTELNKFDEGCTAIKSLAVRILAAHCSTERTMRARLDGLKNRLLQQFGCKHVAEFPNFAKGDWEVSAQDVSPVLRAWHKLFWQKDGRSIAKARLLEQLAKAEAADQGEEPAAGEGGGDAEDHPEGVHQKLCIRAPFGNWQSKNEKFVAVKGLPKVRCPFRPVYHEMIINGNSYKVLKVAGWMRVHPGRTLEDYDSVHTKRREDMVRFWRNHQKTDCQEAIARRRYSLVCVSPPSPLRVVYDISSDDEPCSSNHSLGGGDCIGGEHVIYL

SEQ ID NO: 152449 - protein, 387 aa, Oryza sativa
  Clone ID: PAT_MRT4530_5249C.1.pep
MLPAVKLSPGPVAFAGTNLRSRSASVSSVSSLKPSKFVVSSLRPLYLAPLDGPRAAGQKAQRQPLEFRCAASAADDKESKTEVVPVRSEAAQKLKISIYFATWWALNVIFNIYNKKVLNAFPYPWLTSTLSLACGSAMMLVSWATRLVEAPKTDLDFWKVLFPVAVAHTIGHVAATVSMSKVAVSFTHIIKSAEPAFSVLVSRFLLGETFPVPVYLSLLPIIGGCALAAVTELNFNMVGFMGAMISNLAFVFRNIFSKRGMKGKSVSGMNYYACLSIMSLVILTPFAIAMEGPQMWAAGWQKALAEVGPNVVWWVAAQSVFYHLYNQVSYMSLDEISPLTFSIGNTMKRISVIVSSIIIFHTPVRPVNALGAAIAILGTFLYSQAKQ

SEQ ID NO: 152450 - protein, 1830 aa, Oryza sativa
  unsure (1)..(1830): unsure at all Xaa locations
  Clone ID: PAT_MRT4530_524C.1.pep
MEDHRGRPSQGGGPNQVDVGCNSESRTSLHLSFRQQLAPTVGTSERNHXQRMPPKKVVKEKVTRRKESDAGADMAAEEGAEPSVPVAEDGGAPSASAPVLSLPPSAPTTSVQVPNAADMTKAAAAARALQTRAEILSTSQLLVPQDAPSQPAAAPTALAAVQAVNHDPETQTEADMEAMRQNMTRLQDMLRQMQEXSXAYEAARRTKITSAPILQYSVGYVPPQVYPQVTTQPLPPQVAQAPMYFVGQPSTAAAHPAPHVQLQPQPVAAQVHPQPLGQVPQAMAEGASALQAQFQAXLQQLNQPHISSTTPSARPEGNTSQGAPSCLPSNQPRMGASLXSQGPQFDFINAAQAPTVWPQAPTPGFGASHAPTQVAMTWSQPIFDPSMAAQQAXPIGARQPNAMAQPHAQAVISPFATPYPQQGVVKRAGGKKGLPLSGGIKTRPIPPQFKFPPVPRYSGEXTNPKEFLSIYESAIEAAHGDENTKAKVIHLALDGIACSWYFNLLAYSIYSWEQLCNVFVLNFRGTYEEPKTQQHLLGIRQRPGESIREYMRRFSQARCQVQDITEASVINAASAGLLEGELTRKIANKEPQTLEHLLRFIDRFARGEDDSKRRQAIQAEYDMASVAAAQAQAQSXVAEPPPLAVRQPQPAIQGQPPRQGQAPMTWRKFRTDRAGKDVMAVEEVHALRKEFDAQQASNHLLPVRKKYLNHQISFGPEYAEGVMFPHQDGVXTQALTPAPASLRGFGGEAVQVLGQAQLMIAFGTGENRCKEQVLFDVVDIPYNYNAIFGRATLNKFEAISHHNYLKLKMPGPTGVIVVKGLQPSAASKGDLTIINRAVHNVEAEPHDRAKHVPKPAPHGKIAKIQIDDADPTKLVSLXGDMGEEEAKKILEVLKKNIDIFAWSPDEVGGVSTXLIMHHIVVKPDAKPRKXKLRKMSADRQEAAKAEVQKLLKAGVIQEIDHPEWLANPVLVRKPNGKWRMCVDFTDLNKACPKDDFPLPRIDQLVDSTAGCELLSFLDAYSGYHQIHMNPADIPKTAFITPFGTFCHLRMPFGLSNAGATFAKLVYKVLCKQLGRNVEAYIDDTVLKSRKAFDHASDHQETFDNLRAAGMKLNPEKCIFGVRAGKLLGFLVAERGLPFFKTLRSTGKFNWTPECQAAFDELKQYLXSPPALISLAPGSELLLYLAASIVAVSAALVQETDSGQKPVYFVSEALQGAKTRYIEIEKLVYALVMASRKLKHYFQAHKVIVPSQYPLGEILRGKEVTGRLSKWAAELSPFDLYFVARTAVKSQVLVDFVAEWTPAFAPKPEPVEXPWVMYSDGSWSHRGAGIAVVLTSPNGVPIRYAARLQFETTNNATEYEAILPGLRKAKALGXRPLLIRTDSKLXAGHVDKSFEAKEEGMKRYLEAVRSMEKXCFTGITVEHLPRGQNKEADALAKSAACGGPHSPGIFFEVLYAPSVPTDILEVTTIDQVKLGEDPYNWRTPFVKHLETGWLPEDEAEAKCLQHRATKYKMVSGQLYHSGVLQPLLRCISFAEGEEMAKEIHQGLCGAHQVARTVASKVFRQGVYWPTVLKVCVEQIKKCESCQRHGRSQTAPKYELQPIAPIWPFARWGLDIIGPFPVARNGYMFAIVAAVEYFSRWIEAEPLGAITSTAVQKFVWKNIVCRFGVPKEFITYNGKQFDSDKFREMCEGLNLEIRFASVAHPQSNGAAERTNGKILEALKKRLEGAAKGKWPEEMLSVLWALRTTRTRPTKFSPFMLLFGDEAMTPTKLGANSPRVTFSGDEGGREVSLELLEGVRVEALEHMRKYDTGTSATYNKKVRPTELLPGRSL

SEQ ID NO: 152451 - protein, 123 aa, Oryza sativa
  Clone ID: PAT_MRT4530_52500C.1.pep
MGGGGEVGGMHGAAGRGARRRRDGGSTRARRTRVRGRGDDGDERRTTAVAEEEEERGREEQGGGGGGDAAGGGGGGGGEAAGGGGGRWRGAVTGCLRLADVRARAVAPAAPLRACIVLRRARH

SEQ ID NO: 152452 - protein, 63 aa, Oryza sativa
  Clone ID: PAT_MRT4530_52501C.1.pep
ADLPGRPLEPRSAGGNSSCWCSEPGKWLGGCWIALRTSAWIIKCTRAVSGHAVSPRLRLHVAR

SEQ ID NO: 152453 - protein, 45 aa, Oryza sativa
  Clone ID: PAT_MRT4530_52502C.1.pep
HDCILEHVVYPAEIVGKRIRHCLYAAKVYNIVLDPYEISIAVYKH

SEQ ID NO: 152454 - protein, 116 aa, Oryza sativa
  unsure (1)..(116): unsure at all Xaa locations
  Clone ID: PAT_MRT4530_52503C.1.pep
IIAPIAQAIETGYLLLRKLAENXEQYNCLNRALSLIGNDNHSNLGLYRAQVKPYXRLYRPSTSSTXINMNLCFXPIWCPADAXSNFKSNSIHHQIRFDLLPSFPNLMQNSVVNSNA

SEQ ID NO: 152455 - protein, 250 aa, Oryza sativa
  Clone ID: PAT_MRT4530_52504C.1.pep
MEKIVAASDAQEKEDEHCLYAQELMFAYNRSMVLRAAVQLGLLDALSAAAGNALTADELAEKIQATDKAEVAVSVDRILRYLASFDVVRCSTETSPDGALLRRYMPAPVCRWLTRNNGEGSLAPFTVFVVDEDHLLPWQHIAAAVTSGGPAPFERAHGLLYFEYMGKNQRLGALFDHAMAQHSVILVSKMLERFQGFDGVQQLVDVGGGDGSTLGMITSRYKHIRGINYDLPHVISQAPSLPETTIDASN

SEQ ID NO: 152456 - protein, 157 aa, Oryza sativa
  unsure (1)..(157): unsure at all Xaa locations
  Clone ID: PAT_MRT4530_52505C.1.pep
MAVRALGPPXLHALAATRQAPRCPPAAAAPPTHGYRRGAAVLSGRRGRHTLSSIQLMHAVRGGNLQVEPNMLHSPKPLMSTRRGCVASPTIANVDDCTEGEGALGYTMTQICDKFIEFFMYKKPQTKDWRKVLVSREEWERYRPYFYKHCQARIDME

SEQ ID NO: 152457 - protein, 550 aa, Oryza sativa
  Clone ID: PAT_MRT4530_52506C.1.pep
MAARALGPPPLHALAATRQAPRCPPAAAAPPTHGYRRGAAVLSGRRGRSGPRLFPLLAWCLGGYIILRWQSSSGTKHASFPQAIDVHQTWKLSAVPKVTGKGWSDGTRSCLGIPIASRVLAEKVNRVATVYEDAGNLDVSDSGFDHYGIPSKSCHQRCVASPTIANVDDCTEGEGALGYTMTQICDKFIEFFMYKKPQTKDWRKVLVFREEWERYRPYFYKHCQARIDMENDSSMKQKLVVLARKVKKIDNEIEKHMELFTQLRENPTDINAIVARRRKDFTGGFFQHLNFLVNAYNGLDERDAIARLGAKCLSAIHAYDCTLEQLDLDSAQSKFDDILNSSSLDDACDKIKSLAKTKELDSSLILLINRAWAAAKDSTTMKNEEQSASGDCFKGHAAKDKRKTERTVGGRGGEAEVKDIMCHIYTTTKESLKSISPPEMKLLKYLLNIEDPEERFGALATAFSPEVEHEAKDEDALYTTPNELHKWTKMMLDSYHLNKEETDFMDARKMSDPVIIQRLTLLKETIEEEYMKKYIHPEEQESEDDEDSEE

SEQ ID NO: 152458 - protein, 103 aa, Oryza sativa
  Clone ID: PAT_MRT4530_52507C.1.pep
LAGGPRISNTLPQTLFLFEPPSFLLSAFVCAAAPFGYRRVFSPTPLSCILLSWLPLRLRLSSLQRGFFQKKMHDHPDLVELAGLTSQVDSFSMFRVCNASTHW

SEQ ID NO: 152459 - protein, 92 aa, Oryza sativa
  Clone ID: PAT_MRT4530_52508C.1.pep
MREQEERRHKAARREQPTATAAPPASGTAAHPPSPLHSRARPPTPLHRLSLPPAASAPGADADTFLPPHRHRQVDADAGLPAVVAPVLERSH

SEQ ID NO: 152460 - protein, 697 aa, Oryza sativa
  Clone ID: PAT_MRT4530_52509C.1.pep
TSRERGLGEVGAAASSSSSSRWWRSFSPERRPKTPRIHSLRSTAPRRHPRLHRGPPSSAINSTFQANVLALLAALPPSAGPAAFASLSRSEGRDRAFVRGMCRGDSAPDDCATFLRSAVLDINGHCNDRRRAAIWYDKCFLSYADTNASTAYEGTYRQVFYHYKNVSDKVAFERTYYALMTRPTAAAADGSASAARMFAAGEAVYDPGADNGTMYGLVQCMRDRTAAECDRCLNDSVQQLPSCCWGHQGGVVLGYNYYVRVEIYTYYDLTVDAQPPSPGPSAFTPTNHAGKKGTNVIVATTVSIGTILLVAVFIAVFIYRRKTTKTMIPPGNNTGNEEDNDYVDPPTLNLTVLRAATRNFSAENKLGEGGFGEVFKGILEDGEEIAVKRLSKTSSQGFHELKNELVLAAKLKHKNLVRLLGVCLQEEKLLVYEYMPNRSLDTILFEPEKRQQLDWRKRFMIICGIARGLLYLHEESSQKIIDRDLKPSNVLLDEDMIPKISDFGLARAFGGEQSKDVTRRPVGTLGYMSPEYAYCGHVSTKSDMFSFGVIVLEMVTGRRSNGMYASTKSDSIIVQVWEKWRTRSLADAVDASLGGRYPENEVFSCVQIGLLCVQENPADRPDISAVVLMLSSNSTSLQTPSKPAFFFGSGSIASLDAAGGHAFFGGRGSEVAAISSNKMSSNPVSENEVTISELQPR

SEQ ID NO: 152461 - protein, 41 aa, Oryza sativa
  Clone ID: PAT_MRT4530_5250C.1.pep
VRDYRPFVFLVENTVCVLVRNRVDSIIFVRDEPVTANSIPP

SEQ ID NO: 152462 - protein, 103 aa, Oryza sativa
  unsure (1)..(103): unsure at all Xaa locations
  Clone ID: PAT_MRT4530_52510C.1.pep
SVWICGLSYDAHIELKIYPPKDFRLIPADSMLLCSSLXCKRYFHRRLKAANLTCTGIFRNACMMDIHADAREKRLTINIKLYSREIADANVQLSMPIGTGNLS

SEQ ID NO: 152463 - protein, 51 aa, Oryza sativa
  Clone ID: PAT_MRT4530_52511C.1.pep
MSLHDEVKAVHAVCVAELLATSGGKTLAGGGARAGAGRSGRRCGGDRWDSR

SEQ ID NO: 152464 - protein, 138 aa, Oryza sativa
  Clone ID: PAT_MRT4530_52512C.1.pep
SICNIGSICSSDKHDLPCSAAGGASATISKYTGALGEPESKRHTKQTIQTGHNTTEIIYCAIYPRADVIKEGAAPTCGTPGSVTSREREGAPARRPHLQRHKAGGTRLVARLGFKTGRPSMASGSGTRGRRRRQPAAT

SEQ ID NO: 152465 - protein, 85 aa, Oryza sativa
  Clone ID: PAT_MRT4530_52513C.1.pep
FAWFFVLVFWPFFVRDQVFFGMVGVVFPSLVWCPTFVVARARVPLSCLILFSAMWVVLGVFHFNILCNPPCVLMSPIDIVVGKNN

SEQ ID NO: 152466 - protein, 60 aa, Oryza sativa
  Clone ID: PAT_MRT4530_52514C.1.pep
ARIVMFRLSVARRTEVGGPLPYRLDESQKSQKEVGSGPCARLGHRRRTRGGGPYSLRASG

SEQ ID NO: 152467 - protein, 206 aa, Oryza sativa
  Clone ID: PAT_MRT4530_52515C.1.pep
MAENPQLFGNGMLVPFYGEMFVLARDGVEFHVDKIPSAPGGHAKTKGTIYLSNIRMVFVASKPVGNFFAFDMPLLYVHGEKFNQPIFHCNNISGFVEPVVPENQNRALYSTHTFKILFKEGGCGTFVPLFLNLVASVRRYNQFEAQSAASMAPRVDPLQAVQTPVDDMMRHAYVDPNDPTKIFLQQPAPESQLRRRNYHGRADNAY

SEQ ID NO: 152468 - protein, 185 aa, Oryza sativa
  Clone ID: PAT_MRT4530_52516C.1.pep
METSLRLRGGGSRPQSKSQEGLRIHAKEKLPIASNALLQAHGEIHAATGAPTYLALLFRNFYPRLSANLGLGLAIHFRNNQPLPLAWDNFSYTLRASKAIIPFPSNALLGINLKGRLLADKYFNPTARTAAVELAWTILDLKRGQDVRLKLGYQLLHKMPYFQLRENNWTFNAYMDGKWDVRFDL

SEQ ID NO: 152469 - protein, 81 aa, Oryza sativa
  unsure (1)..(81): unsure at all Xaa locations
  Clone ID: PAT_MRT4530_52517C.1.pep
LAILDETGSIXRYHPSPHLTHPWSERSFFVFFLFDVSGGPRVQGKEEAAAAAQIVDRSRWPAGRGRGTXAAQGKGSSSSGK

SEQ ID NO: 152470 - protein, 567 aa, Oryza sativa
  Clone ID: PAT_MRT4530_52518C.1.pep
MRLLKADQLFRKVIDGGWRKQSRLLGLDVGSKYVGLAVSDDKNRIALPLSVLSRTKTNISLMADDFVTLALQVRLLVGELCKTGKLDDMSYTYWDENFTSKCVEALLHPLKLHDPVETKTMTDKFAAVCILQRYLDNMNRELRSADNSGKQVVHIRGLQCSVQLLNLFPELIAEPYCLIRGRRADEGVYWHVGDGLKLQYLLYHQTVLPVCIQRANFGLSTTGTCTSCDSDTTKRSIESTLASNAYSREGVRCNVKIGWRPRRARGVMERGHEEDEWGGANRHAKDTFLFPNAWIDRSLEAGYVSLASIDRYGYTHWLTPLQKSQDSTLRPIITLRSIDNSGVVSRVRVESPFTRGLVRNRIHYVLRTLSGLDNQRQCTKPFDHTCMLISESIYDSLAHVQINKASLSRVPGVDGDPWGRAVVPERDRAARSAPRGAWRGVLPSMHTATTTIGACTHARTREALSYSPLLRTSRALPRRRRGGIRSSRHGRSRARHRHVNDTSCRVPASVRVRSIGGGRRPVAVCLGPSDTIDHTIYATIEKLDADGRARPSFVFTGRRFDQDSVRT

SEQ ID NO: 152471 - protein, 93 aa, Oryza sativa
  Clone ID: PAT_MRT4530_52519C.1.pep
MEESSCCFMQRRLVRLSWVATKTDPTEAEALNAEYAKLGQHASLTTATWNISGDPCTGADTDGTAIHDNPNFNPAIKCDCTFQNNTVCRITKL

SEQ ID NO: 152472 - protein, 265 aa, Oryza sativa
  unsure (1)..(265): unsure at all Xaa locations
  Clone ID: PAT_MRT4530_5251C.1.pep
TAVLLPLGMAGDDXPTARFSSESGVNDADLNCGEVVVRRRSVXNFVVSHLVVXGRARGADSATSRAGQRVDALCGPRLVPRPTSPGGDCDRRRRSKPAKGRIVSNCNYTSDSRIWYEYCFMRYYNYDFIGEVDTREDASVTMINWQNMDNPKAFQKAAGKAMGKATAQAVAVGRSGLGRAKEQYTPFVSVYALAQCTRDLAPPACARCLSEIVSKFDKTCNSAQGCQIDYSSCWARYEIYPFYFPLEAGSRATIDMSKYTKVTMH

SEQ ID NO: 152473 - protein, 843 aa, Oryza sativa
  Clone ID: PAT_MRT4530_52520C.1.pep
MEAAIGAASWLVDKVVTQLSDELVAAYIASTELGLNMEQIKRDLMFMQGLLHHARERRDKSNPGLQGLLEELRKKADEAEDVLDELQYFIIQDQIDGTHEATPVVDDGIRGQVLHGRHALRHTIGNCLSCFSSSSSSSVPEDANYPHHTAKSRSDESDYVGKLTFNRVDMSKKIKSVIEGIYDLCSHVSNLLKITQPEERRVLSLKRPPTSSTITQNKLYGREDIFNQTLDDMCTIRSETLSVLPIVGPGGIGKTTFAQHLYNHKRTEAHFSGNKTWVCVSTNFDVVRLTQEILMCICQNRNEESSGAHETSNLDQLQKSIAEKLDSKRFLLVLDDMWRCSSEGEWESLLAPLKTGEAKGSMVIVTTRFPSIAQMVKTTKPIELQGLEDDEFFTFFEECIFGQEKPACYEDELIDIARKISKKFKGFPLAAKTVGRLLKNNLSQESWMEVHERNEWKNQQDGDGIMPALQISYDYLPFHLKKCFSYCSLYPEDYRFGNLEITYFWEALGIIAYGDQNNKADHVGLKYLNELVGNGFLMKEGDDSRPYYVMHDLLHDLARNISSQECIDISSYNFRSDSIPQSIRHVSITLQYDEYDQSFERELEKFKTKIDIVNLRTLMLFGKGNANMTFFKDLLKETRSLRVLFMHANSPESFPHDFFKLIHLRYLKLKIPYGVELSLPNAISRFHHLNFLDLGNSICILPKDMNRLFNLHLFLARKELCSNIPGIGKMKYLQRLEEYHVKKEDIGFDLSELGDLTELGGELTIFNLENVATTEEGNQAKLQLKRNLRRLTLIWGAVQQTTGSDVLDGLQPHYNLRALGIINHGGPTGPGWLCSDIYLSIIY

SEQ ID NO: 152474 - protein, 656 aa, Oryza sativa
  Clone ID: PAT_MRT4530_52521C.1.pep
MAATAIATLLGPPEARRPSAAVAAAPATTTGDAFLDLMDANFNKPAPRKALTENLSPTFVSSGDACLDFFFHVVPGTPSAAVASLLAAAWGADPATALRLVANLRGVRGTGKSDREGFYAAALWLHSHHPATLALNAASVAAFGYLKDLPELLHRIVNGGLSTRKPGKKARLAAADGIGFIARRGRGRGRGRGCFRGRGRGFARGYHTSSRKQSRGVGSAEERIAASLERDGRLAAKAAVERRCRRAEAAARAVERYSRDPTYRSLHDRTADLFADLLRDDMRKLAEGNVHEFSLAAKWCPSLDKSYDRSTLLCEAIARRLFPKGSLPELAADLPDAHYAYRARERLRKAALVPLRRALKLPEVYISARAWESVVYTRVASVAMKNYKDLFLKHDADRFNAYLADVKSGKKKISAGALLPHQIISSLDDDGGGSGVADLQWQRMVDDMRALGKLRNCVAVCDVSGSMTGLPMDVCVALGLLVSDLSDDPWRGRVITFSESPQLHHIVGEALSDKARFIREMNWGMNTNFQAVFDKILEVAAGAALSPDKMVRRVVVFSDMEFDQASAQPWETDYEAIVRKYTAAGYGAAVPEVVFWNLRDSKAVPVTSGQKGVALVSGFSKNLLKLFLDGDGVVSPRAVMEKAISGPEYDKLVVFD

SEQ ID NO: 152475 - protein, 98 aa, Oryza sativa
  Clone ID: PAT_MRT4530_52522C.1.pep
GQPWSMVRTGTMLREEQRSSAVGIPCEKVTRVRILGGQLRSTVGIRRSRIPDDEVGYEMAYGGWTPCGRDLHNGLHEVCVQPSVFMKDKRCATVRGGT

SEQ ID NO: 152476 - protein, 401 aa, Oryza sativa
  Clone ID: PAT_MRT4530_52523C.1.pep
MPPPAPAPATLASLSALVTSLARSGRPADALRAFRDMLARGVPPDHFTLPPVLRSCALTGSSPLAASAHALALKIGAQGNLFVASALVLCYSGLSNLPDARRLFDGMRERDAVLWTSMLSAYAQGGHPEAALRFFQGMVAARVQLDAVVMVSSLLACGQIGWRRHGRSVHACCIRRLPGMPLSLGNALVDMYVKCGEFAFAERVFAGMPRRDVISWSALILGHGLNGRSDVALRLFDEMAAEGVRPNSVTFLGALSACAHSGMVVQAYAIFEGMKRHGVKPELKHYSCMADALGRDGRVVAAVKLIEEMPFEPDEAMLGGVLAACRVHGEMEAAERISKKLMGMSPSKSGYFMSLANIYSDAGRYSDAERIRGFMKEVKVDKLPGYSSVEFDVNVSEPRSG

SEQ ID NO: 152477 - protein, 214 aa, Oryza sativa
  Clone ID: PAT_MRT4530_52524C.1.pep
MSSMLRGAAAWVVGRARARRLARSERTSNRRDTREIEGVSMRCDSCGTGVVQSNKVLRMRFCDMLSVFSITSSPIGSGMLPWNASTGWMHRRTKGLKPAILVASGGHGRIYLRAKGKVVLAAVTRPVSGAPTPLAVRPRRPHLPATFFLTSSASHPTSTTLPIPTTPKFQHPLHQLYRAPDFPNPAATCISPARKCDPSELEGGDMELDQGKSQ

SEQ ID NO: 152478 - protein, 49 aa, Oryza sativa
  unsure (1)..(49): unsure at all Xaa locations
  Clone ID: PAT_MRT4530_52525C.1.pep
MSDLDIQXPTVFDPFAEANDGDXGXAAGSKDYVHXRIQQRNXRKSLTTV

SEQ ID NO: 152479 - protein, 242 aa, Oryza sativa
  Clone ID: PAT_MRT4530_52526C.1.pep
GIEFHRQHTHHSLRCRSTRSQVARRSRQAHRLRSHRRSNVPQYSTHPIREYPSSTVACQVEGLGAQGSTSMTSTLPDSSAITSVDQGASTSTPLVWTQVRSIDFPVYTVTPISAGPIIIGNEIDTAMIERNDTPPIIPPTQVENGTSTAPTPGRNPQAAEIYPPCERSKPTRMTTLRLRSWCSMHKTTKHTLEDYPVILHVQAELYAYWERGIQRTSPTGATYCPIHISRSHDLIGHRCFLI

SEQ ID NO: 152480 - protein, 97 aa, Oryza sativa
  Clone ID: PAT_MRT4530_52527C.1.pep
HSTTISLFLSPQLELALLLCSSISNPKTFLNSAQRILLLLLLLCASALGLDFFLPHSSTATEAESFQSLIFSKVFLELNLFCLWRIPKVAAELCVAV

SEQ ID NO: 152481 - protein, 71 aa, Oryza sativa
  Clone ID: PAT_MRT4530_52528C.1.pep
VRPPREFVLIVVTVLHTILSIYCASLCQARTAYAQMRMHGLVLTAFQLVRPGRAAGSASPGKVINLIDLLR

SEQ ID NO: 152482 - protein, 181 aa, Oryza sativa
  Clone ID: PAT_MRT4530_52529C.1.pep
MAASGEWGAAAVAAVPVGTRVVPAEECNAAVASLAECHAPPAGVRGLVESGATAMPPLFLPPGYGHERSPSPPPPRPMAFAIPTVDPSLPCSATVPVVRVAACSCGFFHLTSHGDPHDTVASSVAAMRAFHEQPIASRSLCYSLAPVGGVTYSTIPIQQPPPLLSKAVGRSGGGGGERARP

SEQ ID NO: 152483 - protein, 62 aa, Oryza sativa
  Clone ID: PAT_MRT4530_5252C.1.pep
MADPAAAASTPKGGSGRLADKEDERWRQLGDKEEEWRWHGDEEEGRLVNEDEEWPFFTSNSG

SEQ ID NO: 152484 - protein, 130 aa, Oryza sativa
  Clone ID: PAT_MRT4530_52530C.1.pep
HVNLERAPLLLLPRGDFLRYPALRLRLLRLGAHANRSRNHTNPPTPMGADTSTVGGRCALYPPSPPEDGAEAPTPPDVADAGGGVLCSSEISVKNLATGRRYCFFFLVPNQIDAFFPLRSEFIATFIPFF

SEQ ID NO: 152485 - protein, 27 aa, Oryza sativa
  Clone ID: PAT_MRT4530_52531C.1.pep
KLVGSRVGVIDWCLVFDQLAFRVWQGT

SEQ ID NO: 152486 - protein, 92 aa, Oryza sativa
  Clone ID: PAT_MRT4530_52532C.1.pep
MDIEEGEGGIAHSPRPSESGSGQSQTTRGAAARGWCSSPDKGKRGVGASSLRRGDEARGGGRRCSLALGRGGAAKVDAPLSQRAEAVVGEIQ

SEQ ID NO: 152487 - protein, 120 aa, Oryza sativa
  Clone ID: PAT_MRT4530_52533C.1.pep
TSTTSYIRTHARTLARSLPPPSFVATISFAAGHHRRRRPGSCCPEGEESSSVNSRAPKKLLSKPPGGWLPKFIINFLKSEEKKKSGLPPPWGALAWASSKKNRESQENGAWKNPGDTPEK

SEQ ID NO: 152488 - protein, 73 aa, Oryza sativa
  Clone ID: PAT_MRT4530_52534C.1.pep
MSNAGEREPVGPDQLNISVTVCGADKSVIANVKRNVLKAETIDPDKIEHTGSDILDRANHFCIRLMMNDSLAI

SEQ ID NO: 152489 - protein, 70 aa, Oryza sativa
  Clone ID: PAT_MRT4530_52535C.1.pep
QNETKRGINITTVQSNSNPTCQRTQPLTSRAPHITSGRGVTAFEPSALPHSHRLRLHGLFISRTKIFHPT

SEQ ID NO: 152490 - protein, 84 aa, Oryza sativa
  Clone ID: PAT_MRT4530_52536C.1.pep
HDGLVHPLFFFSKTTDQMNVAKGRRRRKKNFKRKNKLSKKRPRLIPQPIYLPPPPPPPWGLEPLSVHQALMLGGTWRAPPGMSF

SEQ ID NO: 152491 - protein, 103 aa, Oryza sativa
  Clone ID: PAT_MRT4530_52537C.1.pep
MRGGNFPIGGGALTSTCPNGTGVGWKFSPTNVGGIELAFNNCQQQLQPAVLKSSREDVTQRQLSPSPPSPLLAAVSGPPLPPLANAIPATVASSRRYVVVIRS

SEQ ID NO: 152492 - protein, 380 aa, Oryza sativa
  unsure (1)..(380): unsure at all Xaa locations
  Clone ID: PAT_MRT4530_52538C.1.pep
MRRLEESYATSLAVAHAGLWXVRSARGGRKGADKRAPPVSGSGRAVHGGLGPRTGEERRATXAAEPMAPIYPCGGSSRPVRAGTAQTGPATMARDGAAHMRQRRTCGSGARRRPTATDRRRRAAARGEAAATRLSGGATAKRCGRERKRRRGLTDNGRRRRAXGGRWRRRDELRNLQRTTGMGLRRRISTEEGWTRWTSAARELGRGRRNGEKARGSDGGAXIGRERAGRGRKRRESPADVGXSGGVERAGFRKSNPGHLGRGCEREREGSGRGERGARAGVVDVARRRRRRGRGGGFGRGGCWRGVGRRWGKDPTGGPNLSATPGEEGGGRPGWASACSWPSREXGEGREKMGRRPIXKKKRKKRGKRKRKRKKDFPWN

SEQ ID NO: 152493 - protein, 162 aa, Oryza sativa
  unsure (1)..(162): unsure at all Xaa locations
  Clone ID: PAT_MRT4530_52539C.1.pep
GDGGTSSGTSSARRGWGSGGESLWRRGGRGGPRPREPNGGDGAVRRRGERGXGRGRERRESPADVGXSGGGERGGIRKSNPGHLGRGREREREGSGRGERGARAGVVDVARRRRRRGRGGGFGRGGCWRGVGRRWGKDPTGPPGYQCVPNQPVLQVPLCTSL

SEQ ID NO: 152494 - protein, 63 aa, Oryza sativa
  Clone ID: PAT_MRT4530_5253C.1.pep
MERHCRWGRGVERRHRWGRGNSRWEEERRCEVPSPRDPELVERLILDLLDPELKRHAPSELRK

SEQ ID NO: 152495 - protein, 100 aa, Oryza sativa
  unsure (1)..(100): unsure at all Xaa locations
  Clone ID: PAT_MRT4530_52540C.1.pep
RRRPSPFRWTKSTRIHNLKAKIQHKEXIPPDQDRLIIAEMIAHSDGRSPADYNIQMEYTLHLELRLTGGIQIFDKTLTVKIMTPEVEFTDTIDYVNARIH

SEQ ID NO: 152496 - protein, 315 aa, Oryza sativa
  unsure (1)..(315): unsure at all Xaa locations
  Clone ID: PAT_MRT4530_52541C.1.pep
YKRKRRFSLLRKTRRMKSLEVINRALFSPFVELSRFACSFGARRPAVRGFRGSKFLHPRHQGXKPNVXNVKESRDIELHXSVNSPWREVSXIRTLLNWSHWYERVSSIXQVKSGKSCKSRLGKTKDLQSEWSKNKFPLYAYAAAFMFLVMQEYDKRSHGIDFLNRDFVVRGKLIYMLGVCMKCMAMHPEASAVAPGLLDMIRSRAVXQHPEAYVRRSVLFAASCILIALHLLYVSSALIEGNQDIXIHIWVLHVAEADPDTECTYMGMCCLRLHSEMALQTSRALESADHSKASGSRSLYLLSLIISSYHFANMM

SEQ ID NO: 152497 - protein, 272 aa, Oryza sativa
  Clone ID: PAT_MRT4530_52542C.1.pep
MSAPRPALMTSVASPRPVGMMRASWLSSLAGAGVLTPGVGMSVPGSGDVGGRAGGRRSGGSGRGKSRGAGDAAGEWKRSARAAARPLPLHSPVEIIKLCSEFLNADTDTTSTTLWWIMAKLVKNPSIQSNIHDKITAKTGDEKVEVSEENVHGMPYLRAVVLEGLRKHPPGHFVLPQKAMEDMEVGGYLIPKGATVNFMVAEISRDEQEWAKPMEFIPKRFLPDGDSEGVDVTGSKGIRMMPFGVKRRICVGLNFAMHHLEYFVANMVREFK

SEQ ID NO: 152498 - protein, 144 aa, Oryza sativa
  Clone ID: PAT_MRT4530_52543C.1.pep
MGRVRTKTVKKTSRQVIEKYYSRMTLDFHTNKKVLEEVSILPSKRLRNKVAGFSTHLMRRIQRGPVRGISLKLQEEERERRMDFVPDRSALEVDDIRVDKETLDMLASLGMADLPGVVRQSDASTSAPQQYGAARLPYARRDRA

SEQ ID NO: 152499 - protein, 240 aa, Oryza sativa
  unsure (1)..(240): unsure at all Xaa locations
  Clone ID: PAT_MRT4530_52544C.1.pep
GPSAHFFPSFPPSVLGRLQAEAQPGRPPPSSXGVADRWGPPVGSFPHLQRPPRPXRRARNRRRVHAPASSGPRRPRXRACAAFXPAPTPLSLPLAPAPEMAGIRFSNPASLSSPSPPRRSAIPXLPATSGPLSPYLSSPVAPSRFFPFSPPSPELPIAPAPCAHPPPPFPLLRPPLAAATLAAAPRRRRRWDRAAEVHLVHPSSVEIRRRSPIPVVRWRFRSSSRRRHRPPSPAVVDRCR

SEQ ID NO: 152500 - protein, 121 aa, Oryza sativa
  Clone ID: PAT_MRT4530_52545C.1.pep
MSAAASGERDELADSLAELFTNVSLMVRGELQGTNSQLSLLEKMNRRVAEEYNNYGDVASGLRVFVEQLNEKNQSFGEYVSQIDAIDQQVTEFEAVVSMLDKHVSLLEKKVKSAYNIAPTQ

SEQ ID NO: 152501 - protein, 354 aa, Oryza sativa
  Clone ID: PAT_MRT4530_52546C.1.pep
MVAVPVVADDGGGGHGAKGEESVSGSVAGISPSILIIAVIVVVMLLASVSIHYFIRHLCRRSSASAAASSSAPVLPVVVRPASSAAVGEQVVGKASAERAAEMERLISRLPLFTLASSLAALPKSSRDCAVCQSAFRDDDELRLLPACRHAFHSRCVDPWLRANPSCPPCRAATALPHPPLPDLLRVELGSVSSRRSNPNSAAAVASAPPEGAAVRAYPLPPRPHSEYLVEEELEVVIKQPAAAAAPRTGEPSQHPLPAAQAERGQPSSVTPTASFSSARSQERWSNRWSSRWSSRWSSGRWSSRYDAGTVTAAATAEWWWDMDGGAAPAARRREVEEQGNAFHGFMRWLTGAY

SEQ ID NO: 152502 - protein, 70 aa, Oryza sativa
  Clone ID: PAT_MRT4530_52547C.1.pep
PDNLLFTGYCCSLHRSMFDHVQPSVCRSRQQLSLEPSGMRQLGIMVLFALGSPMSSHKMPLVLWLDCRKH

SEQ ID NO: 152503 - protein, 386 aa, Oryza sativa
  Clone ID: PAT_MRT4530_52548C.1.pep
MAKPISIEVWNPSGKYRVVSTKSMPGTRWIRLLADNDCRLEICTETKTILSVDDILALIGDRCDGVIGQLTEEWGEVLFSALKRAGGTAFSNMAVGYNNVDVEAANRNGIAVGNTPGVLTETTAELAASLSLAAARRIVEADQFMRAGLYDGWLPHLFVGNLLKGQTVGVIGAGRIGSAYARMMIEGFKMNLIYYDLYQSTRLEKFVTAYGQFLKANGEQPVTWKRAATMEDVLREADVISLHPVLDKTTYHLINPERLAIMKKEAVLVNASRGPVIDEVALVEHLKANPMFRVGLDVFEDEPYMKPGLADMKNAVVVPHIASASKWTREGMATLAALNVLGKIKGYPVWGNPNLVEPFLKEDATPPAACPSIVNAKQLGLPSSKL

SEQ ID NO: 152504 - protein, 168 aa, Oryza sativa
  unsure (1)..(168): unsure at all Xaa locations
  Clone ID: PAT_MRT4530_52549C.1.pep
MLDPHPTTSWRSDLVVSGWRRRRRCPAVEEEVAEVAKVSAAGSASWRPDLAASAAGRRGKAPAARSGFSGARSGDRRSGGGDGVSVEGRRSGGDGVSDREAGEGTGSRIWXTGGQEVAAASMLKATGPDLLEADGGRRRRRPXAPRGRRRAKEAATLFSDGDKGSNWH

SEQ ID NO: 152505 - protein, 719 aa, Oryza sativa
  Clone ID: PAT_MRT4530_5254C.1.pep
MATAATTTSSTATTTTTTCSSPSSTTSPIHPAVPHRRRLNDIERVDYAHGAAADDCAACGGVAPDAALADDDECGHGHPVVGAVTPCGGGGRAALLLARRKRAWVVGAGGQAWMRGVVLCLLGLVAVVGFLGSHRRGGSGGGGGGAGSGAVGGGGGDDGGRLVKKVEVADADVMGWTEENLTALTRRPPDPPISDMVAVAKIMNASLVIPTLDHQSFWTDPSDFKDIFNVEHFKEILKEDIVIVDSLPPTYKRVKPYMRAPTSWSRASYYRDFSRILRKYKVVRFTHTDSRIVNNGLAPSLQRLRCRANYKALQYRKEIEELGRTLVDRLRNGMDHYIALHLRYEKDMLSFTGCNHNLTVHEADELTDMRLKVRHWKEKEINSEEKRLQGGCPMTPREAAVFLKAMGYPSTTKIYIVAGEIYGAHSMDALKLEYPNIYTHYSLATADELEPLELYQNRLAAVDYIVALQSDVFVYTYDGNMARAVQGHRRFEGFRKTINPDRLKFVELIDKLDEGSMDWNEFQSEVKKHHENRLGGPYDRLPGESPRQEEYFYSNPIPGCLCRKWHLHLHYPLGGINENRLRKVASPHETFTEAGGSVEAEVEDGGEEASDAEESGRAEVVGGCECAMTGLSELSEQSESGTDHGHDAAAGFGRGEEYKPAGIGYPTRPLPGRVAGEPAAIRRRRGALLRHTRRPAAGEALLLPKDTGRASAKVQFQPN

SEQ ID NO: 152506 - protein, 97 aa, Oryza sativa
  Clone ID: PAT_MRT4530_52550C.1.pep
PMFRVGLIVFEDEPYMKPGLADMKNTVVVPHIASASKWTREGMATLAALNVLGKIKGYPVWGNPNLVEPFLKEDATPPAACPSIVNAKQLGLPSSKL

SEQ ID NO: 152507 - protein, 283 aa, Oryza sativa
  Clone ID: PAT_MRT4530_52551C.1.pep
MRARAADHLEALSLEIERKLQKALNSNSQRLQLLQQLFADIALKVDDRARDVILSTNDDGIAPVDEREDTRLCFYEILANHFVKYLLEEVALVPDQLSKISVQAGRGLFLLLSRFMLFYDQDHLLASFLEHFPTFPNSFLVGGPADYYVIELTDQLQKLKVEPVLLHYLSRLTILQGLELRMSTSTRLKACLYSFTSPGGPTYPTRAVRHAAWNTLDLLFPVGRYPRHVISLFFRLLYPWYWPSSCWNFIMTCVKTVYYYILNLIVSSWENMRRPNHQRMHRD

SEQ ID NO: 152508 - protein, 326 aa, Oryza sativa
  Clone ID: PAT_MRT4530_52552C.1.pep
MRARAADHLEALSLEIERKLQKALNSNSQRLQLLQQLFADIALKVDDRARDVILSTNDDGIAPVDEREDTRLCFYEILANHFVKLFEVPLDGKEVSLRYSSALVQGATNVFWIDIQTNTRHFLSLYNYLLEEVALVPDQLSKISVQAGRGLFLLLSRFMLFYDQDHLLASFLEHFPTFPNSFLVGGPADYYVIELTDQLQKLKVEPVLLHYLSRLTILQGLELRMSTSTRLKACLYSFTSPGGPTYPTRAVRHAAWNTLDLLFPVGRYPRHVISLFFRLLYPWYWPSSCWNFIMTCVKTVYYYILNLIVSSWENMRRPNHQRMHRD

SEQ ID NO: 152509 - protein, 88 aa, Oryza sativa
  Clone ID: PAT_MRT4530_52553C.1.pep
RTSRKKEKKKRKKKKKKQKREKKKDGKDNPHNEHNPQGKKGQQNNHTRRKKKGKKKGRRRKRTKRETPGEGNGKGGEGPRRDGEGEGG

SEQ ID NO: 152510 - protein, 145 aa, Oryza sativa
  unsure (1)..(145): unsure at all Xaa locations
  Clone ID: PAT_MRT4530_52554C.1.pep
KTLLKIYYKRKNKKRRGKNKNMIFKKKKDKKEGEKEKGPGKRTRGRGRXMREKKQQHASRQPEGRTKRRKGHSPPGRTNTRRKKEQPKEKPPPRKEKPCHTERPKSKKQLLKEPPQGKKRIPEPKDRPDERMARSQKKKPERDPP

SEQ ID NO: 152511 - protein, 376 aa, Oryza sativa
  Clone ID: PAT_MRT4530_52555C.1.pep
MEVEARIHLLLIKLVFYRSAEERESASVHINLLPVRELYFDPRKKMDAFSHVPPGFRFHPTDEELVDYYLRKKVALKKIDLDVIKDIDLYKIEPWDLQEQCKIGNEEQNEWYFFSHKDKKYPTGTRTNRATTAGFWKATGRDKPIYVKNCLVGMRKTLVFYRGRAPNGQKSDWIMHEYRLETNEYGAPQEEGWVVCRVFKKRVAAVQRAAGDGGDSPFWFNEHVAFMAPAPGLDSPYHGHRQSHPCKLEVEYHHHLLPQEAAPFMHLPRLESPKLPAADIIVATAASSALQPCGHTTAQQLQLQIEPVYVTADASAADWRDLDKLVASQFGHGDSTAKEPSYCNPVQVFQVEGKQEDSLDYVSTSASCGGEEDLWK

SEQ ID NO: 152512 - protein, 38 aa, Oryza sativa
  Clone ID: PAT_MRT4530_52556C.1.pep
ASAAKSKGKKKRVARLAKKGGHSRSGVKKSLYSSEAPT

SEQ ID NO: 152513 - protein, 108 aa, Oryza sativa
  Clone ID: PAT_MRT4530_52557C.1.pep
MGKLSPSTFPVFPVSPPLLLVDLMVALGPRLVEAAVVPPSRGNPTLLTPWAGPALFWGPVPPAFCAQLRAQGGGLWGFARSPHFGWSLWGPPPRGFFPVFGLSLPQGF

SEQ ID NO: 152514 - protein, 79 aa, Oryza sativa
  Clone ID: PAT_MRT4530_52558C.1.pep
MRYQSSSGRSLRGTMGMGVCASAAAAGVVAAAAARSATAVAGGAAARAGAIRFKVRRRRGRRCSCKAGAILCAIRRSGQ

SEQ ID NO: 152515 - protein, 52 aa, Oryza sativa
  Clone ID: PAT_MRT4530_52559C.1.pep
PRPGAVEPENHDQYGGADRLGGRFRRMVAPHDAVAVAYRAAQSAINSNQHQL

SEQ ID NO: 152516 - protein, 749 aa, Oryza sativa
  Clone ID: PAT_MRT4530_5255C.1.pep
MATAATTTSSTATTTTTTCSSPSSTTSPIHPAVPHRRRLNDIERVDYAHGAAADDCAACGGVAPDAALADDDECGHGHPVVGAVTPCGGGGRAALLLARRKRAWVVGAGGQAWMRGVVLCLLGLVAVVGFLGSHRRGGSGGGGGGAGSGAVGGGGGDDGGRLVKKVEVADADVMGWTEENLTALTRRPPDPPLGALIAGTNNATVGYLIVDANGGLNQMRMGISDMVAVAKIMNASLVIPTLDHQSFWTDPSDFKDIFNVEHFKEILKEDIVIVDSLPPTYKRVKPYMRAPTSWSRASYYRDFSRILRKYKVVRFTHTDSRIVNNGLAPSLQRLRCRANYKALQYRKEIEELGRTLVDRLRNGMDHYIALHLRYEKDMLSFTGCNHNLTVHEADELTDMRLKVRHWKEKEINSEEKRLQGGCPMTPREAAVFLKAMGYPSTTKIYIVAGEIYGAHSMDALKLEYPNIYTHYSLATADELEPLELYQNRLAAVDYIVALQSDVFVYTYDGNMARAVQGHRRFEGFRKTINPDRLKFVELIDKLDEGSMDWNEFQSEVKKHHENRLGGPYDRLPGESPRQEEYFYSNPIPGCLCRKWHLHLHYPLGGINENRLRKVASPHETFTEAGGSVEAEVEDGGEEASDAEESGRAEVVGGCECAMTGLSELSEQSESGTDHGHDAAAGFGRGEEYKPAGIGYPTRPLPGRVAGEPAAIRRRRGALLRHTRRPAAGEALLLPKDTGRASAKVQFQPN

SEQ ID NO: 152517 - protein, 62 aa, Oryza sativa
  unsure (1)..(62): unsure at all Xaa locations
  Clone ID: PAT_MRT4530_52560C.1.pep
MSSMNPQYDYLFKLLLIDYLXVVKSCLLLRLADDTYTESYINTIDLYYKIITIELDRKTINL

SEQ ID NO: 152518 - protein, 140 aa, Oryza sativa
  Clone ID: PAT_MRT4530_52561C.1.pep
MVFAIPLIISLLQILIPVEYCDTFILIVLDQDTRTLYVLDPTPIDPIYENNPNARYVKQLLCIAEYLAKAMAKVCPGSRWNEDINLWRQIFLSNVPIQSRELSGYLVSLFMRTCRDEGIQFPILKDGFSYEVRKHFWHNY

SEQ ID NO: 152519 - protein, 476 aa, Oryza sativa
  Clone ID: PAT_MRT4530_52562C.1.pep
MTSISHMDFPKIVEGGLKQMLELLGDDNAPFDVVHSAGRKHIKQEGYSYPLCCRILEVLYKSRQQFHLRTFCVLGSNTTTDSYGNTRPIIGGFVVETSSGAVNPASFEMNSRCPDEIVRRIRVSVSSYDPNWQGRLLETYDTHSDAFEIAPACWMPDWAEMASSLNQLSDSEVLLQCSTSPAAEPPHFVENERRIWRYLIENPYWQDTFPKYKPRVFHRTSDGSTSGCPFGSSCHFLHNFPGGYQAAAKMTSHGGTAVAAPPGRMPLGPGAPNGPPTSSVKTRMCNKYNTAEGCKWGSKCHFAHGERELGKPMLLDNSMPHPMGSMPFEAPPMPGPDIVPPSTFGASATAKISVDASLAGGIIGKGGTNTKHISRMTGAKLAIRDNESNPNLKNIELEGTFDQIKHASAMVTELIVRISGNAPPAKNPGRGSHAGGPGSNFKTKLCENFNKGSCTFGDRCHFAHGESELRKPPAAA

SEQ ID NO: 152520 - protein, 83 aa, Oryza sativa
  Clone ID: PAT_MRT4530_52563C.1.pep
KKKRNKLPPQIPRDRTPGGPPQGTNGGRPKPGKNPPQGGRGKKKRQPGEGRGGRTQQPVGEPVRPRPEAQPPQGAGTRDGRGG

SEQ ID NO: 152521 - protein, 401 aa, Oryza sativa
  Clone ID: PAT_MRT4530_52564C.1.pep
MEGFSRDLLCGIGKGGDGPRGEVRPRVDMEAEEVELNLGLSLGGRFGLDRRGEKLARSSSVAAILAAPTEPSAPPSGLFRTSSLPTVAAAEAAKKQGVDELNCRRPSGGAEAEPAAARLPASGSPSSGSSDGEGRRLEVNMTDTLMRTSSLPAGIEDEWRKRKEAQSLKRLEVKRKRIERRNSLTSNISKEAVGQILEEMNAGAEKVESCDDVATGNKKTGGNVNHSSDRNRCTGLPPVHRATYTQQRGSLSGIPTKHIPAMKGSADAEEHNVPSAATEHRNGAAIATPPFSALAVRAVALASRGEQLRATGRVAARAKSMGDVERIMMQEMPCVCTKGLPNGKRVEGFLYKYRKGEEVRIVCVCHGSFLTPAEFVKHAGGGDVANPLRHIVVNPIPPSLY

SEQ ID NO: 152522 - protein, 146 aa, Oryza sativa
  Clone ID: PAT_MRT4530_52565C.1.pep
ARPTAPGPRRRSRCRPPPRAPRRSPRPCRPSRSTRSPCRTACTRTRSCRCPRRQPAGHGAAAPPRRPAISIRRPRPPRKRARRTVAMAPPLARRRRVAAAASPAGRRTSSPCVAAEAASPYRRPPLSPVSPPPRRRPTVGLPRPVS

SEQ ID NO: 152523 - protein, 150 aa, Oryza sativa
  Clone ID: PAT_MRT4530_52566C.1.pep
RGERPAGGCMVEKRRRSPHPLLSPLPLRPGRFASRRRRSGLQEPPSSCPLVSSILLCATHAGEMRSDASEMRLAAVGNSKKSRLRALATAFDNIWPGAAPASAYLAMVSTSAMTWIALRHLWRIKHTSMEPHFSSPTSKGRWRRCAPVDA

SEQ ID NO: 152524 - protein, 55 aa, Oryza sativa
  unsure (1)..(55): unsure at all Xaa locations
  Clone ID: PAT_MRT4530_52567C.1.pep
KLYRWCVVLVAFCALHLHHPSIXAFTLLINSTMHVHSHCTHHHAASCXQPQCCVI

SEQ ID NO: 152525 - protein, 97 aa, Oryza sativa
  Clone ID: PAT_MRT4530_52568C.1.pep
FFFFFIGNSLSSIPCNRSVRNTWSFDLSSSHKLPAPFPQEKKNWNEKRIPKTRRKSLAAGSAVTRGSARRNGRRHHRGCCCRFAASSPIDGFSLSLT

SEQ ID NO: 152526 - protein, 53 aa, Oryza sativa
  Clone ID: PAT_MRT4530_52569C.1.pep
SHEHANQLLRANQSIDRLKSGESVLPRDTVIGATDCPPIIPEPTVSEGVDHDD

SEQ ID NO: 152527 - protein, 72 aa, Oryza sativa
  Clone ID: PAT_MRT4530_5256C.1.pep
LEREERRRRRRLDMVAPNGKAGGREPETLEEAVRAGWNQECAEHDQCVFFQLETIEKTPCLTKIKSIFRGPL

SEQ ID NO: 152528 - protein, 105 aa, Oryza sativa
  Clone ID: PAT_MRT4530_52570C.1.pep
MAAPDVEYRCFVGGLAWATDDRSLEAVFSTYGEILDSMIINDRETLRPRVLVFATFSSEQSMRDAIAFMNDGAPACPTQLGSWGPRPAVGAGRPSLPRGPCGRSC

SEQ ID NO: 152529 - protein, 193 aa, Oryza sativa
  Clone ID: PAT_MRT4530_52571C.1.pep
GHSASYSSFQTQGHSRNHCPSQTQIHSHNHSHSHSHSHNHNHNLCGVLGVIPKALMPTEISGASVGEVKIVSDMHERKAEMARQSDAFIALPGGYGTMEELLEMITWSQLGIHDKPVGLLNVDGYYDPLLALFDKGAAEGFIKADCRQIIVSAPTAHELLRKMEQYTRSHQEVAPRTSWEMSELGYGKTPEES

SEQ ID NO: 152530 - protein, 79 aa, Oryza sativa
  Clone ID: PAT_MRT4530_52572C.1.pep
SSERILNCIAHGRRHLPASPPGFGGTFHRRTKDGPALQVELLKHFNAGILGTGSNGHTLSSETEQAAMLVRINTLLQGY

SEQ ID NO: 152531 - protein, 103 aa, Oryza sativa
  Clone ID: PAT_MRT4530_52573C.1.pep
MLEDLPNAEVIAVMAKMLWVDANAIMKSDLTFALGDSGFTGCGSWETLMASSYHAPWGEEAGYEQDDDDDLTATAPTETPQQQPQPSSCAVLPPDLALPLWIR

SEQ ID NO: 152532 - protein, 62 aa, Oryza sativa
  Clone ID: PAT_MRT4530_52574C.1.pep
MLVDVWPPSQKGERNLNPVHERRLMGVKGEFPSPSLHGDLHHRRLTTTTPTHLRQPYGFFIR

SEQ ID NO: 152533 - protein, 361 aa, Oryza sativa
  Clone ID: PAT_MRT4530_52575C.1.pep
MAVGKEGGGGAGGEGGMSDSVIRKVLVSYMYVAVWIFLSFTVIVYNKYILDPKMYNWPFPISLTMVHMAFCSSLAIALVRLLRVVELPSSPAMTPQLYTSSVLPIGALYSLSLWFSNSAYIYLSVSFIQMLKALMPVAVYSIGVLFKKENFKSSGPLNMLSISFGVAIAAYGEARFDARGVALQLAAVAFEATRLVLIQILLTSKGISLNPITSLYYVAPCCLAFLVIPWAFVELPRLRAVGTFQPDFFIFGTNSLCAFALNLAVFLLVGKTSALTMNVAGVVKDWLLIAFSWSVIRDTVTPINLFGYGIAFLGVGYYNHVKLQALKAKEAQKKAAQADEEAGSLLQERDSHGERKSDNQA

SEQ ID NO: 152534 - protein, 982 aa, Oryza sativa
  Clone ID: PAT_MRT4530_52576C.1.pep
MDAVNVLASATQLVSAMLTAVGALEQAAADFAEAPRRLQVLEDFVSDLGLLMQQSKQKHAHKMHAPQLERQLQSLGKLMDQLHANITKARRVLKKGKGKKGLARVVWSSVTGDPLMKYVQLIRDDLNWWLELQKLTESVGNVIASTAKSTPSLVRVKSEHGYPVSKKCSYVRELLINDGSHRVVLIVGYLIGSMTVNEDVGKDLEDVCYLLQTALVGRSMLILLDDVWEQDIVDRFTNLYDNDCRYLVTTRDEAIYEIAEAEKVEISKDDIKEIGKDILLYHSLLTVEELPPVAYDLLDRCGHHPLTVAVMGKALRKETRVEKWDRAISNLSTYATCAPGPVSYVNEKEVETTLTIFGSFEFSLEAMPENSRRFFMVLAAISWDEPVPEACLESMWSALMQDTLFPLVVSKLVEGSLIIKLEDQSMYHMHDMVSLYLESKTDNAVHTLLFGSFPEYAALVSPWLFIFGKESAKERAEQKIRSLFSLLEFMEIEILLGSTTQALMECKSISEFEASRLHFSKILSPRIAELISVGSTSLIVTVTKSITVIFFQGDYAKLAQSLETAGSVDKLIHVLRGCEDSSTLANVSTVLAKISEHVDATTADEILATIPMDQIAKLLSPENEEWHEIVFTTLASLIKVGKLRAVETMIESGIDKKLLVLLGSGSEISQHHAIIMLKTFCELGAPLQGCMGPGALTHLPWHARLSLERFVLFDQNVTPSPKPQQSFELILHKILHRDNKDNIEAIQGLLPLAERANDSRVQDLLLGSNMSNGLALLLQRRDIESNQVRSHTAFLVMKLACTGGEPYVHRFLEANIVHELIDMMQCNINDLQDSAYYALHQIIFAKGGSLVLQRFLQAGTIEKLVNLLDRKSSKTKELTMQLLVDIAVVGTKPCIERMLSSQIIEKFVALEKAGGSFSGAVSRYVQGLNMCKNVQSAERSVMKQQILRKVRSEIRGHDLEASLVASVEACISEKGASSRRKK

SEQ ID NO: 152535 - protein, 98 aa, Oryza sativa
  Clone ID: PAT_MRT4530_52577C.1.pep
MEEGEDAGQRWWPGRSSPARGVNGVPAAESGGGKADGVALGLANPMAVSARLGAVASGYRSGGGGSGGEEGEGARAIEGTRELGEMEKKREGRAGMLK

SEQ ID NO: 152536 - protein, 47 aa, Oryza sativa
  Clone ID: PAT_MRT4530_52578C.1.pep
EIIKFNMYLMGYSVFLILSLLFMVSFCSQMVPINIINGLSFLEVLCL

SEQ ID NO: 152537 - protein, 133 aa, Oryza sativa
  Clone ID: PAT_MRT4530_52579C.1.pep
MVRECGRINQPVSVEVEHVHAIHGSNDHDLELDHIQEKERGMKKGPMRIPRFGGSRDEGDVASATIIFLFFSLFSQASSSSIAHAFLPAPTRQSGLVLASDIFPNGCRLSPSTDVPILVLASVVFPKGCRAER

SEQ ID NO: 152538 - protein, 439 aa, Oryza sativa
  Clone ID: PAT_MRT4530_5257C.1.pep
MEQVSSSSVTGELLEQEAPPSTPGLDWSQLPADLLIRIFGTLEITDIFSSGVVCRSWHASYLEARRLGICSNNPGPCLVFSSSDRDPSVATLHSLTTGKDYYVTMPDPPFRTRYIVGSSHGWLITADERSNLLLVNPATQAQIAMPPPETIANVKIRCNGEGMLDGYDLFTMDMSSRDFDDEAEPIDLSWEEGRFYFYMRVVLSADPSSGNCTVMILHLLHNLLSFARVGATHWTWINVNELCWNYHDVLYNDDDRLFYAIRGNGDVHAINTNGPSPILRVVLDAKNSLINCAKYIVLSESGDLLQVWRYYHYVNNNKERRTRELVVYKVDLVEHKLVELKDIEGHALFIGFNSSFLRVEDFPMLTPNSVYCTDDTVHYIYHSRFGFREVHCAIILQIEQSRIEHMLIAKAKSCAVSLLDESFSVYAKRSSGVFHEIEI

SEQ ID NO: 152539 - protein, 43 aa, Oryza sativa
  Clone ID: PAT_MRT4530_52580C.1.pep
EKTAMRMAPPTFSTEEEKSSFEIHRSGVVTFFAVFSMLVYASC

SEQ ID NO: 152540 - protein, 60 aa, Oryza sativa
  Clone ID: PAT_MRT4530_52581C.1.pep
RCHQLTYLINYEFLIMYVCTCVCVYVCTYVCTQLCTIDGACDREGYVCTYVYTMYYYAWV

SEQ ID NO: 152541 - protein, 1925 aa, Oryza sativa
  Clone ID: PAT_MRT4530_52582C.1.pep
MLLVSWIWGFSGRCLLCCLWRYCLPFVGAILRAPCCRTGFAAGALLVAPPSAPPSKGMRWVLDGAVAVWRCRCWGAADARWKVACWARWWRPRRMDADGKVNRDYDPDDFDCLCFLLPCPFDVDRVAALADGSWHCSLSYRNFFAKNASFSSLKSVRVENEGDGLGTWGCKQSDIDLLSLTCGPYRRRSSHPQYELCLCRETQLCMPTLVHRSAGVGLSDGSLMVYDPAYFLHRGRCVRMSDFQVGLGAMGSMYTPFVLPTALSSVDTLGQLVSVAFFADWVFVHTRANCHILLLSLGLHWIAVFFSTVPCKSRQIPDHRMDRVQRVRASREKRAANILLRSSAMRIESAIPLPAQPPQIHRAKKPRSLMDFTPELSKLHRQHRSLLRSKMPPLLAPQNALNSRASGSSSRTDKEYIQSLKASYPGRSYYGPPTHECPYCGAVFWFQERIKTLSAVSKRKKVYNLCCKGGKIQLHAFRPPPEPLATLLKFDGDARSKRFLRQIRSYNSMFAFTSMGATIDKSINTGNAPYVFKINGVVHHRIGTLLPSHGARPKFAQLYIYDPENETQNRLNIFDRDRDDNDRPDPEIIAALSRMLDSNNRLVQNFRYVRDLLSQHGDEKITLRLLGCNARDDVQYNLPTSTEITTIIVGDFDAKEYKFDLLVHDRDHGMRQVSSLHPSYLSLQYPLLFPYGESGFHLGIEYSNYDGTGRKYLTMLEFHRYLMHYRLNEPNPFTCYGRLSDQAVVDVFSTIEANRLQFIIDHQKELRAESVEEIVDVIDRGVTDGDSVGKRQILPASFTGGRRYMVMNYQDAMAICRVYGSPYLFVTFTCNSKWQEIAEAIRFEPGQQSSDRADVIVRVFNMKVNDFITDIREGRTFGKFLAVLYTVEFQKRELPHIHCLVWLAASTADISASVIDGFISAEIPDIETDRLGYELYWLYMTDDIHNRLKKALDNPQCIIPHEHLLNLLLRELTTVFANSGGNIKDFDLPVPTSTAHMPDSNRLIDEELAADPLMMSMHADSLIAQLNDDQRKIFHAIVSSVTANQPSCYFVSGHGGTGKTFLWNAIIAKLRSQNRVVLAVASSGVASLLLPRGTMLANLLIETALIIWDEAPMTHRRCFEALDRTLRDILSETSPANSIIPFGGMPVVLGGDFRQILPVVPKGSRAAVVNASITNSTLWKHVTLLNLNINMRLLNPTLSQNKKDEMHEFSQWVLSVGNGTLPMTAREDDAQPTWITIPDDLLIMTNDDKIAAIVTEVYPNFLTSYRDPTYLASCAIVCPTNAVVDELNDYVVGLVPGNSTTYLSCDTISKCSEQIPDFDMLYPLEFLNSINATNFPTHKLVLKEGVVVMLLRNLNQSAGLCNGTRLLVTSLGQRILQCIILTGSNIGETVYIPRITLSTSKLKWPFTLQRRQFPVRVCYAMTINKSQGQTLDQGSSIHVQIYPSVMNRFKSVLHEGKVYYIDSFSVKYANRTYRPVTNLLMILFTKWTTLEECIDVLGDYPGITFSLTPFQDIPSLIDKNTFYIDVMGVITKISDTATVRPRSSNTNSLKRTIQICEASHPAKLTVSKLKNFLATYKNSNSTLHITLWGKTAAAFNAEEVHKAGQTRPQVAVFVGTLVRNYTGIGLTLTGSSPCKWYIGLDMVEALELKQRTSKPYGSTYRCTSCSYVGIPVPRTAQRVIRKPVETLIDQNPPNKEFIPDEITALINQSFVWNISFTQDAFMKNQESLQVNSVVSSAGPIQLMLSNSPPPSEQTLAIIPASSSSSVEGASAESKKSTESKIKARAKETLLALHTLVTPVRHIVRPRSEQTPTSKLNVPSSGKKSYVLSVSPIPVHTTQISSDNKATTEAEGKAKAPQPASSVELSPPDVEHKAKAAHQLLRDFPSTDPSLLAKDIQKKRDRPATSAPAAKKLFRDNAPSKIEKRQ

SEQ ID NO: 152542 - protein, 89 aa, Oryza sativa
  Clone ID: PAT_MRT4530_52583C.1.pep
STRLASAPTTRRNVQAEAEGEWLLGLPSATYLNGSLPGDNGFDPLGLAEDPENLRWFQQAELLNGRRAMLGVGGMLLSEVLTKIRLIDA

SEQ ID NO: 152543 - protein, 95 aa, Oryza sativa
  Clone ID: PAT_MRT4530_52584C.1.pep
FTKRKKNCLSRLQISPNSVTPAIKHQQNTRKNHQIWRKQHINRTDPRKPASLCTKIFPQLDDKGETLSSPRSRSVPAPFHPTGEGATVVRLQEKC

SEQ ID NO: 152544 - protein, 323 aa, Oryza sativa
  Clone ID: PAT_MRT4530_52585C.1.pep
MRIAINSWSTILLRYIPEDVLFKILSWLPSKSLIRFRSVCKAWHATISSSRFVNAHLECSKQRPSLLVIPGSFEMKKNGENIAFLMSLYKYQDPNIMHLQDFPRGIRKWIRPVHCDGLLLISTRKHKMMICNPSTREIVSLPEGSHSLCGGMGLGFGFDPHSNKYKVARAFYQRDYPTTRQVCKFEVLTLGTDAWRQTEDPPYPIDRLTPVHVKGAIYWKITPDLVMNHFVEIPPLVVFHRRKLLLASNKVYRYDIETCLQKWRLILQSAAAPAAALVTALLAVATLMSCNFKDSADGEVIRADLALPTWSNDAQVGGGRRDS

SEQ ID NO: 152545 - protein, 67 aa, Oryza sativa
  Clone ID: PAT_MRT4530_52586C.1.pep
LMPNGDITIYRIHFLDYNSQDSCMEMYQLKQANMVRKQLLWMSNTSNLSSSTAFLSDRRRRRTGSSS

SEQ ID NO: 152546 - protein, 53 aa, Oryza sativa
  Clone ID: PAT_MRT4530_52587C.1.pep
MAAGATTRLHRWLRVRARLPAVAGRGDRAAVAGRGGARGRATAWDNRSNHPEK

SEQ ID NO: 152547 - protein, 212 aa, Oryza sativa
  Clone ID: PAT_MRT4530_52588C.1.pep
MEVERVAAAAGGVHGLQRAPGAMGGGTSSLLSAAVQEMLMVQKSNKAIKKPPRATPRLPPVTGERRGGSGGSVDRGEATAPAPKRAARAWQPPAKRVARSMLRRGAPPSPEEKRKVLTCCCARLPPGLRCALHQCAPGQSWMRSHCGGGGAIAATSEAVAPRACGRGGWLFSEYARWRRSVWMPSRFYLERIDGQPRPPPGELDAGRRPPAS

SEQ ID NO: 152548 - protein, 422 aa, Oryza sativa
  Clone ID: PAT_MRT4530_52589C.1.pep
MLHHSNSRHQRNRGSRVKTLLQATLLLGVVVWLMYQVKHSYDKKNEYLEDAENQLAHDDRSMFQGRKERGGSYGDGILEKGGENPDVVSKPDEENIGETVFEKDNTDSHDDDIRNTDRSKAGEGHGSSADGNTEANSNDEDGTTNHSEGEKSDAESNSSDAESKGEDHSTGDDMPQSNTVLEESSAETNRMPHEEVAHGDESTNEDQSNVKSDGSNEEEAEKKEAVDSQNASESLSDDAKGGTDDEHSSGTLPDETGNLPSGQNENSQSDATSTTSDASSEAVHIETGSENEDAAKSSGTASGDDDKGSANEASDSNETKSDEGNVAAEVSNDQAANTEAGNSQEASAAEAANGSSEETKPVENQNDGNTESSNNGEQVDIKMETSASTNAEQKESQVGDGSSGSNGSNDSGAKQTGTTETQ

SEQ ID NO: 152549 - protein, 954 aa, Oryza sativa
  Clone ID: PAT_MRT4530_5258C.1.pep
MEIIGIKCSGAILISLIRLSKQYAAYFFKARKRVRALEAATERLRERLSDVETRGVNVETKLDSPMRKGMQRRNEVEGWLKRAEHVCVETEKIQAKYGKRTKCMGSLSPCICVNYYMIAKSAAANCQAAEKIYSEGMFEEYGVMVPQASSEVPITDVSLTGTDRYRSLAVKFIRDEAVSKVGLWGPGGVGKTHLLHQINNLFHKNPAFDVVIRVTASKGCSVAKVQDAIVGEQMLVKKDDTESQAVIIYEFLKSKNFLILLDDLWEHVDLDKVGIPNEVISIGNYKQKLLLTTRSESVCGQMGVKNGQRIKIDCLDETDAWHLFKENVGTEIIENHPLVLKLAKDVANELAGLPLALIVVGRAMSTKRHPREWQNCIDFLQQSRLNEIEGPVCNEESVFARLKLSYEYLSDTNLKDCFTSCALWPDDYLLDRNKLSEYWMGLGLVEEEDIHRCYNAGYARIRELVDKCLLEETDDDRLVKMHDVIRDMALWIVGDEGREKNKWVVQTVSHWCNAERILSVGTEMAQLPAISEDQTKLTVLILQNNDLHGSSVSSLCFFISLQYLDLSRNWLKTIPSEVCKLVNLYYLNLSDNKIKDLPQELGLLFKLQYLLLRSNPIREIPEVILSKLSRLQVADFCSLQLEQPASFEPPFGALECMTDLKALGITVGKIKYLNMLCKTSLPVRSLCVIIKSKSLDEWKRFAFSDSLFGNDLIQRNLLELYIYTHEEQIVFESNRPHRSSNLEKLYICGHYFTDVLWEGVESQDLFQNLRRLDLISCISLTNISWVQHFPYLEDLIVYNCEKLQQIIGSTSNNDNLPNTDEKERISLSQPCLKRFTLIYLKSLTTICDSSFHFPSLECLQILGCPQLTTLPFTTVPCNMKVIHCEEELLEHLQWDNANIKHSFQPFFKVISMNNNSAPQNFLDGLYAEWIYHRFEDDELEEIKARWNKDRGLDS

SEQ ID NO: 152550 - protein, 218 aa, Oryza sativa
  Clone ID: PAT_MRT4530_52590C.1.pep
MWDWVHLSATATVDAVLRPFTVQHRGPVLQLDTSDSSLCGVRVRSPAEELAPTKGCAIPLCPVLLLLLLLLAAAAAAAVAVTRVGGSRCCAAPPRGLEAWEEQAAWVARLLRRPLSKKRAPPRQCKHPNPPGTPPATDRADQSRHGMGGTAAWEERRKMHDGGPGGGAAVEAEWEEARRELATGRRRVREKLRPTGITCYSTKPEQCGYNMFVSSKWG

SEQ ID NO: 152551 - protein, 536 aa, Oryza sativa
  Clone ID: PAT_MRT4530_52591C.1.pep
MAAGEQQPQQQQISASSTSSGRLVTPFWKEKYERDARSGRQLSDLQFFKDRHYLDKEWGKYFEVGCGAGNTIFPLISTYPDIFVHACDFSPRAVDLVKKHKDYRPDRVNAFACDITSEQLTENVQPSSVDVVTMIFMLSAVAPAKMPLVLQNVRTVLKNGGRVLFRDYAFGDLAQERLMSKGQQISENFYVRGDGTRAYYFSNEYLMDLFSTCGFTVEEICVHNKQVENRSLDLVMNRNWIQATFILGSAGLQGPNGQHDSHTCEDEKDKLTANASQEKSTSEEIDLSEDFNNMFGTSHNLDEAQVLRIKAKGHDFEIKMLTKEHQHTCKLTGLMLWESAQFMCSVLAENPSILAGKRVLELGCGSAGICSMVAATVAQFVVATDGDAESLDLLRENTASNLEPDLLKKILIRKLFWGDKDDLKAVRELSSDGAGFDCIIGTDVTYNPDAIFPLFKTARELISNKDSDAALILCYIQRRVDEDSILSTAMAQGFRLVDKWINGIHESNGIISSWFCGNDVCSSFRNATLSILYFQV

SEQ ID NO: 152552 - protein, 145 aa, Oryza sativa
  Clone ID: PAT_MRT4530_52592C.1.pep
MDGAASASGRPLELRTQRPDPPLACFLLPIDCAMAGATAPPIVTDDLFDHVRQAGSYSELIPGNIECPACFIPSGYRSRRSLAVMGLCIDWRKYLDEVKAHAFCAHYDNSFGLSIKTLGLLRHRSAAITVAHSQIVGDLGLGPRA

SEQ ID NO: 152553 - protein, 124 aa, Oryza sativa
  unsure (1)..(124): unsure at all Xaa locations
  Clone ID: PAT_MRT4530_52593C.1.pep
SSYWNLKPTKIRNKKEXHVRSHGLEILTLIREKEKAESQRILDEQQQYELVKFCKDEELVLLADEVYQENIYVTNKKINSFKKIARSMGYNGDDLQLVSLHSVSKGEIPSSAFLSSSTFELLTT

SEQ ID NO: 152554 - protein, 158 aa, Oryza sativa
  Clone ID: PAT_MRT4530_52594C.1.pep
MDGAASASGRPLELRTQRPDPPLACFLLPIDCAMAGATAPPIVTDDLFDHVRQAGARAAALAAVACRGSYSELIPGNIECPACFIPSGYRSRRSLAVMGLCIDWRKYLDEVKAHAFCAHYDNSFGLSIKTLGLLRHRSAAITVAHSQIVGDLGLGPRA

SEQ ID NO: 152555 - protein, 196 aa, Oryza sativa
  Clone ID: PAT_MRT4530_52595C.1.pep
MQHIAEALVNGKEMPLGKYLLGAIYQLLYQIATNLLNGKSIGCGGPWWFIQLWLNLYAVQIANWPALEESEFLTDYVKDANETVHRCPSSNLQAHGYTIVAFHPEVFQDIYKDGNRAPRTQLGTGTAKSQPRGRGRGRGAGLFEVSGDGGGVALSVGDGPVAIPTCKMCSRCGRRFGFENYYGCRRYCKRLMKEIN

SEQ ID NO: 152556 - protein, 153 aa, Oryza sativa
  unsure (1)..(153): unsure at all Xaa locations
  Clone ID: PAT_MRT4530_52596C.1.pep
FAGPCDATWYSVTSRRARARHLGPPRPRPTSPRIAGVGGCRSERLIPPYGQGLRRVRTNGIQEGHEANKGSCPTKLRYTRNIPSMLHCALRANLSSIAKSYXLGHSGNILVNLIGKWKEAEYSGHSVPVGXGLAYYATAASSLADVLVNPFDA

SEQ ID NO: 152557 - protein, 95 aa, Oryza sativa
  Clone ID: PAT_MRT4530_52597C.1.pep
AQCPSAPPSVLPPGKPPPPPPPPGSSRSDGWIGIAPPAALKARARRGASVLEAEHLQAKQNTISTDIREKGANRRCLKVNKFFSNIAFGKNIRFY

SEQ ID NO: 152558 - protein, 61 aa, Oryza sativa
  Clone ID: PAT_MRT4530_52598C.1.pep
RPNTSSPPPQQWRKKIKNKKKKNQNKKNKKKQKTIKRKKKKKKIKKKKKKKKEKKKKKKRK

SEQ ID NO: 152559 - protein, 43 aa, Oryza sativa
  Clone ID: PAT_MRT4530_52599C.1.pep
GEHQLMLIFVSEILDAKLAPCKKQEGLHFKDEMTDKIITYQKQ

SEQ ID NO: 152560 - protein, 65 aa, Oryza sativa
  unsure (1)..(65): unsure at all Xaa locations
  Clone ID: PAT_MRT4530_5259C.1.pep
FHFSSQNFDEGNXKLAXCYNRXCWFXEFLGFHXXSVXRDHXGDTMAIXLQPLLQKPXCFXXXXXX

SEQ ID NO: 152561 - protein, 348 aa, Oryza sativa
  Clone ID: PAT_MRT4530_525C.1.pep
MANKGGEPAARAAVRHGGGPVAFKDAVDVDATPVRPPTELAAAVSALPAGVSYGQPMRCYGGTWVFESWAQGVVAMHRGGLVPRAGDVLLASLPKSGTTWLKALAFATMARRACPPPASPDHPLRRLNPHDCVPLLDRLFAAGRDALLDELPSPRLMCTHMPLSLLPPAVADGNSNTKIIYICRDQKDRLVSIWHFRKRNVPDLLLQEVYESICDGTGFAGPVWDHLLGYWRASKIDLGRVLFLKYEEVLRDPVNTVRELAQFVGQPFSDTEEEAGIVAEIVKLCSLESLRSQKANKEGIQGVYIKFSHDSYFRKGVEGDWRNHMTPKMGEHLDSIMREKFDGSGLTI

SEQ ID NO: 152562 - protein, 1138 aa, Oryza sativa
  Clone ID: PAT_MRT4530_52600C.1.pep
MRGGLRRGLGILLLPLSSSPSRAPRPPVPLAALLVYHRRLDVFARRSFCSSGGGYAVEQFSDDEYDHEYEDHRPSSSVANIDEWRWKLSMLQRNAEEQEIISRDRRDRRDYDQIANLAKRMGLYRCRNIEICGLVFSLWNGSEMYGKVIVASKVPLPNYRPDLDDKRPQREVVIPLSLQRRVEGLVQEHLDRALLPDKCGTGNGSEMAEKAENVNLDEQQDSLLDRSVMEKILQRKSIRMRNFQRSWQESPEGVKMLEFRKSLPAYKEKERLLAAIARNQVIVISGETGCGKTTQLPQFVLESEIESGRGAFCNIICTQPRRISAMAVAERVSTERGENLGESVGYKVRLEGIKGKDTHLLFCTSGILLRRLLSDRNLNGVTHVFVDEIHERGMNEDFLLIVLKDLLSRRRDLRLILMSATLNAELFSSYFGGAPTIHIPGFTYPVRAHFLEDILERTGYKLTSSNQLDDYGQDKVWKTQRQLLPRKRKNQITTLVEDALKTSSFETYGSRTRDSLSNWNPDCIGFNLIEAVLCHICRKERSGAVLVFMTGWDDISCLKDQLKAHPLLGDPNRVLLLACHGSMATAEQRLIFEKPPPNVRKIVLATNMAEASITINDIVFVVDCGKAKETTYDALNNTPCLLPSWISKASARQRRGRAGRVQPGECYHLYPRCVYDAFADYQLPELLRTPLNSLCLQIKSLQVGSIGEFLSAALQPPAPLAVQNAVEFLKMIGALDENENLTDLGRYLSMLPVDPKLGKMLIMGAVFRCIDPILTVVAGLSARDPFLLPQDKRDLAGTAKSRFSAKDYSDHMALVRAYEGWKDAEREGSAYEYCWRNFLSAQTLQAIHSLRKQFSYILKDAGLVDSDANTNNSLSHNQSLVRGIICSGLFPGITSVVHRENSMSFKTMDDGQVLLYANSVNAKYQTIPYPWLVFGEKVKAGHLKMLDGYIDLFMDPSLCECYLQLKEELDKLVQKKLEDPSFDIHKEGKYILYAAQELAAGDLCEGRFVFGRETSRARLSSSDDTKGNIIKDGMNPKSLLQTLLMRAGHTPPKYKTKHLKTNEFRAIVEFKGMQFAGKPKRNKQLAERDAAIEALGWLTQTSGTKLQDDGDDSPLDLTDNMLKLLSRPRRRSRNNSRK

SEQ ID NO: 152563 - protein, 684 aa, Oryza sativa
  Clone ID: PAT_MRT4530_52601C.1.pep
MAAALVTSFPHAIPKPHHHLHAAHHAHLTAAATRPEAPSASSPNPANARLRRLIARDDLAEAARLVDRATSRGEAPDVYLCTKLIRNLCRRGRTSDAARVLRAAERSGTAVDVFAYNTLVAGYCRYGQLDAARRLIASMPVAPDAYTYTPIIRGLCDRGRVGEALSLLDDMLHRGCQPSVVTYTVLLEAVCKSTGFGQAMEVLDEMRAKGCTPNIVTYNVIINGMCREGRVDDAREFLNRLSSYGFQPDTVSYTTVLKGLCAAKRWEDVEELFAEMMEKNCMPNEVTFDMLVRFFCRGGMVERAIQVLEQMSGHGCAANTTLCNIVINTICKQGRVDDAFQFLNNMGSYGCSPDTISYTTVLKGLCRAERWEDAKELLKEMVRKNCPPNEVTFNTFICILCQKGLIEQATMLIEQMSEHGCEVNIVTYNALVNGFCVQGRVDSALELFYSMPCKPNTITYTTLLTGLCNAERLDAAAELLAEMLQKDCAPNVVTFNVLVSFFCQKGLMDEAIELVEQMMEHGCTPNLITYNTLLDGITKDCNSEEALELLHGLVSNGVSPDIVTYSSIIGVLSREDRVEEAIKMFHIVQDLGMRPKAVIYNKILLALCKRCNTDGAIDFFAYMVSNGCMPNELTYITLIEGLANEDFLKETRDLLRELCSRGVLNKNLLEEWRPKFSNQTVHLP

SEQ ID NO: 152564 - protein, 84 aa, Oryza sativa
  Clone ID: PAT_MRT4530_52602C.1.pep
MAEGVVGIIILKLGLALATDTSRVGRNWLCHEASALARIFSQIRDMKEELESMQSFLQGAERFKDTDNTTANFIKKIRCIAFEI

SEQ ID NO: 152565 - protein, 86 aa, Oryza sativa
  Clone ID: PAT_MRT4530_52603C.1.pep
MGMKRPKLSWKDKWCILKEATRLYGASWVRDIGPDIRPNDLLCEEQQIVPLVFAKKEGRREFFIIWVSDIFCMLSLGMAIGRDGHG

SEQ ID NO: 152566 - protein, 153 aa, Oryza sativa
  unsure (1)..(153): unsure at all Xaa locations
  Clone ID: PAT_MRT4530_52604C.1.pep
MGGAIRVADLNHNQHQNLNHNQKPDYDDSNNNNDYHEADGHGGDDQEEAPDAAEPEGSRYLFTDGRATYMYCGARDPECSQHGARPVPTSSARIGPTLWARTHICGMTGDGSNDSXALXKTHLTIRTCYATPAGTGAPRMPLTDAALSATITT

SEQ ID NO: 152567 - protein, 86 aa, Oryza sativa
  Clone ID: PAT_MRT4530_52605C.1.pep
MGLFGHRRGGGLPGRRASGGLAAEREGAREEAAGQGGGREECGEEGVGQLERTALIQAVRMRKRGFSGGASRRAREKARRPGGLRG

SEQ ID NO: 152568 - protein, 52 aa, Oryza sativa
  Clone ID: PAT_MRT4530_52606C.1.pep
LCTTPRKVLVMERGRELPSHIHLLELRPATDDGDLGMRLGLKLLLVKQSNAK

SEQ ID NO: 152569 - protein, 62 aa, Oryza sativa
  Clone ID: PAT_MRT4530_52607C.1.pep
PPFGPIIISAQKGGHLALKGLGRPNPIEGPIKKTPAAGAHPKLILALKDNGEIVDPLANKTG

SEQ ID NO: 152570 - protein, 69 aa, Oryza sativa
  unsure (1)..(69): unsure at all Xaa locations
  Clone ID: PAT_MRT4530_52608C.1.pep
MHVISEDYIWHTMEVLCAYGMKNRIXKRFXFEMIGXVKFVFYTRKFFKWIKTFIIILVCGFKLPTLCIN

SEQ ID NO: 152571 - protein, 77 aa, Oryza sativa
  Clone ID: PAT_MRT4530_52609C.1.pep
MKPQKLSARRLLRGAHQIMQGALVIRHLMDEDFRVLVHTRKREPGQFRVVGPTLTGVRGCEAPHHYDGTGQSTPLTA

SEQ ID NO: 152572 - protein, 54 aa, Oryza sativa
  Clone ID: PAT_MRT4530_5260C.1.pep
TLPCRGCLQKGYQHHLHTFDGWPPRQHLAIGRPPPQAALSHRGRLAPLPQLPPP

SEQ ID NO: 152573 - protein, 52 aa, Oryza sativa
  Clone ID: PAT_MRT4530_52610C.1.pep
SGLPHSLAHQNHEKLRVCTAENPTSGVVQTSKGAAQKRGSHGLISARGRRSG

SEQ ID NO: 152574 - protein, 119 aa, Oryza sativa
  Clone ID: PAT_MRT4530_52611C.1.pep
STDPDAVAFFSPTEGGSYLHARGLSVHHVFKHVSEHADKALQYFVSVEPTKSLSLLLRWIASYQTLFTKVCSKCGRLLLMDKSLALLLPPVQRPYHHQTSSVGSDPQDAYHIGCSSYDA

SEQ ID NO: 152575 - protein, 227 aa, Oryza sativa
  Clone ID: PAT_MRT4530_52612C.1.pep
MEKQRCDERRNRRIGVEMEKTTGAIHVTWHPVGEAHQRRAWQRRKVGGELGGFLRSVATRVAMDGGSGLFLATTASSSPFHRGGIRLTGDHGEELDGGGNELELAGDHGEELGGGGDELELAGDHGEELDGGGNELELAGDHGEELGGGGDELELAGEAATTGRNLAAEGTSSSLPVPSGTGGGAESGDGVWDELELADGVGRGGRESRRAAGQRRRALGLGGGVGR

SEQ ID NO: 152576 - protein, 230 aa, Oryza sativa
  Clone ID: PAT_MRT4530_52613C.1.pep
MDAEAGGLAGGGTRRWRRRRGREAAHAEMEAEAGGGARRCDQASTKEMRRRRELRRMGMVWIDAELEGRLTEVRVWFGMNRVSEMGYRAPEEEYRPNKDGVLLQMQLHPSKKAFQHTVVAETIHLWDFWSRFSPTVAKGFGPPEKDEGVAATIAGFHILLELVRCVHAIDVCRVSGELPQDCEGENSQRARAGCVTAFVHVASFHHDHHFRFFSEEEIYDMLDRGGRRNT

SEQ ID NO: 152577 - protein, 165 aa, Oryza sativa
  Clone ID: PAT_MRT4530_52614C.1.pep
MATAAAAAVVEVRDPAGGERSTDPAAGGAESPADDDEGGSGVLGRRRGAAQAAPLDSRAEEMEVDAACVEEALGAVFAVGAEIRITQPQVLVHATGADADGHVGRGDPAGRGRAAVGGDSSAVPSSGAGTGGAAHGVAAVAAAPAPDATENEVVATKAANETAAK

SEQ ID NO: 152578 - protein, 36 aa, Oryza sativa
  Clone ID: PAT_MRT4530_52615C.1.pep
RHPSTRGLSRRPSAPSYSTPPPRDQHQRSPSQKAPR

SEQ ID NO: 152579 - protein, 347 aa, Oryza sativa
  Clone ID: PAT_MRT4530_52616C.1.pep
MIFNPERKSRCDKRIGSIMNLMKREDAENEKDVGDASSDEDIPMVCNKDFSCLIISDGHHMPWEYKENEVVQGARYARLEDLKEAVKHFVISLQGEFRFRNPGTCIDLQHYSSAKNDEGNASILQKAFFSFAACILAFVHRCLILCIDGTFLTGKYRDQILTTIGVDSNNQLLPAAFAFVEKAVGHLTNGPPRMKRRKASEISKFSEWIEKEPKEKWALLFDKDGSRYNVMTTNLAELYNWVMPDTRALPFIGIVEFILHGTCKYFRDWLITAGPSMLDNGLIYAHKVKEYIDEDIKKARNHLTMPHGTTKHLYDIQCRDKSRRGINCKRALQECVLKADGTCSCSC

SEQ ID NO: 152580 - protein, 71 aa, Oryza sativa
  Clone ID: PAT_MRT4530_52617C.1.pep
MRSKGKLSSPLATWLCKLAPLSRLASPESDGGGLGVERHPLGLSRCFAPRPSPNCHVAQGEREKGTQAGQP

SEQ ID NO: 152581 - protein, 94 aa, Oryza sativa
  Clone ID: PAT_MRT4530_52618C.1.pep
MSCLLGRAAVPVKRVWLGLSARLGLRRTTGLGKLRNEVRTCEYSDVHVMWEMLSSMDAAAPPRHAAAAAAGRKRRRPAATAAWSRLVSCCCCAF

SEQ ID NO: 152582 - protein, 494 aa, Oryza sativa
  Clone ID: PAT_MRT4530_52619C.1.pep
MAGLGKGESSGGGGGGGGEMGFRFKPREAEAVEYYLLPRLQGRPPVPNPAIVVENVYEFEPERLINEKCNGGVAGEGEEGWYFLSPRDRKYRNGKRPSRSTEDKAGRWKASTGKTEGKDPITECYGWVKFCVTSLVYFKGPVKTEKKTKWLMREFTIPHFENKLDKTAAAGGSSNQRQLDQYVLCRIYTSPKKGADDGEQAEVVRGGGGGGEDIDEWAEACAVFDLGPETAEGSDNADAAAAEGDMRSAKQAGKRPVAAAAVAEQPSKRPWLPPSPSTPCDGGPSQAMGNRQVPMQGLSLMHNFPPPPTTFCGHAPFQQGFPVHNNRAQMRWPTMQHNCMPSPAHSFQPRPVQRRPVLVGQAPPQRRPVHHVGGHAPMHMHQAQWTPVHIAQAPMQQLPFDDWVFDPFDDPPPPMQQLPVMMNNYQPQAPMQLPPMMNNDQPAMVHGGELQAPMQLLPATTHGGEVQAPMPLNVYEEEQRPSQEDGGQCTNAEG

SEQ ID NO: 152583 - protein, 53 aa, Oryza sativa
  Clone ID: PAT_MRT4530_5261C.1.pep
QGAASISYLLITLVWASNLSLEGEGVLGRVVCVTRSCCCRYPRAVFGTRPRAV

SEQ ID NO: 152584 - protein, 58 aa, Oryza sativa
  Clone ID: PAT_MRT4530_52620C.1.pep
MGRAKPCSNPCPSLPAQTLPTKGPDPSCPTPGSTPAHWVGIRGYPYPWAIAIPKLNNS

SEQ ID NO: 152585 - protein, 87 aa, Oryza sativa
  Clone ID: PAT_MRT4530_52621C.1.pep
KFLKNGEPGLVKMIPPNPLVVGPFFKAPPLGRFPVRAIRPPVAVGVPQNVEKKAPPGAKVAKAAPQKKLAPLKWGFFRLPFKFFSVR

SEQ ID NO: 152586 - protein, 111 aa, Oryza sativa
  Clone ID: PAT_MRT4530_52622C.1.pep
FCFFFFFFFFFFFFFWGANQGAHWIILVELHHNHYWAFYTKTNANQLSRPGAGYHRTTMESMIYGRRRGGPFMPVRVHWICPGTFGPKPRVVLLEGNGGAERKEHGPVKGE

SEQ ID NO: 152587 - protein, 63 aa, Oryza sativa
  Clone ID: PAT_MRT4530_52623C.1.pep
ACRTGFLFFNRGVWCQAFFFGCVPLLAPGVFTFCFPVANCLVILTQLIFVRGLVLCLSFSTFY

SEQ ID NO: 152588 - protein, 248 aa, Oryza sativa
  Clone ID: PAT_MRT4530_52624C.1.pep
GGNTFFWDDVWVGDTALKIQFPYLYNICRAPRATIKQICTNGEWNIELRRSLSEQDLEEWDNLHEILERVTLTEEDDKMSWGLTKSGWYTTKSLYKEMIFGGVRDRRAQEILSIPVPLKVKIFLWLMIKGRIQTAEQLKKMKWPGEVECKLCGELEGVDHLIFQCPPTKFFWCCVRDALGWAKVPNTRTELLDKLLCPGNARNTPLLCLVAAGTWAIWLFRNDWVFNNKLMSDVLQLPYKAVSFLKQW

SEQ ID NO: 152589 - protein, 164 aa, Oryza sativa
  Clone ID: PAT_MRT4530_52625C.1.pep
MPAGHGLRARTRDLFARPFRKKGYIPLTTYLRTYKIGEHVDVKVNGAVHKGMPHKFYHGRTGRVWNVTKRAIGVEINKQVGNRIIRKRIHVRVEHVQPSRCTEEFRLRKIKNDQLKADAKARGEVISTKRQPQGPKPGFMVEGATLETVTPIPYDVVNDLKGGY

SEQ ID NO: 152590 - protein, 172 aa, Oryza sativa
  unsure (1)..(172): unsure at all Xaa locations
  Clone ID: PAT_MRT4530_52626C.1.pep
GFCRFMFLYMKNISLREILWYLKEDAKCKLFLXFVFQQRHSIYLFYAQELXDGHSIYLFYAQELETVNHILLDCVFAWQVLVPLLSPCDWAALSPPRGNWLQNWWPSFRTCLPDHLCAGFDSLALLVSWQLXKERNFRVFDFTLSSVSVVLESILTEGHLXSLAGVASFGFF

SEQ ID NO: 152591 - protein, 34 aa, Oryza sativa
  Clone ID: PAT_MRT4530_52627C.1.pep
FSVSYLHFYGACQMTTRTYAMSRMHHVLILGVTL

SEQ ID NO: 152592 - protein, 153 aa, Oryza sativa
  Clone ID: PAT_MRT4530_52628C.1.pep
KKKGLQTVLTRTGWGQPQKGKLSLIPLGVTTGTQKRGPGSPSLPKNFIIWGGGKTRPGKRGKQFLGGGGGGGQPGGKKVFWGQNGARKKNMFLFWGKTPFLYKNAPAFLGKGPRVSLPNNGREPGGGYPSIGKGGNFGKEGFEGPAIKKTFLP

SEQ ID NO: 152593 - protein, 415 aa, Oryza sativa
  Clone ID: PAT_MRT4530_52629C.1.pep
MISSGPICNVQVLTAELQWHANAHFDDDQLQTDMELAHQIALTQSTPNPLLLDTHQECNNLFAGDPHAQGASSSIAGSSSLQGSVLDEQVSCLLQAQLRSNVQEIQGGVMNLLRACLESEAGSSTSMISGHVDHYQSLSSEDKGWGCGWRNIQMLSSHLLKQRPEAREALFGGSGFVPDIPSLQRWLEIAWDKKFDTLGSSHFHNKVYGAKKWIGTTECAALLRSFGLRARVVDFDSTESSGPHSKNGKHAPKRVQGPMDKFLIKNVSPTSTSSELCREDAENMRGQQVLVDWIWNYFASRHSDNSDSSRRVLVSDKTPLYFQHQGHSRTIVGIQKQNGQHGNQDRFTLLILDPGHRTSDLERALRSKTGWQRLVKRGVHTLRKPQYQLCYVDPGIASSEEMEQLTTIDSILVRF

SEQ ID NO: 152594 - protein, 109 aa, Oryza sativa
  Clone ID: PAT_MRT4530_5262C.1.pep
MDPRRCVRGGAALRWSQGLRVINDARLLPRAGKLSDTGRRSPPSSAPLSRMLVSSGTAPSLLVHYAPASSFLRARDAVARPPHARELQRRSLTPRACWPQSSSTRAVTG

SEQ ID NO: 152595 - protein, 50 aa, Oryza sativa
  Clone ID: PAT_MRT4530_52630C.1.pep
HIIRLSMVHFNQTTRYYTDTPLSLAGTEHSDKTTAHSVRLHPNWLDYLTT

SEQ ID NO: 152596 - protein, 301 aa, Oryza sativa
  Clone ID: PAT_MRT4530_52631C.1.pep
MDQYINQNWSEMKPAIVVSAVLVQVECKAPIDKCLTEASQAINKALEALMDKRLTEASQANNKALDVVVVAAPPAKKSEIEHAMWKQRMFAFAALGMAEGDEKKLATASLAYKNVANAVLTAAPAEKFKVMEESFKGLPPPARAARAPAVARHISRHRPAPVPVSLSPAPTPPDAVPGRPTAVSPSPARRHPTPADNAIAISAVLVQVECDAPVNQRLTEARQAINKAHDAPVDKRVTEASQDINEALDAVVAAAPPAKKAEIEDATWKHRIHNNIEGLVDGDEKKLAATSVALINEEWVS

SEQ ID NO: 152597 - protein, 110 aa, Oryza sativa
  Clone ID: PAT_MRT4530_52632C.1.pep
MAKTRDGLPTMAGQISKGFGDYGTEEGIDVEGVIWGEEGGQLVVVEVVVEQSGCKAEPWHRGWECCREQGEGLHTCDVAVEQQPRVGGGVGSLLPSWASGELEQARAGMS

SEQ ID NO: 152598 - protein, 252 aa, Oryza sativa
  Clone ID: PAT_MRT4530_52633C.1.pep
MGKGGGCIPSKRHRAAAAAAAPASHSHQRERTSIPAPAAAPRPVRIYVVFYSMYGHVRLLARPVARGVGSVPGARAILFRVPETLPPAVLARMEADDGGGGGDGEDVIPVVDPDGLPDADGFLFGFPARFGAMPAQMQAFFDSTVPLCRHQRLAGKPAGLFVSTGTQAGGQETTAWTAITQLAHHGMLFVPIGYTFGEGMLEMGELRGGSPYGAGVFSGDGSRPPSELELALAEHHGKYMATLVKKMVHGAS

SEQ ID NO: 152599 - protein, 122 aa, Oryza sativa
  Clone ID: PAT_MRT4530_52634C.1.pep
MDGDQRSAATHPSSSFGLAAARKATGKADWLQGLRRRGFVFPPRVPFWQVVLRRPKWKREEGVEATSPDIGMKGHDWRWEAGEVHGERDTKAHGWQARRGSDEVGVEEAMRSAWRLEWCGAC

SEQ ID NO: 152600 - protein, 45 aa, Oryza sativa
  Clone ID: PAT_MRT4530_52635C.1.pep
MKWREKICSVVLGFSLTSEVKSERQRDDSAFTMELLTVPDIAITP

SEQ ID NO: 152601 - protein, 125 aa, Oryza sativa
  Clone ID: PAT_MRT4530_52636C.1.pep
MWIHLDSGSSYYHYQVVYIGGIVRPAPFADDGIGDEFHDGKLAPGSAVVVLAGAPFADDGIGDEFHDGKLAPGSAAVLAGGVPNERTAKQYSEALSENNIMHTNMRTASLLKGSIPGRRLRHVAS

SEQ ID NO: 152602 - protein, 113 aa, Oryza sativa
  unsure (1)..(113): unsure at all Xaa locations
  Clone ID: PAT_MRT4530_52637C.1.pep
MSEGAAGTTRLPEWLETLLSTRFFLACGAHPASPRNECNMFCLDCPSPSXALLRRSSYNDVXFRVTEVEDVLGISGVQTYVINSAKVLFLNERPQPRGAGAAAGEAAASPYNC

SEQ ID NO: 152603 - protein, 176 aa, Oryza sativa
  unsure (1)..(176): unsure at all Xaa locations
  Clone ID: PAT_MRT4530_52638C.1.pep
MSRRESEGAAGTTRLPEWLETLLSTRFFLACGAHPASPRNECNMFCLDCPSPSPPFCYYCRSHRHQSHRVIQVRRSSYPTWFGVTEVEDVLDISGVQTXVINSAKVFFLNERPQPRGAGAAAGKAAASPYNCQICARALLDPFRFCSLGCKVLRTKTGGRGATVQPGDATNDDAAA

SEQ ID NO: 152604 - protein, 1391 aa, Oryza sativa
  Clone ID: PAT_MRT4530_52639C.1.pep
MEAKLLEKLDSLTLCMEALDDKLTKQSGRIDQVATKVDLAMDAVAALQKEQVQAAQLHKQAMASEPMYQIPPVFQVSAAVLHMSGNAAQWYQSFKLVEEVANWSQFRHAVVCEFESTSQREKIQALQTLRQAGSVAEYKHQFDSLVYQIRVFDPSVGAVMVQLPTTVQQAAAVALMQESVLLELSTKQSKRLMYKPLPTKGELPQGGTDTPAIKPERAELWKARQLRDYRRANGLCFKCGDKYSPEHQCALGGQIKAMQVTEVIPDDLLNAVTAEEDSDQDENCHISLNSLSGASHVNTIRLRALVQNKVLLLLVDSGSSHSFLDYNFAQLLGLQLQPIAPSLVKVANGDCIHCQFMVPQFTWWFQGRTFTYDMRVVPLGGHDAILGMDWLAQWGDMSCNWANKTLKFMYQGTWVELQGVPDSPPQTELSAMSLSQVLKCQKGCDIWAAALLETADFPSADSVPPAVSQLVHEFADVFQDPHSLPPHRVYDHAITLFPGSAPVNSKPYRYSPLQKDEIESQVKDMIDSGLITPSMSPFASPVLLVKKKDGTWRFCVDYRKLNSITVKSKFPMPIVDELLDELAGTRFFSKLDLKAGYHQIWMVEDDEYKTAFKTHHGQFQFHVMPFGLTNAPSTFQCVMNSVFAPLIRKYVLVFMDDILVYSPDLPSHLTHLKQVFELLRQHKLYAKRSKCSFACSQLEYLGHIISDQGVSTDPTKTAAMLAWPVPANVTELRGFLGLTGYYRKFVKNYSILAKPLTVLLQKKAFQWSDDAQQAFQKLKLAMSSTPVLALPDFSQPFILETDACAFGVGAVLSQHNHPIAYYSKTLGVANQKLSIYEKEFLVLGTDLQQKAMTKLMGLQYTFQYKKGVENVVADALSRVPPQSHLSALSVASPIWLQEVLNSYAVDTQAQKLLVELAVHSPNDQGYSLTDGLIRHHGRIWIGANLGLQTKLITAFHSSPIGGHSGTMATYHRLKKLFSWVGLKTAVFNFVKQCQICQQAKHEHCRLPGLLVPLPVPKEAWIDISMDFIEGLPKSDGYTVILVVVDRFTKFASFIPLRHPYTASQVAVTVDKFVFKTHGLPQSIVSDHDKVFTSRFWGDLFKVWNTQLNMSTAYHPQTDGQTERVNQCLEMYLRCMIQATPTKWNSWLHLAEYWYNTSFHTSLGCSPHKALFGVEPHISQVPVLLSSVHHSVVDLISERNQLSVFLQQQLQRAQLRMKHKADKGRSERSFSVGDHVFLRLQPYAQSSVVNRPYPKLAFKFFGPFQILEKVGSAAYRLALPEGSAVHPVFHVSQLKAHVPDHTPVFTSLPTPVVLDAADVWPELILDRRLVKKGNAAHVQVLIKWSSLSADDATWEDYDVLKTRFPSAPAWGQAASLAGGTVTADGIQCDAPQ

SEQ ID NO: 152605 - protein, 96 aa, Oryza sativa
  Clone ID: PAT_MRT4530_5263C.1.pep
MTLSLMISAPTAVRLYCPSLPPSSSSPGLVEVDPLKVWLLECDEHELLLIVWTGQTGQVVLMPRESIAGDGSGVNLREDDTWMIRISCEMLRLKVS

SEQ ID NO: 152606 - protein, 187 aa, Oryza sativa
  unsure (1)..(187): unsure at all Xaa locations
  Clone ID: PAT_MRT4530_52640C.1.pep
MDSFNAPMXMVLQGIQSXXFDXXRPYAXKWVDQLPSVLWSLRTTPSRATGQSPFFLVYGAEAMLPSEVEFESLWFRNFKEERYEDDRVDVLNRLEEAREAALIQSAXYLQGLXRYHNRNVRSRAFLVGDMVLRRIQSTQDKHKLSPLWEGAFIIFEVTRPGSNQLKCEDGSVVENSWNIEHLRCFYA

SEQ ID NO: 152607 - protein, 186 aa, Oryza sativa
  Clone ID: PAT_MRT4530_52641C.1.pep
MEALRLSGPAAPPFVPAARVAAAWGARRRGASRSSSSVVAKMEGGGGGKGVPTTNYVVPLDKATGMTRPLVEILRDLNKRVPDKIIDPDTNTVPWYHANRMLSFYAPGWCGEVRNVIYSDNGTVTVVYRVILRGTDGEAYREATGTAPVHEGRNDDAVAAAEEAAFCKACARFGFGLYLYHQDEIP

SEQ ID NO: 152608 - protein, 80 aa, Oryza sativa
  Clone ID: PAT_MRT4530_52642C.1.pep
IKKNIPGHLLFTTHMLPNKKKTLIILLTTPHTCTASYSNLTSNHISPAIIKHHTTPLGFTHCKTPLGFPPLAPNPLFGSR

SEQ ID NO: 152609 - protein, 76 aa, Oryza sativa
  unsure (1)..(76): unsure at all Xaa locations
  Clone ID: PAT_MRT4530_52643C.1.pep
DDLDIRLTLLLISTSMATAXSYFLYILNTRFIGTSCSYCLLSAXLSFTXXSIRVKDLGLERVQKFVGLQXSVAIIV

SEQ ID NO: 152610 - protein, 28 aa, Oryza sativa
  Clone ID: PAT_MRT4530_52644C.1.pep
CNCGPLSSGFKGSLRFSCGKAAWKNYNE

SEQ ID NO: 152611 - protein, 145 aa, Oryza sativa
  Clone ID: PAT_MRT4530_52645C.1.pep
MATAAKGGEKPALRKPVFVKVDQLKPGTCGHTLTVKVVSANPVPARGRAGGGGPAVGSRPARIAECLVGDETGVIVFTARNEQVDMLMPGNTAILRNARIDMFKGSMRLAVDKWGRVEVTEPASFAVKEDNNLSLVEYELVNVPE

SEQ ID NO: 152612 - protein, 908 aa, Oryza sativa
  Clone ID: PAT_MRT4530_52646C.1.pep
MEPNPPPPPAAATATYRRRGKPKPKPKRKAAKPPSPSPPPKRQARDDPPHTGPLTRHSPLNPAPEDAPPQLHAGERDPPPRAWIEPAKLPPVSEEVQAVLSRGAGVHVVPSFAGWFSWKEIHQIEKQALPSFFDGISLRRTPEIYLGIRNFIMKKFHSNPQMHLELKDLSELSDGEMDAQLKVLEFLSHWGLINFHPFPPAVQGVSELVESITNADTEEKISVVDKLFQFETLQSYLIPAPNQAEVTAPIHTPSLLSEPTLTEDSITQAESSVEYHCNSCSVDCSRKRYHCRTQADFDLCCDCYDKGNLDAGMSQTDFIIMESAEIPGFGGTSWTDQETLLLLEALEIFQAKWGDIAEHVATKSKAQCMLHFLKMPIMDPFLHDGDVNEISQETAEQVSAEQGTSRVTEKMEVEDKTKEIKTNDRKTAAKPKLNLTETEVNLDDNVVANNDTKSSGDINVDVCSNTGVSNRSSDTEPTKKETSGENTSNIVNDVLKYAFEAVGHIPKIEGLGSFTEAGNPVMALVAFLSGLVDHDDVTTLCCSSLKAISDMSPALQLATMHCFILQDPPNDLKDPPNRVAIANLTDWEIGTCSFANTDCGQQKDKDATSNPSVTDNDDNLKEESALSVEEPNTTSTSSKNTRKLSNAKESKDESPQVEPKPSSANDCDNPISQVAKRASDNIRGHSSTVLPVSLNNTNEPCSISSQEASAGNTKDTSHTEHIEGDKPIYEDPPLEGKVELNKIEHEVTDLSAVQQHESIQTSLKKGYIQDHNSIKKTVADDVSVQRLQRAAASAISAAAVKSKLLAKHEEYQIQRLAALVIDKQLHKMQAKMSVFTEADNLVLRAREHTERTRKKLLMERSAIIASRMAALPPRPNHQPGMPGSRLPVGTIFFTVVLVRLGKNKYGAN

SEQ ID NO: 152613 - protein, 55 aa, Oryza sativa
  Clone ID: PAT_MRT4530_52647C.1.pep
RLRWGKSLLIQLVRNSFARAGFSPHYVNLKHVLPMRIMRGKEPRGSASACRVRCL

SEQ ID NO: 152614 - protein, 239 aa, Oryza sativa
  Clone ID: PAT_MRT4530_52648C.1.pep
MKFSYTVLGGGFGLVTYLNKVYDWFEERLEIQAIAVEIQAIADDITSKYVPPHVNIFYCLGGITLTCFLVQVATGFAMTFYYRPTVTEAFSSVQYIMTEANFGWLIRSVHRWSASMMVLMMILHVFRVYLTGGFKKPRELTWVTGVVLAVLTASFGVTGYSLPWDQIGYWAVKIVTGVPDAIPVIGSPLVELLRGSASVGQSTLTRFYSLHTFVLPLLTAVFMLMHFLMIRKQGISGPL

SEQ ID NO: 152615 - protein, 78 aa, Oryza sativa
  unsure (1)..(78): unsure at all Xaa locations
  Clone ID: PAT_MRT4530_52649C.1.pep
PHYVLXXYRTMHHSSIGSHPGXTTFRGTAGHAGHPMHTRQSNSITNQLFFPHLHAKFSRQATNHCACHKPILWSSCKT

SEQ ID NO: 152616 - protein, 41 aa, Oryza sativa
  Clone ID: PAT_MRT4530_5264C.1.pep
PRSQIYTPYYYCITCTNVWQSCTTKNFSTPRPNRMNKTELG

SEQ ID NO: 152617 - protein, 65 aa, Oryza sativa
  Clone ID: PAT_MRT4530_52650C.1.pep
TRGPGGKDHVPHESKGANERKMGCIYRGLSGASKGKQVTPCYALDWIVGVRPYNSRSNMRIMHVT

SEQ ID NO: 152618 - protein, 88 aa, Oryza sativa
  Clone ID: PAT_MRT4530_52651C.1.pep
PRELINKLPGLKKIIRRKNQKGVWWNGGIYGKFKGEMGKKRFFTLVCLNEFVWKLFSLIIFACVSICIRYNKWEINPRFFLKGRVYPR

SEQ ID NO: 152619 - protein, 280 aa, Oryza sativa
  Clone ID: PAT_MRT4530_52652C.1.pep
MFLRSKVQEMILRRRSRSMNSGGGGVQQSHLSGQHASSTTVSCDGGGGGAGGKSATAACALLGSPRLLHCASLPSGSHAKNGGGGGGGGGSEPETPYSMSPTSVIDAAAAFAPSPDAGGSKRRPWCDWGAGTHGLADALDCTGDDDDGHRQSVLAAASRAVKLQAQPQQQHPLLRSCSLDRRVEFGVKNKSSWLPLRVAGGEAAAAAAESPAEMQMEPSSEDYTCVISRGPNPRTVHIYGDRVVEGGGGATTAVALAGESSPRPINLPAPAREARGFLSL

SEQ ID NO: 152620 - protein, 73 aa, Oryza sativa
  Clone ID: PAT_MRT4530_52653C.1.pep
KAKLTPWCLPFIDVTNKKFICKALNLLLCNCFTGNIHAFKYVLFIHLCTYKCEFYTAEIAHHSVSIVYVNVSV

SEQ ID NO: 152621 - protein, 60 aa, Oryza sativa
  Clone ID: PAT_MRT4530_52654C.1.pep
ILNFFFFFFFLIFYSFFIFFFIFIFNFFTIKSRKKNFLKNQPPSYKPTTNSLLILIHSPA

SEQ ID NO: 152622 - protein, 66 aa, Oryza sativa
  Clone ID: PAT_MRT4530_52655C.1.pep
PPEPIPGGVNEVYRDRGKLTAFLEIRNERSAPVSGSSSVMKEASLGSIVFGRCFVCPSVNMHQQRA

SEQ ID NO: 152623 - protein, 28 aa, Oryza sativa
  Clone ID: PAT_MRT4530_52656C.1.pep
GNLSETVTFWLGSIILYITHSSMLHAKS

SEQ ID NO: 152624 - protein, 240 aa, Oryza sativa
  Clone ID: PAT_MRT4530_52657C.1.pep
LGTTGVVVGGLYVSILNHRRARTILFLPSSAAGCVGHAPPPRATGYERGEESGGAAQSLSIVAAAAAVVVLELVDENHRHRIRPLHHHCYRSRRRRRRSLHRSPRTRSPDGVAAAPPIPNRALPAGLNRAAVFPLPPPVGREAVVAGEDEVLPPAPRLGGTTTSYNPRSPVVVRQWRGQKWSTSEGQHDTNEGQDSRGCNGGRTESAWAGVALDPPVLAASPSTGPPRPTLPSLHWWRNH

SEQ ID NO: 152625 - protein, 257 aa, Oryza sativa
  unsure (1)..(257): unsure at all Xaa locations
  Clone ID: PAT_MRT4530_52658C.1.pep
TTRTASCRRRRTPRTSSSPSPSWSPPNHQPPPFQSSFDEPPEVIPVVSSLNFQYQHPMNVVPGIPQMSHRFTGPGASSSRIIWSXRGHQHPRLRSGFLLERQGDGVWGVPLSTRSREGRRLIEIRNALEMIHRGENVRFESIFYGGVDIHDRHRDMRLDIDNMSYEELLALEERIGNVSTGLSEEEVTKLLKQRKFSSWRLEASVEEEPCCICQEEYVDGDDLGTLDCGHDFHVGCVRQWLVVKNTCPICKNTALKS

SEQ ID NO: 152626 - protein, 324 aa, Oryza sativa
  Clone ID: PAT_MRT4530_52659C.1.pep
MTRYRWECLLAHILKKRIIIADDWENSYGKIKILFHEFIMEDYDDGKPIFMGVCDGQFIQLFKADGTPEEFGLATLAYILWKRNILIAARVLKGVLCPNNNVAESLACSALMQDCLLREDVDHLSILTDSGAVHRAISGEPVSEHGPNSDEYALLKFLASKFKTCTSTQQPREVIFPVDQLIREMEESTNVRDTLEKVLAKFAPHFGGQPLFRLSQNSSAKDIINSLAALTSPVLPHKAQEKSYIHVDENFKLQAYIHITNDLFPLKVVLVFDSFEKKPLSFQNEVNKLLPRGTVKLVEGECTTFTICRVSFLGVCANAMFFSD

SEQ ID NO: 152627 - protein, 64 aa, Oryza sativa
  Clone ID: PAT_MRT4530_5265C.1.pep
MQTTRYNIGGLNLNMVTRNATVSHIDLNALVNGDGHSHGDGGGGDDEGHGHGHGDYVFQDVYFV

SEQ ID NO: 152628 - protein, 47 aa, Oryza sativa
  unsure (1)..(47): unsure at all Xaa locations
  Clone ID: PAT_MRT4530_52660C.1.pep
MDDKEDGVWWGRXVGAGGGLVDEEDGNGGGGPXSKRPRRWGPCRALS

SEQ ID NO: 152629 - protein, 64 aa, Oryza sativa
  unsure (1)..(64): unsure at all Xaa locations
  Clone ID: PAT_MRT4530_52661C.1.pep
PVSTIDIIEVERGLTELRKLGIESQLWESTRRSLDDDFDNHGSPTGSEIXQKHNNGXRPSXIXF

SEQ ID NO: 152630 - protein, 366 aa, Oryza sativa
  Clone ID: PAT_MRT4530_52662C.1.pep
MAQRVQEEDEQMMSTDDLIQAQIKLYHHCFAFIKSTALWAAIDLRIADAIHRNGGAATLSDLALNVGLHPTKLSHLRRLMRVLTVTGVFAVEDRNGEAMYTLTRVSRLLLNGDGEGTHALSHMARVLANPLAVISHFSIHEWFTTEKATTMTPFEVAHGCTRWEMIANDAKDGSVFNAGMVEDSRVAMDIILKESCGIFQGISSLIDVGGGHGAAAAAIATAFPNIKCTVLDLPHIVAEAPATHSNIQFVGGDLFKFIPAADVVLLKCLLHCWQDDDCVKILRLCKEAIPARDAGGKVIIIEVVVGIGSEEIVPKEMQILFDVFMMYVDGIEREEHEWKKIFLEAGFSDYKITPVLGARSIIEVYP

SEQ ID NO: 152631 - protein, 110 aa, Oryza sativa
  unsure (1)..(110): unsure at all Xaa locations
  Clone ID: PAT_MRT4530_52663C.1.pep
HAWLPGGSRDWQRRQVAVRPETDDSVLLPVNLSDGFVLSFEFWSSPRTGRSTNNGDEVVEQGSSSHAGVPSPLNRSWQSSKQXTAQPEHSVRSTPAAAAAVAVVVNSSAA

SEQ ID NO: 152632 - protein, 344 aa, Oryza sativa
  Clone ID: PAT_MRT4530_52664C.1.pep
MASFTAGGGGANNNPNKSLEVNPAPGDSVSSLSFSPKANHLVATSWDNQVRCWEIQPGGQCQAKASISHDQPVLCSAWKDDGTTVFSGGCDKQIKMWPLLSGGQPMVLSGHEAPVKELAWIPQMNLLVSGSWDKTLRYWDVRQPQPAHVQQLPERCYALSLSYPLMVVGTADRNVIVFNMQNPQAEFKRIVSPLKLQTRCLAAFPDQQGFLVGSIEGRVGVHHVDDGQQGKNFTFKCHRDGNDIYAVNALNFHPVHHTFATSGSDGGFNFWDKDSKQRLKAFNKCPSPITCSTFNQDGSIFAYAVCYDWSKGAEKHNPSTAKTNIFLHSVQESEVKGKPRVNKK

SEQ ID NO: 152633 - protein, 253 aa, Oryza sativa
  Clone ID: PAT_MRT4530_52665C.1.pep
MADYNRYGYGGYGSTPSAPPASSYGYTTTPSAPPASSSSSYGYGHGGGGYPSSTYPPPPPSSSQAYPMGMGGFLVFPPGTHPDVERAFRAVDRDGSGSIDERELQDALSSAYHRFSIRTVRLLLFLFNKPASHSPSRMGPAEFVSLWNCLGQWRGIFDRYDRDGSGKIEKDELREALRSLGYAVPPSVLELLIANYNNGVSSRGALDFDNFVECGMIVKGLTEKFKEKDTRYSGSATLSYDGFLSMVIPFIVP

SEQ ID NO: 152634 - protein, 132 aa, Oryza sativa
  Clone ID: PAT_MRT4530_52666C.1.pep
MDVRMVKSKSLPMIASAAVFLLLLSAALPLSQSYTYEQDVFAINGLYTALGSPSVPGWITNGGDPCNEGWQGVECVVSNITSITLVVHISECGLAALSSRSVSQHEPEFRPSMSEVVQDLTRMVSDATKASM

SEQ ID NO: 152635 - protein, 772 aa, Oryza sativa
  Clone ID: PAT_MRT4530_52667C.1.pep
MHVVICPLLAFGHLLPCLDLAQRLACGHRVSFVSTPRNISRLPPVRPSLAPLVSFVALPLPRVEGLPNGAESTHNVPHDRPDMVELHLRAFDGLAAPFSEFLGTACADWVMPTSSAPRQTLSSNIHRNSSRPGTPAPSGRLLCPITPHSNTLERAAEKLVRSSRQNARARSLLAFTSPPLPYRDVFRSLLGLQMGRKQLNIAHETNGRRTGTLPLNLCRWMWKQRRCGKLRPSDVEFNTSRSNEAISPIGASLVNLQSIQSPNPRAVLPIASSGVRAVFIGRARTSTPTPPHAKPARSAAPRAHRPPSSVMDSGYSSSYAAAAGMHVVICPWLAFGHLLPCLDLAQRLASRGHRVSFVSTPRNISRLPPVRPALAPLVAFVALPLPRVEGLPDGAESTNDVPHDRPDMVELHRRAFDGLAAPFSEFLGTACADWVIVDVFHHWAAAAALEHKVPCAMMLLGSAHMIASIADRRLERAETESPAAAGQGRPAAAPTFEVARMKLIRTKGSSGMSLAERFSLTLSRSSLVVGRSCVEFEPETVPLLSTLRGKPITFLGLMPPLHEGRREDGEDATVRWLDAQPAKSVVYVALGSEVPLGVEKVHELALGLELAGTRFLWALRKPTGVSDADLLPAGFEERTRGRGVVATRWVPQMSILAHAAVGAFLTHCGWNSTIEGLMFGHPLIMLPIFGDQGPNARLIEAKNAGLQVARNDGDGSFDREGVAAAIRAVAVEEESSKVFQAKAKKLQEIVADMACHERYIDGFIQQLRSYKD

SEQ ID NO: 152636 - protein, 57 aa, Oryza sativa
  unsure (1)..(57): unsure at all Xaa locations
  Clone ID: PAT_MRT4530_52668C.1.pep
MSCRCGSSCSCRSNCSCGDXVPDLKEKSSRTNATDELGVAPEKNAHHGGGASPLEDP

SEQ ID NO: 152637 - protein, 241 aa, Oryza sativa
  Clone ID: PAT_MRT4530_52669C.1.pep
MAGKDDDVKVLGLVMSPFAIRVCIALKLKGVSYEYIEEDLANKSELLLSSNPVHKKIPVLIHGGKPVSESLVIVQYVDEAWAPSPTSPSILPADPYDRAVARFWAAYVDDKMVPGMVGVLRAATEEERAAKADETLAAMAQLEKAFAEVAAKNGKPFFGGDTVGYVDLALGCNLHFLEAIRRLHGVALVDAGKTPLLAAWAERFVEVEAAKGVVPDADDAVEFARKVQARVAAAAASTAAK

SEQ ID NO: 152638 - protein, 94 aa, Oryza sativa
  Clone ID: PAT_MRT4530_5266C.1.pep
SNIHPNSPKVQHKPPCEGIATESHGSKITDSQRLQAQPASKNALLGVPPRKAATTSQAALLGASLPGDGNGARLSPVADNRQKIHHRSPALFLV

SEQ ID NO: 152639 - protein, 94 aa, Oryza sativa
  unsure (1)..(94): unsure at all Xaa locations
  Clone ID: PAT_MRT4530_52670C.1.pep
AIQRAPASAMNPIIKPSPFRGWEIDMIGMINPPSSKGXVATDYFTKWVXAIPLKKVDSGDAIQFVQEHIIYRFGIPQTITTDQGSIFVSDEFVK

SEQ ID NO: 152640 - protein, 68 aa, Oryza sativa
  unsure (1)..(68): unsure at all Xaa locations
  Clone ID: PAT_MRT4530_52671C.1.pep
ARGLAQHATEDAPIRQEPSRRGGMGKKEKRKKKKKKKXRKKEKKEKXXXXKXXKKKKXKKXNKKKKKX

SEQ ID NO: 152641 - protein, 405 aa, Oryza sativa
  Clone ID: PAT_MRT4530_52672C.1.pep
MMRDEEEEEGVVIIIREYDPSRDRAGTEAVDRECDVGPTGGMSLHADLLGDPVARIRHSPDYLMLVAETTSGATGGRIIVGIIRGTVKSVATGKSCPGAPAVASVGYILGLRVAPSHRRMGLALRMVRRMEAWFERMGAEYAYMATDKSNEASLRLFTVRCGYSKFRTPSLLVHPVHAHRRRVPRRAAVFRLGARDAERLYDGRFAHVEFFPADIGAVLGNQLSIGTFLAVIDDDGRWRHGEWRGAERFLASPPASWALASLWDCGGVFRLELRGASRLRRAAAAATRALDRAARWMRVPSVPDFFRPFSGWFVYGLGGDGPDAAVAAEALFATFVNMARGRAAAVAVEVAACDPLRRRIPHWRRLSCTEDLWCMKRLGRVGESDGWDWARSPPGLSIFVDPREV

SEQ ID NO: 152642 - protein, 261 aa, Oryza sativa
  Clone ID: PAT_MRT4530_52673C.1.pep
MANRAKDEMYAVGWCHADIDNTTCKSCVTDALRKVKVFFFMVRTKCLLYAELVKGENIIEGSNDLGGENKRIIEGSGDSGCENDTCKTQCTSTLVSFDEITSNAQGKKIALFLDYDGTLSPIVNNPEMAFMSPEMRETVRDAAKIFPTAIVTGRSRRKVFEFVKLVERYYAGCHGLDIMVLEVRPEDVADKGKVIKYLIGTLGLNDSNVLPIYIGDDETDEYAFKVLREQKNGYGIDAIFVLVIINVPSKLVSLDQGRNRK

SEQ ID NO: 152643 - protein, 106 aa, Oryza sativa
  Clone ID: PAT_MRT4530_52674C.1.pep
TRELVSSFFFFFFLVVCWASNIVQPQGGYLGSLENKPRDPSKNASETTILLGYLTSPAHKKGKKYRVGCQERTPVICGSEEMLRCKLEIDQQRNARTSVEMDQEEN

SEQ ID NO: 152644 - protein, 126 aa, Oryza sativa
  Clone ID: PAT_MRT4530_52675C.1.pep
MAESPENAAPAAAPAPAPAPTPAPPPPPSSPPTKSGIPPRYDLDAKWDACLDISIRRVAYSTLGGTFAGLLLFRSPTTRWASVALGAGVGIGAAYTECSYLFNGAPPKWSPKVSTVPSAHSEGEDK

SEQ ID NO: 152645 - protein, 78 aa, Oryza sativa
  Clone ID: PAT_MRT4530_52676C.1.pep
QFASTVVHNLLICFATQSKTKKHLPNVTKFTHCSVQEYLCHHLTLNYILDCLTVHSLLYSILVKTNTCNSLLEKIICY

SEQ ID NO: 152646 - protein, 524 aa, Oryza sativa
  Clone ID: PAT_MRT4530_52677C.1.pep
MGERKVLNKYYPPDFDPSKIPRRRQPKNQQIKVRMMLPMSIRCGTCGTYIYKGTKFNSRKEDVEGEKYLGIQIFRFYFKCTKCSAEITFKTDPQNSDYTVESGASRNFEPWREEDEVADREKRKRDEEEMGDAMRALENRAMDSKQDMDILAALEEMRSMKSRHAGVTVDQMLEILKRSAHDKNSQDYVKRIEDDDDDDEDLVIPGQSSSTSKMNGSSQSVSNATDVLTKTSGSDNANKEGNKIWPSKMPKFIVKPKSTPTDPIKKQKTETTAGPDTGKAPVAEENSEPAQNNVLQSLCQNYDSDEMKIAVRTNEERKEIQLGLQSHARGHHQKTTHSRRRRDATTLPEADPSMEERPVSHRSSCTVTDADEDDLPTQWNKWRRAAALSRRTRRAPRVAVPASPTCACGGRMRRVPKPRPMPTAVDERADGACGGLAPVLPPAAAAAWYPYDLMCTECDGETGWRRRKPACWAADWKAARPRQRWRPYPSFADVAAALGDLRLGAGDDDDHSGDVDMISCSFQK

SEQ ID NO: 152647 - protein, 121 aa, Oryza sativa
  Clone ID: PAT_MRT4530_52678C.1.pep
LPSQGRHGRRLILLRLSPCGRPAYPPSSSPLPCRRLSGSSAKPAGRKDCGGGALSLPNEEASALGHRGCSVAAVHGAGGGGRGVGAADPATPEGLSDGGQRRRRMRAAEDGCGDGGKGPRG

SEQ ID NO: 152648 - protein, 91 aa, Oryza sativa
  Clone ID: PAT_MRT4530_52679C.1.pep
YQLTQAMMPQCPLVATTSRMIQEAIHTVICAGLGLPLDDEDGDADAIHGNMAPVNFHSLPVVVVDPTLGYMYSSNKVLAYYRVPTLRNKNP

SEQ ID NO: 152649 - protein, 37 aa, Oryza sativa
  Clone ID: PAT_MRT4530_5267C.1.pep
CKMTNRGIQFINLKLSSLNQIEYCHYHEVPKKGRNGT

SEQ ID NO: 152650 - protein, 214 aa, Oryza sativa
  Clone ID: PAT_MRT4530_52680C.1.pep
MAMAAAWSPALAAVLLAAAVASASNSEGDALYALRRALADPRGVLQSWDPTLVNPCTWFHVTCDRAGRVTRLDLGNSNLSGHLAPELGHLEHLQYLELYKNNIQGTIPAELGSLKNLISLDLYNNNITGTIPKELGKLSSLVFLRLNDNSLNGPIPRDLAKISSLKVIDVSNNDLCGTIPTSGPFEHIPLNNFDKNPRLEGPELQGLATYDTNC

SEQ ID NO: 152651 - protein, 61 aa, Oryza sativa
  unsure (1)..(61): unsure at all Xaa locations
  Clone ID: PAT_MRT4530_52681C.1.pep
EVGTVTLHGQGRTVGSPGGGGGIQEILGKGGVRFACGKGRRGKKGSRAPRALCGVVVXVXR

SEQ ID NO: 152652 - protein, 330 aa, Oryza sativa
  Clone ID: PAT_MRT4530_52682C.1.pep
MGDVTAAAAPSTDKSNNLFMQIVVHPDGTITRPFVPDAPPSATGPVLSRDVPLDASLATSLRLYLPNPASPPPPPTSKLPVILYFHGGGFVLFSTGSVFYHASCEAMAAAVPAIVVSLDYRLAPEHRLPAAYDDAASAVLWLRDAAAGDPWIAAHGDLSRCFVMGSSSGGNMALNAGVRACRGLDLGPAAVRGLVLHQPYLGGVARTPSEEKSGDDAVLPLEANDKLWSLALPAGADQDHEFSNPAKSMAAAAAALTGLPRCLVTGSDGDPLIDRQRELVAWLRGHGVEVVAKTDFAGSHAAELFVKETADELFAAVCAFVSGAGDVVHS

SEQ ID NO: 152653 - protein, 44 aa, Oryza sativa
  Clone ID: PAT_MRT4530_52683C.1.pep
LISAWVNLSRSIWLCPRVLNRLYHCCVANFLHYFNCIVCVLSVP

SEQ ID NO: 152654 - protein, 421 aa, Oryza sativa
  Clone ID: PAT_MRT4530_52684C.1.pep
MEDTHLLTPYKMGQLNLAHRIVHAPVSRFRSYGSMPQPHNLLYYAQRATPGALLIAEASAVSYAALGRSKDDAANGPIHRQRPGPPGFLFGTNLTDYNSATDGVKATESGVNDRNNLSKWWFMSRLNESGNAGGAEESHYTLPSSLDAPGLWNQEQIEAWRPIVDAVHAKGALFFCQIWHNGRVFSTDNPVTPQVSYFGNTDDLAPAAPQRLETGEIVQIVEDFRVAARNAIKAVLRFDEGFDGVEIHAANGHLLHQFMKASVNDRTDEYGGSVENRCRITVDAMSAVAEEIGADRVGVRLSPFADHCREEGTDPEEVALHLIGVMNGLGVLYCHVIEPRRAFHGTFIVNGGYDREEGDKAVGDGYADLVSYGRLFLANPDLPERFRQKAALNAYDRSTFYTPDPVVGYTDYPFLEQPLAV

SEQ ID NO: 152655 - protein, 58 aa, Oryza sativa
  Clone ID: PAT_MRT4530_52685C.1.pep
RSGRGRRRWGSAWPHRGSARPPPHGAAFSWHPSHSVMHCPADAPGLVDSGAARQSYMA

SEQ ID NO: 152656 - protein, 561 aa, Oryza sativa
  Clone ID: PAT_MRT4530_52686C.1.pep
MREEEGRPGGGGGGRRGQRGEEYRTEEEATTVEPQTVVPVVAQPLLLAAPSSSPRVASSSSPSTTPAQQEGLLPKCQTLSAEDNAIIVHTSTSRGTRPKSKPRETDKLDAREPALHDLERHEPRPRRVDPQRGVAIGIFCTRTATASADSGSIASMITTYGDDDGSAVKREQVVQGEARDAAEQLRPRAARNDVNRRADLVDGIDTESMMEYVKVQVRVTDAPNLSFLTMTLGGDEEEKAVFPILHAMDRNLLVFDLSFPDKIDGVYLIYDTIGKTLSMIPALSSLSSPDGMAHTTQVLIARRHAAVDDGSYALALLGKMGVVDKPGEMPVISWPDVIYQWRPSSSISPWKLIKNANLPQQWMADKSAFSADMAFSFEGHAFWVDLIHGVLFCSCADLLSDDVKDVDFDSIDLPLDCLKFTPHSWTMAERQAYRTVGCTGNSIKLISMHFSGCVKRGAPKVTVWRLEVYAKIWVKEHVLNLKTLWTQPAFLAANLPMDMAAIYAPVVVPSDLTSYIPPTAAVAFPTVAPTVSTAAIATVVSPPNVPASPASNAFALPDKAP

SEQ ID NO: 152657 - protein, 98 aa, Oryza sativa
  Clone ID: PAT_MRT4530_52687C.1.pep
WRTRPCRTAAVRRTSCRTAAPCRLPPGMAPPASGPPPATAPPPATAAATCRRARPRWPPARRIGRGGGGGGGGGREEEGEETLSWCPSRMTRGLGMAH

SEQ ID NO: 152658 - protein, 475 aa, Oryza sativa
  unsure (1)..(475): unsure at all Xaa locations
  Clone ID: PAT_MRT4530_52688C.1.pep
PTTARRSRRHRWRTPPPTPTWRPRTRPSPSHPTASSPPPSHPRXPPTTCTLPSSPAVTHSSPPPPQSRPRTGPTWNPAPAGTDTPADPAASREEGRRWRDPEEVAAARTEGEQRREAAREGRGRAASGVSTPPCSSSTIIQHGEAAKDGXPATQVMAGGGGEEGADSVEGGELGGREREPGGGAVARRSHAXEERGCAVRRLGRAAGRRRRGEESGRRRAEEGGREGSGAGRRRSGRRLEGAPAAASAPLGQWPSASARRGDRRPRGKGWLHGGAHLGATTVWGRGKQLHGGRPAGASGGGXSGVRAGAGGGGSSGPCGAAPLPSPSSSSSSSLAHAPATAGKENSSPPPARSRTKWTAAGRPERERRRRRRRKGAAILLLVTVRFPAGVMRRVMKRRRKSRGRRRGRWGCRRAAPDESLSGSAKAMTAAASTFDMMDDKAASAAEWGRGXTDAAEAASELELEMMRSRFYSSGF

SEQ ID NO: 152659 - protein, 47 aa, Oryza sativa
  Clone ID: PAT_MRT4530_52689C.1.pep
MGIRLAGIRGFNSVKDDLVIARLDRPVHEGDKAVRACAELVFALGLR

SEQ ID NO: 152660 - protein, 560 aa, Oryza sativa
  Clone ID: PAT_MRT4530_5268C.1.pep
MADDSLLDNFLEELQVRKDDVSDTRIAFNKDPFLDDAVLSNPSTSNGNKLTSLVVLNLVSLVHHNLPGILPVAKKNKAKRNFVDVCDRDYGIWMGGFEEWMALVRKRNGSGTPSSSSPQQPRSGGFAAQSSVSYVHGSPLLENTMPFDSHDSAEKTAEALGRVLILDLVLRNEDRLRCRPLGWRGNYANLLVADRNAYANLDSLDDVYDSAIIRYKPEIIRSPQNRKPRRAVSISGSIGSDTSDLMLPDNPSQPEISSFHIIAIDSDGELCKEIEQWNDMLRTEVVKLCQDNSFNTGFFEGIDNSIAVDAYELKVRLEHILERISLISDAASTERPSQITDYLYIGGALAARSTYTLKHLGITHVLCLCANEIGQAESQQPDRFDYQNFSINDDENADISDVFQDASDFIDYVQHLHGKVLVHCFEGKSRSATVVLAYLMLRKKFTLLEAWNMLKKVHRRAHPNDGFAKVLLDLDKKLHGKISMEWHHRRPAMKVCPICGKNAGLSSSSLKLHLQKAHRKISSGSVDTAMSLEIQKAVEAIKAGRGGGDSPTHSAEKVTS

SEQ ID NO: 152661 - protein, 191 aa, Oryza sativa
  unsure (1)..(191): unsure at all Xaa locations
  Clone ID: PAT_MRT4530_52690C.1.pep
KEVSTGTSAERGSLKPYRIVCTVSAEMIGPNRVLVFLMTIDKSESAWNTAIALHLRMTPKGYXTQGTITGMRFRAVTTCRLPLTNPWVTQQTKRSFSEPGAECTDSSGTPPEFLLESYTRRERSXGSAKLPGTPPELIXYINFILMHKRYNRASCNSAQSCVLEMRVSSSFYRLQMKVTLMGIVGNAPQQP

SEQ ID NO: 152662 - protein, 157 aa, Oryza sativa
  unsure (1)..(157): unsure at all Xaa locations
  Clone ID: PAT_MRT4530_52691C.1.pep
LVFLTTTDKSASAWNTAVALHLRVTPKXGYRTQGTITRMGFRVVTTCRLPLPNPVDTQQTRKKFSEPGAEYTDSSGTPPEFLLGSYTRRGRSRMSAKLPGTPPELPLTLYLILMYKRYNRASYNSCMSWXNEKVTSLYRLQMTVRGMGNDQNTLQTP

SEQ ID NO: 152663 - protein, 160 aa, Oryza sativa
  unsure (1)..(160): unsure at all Xaa locations
  Clone ID: PAT_MRT4530_52692C.1.pep
KCIVRQKCLLVFLTTTDKSASARNTAVALSPSVTPKRYRTQGTIIGTGFKAITTCRLPLTNPWNTQXTKKKFSEPGAECTDSSGTPLEFLLRSYTRRGRNRMSAKLPGTPPELPLTLYLILMYKRYNRASCNSAQSCVYWNXVSSSLYRLQMTVRGMGIV

SEQ ID NO: 152664 - protein, 151 aa, Oryza sativa
  Clone ID: PAT_MRT4530_52693C.1.pep
MVLQEDRAAGADAVAERGGEHEASRVPDERGEAKEREVARPRDAVHNPFRCRMELGRRLPKTMMPPPPSFLDFDWDEAAKDEGVGSGGGDPAGGRPLRPLVEEAATQRVGSDGSKSVQGIKEREEEKVWAPRMASGLWLAKFVSKGVSLAN

SEQ ID NO: 152665 - protein, 147 aa, Oryza sativa
  unsure (1)..(147): unsure at all Xaa locations
  Clone ID: PAT_MRT4530_52694C.1.pep
GRRRVLVFLTSTDKSARARNTTVALNLRVTPKGYRTQGTITGTEFKAVTTCRLSLTNPWEVLTLXKKFSEPGAECTDSSGTPPEFLLRSYTHRGRSRMSAKLPGTPRELPLTLYLILMNKRYNRVSCNSAQSCVLEMRVGSSFYRQV

SEQ ID NO: 152666 - protein, 234 aa, Oryza sativa
  unsure (1)..(234): unsure at all Xaa locations
  Clone ID: PAT_MRT4530_52695C.1.pep
VDSVTKWTPPKTVSQNXSFLGLAGYYRRFIENFSKIAKPMTXLLNKDDKFKWSAECDSSFEELKKKLVSAPVLILPDXTKDFQVYCDASHHGLGCVLMQEGRVVTYASWQLRPNEGNYPTHDLELAAVVHALKIWRHYLIGNHCEVYTDHKSLKYIFTQPDLNLRQRRWLELIKDYDMGIHYHPGKANVVADALSRKSYCNALCTEGMCNELQQELEHLNLGIVEHGYVSRPEI

SEQ ID NO: 152667 - protein, 141 aa, Oryza sativa
  unsure (1)..(141): unsure at all Xaa locations
  Clone ID: PAT_MRT4530_52696C.1.pep
SLLVFLTTTDKSASARNTAVALHLRVTPKGYRTQGTITGTEFRAVTTCRLPLTNPWDTQQTKKKFSVPGAEYTDSSGTPLEFLLXSYTRRGRSRMSAKLPGTPPELPLTLYLILVYKRYNRASCNSAQSCVSWNESELLLL

SEQ ID NO: 152668 - protein, 159 aa, Oryza sativa
  unsure (1)..(159): unsure at all Xaa locations
  Clone ID: PAT_MRT4530_52697C.1.pep
LFVFLMIIDKSASARNTVVALHLRVTPKEYXTQGTITRPGFRAVTTCRLPMTNPWDTQQIKKMFSEPGAEYTNSSGTPPEFLLGSYTRRDRSRMRAKLPGTPPELPLTLYLILMYKRYNRASYNSAQSCVLEMRVKSSLYRLQMTVRGLGNDQKTLQPP

SEQ ID NO: 152669 - protein, 378 aa, Oryza sativa
  unsure (1)..(378): unsure at all Xaa locations
  Clone ID: PAT_MRT4530_52698C.1.pep
DPRRRINPLAATDPRRRLALNPIPIAVVASVVVQDSRRCDLLLAATDPRRASTLSYPWPQTILKSRRHARRDHVYFSFPIPPPISHLPNTPFSSLLRVRRTCSRERHLSFLSSVFFKLHGIGLYLYPRYMTSPCRTRLLSRTNSKIRVNLYNRLLPKHISEETISNIIINRYNCLFQRCTTVPTRHNPTTCHHAPRYHYGTSERSCDSTPRITQTKCLLVFLTTTDKSASTRNTAVALHLRVTPKGYRTQGTITRTGFRAITICHLPLINPWGTQMLTLXKKFSEPGAKCTDSSGTPPEFLLRSYTRRGRRRMSAKLPGTPPELSLTLYLILIYKRYDRASCNSAQICVLEMRVSSSFYRLQMMVTAMGNDQTTPQPP

SEQ ID NO: 152670 - protein, 171 aa, Oryza sativa
  unsure (1)..(171): unsure at all Xaa locations
  Clone ID: PAT_MRT4530_52699C.1.pep
PCCSWLQICSPLLVFLTTTDKSASAQNIAVALHLRVTPKGYRTQGTITRTRFSAVTTCHLPLTNPWDTXQTKKKFSKPGAECTDSSGTPPEFLLXSYTRRGSSRMSTKLPGTPPELPLTLYIILMYKRYNRASCNSAQSYVSWXNEKVTSLYRLQMTVRGMGNDQNTLQPP

SEQ ID NO: 152671 - protein, 149 aa, Oryza sativa
  Clone ID: PAT_MRT4530_5269C.1.pep
DRKKNIFKLSQGEYVAVEVVESAYVQSPLVTSVWVYGNSFESFLVAVVVPEKQAIEDWAAQNNKTGNLAELCNDPKARMYIEDELNKTGKRLGLRGFEMLKAIHLETTPFSIEKDLVTPTFKLKRPQLLKYYKDCIDQRYKDAKVGNKQ

SEQ ID NO: 152672 - protein, 266 aa, Oryza sativa
  unsure (1)..(266): unsure at all Xaa locations
  Clone ID: PAT_MRT4530_526C.1.pep
GAKTMEQGRREAKDRAGTLPSRRPLGRRMQGEEYIPKGDDFAKASXPHEGRRSLFWPIKPRGHWADDRLTAHQESMNLYYTMYPCKSPFHKGNHLSFRQQLAPTVGTSERNHXERMPPKKVVKEKVTRRKESDAGADMATEEGAEPSAPVAEDGGAPSASAPAPSLPPSAPATSVQVPNAADMAKAAAAARALQTRAEILSTNQLLVPQAAPSQPAAAPTALAAVQAQVNSDPETQTEAAMEAMRQYMTRLXDMLRQMQEQQGCRN

SEQ ID NO: 152673 - protein, 161 aa, Oryza sativa
  unsure (1)..(161): unsure at all Xaa locations
  Clone ID: PAT_MRT4530_52700C.1.pep
KCLLVFLTTTDKSASARNTAIALHLRVTPKEYRTQGTITGTEFRAVTTCRLPLTNPWDTQQTNKKFSESGAECTDSYGTPSEFLLESYTRRGRSRMSAKLPGTPPEFPLTLXLILMYKRYNRASCNSAQSXCLGNEKVASLYRIQMTVRGMGNDQNTLQPP

SEQ ID NO: 152674 - protein, 835 aa, Oryza sativa
  unsure (1)..(835): unsure at all Xaa locations
  Clone ID: PAT_MRT4530_52701C.1.pep
FNYLTTAIFLLLLPACVADDQLVPGKPLSIGSTVVSNGGAFALGFFSPTNSTSSNLYLGIWYNDISPLTLVWVANRGTPVKDGGHGSSSSAPSLTLSNSSGLVLADGDGRVLWTTDITIIAANSPAVAVLMNTGNLVVRSPNGATLWQSFDHPTDTYLPGMKIGINYRTRVGERLLSWNDGPGDPSPGSFSFGGDPDTFLQLFIWNQSRPYWRSPVWTGNPIPSQLMVNGTTVIYLSVVDADDEIYLSFGISDRAPRTRYVLTNSGKLQVLSWDGGDGASEWSKLGELPKYECEHYGYCGPYGYCYYSEVAPTCECLDGFEPRSKEEWSNGRFSRGCRRTEELPCGGDGGDAVFLEMQGMQLPDKFVRVRNKTFHECAAECAGDCSCTAYAYANLGGSGSARKDATRCLVWLGELIDTQKRISCARFFKMKYWSKMKXTVCLCAGKRKQRNAVKIAVPVLVIVTCISLSWFCIFREHKKSQVQGVLTATALELEEASTTHDHEFPFVKFDDIVAATNNFSKSFMVGQGGFGKVYKGMLQGCQEVAVKRLSRDSDQGIVEFRNEVTLIAKLQHRNLVRLLGCCVEGHEKLLIYEYLPNKSLDVAIFKSERGVTLDWPARFRIIKGVARGLVYLHHDSRLTIIHRDLKTSNALLDSEMRPKIADFGMARIFGDNQQNANTRRVVGTYGYMAPEYAMEGMFSVKTDIYSFGVLLLEVISGVKISNIDRIMDFPNLIVYAWSLWMEGRAKELVDLNITESCTLDEALLCIHVGLLCVQENPDDRPLMSSVVSILENGSTTLPTPNHPAYFAPRKNGADQRRDNVFNSGNEMTLTVLEGR

SEQ ID NO: 152675 - protein, 45 aa, Oryza sativa
  Clone ID: PAT_MRT4530_52702C.1.pep
MDASGMMRFDLEVARNGWEVDALRVGKVAKVLAGKTNQLDMMSYT

SEQ ID NO: 152676 - protein, 122 aa, Oryza sativa
  Clone ID: PAT_MRT4530_52703C.1.pep
RPPLSQSAALAAARSLLLTRGKPAKRIEGPSVYFFHMRKIGPLLDNIPQRHKWAPDGLTGLTPEEVGWPEAAAAAAHKHQVVATTMHVARGRSKLLACIHGASLSPTIGDLIIPIGGRASQF

SEQ ID NO: 152677 - protein, 58 aa, Oryza sativa
  Clone ID: PAT_MRT4530_52704C.1.pep
AAVANLNRTGIRHTALPNFCKPLPRFCDLSAASIACAFLSCIFLAASAVIDVIWLSNM

SEQ ID NO: 152678 - protein, 71 aa, Oryza sativa
  Clone ID: PAT_MRT4530_52705C.1.pep
MGMWSEVVAISALAEALAKVWFQAVSIRTLSRLKACGPQGSEQIKHFLSLGVGMGSIDAVISPPEEPVEDW

SEQ ID NO: 152679 - protein, 75 aa, Oryza sativa
  unsure (1)..(75): unsure at all Xaa locations
  Clone ID: PAT_MRT4530_52706C.1.pep
GQGKNRFSFLAXYISAQLCTRRHTQLKQPLFVESERETNPNRKKKKKQICICTPLFFFFFLFEVVIYTQNSPTRP

SEQ ID NO: 152680 - protein, 691 aa, Oryza sativa
  Clone ID: PAT_MRT4530_52707C.1.pep
MAGGLITAWRNAKFKAALTCSFHSTIDQTSFLITNIYAPHANSERQEVFDLLTALRTTRLEPWMRIGDFNIYRFPHEKNNDSINTRGMEEFNSWINGEGLFDIDIPSRKFTWSNKRRCPTSVKLDRVLIDTAWNQTFANASAKALIATTSDHIPILAEFSDNCSKSDIFRLENYWLQMPDFIAMTETNWSRGTRPLTAISKLNHKLRRLRASTKAWNRNKRSIPTLLSANKDTLEYLDKIEEWRQLTDLEYYLRQRIQKHCNELNDFITQKWKRRARIRFCTLGDENTRFYHTLASVTAAAHIKDFRPISLLHSVPKLLSKTLTNRLQKEILKLIDPMQSGFIRGRSITENFILASELVQSALKGKKPMIVLKLDFHKAFDTVSWDALFRIMEARGFPDKRIGWIKALLCTGKAQITNNGQKGEQIQYKRGFYYKNSKVVKDLRAHNTALILKLGHKDCTVDSQFTQNSWHVKLHPNLSYQAELELHSLMQILHRLSPIPEIPDTRVLLHSVPKFSTSNAYQLLTYHGALWKPAEYVWIHTIPQNCKIFLWLAFKDRLNTKANMVSKCWSEDPHCPLCPALESADHIILRCKNANSLWEKMNLLHLANHSESSSAFLQAVVDRNHSNRGIEPIWFAACAYTLWKARNNMIFERQIDNLQFIIQQISDTLKLRSMRANEATKERILSWCAGL

SEQ ID NO: 152681 - protein, 191 aa, Oryza sativa
  Clone ID: PAT_MRT4530_52708C.1.pep
MVRFDGDAGGVVVDGETYALRQMHWHSPSEHAVDGRRYDLELHMLHQSETRDGRYAVVAQLFDIGHRRDATLDMVITLCSTSSTIYTISVTSDTIGLTDKVNPAREKNTAVEEDYEKVYSCNGIANIYQSGTFNTKYDTPYRYDDISMIRAARVAAADGAPLREVVHDGDTGRQSNTNSSKTACQIFMFIA

SEQ ID NO: 152682 - protein, 161 aa, Oryza sativa
  Clone ID: PAT_MRT4530_52709C.1.pep
QRRHGQQALSLQRRRLIGVGAELELHQPNLGELVPAHLLRAVAVVRPNREQARLVSVLVGQPMPPRDAEDLAPCLHDLCLCFFLRGVETSDDFVDANVRRLTCHPSAPRRSSSSSAVQFHCWVKPEQSPRNSTNPSFPRSTAEFPDETWCLMNSIGPGRQE

SEQ ID NO: 152683 - protein, 46 aa, Oryza sativa
  Clone ID: PAT_MRT4530_5270C.1.pep
KDANVFILHKMNHKILHVFCALFIRQTISSAIHTTWSMTNYSLSIT

SEQ ID NO: 152684 - protein, 46 aa, Oryza sativa
  Clone ID: PAT_MRT4530_52710C.1.pep
MSVFVIIIGYYTAIDWITDIVIFINILSNLFIIAYSTAIDRQLRHH

SEQ ID NO: 152685 - protein, 417 aa, Oryza sativa
  Clone ID: PAT_MRT4530_52711C.1.pep
MTTVAVDQRSPRRRIALPGCPDKCGDISIPYPFGTKEGCYLDINFIVLCNLSTTPPATAAGTIILKGNGYYFGDQENPVGVQTNKSWWTVDLIDIDVTRGEVRVAVPVSSDCSTNESYHELSIFTQSLNFSTTFLFSATRNVLLGVGQSVRARIDGVMSGTNYSAACNSLFDTPAKAENGTCMGLGCCEAELAPELGMITVSMYKQSNSMWETFPCTYAMVVERSWYNFSLQDLYGYDVLDKKFPGGVPLVLDFAIRNESCPAEGKPLPTACRSSNSLCVNTTNGQGYVCKCQEGYEGNPYLPDGCQADILNGLMRAFSQEVRGVGEHRAAGTKVTEQQILPRPIHRRWATAMSSSILTAGSHRAVDPSAMDLAGADPPATCDGDSSSAGITASWQINGDAGLRKRHSDGLVAPDQR

SEQ ID NO: 152686 - protein, 228 aa, Oryza sativa
  Clone ID: PAT_MRT4530_52712C.1.pep
MVNFKNLAVAATSLLGLANAAPTAKVNSDEVIPGKYIVTLKSDIAASKIESHLNWVGDVHKRGLNERAEKGVERTYNGKYGFHGYAGSFDKDTIKEIKENPDVALVEEDRVWTINWVDEPEKESLSKRAETTQSSATWGLGTVSHRSKGSTSYIYDTNAGSGTYAYIVDTGIITSHNEFEGRAQAVYTAFSGQNADTNGHGTHVAGTIAGKTYGVAKKPPSKLSSLPG

SEQ ID NO: 152687 - protein, 437 aa, Oryza sativa
  Clone ID: PAT_MRT4530_52713C.1.pep
MNEVFEQLDSFNLIWRNVENLEKATKKLIAKRDDVENKISNDERSGMRIKSEARRWLEDVNTTISEEADINQKYESRGMTFGGCSMNCWSNYKISKRASQKLLEVKEHYIADMSVVGDQPSPEPVQKIPIPCDHVMDNDNNLREALDYIKNDPVGIIGIWGVGGVGKTHLLNKINNSFLGDSSFHSIIYVIASKECSVQKIQAEIVKKLNLRKDDDVKFQAHIISEFLDGKNFLLLLDDLWERIDLLEVGIPTLGIENNLKRKVVLTTRSQDVCGQMEVRKQIKVACLRDEEAWKLFLEKVDEETLPSSSLIELAKQVVKELKGLPLALVTVGRAMLTVLYTIDCDQLEDISWALHLPFLEELWVQGCGKMRHAIRNISKQESSMQSIDTFPRLVSMLFANNDGLVIYSDSVEWWDNLEWEEEGIRPMLEPLLKIVS

SEQ ID NO: 152688 - protein, 55 aa, Oryza sativa
  Clone ID: PAT_MRT4530_52714C.1.pep
AQAGRSAASYLVYPTEVFRVTAGVFLFINATSACVASKKFFVHYMGSSYNQASLA

SEQ ID NO: 152689 - protein, 924 aa, Oryza sativa
  Clone ID: PAT_MRT4530_52715C.1.pep
MAQILGGLVNIVVTPIYNAIFKHALYPFKVTRNVENLEKATKKLIAKRDDVENKISNDERSGMRIKSEARRWLEDVNTTISEEADINQKYESRGMTFGGCSMNCWSNYKISKRASQKLLEVKEHYIADMSVVGDQPSPEPVQKIPIPCDHVMDNDNNLREALDYIKNDPVGIIGIWGVGGVGKTHLLNKINNSFLGDSSFHSIIYVIASKECSVQKIQAEIVKKLNLRKDDDVKFQAHIISEFLDGKNFLLLLDDLWERIDLLEVGIPTLGIENNLKRKVVLTTRSQDVCGQMEVRKQIKVACLRDEEAWKLFLEKVDEETLPSSSLIELAKQVVKELKGLPLALVTVGRAMYAKRDPVLWEHTIDYMKGACRDKDGPLSMETVFRQLKFSYDSLRNDTLKRCFLTCALWPEDVFIATDELDQCWMGLGLVDKDDIQSSYREACNVRSELQSACLLESWHTSRVITMHDVVRDMALWICCGCSEKNDNWVVHAQVGKNLSRRTIPWSKAECVSLMWNRIEELPPMDSNYFPAKLRTLCLQGNRLDGRIVETLKNFTALTYLDLCSNSLTNIPGEICALANLEYLDLGYNSGICEVPTCFRELSKLKFLYLSCTNVWRIPEDVISSLKALQVIDLTPKPKPWNRYGNRENHADHMPSVVLIQELTKLSKLKAVGITVESVSSYEALKEYPNLPIRRLVLNIEERESVFYLLTGPLSDHLAQMTLHKLEIYRSSMEEIIIERHESGGHLEQNYSFDALNQLDLQFLENLKVITWKGIRPELLFHRLTVLYTIDCDQLEDISWALHLPFLEELWVQGCGKMRHAIRNISKQESSMQSIDTFPRLVSMLFANNDGLVSICDSDVTFPSLKSLRVTNCENLKRLPFRRQQSLPPKLQVIYSDSVEWWDNLEWEEEGIRPMLEPLLKIVS

SEQ ID NO: 152690 - protein, 199 aa, Oryza sativa
  Clone ID: PAT_MRT4530_52716C.1.pep
MLAKLMATAAAAAAAAAKPAPALSFSTAAAEGDEHAHYNHTDACHHLRWTAKESYEYMYARPWSRVVDFYAELVRTGAGAAGLADLFGKDEARFVDPPILEDYTAPSENQTSTKSSKDRGGRWERVTFKIVLSYHGGSFDGWQKQPGLNTVQGLVEKHLGQFVDEKKAKQLEARSLPLEGCAVVAGRTDKGVTALQQVC

SEQ ID NO: 152691 - protein, 110 aa, Oryza sativa
  Clone ID: PAT_MRT4530_52717C.1.pep
MLSSSSSASPCYSETPRNTTATPSPCSGRRQGRSAKPVIVHLFTKPEDRQSHSLVVGPFVYVVLFRSSLPVATIVPSLCCTHGKSLSLRCPLLVLPVWLPRGCPRVQFAW

SEQ ID NO: 152692 - protein, 63 aa, Oryza sativa
  Clone ID: PAT_MRT4530_52718C.1.pep
LGLRRGLAHGDARVQLRLPAVPRRQASGTRVPWWGVASVPGLAACMISISACYVCVCNVCADA

SEQ ID NO: 152693 - protein, 384 aa, Oryza sativa
  Clone ID: PAT_MRT4530_52719C.1.pep
MEADEQQQRTSTRWKGRRKTLVLVVEEEKRMDCITTYLLFNINIKDMFTHDDEWTVLRPLPRPMAQMDTLRRLALEYLNFAVVASNTIVGVSNRKRTVLLDLECDATADVLSPGPELPEEIIGGTEGDWELPIDGRGVFVPELGLCPRLRCLCAFDLPTATAPPVVRYVWPETFSEELNAMGVRAGNPWQLGLPGTMGIQHDHRRVPTRFALLLIAVQLQRDDKEEFCLVSRKLRCYDLPANAKKCLPAAYLATVRLLVTVGAEGGEIPVVPTKILLPPQPFFLPPPSQEKTRKSWGLKEKKNHQEKSRSKIIRAAARPVVVTDAAAATGDASRHREPAAAAKNPDLLPLLLAAAACTVGEEARRRWLAPGSPGNSPPDDRQRI

SEQ ID NO: 152694 - protein, 227 aa, Oryza sativa
  unsure (1)..(227): unsure at all Xaa locations
  Clone ID: PAT_MRT4530_5271C.1.pep
HPRLWGDAEYATXQPANRLLNVRTARXRLNGGGRPFGHGTVQAYLRDARDRLEAMARAAQGERVCLALKLVRGAYLAREARLAASLGVPSPVHRSIQDTHDCYNGCAAFLLDRVRRGAAAVTLATHNVESGQLAAARALELGIGGGGDRGLQFAQLMGMADGLSLGLRNAGFQVSKYLPYGPVEQIIPYLIRRAEENRGLLSSSSFDRQLLRKELVRRFKAAMLGRE

SEQ ID NO: 152695 - protein, 52 aa, Oryza sativa
  Clone ID: PAT_MRT4530_52720C.1.pep
MKMILPIRADKDVGGVETKAPSNNDRVVQPWQRNNQSIADEATGEEGEDAHY

SEQ ID NO: 152696 - protein, 514 aa, Oryza sativa
  Clone ID: PAT_MRT4530_52721C.1.pep
MFRSMGTGTGTKPPAMTTERYEFGPLVGEGNFAKVYLGRHRATGEEVAIKVMDKEKLVRLGATELIKREIAVMQRLRHPNVVRIHEVMANKRRICVVMEYVRGGALYRYFRRGPSGGAAGLREHEARRFFQQLVSAVAYCHSRGVFHRDIKLDNLLVDEQGNLKVADFGLSALADMERREAHLQTVCGTPLFLAPEVFKRRGYDGAKADVWACGVVLYVLLTGRKPFPDEHVSRLYRLIGQNQFQCPPSFSPDLARLVRRLLQPDPDRRITIPEIMEMRWFKRGFKEVTYYIDSNDRLRSLDGLDGEPELYDSDTDTIESSSSSESPTPVAGTPRGMHTSVSAPALSELDRMEDSASLPLPLPLPPRPRMPRPKSLNAFDIIASSPSFDLSGLFEERGERMRFVSGAPVADIIAKLQEIAGMVSFTARTKDCQVSIEATRNGQKGALAISAKVFELTRELVMVQVCKKAGDTAEYRRFCDNELKAGLRGLVVDALPPPVEGGGHGGAAAAAEAE

SEQ ID NO: 152697 - protein, 53 aa, Oryza sativa
  Clone ID: PAT_MRT4530_52722C.1.pep
SAQTTLAGLGIGPASVCVLEKRAEQLGLREREEMDHALFVRSRSSLVLATRGD

SEQ ID NO: 152698 - protein, 69 aa, Oryza sativa
  unsure (1)..(69): unsure at all Xaa locations
  Clone ID: PAT_MRT4530_52723C.1.pep
PRASDKAAMAPEGSQLDAKHYDSXICEELXNQCETDETLTSYDEDHESFDDMALQENLLRGLYAYGVEK

SEQ ID NO: 152699 - protein, 139 aa, Oryza sativa
  unsure (1)..(139): unsure at all Xaa locations
  Clone ID: PAT_MRT4530_52724C.1.pep
KVWPPAKRKFYVWLVIQNRVXTLDRLATRXNNVRCPLCRTRNESELHLSPTVDTLQVWRQLASMVAYQQLDPNQXEPCLDVQVWXEMLDNKKEVPKKDLRSLVLLVVXKIWKERNLRVFKHKETTAPSLVAKNKGGNKN

SEQ ID NO: 152700 - protein, 73 aa, Oryza sativa
  Clone ID: PAT_MRT4530_52725C.1.pep
TLHLCLLYDIPEDFFNHGLEFTSTRSLTQDLRSATETTQPTNLEALSLALRYLTDNSHTYSFLPQLGLTYIPA

SEQ ID NO: 152701 - protein, 143 aa, Oryza sativa
  Clone ID: PAT_MRT4530_52726C.1.pep
NNLKEPFPLISSLLNRPRDIISRNVIIRCHQSYVENAQITDNRGLNHRTLPIYTFSFFSLFRNDQWYLSDKRRLVGVVLGFGNSSASTIISTLEELPNFCCFLAFHGGIIELPKPERKHSRIISCKQSTICFVADSCVSPAQG

SEQ ID NO: 152702 - protein, 97 aa, Oryza sativa
  unsure (1)..(97): unsure at all Xaa locations
  Clone ID: PAT_MRT4530_52727C.1.pep
KALAELQRKHSVDVTFDSPYSMEARSRGFDVPXSWKSFIGGKLIGGKMDDITVIVAQVKAVMIPDDEGVDEEKGQGDEQGSAVAVASSEQKEDSITT

SEQ ID NO: 152703 - protein, 93 aa, Oryza sativa
  unsure (1)..(93): unsure at all Xaa locations
  Clone ID: PAT_MRT4530_52728C.1.pep
FFFFFFFFXXXXXXFXXFFXKXKXPXXFXQKKINTLTXXXSHLWXTXXKXXTPXXXQKNXTKNKKPXPXXNXFYHLTSPKKXXKXXAPPPXMG

SEQ ID NO: 152704 - protein, 94 aa, Oryza sativa
  unsure (1)..(94): unsure at all Xaa locations
  Clone ID: PAT_MRT4530_52729C.1.pep
TQHGQTGRPPTIGHDTLIXKKDFPVKQQIGDKCGFHVCHNMRLLYREKVKTLAEFEGTITKSLPTNFEEVRGEIASFILHEIINPKEMFRLKLK

SEQ ID NO: 152705 - protein, 107 aa, Oryza sativa
  Clone ID: PAT_MRT4530_5272C.1.pep
LVDPPGCRSSRCADPNMGRCSNGFRPHHWETGKEKNGAGNLWFREGIFARSDTACGLIYRVGQNEPSMANGLGDSRTEISSALLSLFHEITKMVHAMVGNLTEQSEL

SEQ ID NO: 152706 - protein, 830 aa, Oryza sativa
  Clone ID: PAT_MRT4530_52730C.1.pep
MAAAASLFLETHRLSMSSQGGYDNSAVTWTLQAYEPNTRPSQRAAQRPNNIAILPWPRSRTVASPRTAPPRGAHARTHAGSGSGGEAAARGAVVACVMWRAPIRGLASAAAARAGAGAPLSGLTDALLAARLANHLLTTPHIPPELLPAAPLPLPVRLHVLRHPALPPTSKLSFFLAATPPSCPLLAATFPVLVRALATHSPPLLDALLPFALSSSCPSELLPALLSALLSASRVDAALALLDAAPPDLLPRLAAAAIPSLIASPDPISAVPAIRRLLPIASHPPPVRATNRLLLALSKENLYDDFRHVFGEMSRRGLPSNIRFYNICIHAFGKWRRLDMSLKLFAAMKTASPPLVPDICTHNSLIRALVVGARVADALVEMRGSYGVKGDAVVYNSLLDGLFKAKKLDEACGFFETMVADGIQCSASTHNTVIDGLFKNGRAEAACRLFYDLRRKGQLLDGIAYSIMVREFCKEGKGDQVAEAVELMKEMEERGFAVDLVTVTSLLIGFNKSRRWDLEEQIVKFIRDSSVLPDAIRWKSNMMSALQGPQDREKDGTSIFPFDGNIDDVMSLVNPVVCTGANEETPKDEPKDDWSLSPHLDHLAKHADHLNSSAIFTIDRGQRVQGMGAKTFDADMVNTYMSIFLAKGKLSVACKLFEIFTTLGRKGTSYTYNSLMTSFVKKGYLKQVWAILHERGGQLCPNDIATYNLIIQGLGQMGKAEVAGSIISELSKKGVYMDIVMYNTLINQLGKAGKVDEANSLLEQIIGRGIKPDVVTFNTLININAKAGRLKEADKYLRKMIAEGIAPNYATETILVFLDKEIEKKRQQPR

SEQ ID NO: 152707 - protein, 34 aa, Oryza sativa
  Clone ID: PAT_MRT4530_52731C.1.pep
DRSELNQLQVIAHFTMKNIYLIHGTAFTRINSHL

SEQ ID NO: 152708 - protein, 228 aa, Oryza sativa
  Clone ID: PAT_MRT4530_52732C.1.pep
MSHRKFEHPRHGSLGFLPRKRSSRHRGKVKSFPKDDVNKPCHLTSFVGYKAGMTHIVREVEKPGSKLHKKETCEAVTIIETPPIVVVGLVAYVKTPRGLRSLNSVWAQHLSEEVRRRFYKNWCKSKKKAFTKYALKYDSDAGKKEIQMQLEKMKKYASVVRVIVHTQIRKMKGLKQKKAHLMEIQINGGTIADKVDYGYKFFEKEIPGGALCQKDEMIDMIDFPKAKG

SEQ ID NO: 152709 - protein, 48 aa, Oryza sativa
  Clone ID: PAT_MRT4530_52733C.1.pep
LNRRSYYKCTTVGCPVRKHVERASHDTRAVITTYEGKHNHDFWVDRGS

SEQ ID NO: 152710 - protein, 463 aa, Oryza sativa
  Clone ID: PAT_MRT4530_52734C.1.pep
EITTVKEATFDTQQAQSFTDQETDLSSSSNPEEAVQESDLVKSEQETDVQQEQELDSTEETKGTEDYQQNGVSTCEESVTEVEPNVDDQHVQENKSAVEVKENEDTETEEISKQINFTTSENGAQESSEQEADQPFYVQPVQQLELTTDSKDNQLVEAEETSSQSNIKEDEEIEKQKEDEEIEKQKEELQTDEQKHDDKRVDFIIDTQVESIDAFQAEQTDSVVTEMLNDEVTQHEPEDSIPRTTDAMVENITEIKEETEEENGPNSGGTLEVSAKNYNEDVHENTEKDAVVEKTSSSEHDEIAGEIRNEEVTYVTVEPCLASSLERDLQVDSDLSNDQMLENNPIAVPQNDEYMYRAEEGYTNKVNVDMHAIQESDKVIEDAEEKQGMQNEDNVVHHDESLVTTQKEEASQVHTDEQYSADTKMDDTAISYAEMTHENTSTEPREVEDTKEKKGFNDFPEFV

SEQ ID NO: 152711 - protein, 171 aa, Oryza sativa
  Clone ID: PAT_MRT4530_52735C.1.pep
MAGRQAEKFRDVQSRIDSYLLLFPVISHMDITRRLDRIYNILDAAKMYWKEPHGVQEFSFNELAKATNNFAPERKIGEGGFGSVYMGRLPDGRVVAIKHRCRNSDQGMEVFMEKQRRLLPPFRKEKEEKEHLLVYEYMENGSLDHHLHGPTSSSSSSPVMASWKIRMEILL

SEQ ID NO: 152712 - protein, 114 aa, Oryza sativa
  Clone ID: PAT_MRT4530_52736C.1.pep
MALWGGLGQAATVAQLVGADIGGLITMIMQAAMTAQQNKKECEQLARRVFTGLDDTLREAHELVMACQDNSAMYRLVMAGRQAEKFRDVQSRIDSYLLLFPVISHMDITRRPAY

SEQ ID NO: 152713 - protein, 342 aa, Oryza sativa
  unsure (1)..(342): unsure at all Xaa locations
  Clone ID: PAT_MRT4530_52737C.1.pep
MLLRCIGRNHMESKSLVLTSSQRRPTTLPLKERSVKVASARCTWEGFLMGGWSPSSTVVGTQIRNGSLDHHLHGPTSSSSSSPVMASWKIRMEILXIGVSRAIEYLQSCGEQPIIHRDIKTSNILLDGNWVPRLTDFGYAFTWEGPGTDINVLCGTMGYMAPEYLMTWALNPTIDIYSFGVVMLEVLTGKKPYLFKEEWKEEKREKCEQDGKNTEEDKEESEREEEEKTTEEQHEWQKRDGWSSGHSLASLTPLIEAGKCGRCWTGAGSGANGKPVEAAELVGPTAASCLRVRLEEGSTHLEIGGQSREGARARPLRRVGGSIAWAPETSYVNNWAMYILIM

SEQ ID NO: 152714 - protein, 220 aa, Oryza sativa
  Clone ID: PAT_MRT4530_52738C.1.pep
MGIVAETEIKLTGTLIHLKASFGPALELSRSPRPRVFCQQVDNRVVFLLESMPGEIRDSARSLQPASGGEEGIESQAIATSHIAYPPEGSQQLAANYKSSDSSRRVLDVDEESRTQDQEAVVLHPQNDFHSLDGSDIMLNEKVECDACKLRDTQCVSPYKPFLFPNVVRSTHGGVNPPARDQTMTYSDYSDRINTFLSSKSIVFTRTHIYICGLDVHVAI

SEQ ID NO: 152715 - protein, 548 aa, Oryza sativa
  Clone ID: PAT_MRT4530_52739C.1.pep
MVGSGVARDCLHYLLDCSAVGTAAAASSSSRDSVLVETNRWAETGSRLTNKEQNPDLSAIALWDVTGHAATVAQLVGADVGGLISMIMQAAMTAQQNKKECEQLARRVFTIAELLQHLQDPEVLRRPEIRRPLTGLDDTLREAHELVLSCQDKSAVYRLVMAGRQAERFRDVQSRIDSYLLVFPFISHIDITRRLDRIYNILLPTNTPGPSTPAFPVPPNPVPAAQEDSEAAAAFGKIDLIRELSILRSFSHEHIVRVFGSCVKEKRQLLPPFRKKLEEILLVLEYMENGSLNSHLHGPRSSSPVITSWKMHIEILLGVSRAIEYLQSYAERPVIHRDIKTSNILLDISWAPHLTDFELALTWEGPDHVVDLLVQGTLGYLAPECIIDGTLNPTVDVYSLGVVMLEVLTGKKPYFSEEWKEKKTEECVEEEKREECDQQERKNTEEDKEESEEDGKTTKQRWYEWLEQDGIGHQSLVSLALILIEAGELWKFLDRRPAPEPTPRQLEAAELVAQIAARCLQLQWEERPAISEVVANLEKALELARCDG

SEQ ID NO: 152716 - protein, 46 aa, Oryza sativa
  Clone ID: PAT_MRT4530_5273C.1.pep
MYHAPVTASYHQSAWAKIGRIVNPYIHRYAPFLNTPISAAQRWWFR

SEQ ID NO: 152717 - protein, 374 aa, Oryza sativa
  Clone ID: PAT_MRT4530_52740C.1.pep
MASGEGKPNPGGGGGVVAKGRKRKYLPHGKPVRKGAYPLRPGVQGFFLTCDGGRERQATREALSLLDSFYEDLVDGKGSDGKPKSIPDKPLNKKITFADSDSSDDEEEDHSGEVTDDTNNADKGETTPSEQQKEVSDTPVVPSKDNEEQTDNADESKLKKQRVQDPPISEQTEPKEPTDKPTESTDKPKGSNDKPIDDLIDEDLKELGDRKKRLFATLDSGCNGCIFIQMHKRDGDPGPVEIVQNMMSSAASTRKHMSRFILRFLPTEVTCYASEEEITKAISPLVEKYFPKESSSVYKFAVLYEARSNTGIDRMKIINAVAKSVPQPHKVDLSSPDRTIIVQIAKTICMIGVVERYKELAKFNLRQLTSPPEK

SEQ ID NO: 152718 - protein, 442 aa, Oryza sativa
  Clone ID: PAT_MRT4530_52741C.1.pep
MFRAGSTPTSSSFQLLATWTSLAVSIEFTTSCFRTTWPGHLCLLSPCPKSLSQPPRILLRSVGTGRNPIESKSLILRSSQRRPRTLPLKERSVKVASATVYMGRLPDERVVAIKHRSRNSLQGYKEFMAEITILSPIRYKHIVPLYGYCDVLVEEKQRRLLPPFRKEKEKEHLLVYEYMENGSLDHHLHGPTSSSSSSPVMTSWKTRIEILLGVSRAIEYMQSYGERPVIHRDVKPSNILLDASWAPHLTDFLWALTWEGPGHQENIIGTYGYLAPECVIAGTLNPTVDVYSLGVVMLEVLTGKKPYFSKEEWEKEKTEERVEEEKREECEQEGKNTEEGKESEREEDGKTKEEWHEWRKREMFSRRHNLVSFALPLIEAGEVWKVLDKRPAAEPTPRQLEAAELVAQMAVRCLLLQWEERPPISEVVANLENALELAHCDG

SEQ ID NO: 152719 - protein, 116 aa, Oryza sativa
  Clone ID: PAT_MRT4530_52742C.1.pep
RSRVLSWTLDAALFFFFFFFLFLFWLFFDVYDFLKELSTRSKANGYAIFGHPRARGAAPRVPKSWRGLGKDSPQKTLLAGARSGPSRHAAEGPSLPRLVPGGPLARAAGGPPRGWA

SEQ ID NO: 152720 - protein, 93 aa, Oryza sativa
  unsure (1)..(93): unsure at all Xaa locations
  Clone ID: PAT_MRT4530_52743C.1.pep
LDFKSKNRPKKPQKVSKYPPQKRPPLFPLKCVILKKLGNSLSIGFSPKNFQKFFPLPCFLFKPLFFFCPKKGIFLXNLGVPNPFFSVPPFKFF

SEQ ID NO: 152721 - protein, 56 aa, Oryza sativa
  Clone ID: PAT_MRT4530_52744C.1.pep
TRHLWASSSCSSSCNFILNHILKLHFSCTGIKYDNLGKFHEAQMQFILSSSFNFLY

SEQ ID NO: 152722 - protein, 95 aa, Oryza sativa
  Clone ID: PAT_MRT4530_52745C.1.pep
MDFLWDGVRTSSSTTDRARMTPPPSSPTWVFLNRKACVCGGEGGDSEPVLLQGADDVSLELAAPPRESVLTVSPRVLLGDVSVLALDPSAGLVLV

SEQ ID NO: 152723 - protein, 94 aa, Oryza sativa
  Clone ID: PAT_MRT4530_52746C.1.pep
VPSCDGYEEADGCVERPSLEMRRRANESDEKFLHSNLTPLLQNATEVLRDEEKPVRRIRKPLEVSNAREWRDQGVVVKHPNENLDLGLGCVMVK

SEQ ID NO: 152724 - protein, 192 aa, Oryza sativa
  unsure (1)..(192): unsure at all Xaa locations
  Clone ID: PAT_MRT4530_52747C.1.pep
PEGESPFDISPTILNFFLKYVNLYVYMKVCLTINQMIXKRINNYLNFLNKTNGQTYIKKSTVSNILKRREYIKSINPVDLVQGNLRQYIDLVLARSTAANNNNNNNNNNNNNNNNNNNNNNNNNNNNNNNNNNNNNKCNRRRRRGNTNNSSSSGTNGLTPNTTGDGWELGRNPNLHFTSSSLKGRGTIYIFI

SEQ ID NO: 152725 - protein, 116 aa, Oryza sativa
  Clone ID: PAT_MRT4530_52748C.1.pep
GGRRWRILAPPSSPTALSSPPAPTPSGGGILGTWRRSGGGADPKHGSWNQGPERSWRPSHRRRHRARSDHCVAESHRRHLRSLHAPRLRRQSLPRLLLRRAPSPCRRGAPSSAPYL

SEQ ID NO: 152726 - protein, 371 aa, Oryza sativa
  unsure (1)..(371): unsure at all Xaa locations
  Clone ID: PAT_MRT4530_52749C.1.pep
APRRRHRPRPPPPSAARASPCSPAPWPPSRGRSRRRPSAPPSAPASRXPLPPPPGSPPPPPPPWPPRRTRTRARPPGASPRWWPPAPNPPRPPXRSPPAPPPPPPRASLGISTAMVRXPKYPAPPPDPPGASLCSWPPANPPPLQPSVAPXRSPPPPPPPRAXSGPPPPRPAGSPQMPPPWPPRRTQPPGTSPCSWLPPNPPRLPXRSPAPPPPPRPPVNPPPLQPSVAPXSRSPPPPPPPRASXGSPPPLPPTSSPSPPXREPDALAPPAPXPPRTSPREGPVPRSRPDTPPAHLGQTRRAGSPPPPPPWLPRRTRPPGASPCLWLLPNPPRLPVXSPTPPPPPRASLGISATMVSLLEPCAARLSWLFP

SEQ ID NO: 152727 - protein, 121 aa, Oryza sativa
  unsure (1)..(121): unsure at all Xaa locations
  Clone ID: PAT_MRT4530_5274C.1.pep
VEXLDLRAAKRLLLXFXRRLRXNLEXRMXHPDDPARFADSKIALHXETDRXXLLAGAPDLFPDXXPXGLXSSLXSXLTHDNXDLXADXAFXLXDLTDFDDTNRLQFLACGSKLTCQFFSRR

SEQ ID NO: 152728 - protein, 702 aa, Oryza sativa
  Clone ID: PAT_MRT4530_52750C.1.pep
MAESQVEGMRKAYAEIMLNMAQESAARVLAAERRAAALAGGLAAAREDGVAALVRLKAIMEARFSQARKNNQTDKCSGCLSRQNLSSYQIKEAESQSLANINKIKELQEQLHGAQDTVASLQIELQRSNTELEQARSTLAEERRNNLRSCNKINSNKNSSSSSRKHLQGRVSSKSKNTAKESGAVENLETLYRCDSDLGSFMARTKNPELYRNGCTQRIRAIKQRSPNSDTSLVENSKQTSALNSRSKTGKTDTNRNPQSTRSIMEQILQTKFLANCKRKRGRRSRPSYMHDNSGEHGQTEYKSSDTSDGNGCLLLLQALEQDLSPLKASSGSVGEGLADQKDELLKDEKDADLNLHPASPGPNDVLSVNNMQMKRRKRSKTMRVFESDFEAKAAPEFGNTLPKSSNNNSMLNSEQSSDPPAGNNGPVLQCTAENLMHVTDAANADQLKSENSSPLVPQSTESEIGDEGNSRVDHKECRTPDNNAIVLEEVNVDKSCIILASDGADSSIVSSLDKEENAKEATSGVAVQAEGARYIKYTFNRRKRKAAPLDSTPQGAVPEKSSSVVCPSENHEPHAKPETQDLVIESPPGDNQLIHVAQQSQTHHHALAYSIYFNLNMRYTSGSYFDSRSAVKYTSTILTPLKDTRQGFTYRMIITRLSRGYDDYHAIIVFIALPQGGGYLGPNDKNNMKPKAKKKNAPYEK

SEQ ID NO: 152729 - protein, 551 aa, Oryza sativa
  Clone ID: PAT_MRT4530_52751C.1.pep
MAVEIPRLALGGGGGGAGGERLPAAGEDSAPAATNAGKRPVVGLGFGSSLAAMAAAAAAGIQPDAFALGGPAEYPAGDGERDVLMVSFLRSIAAFLADGTCQMQVNDGLSCVVDLAGGDADGGGVGEGRSAQRLASAFAEALALRFILPCDGVCRSLHLTRAPPPPAVSAARQGFRAMCPFVRLAAAAANLSIAEVMEAERAVVHVVDLGGGVDANQWVELVRLVAARPGGPPGLLRLTVVNESEDFLSAVAAYVAAEAQRLDLSLQFHPVLSSIEELSATATGSIGSRLVVIPGQPLAVVANLQIHRLLAFPDYVDGVASRRPAAEQSGSSQHTMTTATKTKADALLRAIRDLNPKLVVLTENEADHNVAELGARVWNALNYYAALFDALEASSTPPAAVPPHERACVERWVLGEEIKDIVVREGTGRRERHETLGRWAERMVAAGFSPVTAARALASTETLAQQMVAAGGGGAGAGVLRAAHGGGCFPVICWCDVPVFSVSTWTARRVLVPAPPLWPPAAAGGAGPSGSGYGGDGPSTASSSAAMWWVG

SEQ ID NO: 152730 - protein, 284 aa, Oryza sativa
  unsure (1)..(284): unsure at all Xaa locations
  Clone ID: PAT_MRT4530_52752C.1.pep
EGRVPRRRQGTPLAYLGQKRPAGSPQMPPPWPPRRTQPPGTSPCSWLPPNPPRLPVAALPLPLRLLGQASGSPPLWXACPNPPSASLCSWPPVNPPPLQPSVAPXSRSPPPPPPPRASLGISAAMVTLPEPTLPPTSSPSPPXREPDALAPPAPAAADGHSGGAGARTLLPPPTPPARSTMQLSPSXPASGTSRRPGRRQWTAGTSPREGPVPRSRPDTPPAHLGQTRRAGSPPPPPPWLPRRTRPPGASPCLWLLPNPPRLPVAALPLPLLLLGQASGSPPPW

SEQ ID NO: 152731 - protein, 109 aa, Oryza sativa
  Clone ID: PAT_MRT4530_52753C.1.pep
MGEAGSDQFCHCQGCLGKYTLLRDEENPRLAMFERRLPCFGCGIGWSSFLLGFLCPLIWYYAATLYCCKYYNKDPRERPGLAASAVAAAIFTTATIITLTTMLIICVYK

SEQ ID NO: 152732 - protein, 37 aa, Oryza sativa
  Clone ID: PAT_MRT4530_52754C.1.pep
MAFWSKNFVKHIERRRGARGWEVETPTVNGVRECGAP

SEQ ID NO: 152733 - protein, 60 aa, Oryza sativa
  Clone ID: PAT_MRT4530_52755C.1.pep
KISFILKLKKIRKPGKKGCFIPKKVRTVFTLGGGPQLLNSPFRGPKLLLLTPTFPYRLLL

SEQ ID NO: 152734 - protein, 126 aa, Oryza sativa
  Clone ID: PAT_MRT4530_52756C.1.pep
HVQKKKTEEQKTDAADGPDHRDRPAFSAPWAGAGRRGSIGRIRSRRSPCRWAGPACRSACSPGCRRRRSRTCWAPRPAPARRRRRSSPPPPRQRPPPLPPPPPRPAAAPPPRLSSTPLRSRLILPS

SEQ ID NO: 152735 - protein, 333 aa, Oryza sativa
  Clone ID: PAT_MRT4530_52757C.1.pep
KDARLSYARANVVQKGTGGWKKIVEAFGNDVLLENGEIDRARLGQIVFSDREKRQVLNRLLAPHISSGIFWEILKLWIKGCKVIVLDIPLLFETKMDQWTHPVIVVWVNEATQIERLMSRDGCSEEQARNRINAQLALDWKKSQADIVIDNSGTLDETKEKFQEVLRNVSEPLTWKERLRSRDGLFSVVACGRRLVAGRDTGRGTTNNRSSATLEQCKNHRWVHDIKRAPSNHAIGEHFRSGMQFRKYYVLHHGEEDEMICKFSSLSVYIMFFMAKTIARCSNLILVDDSTIQGGQATGLQQVGPHVRLAGWCGREMYEFSRIVINMQSIRGD

SEQ ID NO: 152736 - protein, 311 aa, Oryza sativa
  Clone ID: PAT_MRT4530_52758C.1.pep
MEMAAPNGGGAAGMSSPVNGASAPATPGTPAPLFAGPRVDSLSYERKSMPRCKCLPAAVAEAWAPSAHGCVVEIPAPDVSLTRKLGAEFVGTFILIFFATAAPIVNQKYGGAISPFGNAACAGLAVTTIILSTGHISGAHLNPSLTIAFAALRHFPWLQVPAYVAVQVLGSICAGFALKGVFHPFLSGGVTVPDPTISTAQAFFTEFIITFNLLFVVTAVATDTRAVGELAGIAVGAAVTLNILIAGPTTGGSMNPVRTLGPAVAAGNYRQLWIYLIAPTLGAVAGAGVYTAVKLRDENGETPRPQRSFRR

SEQ ID NO: 152737 - protein, 193 aa, Oryza sativa
  unsure (1)..(193): unsure at all Xaa locations
  Clone ID: PAT_MRT4530_52759C.1.pep
VDAPAVEPSTHRRHPKARSGDLKAGFGQEGHEVAVVEPPPVLSSCRWEGRVAKLGREIAVKMELWALVASVEGAARRKAHPTSSSXPSLGPPRHLAPSPPLDPPLAPLPLEPGGCRPLGCPVARRRRLHSTHLRRRRRSSRVASAVCAAPSPDAVPSARPASSVAAALAGRQPLFRPSSPVSWRHRHRSLATW

SEQ ID NO: 152738 - protein, 759 aa, Oryza sativa
  Clone ID: PAT_MRT4530_5275C.1.pep
MAPPGNSDELASSKKVKKSNSKEERKHKKGKHERPAASDEAPTPRSDAKGSKGKKRKHKDGEGEKEHGKRSKERKGEGEAAEARRGDDKVRRAMEDERFAAARTDPRFRAMRRKEAKVELDSRFTSMLTDPRFSSSSAPVDKHGRRRRKKGGRENPMLQYYLNQEEEEEKEKAKLVEEEEEEGDAEEQQGEEESSSSDDDDDDEDEEEDDDDEVYSVGSDIAHYLMGRHDDTPMIDKETHRLAVVNMDWDHIKAVDLYMVMTSCLPKGGRVLSVSVYPSEFGLERMKIESTKGPAALVDVNGSDGEYSGGDDDDDDEEEEDSSDTEHDSEAENNKLRTYELNRLRYYYAVVVCDSSATANHLYMNLDGTELLKTSNVFDLQFIPDSMEFKHPARDVATEAPPSYKEPNFETRALQHSKVKLTWDDDEPERKKVLRRKFTDDQLDDLDMYLASDDSASDDEGADNHGDESLQSGAKRKLTREERLALLLQGDKSEEEQTDGEDMEITFNTELEDLSKRILDRKVNNEKTVWEKHQEKMKEKRKSRKRRSKDDDDDGYSSEDGLDEHDDFFDDEMSDEEIKPNKKQKAKAKDKGKGKGKDKLPEQHLEDEATREELELLVAADKDAGNGAKGYNLKRKKGTKGKKGKEQSVEDELPDIDLSKDERFSAMFNSHWFAVDPTDPQYKRSAAFMRKQAGIKGAHEPSLGGRGSGRGTLPPDDVPTDTHDQKPDGTSTEKLETMSAVKSLKRKLTALKNTSKSDR

SEQ ID NO: 152739 - protein, 342 aa, Oryza sativa
  Clone ID: PAT_MRT4530_52760C.1.pep
MAMAFLGQSRLYDGISWNSHLSMAFLVPPVSVATSAPSLSLPPPLPSSSLSLSLFSASRPVAGAKAARVRRRRQVANGETEALHAAVLKEEQQQHEVEEATVVTSSSATSGEEGGHLPQGWAKRKRSRRQRSEEENLALCLLMLARGGHHRVQAPPPLSASAPPPAGAEFKCSVCGKSFSSYQALGGHKTSHRVKLPTPPAAPVLAPAPVAALLPSAEDREPATSSTAASSDGMTNRVHRCSICQKEFPTGQALGGHKRKHYDGGVGAGAGASSTELLATVAAESEVGSSGNGQSATRAFDLNLPAVPEFVWRPCSKGKKMWDEEEEVQSPLAFKKPRLLTA

SEQ ID NO: 152740 - protein, 123 aa, Oryza sativa
  unsure (1)..(123): unsure at all Xaa locations
  Clone ID: PAT_MRT4530_52761C.1.pep
NKITEENGIQAKTDIQEWIHMQQRFGNMYTCNARTAQGYYQLVQASRFQSHNHTSRENQSINAKVVGLNIAGADLFELGGGRRRRRRAGPAWCXSAGGQLGLGGSDGGRARIGHGLWRLSCWM

SEQ ID NO: 152741 - protein, 263 aa, Oryza sativa
  Clone ID: PAT_MRT4530_52762C.1.pep
MDRYQRVEKPRNETPISENEIRITAQGRMRNYISYGMSLLEENGHDEIVIKAMGRAINKTVMVVELIKRRIGGLHQITSTESIDITDTWEPLEEGLLPLETTRHVSMIAITLSKKALDTLSPGYQPPIPAEEVRPAFDYEHEVESFPTNRGRGRGGGRRGRGRGNGPPAYDYGEEWEEEGDYYNYRGRGRGRGRRGGYGYDYGYGGRGDYYEDQGEYFEEPEDYPPLSSSVGFTGRGRGRRGGGPGPFRGRGRGRGPPPPPRR

SEQ ID NO: 152742 - protein, 52 aa, Oryza sativa
  Clone ID: PAT_MRT4530_52763C.1.pep
GLVQPKDQPTYNPVIHTIELSIVHPEFIYVFYIAFCALLFLSLTHKVQNFFC

SEQ ID NO: 152743 - protein, 287 aa, Oryza sativa
  Clone ID: PAT_MRT4530_52764C.1.pep
LHSTTEHHICSRAASAALVHRRSFRIGFRRTGGRGGESKITAQGRMRNYISYGMSLLEENGHDEIVIKAMGRAINKTVMVVELIKRRIGGLHQITSTESIDITDTWEPLEEGLLPLETTRHVSMIAITLSKKALDTLSPGYQPPIPAEEVRPAFDYEHEESFPTNRGRGRGGGRRGRGRAMSNGPPAYDYGEEWEEEGDYYNYRGRGRGRFRGRGRGRGRGGYYGGGRRGGYGYDYGYGGRGDYYEDQGEYFEEPEDYPPPGRGRGRGRRGGGPGPFRGRGRGRGRF

SEQ ID NO: 152744 - protein, 828 aa, Oryza sativa
  Clone ID: PAT_MRT4530_52765C.1.pep
MAMTTAAAPARRHRRLEAVGGGNATGCRRGRASGGLHAKRRASRGRGDYCEAAGGDGATGRRSGKEGEAAGGGRRHGRERRMAGRGAMNSCVPDYLIQGNGTVYTIDSCYKKTGVHKGAPQQKPWADMIADVMREQFGLKPKDSGNLYRHPYLEHFERVPLPNRYKVPDFSKFSGKDNVTTYEHVNRFLAHCGEVSATDALRVRLFPSRSAFTWFSALPYNFVHTWADLERQFHKYFYSGIHQMKLSDLTSIKQKHDESVQDYIQRFRDMRNRCFSFALTDSQLADLAFQGLLAPTREKFATQEFESLAHLAQKVKNVNTYLSEVEEEEDPEVATAEWARNKRVVTCQWVKDSGKEETFDFDITKANKIFDLLLREKQIHLPAGHMIPSAIELGKRKYCKWHSTGSYSTNECKVFRQQIQSAIEQRRIKFDDPKKSMEINGNPFPVNMNGGMRLPSIQNYPGCSGIDEDHVGSSSRFLPRNENRPIQKKLPVHQRLGPLHQDPIWREDEEDESRKQQWCPSGIFTKNHKRRVQRMWSREWFQEVHEEINHRLKRTKQEWRVKSKVVPTDEVEANKARWIAKGKTVESSSVNMVFVLPAEYCAEPTGVEIMEESLPKLVLSPKQVVVEKPEGTEHWHLKPLYVKGFVNGKPMSKILVDGGAAVNLMPYATFRKLGKNAEYLMKTNMVLKDFGGNPTEANGVLKIKITVGSKTVPTTFFVIDGKGSYGLLHGRDWIHANYCIPSTMHQSLIQWQGDQIEVVLADRSVNVANADLTIWEMDVIDCLSRNVWEGGYLKVSDHDIQLIGGEEPQLLLRGHHGGFEILRQEYYR

SEQ ID NO: 152745 - protein, 95 aa, Oryza sativa
  Clone ID: PAT_MRT4530_52766C.1.pep
MEEAALSGKRALYISISLSQIKSFVTVLKTQGFSYHGGTQCSQVMLRMGSTCRRHKPATLGANKPKCLAEVEEEEAKAEEAHKENTWWAVAIGDL

SEQ ID NO: 152746 - protein, 228 aa, Oryza sativa
  unsure (1)..(228): unsure at all Xaa locations
  Clone ID: PAT_MRT4530_52767C.1.pep
TTGPRNAGHPSGDTPASPPGPVWPRAAASSRLGDRPPRNTRSRRDTPQPSGAHYTTPPPPARAPAAPTTAHAFATPTXPGPPXPRPPPHDGPPAPPPXGPWAPLRPCPRPPPPPRPPRRPRPPPGRAPTAPPNPAHAVGGGPPWPVGGASATYETRSTAAAASSSWPPSVRPAMLPPPRPAVPXRHPPPPPPCPRHRRFLVRSPPRHPSPPPPRPSPPPPPRPVVPRC

SEQ ID NO: 152747 - protein, 155 aa, Oryza sativa
  Clone ID: PAT_MRT4530_52768C.1.pep
MEKSSDEQCCIHQGLEENEDRVFPRQHHQRERDISTALLKRPSSVSARTLLNQYRSACSIALPQAILRQCEDIAEPMPHAILRQREDIAEPTPLVSVNARTSLNQCPSPVSCRRPLRHTTFTGLPDATTSSHVVGWATSLLSPALTSQCYRLDRA

SEQ ID NO: 152748 - protein, 58 aa, Oryza sativa
  Clone ID: PAT_MRT4530_52769C.1.pep
WEMCCEFGQCQLETLPMWRVVADSIGTDDQCLPESAIVLSEMGTEQIKDDKGSFNSHS

SEQ ID NO: 152749 - protein, 52 aa, Oryza sativa
  Clone ID: PAT_MRT4530_5276C.1.pep
LASLFTLCLFVPSICSYEACYQHFSLSSPNFSMLPKAPALPKTNNLTFFPEK

SEQ ID NO: 152750 - protein, 116 aa, Oryza sativa
  Clone ID: PAT_MRT4530_52770C.1.pep
DVGDVDIPGVRRLKRSWLPQPLLDLNKLFTKQFIENGREMVKTDGVLINLSILSRVRLRINIYCYIIPPSMSRISVQVKGGSVINKSTLVCAAMRSLGLKKANFQLAPPKLLLVPG

SEQ ID NO: 152751 - protein, 147 aa, Oryza sativa
  Clone ID: PAT_MRT4530_52771C.1.pep
MGNVYLLHDEPMPIVDTIQLNNNYLKLLENAANHRDITVRNVANHIIDNLHADPTQWHYVSHIDWIQARFNAYQQRIQQEDEIPLEQQHQLRQLPQNILSSHTELSQKERELSKNIQSSQMELSKKSQRSHTELSDSVQYKYEYLYK

SEQ ID NO: 152752 - protein, 481 aa, Oryza sativa
  Clone ID: PAT_MRT4530_52772C.1.pep
MAPPPAVLSSGELGARGHTRPHVVFVPSAGMGHLLQFFRFIGALSAHDVDISVVTVFPTVSAAEADHFAALFRDYPSVRRLDFDLLPFDASEFPGGDPFLLRWEALRRSLHLLGPVIAGVTPRVTATVTDVTLVSHVNPIAKDLGVQCHVLYVSSAAMMSLCSYFPIYLDNKDAGADVGDVDIPGVRRLKRSWLPQPLLDLNKLFTKQFIENGREMVKTDGVLINTFDALEPVALAALRDGKVVRGFPPVFAVGPHSSLASEATKGAAADAEGSPMAWLRQQPARSVVYVAFGSRCAVSHEQIREIAAGLEASGSRFLWILKTTVVDRDDDAGIRDVLGDGFLERVRGRGVVTKAWVDQDAVLRDPAVGLFLSHSGWNSVIEAATAGVPLLAWPRGGDHRVAATVVASSGVGVWMEQWSWDGEEWVVSGEEIGGKVKEMMADAGVREKAAKVGEEVAKAVAVGGTSHTGILDFVAKLKAAT

SEQ ID NO: 152753 - protein, 180 aa, Oryza sativa
  Clone ID: PAT_MRT4530_52773C.1.pep
MAAVDAVALLAVVSALAFLVTPYVRMVAAEVGGLVSDLDAAGVASSYYAPFAAAGAGAAIAAVAGVVAWDAVGHRARRCGKPRCRGLRKAVEFDIQLETEECVRGQQQRLLPLPGGRAALLAAAGARPVQLGDAHRELEAELRKMAPPNGRTVLIFRSPCGCPKGRMEVWGAKKVRRIKK

SEQ ID NO: 152754 - protein, 228 aa, Oryza sativa
  Clone ID: PAT_MRT4530_52774C.1.pep
MDTIKSFKGYGKVDELEQQAYQKKTRKRLIIIAVSSIVLFAVIIAAVAGVVIHKRNTSSSPSSDSPPQTELTPAASLKAVCHVTQYPNSCFSAISSLPESNTTDPELLFKLSLRVAIDELSKLSSFPSKLRANAEHDARLQKAIDVCGNVFGDALEQLNDSISALGSGAADAGKIISPASVGDVETWISAALTDQDTCLDALAELNSTASRGALREIDTAMRNSTEFA

SEQ ID NO: 152755 - protein, 34 aa, Oryza sativa
  unsure (1)..(34): unsure at all Xaa locations
  Clone ID: PAT_MRT4530_52775C.1.pep
RPRRAAQGGGGRPRRRRERHPVRPXNRIKERLSY

SEQ ID NO: 152756 - protein, 78 aa, Oryza sativa
  Clone ID: PAT_MRT4530_52776C.1.pep
PTSSSPTHTLINHPAHWHQPTSTSANTLMTGHIYRPLFSSVDLQLPSTLAWPGVCSSHTVVNSDVLLNVSRYNCTWRD

SEQ ID NO: 152757 - protein, 100 aa, Oryza sativa
  Clone ID: PAT_MRT4530_52777C.1.pep
KLSSRVDEVVNGYISSIHRATTVCDSSVIGGVIFRLPYVHAFFQGKQHGNAWVRRILESLAVYTLIRFDFHDLRADPPSRRDGWLGVYALKPLRSSDNDR

SEQ ID NO: 152758 - protein, 85 aa, Oryza sativa
  Clone ID: PAT_MRT4530_52778C.1.pep
RKGATLVSLLLRFLLSRQQNLITGPWPEGYGNRHLQSQKPGFSPPHASIMHDQLPSMHITLVGGLLLLLMDQKERDKLRNKKLAS

SEQ ID NO: 152759 - protein, 560 aa, Oryza sativa
  Clone ID: PAT_MRT4530_52779C.1.pep
MASMMQPQIILLKEGTDTSQGRAQVVSNINACTVVADTVRTTLGPRGMDKLIHDDKGGTTISNDGATIMRLLDIIHPAAKILVDIAKSQDSEVGDGTTTVVLLAAEFLKEAKPYIEDGVHPHSLIRSYRTAGHLAIEKVKDLATSIEGKSLEEKKELLAKCAATTLSSKLIGGEKEFFASMVVDAVLAISNDDRLNLLGIKKVPGGTMRDSFLVNGVAFKKTFSYAGFEQQPKKFLSPKILLLNIELELKSEKENAEIRLSDPLQYQSIVDAEWNIIYDKLDKCVKSGAKIVLSRLAIGDLATQYFADRDIFCAGRVAEEDLQRVAAATGGTVQTSVNNVIDEVLGTCEVFEERQVGNERFNIFSGCPSGQTATIVLRGGADQFIEEAERSLHDAIMIVRRALKNSTVVPGGGAIDMEISKYLRQHARTIAGKSQFFVNSFAKALEVIPRQLCDNAGFDATDVLNKLRQKHASGEGANFGVDINTGGIADSFANFVWEPAVVKINAINAATEAACLILSVDETVKNPKSESAQGDAAASAMAGRGGGAMRGRGGRGMRRR

SEQ ID NO: 152760 - protein, 103 aa, Oryza sativa
  unsure (1)..(103): unsure at all Xaa locations
  Clone ID: PAT_MRT4530_5277C.1.pep
MRAYSVIAMDTVHTAHENSTTSAEYHPCDVDDVHKPHSAVTIGAMREALDLNYLILTPLSSFVQAAAXSDARKIGGRSLNGGEEVPNADTAPAFARDQLILGI

SEQ ID NO: 152761 - protein, 86 aa, Oryza sativa
  unsure (1)..(86): unsure at all Xaa locations
  Clone ID: PAT_MRT4530_52780C.1.pep
QSXVAXXAIRXXXXXVXDXNVXRRXQXSIEXAXXRYGLTXXXXVXEERXHRPXXXXHRLXLCRXXGXQXXGVXXXGXXVXDESNVV

SEQ ID NO: 152762 - protein, 115 aa, Oryza sativa
  Clone ID: PAT_MRT4530_52781C.1.pep
PKAVGCRVRALTAYKAVMQDYALRIGVPAESPCDLTAHSWQRAERETFLWRNPISSTPPEHHDKDKNETKRWPNPTGLYCSQEEDHVGYRKRSTAHDMGIDRIPEQLCSWLKIGD

SEQ ID NO: 152763 - protein, 132 aa, Oryza sativa
  Clone ID: PAT_MRT4530_52782C.1.pep
MNCDAQLEGWHLNPSDAYIEDKHLQEAKSIVKEMHETISDVRSSALYTKFIDHVKKDESVSSHISSMLGAHECIQLVIYGLGSFEFDVKSQYQLAFALLLKADNIFPIGDIEIYDPALSPADVKACFDLGIL

SEQ ID NO: 152764 - protein, 58 aa, Oryza sativa
  Clone ID: PAT_MRT4530_52783C.1.pep
NSIYGPGVLFLWQLQQGLFFGAINGPFVSFFPFSPVIFPGAQQMGAIKDPSKRGFPGF

SEQ ID NO: 152765 - protein, 1498 aa, Oryza sativa
  Clone ID: PAT_MRT4530_52784C.1.pep
MGSVSPPAPEEDAAAVESAGAAARMFWHETKRLWAIGTPIAIGTITNYAISSVTTMFIGHLGNLPLAAASVGLSVFATFALGFLLGMGSALETLCGQAFGAGQVSMLGVYLQRSWIILLGATVLMVPVYVLAEPLLLLVGQDPEVARAAGRFTLYILPGAFAFAVNFPSGKFLQAQSKVGVLAWIGVAGLAFHVGITYLAVSVLGWGLPGAAAAYDVSQWASSLAQVAYIMGWCREGWRGWSMAAFHDLAAFLRLSIESAVMLCLEIWYLGLITVLTGDLDDAQMAVDSLGICMNINGYEGMIFIGLNAAISVRVSNELGSGRPRAAMHAVVVVVAESLLIGLLCMALVLAFSDKLALVYTSDAHLLRAVSRIAGLLGVTMVLNSVQPVLSGVAVGGGWQGLVAYINLACYYLFGLPVGYLLGYYFNLGVGGVWGGMLCGVALQTLILLFVVWRTDWKAEVELALPYSHFIKRNEVYRLQVKGRPSLIRICWPAASLIPNPPLMDFSPFQKKARLILSVVSIDFSVQIHIYHRLPLSSSHRSSQLKNCYLPNLRKESARLASKRTTCSVATEPPPSTTEEPEMDLPKEIFLKEYKKPDYLFDSVNLEFQLGEDKTIVTSKIAVSPGTEGTSSPLTLHGRDLKLLSIKVNGKDLKVDLFVLVRDGGLLCPSVSEDYMVDSRHLTVSRPPGGTFNLEIVTEIYPQLNTSLEGLYKSTGNFCTQCEAEGFRKITYFQDRPDVMATYTCRIEADKTLYPVLLSNGNLIEQGDLEGGKHYALWEDPFKKPSYLFALVAGQLDCREDSFTTCSGRKVTLRIWTPGQDLAKTAHAMYSLKAAMKWDEEVFGLEYDLDLFNIVVVPDFNMGAMENKSLNIFQSRLVLASPETATDGDYAAILGVVGHEYFHNWTGNRVTCRDWFQLTLKEGLTVFRDQEFSSDLGCRTVKRIADVSKLRTYQFPQDAGPMAHPIRPHSYIKPPYRSDINSSNFTGRWTIFIPVYEKGAEVVRMYKTMFGASGFRKGMDLYFQRHDGQAVTCEDFYAAMCDANNTQLPNFLQCQEVPPTPGQPVKEPMFIPIAVGLVDSTGKDMPLTSIYSDGMLQSLTSDGQPVFTTVLQFNKKEEEFIFNNIPEKPVPSLLRGYSAPVRLDSDLTESDLFFLLANDSDEFNRLLSVSCFKSSSLLLEIFNLRILAFLRWEAGQVLSRKLMLSLVADFQQQKTLALNPKFVDGLRSILRNTSLDKEFIAKAITLPGQGEIMDMMPVADPDAVHAVRTFIKKELALQLKDDLLSTVTNNRSSEAYTFNHDSMARRALKNTCLAYLASLNEPDTTELAFVEYKSATNMTEQFAALAALSQNPGQVRDDTLLDFYNKWQHDYLVVSKWFALQATSDIPGNVANVQKLLGHPAFDMRNPNKVYSLIGGFCGSPVNFHAKDGSGYKFLGEVVLQLDKINPQVASRMVSAFSRWRRYDESRQALAKAQLEMIVSANGLSENVYEIASKSLAA

SEQ ID NO: 152766 - protein, 154 aa, Oryza sativa
  Clone ID: PAT_MRT4530_52785C.1.pep
VSHWTRPATPSLSLYSARLASKRTTCSVATEPPPSTTEEPEMDLPKEIFLKEYKKPDYLFDSVNLEFQLGEDKTIVTSKIAVSTGTEGTCSPLTLYGRDLKLLSIKVNGEDPKSEDYMADSRHLTVSRPPGGTFNCEDATDIYPELNTSLEGLY

SEQ ID NO: 152767 - protein, 502 aa, Oryza sativa
  Clone ID: PAT_MRT4530_52786C.1.pep
MASPPSAPSSSAAAAARAAPHRPRLRSRRSLRPPPQPQPRVLPSSVACRSSALRDFQFRNISTRPTSRRDVLPVASAFDEDLGDFSLVHADGDDPLEVVVYSSESDWSDEEVVLNPTSDVELPLKSKSRFEGVEVLSALAGFLFAPVADNMKIHHFRRRGKLMSPFYRKPTPAMGGLFFVPIGIFVARRQVGSSTGVNGAAIITLIFAMVGFLDDISNLVMDCNRKIPHWMRLFVQIVAGIYLSIWLSSTNISTPYNTKFLVPLPPPLGLAFIGKIYLVLAAICSLSMGTGVTLVDHLDGLAGGVAALALAGLSVASLPICSEMSVFGASMSGACTGFLFHNRYRASIVMGRVGSFALGGAIATIAACSGMFIPMFIACSIFLLELLLVIFQVPFQMAKKHFLGTNRYPLRILPSYYFLKSWGIKEPYIVAGAYIISCLLTAFAGYLGLVSASDLARPSQRSKMPLTYRRQITVDMNSVENKEYSQKYLQISTSGQNTFAGG

SEQ ID NO: 152768 - protein, 260 aa, Oryza sativa
  Clone ID: PAT_MRT4530_52787C.1.pep
MDGKVAIVTGGASGIGEAAARLFASCGATVVIADVQDELGEAVAASVAGGGCRYVRCDVTDEAQVEAAVAAAVAEHGRLDVMVSNAGVLLPTGPVVDMDLAALDRVMSVNFRGAAACVKHAARAMVSRGTRGAIVCTASVASCQGGFGPAAYTASKHAVLGLVRAAAGELGRHGVRVNCVSPGGVATPLSCGLTGMSPEEMEAAAEPHNVLRGKVLKAADVAEAMLFLASDQAAFVSGHNLVVDGATTAVNYAVLQSVGL

SEQ ID NO: 152769 - protein, 70 aa, Oryza sativa
  unsure (1)..(70): unsure at all Xaa locations
  Clone ID: PAT_MRT4530_52788C.1.pep
LINYRNFTLIGGPNFFGLTKEKGLGVTPVIKXFGGAPLPERGINLSFRNSRGPGPPFFFSFIFLSLKQEI

SEQ ID NO: 152770 - protein, 64 aa, Oryza sativa
  Clone ID: PAT_MRT4530_52789C.1.pep
RQSPVGDKPSHFCRGRPFGLASQKGLNKGFLGAYFGGILFLVQKKKWKWMVSPSPFFGVWGLLI

SEQ ID NO: 152771 - protein, 35 aa, Oryza sativa
  Clone ID: PAT_MRT4530_5278C.1.pep
YNTKRAQAVKLSGVLVRDQCHHMCDVPHMATHRTT

SEQ ID NO: 152772 - protein, 116 aa, Oryza sativa
  Clone ID: PAT_MRT4530_52790C.1.pep
KKNWGVFNKKVKPHKSPFPQEKNGPRVWGGEKNKRGGAFLKKKKKKTWVEKRAVPPKKPKKNLGPPFFLRKKRGTGFIPEKNTPRGLAHPGRPRVSPPGDPLGAGPSPKKGGGATP

SEQ ID NO: 152773 - protein, 105 aa, Oryza sativa
  unsure (1)..(105): unsure at all Xaa locations
  Clone ID: PAT_MRT4530_52791C.1.pep
MRTTRRRGKACACTRGRTGVAAGRIAEPXPVSCSPCGGREAATGGGIAVPCSPLATRRRCRRFDAGGRVGRGRRVASDFEKPIRDIFHCELDFRQLQVRPHTSAD

SEQ ID NO: 152774 - protein, 196 aa, Oryza sativa
  unsure (1)..(196): unsure at all Xaa locations
  Clone ID: PAT_MRT4530_52792C.1.pep
PRVRFGLNQEXPLXPNGXNIDVTSSNRLRYIHLVAKYYLHDRLRRQSXAFFSGLYEIIPVDLLSIFNPPELQXLISGXQTTIDIDDLQNNTTYAGGYHRLDXTIIRFWKVVRAMSFEEQSLLLRFVTACPRPPSLGFSSLTPRFTIQRIDNDASNQRLPSASTCFNILKLPTYPSETILKEKMLYAITSKSGFDLS

SEQ ID NO: 152775 - protein, 38 aa, Oryza sativa
  Clone ID: PAT_MRT4530_52793C.1.pep
RRTLANVRRLRFTLSCLRTLVTAKIAFGVSSYALVIST

SEQ ID NO: 152776 - protein, 92 aa, Oryza sativa
  Clone ID: PAT_MRT4530_52794C.1.pep
AGIRHEACELFLVCRTRVVLYPFVGFFASYKVRRRLEEARYNQHCSLRDKFRRYMAGGSKTRIHASLVSTLLLLLPLASAIHRSDFPASFLF

SEQ ID NO: 152777 - protein, 464 aa, Oryza sativa
  Clone ID: PAT_MRT4530_52795C.1.pep
MELSMMYDELYTKAKVIQTGKGTILRCVSLTSTVVAFVLFILMSGSKQRYYNSIGVDVAITYMLFVGAFCLEACAIIIAMVSPRAWASMEARGGGCNSRQYNFMSSRLADGKSRITEEMMAIVGAKEVWSNFRHTRHGPVTDEMKELIHQEIDNNKSSGRDDDIQEKEVHSLMHTCEVISDYMFFLLVTQPAMLPVQRNVYDLLALVLNDAGYARTSSKEQFLETVASGEYSWDQPFMDFRAAPPDDMLQQGWKGLHAALQVMLQIWVRLLIYAAGKSQHARRLSMGGELLTFVWLLMAHRELGDIYNIQFQLVEKEKDGELFAFAMGESDMIAVEAQKARTKWPKARNPSGNVKNTYPRMMMKPIAMHQQVFDKDTFSSDDRMGDVEVDIQPLIAAAREHESSAAIAGSVEVTKLLASDDGTLARDSVISVVDGKVKQDIALRLQNVEHGELEIELECVPLSQ

SEQ ID NO: 152778 - protein, 70 aa, Oryza sativa
  Clone ID: PAT_MRT4530_52796C.1.pep
MAVALTITEHERAAVGGVVANVSREEGIPIRRIDKRLTHRLDGGYERRRERTGHSGDRQSYCIFGHAVLE

SEQ ID NO: 152779 - protein, 87 aa, Oryza sativa
  unsure (1)..(87): unsure at all Xaa locations
  Clone ID: PAT_MRT4530_52797C.1.pep
GDEEDVXGDGDGGRGDEGSPSPLAARSTSYGKGAVGPAGARTFSPFTPHVCYSLFFPLFLFCKICARQDNLNSKPLRFESMFRIQAV

SEQ ID NO: 152780 - protein, 236 aa, Oryza sativa
  Clone ID: PAT_MRT4530_52798C.1.pep
MAKHEHVSSKRLTVAGYAWEIHYTPGHDAHWHYWVAFKLVFLGIGEQAQRAGGDDDDNDAGAIKAELEASGFITGDSFAVRCTITVLSKNTINSAEPSPDLHLQLGELLRSGRFADVEFIVSGVSIAAHRCVLAARSPSLAAAVLKGGTRKKDGSVRVEVKDDMRAGVFRALLHFIYTDTLMELDWREDGSDPLLPRTMVMSLNEAAGRYGLERLKQICENMLGFDDACSADCAVM

SEQ ID NO: 152781 - protein, 234 aa, Oryza sativa
  Clone ID: PAT_MRT4530_52799C.1.pep
MRRWGRGRRGGEARGVGVERKRLVVFVSGGGSNFRAIHDAALGGDVNGVVVALVTDKPGCGGAEHARGNGIPVVVFPKLKSAPEGVSTDELLNGLRELRVDFILLAGYLKLIPVELVQAYPKSILNIHPSLLPAFGGKGYYGLKVHKAVIASGARYSGPTVHFVDEHYDTGRTLAQRVVPVQANDTPEQLATRVLHEEHQVYVEAVTALCEDRIVWREDGIPLIRSQTNPDEYT

SEQ ID NO: 152782 - protein, 144 aa, Oryza sativa
  unsure (1)..(144): unsure at all Xaa locations
  Clone ID: PAT_MRT4530_5279C.1.pep
VVFILEKIHIMWESILPRSIYKRKLXKDMLLIDDMAAEETLQLQGLIHLALENLSSLFLSLVENEFLDHQTWIELDEIIRPLKKFRKLAELLDMSLKSITAAWESGELTNCGFTSSEVQNFVKAIFADSPLRKECLLWISRTPS

SEQ ID NO: 152783 - protein, 113 aa, Oryza sativa
  unsure (1)..(113): unsure at all Xaa locations
  Clone ID: PAT_MRT4530_527C.1.pep
XXXTTKHXIAXXXMGXXGRGXIYLXXPFTRGMLXPSXGYSLTPXNSXCXQLKPKTNWMPXTXGRLXPLXNRCXILFXFXXCVSLSPWXXXTYXSXXFXPFPNCXLGIYXLXGX

SEQ ID NO: 152784 - protein, 290 aa, Oryza sativa
  unsure (1)..(290): unsure at all Xaa locations
  Clone ID: PAT_MRT4530_52800C.1.pep
MEAAVASTGSGLRCSPNPMPKQQHERRSARVGFVSQPRPRAVRCERSPHPDARAYAAVAVGVVAKGREVGGVGVERRRLAVFVSGGGSNFRAIHDAALGGEVNGDVVALVTDKPGCGGAEHARGNGIPVVVFPKSKSAPEGVSIDELLNALRELRVDFILLXGYLKLIPVELVQEYPKSILNIHPSLLPAFGGKGYYGLKVHKAVIASGARYSGPTVHFVDEHYDTGRTLAQRVVPVLANDTPEQLAARVLHEEHQVYVEAVAALCDDRIVWREDGVPLIRSHTNPDEYT

SEQ ID NO: 152785 - protein, 73 aa, Oryza sativa
  unsure (1)..(73): unsure at all Xaa locations
  Clone ID: PAT_MRT4530_52801C.1.pep
MNIIFIFALLARVACNASARIDPLSQSYPQYQLQPHLLLQKQVLTQCSVFVRNTNSILGTSFCXPATYTLYNN

SEQ ID NO: 152786 - protein, 87 aa, Oryza sativa
  Clone ID: PAT_MRT4530_52802C.1.pep
QDLASFQTAVAGCSIGPTRGRSWRNRRVTPLRARVSSILSEDGCKHPQIACPELPKLSTSDPVVEITIAAMPSQCDTQVFSCKQSGS

SEQ ID NO: 152787 - protein, 404 aa, Oryza sativa
  Clone ID: PAT_MRT4530_52803C.1.pep
MNPLLTAAAAVVLCFLLHGAAASGDPFPPRFNSIFSFGSSYSDTGNFVLQSAGLPSIPFNHSPYGDTFFRRPTGRPSDGRLPIDFIAEALGLPLVPPFLAKEANDFGGGGGANFAIVGGTALDVGFFIRRNNASVPPFQSSLRVQIGWLRSLLRRAGNATAAERLATALFVVGEFGGSDYRYLLSGGKSLEQAKSFVPEVVRAICRGVERLVEEGARYVVVTGTPPAGCMPMELTKYAAANASSAAAAYDRRTGCLRRLNGLAQYHNWLLREAVERMRGKYPTTKLVYADFYKPVASLVRRPAKFDRHRSAIVVAIAHKCECATVAMYTRFTQQPLKACCGGGGPYNYNPGAACGSPGASTCGDPSAYVNWDGIHLTEAAYKYVAGGWLNGVYAYPSILSLLAQ

SEQ ID NO: 152788 - protein, 114 aa, Oryza sativa
  Clone ID: PAT_MRT4530_52804C.1.pep
FYDIIYLVSPSYITYTDFNYTSFLKRYLLWSNKKYFKIPVSHGTKIQRSETIWYHEVTNTATGDQITARIVDQCANGGLDLDWDTVFSKIDSDGQGYQNGHLIVDYQFVDCGDN

SEQ ID NO: 152789 - protein, 837 aa, Oryza sativa
  Clone ID: PAT_MRT4530_52805C.1.pep
MAVMTDVSTTGTALRTPAAGAVKEGDVEKLRFIDEMTTNVDAVQERVLGEILGRNAGTEYLTKCGLDGATDRAAFRAKVPVVSYDDLQPYIQRIANGDRSPILSTHPVSEFLTSSGTSAGERKLMPTIMDELDRRQLLYSLLMPVMNLYVPGLDKGKGLYFLFVKSETKTPGGLTARPVLTSYYKSDHFKNRPYDPYHNYTSPTAAILCADAFQSMYAQMVCGLCQRNDVLRLGAVFASGLLRAIRFLQLNWEQLAEDIESGELTPRVTDPSVREAVAAILLPDPELAKLIRAECSKGDWAGIITRVWPNTKYLDVIVTGAMAQYIPTLEFYSGGLPMACTMYASSECYFGLNLRPMCDPSEVSYTIMPNMGYFEFLPVDETGAASGDATQLVDLARVEVGREYELVITTYAGLNRYRVGDVLRVTGFHNAAPQFRFVRRKNVLLSIESDKTDEAELQRAVERASALLRPHGASVVEYTSQACTKRIPGHYVIYWELLTKGAGATVVDADTLGRCCLEMEEALNTVYRQSRVADGSIGPLEIRVVRPGTFEELMDYAISRGASINQYKVPRCVTFPPIVELLDSRVVSSHFSPALPHWTPARRTTSPAHPSRTVPSRPRVNHLPRAHHDVGPCVLVLAVVVDWAGWLPRWRHAVQVKEAGVRGFNGCSPVSRLTRTRARALRRKRGRVAETQPHRGRVPLPESRARAARATYLGGGGNERLRAGRGEVLQEGGRGRGATCRDKNRRFAWEIRPQGFMDTSKMNACKEVPLFPRSKRKAHIAAGARLASKVESEAHTHARRRETVRKRCGGAWFMWARPVKGEPRQSSSSRCLPDSSS

SEQ ID NO: 152790 - protein, 578 aa, Oryza sativa
  Clone ID: PAT_MRT4530_52806C.1.pep
MVTPLSNSTKSNEQCDIERKHDGSIDSVAKRKGSLCQQVANSDGERRTRYSGPNLPEVTCKHLPSYWPLLPMKDYQGYVLSLVNHRVTIGNLEVMRTAYRLLSFPTTNPKGYGKATRLFSLPIDQAVTLTDIWCHIHSLMPFKDAARAACVSHAFRRSWQHRPNLIFCIGTLGLDFINKIDRIIKNHSGIGIKSLQLEYDTFCNARRSASISYHLNNWLQIAVTPWIEELILTLSLSSYNVDYNFPCSLLSDGRGSSLRHLYLGSCFFHPTVNLELRNLTRLHLVTVHITGDEFGCLLSNSYALERLELKYCYGIICLKIPCLLQRLSHLEVFECRMLQAIENKAPNLCSFDLGARQVRLLLGESLQMKTLSLDYPSAVYYARAELPSNVPNLEILTICSDHEMVDTPMLPSKFFYLKCLTIDLAWRLSPAYDYFSLISFLDASPSLETFCLEISQDRMENELIIGDMSHMRQMLEHRHDNLQSVEIIGFCYTKSLIELTCHILDNTTSLKHLKLDTTRDVFSCSTGKHDKCFHMGKDMLTEAKKAVLAIETYIEPKVPSTVMLSVVKPCNRCHVAES

SEQ ID NO: 152791 - protein, 158 aa, Oryza sativa
  Clone ID: PAT_MRT4530_52807C.1.pep
LDCLTTMSNVCLQYRYYPKDPAHTFCCKDCARNAANNAPSLIEIPSDHVMYLNAASAFYEGWNGTPPLIRTIYLVTWTRESRNEFEAYRDQIESRGNFIAMDKYAGNERKRFRGAERACTIGEDGNVTMCYNGDCKLCEALREGFKPYLDLKRRTGYH

SEQ ID NO: 152792 - protein, 184 aa, Oryza sativa
  unsure (1)..(184): unsure at all Xaa locations
  Clone ID: PAT_MRT4530_52808C.1.pep
VKVDVIHLLEMVCEEYGGRVELAKAYFAGLTESVRRHFNGNGVIASMEHCNDFMLLGTEAVALGRVGDDFWCTDPSGDPDGTFWLQGCHMVHCAYNSLWMGAFIHPDWDMFQSTHPCAAFHAASRAVSGGPVYVSDAVGXHDFDLLRRLALPDGTILRCERYGCPTRDLLFRRPAHDGKTMLRS

SEQ ID NO: 152793 - protein, 91 aa, Oryza sativa
  Clone ID: PAT_MRT4530_52809C.1.pep
LRVEPLENGPWPFLEKISDDLALFFAYISPILSCFFPEGPLPQLGKNPLFLMDLNISHFFSNNTSIYIYIYIYGHFFPKKKKKKKKKKKKK

SEQ ID NO: 152794 - protein, 128 aa, Oryza sativa
  Clone ID: PAT_MRT4530_5280C.1.pep
PFFQAFVSSSLLFKSSCTLFVQMLPTVSNKYLDLPCHTSAFSTSMSDSKLQMALDPQESLGVAADTRTGSPGASSAASCLSSSLASFSSYNGSERSRARRVSRRVSHLGGSRLAISPTAAAPEVGAIR

SEQ ID NO: 152795 - protein, 1953 aa, Oryza sativa
  Clone ID: PAT_MRT4530_52810C.1.pep
MAEQAKAHNLSPSVSGDDGEPNPRRRARTPPPPPRQSPRRKEALERVEGSATSTSTGDGEGRRDGERRLLVYGDGSTPQGALQATGALLRHPPIVPDPESPAQRWLDDVANLVMTARQRLGAGGRSSATKTSGAATTGSVSSRRRARRAAAVARHSAATPSSAPPTQEDQRGGPDARIDIERRRNGRHAPHATEGASSSGVSPQHGRGDQPSVPPVGGVGCRAFVASLRNVRWPPRFRPTIAEKYDGSVNPAEFLQVYTTGIEAAGGDDRVMANFFPMALKGQARGWLMNLPPASVHSWEDLCQQFTMNFQGTYPRPGEEADLHAVQRRDDESLRSYIQRFCQVRNTIPCIPAHAVIYAFRGGVRHNRMLEKIASKEPQTTAELFQLADRVARKEEAWTWNPSGSGVAASAAPGSAAQTGRRDRRRKKRSAHTDDEGHVLAVEGASRATRKGRPAGDKKMEVGAPSRERPTGKWCIVHNTSLHDLADCRAVKSLAEWTRKWGEERRQERREGKSPAVPSGNRRSEAKQKAPAEDIGDGDDDLGFQEPGATIATVDGGACAHVSRRSLKAMKRELLAVAPTHEATRRARWSEVALTFNQTDHPPCVARGGQIAMPIIGVTPGHTWPLGHIDLPVTFGGSANFRTERVNFDVADLSLPYNAVLGRPALVKFMAAVHYAYLQMKMPGPGGPISVHGYLKVALACMEQRADHLAAVSKPEGGDERLGTSAPAAPRQRIVTCDEVLEDALVSFLRANADVFAWRPADMPGVPREVIEHRLAVRSGARPVRQKVRRQAPERQAFIREEVARLLEAGFIREVIHPEWLANPVVVPKANGKLRMCIDYTDLNKACPKDPYPLPRIDQIVDSTAGCDLLCFLDAYSGYHQIRMAREDEEKTAFITPIGTYCYTTMPFGLKNAGPTFQRTTRISLGSQIGRNVEAYVDDLVVKTRNQETLLSDLAETFESLRSARIKLNPDKCVFGVPAGKLLGFLVSARGIEANPEKIRAIERMRPPSKLRDVQCVTGCMAALSRFISRLGEKALPLFKLLKRSGPFTWTEEAERALTQLKAYLSSPPVLVAPEPNEPLLLYLAATPQVVSAALVVERDEDNPHSAHPHPVLTWPGREQGGEAPEPNGGPRPPTTGADPLPACQTVPGAPDPQDGPRATAGRPHLSPSDPEANPVPTRPGRKQGEEAPEPNGGLRPLTTGVGPLPACPTTPGAPDPQDGPEATVGRPPLSSSDPEVVGTEDECTLRGRLDKERPRDVAPSEEDRPHRKVQRPVYFVSEALRDAKTRYPQARKMLYAILMASRKLRHYFQAHRVTVVTSYPLDQILHNREGTGRVVKWAIELSEFDLHFEPRHAIKSQALADFVAEWTPAPEPGAGAGVTLTSPSGDVLRYLVRLDFRATNNMAEYEGLLAGLRVAAGMGIRCLLVLGDSQLVVNQVCKEYRCSDPQMDAYVRQVWRMERHFDGIELRHVPRRDNTVADELSRLASSRAQTPPGAFEERLAQPSARPDPLGETDAPDRPPMPVGVQASGPEGSAPSSLRLIAWIAEIQAYLTDKTLPEDREGSERVQRISKRYVLVEGTLYRRAANGILLKCIPREQGVELLADIHEGECGAHSASRTLVGKAFRQGFYWPTALNDAVDLVRRCRACQFHAKEIRQPAQALQIIPLSWPFAVWGLDILGPFRRAPGGFEYLYVAIDKFTKWPKAYPVVKIDKHSALKFIKGITARFGVPNRIITDNGTQFTSELFGDYSEDMGIKLCFASPAHPRSNGQVERANAEILRGLKTKTFNILKKHGDSWIEELPAVLWANRTTPSRATGETPFFLVYGAEAVLPSELTLKSPRATMYCEADQDQLRRDDLDYLEERRRRAALRAARYQQSLRRYHQRHVRARSLCVDDLVLCRVQTRAGLSKLSPMWEGPYRVIGVPRPGSVRLATGDGTELPNPWNIEHLRRFYP

SEQ ID NO: 152796 - protein, 61 aa, Oryza sativa
  unsure (1)..(61): unsure at all Xaa locations
  Clone ID: PAT_MRT4530_52811C.1.pep
MGRGRIAHATLNGPCVWKVICIGLTIGLTSGGILKMHNWYXQRKTXSLYDMLKMGQIKVVA

SEQ ID NO: 152797 - protein, 278 aa, Oryza sativa
  unsure (1)..(278): unsure at all Xaa locations
  Clone ID: PAT_MRT4530_52812C.1.pep
RCYDPVVLIIRENSIRSIGKNPVPKNSTTNFLLRPEAHDTNFLAIYSTPVTFAIQTSRGQWRRGEEAVDSGEQPRRRVAAGIGQRRCGLRRRVRPPXALFASAIGVQRPTSIHIDARAAHVIIVVLVLKRPLCRRQXRTRFGGGGALRXGLRFGVLPGRGRQRXLLLAVAVVAADDELADAAPPRDGPRRPALPWGARHRTRGQTSGERRVNESDKNFLHSDLTPLLQNATEPGSMVDGVEVGEEGARQYSQRRRGRCRPPRPRPSATTRGEGCGGWR

SEQ ID NO: 152798 - protein, 388 aa, Oryza sativa
  Clone ID: PAT_MRT4530_52813C.1.pep
MGRWAYLSEDLLDDIVRRLPCEVDRLRMSHVCRSWRVALTKAEPPAPPPPPPLPWLLLPEVDGEHGLTFSCVLSGWRRTHPFFLPHAARRARYFGSYDGAWLFLAIDGPQGDQAYLDLPNAIPLNWDLPPEAQDLERIAIVAATLSCPPTEQGCVVAGIIVLPQALLRGVAFWRMGDRVVSAVFAEAWPPEQVEDLIYFKGREGHENFLLLTDGENIYVCQPMFHGDDPPMVPVFSNLVRFKPRGSSGQRVLARYLVESRGDILMVVRFRSDLQSSEFRVFQHKDGEFGENLWSLMSELDGRMLFVGRGCSRSYEARDYRYPGMEGVYFLDDRSFHDQIVGFDGDAPKEPYRCSDNGRCSRPPSQVERCFPERGQSRSKYSPPVWILP

SEQ ID NO: 152799 - protein, 1997 aa, Oryza sativa
  Clone ID: PAT_MRT4530_52814C.1.pep
MAEQAKAHNLSPSVSGDDGEPNPRRRARTPPPPPRQSPRQEEALERVEGSATSTSTGDGEGRRDGERRLLVYGDGSTPQGALRAAGALLRHPPVVPDPESPAQRWLDDVANLVMTARQRLGAGGRSSATKTSGAATTGSVSSRRRARRAAAVARHSAVTPSSAPPTQEDQRGGPDARIDIERRRNGRRAPHATEGASSSGVSPQHGRGDQPSVPPVGGVGCRAFVASLRNVRWPPRFRPTIAEKYDGSVNPAEFLQVYTTGIEAAGGDDRVMANFFPMALKGQARGWLMNLPPALVHSWEDLCQQFTMNFQGTYPRPGEEADLHAVQRRDDESLRSYIQQFCQVRNTIPCIPAHAVIYAFRGGVRHNRMLEKIASKEPQTTAELFQLADRVARKEEAWTWNPSGSGVAASAAPGSAAQTGRRDRRRKKRSAHTDDEGHVLAVEGASRATRKGRPAGDKKKEAGAPSRERPTGKWCIVHNTSLHDLADCRAVKSLAERTRKWEEERRQEHREGKSPAVPSGNRRSEDKQKAPAEDIDDGDDDLGFQEPGATIATVDGGACAHVSRRSLKAMKRELLAAAPTHEATRRARWSEVALTFDQTDHPPCVAREGQIAMVVSPTVCNVKLGRVLIDGGAALNILSPAAFDAIKAPGMMLRPSQPIIGVTPGHTWPLGHIDLPVTFGGSANFRTERVNFDVADLNLPYNAVLGRPVLVKFMAAVHYAYLQMKMPGPGGPISVHGDLKVALACMEQRADHLAAASKPEGGDERLSTSAPAAPRQRIVTCDEVLEDALVSFLRANADVFAWRPADMPGVPREVIEHRLAVRSGARPVRQKVRRQAPERQAFIREEVARLLEAGFIREVIHPEWLANPVVVPKANGKLRMCIDYTDLNKACPKDTYPLPRIDQIVDSTAGCDLLCFLDAYSSYHQIRMAREDEEKTAFITPIGTYCYTTMPFGLKNAGPTFQRTTRISLGSQIGRNVEAYVDDLVLKTRNQETLLSDLAETFESLRSARIKLNPDKCVFGVPAGKLLGFLVSARGIEANPEKIRAIERMRPPSKLRDVQCVTGCMAALSRFISRLGEKALPLFKLLKRSGPFTWTEEAERALTQLKAYLSSPPVLVAPEPNEPLLLYLAATPQVVSAALVVERDEDNPHSAHPHPVLAWPGREQGGEAPKPNGGPRPPTTGAGPVPACQTVPGAPDPQDGPRATAGRPHLSPSDPEANPVPIRPGREQGEEAPEPNGGLRPLTTGVGPLPACPTTPGTPDPQDGPEATVGRPPLSSSDPEVVGTEDECTPRGRLDKERPRDVAPSEEDRPHRKVQRPVYFVSEALRDAKTRYPQAQKMLYAILMASRKLRHYFLAHRVTVVTSYPLGQILQNREGTGRVVKWAIELSEFDLHFEPRHAIKSQALADFVAEWTPAPEPGAGAGVTLTSPSGDVLRYLVRLDFRATNNMAEYEGLLAGLRVAAGLGIRRLLVLGDSQLVVNQVCKEYRCSDPQMDAYVRQVRRMERHFDGIELRHVPRRDNTVADELSRLASSRAQTPPGAFEERLAQPSARPDPLGETDAPDRPPRPVGVQASGPEGSTPSSLRLIAWIAEIQAYLTDKTLPEDRERSERVQRISKRYVLVEGTLYRHAANGILLKCIPREQGVELLADIHEGECGAHSASRTLVGKAFRQGFYWPTALNDAVDLVRRYRACQFHAKQIHQPAQALQIIPLSWPFSVWGLDILGPFRRAPGGFEYLYVAIDKFTKWPEAYPVVKIDKHSALKFIKGITARFGVPNRIITDNGTQFTSELFGDYCEDMGIKLCFASPAHPRSNGQVERANVEILRGLKTKTFNILKKHGDSWIEELPAVLWANRTTPSRATGETPFFLVYGAEAVLPSELTLKSPRATMYCEADQDQLRRDDLDYLEERRRRAALRAARYQQSLRRYHQRHVRARSLCVDDLVLRRVQTRAGLSKLSPMWEGPYRVIGVPRPGSVRLATGDGTELPNPWNIEHLRRFYP

SEQ ID NO: 152800 - protein, 117 aa, Oryza sativa
  unsure (1)..(117): unsure at all Xaa locations
  Clone ID: PAT_MRT4530_52815C.1.pep
RRVGGPTLTGTIHQGARSTWMNNTITXEYMDERNWLPIYVRQSTSKLHAHPTTPIIMTVPGTELVPFTGLLHERFALKQSVEELGNSGLLFGCRNLNMVYIYEDEVQNLIHDGSLFE

SEQ ID NO: 152801 - protein, 2028 aa, Oryza sativa
  unsure (1)..(2028): unsure at all Xaa locations
  Clone ID: PAT_MRT4530_52816C.1.pep
MAEQAKAHNLSPSVSGDDGEPNPRRRARTPPPPPRQSPRQEEALERVEGSATSTSTGDGEGRRDGERRLLVYGDGSTPQGALRAAGALLRHPPVVPDPESPAQRWLDDVANLVMTARQRLGAGGRSSATKTSGAATTGSVSSRRRARRAAAVARHSAVTPSSAPPTQEDQRGGPDARIDIERRRNGRRAPHATEGASSSGVSPQHGRGDQPSVPPVGGVGCRAFVASLRNVRWPPRFRPTIAEKYDGSVNPAEFLQVYTTGIEAAGGDDRVMANFFPMALKGQARGWLMNLPPALVHSWEDLCQQFTMNFQGTYPRPGEEADLHAVQRRDDESLRSYIQQFCQVRNTIPCIPAHAVIYAFRGGVRHNRMLEKIASKEPQTTAELFQLADRVARKEEAWTWNPSGSGVAASAAPGSAAQTGRRDRRRKKRSAHTDDEGHVLAVEGASRATRKGRPAGDKKKEAGAPSRERPTGKWCIVHNTSLHDLADCRAVKSLAERTRKWEEERRQEHREGKSPAVPSGNRRSEDKQKAPAEDIDDGDDDLGFQEPGATIATVDGGACAHVSRRSLKAMKRELLAAAPTHEATRRARWSEVALTFDQTDHPPCVAREGQIAMVVSPTVCNVKLGRVLIDGGAALNILSPAAFDAIKAPGMMLRPSQPIIGVTPGHTWPLGHIDLPVTFGGSANFRTERVNFDVADLNLPYNAVLGRPVLVKFMAAVHYAYLQMKMPGPGGPISVHGDLKVALACMEQRADHLAAASKPEGGDERLSTSAPAAPRQRIVTCDEVLEDALVSFLRANADVFAWRPADMPGVPREVIEHRLAVRSGARPVRQKVRRQAPERQAFIREEVARLLEAGFIREVIHPEWLANPVVVPKANGKLRMCIDYTDLNKACPKDTYPLPRIDQIVDSTAGCDLLCFLDAYSSYHQIRMAREDEEKTAFITPIGTYCYTTMPFGLKNAGPTFQRTTRISLGSQIGRNVEAYVDDLVLKTRNQETLLSDLAETFESLRSARIKLNPDKCVFGVPAGKLLGFLVSARGIEANPEKIRAIERMRPPSKLRDVQCVTGCMAALSRFISRLGEKALPLFKLLKRSGPFTWTEEAERALTQLKAYLSSPPVLVAPEPNEPLLLYLAATPQVVSAALVVERDEDNPHSAHPHPVLAWPGREQGGEAPKPNGGPRPPTTGAGPVPACQTVPGAPDPQDGPRATAGRPHLSPSDPEANPVPIRPGREQGEEAPEPNGGLRPLTTGVGPLPACPTTPGTPDPQDGPEATVGRPPLSSSDPEVVGTEDECTPRGRLDKERPRDVAPSEEDRPHRKVQRPVYFVSEALRDAKTRYPQAQKMLYAILMASRXLRHYFLAHRVTVVTSYPLGQILQNREGXTGRVVKWAIELSEFDLHFEPRHAIKSQALADFVAEWTPAPEPVSVPEASSGPPQLPHTAHWVMQFDGSLSLQGAGAGVTLTSPSGDVLRYLVRLDFRATNNMAEYEGLLAGLRVAAGLGIRRLLVLGDSQLVVNQVCKEYRCSDPQMDAYVRQVRRMERHFDGIELRHVPRRDNTVADELSRLASSRAQTPPGAFEERLAQPSARPDPLGETDAPDRPPRPVGVQASGPEGSTPSSLRLIAWIAEIQAYLTDKTLPEDRERSERVQRISKRYVLVEGTLYRHAANGILLKCIPREQGVELLADIHEGECGAHSASRTLVGKAFRQGFYWPTALNDAVDLVRRYRACQFHAKQIHQPAQALQIIPLSWPFSVWGLDILGPFRRAPGGFEYLYVAIDKFTKWPEAYPVVKIDKHSALKFIKGITARFGVPNRIITDNGTQFTSELFGDYCEDMGIKLCFASPAHPRSNGQVERANVEILRGLKTKTFNILKKHGDSWIEELPAVLWANRTTPSRATGETPFFLVYGAEAVLPSELTLKSPRATMYCEADQDQLRRDDLDYLEERRRRAALRAARYQQSLRRYHQRHVRARSLCVDDLVLRRVQTRAGLSKLSPMWEGPYRVIGVPRPGSVRLATGDGTELPNPWNIEHLRRFYP

SEQ ID NO: 152802 - protein, 113 aa, Oryza sativa
  unsure (1)..(113): unsure at all Xaa locations
  Clone ID: PAT_MRT4530_52817C.1.pep
MVYLCHLRSSPASAAERESPCGRTPFANATNEATLRNIVRRPLAFPSGSGSCGPXDADARDLIARLFAKDPVAVVQGGADNADAAAATADEAGLHGSAAHAWTFVWIIGWTRH

SEQ ID NO: 152803 - protein, 94 aa, Oryza sativa
  unsure (1)..(94): unsure at all Xaa locations
  Clone ID: PAT_MRT4530_52818C.1.pep
MGQGVRQTANRIKERAVLRYMQRDTLDQTTSLRGRGASALGAGASVTRPPLGXIRRRADTSPSGPTSPKVPGHAGDCVYLKPLVMILPVPYHRQ

SEQ ID NO: 152804 - protein, 38 aa, Oryza sativa
  Clone ID: PAT_MRT4530_52819C.1.pep
MQISPAGRMTDDLMCFLTIWYSPIIFVYVSKAEMIHPH

SEQ ID NO: 152805 - protein, 115 aa, Oryza sativa
  Clone ID: PAT_MRT4530_5281C.1.pep
MKRPAKGLLTCSKAVTNGGEATAACFVNGNLWQRRWWSGSRMDMAQACRDAMARGNGGKQPFLLFPRMGPARPPLGLRPSLWSSQVPPLTHLLLHHHHRQALPRIVLESARFRRW

SEQ ID NO: 152806 - protein, 448 aa, Oryza sativa
  unsure (1)..(448): unsure at all Xaa locations
  Clone ID: PAT_MRT4530_52820C.1.pep
MNDIVIFNEIISNIGLVEISLRGMSFTWSNMQDQPLLQQLDWVFTSPAWNLKFLHTSLTALSKYISDHAPCLISIETSVPKSRLFRFENLWVDMPGFMDVVSQFWNIPVRGSNQAIKLNGKMKNLRKGLKIXRKRLSNMHTLVSNCNEVLLFLDKIEEQRDLAIQEWNFRTILKDHILQLLKYKNEFWKKRCTIRWVKFGDENPKYFQAAATDSHNRNKISHXKLDDRIISSHEEKAQXFIQLFTDRMGTPEHLQSDLNLSSLIQHNSNLNLLSSMPSKDEMDQIIKQMPSDRALGPDGFNGMFLKKCWHIISEDFYAMADQFFSGGISIQNLNNSFITLVPKKPNPESPNDYRPIALQNSVLKFVSKIMANRLQSVILDIIHENQYVFIKGRTIQDCLAWSFEYIHQCHQSNREIVILKIYFEKAFDLVEYEAIIQINGTKKFNGVA

SEQ ID NO: 152807 - protein, 43 aa, Oryza sativa
  Clone ID: PAT_MRT4530_52821C.1.pep
KKYETSLFNGFICQNNSPAKGCPFWMAPQGHGLNCTCKSKALL

SEQ ID NO: 152808 - protein, 39 aa, Oryza sativa
  Clone ID: PAT_MRT4530_52822C.1.pep
KLYMYSHDSRYSYVYDISIQGIGLFNYLCSAELAHISVL

SEQ ID NO: 152809 - protein, 1224 aa, Oryza sativa
  Clone ID: PAT_MRT4530_52823C.1.pep
MPEPEVGVLGGRGLHRDGLKGWPDLRSLSGKKMTTPPPPPVEKQQQQARPAAVAPPDQTLEFSDGLLLRVLACLPEPHLTGAASLVCRRWMRLAGRLRRRLVVRDWAFVTHRLHHRFPELADLDLFPASIVAPAVPSPTSPLLTCAEVSLTLDTGADPPLVACRFLADDVLDRGLVAVAASFPNLRRLSATAASESGGLMDIAGGCATLQELELHRCTDLALRPVSAFAHLQILRLVAASSALYGTSEDGGVTDIGLTILAHGCKRLVKLELVGCEGSYDGIAAVGRCCAMLEELTIANHKMDNGWLAALAFCGNLKTLRLQGCCRIDDDPGPAEHLGACLTLESLQLQQCQLRDRRALHALLLVCEGARELLVQNCWGLEDDMFAMAGLCSVRRYNACKLQCMDPSMFGVSMPLLLLWRVKFLSLEGCSQLTTRGLESVITSWSDLQSLKVVSCDKIKDEEISPALSELFSTFKELKWRPDNKSRLAASLAGTGMGKKGRVLCKRLREREMKGKGQRTDAGAQLSTNRARMSVKGRAPPPEEGKKNGEKMAAAAAIPIPIPCVAEPTAASRVSPGSSPARSDASEGAAFYAADTEAEPEASVGRSTQMLLAMAAMGGRGGPYGRRPASSYGSCAAWSAGSLTDHRPASPSPICSPVSSNGGEGCRDVERTNPVPPRFIHKATPARLMRRARSSHNYRRRLGAMDAINEWRLPKVSEEEDEAVDQTDWQADTLSSRISSARDWNFEAGGAYEGSDHNGGAFNHSDGENSPVAVQRMGRWPQGSAVKHKENFVHAKLVAWKNAEIEKLIDKLRRKEADIDEWQMNQVTQAKEKMKRIEIKLEKKRARAAEKMQKAIKDAQKKADKKKIKEHAATDNQIASVERAMVKMSRTGKLPWSLAVLVCPSNCNQNNSSALSTIPMRSGEGRDCEVPGSTAVQGTNVPTISQEQDRSVYKELRSQNEEFFELFMLKVSLKRQIDRVNHHLALCRKLWRQANESAGGHRCGNSSCSGGHRHRAVAVPVPHAEATPRAMPSTPLAVPLPATAMAQRTQCNLARMPRPQQPNCGGRPGSSRGGAVGLSAAGRMLETPGQPHVAPNGWPAGHGHPASGTLAAAMACSSRPVARQQGNRREQGWDAHQAQVGAQHQNLPRFPPQQGGGNIGERQGQGQFRPGTPSYVQEQRPPPQSSSSHEALQAGERQQANNNSSGSSRQQRQTDTQRWQAGANP

SEQ ID NO: 152810 - protein, 98 aa, Oryza sativa
  unsure (1)..(98): unsure at all Xaa locations
  Clone ID: PAT_MRT4530_52824C.1.pep
GPGGPPRSTXXLIXXFFXPXSFFVXXLITXXXFPEDLXEXFQXEMESNKAIMEENEXFDQDXGGEEEEEXPEHPXPVEKEGVXVXVXPRTRNRPKREQ

SEQ ID NO: 152811 - protein, 155 aa, Oryza sativa
  unsure (1)..(155): unsure at all Xaa locations
  Clone ID: PAT_MRT4530_52825C.1.pep
ATFDTSTSEGFLHNDGKGFSFTEFIKGVFSPFRSSNYQWVFWTRFLFTAGFNIVLSFLEYFLADVVKPYNLFGLVELESPXKASAVFVCLVLAGSLASALVSGILSDKYGRKVLVYASGGVMAAVHFSFLFYYPYSLLCLGGFVFGLAYGAYISV

SEQ ID NO: 152812 - protein, 99 aa, Oryza sativa
  Clone ID: PAT_MRT4530_52826C.1.pep
WRHECEGWRQLLTTSFLLTPCSRGHVMCCCSCTACRNAVYCCTVYLLTTPALVWSLEFGSNPAIFTLEKMGPCTCEFPGSTSDYWSYFNFFMINIFYCH

SEQ ID NO: 152813 - protein, 63 aa, Oryza sativa
  unsure (1)..(63): unsure at all Xaa locations
  Clone ID: PAT_MRT4530_52827C.1.pep
ELLYALNWPWMDRPYTPVIAPAFLALVNLSSADGQPAGGLELPLCPRKGVPRRPSRCGQXTXS

SEQ ID NO: 152814 - protein, 272 aa, Oryza sativa
  Clone ID: PAT_MRT4530_52828C.1.pep
MQRSLNQEQRKTAKEHKRTETSTEEKTQRQGTKGKTGTSQDLVEATRATVARGSALTVDVTTTLSPYGAVEPTHPSSAAYGVKSDGGGGGEESEASNDPTAESPPRGQSQPSDIHAVPRAVKLPGHPRPLGSLLFASSTRKGCPARARAREPAPMGHGPWTEPTKHHPTDTWVPSGPPIRAVSAVHGGRGAFNAGLMVFHTAGPELPRPGGKHGYREVTAVFILPYPRGNCAVTGEVKGTISMVAKMDCVQRQQENVRGSSGNWVTLRAPQA

SEQ ID NO: 152815 - protein, 53 aa, Oryza sativa
  unsure (1)..(53): unsure at all Xaa locations
  Clone ID: PAT_MRT4530_52829C.1.pep
FFFFXLLSLSLDSTTGRQKWDVFSFVLLKNIILIKLVSSARTLTRNNIYLLLA

SEQ ID NO: 152816 - protein, 255 aa, Oryza sativa
  Clone ID: PAT_MRT4530_5282C.1.pep
MLSGMEKQPAMLLVLVTLCAFACKRSVAQSAFATFYGGKDGSGTMGGACGYGNLYNAGYGLYNAALSSALFNDGAMCGACYTITCDTSQTKWCKPGGNSITITATNLCPPNWALPSNSGGWCNPPRQHFDMSQPAWENIAVYQAGIVPVNYKRVPCQRSGGIRFAISGHDYFELVTVTNVGGSGVVAQMSIKGSNTGWMAMSRNWGANWQSNAYLAGQSLSFIVQLDDGRKVTAWNVAPSNWFFGATYSTSWVQF

SEQ ID NO: 152817 - protein, 181 aa, Oryza sativa
  Clone ID: PAT_MRT4530_52830C.1.pep
MASRTMTLEVTVVSAEEVVLPPTRRPLGRGAYAVVRTAASASSPAAALLRQTCRHPAESTLIANAPEIVVPWEQENVFVRCHVLMENKSEIIHQFQLSRKLMLGCDGCEERNVPMLAMPNCQVWNEPAGFASLGIGFGSAGVNECPHSNTHESGQAVAVMLLPTGTMGNSHSWWPTKSVTL

SEQ ID NO: 152818 - protein, 73 aa, Oryza sativa
  Clone ID: PAT_MRT4530_52831C.1.pep
SARPFFWGFLNGCKYQRNHNSGHAETFSAYALIGSELDTPKLKARITLLYLATGHHKGTSGLVCNLKALNALT

SEQ ID NO: 152819 - protein, 127 aa, Oryza sativa
  Clone ID: PAT_MRT4530_52832C.1.pep
MSRACRGESSGGGRSSLGYLFEPEPEDIIPDHSTKSVQGTNKAPKGNIVLGDKMASDEADQEHQAAAPLKKEDSNPIVSSRSASNIYHTNQVGNNSGLLITDRPSTRVRCAPGGPSSLGFLFGDEDA

SEQ ID NO: 152820 - protein, 1121 aa, Oryza sativa
  Clone ID: PAT_MRT4530_52833C.1.pep
MRQAARGPAPAAQGGPGMAFPCSILCHYCLHVAPHIRYERVRRRCGDGGGALGGRGALVRGGHMAGPDWPKMETAHGDGPMKTRHAGGGSRTGDVASSRSTDHGIGRKTEGLLKMEEIVGSAIVQETVNRIISGLIDRCERKSSARDHLERLEMAQIKLEFALETSNKWQITSGPLLRWQKKLKRATEECDDTLRKCRQHIQEEDEVEQQVRNSSFPRRIAHATKTLVSSIFHSNSDELGRSSVQRFEWFADGANDFLRSVEFGGTPRRYLFFDPLIGHLISAETVRKELIQLPTQDFSRVSHSHSYGWENIHSIATEWFRPNPLCCKHHGQKGTIVEGKSSLKEFPHLNVILVYTPHGSSEDLFPAVDSTVIEAVKATMNMRSTRRTIRGARKAKMLRRHDRRTHNHRHEVADFLSLWAVHAPVRLQGSLLDWIRKEKKVAGWGNQQNIMMSEVVASAVVGEAVSRVSTFFVDKHKRKLSEEDGLERLEMAHIRMEAALEMSGKWPPVTDASLLRWRKKLKCASEECSQVMNRCKRRAMEDDEMEQQIRRCSFPRRIAHETRSFFSSFSGDKNVDSLITTSTIQRFERFADGAGEFLRFLQFGSIGSINYMLVDPLTGPLLAGKALQFENPPGISGYYLAARPLRFAERGVVACVFLQYKNHERPEENFLLGILIRVTASTNVVGIMARCSEKLTSNFKPVTEAVRQELAQFHQRGFYCFPFVASTDPEYSRIHQSETHRARPNPACCEEEHEHHGRRRSSDMVEPLGAFPEPVIKLVVQRHVSATRHKRTSSSSSYSCSCGHANMGCSGPTLLQVTAVFAPHASPEELPSGAKSVAVVAIDGREEQAVRTNVGWREMEELLPNAVDRLCHEAAAHEVFWRSGHGVAYLCVEKMGTEMARSGRLISQLKMGEIVSYAVVHETVNKIISGLVDKYERKSSAEEQMERLEMAQIKLEIALETSNKWQITSGPLLRWQKKLKRAAEECDDTLRKCRQRVEEEEEVEQQVRNSSFPKRIAHATKSMISSIFHGNIDEPTVSSVRRFEWFAEGANDFLRSVEFGGTPHRYSFFDPLIGHLLADVISEFLKLWVDRAPVMMQFAAVDWIQALLGEAGDSKKLLMSM

SEQ ID NO: 152821 - protein, 1120 aa, Oryza sativa
  Clone ID: PAT_MRT4530_52834C.1.pep
MGGGPRTFPGGLSKWQHKRMHEKLARHKERGLLRHEKQLYLARLRSEIRASRLPAAGASPPDDGDGPTSSRAHIRALADRFLLPGAEDLWNEDDGPIHRADRPRPPRRIVSVGGNGGDRRKLDSTKQELPRGGKEPRLAAFNPRRDFQTAAPWWWQWSSSSAIPSRTKEASFCFFGPKRSYSVMPLFQAHQESSGTSMVPLIARGLASARIAPSQLNGERFYSFAAGRFGRKLRPDSSDEDDEDISTAKKDMRFARFGASSEEESGYDELEARSAIRKKWSSAALRNCDMKKERRALKSYEEENNDLAGKDVLVKAKTGTGKSAAFLLTAEANVLLKYHQGIGVQSLIGGTRFKLDQRRLESDPCQILVATPGRLLDHIENKSSFSVRLMGLKLLVLDEADHLLDLGFRTDIEKIVDSLPRQRQTLLFSATIPKEVRRVSQLVLKRDHVFVDTVGLGAVETPTKIESTTSIDLEGPEEKVDGSIKIVDMSIKEAAYHAWLGYYNSIGDVGRDKTMLVDLANRFCKSIGLEKPPALYRKTALKMGLKDKSAAHNNHLPVVDRFTKLPDDVLLNILDRLNTPDAVEHPRLAELDISSAGLELVELNSLPNLKRLKVIRLSQFLSSAPTIRDLHLSFLSEKIWVQPECPKLLSPVLQNLQVLNLDELPEGRDIAWTCFFLEAAPSLKEGFCEKTNVEWESSTPDGFRHYNLTKLTIYGFQPNENFMGYIRHVMEAAVNLEDISLYDRKVLECCEDLDPKIKVAPSGYPETIQEQELLKKQITEGLMNAAVSDATDNILNFRNQEIPLRQLTICFYLKYYDCLTIGKTVARAMATHSHNLDSAEFSILTEDSVLQMKFEHPRLVELNISSAGLELVELSSLPNLKRLVFSLWNCPQEPLSFGNVPLLSSLSLTDESMRWQKVIRLSQFLPNVLSIRDLHLNFLSEKIWVQPECPKLLAHVLRNLQVLNLDELPEGCDIAWTRFFIEAAPVLKELCITVWDHWCEMETDSVEREAQGFCDKTDVEWESSAPDGFRHYNLTKLTIYGFQPNDNFLGYIRHIMEAAVNLEDVSLYDRKVLECCEDLDPKIKVASTGYPEAIQEQELLKKQITEGSVMASPHIIHFRS

SEQ ID NO: 152822 - protein, 507 aa, Oryza sativa
  Clone ID: PAT_MRT4530_52835C.1.pep
MGWTPFAATVNNCQVGVGVATRQRSVCGVGSRQRVGTAREQACDEKAEEWLTLAHEQAGRGAARAPSRRAASAAEERKHAGDKQAEECSRVGGEQAKERQPAAGLCLCLKMQVGTFSVKPIEEGGIFCSSNIPLLYKHYDGQSSSLVIKNLENLKGSLGEVQELAKYQQVRLVWSRSNFIEDSSMAEDKAVLQKLRPHHDLETIEIEGYRGDEFCYWMMNINSSLPNLVTVKLSNIANCQCLPPLGQLANLEVLHISDMPSVRKVDGHVYGTEKPFRKLRELELSTMKNLEEWLTTTLLLTGHNDHQLSRSEEVFPNLQVLLIANCPRMRFVPGFPRSRECTLEKSYSILLSFEQFIGSSNLALIALKINDSGSSSDIVKFLQGCVNLLYLTIDSCIDLITLPEPIKNCHCLRKLEITNCWNFSVLPEWLGELTFLQKLDIQASKLEYLPQSIQRLTALERLVLNKCNYKLRERCKSGDDWINIKHIPHIQITDRNGRTEIISPSCT

SEQ ID NO: 152823 - protein, 498 aa, Oryza sativa
  Clone ID: PAT_MRT4530_52836C.1.pep
MKNKKGSRRNRNKSAAHNNHLLVVDRFTKLPDDVLLNILERLNTPDAVRTCLLSKRTIHLRHLLSNLNISLHSFLPHYYGYYATSKDAIQIQMNAAVSDATDNILNFRNQEIPLRQLSITFYLKYYDCLAIGKAVARAMATHSHNLDSVEFIILTGKRALYCSIDDLRHNGKLLMTFFGACTDAFAGLTRLHLRNLRLAEADIPNIIATCKRLEYLKLSACQIEDSVLQLQLEHPHLVELDISTANLDLVELNSLPNLKRLVFSVWVCPQEPLSFGNVPLLSSLSLTNVAMRWHKVIRLSQFLANITFIKDLHLNFLSEKIWVHPECPELLTPVLQNLQVLNLDELPEECDIAWTSFFLEAAPSLKEMCITVWDHWCEIETDKVEREEQGYCDKTNLEWRSSARDGFRHYNLTKFTIYGFQPNENFLGYIRHIMEAAVNLEDISLYDRKALECCEDLDPKIKVAPSRYPQNIVEQELLRKQITEGLVMASPHVIHFRS

SEQ ID NO: 152824 - protein, 200 aa, Oryza sativa
  unsure (1)..(200): unsure at all Xaa locations
  Clone ID: PAT_MRT4530_52837C.1.pep
DYIFLWKWRKYLLLLATLVAGVTYDAGLNPPGGVWPDDTGGHATGDPVLPVTFHSRYLAFFYCNATAFVASLVVIMMLLDRRVSGNRVGVTVLRSAMVLDLFALMGAYAAGVSRDVLAVAYVSALFGLVFAYVALHIVVATSALPPVEWLRASAKRLXXXXXXXXXXXXXXXXXHKAGRNSVREKESVSEIVKLNLVACL

SEQ ID NO: 152825 - protein, 207 aa, Oryza sativa
  Clone ID: PAT_MRT4530_52838C.1.pep
MPLRAASFSTCRNTSSGCVAADCADDLAAPSGAGTDQYSAVMPENSSVTFGDDEADNGYHPQGTADFIYQIGSSMSNPIKLGQMSQTTYKYFSQIPFVGAKGDVVKDMLRRGLSTTEDRHIYNHLKREYDFTVAVAEDQQQLLGKQSHGDGVQIWSSKALPWLCLGAMEVELAGPAAAYRRGKTMEVGMGSPGVRGKEKAGWQIEIN

SEQ ID NO: 152826 - protein, 108 aa, Oryza sativa
  Clone ID: PAT_MRT4530_52839C.1.pep
GLVHASTRYTTWIGPSCSGKSLRRNYYYLYMVIHRWVGHSTGANERRFASASYGNDSRFTVVFAATHWHVPHDSHPWLPAWVKHTLERRSRRLQLAKLRLQAAATVSL

SEQ ID NO: 152827 - protein, 67 aa, Oryza sativa
  Clone ID: PAT_MRT4530_5283C.1.pep
SLGPNSAHSLPSSQPGRKSVCGPCRYSTPSSSSSRLLPVHAVAEPDAADPLPKFGLLVAPFSKLVSG

SEQ ID NO: 152828 - protein, 221 aa, Oryza sativa
  Clone ID: PAT_MRT4530_52840C.1.pep
MPLRAASFSTCRNTSSGCVAADCADDLAAPSGAGTDQYSAVMPENSSVTFGDDEADNGSHRSEGDEPEAKRYYHPQGTADFIYQIGSSMSNPIKLGQMSQTTYKYFSQIPFVGAKGDVVKDMLRRGLSTTEDRHIYNHLKREYDFTVAVAEDQQQLLGKQSHGDGVQIWSSKALPWLCLGAMEVELAGPAAAYRRGKTMEVGMGSPGVRGKEKAGWQIEIN

SEQ ID NO: 152829 - protein, 224 aa, Oryza sativa
  unsure (1)..(224): unsure at all Xaa locations
  Clone ID: PAT_MRT4530_52841C.1.pep
MAEVKPEEISYPPMEQLQGFEYCIDSNPPWGEAIILGFQHYILALGTAVMIPAVLVPMMGGSDGDRVRVVQTLLFVTGINTLLQSLFGTRLPTVIGGSYAFVVPIMAIIQDSSLAAIPDDHERFLQTMRAIQGALIVSSSIQIILGYSQLWGIFSRFFSPLGMAPVVALLGFGLFERGFPVVGRCVEVGLPMLILFVVLSQYLKNVQIRDIPILXERFSLFICI

SEQ ID NO: 152830 - protein, 500 aa, Oryza sativa
  Clone ID: PAT_MRT4530_52842C.1.pep
MDAFFSAVLGDLLSRSISFTIDRYYRQHQGVEENLRKLHRMLLRIQAIVEEAHGRQITNQAMLLQLRMVRAVMYRGYYFLDNFRYRTVQAHAQDEVGDRSLGLSPFSQFKRFCFSTRTRKIASEVLDQKELQKMLGHLENIVSDMQEFVAFVSCYPHMSRQPYCSYLLLENCMFGRQIEQERIINFLLEPNHPSAKGINVLPIIGPGRVGKSTLVEHVCHDERVRKYFSMIVLCSADSIGGGFLTDTGLIKHRNPTSTGQSLVIIELADDDMDDRTWARILHNLRGEHITPVSKIILTSRSDKIRAFGTTEALHLDFLPKEAFWYFFKTIAFGSRNPEEEPKLASICMEIATLVKGSFMATHVIGGILRSNLSAQFWCRFLKCFRHYTDMHISVLGEHPSDAYTKTSGLTYIWTSRNMSVVAATYSLHQASSAQLADLSPILSNDVLTGDVEPPEKFDALEWRSSIPPYYNYISHYEILAQPPDMLPKRKRSRSLSEGLV

SEQ ID NO: 152831 - protein, 36 aa, Oryza sativa
  unsure (1)..(36): unsure at all Xaa locations
  Clone ID: PAT_MRT4530_52843C.1.pep
FCLALSPCKSCSSLCNHPFVVRRARLNILYSSVGXD

SEQ ID NO: 152832 - protein, 88 aa, Oryza sativa
  Clone ID: PAT_MRT4530_52844C.1.pep
MANSMVVRVLQQHVDAEGFLESRGEEVQLLILHERSIAREQVEEAVDVRELALDGIKDLSKALFPIFANVGDGGHGAAAARSSRIVEV

SEQ ID NO: 152833 - protein, 131 aa, Oryza sativa
  Clone ID: PAT_MRT4530_52845C.1.pep
DVELGLGLSEDELLERGTVRPLLCWFGRGQRVKAKELGRLEAVKGIGPLKKDETKGIIPVQAAKKAKRSNSLFFDPPSSLDMNLLLYSKGFSHMRGGVPPSEGSRHGKDPPHSPFNGSGFWVCECTRNTIP

SEQ ID NO: 152834 - protein, 272 aa, Oryza sativa
  Clone ID: PAT_MRT4530_52846C.1.pep
MQVNKEAPLGCLKPISQYNLQEQRSNGFPENSEKKNDSIATERVLEASPLPNQGFFRPVQRTEYYAYPFIYADYQMPGQPQPYNLDNQFYQINRDHSFPIESRVQYLPFKMPPQGYPPDAQLQEFQYFGGIDFEATCDKGDNPHPQEIIEFPSVLVNSATGQLEASFQTYVRPAYNQLLTDFCKELTGIQQIQVDRGVPLSEALLMHDKWLEEKGIKHKNFAVVTWSNWDCRVMLESECRLKRIRKPPYFNRWCLDPGTKPNLCHIGCLDTN

SEQ ID NO: 152835 - protein, 1040 aa, Oryza sativa
  Clone ID: PAT_MRT4530_52847C.1.pep
MASTEYAQAFSNETDLDALLAFRAGLSNQSDALASWNATTDFCRWHGVICSIKHKRRVLALNLSSAGLVGYIAPSIGNLTYLRTLDLSYNLLHGEIPPTIGRLSRMKYLDLSNNSLQGEMPSTIGQLPWLSTLYMSNNSLQGGITHGLRNCTRLVSIKLDLNKLNREIPDWLDGLSRIKIMSLGKNNFTGIIPPSLGNLSSLREMYLNDNQLSGPIPESLGRLSKLEMLALQVNHLSGNIPRTIFNLSSLVQIGVEMNELDGTLPSDLGNALPKIQYLILALNHLTGSIPASIANATTMYSIDLSGNNFTGIVPPEIGTLCPNFLLLNGNQLMASRVQDWEFITLLTNCTSLRGVTLQNNRLGGALPNSIGNLSERLQLLDLRFNEISNRIPDGIGNFPKLIKLGLSSNRFTGLIPDNIGRLTMLQFLTLDNNLLSGMMASSLGNLTQLQHLSVNNNNLDGPLPASLGNLQRLVSATFSNNKLSGPLPGEIFSLSSLSFVLDLSRNQFSSSLPSEVGGLTKLTYLYMHNNKLAGALPDAISSCQSLMELRMDGNSLNSTIPVSISKMRGLELLNLTKNSLTGAIPEELGLMKGLKELYLAHNNLSLQIPETFISMTSLYQLDISFNHLDGQVPTHGVFSNLTGFQFVGNDKLCGGIQELHLPSCRVKSNRRILQIIRKAGILSASVILVCFILVLLVFYLKKRLRPLSSKVEIVASSFMNQMYPRVSYSDLAKATNGFTSNNLVGTGRYGSVYKGTMRFKNSVSDVAVKVFDLEQSGSSKSFVAECKALSKIQHRNLVGVITCCSCPNLNQNDFKALVFEFMPYGSLDRWIHPDIDPSSPVEVLTLMQRLNIALDIGAALDYLHNNCQPAIVHCDLKPSNILLGDGMVAHVGDFGLAKILTDPEGEQLINSKSSVGIMGTIGYVAPGIANVAYALQNMEKVVKFLHTVMSTALVYCSLRCLQKYAEMAYPELLIDIVDPLMLSVENASGEINSVITAVTRLALVCSRRRPTDRLCMREVVAEIQTIRASYVEEINKIVSD

SEQ ID NO: 152836 - protein, 154 aa, Oryza sativa
  Clone ID: PAT_MRT4530_52848C.1.pep
YSKTSTASSTTTTTAPLTTASITSSTRTTKESNSWAAKLSSAGNWPIEHTVSNIPESNTSAPAKTGVARTASASRLSMASTSTSRCSSSRTRRYGATSSARLPTSNTSSSSGSVLPSSGSVLLPFRMELWRHVVSGDMMTKNEASFTTTLRFMI

SEQ ID NO: 152837 - protein, 118 aa, Oryza sativa
  Clone ID: PAT_MRT4530_52849C.1.pep
SAECSFVHLKDLKHSQTVQYEAATKLKMNFASTAASKFNISSSMNTQNISQLILHLRLGKCLDPCNGVPVICSLHFVVIRFKLAKLHKQSFDKVNTASVHPIPFPFRCLVKPNPSVKQ

SEQ ID NO: 152838 - protein, 650 aa, Oryza sativa
  Clone ID: PAT_MRT4530_5284C.1.pep
MAALTEDILLQIFSRVGSIKDLFKFAVTCRRWLRRFTDPAFLRGLCLDSGEGHRARLLGFFFQQTRFYRCEKMIKMRVTQQSSVCPPTFLPAPWSPLGLTDRTLTSFLAADDDTFNYAEPLAARCGIVLMRLVPRTALMIACSHLLGVCNPITGECHVLPPLNLSGLHRYLTSYAIITSTDSDLDGKQPPSSSSSGRSTFSQLYLVVQHKKDCNEYFYSYSAATCSWSAPTMCVDGRRFSLVGERSAVVHKGAAHWLFIDRVSSATQDDILYKLTAAVDTSEISLTRLPFVLEAHRSSAIPLAVPYPDYSHICQPREKWFNFNRGSMLVLYRSNGVFILDLEKKVMEKLLSRHGKATAERPSSSEGYIWKLSLLVITVTGLTPWQKAQNLNPKKEQPTTTALQKRGPLHIFLCNVSDPHGNASQPSNRKGTGRHTFIHVIDPRDKPLHQSAPTFTHYKLTAPVSSFHTAISQHISTHRSKAKPTDPLPLPEKKRAASMAPKAEKKPAAKKPAEEEPAAEKAEKAPAGKKPKAEKRLPAGKGEKGSGEGKKAGRKKGKKSVETYKIYIFKVLKQVHPDIGISSKAMSIMNSFINDIFEKLAAEAAKLARYNKKPTITSREIQTAVRLVLPGELAKHAVSEGTKAVTKFTSS

SEQ ID NO: 152839 - protein, 140 aa, Oryza sativa
  Clone ID: PAT_MRT4530_52850C.1.pep
MDKPAPQAFVYRISTADEWAQLQRTGGTLGGDLDRSTGCIHLSDLSQGIHNVRKKQVRKTLKNFFLGRNDLYLLQVDTSKLSDGLVYEAADDSNYFPHFYGPGRSFAPLQLDAVIKEAEKIVLVDNDFTCSLLDGAYPLS

SEQ ID NO: 152840 - protein, 173 aa, Oryza sativa
  unsure (1)..(173): unsure at all Xaa locations
  Clone ID: PAT_MRT4530_52851C.1.pep
FFFFFFXKINWNDNSQTDRIHTNVEFPAVLPTNHIYSCSLTMLLNPELPQQACHVHAHLHCLXKVAPIXCPSACSLXIASTHTLQSSXAIASLHSTIHPIXGSIQTQGSMHAISPSSVSHSLQSWXKQHMPATNSWQGSAGTLVQPSIRGILRQFQPSKLHSLRLCSNSSNRG

SEQ ID NO: 152841 - protein, 67 aa, Oryza sativa
  Clone ID: PAT_MRT4530_52852C.1.pep
TVIRWRTLIFLTLKKNTGNTWFCVMYPSVIPIEFYYTYDWSCTTHIRPPINTLNIFPCGPRHVAALH

SEQ ID NO: 152842 - protein, 89 aa, Oryza sativa
  Clone ID: PAT_MRT4530_52853C.1.pep
MGSFVLIFVIAISASLVPGGVTQSSPATFFVTSPNVFRVDVPESVVVTLIRSTPNVQNVQVRVSLRRPGSGVHFSEDTRAVSPGSSQSL

SEQ ID NO: 152843 - protein, 102 aa, Oryza sativa
  Clone ID: PAT_MRT4530_52854C.1.pep
PNEMLFIARSAVVDPHHLHLCSPIRGGEEGPPQSAAEVDTVPQSAKVELGGTVELLIQYGDKERMATKRAKPAGGSGRITVVAPPAATGADEGSGVLEHPQW

SEQ ID NO: 152844 - protein, 813 aa, Oryza sativa
  Clone ID: PAT_MRT4530_52855C.1.pep
MDAHSAFMFLLTLIHLLLQISARDFLSPGSSLSVERSSDVLYSPDGTFACGFYNISPNSSIFAVWFSNSAEKTVVWSANLGRPVYTWGSKIKLNIDGNMVLQDYGGQIVWTNNVSSSNVQEARLLERGNLIVKGQGDTILWQSFASPTDTLLPNQIINGTIKLVSSTSSNRLLVPGHYSFHFDDQHLLTLFDDEKDISFIYWPNPFINMWAKKRISFNTTTFGVLDSSGHFLGSDNASFMAADWGPGIMRRLTLDYDGNLRLYSLNKTDGTWLVTWMAFTNLCFVRGLCGMNGICVYTPKPACVCAPGHEINDPSDLSKGCKPKFTISCDRKQKIRFVKLPTTEFLGYDQSTHQQVSLSTCKNICMSDCSCKGFSYWQGNGNCYPKSSLVGGVTSQSLPGSTYLKLPEALKVRESSIPRSQPSGRQYGPNCSAENQYSIANFSDISRSGQSESRFFYFYGFLSAIFLIEVILIALGWWFILRMEGRQLTGVWPAESGYEMITSHFRRYTYKELQRATRKFKEELGRGASGVVYKGILKDERAVAVKKLADISQCEEEFQHELSVISKIYHMNLVRVWGYCSDGPHRMLVSEYVENGSLDKKLFGSEASQTLLEWKQRFKIALGVAKGLAYLHHECLEWVIHCDVKPENILLDDNLEPKITDFGLAKLLNRGGSNKNVSRIHGTRGYIAPEWVSSLPITAKVDVYSFGVVLLELLKGSRVSEWAKTEDEDDEVEKVLRRDVRMLAENVKLQEDSERSWITNFIDSRLNGQFNYLQARTMIKLAVSCIEEDRSKRPPMENVAQMLLSVDEENIIT

SEQ ID NO: 152845 - protein, 158 aa, Oryza sativa
  Clone ID: PAT_MRT4530_52856C.1.pep
MASWPHTQSSSSQLLLSTPALRQQTTGQLISPAKNVRCRCWMLMIGTLGDCLGRIRTTETALLSLRSVRKELPTANELQGNGTWRYRYIHTGDGSVSSFRGDGFGVSTNLEITIHTPKASEGIMKVFKLSIKRYGVANFKKMSHPISAFPVWLNNYPL

SEQ ID NO: 152846 - protein, 87 aa, Oryza sativa
  unsure (1)..(87): unsure at all Xaa locations
  Clone ID: PAT_MRT4530_52857C.1.pep
RAAGAATNXTDSSPPAPRSYVQRSDAPSRGRSLHARTRGSPRTPRRRIPRCRHRRRRHRREQQKQRQHHRPRHGVAQLGSRRPRVTV

SEQ ID NO: 152847 - protein, 279 aa, Oryza sativa
  Clone ID: PAT_MRT4530_52858C.1.pep
MVEAVASFRRGGVGIAGMSSSTLEEVQMQETLIFSDTIKDLKMLKSQLYSAAEYFELAYTQEDDKQEVMNNLKEYSVKALVNTVDHLGSISFKVSSLIDQRFDEVDDTNLRVSCIHQRAQVSQACMDKEGLSQQSLVITAPKYHKRYILPAGDGSMPNAVPNFSEMRKAKNRAAQMQQRSNLHSASFGRSPVHLRNVHARRHQHSAHLLRIQYPPNEQIRVQMHTSEHKKLASVRSQADRNDDKEGEQTPKKGKKFLKSLLSRRKSRKEEPLPCYFDDY

SEQ ID NO: 152848 - protein, 91 aa, Oryza sativa
  Clone ID: PAT_MRT4530_52859C.1.pep
MAAVATPDAWRTHDWRKAVDYHATLLATLLANGILSPTSRAICLGAVQEALAMRELSVSTAVAVARKRSPPLAIAGNDRRLPFPDSSVDFI

SEQ ID NO: 152849 - protein, 153 aa, Oryza sativa
  Clone ID: PAT_MRT4530_5285C.1.pep
MAPKAEKKPAAKKPAEEEPAAEKAEKAPAGKKPKAEKRLPAGKGEKGSGEGKKAGRKKAKKSVETYKIYIFKVLKQVHPDIGISSKAMSIMNSFINDIFEKLAGESAKLARYNKKPTITSREIQTAVRLVLPGELAKHAVSEGTKAVTKFTSS

SEQ ID NO: 152850 - protein, 101 aa, Oryza sativa
  Clone ID: PAT_MRT4530_52860C.1.pep
MTTRTVLLSEYSDSGHDNSGRNGAVAGVVGHGVGAGGRGLHGYIACAVVLLASTPYAPLHIQGDELQHGVWTAKDDCRWRQAPAWDVDYEPTSNDASVPNS

SEQ ID NO: 152851 - protein, 811 aa, Oryza sativa
  Clone ID: PAT_MRT4530_52861C.1.pep
MPSYQYLLSLLFYILDCTDRFSVIVTIHNHRVAVPGPAPPQDQWKSYCRTISLLAFQSFGVVYGDLSTSPLYVYKSAFSGRLNNYRDETTIFGLFSLIFWTLTLLPLLKYVIIVLNADDNGEGGTFALYSLLCRHAKFSLLPNQQSADEELSTYYQPGVGGIISSPLKRFLEKHRKLRTCLLLFVLFGACMVIGDGVFTPAISVLSAISGLKDPGPGGIPDGWVVFIACIVLVGLFALQHRGTHRVAFMFAPIVVVWLLSIGVIGLYNIIHWNHRIFLALSPHYVIKFFKMTGKDGWLSLGGVLLAITGTEAMFADLGHFTAASIRLAFVGAIYPCLVLQYMGQAAFLSRNMSAVEDSFYQSVPRSLFWPVFVIATLAAVVGSQSIISATFSIVKQCLSLGCFPRVKVVHTSRWIHGQIYIPEINWILMVLCLAVTLGFRDTTVIGNAYGLACIVVMFVTTWLMALVIIFVWQKNILLALLFVVAFGSIEVVYLSAAVTKVPQGGWAPIVFAFVFMLVMYVWHYGSRRKYLFDLQNKVSMKWILTLGPSLGIVRVPGIGLIYTELVTGVPSIFSHFVTNLPAFHQVLVFVCVKSVPVPFVPEDERYLIGRIGPREYRMYRCIVRYGYKDVQKDDENFENHLVMSIAKFIQMEAEEAASSGSYESSEGRMAVIHTEDTTGTGLVMRDSNNEASGTSLTRSSRSETLRSLQSIYEQESGSLSRRRRVRFEIAEEERIDPQVRDELADLLDAKEAGVTYIIGHSYVKARKNSNFLKTFAIDYAYSFLRKNCRGPAVALHIPHISLVEVGMIYYV

SEQ ID NO: 152852 - protein, 158 aa, Oryza sativa
  Clone ID: PAT_MRT4530_52862C.1.pep
SCWVGFLDESVRLSDSDSGSSNNTRTSSHHSREEDLTRRLNELRQRGRLAQNAILQVKLGEHDVFTTLQNNMIAAKALLDNMPIPGDPAVKTTIAQRLLWQETIPPQNTGSRRVEASQAGRSHPSLRTSDLRDKIEVGRRLNADLRNVMNKRRQLRDA

SEQ ID NO: 152853 - protein, 187 aa, Oryza sativa
  Clone ID: PAT_MRT4530_52863C.1.pep
MEGIGVSDAHARAARLLWSDWIKNSLWCKYDFHFSTAREVGIDCFDDLIPQKLWLPQLAKRDRTPGFITVEYDKPRYVTKMAAKVIDQDGKLDLLLKKMEDSDRKWEESEKRREQSEEKSRIEFMALKVVVESHFTVVEKRVDELQGSVVELQDKVEKLQIVVQQASREPFSAPTSPTGAISHLTFS

SEQ ID NO: 152854 - protein, 60 aa, Oryza sativa
  Clone ID: PAT_MRT4530_52864C.1.pep
MTRFRAPTCHHDIPERGRFAPSPAGNGQPPSRAVVNPEADQTDAPADPTPSRPPSPGYVG

SEQ ID NO: 152855 - protein, 52 aa, Oryza sativa
  Clone ID: PAT_MRT4530_52865C.1.pep
TRKISVIFPPSYYLFLFLNTNICYLKMIFIHVIPKNIGMQSAYIRCLHQYFA

SEQ ID NO: 152856 - protein, 74 aa, Oryza sativa
  unsure (1)..(74): unsure at all Xaa locations
  Clone ID: PAT_MRT4530_52866C.1.pep
TPPAWRPHQGTSSLLPPPPPAVRDNKIRRSGLSKMATLPRYSCLRRAALTRTXTSAMMSWLRSLVKQSACRASA

SEQ ID NO: 152857 - protein, 123 aa, Oryza sativa
  Clone ID: PAT_MRT4530_52867C.1.pep
LGARRPPTTSSPAATGSPPRAGGGARGAQGPPRPPPRRGPRAGRLPTLLWCRPPPLPLSRFFPVRRRARSAGGRARSAVGRTPAWPIEASEGEAAPGVELVGAHGSVHEPRRQIEKEEDEDEH

SEQ ID NO: 152858 - protein, 104 aa, Oryza sativa
  Clone ID: PAT_MRT4530_52868C.1.pep
STSLSDHCPLLLTRQGEAPRVKTFRFENFWIHLPGFQDVVSTAWNMEQPHHKAHHRLFHKLGVTADSLRSWSRNLISQSKLQLHMALEVILHLREGDANTKYFH

SEQ ID NO: 152859 - protein, 134 aa, Oryza sativa
  unsure (1)..(134): unsure at all Xaa locations
  Clone ID: PAT_MRT4530_52869C.1.pep
IWSIAHNRGHGYSNSFTLARGAQLYPXDTIHSCHRAMHDXVTMSSDCDKILHITPSDQSHHTAGFTSAXQQAAGSPPSCHGEFGSSKGCRRAHPYSITPTLAWKCQLEESYTTDQVVXTHSRLWQAWYVFQGFP

SEQ ID NO: 152860 - protein, 153 aa, Oryza sativa
  Clone ID: PAT_MRT4530_5286C.1.pep
MAPKAEKKPAAKNPAEEEPAAEKAEKAPAGKKPKAEKRLPAGKAEKGSGEGRKAGRKKANKSVETYKIYIFKELKQVHPDIGISSKAMSIMNSFINDIFEKLAGESAKLARYNKKPTITSREIQTSVRLVLPGELAKHAVSEGTKSVTKFTSA

SEQ ID NO: 152861 - protein, 113 aa, Oryza sativa
  Clone ID: PAT_MRT4530_52870C.1.pep
MAQTLYNPTIGSNIMSITFALNFLGDEPLAPMDKTFRAHLFLSSKVMLLFVVPIRQKDVKAILDFHAFKFSKFYILIDHPIEKLLTDVPQTGVINIKLGINVFPSRSYDRETL

SEQ ID NO: 152862 - protein, 97 aa, Oryza sativa
  Clone ID: PAT_MRT4530_52871C.1.pep
GEDKRGQRRRLCLLPFANRPLVLSLLEPGDAVLPSSCITADRHLSLPCKIMPGGAVVRAGESRPWPRYPERSVHLLSFAMVGLIPLFSRFFHEVGIL

SEQ ID NO: 152863 - protein, 109 aa, Oryza sativa
  Clone ID: PAT_MRT4530_52872C.1.pep
MAPVFFLLLFSQIFLCTAVDTINSTTPLSGTQKIVSKGGRFALGFYTPPQGNNTASGTGNYYIAIWYNNIPLQTTVWTANSDVPVSDPTTAFLSIGSDGNLVLLDQSKN

SEQ ID NO: 152864 - protein, 358 aa, Oryza sativa
  Clone ID: PAT_MRT4530_52873C.1.pep
MPMPAAAGEGPWPRRAADLGVAQSQRSPAGGKKSRRGPRSRSSQYRGVTFYRRTGRWESHIWDCGKQVYLGGFDTAHAAARAYDRAAIKFRGLDADINFNLNDYEDDLKQMRNWTKEEFVHILRRQSTGFARGSSKYRGVTLHKCGRWEARMGQLLGKKYIYLGLFDSEIEAARAYDRAAIRFNGREAVTNFDPSSYDGDVLPETDNEVVDGDIIDLNLRISQPNVHELKSDGTLTGFQLNCDSPEASSSVVTQPISPQWPVLPQGTSMSQHPHLYASPCPGFFVNLREVPMEKRPELGPQSFPTSWSWQMQGSPLPLLPTAASSGFSTGTVADAARSPSSRPHPFPGHHQFYFPPTA

SEQ ID NO: 152865 - protein, 81 aa, Oryza sativa
  Clone ID: PAT_MRT4530_52874C.1.pep
MALANLDTAENTVDERSATGSLLHQGVALSRLTLDMTSIHSAVHRLSVCVQHADPPDALTPPANPQQCKGDRSRCDRNLPH

SEQ ID NO: 152866 - protein, 167 aa, Oryza sativa
  Clone ID: PAT_MRT4530_52875C.1.pep
MAVDRGLLLLVVSAAVLVGLASASPFISDSVFLGSVGSTGRSLLQAKKNCPVNFEFQNYTIITSKCKGPRFPAKQCCDAFKEFACPFNEYINDESNDCASTMFSYINLYGKYPPGLFANECREGKLGLSCEGVSQKDSVVSSAGQQAQSSLLAFIMLTFGLAALWFH

SEQ ID NO: 152867 - protein, 50 aa, Oryza sativa
  Clone ID: PAT_MRT4530_52876C.1.pep
MASDEASGCKESDPTRALVFLSTPCAPSPRAWRSSHPLLPLQLRPARRDA

SEQ ID NO: 152868 - protein, 67 aa, Oryza sativa
  Clone ID: PAT_MRT4530_52877C.1.pep
MERDARGCVAGLRPCGGFGGDRVVGGDGEEIAAILAAWMRSGREEGVGQEDLGGRRGAPPVPSDVNH

SEQ ID NO: 152869 - protein, 171 aa, Oryza sativa
  Clone ID: PAT_MRT4530_52878C.1.pep
MAVDRGLLLLVVSAAVLVGLASASPFISDSVFLGSVGSTGRSLLQAKKSTLSNCPVNFEFQNYTIITSKCKGPRFPAKQCCDAFKEFACPFNEYINDESNDCASTMFSYINLYGKYPPGLFANECREGKLGLSCEGVSQKDSVVSSAGQQAQSSLLAFIMLTFGLAALWFH

SEQ ID NO: 152870 - protein, 183 aa, Oryza sativa
  Clone ID: PAT_MRT4530_52879C.1.pep
GGQLGNTLGNFTSLITLDLSNNNIGGTIPDNLPITLQRFFLSGNQLSGSIPSTLSTLTLLTGLSLNNNHLSGEIPDAFSTLTGLANLDFSSNNLTGPLPPSMGNLTALTSLHIQNNQIIGLLNVLQDLPLQDLNIENNLFSGPVPVKLENIPNFKKDGNPFNTSIAPSALPPAAPTPLPSVSP

SEQ ID NO: 152871 - protein, 702 aa, Oryza sativa
  Clone ID: PAT_MRT4530_5287C.1.pep
MAALTEDILLQIFSRVGSIKDLFKFAVTCRRWLRRFTDPAFLRGLCLDSGEGHRARLLGFFFQQTRFYRCEKMIKMRVTQQSSVCPPTFLPAPWSPLGLTDRTLTSFLAADDDTFNYAEPLAARCGIVLMRLVPRTALMIACSHLLGVCNPITGECHVLPPLNLSGLHRYLTSYAIITSTDSDLDGKQPPSSSSSGRSTFSQLYLVVQHKKDCNEYFYSYSAATCSWSAPTMCVDGRRFSLVGERSAVVHKGAAHWLFIDRVSSATQDDILYKLTAAVDTSEISLTRLPFGAGGSPLLCVSGDGKLSVACVFPIHMRVWTQQDDTPATWLRTVIRIPLAVPYPDYSHICQPREKWFNFNRGSMLVLYRSNGVFILDLEKKVMEKVMDCLLPLFSDKLNRTAVAYEMDLVEFFVLQLSGYIWKLSLLVITVTGLTPWQKAQNLNPKKEQPTTTALQKRGPLHIFLCNVSDPHGNASQPSNRKGTGRHTFIHVIDPRDKPLHQSAPTFTHYKLTAPVSSFHTAISQHISTHRSKAKPTDPLPLPEKKRAASMAPKAEKKPAAKKPAEEEPAAEKAEKAPAGKKPKAEKRLPAGKGEKGSGEGKKAGRKKGKKSVETYKIYIFKVLKQVHPDIGISSKAMSIMNSFINDIFEKLAGESAKLARYNKKPTITSREIQTSVRLVLPGELAKHAVSEGTKAVTKFTSA

SEQ ID NO: 152872 - protein, 334 aa, Oryza sativa
  Clone ID: PAT_MRT4530_52880C.1.pep
MELFERARTVRLRGHHDKYLYAEEDESRVSQDRSASSPNARWSVEPVPHAPGVLRLRSHYGRYLSASNEPFLLGVTGRKVLQALPHRLDSSVEWVPVRDGAHARLRTRYGNYLRANGGLPPWRNSVTHDVPHRHAGWILWTVEVVEVLPESLVPAPIASDDDPAAPHYKTPSRGPSPVPTPALAPASPPRHRPASPPSYLARPPPPPPGYIEPPQGYIEPPPPEPTLARIESTESFSLPLHKVDGRAIHYHIGDDNGDIGDDQEGHSFTFNGTSLEELLERLQEETGLNDVIICSRSPINGKLMPLRLQLPPNNAAMHIVLVRESSKGEKSFLE

SEQ ID NO: 152873 - protein, 40 aa, Oryza sativa
  Clone ID: PAT_MRT4530_52881C.1.pep
MGVDHSEEDEGVGKELVVVTLAVKLGAHPSLCQRMQAQPA

SEQ ID NO: 152874 - protein, 103 aa, Oryza sativa
  Clone ID: PAT_MRT4530_52882C.1.pep
SRRPHPSPPRLHRPRRSPPPDPPLHHDRPSPSPPTAACDSPGRQIHRPWPESPQLALSAHHELRRCSPSLDPPPHHELRLCSSPSPDPPPRAVVVTTAGSLHL

SEQ ID NO: 152875 - protein, 394 aa, Oryza sativa
  unsure (1)..(394): unsure at all Xaa locations
  Clone ID: PAT_MRT4530_52883C.1.pep
SSGSSSEAAITVEDFRLIRGGIGRVEQRSGRRKIGRKEERGGDDTSPVAVQVPAPDPAGSRPQXGDKGVDIDCHTVEFDDVRYHIQFSMRNPKVMVLSVALPLPPPEAMLYDGLPLGAIEAIKAAYGPVVQILDPPKDGFDLTMKINLTKLPPDEEQRNAVLTQIASVREVVLGAPLKLLLKHLASKTVAPNVDKLVALVHRPNESFFVAPQADKVTVVYPMRFQDSIDIVLATSFLQEFVEARRTSALNNAPSCLWSPVPPLELKGVPSDALNANAGFVTFDPFFVSLTHLYAVVFPRHVEGKKLDKTVWSLLTFHAYVSYHVKCSEGFMHTRMRRRVETLIQALDRAKSDAEKLKKLVNGGSFKRLVCANTLNSCLNPSFLSLIKTLLAELE

SEQ ID NO: 152876 - protein, 377 aa, Oryza sativa
  Clone ID: PAT_MRT4530_52884C.1.pep
MLMQDSLWGMHRVDMCALNVFCFTGKTHLEIHGVFRIAPQGGQVDQQLDGQYCLYTEPSGTDSINCSSICNAVLPIDIHRLIDRDQKQKHPPAVTGGAGGELSPTPMTTARFVSPSLSRVSPSPAGRVSGSSWLSRAGVALPARPHGLSLHLRPPAMASAAAAGNGSPSAPEDSTALSRIGEVKRVTKETNVHVKINLDGTGVADCSTGIPFLDHMLDQLASHGLFDVCVKAKGDTHIDDHHSNEDIALAIGTALLEALGDRKGINRFGHFTAPLDEAAVEVILDLSGRPHLSCGLSIPTERVGTYDTQLAGKNSHHIIEATFKAFARALRQATEYDLRRRGTVPRLQYSKETNGMASTAPRVLLTLGISVGCDNRT

SEQ ID NO: 152877 - protein, 147 aa, Oryza sativa
  Clone ID: PAT_MRT4530_52885C.1.pep
PPPSRGRRRRRATACKYARRRRGKTASSVGSCENPLGFPRPSVAVTWTAGMRECAKCWDRANLKPVISYLFSRSVDELISTTSSTFTANDFKSMLHTHQKKKNLVLLLKQILLNLIQFIEILLLYYSIWINLNKKKKKKPAARDPLV

SEQ ID NO: 152878 - protein, 114 aa, Oryza sativa
  Clone ID: PAT_MRT4530_52886C.1.pep
PGERGSLAARGLPPFFGGSACFYRTLLFIKSPVSGCRFGWCPFPLCYGPSAIAFFLCSCFFPREFYGGPIRCWCFVQAFSWGVLVCFFFFVPGLCGLFMLQFTACALGFFHCPV

SEQ ID NO: 152879 - protein, 267 aa, Oryza sativa
  unsure (1)..(267): unsure at all Xaa locations
  Clone ID: PAT_MRT4530_52887C.1.pep
MASAAAAGNGSPSAPEDSTALSRIGEVKRVTKETNVHVKINLDGTGVADCSTGIPFLDHMLDQLASHGLFDVCVKAKGDTHIDDHHSNEDIALAIGTALLEALGDRKGINRFGHFTAPLDEAAVEVILDLSGRPHLSCGLSIPTERVSTYDTQLVEHFFQSLVNTSGMTLHIRQLAGKNSHHIIEATFKAFARALRQATEYDLRRRGTVPSSKGVLSRSXCCRFGKQGVHATVPCRLQYSKETNGMASTAPRVLLTLGISVGCDNRT

SEQ ID NO: 152880 - protein, 122 aa, Oryza sativa
  Clone ID: PAT_MRT4530_52888C.1.pep
PVRATYHYYRRRKNNWDLGAPAVSAYCATWDADKPLEWRQKYGWTAFCGPVGPTGQDACGKCLSVTNTATGDQITARIVDQCANGGLDLDWDTVFSKIDSDGQGYQNGHLIVDYQFVDCGDN

SEQ ID NO: 152881 - protein, 602 aa, Oryza sativa
  Clone ID: PAT_MRT4530_52889C.1.pep
MAVDNNFLPRTKLEFPTYDGKGDLLPWLNHCETFFRGQKTPDSRKVNSFLALVCRDVELSEPQQIQLFMASLVNPLKTDVALRRPSTLDDAIMLAQAYEQRLHLGATDPIPERAVRALRMVLPAPSTASSTPSTDAASTTASGKQPLVAALPRKHLSPVEMAQRRTEGLCYNCHEKYVSGQHCEKSFIIEVISFPDDTEGEDDPPPAANTILADAGKLLISLHALAGIRALMFNTIKVCACVGTVDYLALLDSGSMHNFLSETHVVIGTSAFDVDFYSLLLGGYDIVLGAHWLGTLGPTLWDFADQSFSFGTGDNKVTWVSVDAPSPLTHVIALDGAPDELMAEVLDDFRILFNDPHDDVHKTAFCTHQGLFEFLVMLFGLTNAPATFQALMNNMLLPFLHRFMLVFFDDILIYSSTWAEHLRHVRTVFQTLQDDHLHLKRSKYHYSLRFFLDQRLSIVPQHQWASKLLGFDFAVEYKPGSTNVVADALSRCDEHTTEAFLLSSPTFGLFDDLRREVATTPALISLTEDIRKGLKPPQWSLTEGLITFAGRVFVSSSSPLLPVILELAHDIGHEGTQKMLARLRADFHIARDHTTVQEFVFN

SEQ ID NO: 152882 - protein, 248 aa, Oryza sativa
  Clone ID: PAT_MRT4530_5288C.1.pep
MGETKAEQLVTAVYKVHVHCKQCANTIVTQFTQFPGVREVKLDGGKVTVKGIGFDAEKLRKKVEKGCRRRVELVPPPKDIVTEVKSKKEELKIITVRVPLHCAECAARVKEVLLEHKSIYAAKIDLGKNLCVVEGVIEEKKLFEYIYHRTRKYGFIEKVEKKEIIVEEKVEVKKKEAEKKKEGEKKEEVKVKEKVKEVVAPYFIPCTHPHFIDYSHPELHGFKDTVFLHCSHSNQFLSNENPEACSVM

SEQ ID NO: 152883 - protein, 1397 aa, Oryza sativa
  Clone ID: PAT_MRT4530_52890C.1.pep
MRRESTRRAPRPTGRVLLLLGSSPLSSLYICGLVPTTTLSLSLSLSPCGLAVSLARPPPPPVRPNASPAGGEEMVFKGRFFSSRHKSSESSSPTDGSNSPRTPTSAPPAAGSPAAASSSSSSRSDKKKPKSETPRKRDKLFGGSASGSAASKGGAGAAPASASSSPSADGRKAAAAQLRDGGAGGASAAALSPILASSLGLNRIKTRSGPLPQEGHRIAAALGSSNLSRGQAQADPSAASAGGGGGGGRKAGSSWADSTSGSRGKGKAAEHPARGATATSLEGKSSAKGFCIMILQAGYRFLEDRGISLSLPSSCIDSKGRTALSNSIQAPFRAYRVDDVLSYKEIGAHDFHFAAWCLDAKLGTTGANCAYDPCETPKESESPRFKAIMQATSAPRKRVPADIKSFSHELNSKGVRPFPFWKPRGIYNLKEVLKVIQVRFEKAKEEVNSDLAVFAGDLVGVMEKYADSHPEWKETLEDLLILARSCCVMTPGEFWLQCEGIVQDLDDHRQELPMGVLKKLYTRMLFILTRCTRLLQFHKESGFAEDEVVMDQRDKIIQSADRQILAQPGDDTTTRGSKSDVRKSYSQEQHNLKWKRSQEIKPVKFLSPLDTTDVKKEVESPTRERISSWKPFPSPVPKPPKDPTPIKEESPNKKTDTPPAVSSQAELNSPVESTSHQSLPPKHQHKTSWGHWSDQPNISEEGSIMCRICEEYVPTHYVENHSAICASADRCDQKGVSVDERLIRVAEALEKLVESYTQKDLPNAVGSPDVAKVSNSSINEESDGPSPKLSDWSRRGSADMLDYLQEADSTISLDDIKNLPSMTCKTRFGPKSDHGMATSSAGSMTPRSPLTTPRSNHIDMLLAGRSAINESDDLPQIVELADIARCIATTPLDEERALSLLVTCIEDLQEIVNRRKHEALTVQTFGTRIEKLHREKYLLLCDSVDMDKVDSASTVMDEEDDVVRSLRASPVHPVKDRTSIDDFEIIKPISRGAFGRVFLAKKRTTGDLFAIKVLRKADMIRKNAVESILAERDILITVRNPFVVRFFYSFTSRENLYLVMEYLNGGDLYSLLRNLGCLDEDVARIYLAEVVLALEYLHSMHIVHRDLKPDNLLIAHDGHIKLTDFGLSKVGLINSTDDLSGPAVSGSSLYGDDEPQMSEFEEMDHRARRQKRSAVGTPDYLAPEILLGTGHGTSADWWSVGVILFELIVGIPPFNAEHPQTIFDNILNRKIPWPHVPEEMSSEAQDLIDKLLTEDPHQRLGANGASEVKQHQFFKDISWDTLARQKAAFVPSSDSAFDTSYFTSRYSWNPSDENIYEAYEFEDSSDNGSLSGSSSCVSNHQDDMGDESSGFTEFESSSNVNYSFSNFSFKNLSQLVSINYDLLTKGLKDDPPTKSET

SEQ ID NO: 152884 - protein, 137 aa, Oryza sativa
  Clone ID: PAT_MRT4530_52891C.1.pep
HAKIMVTHIHGLKTLFRLMLVHHLWVSLLILRRWNDSFPMKQSLPKSIDDDVPITETGAMADSTSYGYHITATGSTSSTRVENGRHQLMGDPFDSGTADKFNGNSFDGLPFDFIGSSPIPDIGVLLDDDDIMPYLGT

SEQ ID NO: 152885 - protein, 237 aa, Oryza sativa
  Clone ID: PAT_MRT4530_52892C.1.pep
MAGRGGGGELRLLGTWSSPWVIRVRVALGMKGLSYEYTEEDLSSKSDHLLRSNPVHEKVPVLIHGGRPVCESLVVLEYIDETWGATGTPQLLPADPYDRATARFWTNYVNDTFFPSWKVLFRSTAAEQRAEAFKNVVPRVEALERAFGECSKGKAFFGGDDAGLVDVALGSHLVWIKVVDEVAGANLLDEAKFPGLAAWAERFLAVDAVRQVMPDAGDVLKQYKGFLAKWTAGAGSS

SEQ ID NO: 152886 - protein, 28 aa, Oryza sativa
  Clone ID: PAT_MRT4530_52893C.1.pep
GDVEEQEIGSSTGVNWCWNINRSNDTTA

SEQ ID NO: 152887 - protein, 534 aa, Oryza sativa
  Clone ID: PAT_MRT4530_52894C.1.pep
MALSFCHQSTTTIRQPPPAATAKRRRQALPPATTSQAPPSAADAKRHQPAASRRHHATEGAAPPLHPTTPQPPSTEGTRRHPPPLSAPSPAPASTPLREANLVGSYRCSYCYNMGPRKLHLASISALSIFLYVFAHTNSAQAFPVADGTYPPEAEGPAAESSDMDEQLELTPGPQPRVVDVDDYRARADAGDHTEAFLQAWKEACNSSDYPSVLLVPEGKTYLLMPVSFNGPCRATTITATEWITFDNIDHLRVLGGGTLNGNGHQWWINSCKTNRSMALYFRRCNHLVVEGLQIRDSMQMHVVIAYSWRVLVSRLLITAPGWSPNTDGIHVSNSREVLMSGCIISTGDDCISIVTGSMFIRATGIFCGPGHGISIGSLGANKSWAHVSDVLVEKATLVGTTNGRTISRDPSSPLSYPRPPTADSKPNLRFLPAVQCSLRRAAAAASAAPHASNSKRPTDPVTPLARYTRHGTRRAWNEAKQNGRVNYGPDSNRFKIGAGGPTPEITAASQPPTHLCSASAYQARGSRLPRARA

SEQ ID NO: 152888 - protein, 71 aa, Oryza sativa
  Clone ID: PAT_MRT4530_52895C.1.pep
SFFFFFFFFFFFLFFLFPKATKNLSLNPKAYPTFSNRKNNLQGRRIQANPRGGGGATWHTPKGLNPKWAQP

SEQ ID NO: 152889 - protein, 198 aa, Oryza sativa
  Clone ID: PAT_MRT4530_52896C.1.pep
MALHHLRHAPLALRLARLPRLAPSPPPPAARLLLLLAPSQHPAPPWRLLSRPRALATAAADADDAGAGGNGDGDGFFSEESTSWESLGVSDRLASALHGAGLARPSLVQAACIPHVLTTNDVIVAAETGSGKTHGYLVPLIEKLCSKSISAEDGNSQDVTSGSPNIALVLCPNVMLCEQVVRMANSLVDESGEPLKSA

SEQ ID NO: 152890 - protein, 53 aa, Oryza sativa
  Clone ID: PAT_MRT4530_52897C.1.pep
YPTIAAAPHMFLNGYKNVLAVAVETEYSYPHADKIKEYLKVILFLFHFMMMFS

SEQ ID NO: 152891 - protein, 360 aa, Oryza sativa
  Clone ID: PAT_MRT4530_52898C.1.pep
MAAFQLPLAILVSLLAVGATANNGYTTPSPPPPQQQYTPPPPAHSDKLLVRVEGMVYCQSCAYRNTHSLNGAMPLPKAEVSVTCHDVKNHVMECKRAIADESGYFQTELGVTKVSDFFMGDPSKACHVRLQASPEFKCNNPTNINYSSIEGASLRDEGQDVVAIFQEAQTWVNLYVNKLLPLDLHLAGATRSPLRGCRYGEEGGTIWSTEAVADSPIGQIGRLLGLHAIRCITEKRLYPLQRTGKSPNYTPKYELPPQTRKPYMFHPQLLISDELPLTRTGVVLVLHGSPLGHGRKNGGTAQRDYVGNDTTKWQDDVGVVDAVDVASPGARPNGSASVSATLRPKPPDDGPPRNNSTRRR

SEQ ID NO: 152892 - protein, 109 aa, Oryza sativa
  Clone ID: PAT_MRT4530_52899C.1.pep
KKNSKPPLRKKKGPKHGKKKGGGSKKNNLIPLGGRGPFEKTPGNKREKKEAKRLVIILFQKRARGGTRPLLPLGKKSGECPNRAKKRAWSPGNAHTGRALGEWGGGLAF

SEQ ID NO: 152893 - protein, 155 aa, Oryza sativa
  Clone ID: PAT_MRT4530_5289C.1.pep
MAPKAEKKPAAKKPAEEEPAAEKAEKAPAGKKPKAEKRLPAGKGEKGSGEGKKDRAGRKKAKKSVETYKIYIFKVLKQVHPDIGISSKAMSIMNSFINDIFEKLAAEAAKLARYNKKPTITSREIQTSVRLVLPGELAKHAVSEGTKAVTKFTSA

SEQ ID NO: 152894 - protein, 401 aa, Oryza sativa
  unsure (1)..(401): unsure at all Xaa locations
  Clone ID: PAT_MRT4530_528C.1.pep
GEDYGTGHGREAKDRAGTLPSRRPLERRIQGEEYMPKGDDFAKASSPPRGPKKPFXPIKPRGHWADNRLTAHQDSMNLYYTMYPCKCPFHKGNHLSFRQQLAPIVGIFERNHXERMPPKKVVKEKVIRRKESDTGADMAAEEGAEPSATVVEDGGTPCASAPAPSLPPSAPATSVQVPNAADMTKAAAAARVLQTRAEILSTSQLLVPQAAPSQPAAAPTALAAVQVQVNPDPETQTEADMEAMRQNMTRLQDMLRQMQGQQQAYEAARRSKVALAPILQYSAGYVPPQVYPQVPTQPLPPQVARAPMYFAGQPSTAAAHPAPHVQLQAQPVAAQVHPQPPGQVPQTMAEGASALQAQLQAFLQQLSQPQXNISSTAPSALPEGNTSQGAPSWLPSNQPGL

SEQ ID NO: 152895 - protein, 380 aa, Oryza sativa
  Clone ID: PAT_MRT4530_52900C.1.pep
MAASAAESSSQSHETRGQGDAEEKHPQPAAATAAGGAGGGVEIRAAKRFKLSARFADSEGTEDEDEDEDEYKSWIVSIHNDQCRQYDPKQRRFNSYRTFVGHAATPELLKHLDEDATIGPERRPLDALTEQELVESPYVLHVKILESDIGFPINLFGTVLIREHLKCVYIFRRDRDDCQLIKSSGEILNLIAPYVGPTDESIDFEINLKIRGNMGESNDRIFSNGFTEAPETSNSGQTKRVLLSSWLSTLELAYTTAHFTVQVAIGINILKGSSNFLGIIKACGTKNEGDAVLYDSEVSGTRIALGDDGSIALSRNVVVLHVDEMLLLKFFVYDDDMISKSAPIILTLGHNDESFNIEQGSYKLRVKLDWTKINLLGNIN

SEQ ID NO: 152896 - protein, 676 aa, Oryza sativa
  Clone ID: PAT_MRT4530_52901C.1.pep
LTEHLIDVHTSGSSNRETHSFITEPEIIGRDEAKRKIVETICTATESNPLSVLPIVGLGGIGKTALAQLIYNDVQITETFQKKLWVCVSNVFDLKKILDDIMQSGTGKSNKHLNLEMLQSKVRGFLCEKRYLLVLDDMWNDKVNEWDELKCLLSSGGSGSVIIVTTRNMSVASIVKTLEPYDVAKLTDDKCMQVFMHYAFRGGGPHDPKLLEIGKSIVEKCCGIPLAAKTLGSLLCTSHDVGEWRRVMEDKIWNTEAKVYGLIPALKLSYDALPPHLRACFSCLSIFPKDHQLFYSTTVMLWMALGMLNTGKESKQMISAGSKCFHDLLGRSLFQDQIIVYDETIQSCKMHDLIHDLAQFVSENEHAVISCEKTAFSKRVKHLVLVNLQTVHLAQCDQLEGLPRDVHQLVSLTYLSLTSKQKYLLKSGFCGWPSLTFLYLHHCVELTSLTEGFGSLAALRELRIFNCPKLASLPSAMKQLSSLEKLVLNNCNELDLMEPGEALSGLGSLRALNLVGLPKLVGFSASFQSAASSLQYFCIGDCQGLEKLPDFIQSFTCLKIIGIRDCPELSRRCTAESGEDFHLIHHVLRIYIDNKIWEKALVSTETVLLHQSTVVSTEVVREHEEGLALWLHSRAFLSRSKDDTRVQSYRSLVLVRLRRDSACTVAMVPEPDGRTG

SEQ ID NO: 152897 - protein, 66 aa, Oryza sativa
  Clone ID: PAT_MRT4530_52902C.1.pep
MPISHHGVSLTSSGQRRSSRSLRKRKMKTHLATLDPYNRPRASPSRSSPRYATYVGSELELGSQPH

SEQ ID NO: 152898 - protein, 357 aa, Oryza sativa
  unsure (1)..(357): unsure at all Xaa locations
  Clone ID: PAT_MRT4530_52903C.1.pep
ISEHFVAWHYEKNGISVHSAYKLTLTEIELKEGNSSSNTNNGSRYYRSMIWIANVPQKVRVFVWRLARENLPTQANKFQRQLVTSKIXNSFHVVVRCTKAKALRHALRKIWGLPGGSSFLIXSGSDWLLMLLSSVLAKSLXLVWRAWYLRNDVVHCKGEEVLGISATFLQATMXSFVQAMGQEPDQKGKVVLSEVXISSLNLKINRTLGIGCSSWELPELGWANINVDGAFCAGSGNAGIGIIIHXSSGSVLLSSXKYIRHRASAEELERFACKEGLELDVEWVXYTPVVLETNCMFVVNALXAALRESIXWCYTIAEMQSTEELLVEVKIRHVRKXCNRIAHELARLASRRKHCAA

SEQ ID NO: 152899 - protein, 500 aa, Oryza sativa
  Clone ID: PAT_MRT4530_52904C.1.pep
MASSLVARRAAAAVSGGAEGGGGEGRGGDTLGRRLLKLIYPKRSAAVVLRRWAEEGRTVQKYQLNRVVRELRKYRRFKHALEICEWMRTQPEMRLLPGDHAVHLDLVAKVRGLPSAEKFFEDMPERAKGPSTCNALLHAYVQHGRRDKAEAMLEEMAKAGYLTCALPFNHMMSLYMSSGELEKVPEMIKELRRYTIPDLVTYNIWLTYCSKKNSVKAAEKVYDLMKDERVVPDWMTFSLLGSIYINAGLHVKGRDALVEMEKRASRKERAAYSSLLTLYASLSDRGNLDRVWRKMRETFRKFSDTEYKCMLTSLTRFGDIAEAESFYSEWESASGTRDSRIPNTILAFYIKNGMMEKAEGFLDHIVQKGVKPSYSTWELFVWGYLSDGRMDKVLECLKKALSCLEKWDPNPQLATAIYSQIEEKGDIEAAEKLLVMFREAGYVTTEIYNSVLRTYAKAELMPLIVDERMDQDKVSMDDETRSLLRLTSKYPIGEVSTLMS

SEQ ID NO: 152900 - protein, 98 aa, Oryza sativa
  unsure (1)..(98): unsure at all Xaa locations
  Clone ID: PAT_MRT4530_52905C.1.pep
GGQRSLATDCDGRGVDKADLGRASPTTAAAWCGGGPSGCXGGRNGGDGGGEWAHGAGAVESSGAADGKRKKEEENAGMVYMGSGGADEAGRRPDFSPT

SEQ ID NO: 152901 - protein, 242 aa, Oryza sativa
  unsure (1)..(242): unsure at all Xaa locations
  Clone ID: PAT_MRT4530_52906C.1.pep
MAGGRVVASGSRPVDARGCGKRSTAVAAGARQRQEEAGGRRAHSKWLRTSDFGLSTVNYHARPDGLLHTAYGTPTYVVPKHHPLLLAGALLFQDENLVCIYHKMRQGDFSCPTWLTTDARKLIKMLFDLNPDTCITFAGLHKMQWFRKMAXCSVTHLTKLAQEPVDMLGNVDNDKDELRKVLNAFHLMSLXKGFDLSPLLVRTTLPCRKGEPRRAWVACDSRRASRRAAWSRDWRRSRWATP

SEQ ID NO: 152902 - protein, 54 aa, Oryza sativa
  Clone ID: PAT_MRT4530_52907C.1.pep
LQSVYALGCAGFESWIFETGQQVHGGRYVVSELVHRVNYHGPPAYCCSSPSRSK

SEQ ID NO: 152903 - protein, 192 aa, Oryza sativa
  Clone ID: PAT_MRT4530_52908C.1.pep
MVGRAAGHHRMLAGGDGETRRMLGATRRRVAAPRSQNRRRHNGDQYERNRRRFNHLGQYYGREGLPRSGGTAEFDGVRRGAAEIGADGGRRGLKVFDARPSSSNGSRLPPMAVTAVRAPPLHTPPPTSAERPCGGGATPAHQDGDATATRATATDSDIGLDREDAGLCPRVTRGRCGGRYHSIPKAMCEGTG

SEQ ID NO: 152904 - protein, 75 aa, Oryza sativa
  Clone ID: PAT_MRT4530_52909C.1.pep
IRVSKTDGRGFLHLGRGGPEVIQGPRRGCGQNKKGNYHGALVYRKDHGTSPFNLNIGVNLFPRGRFHWRPGKNWG

SEQ ID NO: 152905 - protein, 56 aa, Oryza sativa
  Clone ID: PAT_MRT4530_5290C.1.pep
EEEDAARPRLDEMAVGDAASEAEISELKQRISGGRRSRRPTLETIHEESYAPAARC

SEQ ID NO: 152906 - protein, 107 aa, Oryza sativa
  Clone ID: PAT_MRT4530_52910C.1.pep
MRYPRVQCAPVNSRSSMDSGRIHLPVGEAFARSVVAGWYGVRPRAARAPRERRGPLPNKGAAQLAPRSYARDRVREEISLCVTLLRRRRRRPPYPAPTAATRRGRTF

SEQ ID NO: 152907 - protein, 105 aa, Oryza sativa
  Clone ID: PAT_MRT4530_52911C.1.pep
MLEEVVAKFTGASARQGSVVALLLKEVQRMGKEEKAIGGSDAQWRQQHLGEAYLHRLLHELAASHAMTTASVLQCLSHLRHCDHNHGTEATSAASFMEFAEWISL

SEQ ID NO: 152908 - protein, 127 aa, Oryza sativa
  Clone ID: PAT_MRT4530_52912C.1.pep
GRGRRLASPARRTHLLALLLSRISLSSSSREHPRRLHRSSSSLFQPCGIGLLGPGVALSVSPPPMCIASDSSLLAIHWRHQRYCVPHLLPSKVTAPRPAGSPITDASSLGSSFFCSPACYHIDPQSV

SEQ ID NO: 152909 - protein, 124 aa, Oryza sativa
  Clone ID: PAT_MRT4530_52913C.1.pep
HEGPIHPVFQHIGISAWPGRVVLTTHALYFQSIKVGYGDKIVKYDLATDSDQVIKRDFTGPLGVRLFDKGVMYKSSTLTEPIYFDFPELGGPSRRDYWLAIAREVLQVNKFIRKFNLENVQRAE

SEQ ID NO: 152910 - protein, 64 aa, Oryza sativa
  unsure (1)..(64): unsure at all Xaa locations
  Clone ID: PAT_MRT4530_52914C.1.pep
MEQSVRMAMELAGTDSMVDQHRDQMELRLQERCQAXRGYLMCSLSRCRPSIKRLSVCHSTPWWA

SEQ ID NO: 152911 - protein, 214 aa, Oryza sativa
  Clone ID: PAT_MRT4530_52915C.1.pep
MAAAEKTKPVLYSEWMSSCSYRVRIALNLKGIDYEYRAVTRGDPDYGKINPIKYVPALVDGDFTISDSLAIILYLEDKYPQHPLLPQDLKKKALNMQIANIVCSSIQPLQCYAVIGLADGKMSANESLQIVQHYTDKGFRAIEKLLEGCRSKYATGDEVQLADVFLAPQIHAGITRFQIDMSKYPILARFYKAYMELPAFQAAVPENQPDAPSS

SEQ ID NO: 152912 - protein, 373 aa, Oryza sativa
  Clone ID: PAT_MRT4530_52916C.1.pep
MPSGYDDDRLRELKAFDDTKAGVKGLVDAGVTAVPRIFHHPPDPTPVASAADAADADAIPVIDLARADADRDRVVAQVRSAAESVGFFQVVNHGVPARLTDGMLAAVRRFNERPAAAKAAFYTRDAARRRVRFNSNFDLFESPAANWRDTLFCQAAPDPPAPEELPADVRGVLPEYAGAARRLASSVLELLSSALGLETGRLGGMGCADGVSVVSNYYPPCPEPEATVGTARHSDPAFLTVLLQDGMGGLQALLGGRWVDVPPVAGALVVNVGDLLELVSNGRMRSVEHRVVANRSRDAARVSVAAFCNVDLGRESSRSGRLYGPIAELTAGGDPPRYRSTTVAEFLAHYDGKGLDGRPALHHFRLPAAASLD

SEQ ID NO: 152913 - protein, 525 aa, Oryza sativa
  Clone ID: PAT_MRT4530_52917C.1.pep
MRVILQQCERSRTVRRVIHTASVTAASPLREDGSGGYKDFINESFWSPLNLTYDFTNAHLDGYVSSKSLSEKELLSYNSSPSPAFEVVTLACAVVGGDTLQPYLWSTIPVIMSPLTGDELCHNVLKFLQALLGSVPLVHIDDVCDAHVFCMDQPSIAGRFLCAAGYPNMKDYIDRFAAKYPEIEIKLKEVIGEGVRVQADTKKLVDLGFKYKYGVEETLDCSVECAKSSSRSVLRDMDLKLVSFRATYDTHLRAGKEIKQRKSWVHSVSHTGDEKKTAPLREFPGAAERLVLFEADMYDADTFEPAIAGCEFVFLVATPMQHDPTSTKYKNTAEATTDAMRIILDQCERSRTGYVSSKTLSEKELLSYNGSSPSPAFEVVTLTCAVVGGDTLQPCPWSSSIPVILAPLTGDEPSHNSLKFLQALLGSVPLVHVEDACDAHVFCMDQPSIAGRFLCAAGYPNMKDCVDHFAAKFPDIEIRLKEVIGEGVRVQADTNKLVDLGFKYRYGVEETLDSSVDCAKRLGEL

SEQ ID NO: 152914 - protein, 196 aa, Oryza sativa
  Clone ID: PAT_MRT4530_52918C.1.pep
MPRRTADDDDDGAGAIHGVFRLPTAGDGGEAAESDQHRSSPRAHPLLRRPHRRQQPFYPKARFRSLIILHTYCFNFREILRYLRRSSLTTATVTADRGGGGGGHGRRRSLFVKVYMEGVPIGRKLDLLPLDGYKGLVARLASMFRASITYHHCHRQFAVVGMKTNKVHHVLTYEDQEGDWMMAGDVPWEYGKLAQL

SEQ ID NO: 152915 - protein, 687 aa, Oryza sativa
  Clone ID: PAT_MRT4530_52919C.1.pep
MAKIDTALSSTISANANGKTWMKSTKTRTAAVLSMEDSGREPPGVGPGSFFFTLLSPLLFLFVPTFFFQSPSMLLSLVFFLVPLPSSERTAPHPSSTASRLYFCEETKRSEAKAKTSAAAAAAAAASSSSSRPLSFLHPSLASIARALPILTWQLCDSTHNPNPSRTTPASASAASPTPIPTPSPVSASPPRPSAPTALAPDSSPSRAELTLPPRRVSSSVFLRPPRLFLLWLVLGIRFSDSCCAASFAMGKSKKSKVRGVGGGDDLIDSSDADSVGSSSTALSDLSMSYATEHVGSQEFVLDKYIDALYEKRGSTREAALSQLVDAFESFILHGLVENKYATLLSLFNSSIKKGSTKEACLASRAIGLLALTVGAGSSSHEIMEESHAQLSRVLQTWPDASKMISALDCLAGVRFVGAADLAETELSLKAMWDVIHPKSGSNVGIIRKPRPPVLAAAISAWAFLLTTIGSWRINADSWKEPIAFLSTLLGAEDRAVRMAAGEALALCFELNLLDVSFGEDDDVENGGTVGSKSKLFLDMQALKAKISSLASNLSMEAGGKGADKKNLTDQRDLFQRILDFVKYGECPEESVKISGKRDVLRVSSWSELIQLNFLRRFLGRGFLKHVQENGLLQDVFDIKTDKAETLSSTDKKIFRSGEEKGRALKLNKDRRLAQERKNAVMLDLDE

SEQ ID NO: 152916 - protein, 154 aa, Oryza sativa
  Clone ID: PAT_MRT4530_5291C.1.pep
MAPKAEKEPAAKKPAEEEPAAEKAQKAPAGKKPKAEKRLPAGKGEKGGAGEGKKAGRKKGKKSVETYKIYIFKVLKQVHPDIGISSKAMSIMNSFINDIFEKLAAEAAKLARYNKKPTITSREIQTSVRLVLPGELAKHAVSEGTKAVTKFTSA

SEQ ID NO: 152917 - protein, 61 aa, Oryza sativa
  Clone ID: PAT_MRT4530_52920C.1.pep
ARFVLRARFVPEVVGAPAVPYRQRCNPIQLALFMCSSQACTIHNNFPIFHFINIWCLCVKS

SEQ ID NO: 152918 - protein, 772 aa, Oryza sativa
  Clone ID: PAT_MRT4530_52921C.1.pep
MATAGAAVDRLLRRLAADAGRLKLPSSIDEDMAQVRRTLARLQDVLLSVEGKYFKMSMEAQEWMRKINQISYDIQDLLDEFEDCSEAGSQRGSSWIAKEILLCSSSPCFFNSSRLQRIRIIKRKLDLSTEDSVVLSLMQHSPSNLKHCNEPVIFDGYKILGRDNDRENVKNLLFQNDADKFSIIPIVGLAGIGKTALARLIFQDYGEEWNFDQRIWICIDRKLELNKIANDIISQVNKKEETISEFVLNDQIHNNLQFMKNRLQEVLSDKSSLIVLDGLISTDKNQLIELKEMLRGTEKCTKIIVTTSSEVSADLIGTVPSYKLHPLSDDDCWGIFCQRAFDNGAGNMDRAEIGRQIVKRCEGIPMAAYSLGSMMRNKDDNAWLWARDKEIWELPKVFANGFELLAPFSEIYHRFVIDREKLIQQWIALDMVGSKHGALPAYVHGEMFIQELLSLFFLEIQKIPSVVKRPKMIPGCLIAIAVRRKYGILVILSFMFFPFYVCSWCVVRNLLMMIDDYSSSHAKCGRYSNTQLPVQKPVSATGISPTNRRTLLQVNSLVHAFAKYVAGSDIVISDGRELSRGPSAEKVSSTYAVLINHTGHSTLQKDVLTGARAISFKNCLLADAFLRLNHLRILDLTCCYDLELPASIGYLKLLRYLAGFGLRIRKLPNQMSSLQNLEALDFSESHLEELPSFIGSYQKLTYLNLQRCEKLRNLPRTLGDLKRLEYLNLSYCPGVSEDADYLCSLHALRFLDLSGCSELQQLHHFFGNLTKK

SEQ ID NO: 152919 - protein, 150 aa, Oryza sativa
  Clone ID: PAT_MRT4530_52922C.1.pep
RCEGIPMAAYSLGSMMRNKDDNAWLWARDKEIWELPKVFANGFELLAPFSEIYHSMPSALKSCFSYLSIFPIGFVIDREKLIQQWIALDMAGSKHGALPAYVHGEMFIQELLSLFFLEIQKIPSATGISPTNRRTLLQVNSLVHAFANML

SEQ ID NO: 152920 - protein, 56 aa, Oryza sativa
  Clone ID: PAT_MRT4530_52923C.1.pep
ERTLIQLIIGIDGIPPGFGIEFMAQDTLGSVASAHASVHESAYILALVIKGILECY

SEQ ID NO: 152921 - protein, 191 aa, Oryza sativa
  Clone ID: PAT_MRT4530_52924C.1.pep
MARTKLAALGFVVLLSIGLASAARVERYSSSQGSGTGSGQGGGYVNGGGAGEGIGAGSGSSNRYGAHASGGGGGGGGGYSQYGGSGSGSGYGTGSGSSQTSQNRYYSYGGSSSAGGAGAGGGAGQAGGYWPSNGHGSGSGTGYGSSSANNYYGGPYANANAGGNGGGNGQGQYGGRGVGAGVGSGYGDANP

SEQ ID NO: 152922 - protein, 256 aa, Oryza sativa
  Clone ID: PAT_MRT4530_52925C.1.pep
MVVQNKGLSSNGGAEQNGVDLREKLSRKPKNIRRYDARGHVPESRSRYDGRDKIPELRSRYGMRERLPEPRTSALPSRIPSARSMDDLLKLDSSREAYSSWSGNLRHRSPEKLKSARRDMSPSRTYDHIRSMPPIRSAGTSRTSGLITRDAPDALRTQPYAGKSTISIDTTQPANGVASSATVMPTAPVMPEVPLTVTGLLNSLGLEKYVFLFHAEEVDMAALSQMGDSDLKEIGVPMGPRKKILQAVAPYSKRRR

SEQ ID NO: 152923 - protein, 133 aa, Oryza sativa
  unsure (1)..(133): unsure at all Xaa locations
  Clone ID: PAT_MRT4530_52926C.1.pep
SHSISKLSLTNLTQTQPEMARETSHDFTSKRWHMRPPKNSQQRLEKHHMILPLKVSICELRKGEKLVTFLTIHFTFQFCVFSCQMLVASVSSQHDSEISSSSFGFASCCQNPSLIXVLAEQELQFEHVXQHVS

SEQ ID NO: 152924 - protein, 157 aa, Oryza sativa
  unsure (1)..(157): unsure at all Xaa locations
  Clone ID: PAT_MRT4530_52927C.1.pep
VSVDLLFPPXXLSLXXPXXISXGSPHRVSXXXPXLLSHHFXXXGXHXXXFHXXXXXXSLLLSXXIHLGXPXMRXXLXXKPXPXCPPXXLLNLLHPPSLSFSXXSTXXGXXLSXRPLFXLSLSPPSPSXXXPSXXLVSXFLXHXXSPTLTLSXXXXSS

SEQ ID NO: 152925 - protein, 48 aa, Oryza sativa
  Clone ID: PAT_MRT4530_52928C.1.pep
KYSCPNSVYFAGVGEVQDGIGGGEGGGVDQTISPTVSTLAVQDHSHHR

SEQ ID NO: 152926 - protein, 78 aa, Oryza sativa
  Clone ID: PAT_MRT4530_52929C.1.pep
MDPLPQNIYLVAADKHPCLKLPLHVEPCNEVLHSTIQLISWQPNIFLLNHFLLDYLALGNCSFLFFHFLNFSIPNISI

SEQ ID NO: 152927 - protein, 153 aa, Oryza sativa
  Clone ID: PAT_MRT4530_5292C.1.pep
MAPKAEKKPAAKKPAEEEPAAEKAEKAPAGKKPKAEKRLPAGKAEKGSGEGKKAGRKKAKKSVETYKIYIFKVLKQVHPDIGISSKAMSIMNSFINDIFEKLAGESAKLARYNKKPTITSREIQTSVRLVLPGELAKHAVSEGTKAVTKFTSA

SEQ ID NO: 152928 - protein, 436 aa, Oryza sativa
  Clone ID: PAT_MRT4530_52930C.1.pep
MAWSYVKMSMFGTAAAYSEDDEIMAAVVILTQTPRKRPWGGSVPGHKTYKRDRIAADWQLNQDYFVERPLYNEEHFRRRFRMRRELFLRIVDEVTAKNRFFTQRRNAAGQLGFSALHKCTVALKMLAYVGPADELDDHLKMGESTALKTLMEFVMTVIKVFGKEFLRPPRSEEIEHILSINLARGFPGMIGSIDCMHWEWSSCPTGWQGMYRGHKGKPTLILEAVATEDLRIWHAYFGLPGSHNDINVLHRSNVFDDVPNGRAPSVEFHVNDNIYSLGYYLADGIYPDWATLVKSIALPVSNKQKVFSEQQESCRKDVERAFGVLQAKWKILHRPARLWSPKVLNSIMRACVILHNMVVEDERGVQLPTVHPSEWPGVSDPPINQDREIPAIEKLVDAQNIIQDRETAALLQNDLMEHMWMLYGQCSGPFAANHRN

SEQ ID NO: 152929 - protein, 172 aa, Oryza sativa
  Clone ID: PAT_MRT4530_52931C.1.pep
MEVEARRLEVEAARLESAHGDGGGAAEVGWLEAAHGRRWRRRREAHADAVKRRREGAKEDGDGDGDGAQEDGDVRFYSAHPIPASLSNATALVALNLANNSFAGQVPAEIGTLCALSLELSNNKLTAIDAGGGWEFVDNLTKCSALAEILLYGNKFAGVMPSFVKLKNLYCI

SEQ ID NO: 152930 - protein, 99 aa, Oryza sativa
  Clone ID: PAT_MRT4530_52932C.1.pep
MAPVTTSDQLGAAAFEHLDDTFGSFPMIRRYTPICLLFSLPEDVPSIQTEVEQHLRRALAKLARDLPWVAGRVIYKGRDETHSGIRRVIPHADEIELIV

SEQ ID NO: 152931 - protein, 50 aa, Oryza sativa
  Clone ID: PAT_MRT4530_52933C.1.pep
FLKYYKVPSISFSYIVFKRKYRAHPLDRLMVICMHMQYYVLPKSKKKKKK

SEQ ID NO: 152932 - protein, 105 aa, Oryza sativa
  Clone ID: PAT_MRT4530_52934C.1.pep
MEHGERRTIVPLVIALKLIAPVATRVTNVVAVLGLAAFVGVIANKAVPILDLPASVGIAANELTSLLALNRVAIELSSRCIISPVAPPLLPSNIEIAHVLACVFQ

SEQ ID NO: 152933 - protein, 160 aa, Oryza sativa
  Clone ID: PAT_MRT4530_52935C.1.pep
AAGIRHEGGFVHSGSRRRRTAASADAPPPSPSTWSRRNAPEEESGQVPSCRNAVLSVAVADLLLKTPLLGVGVRRTRRVRGVAVTSNSRGRRRRRRPPMASPALGCAVGRGLARSPPGSAAGTVVAGSDSRVASRACRLFDRMPDPRGYHQLAGISNFRS

SEQ ID NO: 152934 - protein, 1117 aa, Oryza sativa
  Clone ID: PAT_MRT4530_52936C.1.pep
MSSLSRELVFLILQFLDEEKFKETVHKLEQESGFYFNMKYFEDEVINGNWDEVERYLGGFTKVDDNRYSMKIFFEIRKQKYLEALDKHDRSKAVEILVKDLKVFASFNEELFKEITQLLTLENFRENEQLSKYGDTKSARAIMLVELKKLIEANPLFRDKLQFPNLKSSRLRTLINQSLNWQHQLCKNPRPNPDIKTLFVDHSCGQPNGARAPSPANNPLLGSIPKPGGFPPLGAHAPFQPAPTPVPPLAGWMSNPPAVTHPAVSGGAIGFGTPTNPAAILKHPRTPTTANPSMDYPSGDSDHVSKRTRPVGMSEEVNLPVNMLPVTYPQSHSYPQDDFHKNVARTLSQGSTPMSMDFHPVQQTLLLVGTNVGDIGLWDVGTKERLVLRNFKVWDLTKCSMALQASLVKDPTVSVNRIIWSPDGTLFGVAYSRHIVQIYSYHGGDDIRQHLEIDAHVGGVNDIAFAHPNKQLCIITCGDDKTIKVWEATSGAKQFTFEGHEAPVYSVCPHYKENIQFIFSTALDGKIKAWLYDNLGSRVDYDAPGHWCTTMAYSADGSRLFSCGTSKDGESHLVEWNESEGAVKRTYQGFRKRSMGVVQFDTTRNRFLAAGDEFLIKIWDMDNTSLLTTIDADGGLPASPRVRFNKEGTLLAVSTHENGIKILANADGVRLLRTLENRSFDASRSASETVTKPPINTLTANAAAAATTAANGDSRSLVDVKPRIADEPLDKSKVWKLMEITESSQCRSLKLTDNMRTSKISRLIYTNSGVAILALASNAVHLLWKWPRNDRNSSGKATASVSPQLWQPPSGILMTNDITDNPEEAVHCFALSKNDSYVMSASGGKISLFNMMTFKTMTTFMPPPPAATFLAFHPQDNNIIAIGMDDSTIQIYNVRIDEVKSKLRGHSKKITGLAFSNVLNVLVSSGADAQICVWSTDGWDKLKSRMLQIPSSRPSSIILDTRVQFHQDQLHFLVVHETQIAIYETTKLEPVKQWPVRENSSPITHAMFSCDSQLIYASFLDATVCIFNASSLRLQCRILPASYLPQNISSNVYPVVVAAHPSEANQFALGLTDGGVYVLEPLESERKWGNPPPAENGSTSALSTPPNGASSSDQPER

SEQ ID NO: 152935 - protein, 37 aa, Oryza sativa
  Clone ID: PAT_MRT4530_52937C.1.pep
YSFEFSSIPLNLGLTAFCSVRPEVPVIPVQNFRGSGV

SEQ ID NO: 152936 - protein, 268 aa, Oryza sativa
  unsure (1)..(268): unsure at all Xaa locations
  Clone ID: PAT_MRT4530_52938C.1.pep
MARSLAAVLLLLVAAAGASHAASPAEMYWKIALPTSPMPGAIRDLISPASSVGSASKEDTVGNVFFLEKDLFPGSKMTLHFTRATAGAALLPRGRAESVPFASERLPEILSQLSIPAVSPTADAMWSTLAECEAARLAGETTKHKHYCATSLESMVEFVASSLGTRDVHAVSTEVISTLTPTPRQAYRVEAVRPVAVPGGDMVACHGMPYAYAVFGLHXSRAQAVAACHGDVDGHGAVAEAYKRLGVAPGSVAICHFLPQDDMIWVRN

SEQ ID NO: 152937 - protein, 85 aa, Oryza sativa
  Clone ID: PAT_MRT4530_52939C.1.pep
SYSTSYLQVLENINGILQTSRITARINLSRTRTLLPLHRSNTELRISQQIKYTYSTCICNLPKRIVCYFFKTMEQEVIVSRIKKS

SEQ ID NO: 152938 - protein, 154 aa, Oryza sativa
  unsure (1)..(154): unsure at all Xaa locations
  Clone ID: PAT_MRT4530_5293C.1.pep
MAPKAEKKPAAKKPAEEEPAAEKAEKALAGKKPKAEKRLPAGKAEKSSGEGKKAGRKKAKKSVETYKIYIFKVLKQVXHPDIGISSKAMSIMNSFINDIFEKLAGESAKLARYNKKPTITSREIQTSVRLVLPGELAKHAVSEGTKAVTKFTSA

SEQ ID NO: 152939 - protein, 239 aa, Oryza sativa
  Clone ID: PAT_MRT4530_52940C.1.pep
MPGAIRDLINPVSSAASASKEDTVNNVFFLEKDLFPGSKMTLHFTRATAGAALLPRGRADSVPFASEKLPEILSQLSVPAGSPAADAMRSTLAECEAAPQAGEAKRCATSLESMVEFAASSLGTRDVHAVSTEVDRAGPTPRQAYRVEAVRPVPVSGGDMVACHGMAYAYAVFGCHTTTAAAYTVTLAGADGTKAEALAACHTDAAPRVAEAYKRLGVAPGSVPVCHFLPQDDMLWVRN

SEQ ID NO: 152940 - protein, 500 aa, Oryza sativa
  Clone ID: PAT_MRT4530_52941C.1.pep
MYWKIALPTSPMPGAIRDLISPASSAASASKDKEDTVGSVFFLEKDLFPGSKMTLHFTRATAGAALLPRGRADSVPFASEKLPEILSQLSIPAGSPTADAMRSTLAVCEAARIASETAPKHKHYCATSLESMVELVASSLGTRDVHAVSTEVVNRAGPTPRQAYRVEAVRPVPVPGGDMVACHRMPYAYAVFGVHGIKGAAYTVTLAGADGTMAEAVAACHGDVDGHGVAVAEAYKRLGVAPGKVAVCHFLPQDDMLWGGDPGAAYLQPLPLSIPPSVADDLHPASAATGLHPVLSRRRSPSRFSRRHRSPSRSPSQPVAGARHLSFLASDSPVAGEGKVEGNSPDTKKQERHRRVGLAKVKLKELILLKEFGRGHRRPRDYKELFNHRHAILRNHVERALGVLKKRFPILKVGTFHRIKNQVRIPAAAAVFHNMIRLLNGDEGWLDNQPDNIEPTNFVDLPEGDSEYRNDVPSLSNQMISGNNIRDMIAKKMWEDYVRN

SEQ ID NO: 152941 - protein, 277 aa, Oryza sativa
  unsure (1)..(277): unsure at all Xaa locations
  Clone ID: PAT_MRT4530_52942C.1.pep
RCRHSLLSRSSSFPSALQVAAAGDSHAASPAEMYWKIALPTSPMPGAIRDLINPASSAGSASKEDTVGNVFFLEKDLFPGSKLTLHFTRATAGAALLPRGRADSVPLATEKLPEILSQLSVPAGSPAADAMXCEAAPLAGEAKQCATSLESMVEFAASSLGTRDVHAVSTEVDRAGPAPRQAYRVEAVRPVPVSGGDMVACHGMAYAYAVFGCHTTTAAAYTVALSGADGTRAEALAACHADAAPGVAEAYKRLGVAPGSVPVCHFLPQDDMLWVRN

SEQ ID NO: 152942 - protein, 132 aa, Oryza sativa
  unsure (1)..(132): unsure at all Xaa locations
  Clone ID: PAT_MRT4530_52943C.1.pep
FRPISFTSLCKNHNRLRVLISIMFRRLVVDAFIYHKYCKSCMCLXALILQRDVSMVELVTINKAMPGDIPDYLVGTCIFAXKKRCILRLYKILPTEHAFKAQGSCTRDNKKTTKEQCRITSTFIPRSLVVKI

SEQ ID NO: 152943 - protein, 53 aa, Oryza sativa
  Clone ID: PAT_MRT4530_52944C.1.pep
SIYSKSQLFSELVPLSFQVNKPTIPLGAGAGAALVSAFATMTAVASPQSFGRR

SEQ ID NO: 152944 - protein, 524 aa, Oryza sativa
  Clone ID: PAT_MRT4530_52945C.1.pep
MTIPFPFGLQEECSANRKFLLNCTSKQAFIGGSYTQYQVTNISLDQGLLFVNFSQHEEAYSELVEISRDNISQWVESWIDEFNDFDVSQHYGIWKWFVTNMTCEKAKKSSAYACISTNDIDECSIPNDCKGMCHNQAGGYSCTRCPHGTSFDPAERKCTSTKQHNIVLGISHFNRSLFNKITVKWKRGIQKKIRRDYFHKNKGLLLEQLISCDDSVAHKTKIFSLDELEKATNNFDSTRILGSGGHGTVYKGILSDQRVVAIKKSKIVEQSEIDQFVNEVAMLSQIIHRNVVKLFGCCLESEVPLLVYEFISNGTLYDLLHGNLQSKCVLTWWNRIRIALEAASALAYLHCAASVPIFHRDVKSANILLDDNFTTKVSDFGASRSVSIDETHVVTIVQGTFGYLDPEYYHTGQLNEKSDVYSFGVILIELITRKRPIFLNSIGEKQNLCHHFLQRQQNNTTSEIVDVQVLEEADQWEIDEIASLAEICLRLRGEQRPKMKEVELRLQLLRSKVAKKKNRVESIG

SEQ ID NO: 152945 - protein, 422 aa, Oryza sativa
  Clone ID: PAT_MRT4530_52946C.1.pep
MDEPPQLFLCPISMELMEDPVTVSTGVTYDRRSIEEWLFVYGRTTCPATMQPLSNFDLTPNHTLKRVISSWLDRGSSSSSSSSPSTSTLSSPIHELATPLSRALEQERLLAALAELEETPFKVTKLKSMRARMAGDVAMQGEFVASGGVRVVGRVMAQALAESGGDFSAFAACEEAAAVLAALPLSDEASVRVVLAPECIRPVMALLQRGGAEARLHAMDILTKISSSGSGGDWTAGVDIDDVIKSLLELLSDEASTRLSSRALDVLLDVVERARGARAKAVEVGAVHVLVELLADADDRRVTERVLLLLKRLCKCPEGRLAFAEHDLSVAAVARTMLRVSELSTQLAVKVLWLVSVVAPSEKVLEDMMLTGAVAKLLGLLHVESSPSTKQKTVRMVRIHGVVWRQYACFPTDFRDYLRLLD

SEQ ID NO: 152946 - protein, 43 aa, Oryza sativa
  Clone ID: PAT_MRT4530_52947C.1.pep
SATTSRGARFSRRQQLQRGASLSSSNQSTLASANHVDSVYDNQ

SEQ ID NO: 152947 - protein, 238 aa, Oryza sativa
  unsure (1)..(238): unsure at all Xaa locations
  Clone ID: PAT_MRT4530_52948C.1.pep
PGSNKELIWQEKVQFSQVPGPQLVTIWRESLFHLLDQIPDELSSQIQAIAIDGTSSTVLLLDSQGNGLMEPLLYNDDRGKEVKHLLSAIAPADHLVQSATSSLAKLLWYSQQPEFERANYFCHQADWLASLLHGGRPVSDYHNALKLGYNPHNLTYPDWLKNASWFALLPPVIAPGKAISRLSPSIANAEKFPKNYLVCAGTTDSIAAFLASGATQPGEAVTXLGSTLVLKLLSEKPV

SEQ ID NO: 152948 - protein, 39 aa, Oryza sativa
  Clone ID: PAT_MRT4530_52949C.1.pep
GFGKKKGVFPLRITIFPFEEEMPAIMTSFKKFSNPFMVQ

SEQ ID NO: 152949 - protein, 154 aa, Oryza sativa
  Clone ID: PAT_MRT4530_5294C.1.pep
MAEEQRWQEGCHRLCANNCGFFGSPATLDLCSKCYRDRQGRESTAPVVVAAAASACPATHPSSPSSSSCPAFLPSSTAAEAGVVVAAVAKASRCASCRKRVGLTGFACRCGGTFCGAHRYPERHACGFDFKAAGRDAIARANPLIKGDKLKDKI

SEQ ID NO: 152950 - protein, 663 aa, Oryza sativa
  Clone ID: PAT_MRT4530_52950C.1.pep
MPPPAEEFAVDDLDEFESRLDSFLNRFHADDLRRILLPFPDGKLHFPLVIDFAELLEFDPEVAHQLYDYPKDVLELFDAAAQRALDKFDAAARRADKTLDSQRKAGDETMEKKFVHVRVNTSGSALECPEASPSIGKVRVKHRGTLLTLKGTVIRSGGVKMIEGERKYQCRKCKCRFTVHPELEAGNRITLPASCKSKSAKGCGGANFQLIEDSITCHDYQEIKIQENIQLLGVGSIPRSMPIILMDDLVDIVKAGDDVVVTGRLSAKWSPDIKDVRSNLDPMLIANFVRRTNELKSDLDIPVEIINKFEEFWAASRATPLKGRNSILKGICPQIYGLFTVKLAVALTLIGGVQHVDASGTKVRGEPHMLLVGDPGTGKSQFLKFAAKLSNRSVITTGLGSTSAGLTVTAVKDGGEWMLEAGALVLADGGLCCIDEFDSMREHDRTTIHEAMEQQTISIAKAGLVTTLNTRTTVFGATNPKGQYDPNESLSVNTTLSGPLLSRFDIVLVLLDTKNKKWDKIVSSHILAENTEEKKGKTSDPEVMWTLSMLRRYIHYVKQHFKPVLTKEAERVISSYYQRQRQSGTRNAAHARLMFRNDVTKLDAIAAILCIESSMTTSAIVDTAGNALHSNFTENPDQECILKCDSIAYLSKNIKYLTDEISN

SEQ ID NO: 152951 - protein, 70 aa, Oryza sativa
  unsure (1)..(70): unsure at all Xaa locations
  Clone ID: PAT_MRT4530_52951C.1.pep
SSRAHTNRMKHWRFNTKSYRQRAEALEGLLEFSAQLLQQERFEQLRILLXPFGTWKAYPKESAIWLSKSF

SEQ ID NO: 152952 - protein, 641 aa, Oryza sativa
  Clone ID: PAT_MRT4530_52952C.1.pep
LKPGMSALVTGGGSGIGKALCIALAQKGLFVTVVDFSEENGREAASLVQNENKKFHGDLKVPSAMFIKCDVTNAGDLSAAFGKHVDTYGGLDICINCAGIAIKTLVYDDRSDGTSTWRHAVNVNLVAVIDGTRIASQIMRSGKKPGVIINIGSAAGLYPMNFDPIYSGTKAGVVMFTRSLAPLKRHGIRVNVLCPEFVQTNMAEQLSRRIIDVTGGYIKMEDIVNGTFELIKDESKAGACLWITKRRGMEYWPTPEEQRKYMLNLPKSKRMLTQNTFSTVQTPEFYEKIVVHTLSHNFRDATRLERVRLRLPVEPHNALVKIIYAGVNASDVNFSAGRYFSGGAKETAARLPLDAGFEAVGIVASVGDSVNHIKVGSPVALMIFGAYSEFTQVPAKHLLPVPRPDPEVVAMLTSGLTASIALEKAGQMASGQVVLVTAAAGGTGQFAVQLAKLAGNKVVATCGGKCKAALLSSLGVDRVINYQNEKIKDVLKKEFPRGADIIYESVGGEMFDLCLNALAVHGRLIVIGMISQYQGEHGWKPRNYTGLCDKILAKSQTVAGFFLIQYAHLWQDHLDKLFDLYASGKLKVCMTRCIQQVSLDPKKFVGVASAPDAVEYLHSGKSVGKVVVCIDPSYSQTLAKL

SEQ ID NO: 152953 - protein, 63 aa, Oryza sativa
  unsure (1)..(63): unsure at all Xaa locations
  Clone ID: PAT_MRT4530_52953C.1.pep
NPXGXXTRGSPXAXPRSPSLTDLLMXLCKRXKEKXSYLVWNAVGCLGVSAISDLVRELHGLVC

SEQ ID NO: 152954 - protein, 327 aa, Oryza sativa
  Clone ID: PAT_MRT4530_52954C.1.pep
MTPSFPAIAICHSCFLHGQAHHQCVPLPSQALSWSSTSSISSGEVDGKLFIIDEGIFEMLREPPPPRDNGPAVGVKVKFDWSWCTLPSPPFHNVISHGVHPDQRTMVFSMTKYSMKKRTGLLATFSFDLESSRWTQHADNDDGQPPACKLSKERLFCVDTAEKHIGATLVHMGGDRSMVCLVQYLSIDNHQGDIWKEFLPQRIRYLLRITTFSPKYDKHEDLRIAKCHHIGSYQLPEIATVYDDHLKSPMAFWILSLTNKFHEQLRKQKSKGMFGLPPKVGTTEPEATTVILVRACQRAPIPISADDKAEQMTGYVSIGLLSTHNVV

SEQ ID NO: 152955 - protein, 113 aa, Oryza sativa
  Clone ID: PAT_MRT4530_52955C.1.pep
MGHGGGQAAHVAERCVLDTGAGGQSGGCGGFGPPVARSGAGSDKAHGEQAAPTTLLLATVAELAATADGWKRGVECGSAPVVGGGGGRQRKRWLHDTTVGEAEGMEAVTVRPA

SEQ ID NO: 152956 - protein, 93 aa, Oryza sativa
  unsure (1)..(93): unsure at all Xaa locations
  Clone ID: PAT_MRT4530_52956C.1.pep
LAPRSRMSRRXCTTIYPENLHDALRMRHEEDLSYQVWPNRHIDWLIPPRPPGYAFAQHEDSPDAQQACSGMDRLHFVGQLPMLEPAHLGIGKG

SEQ ID NO: 152957 - protein, 61 aa, Oryza sativa
  Clone ID: PAT_MRT4530_52957C.1.pep
MELQSYRLRTVYVILRKLLPSFHNVIFRAEYWFRCWAQLQRCDEDGELMKVACRRLETTVM

SEQ ID NO: 152958 - protein, 84 aa, Oryza sativa
  Clone ID: PAT_MRT4530_52958C.1.pep
ARFGWSACENHFRRRRLSGPPAKIYFRRRTTHFTPIYIFIGGHLASRDISASCGLWFGWPLDSSSTWSREPPDTSHNLRLASIL

SEQ ID NO: 152959 - protein, 68 aa, Oryza sativa
  Clone ID: PAT_MRT4530_52959C.1.pep
LLFNCGGSLCGLGSLLHPMFPNMRMLFMPLLRDVPFSNRKSLTLVLFSCLLYFDLLVISFSDDDSGSD

SEQ ID NO: 152960 - protein, 106 aa, Oryza sativa
  unsure (1)..(106): unsure at all Xaa locations
  Clone ID: PAT_MRT4530_5295C.1.pep
GLRRGTQRGGTCGARRWRARRHGGLLPHRCRCRPPPRHRRSPAPPPPQPQPPTAREAPPPPPPQPQLPAARGALPPPPXPPAPPQPPTNGRPPPSPSVREMEWVEK

SEQ ID NO: 152961 - protein, 132 aa, Oryza sativa
  unsure (1)..(132): unsure at all Xaa locations
  Clone ID: PAT_MRT4530_52960C.1.pep
LAAATTATARGATSGRSRRWRGRLGGGDXGEGGEVLAAATVTARGTTSGRSRRXRGGLGGGDDEGAGGQIIACGRLKRPHGKMIFPCGRLKPAACETDLSMRAIKPAVWKDHFSVRAVKPATCEKDISMRLA

SEQ ID NO: 152962 - protein, 83 aa, Oryza sativa
  Clone ID: PAT_MRT4530_52961C.1.pep
QSVLFLFLFYFNEKRYTKINLTIDTVTPQFPFAKPQFTLPVTLLLIFNRCSLALLVHKYIALQRGSSCRLEEKCLAKTSCPVS

SEQ ID NO: 152963 - protein, 46 aa, Oryza sativa
  Clone ID: PAT_MRT4530_52962C.1.pep
VKSTERCEGLRVAGKSPCYDPCGVHANLERKGGIQILHTVFDTSDH

SEQ ID NO: 152964 - protein, 45 aa, Oryza sativa
  Clone ID: PAT_MRT4530_52963C.1.pep
MEVGDDDARTCAIPRRCLQAFIAPCMEVCSGGDGETASLGKKAHS

SEQ ID NO: 152965 - protein, 46 aa, Oryza sativa
  Clone ID: PAT_MRT4530_52964C.1.pep
CVSPLTFVSSSTYPLMGSMRAAAARPLRRIRRRRRQLPASVIKPGR

SEQ ID NO: 152966 - protein, 58 aa, Oryza sativa
  Clone ID: PAT_MRT4530_52966C.1.pep
RFVQYHFIHACVIVPSCIQPGASHSTIMPCSFQPSCLHHHYHYVPLPLPPAACFAPTQ

SEQ ID NO: 152967 - protein, 382 aa, Oryza sativa
  unsure (1)..(382): unsure at all Xaa locations
  Clone ID: PAT_MRT4530_52967C.1.pep
MNKNNFSRIYLLCLGLLKIRTSFQRTHIPLISSLWLALPLCNISSRXRTERETEPTALRRVRRVASTWQRRTEASPPPSYVATLHPPSRCRSNQGRKLQLSLSTSLSSPAAKKRDIANRRRALSISNSYSFHSHLTMPNNFGFDPIPFHLLQQREHRHVMVALEHALCTAAGTSSPFPLIWTKPGQAVAPASSPRPPLYFPSRISKDGATSVEIVHRLLHLRSPSPLSDSSRQFDEWIEPLPSSRSSTPSLDHLLHRCRCPDFHAPRSRFGEHPXAHRIAYMHFIHLESSTNSTCSSXPKHSRRSDSPPVLLRCPLTEKMYKLCRVKTNXLAVLADMSGVWIYIEYRLMFILLNAEIYLXIMMRFENDLLAAMKGNEVHIYT

SEQ ID NO: 152968 - protein, 365 aa, Oryza sativa
  Clone ID: PAT_MRT4530_52968C.1.pep
PPKSALPGPSDSSRRELALASALHCRPLHSAALSALLSRQRGRPPLPSPAALPTAALTTEDEQRCGRPNGGRWAGWQRASAAAGGDRGGERRPQWRVCVGVAVTVELGSARQPPHSRLPPTTTVEEKSRKKRMRDPLIRIIQSYIMGDQMDPEQQTGRQPGNVKEIKNRSRQYRACMSLSVLASRQASIPAFLISLRPQKQAQHSHNYSSLQPEKNGARKISAALRYKPAQARRPRERRGDVKSGPFVSTCSRSFGRYTAHTRTRTRCKATKVSLLISEEEAEEDERVINPSRKQFFFDKPKQLFLSRMIEIDGWIERPVDRYRRARLLFSDSSSFFASNPIAKSGARNGLRIFGTGILMVACLH

SEQ ID NO: 152969 - protein, 136 aa, Oryza sativa
  Clone ID: PAT_MRT4530_52969C.1.pep
PAGTSLSSPAAKKRDIANRCRALFISNSYSFHSHLTMTNNFGFDPIPFHLLQQRERGHVMVALERALCTAAATSSPFPLIWTKPGQAVAPASSPRPPLHFPSRISKDGATSVEIVHHLLHLQSPSPLPNPPPPMIA

SEQ ID NO: 152970 - protein, 68 aa, Oryza sativa
  Clone ID: PAT_MRT4530_5296C.1.pep
MGWGYARGDNGYGGMLPRIGGERQKSCGGVDHIHCGLQLAARQVMAVAETARELCKAVATLDADLIRH

SEQ ID NO: 152971 - protein, 928 aa, Oryza sativa
  Clone ID: PAT_MRT4530_52970C.1.pep
MGNPTLTERVVATEGETEALGEKVAELTSSHNNILGTLRGLESWIPNVDAGMWDLNKTVEGISTRITALESQPKASPTAATPPPEGQGKVENHQGLATDASAAQEHTLVKVPFETWASFATLHFVGNATLWLQTYEELHSVEGWAELCVAVHSKFGRDKYQDHLEELESFTKTGRVDEYHKRFEELMHRVLVYNKGYDETYFVTNFVGGLKGEIKFAIKLHKPRIVDAALSLAKIQEELIAEAGKKNFYVSTRGSFKEANTAPGKIGYQGKGSSSNFLSESVIKRLNIPVEDTAVSQDRFQEPDSLPPHRAFDHAIPLQPGVKPVNLKPYRGLNEITVKNKYPMPVVEELLDELAGAKWFTKLDLRSGYHQIRLQEKDEHKTAFKTHQGHYEFRVMPFGLSNAPATFQGLMNTIFAPWIIKHVLVFVDDILIYSPTLAKHVQHLKGVLQVLAQHQLHLKLRVATDPSKVVAVQQWPPPKNLKQLRGFLGLTGYYRRFIKNYGQLARPLTDLLKKNVKYQWLQPQQIAMEALKQALINSPVLALPDFSKEFVVETDASDKGIGAVLMQEGHPIAFISKTLGVKSQALSTYEKECLAILLAIQKWRSYLQHSVFTILTDHRSLSHLSEQKLTTSLQHKAFLKLMGLQYKIKYKKGLENKAADALSRQCEEETSAISMSIPRWLEIIQEGYTKDEETHKLLAELSLLPDGQGDFKLVQGIIRHKGKIWLGNHTEAKEAVLLALHSSGVGAIQGVVKSVNKLRLSTWLSQAQFWYNTSFHSVLGKSPYEVLFARKATSFGVADLGLSTVPDIQVWLQERSQMNELLHQQLKLSFRYFGPYKILGRIGAMAYRLELPEGSLVHPVVHVSLLKKDAHVQPEVVLRHQLIKRGGATVPYGLIRWTNLPDDLATWENLRQLRQRFPQAPAWGHAGC

SEQ ID NO: 152972 - protein, 262 aa, Oryza sativa
  unsure (1)..(262): unsure at all Xaa locations
  Clone ID: PAT_MRT4530_52971C.1.pep
MNKNNFSRIYLLCLGLLKIRNIFQRTHIPLISPLWLVLTLCKSSSRXRDSREREIGAGCVRRVATTCRRHQTPILXSPPPSCISTHHSPPLSRRNRGRRLSTSPSPSSLPPAAKKTXLYSTLLTMPRIYPFNFILYRAADRRERRRAPGTPERAPSAAAADIVVVPTTXTKPSRAVAPTSSPXSLPQKPSKILGNGAASAEIGYRLLHLRSPSPLSIPPPPFDEWIEPLPSSRSSTPSPDHLLHRCRCPDFPAPRSRFGEHP

SEQ ID NO: 152973 - protein, 151 aa, Oryza sativa
  Clone ID: PAT_MRT4530_52972C.1.pep
SWRERINIDLGPHGSLFGLNHTLCISSIQHSDSSTQLHRLLPITTPEPSKPRGRAPAFLFHLDLVAGREDDGRRHHHCAAVVSSSLAFHYRLSRRRCSGARTGRRHRDIVFVAVEPEQAEPSHRTINISSVSSLKSLMNPCQWCSELGDRH

SEQ ID NO: 152974 - protein, 94 aa, Oryza sativa
  Clone ID: PAT_MRT4530_52973C.1.pep
KIDWFIRSMFIAYNYLCKTTQGLRWECQMLSLINPDDTISFLPGAYLRSFTVWNVQSQLLNKSWGTHPRPPHIIAAKLKKKILYPLTLTLKGAF

SEQ ID NO: 152975 - protein, 385 aa, Oryza sativa
  unsure (1)..(385): unsure at all Xaa locations
  Clone ID: PAT_MRT4530_52974C.1.pep
MNKYNFSRIYLLCLGLLKIQTSFQRAPLPLIFESNLSIIFNFSSIQHSDSRERETEGAXGTGRRRRVASTWQCRTKASPPPSCVATLHPPSQCRSNRGRKLQLSLSTSLSSPAAKKRDIANRRRALSISNSYSFHSHLTMPNNFGFYPIPFHLLQQRERCHVMVALERALCTAAATSLPFPLIWTKPGQAVAPAFSPRPPLHFPSRIXKDGTTSAEIGYRLLHLRSPSPLSISPPPFDEWIEPLPSSRSSTPSPDHLLHRCRSPDFPASRSRFGEHPXAHRIAFMHFIHLESSTNSTSNSXPKHSRRSDSPPALLRCPLTDKMYKLCKVKTNRLAVLTVMSGVWICIEYRLVFILLNAEIYLQIVMRFENDLLAAMDGNEVDIYT

SEQ ID NO: 152976 - protein, 339 aa, Oryza sativa
  unsure (1)..(339): unsure at all Xaa locations
  Clone ID: PAT_MRT4530_52975C.1.pep
PVKSTLVNLVHTLSYEATNLEEKIILKISPKSINTPSSTHLSQSSLHTLCISSNRPETTETEREIGAGYERHVATTCRRHQTPSLAFSSSQLHRHTPLSIPKLKKPRRRAPSXLFHLNLAAGREDDDRLQRHXAAVVSSSLAFHYHLSSPIPAXLSFIPFHAVVWWELKPRRXCSGARTGRRHREIVFVAVEPEQAEPSHRIINISSGSSLKSLMNPSQWCIELGDRHRLPQFQPSSSTFDFSLSDHQPYQAGDVIXRSSPPSPSRSARGHRYLDPAKFHWTLEPPQLAPXSPLIPVTNACNNTTKSVALNPFTXYPYVARRDLPPFVAGELQDELGHG

SEQ ID NO: 152977 - protein, 381 aa, Oryza sativa
  unsure (1)..(381): unsure at all Xaa locations
  Clone ID: PAT_MRT4530_52976C.1.pep
MNKNNFSRIYLLCLGLLKIRTNFQRTYIPLISPLWLILTLCKSSSXTRDSREREIGAGCVRRVGSTWQRRTEASPPPSCVATLHPPSQCRSNRGRKLQLSLSTSLLSPAAKKRDIANHRRALSISNSYSFHSHLTMPNNFSFDPIPFHLLQQRERRHVMVALERALCTAAATSSPFPLIWTKPGQAVAPAFSPXPPLHFPSRISKDGATSAEIGYRLLHLRLPSPLSIPPPPFDDWIEPLPSSRSSTPSPDHLLHRCRCPDFPAPHSRFGEHPXSHRIAFMHFIHLESSTNSTCSSXPKHSRRSDSPPALLRCPLTEKMYKLCRVKTNRLAVLAVMSGVWISIEYRLMFILLSAEIYLQIVLRFENDLLAATEGNEVHIYT

SEQ ID NO: 152978 - protein, 53 aa, Oryza sativa
  Clone ID: PAT_MRT4530_52977C.1.pep
RPGSRSPSSTPCCPPPPRAGSSPVPASRTRRRVSNRRSQQKPPAPCRRPKQTH

SEQ ID NO: 152979 - protein, 380 aa, Oryza sativa
  unsure (1)..(380): unsure at all Xaa locations
  Clone ID: PAT_MRT4530_52978C.1.pep
MNKNNFSRIYLLCLGLLKIRTSFQRTHIPLISSLRLALPLCNFPSRPINTERERSRADRLWTPRDAWPRRVDALKTPSSISASPRRVATLHPPSQCRSNRGRKLQLSLSTSLSSPAAKKRDIANRRRALFISNSYSFHSHITMPNNFGFDPIPFHLLQQRERRHVMVALGRALCTAAATSSQFPLIWTKPGQAVAPASSPRPPLHFPLRILKDGAMSVEIVHRLLHLRSPSPLSIPHRPFLELIEPSPFTRRFLPPSSAXATPAMSSISVSTLQPIEHTCTHPINQYMIVEAHASPPENILLSNSPPALLRCPLTKKMYKLCRVKTNRLAVLAVMSGVWIYIEYRLVLILLNAEIYLQIVMRFENDLLAAMEGNEVHIYT

SEQ ID NO: 152980 - protein, 259 aa, Oryza sativa
  unsure (1)..(259): unsure at all Xaa locations
  Clone ID: PAT_MRT4530_52979C.1.pep
MTKYNFSRIYLLCLGLLKIQTSFQRTHIPLISPLWLILTLCKSSSRPXDSREREREIGAGCVRRVASTWQRRTEASPPPSCVATLHPPSQCRSNRGRKLQLSLSTSLSSPAAKKRDIANRRRALSISNSYSFHSHIAMPNNFGFDPIPFHLLQQRERRHVMVALERALCTAAVTSSPFPLIWTKPDQAVAPASSPRPPLHFPSRISKDGATSVEIVHRLLHLRSPSPLSIPPPPVXIVRFFAYTPSMSRRHQPSYPSHV

SEQ ID NO: 152981 - protein, 415 aa, Oryza sativa
  Clone ID: PAT_MRT4530_5297C.1.pep
MSTYEKECLAILLAVDRWRSYLQHSVFTIVTDHRNLTHLTEQKLVTSMQQKAFLKLMGLQYKIKYKKGLENTAADALSRQVEEDQHSMSISVPRWMEIIQEGYEKDEATKQLLTQLSVHSDKQGDFQLMQGIIRHNGKIWLGQHEEAKQAVLLALHSSGVGGHSGITATYNRVKTLFSWSRLKNYVQTYVQGCEVCQKAKSEHCKLSGLLQTLPVPLQAWSTVSLDFIEGLPKSGKFDTILAVVDKFTKFAKFIALSHPFTALTVAQAFIQNVYEMFGMPRVIISDRDRMFTSALWQELFRLADAQYWYNTSNHSTLAKRSCQKLSFRYFGPYRVLERVGAVAYRLELPPGSLIHLVVHVSLLKKMVKPGTQEQNVQPEAVLRRQLIKRGGAAVPYGLIRWSGLPEELATWENLR

SEQ ID NO: 152982 - protein, 90 aa, Oryza sativa
  Clone ID: PAT_MRT4530_52980C.1.pep
MGRHRGNESGFGDGDGSGWTRPPLASYTPMRTRMRSTVTTRDDATTKTTATTRMAQRQLLGGGEDGAPLVAEDGLMRRREKTPVPHSFGG

SEQ ID NO: 152983 - protein, 993 aa, Oryza sativa
  unsure (1)..(993): unsure at all Xaa locations
  Clone ID: PAT_MRT4530_52981C.1.pep
MVASYNGFLMGKLRLMLLLLQLRMPQEPEGEAAAAGAGSFLRLPESAGAFDELPRARIVGVSRPDAGDITPMLLSYTVEVQYKQVKEWLQNLGIGEHIPVVHDDDEADDVHVPSQHDEHSVKNRNVPSSAVLPVIRPALGRQQSVSDRAKVAMQEYLNHFLGNMEIVNSREVWAVLKPGFLALLQDPFDPKLLDIVIFDVSPHMDRNGEGQSTLAREIKEHNPLHFAFEIFITDWWLCPELYLRRPFHHHESSRLDILLESRAKQGVQYLFVCNRFGSIKCLTGSCLHEMIIDKCMKFNFADIGCMHFKIYILLYKEVSLALKINSMYSKQRLLNIHENVKVLRYPDHFSTGIYLWSHHEKIVIVDNQVCYIGGLDLCFGRYDTPEHKVVDVPPSIWPGKDYYNPRESEPNSWEDTMKDELDRTKYPRMPWHDVQCALYGPACRDIARHFVQRWNYAKRNKAPNEQAIPLLMPQHHMVIPHYMGKIKESNEEVSKQTHVEDIKGQKLSSLKAPASCQDIPLLLPHEPDHQASNNGELGLNGLDNNHGHSDHPNKTHWKQPIPNRKAKQDTSLQDLQMKGFVDNLGTPDVSSVIGHYVFMMWMVPKPMIISPFMGSGDTAVEVVLDIGEVGPRATCCCQVVRSVGPWSAGTTQIEGSIHNAYFSLIEKAEHFVYIENQFFISGLSGDDTIKNRVLEALYRRILRAEKEKRCFRVIIVIPLLPGFQGGIDDGGAASVRAIMHWQYRTICRGPNSILKNLYDVVGSKAHDYISFYGLRAHGRLGDGGPLVTNQIYVHSKLMIIDDRMTLIGSANINDRSLLGSRDSEIGMIIEDKEVVSSIMDGRHWQAGXVTSYRRTLSLCXQLGLHSVLVSLIMDTVDDLTSYMIWMCTANSNSKIYQKVMSCVPNDHIHSRSQFRQGFAHRKEKIGHTTHYLGVAVEITETHKDGDLAGTDPMEKLQAVRGHLVSFPLEFMCQEDLRPFFGESEYYTSPQVFH

SEQ ID NO: 152984 - protein, 387 aa, Oryza sativa
  unsure (1)..(387): unsure at all Xaa locations
  Clone ID: PAT_MRT4530_52982C.1.pep
LNKYNFSRIYLLCLSLLKIQTSFQRTHIPLISPLWLVLTLCKSSSRXRDSREGEIGAGCVLRVATTCRRHQTPIXTSPPPSCISTHHSPPLSRRNRGRRLSTSPSPSSLPPAAKKNNYRTSQXARVIPISFTFHTLLTMPRIYPFNFILYRAADRRERRRAHGTPERAPSAAAADIVVVPTTVDSXTKPSRAVAPTSSPXSLTLKPSKILGNGAASAEIGYRLLHLRSPSPLSIPPPPFDEWIEPLPSSRSSAPSPDHILHRCRCPDFPAPRSRFGEHPXAHRIAFMHFIHLESSTNSACSSXPKHSRRSDSPPALLRCPLTEKMYKLCRVKTNXLAVLTVKSGVWIYIEYRLVFILLNAEIYFQIVMRFENDLLAAMDGNEVNIYT

SEQ ID NO: 152985 - protein, 63 aa, Oryza sativa
  Clone ID: PAT_MRT4530_52983C.1.pep
SARVNRLLITTIQQHASACPVPSIPLCFACFLFCSLEQSGGAFPVAMNINLYLSIPSLQKAHS

SEQ ID NO: 152986 - protein, 97 aa, Oryza sativa
  Clone ID: PAT_MRT4530_52984C.1.pep
FRRCCLLFLSSEEDLNHQPQPLEMGRRHTGTAGPLGLIAFGFTACLMMLSFLYPGAASGYMIPLAFIFGGIVLIICGIIELYREDVFHGTVFGCYGC

SEQ ID NO: 152987 - protein, 193 aa, Oryza sativa
  Clone ID: PAT_MRT4530_52985C.1.pep
PKQIIIFRDGVSESQFSQVLNVELNQIIKAYQYMDQGPIPKFTVIIAQKNHHTKLFQENTPDNVPPGTVVDSGIVHPRQYDFYMYAHAGPIGTSRPTHYHVLLDEIGFLPDDVQKLVLSLSYVYQRSTTAISVVAPICYAHLAAAQMGQFMKFEEFAELRLEVVVSFVIRSSGPELPRLHADVCSSMSLLRWW

SEQ ID NO: 152988 - protein, 39 aa, Oryza sativa
  Clone ID: PAT_MRT4530_52986C.1.pep
ILNGAFFFFFYYGKILKKFHLFKSINNTTNILGSFAIAK

SEQ ID NO: 152989 - protein, 62 aa, Oryza sativa
  Clone ID: PAT_MRT4530_52987C.1.pep
KKKKSNNIKKKENKKKINKKKKKKKIKKKKKKKKKKKKPKKKKNQKQKKKKKKKKKKKKKKK

SEQ ID NO: 152990 - protein, 88 aa, Oryza sativa
  unsure (1)..(88): unsure at all Xaa locations
  Clone ID: PAT_MRT4530_52988C.1.pep
RLVELVKFVLHQPAHKFGFDSGKVDPHMTVASAMHESGADLSAFLSIRTCSSGCACSHXEHGHYSARWLCCSRFLYRRYRLTTIIGVK

SEQ ID NO: 152991 - protein, 62 aa, Oryza sativa
  Clone ID: PAT_MRT4530_52989C.1.pep
ELGIKTGSYTDYQMIQASASAIVQFVVYPELASCKKSFLLSKINSFELSILTKIKKHIELHF

SEQ ID NO: 152992 - protein, 128 aa, Oryza sativa
  Clone ID: PAT_MRT4530_5298C.1.pep
MAERPMQSHNSSWLPKHCRACTPATTGDHAPALIAVRCHNSTYATVNFRPSHRRHRRLHTSTLTNTAAKAEESRRADMRTAYCRRAKEVVAGGWPMGPPPSHGCRMLSLLLLFESFYSVCEVSRGIER

SEQ ID NO: 152993 - protein, 93 aa, Oryza sativa
  Clone ID: PAT_MRT4530_52990C.1.pep
MAVPRSEDGEAGGEALFGVGRLTSIVSIDGLVLSAVVWRLPSPRSGQPSATAVFASFGAVVTEYLRSCRTAASSFLPSAQAPASSGPLPVAAA

SEQ ID NO: 152994 - protein, 248 aa, Oryza sativa
  unsure (1)..(248): unsure at all Xaa locations
  Clone ID: PAT_MRT4530_52991C.1.pep
MVMDKSSLPPPPPPPAXPLPPPPPLPPSKPXTSHPTRSPSRPPXSSLASMKASQSPPPPPPHPRRPSPPPLPPPPAPPSSAPAAVDHPPPQPPXTTSTSPTSGTSSRSSPAPPATSSRLRLSRRPPPPPSPXLPPQPPPPTIMAPPPPPPPSAIPXPPPPXRPPPLAPPRPPPILQPAPPALSPLPPLPAVCMTAESPISAYMRRLRGMPSPIHVPTSPLGFGCLPSPRTPPSPGVPMPATSPRVRDP

SEQ ID NO: 152995 - protein, 158 aa, Oryza sativa
  Clone ID: PAT_MRT4530_52992C.1.pep
IHSEVKSSVTAVSESACHVSKSTKGQVPGSSKLGQLATRRNLETEVLQSQQVSSPAQSKTGSSVHEDGGNCCNKPMKNEMLDVKLKLKQVELDVLKLRSKQAQINNVKQGFLSSGPHANLDEDADSRTVLVTNVHFAATKEALSGHFMKCGTVLKINI

SEQ ID NO: 152996 - protein, 214 aa, Oryza sativa
  Clone ID: PAT_MRT4530_52993C.1.pep
METPPHADTGSTHEQGEKRQVEYLVRFGGLAVVRRGGEGSDPCWPLTVYLWVCSLRLKRAPICQVKGGREAAHQTALLLCSPTPTHGHELPRAGSASPPPPFSFAVWPPTRRTRDAVVRRLVAVLSGDTTTALRKRYRYGAVPAADAERAARAVEAQAFDAASASSSSSSSVEDGIETLQLYSREVSNRLLAFVRSRSSAAGAPPASAAAGEVA

SEQ ID NO: 152997 - protein, 215 aa, Oryza sativa
  Clone ID: PAT_MRT4530_52994C.1.pep
TRGTADYRYFPEPDLPEVVLTSEYIDEIQNSMPELPEAKRRRFENMGLSMQDVLFLANDDNVARFFDSTLEHGADAKLAANWIMGDIAAYLKNEKLSIDEIKLTPLELSELIASIKNGTTGGDVGKEILIELIAKGGTVKSVIEEKDLVQIADPAAIEAMVDQVLADNPKQLEQYRSGKTKLQGFFAGQVMKASKGKANPVLLNKILGEKLKANS

SEQ ID NO: 152998 - protein, 374 aa, Oryza sativa
  unsure (1)..(374): unsure at all Xaa locations
  Clone ID: PAT_MRT4530_52995C.1.pep
MNKYNFSRIYLLCLGPLKIQTNFQRAPLLLISHLWLAXTLCISSNXQRAETEREIGAGCERYVATTCRRHQTXSXPSPHPSCIATPHYPFLTRRNREGELHLXLSISTSPPTVKTXDRLQRHYAAVVSSSLASHYHLSXADSIPLSFTPFHAVVWWERKXAGDALEHAPGAAVAASSSLPSIXTEPERATTPPASPRPPLHLPPRNPSNGAAILEIDIVFSNSVQLLPSSNPFSLVSISQIPFMQSFAVAVALQTTPALSSISVSTLQPIEHTCMHPINQYMIVEAHAPPPENILYSDSPLALLRCPLTKKMYKLCRVKINRLAVLMVMSGMWICIEYRLVFILLNAEIXLENVMRFENDLLGAMDGNEVYIYT

SEQ ID NO: 152999 - protein, 77 aa, Oryza sativa
  Clone ID: PAT_MRT4530_52996C.1.pep
MSQIEETEETSEVDLDDLQMDETEDPFAEELDNLVLNIITRKCNSSVAQLNREQFAENKDSRYKKRQQFEESSPHKN

SEQ ID NO: 153000 - protein, 370 aa, Oryza sativa
  unsure (1)..(370): unsure at all Xaa locations
  Clone ID: PAT_MRT4530_52997C.1.pep
MNKYNFSRIYPLCLGLLKLQTKFYRAHIPLFSPLGLVHSLSISSNXQRQPKEKEIGAGWVRRVCTTCRRLKTPSSFSTPLPYXVTTLHPPFQCRSNQGRKLQLSLSTSLSSPAAKKRDIANRRRALSISNSYSFHSHLTMPNNFGFDTIPFHLLQQWESRHVMVALERALCTAAATSSSFPLIWTKPGQAVAPASSPQPPLHFPXRTSKDGATSVEIVHHLLHLRSPSPLPNPPPLIIXLIGXSELGADIFQFQGKSHLPLFDHFEPMFWRLLKMFANLACRLQTPTTCIITLTPHISISLSPNLSKVYKLCRVKTNRLAVLAIMSGVWICIEYRLVITLLNAEIYLQIVMRFENDLLTAMDGNEVHIYT

SEQ ID NO: 153001 - protein, 318 aa, Oryza sativa
  Clone ID: PAT_MRT4530_52998C.1.pep
SRLMATATMSLRRCAERAPELRCARQRSRRLAAPERMKSKGEIFGMVRRVWNAREEETTAAHQRLRPLSSSWPAMENQWRRAARMLSLGWIGTGMTELIVEPEKFTPQSCLKLQTINKEEKLAKQDLPDIHANGSGTSSTGGDLTDNKRQHQIMGINNLCTMGGKPPFFYVVMTGRMTSSRYLAGACCHGIVNVVESCPTEEVSSESSETSPSLPRLHQPNTSLGDGDCRTALGAMVLPSSESPCQSSDRHHPVESLINPSTPPRCSRLMRRSDEGGRSLYEGYITNTGARTDEAADALPAPRYISTIFTNIHRAWRT

SEQ ID NO: 153002 - protein, 107 aa, Oryza sativa
  unsure (1)..(107): unsure at all Xaa locations
  Clone ID: PAT_MRT4530_52999C.1.pep
FSTVATPFFQLPVFXIKNCPVMQHQCCPQLRMIAQQFPCQALNSVQAIVQQLRLQQFARVFFDQSQAQAPALLALNNPSICGIYPSFNPAPCSIPPAGGIWDLIVPV

SEQ ID NO: 153003 - protein, 205 aa, Oryza sativa
  unsure (1)..(205): unsure at all Xaa locations
  Clone ID: PAT_MRT4530_5299C.1.pep
MNLILCVFEELSFQKNEIFCXVKLKIMKNNILFCLGIVRDISFLVNYLGFPIHXRKLTNKNWKLLRERIEKSLSSWKGKHMYVGRRLXLFNFVLISLIMFMIXLFDILRGVLQKIHYYRSIFFWQRINXEKKYRLTRXDVICQPKEXGGLGFYNIDIQNQCLLSKWLFKLKYEDGVXREMPRRKYLNNKSISQVVKKTSDPHFYS

SEQ ID NO: 153004 - protein, 33 aa, Oryza sativa
  unsure (1)..(33): unsure at all Xaa locations
  Clone ID: PAT_MRT4530_529C.1.pep
MKXKWITGRNSSKSSGHGSAQRNXVKNLEAXTN

SEQ ID NO: 153005 - protein, 1349 aa, Oryza sativa
  unsure (1)..(1349): unsure at all Xaa locations
  Clone ID: PAT_MRT4530_52C.1.pep
MPKSTGQIYPQLFTKAGLAASGIEVVDAAAPADAADGEHGLVHDARTGGAEDVGRRLQQHLHLQLAVAVDSNQREGGETPSAATIGGPAATSSLVWCFMQELVDSDPRTSVPQYPLYPVYGYSPSSVVHQVGGLDAQGYTTMTSSLVDDGVNSSFNQGASTSTMLVWTQVGEIVFPIYTTMPISTGPVITGSENNVVMTLVDSMSKDPPAEAENRTSATSTPEKYSNAASSCLSDKKHEPTRTTSEATRTWCPIHKTKRNDLQACSIFLDVQAEIRSCKERGIQRTSPTRDVHCPIHKTRTHDLSSCKVFLNAIKTSPPTVQQPQISPRDADKERGATTISDRFVGVIDIDPHEPSVLHLLEGEASSSTSTPRDVYTIGGTSTSAGGNTEAEDQLATPAQHIRIINAILMETPYDPVLNADLDQWTERLRESVANLSNTFKEAAARACFIFKKALTKQLALEKGKQVRVVEKATEAATQDSDSAYPDSDLHVSHIFGGSTAYSSKREYKKVEREICSTWQGAASKMKWSEQKIEFSEADHPKTAVTPGRYPIVVEPTIRNIKSSSKPLGKITLPVTFGQANNFRTVQITFDVTEFDTIYNAIIGRTALAKFMAASHYAYQVLKMPGSKGTITIQGNAKIAVQCDKRSLNMVEHTLNPPTTVEPPKKPSDMPGVPREVIEHKLMVRPDAKLVKQKLRRFAPDRKQAIREELNKLLKASFIRKVLHPEWLANPVMVRKANEKWRIYHQISMAKEDEEKTTFVMPFGVFCYVKMPFALIIAGNTFQRTVQGALNNQLGNNVEAYVDDIVVKTKTSDSLIDDLREMFDDLRQYRLMLNPEKCTFGVPSGKLIGFLVSGRGIEANPEKIKAIENMKSPIKLKEVQKLTGCMAALSRLVTRMGERGQPFFALLKKQDKFVWTQEAEDAFIALKPYLSNLPVLVPPQPNEELFLYIAATPYSIQKLLYAVIMTSRKLRHYFQAHRVTVVSSFPLREVMRNTDVVARIAKWVVELSQFDVYFVPRTTIKSQVLADFVADWTMLDNRSHNQTDNETWTMAFDGALNSQGAGAGFILTSPSGDQFKHAIHLNFRATNNTAEYEGLLARIRAAAALGVKRLIVKGDFELVANQDNIKPDDLARRASKREPLEPGTFLDVLTKPSVKEANDEDSTVTPDISSGATEAEYVVADIETTDGWWTPLIMFLSSDELPDDDAEAEKITRXSNDLYKKAPNGVLLKCISSDDGKHLLLDIHKGICGSHAAGARHTWTIPTRTGQLHVPIXVAINKFTKWIEATPTGEIKADNAIKFIKGIFCRYGLSHRIITDNGSQLISADFQDYFVGLGVKICFASVSHHQSNG

SEQ ID NO: 153006 - protein, 176 aa, Oryza sativa
  unsure (1)..(176): unsure at all Xaa locations
  Clone ID: PAT_MRT4530_53000C.1.pep
SNRGRKLQLSLSTSLSSPAAKGRDIANRYRALFISNSYSFHSHLTMTNNFGFDPIPFHLLQQREHRHVMVALERALRTAAATSSPLPSIXIKPERATTPPASPQPPLHFPSRIFKNGATSVEIVHRLLHLRSPSPLSIPPPPFLELIEPSPFTRRFLPPPSRYTSRRHQPSYPSHV

SEQ ID NO: 153007 - protein, 160 aa, Oryza sativa
  Clone ID: PAT_MRT4530_53001C.1.pep
YPINFEFDFGPVIEFLNMRLNNAGDPFMECNYGIHSKKFEIAVLDWFARLWELPKDQYWGYVTSGGTEGNMHGLLVGRELFPEGIIYTSCDSHYSIFKAAKMYRVQCIKIDTLFSGTTMKGAVDDLDEVVMILENCGFANRFYIHCDSALVGLMMPFIKQ

SEQ ID NO: 153008 - protein, 187 aa, Oryza sativa
  Clone ID: PAT_MRT4530_53002C.1.pep
MIFVSKGSTVSERSIYKKIPEVSKNQPADLASYVSGRVLTEMVDMAGVARFMTVARVTARRRQEPPGERRWLNQLQELSCMCVHEVREAPEMLLMHGIGLVLTGGGGFGNGDGDRRWRRRWTISTLVAPSFEILEGKWRGGRGEDAGATAWPGLVQISGNGDDVAAAVHRARSRATMTWRRSRCCRR

SEQ ID NO: 153009 - protein, 290 aa, Oryza sativa
  Clone ID: PAT_MRT4530_53003C.1.pep
MKMEALILRMQAVITSFTSCRRSKPMQLNPKAKTRRNKTKVKRVAMRRDCIELTAERERETEGADRHWTASTRGLDVAAPNRGFTSTQLHRLLPITTPEPSKPRGRAPAFLFHLDLVAGREDDGRRHHHCAAVVSSSLAFHYRLSTPIPSLLSFIPFHAVVWWERKPRRRCSGARTGRRHRDIVFVAVEPEQAEPSHRTINISSVSSLKSLMNPCQWCSELGDRHRLPQFRPSSSTFDFSLSDHQPYQAGVVIERGSLPSPSRSARGHRYLDLAKFHWTLDDCLNGEEVI

SEQ ID NO: 153010 - protein, 51 aa, Oryza sativa
  Clone ID: PAT_MRT4530_53004C.1.pep
KKWSSSSTSTPSFTAALSYMMGYKHIAQEVYALCVHKYMGFFVYPPPAPSI

SEQ ID NO: 153011 - protein, 377 aa, Oryza sativa
  unsure (1)..(377): unsure at all Xaa locations
  Clone ID: PAT_MRT4530_53005C.1.pep
MNKNNFSRIYLLCLSLLKIRTSFQRTHIPLISSLRLALPLCNFPSRPRNTERERSNADWLWTPRDAWPRRVDALKTPSSISASPRRVATLHPPFQCQSIRGRASSLLFSTGSPSPAVKKTMAAIVDXAAVVSPSLAFHTLLTMPNISPFDFILSGAANRRERCRAHXALERAQRTAAATSSPLPSIXIKPERATTPPASPQPPLHLPSRNPSNGAAILEVDIVFSNSVQPLPSSIPFSLVSVSQIPCMHGLSRXPLTSCMHRIGDSPXQIEHIEHTCMHPINQYMIVEAHASPPENILFSDSPLALLRCPLTKKMYRLCRVKTNRLAMLAVKSDVWICIEYRLVFILQNAEIYLQIVMRFENDLLATMEGNEVHIYT

SEQ ID NO: 153012 - protein, 387 aa, Oryza sativa
  unsure (1)..(387): unsure at all Xaa locations
  Clone ID: PAT_MRT4530_53006C.1.pep
MNKNNFSRIYLLCLGLLKIRTSFQRTHIPLISSLWLALPLCNFPSXPRNTERERSSADRLWTPRDAWLRRVDTLKTTSSISASPRRVATLHPPFQCRSIRGRASSLLFSTGSPSPAAKKTMAAIVDXAAVVSSSLAFHTLLTMPNISPFDFILSGAANRRKRCSAHXALERALCTAAVTSSPFPLICTKPGQAVAPASSPRPPLHFPSRISKDGATSVEIVHRLLHLRSPSPLPNPPPPFLELIEPSPFTRRFLPPPSRYTSRRHQPSYPSHVXISVSTLQPIEHTCMHPINQYMIVEAHASPPENILLSDSPPALLRCPLTEKMYKLCRVKTNRLAVLAVMSGVWICIEYRLVFILLNAEIXLQIVMRFENDLLAAMEGNEVHIYT

SEQ ID NO: 153013 - protein, 373 aa, Oryza sativa
  Clone ID: PAT_MRT4530_53007C.1.pep
MNKNNFSRIYLLCLGLLKIRTSFQRTHIPLISPLWLVLTLCKSSSRTKDSREREIGAGCVRRVASTWQRRTEASPPPSCVAILHPPSQCRSNRGRKLQLSLSTSLSSPAAKKRDIANRRRALFISNSYSFHSHLTMTNNFGFDPIPFHLLQQRERRHVMVALERALCTAAATSSPFPLIWTKPGQAVAPASSPRPPLHFPSRISKDGATSVEIVHRLLHLRSPSPLPNPPPPFLELIEPSPFTRRFLPPPSRYTSHRHKPSYPSHVYHLEHTCMHPINQYMIVEAHASPPENILLSDSPPALLRCPLTEKMYKLCRVKTNRLAVLAVMSGVWICIEYRLVFILLNAEIYLQIVMRFENDLLAAMDGNEVNIYT

SEQ ID NO: 153014 - protein, 108 aa, Oryza sativa
  Clone ID: PAT_MRT4530_53008C.1.pep
MEVAVREIATYWFENQRASRIISRTPMEGCRRQMLMAAAQHVSRRPLRQHAVEASAAVPVAAHKTVDRGGREQAAAVAAAHDPAKQEMAGAALLGRLGWRSRRHVSHG

SEQ ID NO: 153015 - protein, 82 aa, Oryza sativa
  unsure (1)..(82): unsure at all Xaa locations
  Clone ID: PAT_MRT4530_53009C.1.pep
SPRVEXISPLQKMDVPIPTSLVTLVESWNLRCRVIAEYFVSIWGVPSLLYLFAKTLLTRSVSCAARGYPFVMFRVALERDLM

SEQ ID NO: 153016 - protein, 103 aa, Oryza sativa
  Clone ID: PAT_MRT4530_5300C.1.pep
EVGIFRNTFNRHLEHILSVPRRMSLTLPCSYSIPQAPEYCGVDADDLYIAGNAFFDMENVENLYLMTFADDADCWPSPISLLFLSMTILKRCSHHMKQKRTQN

SEQ ID NO: 153017 - protein, 233 aa, Oryza sativa
  Clone ID: PAT_MRT4530_53010C.1.pep
MAGGGDELKLLGMWASPFALRAKLALSFKGLSYEYVEEDLKNKSELLLTSNPVHKKVPVLIHNGKPVCESQVIVQYIDEAFPDAGVPLLPSDPYDRAVARFWAAYIDDKLLKSWLQASMCKTEQEKAAAMKETFAAVANLEAAFKECSKGKPFFGGDAVGYVDVTLGAVIGFVRVGEAVHGMRLFDASRSPLLDAWLDRFAALDAAKAVLPDTGRLAEYAKMKQAEWAAAATN

SEQ ID NO: 153018 - protein, 94 aa, Oryza sativa
  Clone ID: PAT_MRT4530_53011C.1.pep
KALKDEYMKRIVEAFETRTASSIKTKSDPVREEIASQLKTVIDDGNAEGSDEHFFATQLLIEKRYRDVFATLKTKEGRVSWLRRAYEMIDRSNK

SEQ ID NO: 153019 - protein, 137 aa, Oryza sativa
  unsure (1)..(137): unsure at all Xaa locations
  Clone ID: PAT_MRT4530_53012C.1.pep
FHLWVXEASSASRXXRIGPARPGPRAPRPRGWARDRSPPLRTPDSPRDQSSRSRRRCSERPSPARSRASRGRRRRPRLRRPPWPLRGPPMAPRLKSPRMWPTKLRRPVPRMSCKGDSVFASVVSPTYFLVSFFSLLS

SEQ ID NO: 153020 - protein, 30 aa, Oryza sativa
  Clone ID: PAT_MRT4530_53013C.1.pep
MSHRKFEHPRHGSLSFLPRKRCSRHRGEGK

SEQ ID NO: 153021 - protein, 48 aa, Oryza sativa
  Clone ID: PAT_MRT4530_53014C.1.pep
MGKEESHKVCFPVQPLSTAQGLTDLSGGPEESKARSNGEIEGARGAMR

SEQ ID NO: 153022 - protein, 50 aa, Oryza sativa
  Clone ID: PAT_MRT4530_53015C.1.pep
MEAHAAAQHTVSEAASDLANLRSLVFFPHCIGRSEWLLEASGPNEGLLYS

SEQ ID NO: 153023 - protein, 48 aa, Oryza sativa
  Clone ID: PAT_MRT4530_53016C.1.pep
KQTLPTYHQAFFLLWANLSNMLYIHTLCAYSRSLRFHKPLTQRIIVCT

SEQ ID NO: 153024 - protein, 459 aa, Oryza sativa
  Clone ID: PAT_MRT4530_53017C.1.pep
MKTSLCVLLCILVISEVVGVPRCAAALGINYGQVGNNLPSPAQVVSLLASLRIGKVRIYDANPQVLAAFAGTGIELIVTVPNDLVRPMAASPGEALQWVSSSVRPYFPATRVTGIAVGNEVLTDDDEALKAALVPAMRNLHAALAQLGMDGYVHVSTASSLAVLATSYPPSQGAFTAEVAPLMAQFLRFLAETNAPFWINAYPYFAYKGDPTRVSLDYALSNPYHVGAIDPYTRLQYTSMLYAQVDAVAYATSQLGYNNIPVYVSETGWPSKGDTDEVGATVENARAYNRNLLLRQAAGEGTPLRPRQRLEVYLFALFNENMKPGPTSERNYGLYQPDGRTMVYNVGLMQQSTSAASLSLAASPATKTDAKKNFAGLCFLSSLAILQCPNASSAQRKSFWHKQNGLTIVDQKPLQDQRGDAPFQGGKRKIKGSSCCQEEKLEEATLGCGRHYLGDGTEL

SEQ ID NO: 153025 - protein, 80 aa, Oryza sativa
  unsure (1)..(80): unsure at all Xaa locations
  Clone ID: PAT_MRT4530_53018C.1.pep
VATFLFLYITILTVMGVSXSGSKCATVGIQFIAWSFXGMIFALVYCTAGISGGDINPSFTFGLFLAKKLSLTQTFFYILI

SEQ ID NO: 153026 - protein, 67 aa, Oryza sativa
  Clone ID: PAT_MRT4530_53019C.1.pep
NLGMFLIIKLIGCSSLVTPFYLRKREIRKYLFLISSIVLDRLIPSQGNMVELRQSLQFFVRKGKDRK

SEQ ID NO: 153027 - protein, 226 aa, Oryza sativa
  Clone ID: PAT_MRT4530_5301C.1.pep
MAGQTVCYTGQTVPTIAGQTVPYSGQIGPPVAGLTAPLTTGQTGPWAGQTGSLGVSPEIPIDVDKKKGKSVVIGDLRPKNRINNAKAEDHKVRKEAKAPEVVVVKESQDVHVPTGDAVETMQAKEIEADAVTVNIGGLTETAGRRSDWAQRPIRPRGIKVEVNLGSLWYFKHDDLLVEDYKTLMGSNFEDVIDKRLKTLKEMKTLQDGMFRVSFSIYPKLDVEKGL

SEQ ID NO: 153028 - protein, 2002 aa, Oryza sativa
  Clone ID: PAT_MRT4530_53020C.1.pep
MAEQAKAPDLSPSVSGDDGEPNPRRRARTPPPPPRQSPKQGEALERVERFAASPIAGDGGERRDGDRRLLVYGDGSTPQGALQAAGALLRHPPVVPDPESPAQRWLDDVAKLVMTARQRLDAGGRSSATKASGAATTGSASSRRRARRAAAAVRRSAATPSSTPSTREDLRGEQDARASIERRRNDRSAAHATEGASSSRVSPRHGRGNQPSVPPVGGVGCRAFVASLRNVRWPPRFRPTIAEKYDGSVNPAEFLQVYTTGIEAAGGDDRVMANFFPMAPKGQARGWLMNLPPASVHSWEDLCQQFTMNFQGTYPRPGEEADLHAVQRRDDESLRSGGVRHNRMLEKIASKEPQTTAELFQLADRVARKEEAWTWNPSGSGVAASAAPGSAAQAGRRDRRRKKRSVRSDDEGHVLAVEGASRATRKGRPASDKKKEASVPSRERPTGKWCTVHNTSLHDLADCRAVKSLAERTRKWEEERRQERREGKSPAVPSGRRRSEAKQKAPAEDIDDGDDDLGFQEPGAAIATVDGGACAHVSRRSLKAMKRELLAATPTHEATRRARWSEVALTFDQTDHPPCVARGGQIAMVVSPTVCNVKLGRVLIDGGAALNILSPAAFDAIKAPGMMLRPSQPIIGVTPGHTWPLGHIDLPVTFGGPANFRTERVNFDVADLSLPYNAVLGRPALVKFMAAVHYAYLQMKMPGPNGPISVHGDLKVALACIEQRADRLAVVSKPEGGDERLGTSAPADPRQRIVTSDEVPEDALVSFLRANADVFAWRPADMPGVPREVIEHRLAVRPGARPVRQKVRRQAPERQAFIREEVARLLEAGFIREVIHPEWLANPVVVPKANGKLRMCIDYTDLNKACPKDPYPLPRIDQIVDSTAGCDLLCFLDAYSGYHQIRMAREDEEKTAFITPIGTYCYTTMPFGLKNAGPTFQRTTRISLGSQLGRNVEAYVDDLVVKTRNQETLLSDLAETFESLRSARIKLNPDKCVFGVPAGKLLGFLVSARGIEANPEKIRAIERMRPPSKLRDVQCVTGCMAALSRFISRLGEKALPLFKLLKRSGPFTWTEEAERALTQLKAYLSSPPVLVAPEPNEPLLLYLAATPQVVSAVLVVERDVDNPHSAHPHPVLIWPGSEQGGEAPEPNGGLRPLTTGVGPLPARQMVLGAPDPQEGPEATAGRLHLSPSDPEANPVPIRPGREQGEEAPESNGGLRPLTTRVGPLPVCPTTPGAPDPQDGPEATVGRPPLSSSDPEVIGTEDECAPKGHLDEKRPGDMALSEGDRPHRRVQRPIYFVSEALRDAKTRYPQAQKMLYAILMASRKLRHYFQAHRVTVVTSYPLGQILHNREGTGRVVKWAIELSEFDLHFEPRHAIKSQALADFVAEWTPAPETVSVSEASSDPSQLPHAAHWVMQFDGSLSLQGAGAGVTLTSPNGDVLKYLVRLDFRATNNMAEYEGLLAGLRVAAGLGIRRLLVLGDSQLVVNQVCKEYRCSDPQMDAYVRQVRRMERHYDGIELRHVPRRDNMIADELSRLASSRAQTPPGVFEERLAQPSARPDPLGETDAPDRSPRPVGAQASGPEGSAPSSLRLIAWISEIQAYLTDKTLPEDREGSERVQRISKRYVLVEGILYRRAANGILLKCIPREQGVELLADIHEGECGAHSASRTLVGKAFRQGFYWPTALNDAVDLVRRCRACQFHAKQIHQPAQALQIIPLSWPFAVWGLDILGPFRRAPGGFEYLYVTIDKFTKWPEAYPVIKIDKHSALKFIKGITARFGVPNRIITDNGTQFTSELFGDYCEDMGIKLCFASPAHPRSNGQVERANAEILKGLKTKTFNILKKHGDSWIEELPAVLWANRTTPSRATGETPFFLVYGAEAVLPSELTLRPPRATMYCEVDQDQLRRDDLDYLEERRRRAALRAARYQQSLRRYHQRHVRARSLCVDDLVLRRVQTRAGLSKLSPMWEGPYRVIGVPRPGSIRLATGDGTELPNPWNIEHLRRFYP

SEQ ID NO: 153029 - protein, 1836 aa, Oryza sativa
  Clone ID: PAT_MRT4530_53021C.1.pep
MAEQAKAPDLSPSVSGDDGEPNPRRRARTPPPPPRQSPKQGEALERVERSAASPIAGDGGERRDGDRRLLVYGDGSTPQGALQAAGALLRHPPVVPDPESPAQRWLDDVAKLVMTARRRLDAGGRSSATKASGAATTGSASSRRRARRAAAAVRRSAATPSSTPSTREDLHGEQDARASIERRRNDRSAAHATEGASSSRVSPRHGRGNQPSVPPVGGVGCRAFVASLRNVRWPPRFRPTIAEKYDGSVNPAEFLQVYTTGIEAAGGDDRVRNTIPCIPAHAVIYAFRGGVRHNRMLEKIASKEPQTTAELFQLADRVARKEEAWTWNPSGSGVAASAAPGSAAQAGRRDRRRKKRSVRSDGEGHVLAVEGASRATRKGRPASDKKKEASVPSRERPTGKWCTVHNTSLHDLADCRAVKSLAERTRKWEEERRQERREGKSPAVPSGRRRTFDAIKAPGMMLRPSQPIIGVTPGHTWPLGHIDLPVTFGGPANFRTERVNFDVADLSLPYNAVLGRPALVKFMAAVHYAYLQMKMPGPDGPISVHGDLKVALACMEQRADRLAVVSKPEGGDERLGASAPAAPRQRIVTSDEVPEDALVSFLRANADVFAWRPADMPGVPREVIEHRLAVRPGARPVRQKVRRQAPERQAFIREEVARLLEAGFIREVIHPEWLANPVVVPKANGKLRMCIDYTDLNKACPKDPYPLPRIDQIVDSTAGCDLLCFLDAYSGYHQIRMAREDEEKTAFITPIGTYCYTTMPFGLKNAGPTFQRTTRISLGSQLGRNVEAYVDDLVVKTRNQETLLSDLAETFESLRSARIKLNPDKCVFGVPAGKLLGFLVSARGIEANPEKIRAIERMRPPSKLRDVQCVTGCMAALSRFISRLGEKALPLFKLLKRFGPFTWTKEAERALTQLKAYLSSPPVLVAPEPNEPLLLYLAAPPQVVSAALVVERDEDNPHSAHPHPVLTWPGREQGEEAPEPNGGLRPLTTGVGPLPARQMVLGTPDPQEGPEATAGRLHLSPSDPEANPVPIRPGREQGEEAPEPNGGLRPLTTRVGPLPACPTTPGAPDPQNGPKATVGRPPLSSSDPEVIGTEDECAPRGHLDEERPGDMALSEGDRPHRRVQRPVYFVSEALRDAKTRYPQAQKMLYAILMASRKLRHYFQAHRVTVVTSYPLGQILHNREGTGQVVKWAIELSEFDLHFEPRHAIKSQALADFVAEWTPAPETVSVSEASSDPSQLPHAAHWVMQFDGSLSLQGAGAGVTLTSSNGDVLKYLVRLDFRATNYMAEYEGLLAGLRVAAGLGIRRLLVLGDSQLVVNQVCKEYRCSDPQMDAYVRQVRRMERHYDGIELRHVPRRDNMIADELSRLASSRAQTPPGVFEERLAQPSARPDPLGETDAPDRSPRPVGAQASGPEGSAPSSLRLIAWISEIQAYLTDKTLPEDREGSERVQRISKRYVLVEGILYRRAANGILLKCIPREQGVELLADIHEGECGAHSASRTLVGKAFRQGFYWPTALNDAVDLVRRCRACQFHAKQIHQPAQALQIIPLSWPFAVWGLDILGPFRRAPGGFEYLYVAIDKFTKWPEAYPVIKIDKHSALKFIKGITARFGVPNRIITDNGTQFTSELFGDYCEDMGIKLCFASPAHPRSNGQVEHANAEILKGLKTKTFNILKKHGDSWIEELPAVLWANRTTPSRATGETPFFLVYGAEEVLPSELTLRSPRATMYCEVDQDQLRRDDLDYLEERRRRAALRAARYQQSLRRYHQRHVRARSLCVDDLVLRRVQTRAGLSKLSPMWEGPYRVIGVPRPGSIRLATGDGTELPNPWNIEHLRRFYP

SEQ ID NO: 153030 - protein, 2014 aa, Oryza sativa
  unsure (1)..(2014): unsure at all Xaa locations
  Clone ID: PAT_MRT4530_53022C.1.pep
MDGFVAELGRMAIAVGYPHNPEYTQLRLLNGEFPHQVRLEVHDIPTVLPNMVVTATGGTFEHACQEAALRMMARMRELHDHDLRNTAYRYHPRRSSDANISTFSRRVVDKNDRFVTGLTLLMSSAHSHLPTTCPPQAEVEFFLISLMAEQAKAPDLSPSVSGDDGEPNPRRRARTPPPPPRQSPKQGEALERVERSAASPIAGDGGERRDGDRRLLVYGDGSTPQGALQAAGALLRHPPVVPDPESPAQRWLDDVAKLVMTARRRLDAGGRSSATKASGAATTGSASSRRRARRAAAAVRRSAATPSSTPSTREDLHGEQDARASIERRRNDRSAAHATEGASSSRVSPRHGRGNQPSVPPVGGVGCRAFVASLRNVRWPPRFRPTIAEKYDGSVNPAEFLQVYTTGIEAAGGDDRVRNTIPCIPAHAVIYAFRGGVRHNRMLEKIASKEPQTTAELFQLADRVARKEEAWTWNPSGSGVAASAAPGSAAQAGRRDRRRKKRSVRSDGEGHVLAVEGASRATRKGRPASDKKKEASVPSRERPTGKWCTVHNTSLHDLADCRAVKSLAERTRKWEEERRQERREGKSPAVPSGRRRSEARQKAPAEDIDDGDDDLGFQEPGATIATVDGGACAHVSRRSLKAMKRELLAAAPTHEATRRARWSEVALTFDQTDHPPSSPQHPFPAAFDAIKAPGMMLRPSQPIIGVTPGHTWPLGHIDLPVTFGGPANFRTERVNFDVADLSLPYNAVLGRPALVKFMAAVHYAYLQMKMPGPDGPISVHGDLKVALACMEQRADRLAVVSKPEGGDERLGASAPAAPRQRIVTSDEVPEDALVSFLRANADVFAWRPADMPGVPREVIEHRLAVRPGARPVRQKVRRQAPERQAFIREEVARLLEAGFIREVIHPEWLANPVVVPKANGKLRMCIDYTDLNKACPKDPYPLPRIDQIVDSTAGCDLLCFLDAYSGYHQIRMAREDEEKTAFITPIGTYCYTTMPFGLKNAGPTFQRTTRISLGSQLGRNVEAYVDDLVVKTRNQETLLSDLAETFESLRSARIKLNPDKCVFGVPAGKLLGFLVSARGIEANPEKIRAIERMRPPXNLGMCNVSPEAERALTQLKAYLSSPPVLVAPEPNEPLLLYLAAPPQVVSAALVVERDEDNPHSAHPHPVLTWPGREQGEEAPEPNGGLRPLTTGVGPLPARQMVLGTPDPQEGPEATAGRLHLSPSDPEANPVPIRPGREQGEEAPEPNGGLRPLTTRVGPLPACPTTPGAPDPQNGPKATVGRPPLSSSDPEVIGTEDECAPRGHLDEERPGDMALSEGDRPHRRVQRPVYFVSEALRDAKTRYPQAQKMLYAILMASRKLRHYFQAHRVTVVTSYPLGQILHNREGTGQVALADFVAEWTPAPETVSVSEASSDPSQLPHAAHWVMQFDGSLSLQGAGAGVTLTSSNGDVLKYLVRLDFRATNYMAEYEGLLAGLRVAAGLGIRRLLVLGDSQLVVNQVCKEYRCSDPQMDAYVRQVRRMERHYDGIELRHVPRRDNMIADELSRLASSRAQTPPGVFEERLAQPSARPDPLGETDAPDRSPRPVGAQASGPEGSAPSSLRLIAWISEIQAYLTDKTLPEDREGSERVQRISKRYVLVEGILYRRAANGILLKCIPREQGVELLADIHEGECGAHSASRTLVGKAFRQGFYWPTALNDAVDLVRRCRACQFHAKQIHQPAQALQIIPLSWPFAVWGLDILGPFRRAPGGFEYLYVAIDKFTKWPEAYPVIKIDKHSALKFIKGITARFGVPNRIITDNGTQFTSELFGDYCEDMGIKLWFASPAHPRSNGQVEHANAEILKGLKTKTFNILKKHGDSWIEELPAVLWANRTTPSRATGETPFFLVYGAEEVLPSELTLRSPRATMYCEVDQDQLRRDDLDYLEERRRRAALRAARYQQSLRRYHQRHVRARSLCVDDLVLRRVQTRAGLSKLSPMWEGPYRVIGVPRPGSIRLATGDGTELPNPWNIEHLRRFYP

SEQ ID NO: 153031 - protein, 1927 aa, Oryza sativa
  unsure (1)..(1927): unsure at all Xaa locations
  Clone ID: PAT_MRT4530_53023C.1.pep
MAEQAKAPDLSPSVSGDDGEPNPRRRARTPPPPPRQSPKQGEALERVERSAASPIAGDGGERRDGDRRLLVYGDGSTPQGALQAAGALLRHPPVVPDPESPAQRWLDDVAKLVMTARQRLDAGGRSSATKASGAATTGSASSRRRARRAAASVRRSASTPSSTPSTRVDLHGEQDARASIERRRNDRSAAHATEGASSSRVSPRHGRGSQPSVPPVGGVGCRAFVASLRNVRWPPRFRPTIAEKYDGSVNPAEFLQVYTTGIEAAGGDDRVMANFFPMALKGQARGWLMNLPPASVHSWEDLCQQFTMNFQGTYPRPGEEADLHAVQRRDDESLRSYIQRFCQVRNTIPCIPAHAVIYAFRGGVRHNRMLEKIASKEPQTTAELFQLADRVARKEEAWTWNPSGSGVAASAAPGSAAQAGRRDRRRKKRSVHSDNEGHVLAVEGASRATRKGRPASDKKKEASVPSRERPTGKWCTVHNTSLHDLADCRAVKSLAERTRKWEEERRQERREGKSPAVPSGRRRSEARQKAPAEDIDDGDDDLGFQEPGATIATVDGGACAHVSRRSLKAMKRELLAAAPTHEATRRARWSEVALTFDQTDHPPCVAWGGQIAMVVSPTICNVKLGRVLIDGGAALNILSPAAFDAIKAPGMMLRPSQPIIGVTPGHTWPLGHIDLPVTFGGPANFRTERVNFDVADLSLPYNAVLGRPALVKFMAAVHYAYLQMKMPGPDGPISVHGDLKVALACMEQRADRLAVVSKPEGGDERLGTSAPAAPRQRIVTSDEVPEDALVSFLRANADVFAWRPADMPGVPREVIEHRLAVRPGARPVRQKVRRQAPERQAFIRVEVARLLEAGFIREVIHPEWLANPVVVPKANGKLRMCIDYTDLNKACPKDPYPLPRIDQIVDSTAGCDLLCFLDAYSGYHQIRMAREDEEKTAFITPIGTYCYTTMPFGLKNAGPTFQRTTRISLGSQLGRNVEAYVDDLVVKTRNQETLLSDLAETFESLRSARIKLNPDKCVFGVPAGKLLGFLVSARGIEANPEKIRAIERMRPPSKLRDVQCVTGCMAALSRFISRLGEKALPLFKLLKRSGPFTWTEEAERALTQLKAYLSSPPVLVAPEPNEPLLLYLAATPQVVSAALVVERDEDNPHSAHPHPVLTWPGSEQGGEAPEPNGGLRPLTTGVGPLPARQMVLGAPDPQEGPEATAGRLHLSPSDSEANPVPIRPGREPGEEAPEPNGGLRPLTTRVGPLPACPTTPGAPDPQNGPEATVGRPPLSSSDPEVIGTEDECAPRGHLDEERPGDMALSEGDRPHRRVQRPVYFVSEALRDSKTRYPQAQKMLYAILMASRKLRHYFQAHRVTVVTSYPLGQILHNREGTGRVVKWAIELSEFDLHFEPRHAIKSQALADFVAEWTPAPETVSVSEASSDPSQLPHAAHWVMQFDGSLSLQGAGAGVTLTSPNGDVLKYLVRLDFRATNNMAEYEGLLAGLRVAAGLGIRRLLVLGDSQLVVNQVCKEYRCSDPQMDAYVRQVRRMERHYDGIELRHVPRRDNMIADELSRLASSRAQTPPGVFEERLAQPSARPDPLGETDAPDRSPRPVGAQASGPEGSAPSSLRLIAWISEIQVYLTDKTLPEDREGSERVQRISKRYVLVEGILYRRAANGILLKCIPREQGVELLVDIHEGECGAHSASRTLVGKAFRQGFYWPTALNDAVDLVRRCRACQFHAKQIHQPAQALQIIPLSWPFAVWGLDILGPFRRAPGRFEYLYVAIDKFTKWPEAYPVIKIXELFGDYCEDMGIKLCFASPAHPRSNXHGDSWIEELPAVVWANRTTPRRGTGGTPFFLVYGAEAVLPSELTLRSPRATMYCEVDQDQLRRDXLDYLEERRRRAALRAARYQQSLRCYHQRHVRARSLCVDDLVLRRVQTRAGL

SEQ ID NO: 153032 - protein, 1008 aa, Oryza sativa
  Clone ID: PAT_MRT4530_53024C.1.pep
RNVEAYVDDLVVKTRNQETLLSDLAETFESLRSARIKLNPDKCVFGVPAGKLLGFLVSARGIEANPEKIRAIERMRPPSKLRDVQCVTGCMAALSRFISRLGEKALPLFKLLKRSGPFTWTEEAERALAQLKAYLSSPPVLVAPEPNEPLLLYLAATPQVVSAALVVERDEDNPHSAHPHPVLTWPGSEQGGEAPEPNGGLRPLTTGVGPLPARQMVLGAPDPQEGPEATAGRLHLSPSDPEANPVPIRPGKEQGEEAPEPNGGLRPLTTRVGPLPACPTTPGAPDPQDGPEATVGRPPLSSSDPEVIGTEDECAPRGHLDEERPGDMALSEGNRPHRRVQRPVYFVSEALRDAKTRYPQAQKMLYAILMASRKLRHYFQAHRVTVVTSYPLGQILHNREGTGRVVKWAIELSEFDLHFEPRHAIKSQALADFVAEWTPAPETVSVSEASSDPSQLPHAAHWVMQFDGSLSLQGAGAGVTLTSPNGDVLKYLVCLDFRATNNMAEYEGLLAGLRVAAGLGIRRLLVLGDSQLVVNQVCKEYRCSDPQMDAYVRQVRRMERHFDGIELRHVPRRDNMIADELSRLASSRAQTPPGVFEERLAQPSARPDPLGETDAPDRPPRPVGAQASGPEGSAPSSLRLIAWISEIQAYLTDKTLPEDREGSECGAHSASRTLVGKAFRQGFYWPTALNDAVDLVRRCRACQFHAKQIHQPAQALQTIPLSWPFAVWGLDILGPFRRAPGGFEYLYVAIDKFTKWPEAYPVIKIDKHSALKFIKGITARFGVPNRIITDNGTQFTSELFGDYCEDMGIKLCFASPAHPRSNGQVERANAEILKGLKTKTFNILKKHGDSWIEELPAVLWANRTTPSRATGETPFFLVYGAEAVLPSELTLRSPRATMYCEADQDQLRRDDLDYLEERRRRAALRAARYQQSLRRYHQRHVQARSLCVDDLVLRRVQTRAGLSKLSPMWEGPYRVIGVPRPGSIRLATGDGTELPNPWNIEHLRRFYP

SEQ ID NO: 153033 - protein, 1883 aa, Oryza sativa
  Clone ID: PAT_MRT4530_53025C.1.pep
MTARQHLGAGGRSSATKTSGAATTGSVSSRRRARRAAAVARHSAATPSSAPPTREDQRGGPDARIGIERRRNGRRAPHATEGASSSGVSPQHGRGDQPSVPPVGGVGCRAFVASLRNVRWPPRFRPTIAEKYDGSVNPAEFLQVYTTGIEAAGGDDRVMANFFPMALKGQARGWLMNLPPASVHSWEDLCQQFTMNFQGTYPRPGEEADLHAVQRRDDESLRSYIQRFCQVRNTIPCIPAHAVIYAFRGGVRHNRMLEKIASKEPQTTAELFQLADRVARKEEAWTWNPSGSGVAASAAPGFAARTGRRDRRRKKRSAHSDDEGHVLAVEGASRATRKGRPASDKKKEAGAPSRERPTGKWCTVHNTSLHDLADCRAVKSLAERTRKWEEERRQERREGKSPAVPSGNRRSEAKQKAPAEDIDDGDDDLGFQEPGATIATVDGGACAHVSRRSLKAMKRELLAAAPTHEATRRARWSEVALTFDQTDHPLPQHPFPAAFDAIKAPGMVLRPSQPIIGVTPGHTWPLGHIDLPVTFGGSANFRTERVNFDVADLSLPYNAVLGRPALVKFMAAVHYAYLQMKMPGPGGPISVHGDLKVTLACMEQRADHLAAASKPEGGDERLGTSVPAAPRQRMITCDEVPEDALVSFLRANADVFAWRPADMPGVPREVIEHRLAVRPGARPVRQKVRRQAPERQAFIREEVARLLEAGFIREVIHPEWLANPVVVPKANGKLRMCIDYTDLNKACPKDPYPLPRIDQIVDSTAGCDLLCFLDAYSGYHQIRMAREDEEKTAFITPIGTYCYTTMPFGLKNAGPTFQRTTRISLGSQIGHNVEAYVDDLVVKTRNQETLLSDLAETFESLRSARIKLNPDKCVFGVPAGKLLGFLVSARGIEANPEKIRAIERIRPPSKLRDVQCVTGCMAALSRFISRLGEKALPLFKLLKRSEPFTWTEEAERALTQLKAYLSSPPVLVAPEPNEPLLLYLAATPQVVSAALVVERDEDNPHSAHPHPVLAWPGREQGREAPEPNGGPRPPTTGAGPLPACQTVPGAPDPQDGSGATAGRPHLSPSDPEANPVPTRPGREQGEEAPEPNGGLRPLTTGVGPLPACPTTPGAPDPQDGPEATMGRPPLSSSDPEVVGTEDECAPRGRLDEERPRDAAPSEEGRPHRKVQRPVYFVSEALRDAKTRYPQAQKMLYAILMASRKLRHYFQAHRVTVVTSYPLGQILHNREGTGRVVKWAIELSEFDLHFESRHAIKSQALADFVAEWTPAPEPVSVSEASSDPSQSPHTAHWVMQFDGSLSLQGAGARVTLTSPSGDVLRYLVRLDFQATNNMAEYEGLLAGLRVAAGLGIRRLLVLGDSQLVVNQVCKEYRCSDPQMDAYVRQVRRMERHFDGIELRHVPRRDNTIADELSRLASSRAQTPPGAFEERLAQPSARPDPLGETDAPDRPPRPVGVQASGPEGSAPSSLRLIAWIAEIQAYLTDKTLPEDREGSERVQRISKRYVLVEGTLYRRAANGILLKCIPREQGVELLADIHEGECGAHSASRTLVGKAFRQGFYWPTALNDAVDLVRRCRACQFHAKKIHQPAQALQIIPLSWPFAVWGLDILGPFRRAPGGFEYLYVAIDKFTKWPEAYPVVKIDKHSALKFIKGITARFGVPNRIITDNGTQFTSELFGDYCEDMGIKLCFASPAHPRSNGQVERANAEILKGLKTKTFNILKKHGDSWIEELPAVLWANRTTPSRATGETPFFLVYGAEAVLPSELTLRSPRATMYCEADQDQLRRDDLDYLEERRRRAALRAARYQQSLRRYHQRHVRARSLCVDDLVLRRVQTRAGLSKLSPMWEGPYRVIGVPRPGSVRLATGDGTELPNPWNIEHLRRFYP

SEQ ID NO: 153034 - protein, 107 aa, Oryza sativa
  Clone ID: PAT_MRT4530_53026C.1.pep
WIEELPAVLWANRTTPSRATGETPFFVVYGAEAVLPSELTLSTLVLDPALGGPGRLKSPNGAQNRAVPRGVVNSGGESAKAHNRVIHNPRSPRSRPGQSRHADLPRH

SEQ ID NO: 153035 - protein, 418 aa, Oryza sativa
  Clone ID: PAT_MRT4530_53027C.1.pep
MASRWRELHGSGHWDGLLDPLDVDLRRCLITYGEMIMATYEAFIGEHRSPNAGMCRYRHADLFRRVDVSHPGWYAATRYIYATANADVHGKVLLRPLCREGRATECNWMGYVAVATDEGAAALGRRDIVVAWRGTQRALEWVADLKLAPASAAGILGPEGADGTDPSVHRGYLSLYTSEDQCSELNKQSARMQNKKLGFDPMRQTLKKVLTEIARLMDKYKDEETSITVIGHSLGATLATLNAADIAANSYNRGSSRVDLQACTPVTAVVFGSPRTGDRGFRDAFHRLRDLRMLRVRNRPDRIPHYPPVGYADVGVELLIDTRLSPFLRRHGSESQSHDLECHLHGVAGWHGDHRGFELVVDRDVALVNKFDDCLADEYPVPVRWKVHHNKSMVKGPDGRWVLQDHEPDDDDDDDDDD

SEQ ID NO: 153036 - protein, 2027 aa, Oryza sativa
  Clone ID: PAT_MRT4530_53028C.1.pep
MAEQAKASDLSPSVSGDDGEPNPRRRARTPPPPPRQSPKQGEALERVERSAASPIAGDGGERRDGDRRLLVYGDGSTPQGALQAAGALLRHPPVVPDPESPAQRWLDDVAKLVMTARQRLDAGGRSSATKASGAATTGSALSRRRARRAAAAVRRSAATPSSTPSTREDLHGEQDARASIERRRNDRSAAHATEGASSSRVSPRHGRGNQPSVPPVGGVGCRAFVASLRNVRWPPRFRPTIAEKYDGSVNPAEFLQVYTTGIEAAGGDDRVMANFFPMALKGQARGWLMNLPPASVHSWEDLCQQFTMNFQGTYPRPGEEADLHAVQRRDDESLRSYIQRFCQVRNTIPCIPAHAVIYAFRGGVRHNRMLEKIASKEPQTTAELFQLADRVARKEEAWTWNPSGSGVAASAAPGSAAQAGRRDRRRKKRSVRSDDEGHVLAVEGASRATRKGRPASDKKKEASVPSRERPTGKWCTVHNTSLHDLVDCRAVKSLAERTRKWEEERRQERREGKSPAVPSGRRRSEARQKAPAEDIDDGDDDLGFQEPGATIATVDGGACAHVSRRSLKAMKRELLAAAPTHEATRRARWSEVALTFDQTDHPPCVARGGQIAMVVSPTVCNVKLGRVLIDGGAALNILSPAAFDAIKAPGMMLRPSQPIIGVTPGHTWPLGHIDLPVTFGGPANFRTERVNFDVADLSLPYNAVLGRPALVKFMAAVHYAYLQMKMPGPDGPISVHGDLKVALACMEQRADRLAVVSKPEGGDERLGTSAPAAPRQRIVTSDEVPEDALVSFLRANADVFAWRPADMLGVPREVIEHRLAVRSGARPVRQKVRRQAPERQAFIREEVARLLEAGFIREVIYPEWLANPVVVPKANGKLRMCIDYTDLNKACPKDPYPLPRIDQIVDSTAGCDLLCFLDAYSGYHQIRMAREDEEKTAFITPIGTYCYTTMPFGLKNAGPTFQRTTRISLGSQLGRNVEAYVDDLVVKTRNQETLLSDLAETFESLRSARIKLNPDKCVFGVPAGKLLGFLVSARGIEANPEKIRAIERMRPPSKLRDVQCVTGCMAALSRFISRLGEKALPLFKLLKRFGPFTWTEEAERALTQLKAYLSSPPVLVAPEPNEPLLLYLAATPQVVSAALVVERDEDDPHSVHPHPVLTWPGSEQGGEAPEPNGGLRPLTTGVGPLPARQMVLGAPDPQEGPEATAGRLHLSPSDPEANPVPIRPGREQGEEAPEPNGGLRPLTTRVGPLPACPTTPGAHDPQNGPEATVGRPPLSSSDPEVIGTEDECAPRGHLDEERPGDMALSEGDRPHRRVQRPVYFVSEALRDAKTRYPQAQKMLYAILMASRKLRHYFQAHRVTVVTSYPLGQILHNREGTGRVVKWAIELSEFDLHFEPRHAIKSQALADFVAEWTPAPETVSVSEASSDPSQLPHAAHWVMQFDGSLSLQGAGAGVTLTSPNGDVLKYLVRLDFRATNNMAEYEGLLAGLRVAAGLGIRRLLVLGDSQLVVNQVCKEYRCSDPQMDAYVRQVRRMERHYDGIELRHVPRWDNMIADELSRLASSRAQTPPGVFEERLAQPSARPDPLGETDAPDRSPRPVGAQASGPEGSAPSSLRLIAWISEIQAYLTDKTLPEDREGSERVQRISKRYVLVEGILYRRAANGILLKCIPREQGVELLADIHEGECGAHSASRTLVGKAFRQGFYWPTTPNDAVDLVRRCRACQFHAKQIHQPAQALQIIPLSWPFAVWGLDILGPFRRAPGGFEYLYVAIDKFTKWPEAYPVIKIDKHSALKFIKGITARFGVPNRIITDNGTQFTCELFGDYCEDMGIKLCFASPAHPRSNGQVERANAEILKGLKTKTFNILKKHGDSWIEELPAVLWANRTTPSRATGETPFFLVYGAEAVLPSELTLRSPRVTMYCEVDQDQLRRDDLDYLEERRRRAALRAARYQQSLRRYHQRHVRARSLCVDDLVLRRVQTHAGLSKLSPMWEGPYRVIGVPRPGSIRLATGDGTELPNPWNIEHLRRFYP

SEQ ID NO: 153037 - protein, 54 aa, Oryza sativa
  Clone ID: PAT_MRT4530_53029C.1.pep
SYKWGITLFAYPPSICEIPYSTAIRSPCSFSVRTCMQCNLLRHRRDQSPTNEQS

SEQ ID NO: 153038 - protein, 70 aa, Oryza sativa
  unsure (1)..(70): unsure at all Xaa locations
  Clone ID: PAT_MRT4530_5302C.1.pep
PEVRMCPHVGEPTQCVSEGARESIAGRRNNXCGVVCPCVVESSPKCVKRKSSWVVVVVPSRVXGHGCCVH

SEQ ID NO: 153039 - protein, 159 aa, Oryza sativa
  unsure (1)..(159): unsure at all Xaa locations
  Clone ID: PAT_MRT4530_53030C.1.pep
RPGTYPIPEQAWHQIPSPWITASSYLGLLLLSPAVAAVSVPGEEEPLIRQVVGGGDYNELELNAERHFCSLVQRFYKAYRDADDHSYRVSGFKDNLRRARRHQLLDPSAEHXGVNKLSDPTPAEFRRAYLDLITLSRALLRGLGRXVHEDRVLITDGLF

SEQ ID NO: 153040 - protein, 576 aa, Oryza sativa
  unsure (1)..(576): unsure at all Xaa locations
  Clone ID: PAT_MRT4530_53031C.1.pep
QHGALRGRARGHVRGRRTEHWIGXEKLTSPKLFGGLGFRDIRCFNQALLTXQTWRLIDTPENLCARVLKEKYYPNGSLTDTTYGTYSSDASPTXKGIEYGLELLNKGLIWRVGDGRQTKIWRSQWIAHGEKPKILQKKTWNRLIYVHKLMNPDTKTWNEPXIRHVVKENDASEILXKIKIPEREMPDFPAWHLEKIGIFTVRSAYKLAXNLAGKICIEYSSSSATDGETKIXEEYMTNKCPTKSXIFAWKLAQDRLLTWGNKRKQKIXQSGICPIYGLTEANGVHATVECTVARGLQETMRAHWVLPEERSFKWTGPDWLLVMLDSLNRLVKAHVLYLLXKSXHLRNVVIHGKGNASIVDSVSFLVSYEVNYCQSXQREDDHKGKGPLSLHHYGSAAQAEXLRATVELIHIPIVMEMDNVEIAXRLKTAGSLKSAWRXTIEEIKGIMQCFQQVQVHKIKREANMVAHVLAQMVMILCMRSXRLCTPTRILDLMNQEVLQGRTTPLQRHRRCSTRRPATRAHIGDSISSPXVAIKIHPPSPPHLSSLPDRLHFPLSPPGLPPPIRISPLVLFESGVS

SEQ ID NO: 153041 - protein, 238 aa, Oryza sativa
  Clone ID: PAT_MRT4530_53032C.1.pep
MAWRRGFGREEEDAAAAGESGLELCLGLPAYFSSSSSSKPSEGSTAAPAFALRSNGTNASKPSGAAAAAPVVGWPPVRSFRRNLASSSSSSSKQAPPPPSSSPQNGDKASKDGGAEKGMFVKINMDGVPIGRKVDLAAYGGYAQLSAAVDKLFRGLLAAQSAAADGEADAAAAGEMVGGGEYTLVYEDDEGDRMLVGDVPWQMFIATAKRLRVLKSSDLPPPSLMRAAGSRKRAAADS

SEQ ID NO: 153042 - protein, 157 aa, Oryza sativa
  Clone ID: PAT_MRT4530_53033C.1.pep
CTLLLTPHRRRRQLRRRFSGDGARWLQQRLRLVAATVTKRERTSVLKRQRAAATVTEGKCAVAHGGGGARKEVRQWRGEGSGGGSRQRDADLAPASLGRVDPPPPVLGRGTGGGASGGARRHRRVGGAVGSRAGAGERIRCRPSTPSLGSNESILTS

SEQ ID NO: 153043 - protein, 185 aa, Oryza sativa
  Clone ID: PAT_MRT4530_53034C.1.pep
MARHSSSCPSLALAHLPTLYFLLWLHVPDVAPRFPSVRYLVPRYGHGERGGVVSWIWSRIWRWRYYQPHRRMDVEMVVVEVGIPDGHGWRSSSRSPWGRDVVFSPTMMVDKGLTPSFFEMTISGALIGYQCGGIAIMLLANPFCCLSVLCAACDGGPALGTRPRLFGWRWTCEEKVEAQDDVNTI

SEQ ID NO: 153044 - protein, 66 aa, Oryza sativa
  unsure (1)..(66): unsure at all Xaa locations
  Clone ID: PAT_MRT4530_53035C.1.pep
ETRDGGERXEXXXCGEEAAQFRARPRFCLXIXLXPXAPXAXXPXEEIXGXFYFRSPTXXTSDFXNX

SEQ ID NO: 153045 - protein, 78 aa, Oryza sativa
  Clone ID: PAT_MRT4530_53036C.1.pep
PGPNSPGEPHETRPRGQRFLLKTYRGGRGEKRPGLTGGGVSIPGQTKEKAHRPAWHWFEWRKTRRTGAIGRTQLPPRG

SEQ ID NO: 153046 - protein, 59 aa, Oryza sativa
  unsure (1)..(59): unsure at all Xaa locations
  Clone ID: PAT_MRT4530_53037C.1.pep
RFKLNEESNTRRRKLKKEWHFXNGQRTVYGNSRDXPQNLRFKQNLISWLKSTFARPEKP

SEQ ID NO: 153047 - protein, 407 aa, Oryza sativa
  Clone ID: PAT_MRT4530_53038C.1.pep
PAGNRPIRRSSSGFSSRAREAQQKPSLLFPRRRRRLSPSENTQKPNQTLDPPPPRSSVSDSGDARAATMPNLECRMYEPRFPEVDAAVMIQVKHIADMGAYVSLLEYNNIEGMILFSELSRRRIRSISSLIKVGRQEPAIVLRVDRDKGYIDLSKRRVSEEEAHACEDRYNKSKLVHSIMRHVAETLGIDLEPLYQRIGWPLYRKYGHAFEAFKLIVADPDAILDSLTYEEKETGADGQEVTKVVPAVTPEVKDALVKNIRRRMTPQPLKIRADVEMKCFQFDGVLHIKQAMRKAEAAGNDNCPVKIKLVAPPLYVLTTQTLDKDQGISVLTDAIKACTAEIEKHKGKLIVKEAPRAVSEREDKLFNEHIETLNEQNAEVDGDADSEEEEDTGMGDIDLTNSGVNAD

SEQ ID NO: 153048 - protein, 38 aa, Oryza sativa
  Clone ID: PAT_MRT4530_53039C.1.pep
DACATPWATGSSSARCSGPGSWAASGSVPDDLNSHMLS

SEQ ID NO: 153049 - protein, 334 aa, Oryza sativa
  Clone ID: PAT_MRT4530_5303C.1.pep
MSYMAGFNQGISSSTITSGNGFNNIATQYIRTDQGVMRGNVPLPQVVISSKVTSDSPNPSFAIQNINNHCVDAYTTSSFAPIQYAYNAMGGSAGVYTADYTEIGYRQNLDNGMTGHGTGLTASYAGQTVPTMAAKLSDGSDCITSESEIALSPKTESQIGHVDVGKDDDNVLRDSGEIESKVAMHTYQRPYPEHVDSVPYPQGFEVPNFMKFTGENAMTTMEHIGHFIDQCNASLMEQRPIDTSSVTCETISVTSMPKTGIVSDPFPVSSIDVDKKKGKRVIIGDPRPKNRINNAKAEDHKVVKDELSSIQRTKKPKLTFEMLMAKYKKGLAGQ

SEQ ID NO: 153050 - protein, 113 aa, Oryza sativa
  Clone ID: PAT_MRT4530_53040C.1.pep
AGGIEAGHRWPRPPLPQIRLEGKRRDGWPAGGGMGGRPWHPRRAGGWGHGKQWPCEHGDGGARRRERHTGERVAARGRGVDGVRGGGGQSQRRGGGGSRRWRPVAEARRHPDL

SEQ ID NO: 153051 - protein, 86 aa, Oryza sativa
  Clone ID: PAT_MRT4530_53041C.1.pep
YNPRSLLEIEVESSWNVERLGPGFESILFLSCGCCSPSLLCPTPKGLARTSCQRGSRAPPRADVAGTSAPTASALRCPTISSLAVW

SEQ ID NO: 153052 - protein, 83 aa, Oryza sativa
  Clone ID: PAT_MRT4530_53042C.1.pep
FRSTPPTVLFYPAIRPPSVAWFPLGSSDIILCLLWLTQVPLCPFCPVITVILPTCCLSIYVTHFLKFASQFEFSNPYFIEPSI

SEQ ID NO: 153053 - protein, 67 aa, Oryza sativa
  Clone ID: PAT_MRT4530_53043C.1.pep
LLLGEGPRAPRGAISGARVPDGHTDDDAPAANEEGADDDQGGEWTWQLEASVKTRMEKTVSFIFKPC

SEQ ID NO: 153054 - protein, 58 aa, Oryza sativa
  Clone ID: PAT_MRT4530_53044C.1.pep
PFFVVVTCLMADYRGRIFGYDIGISSGVTAIDSFLAAFSPGVQPRMAAARVYEYCVYD

SEQ ID NO: 153055 - protein, 467 aa, Oryza sativa
  Clone ID: PAT_MRT4530_53045C.1.pep
MEDVAVAAALAPAPATAPVFSPAAAGLTLIAAAAADPIAAVVAGAMDGVVTVPPVRTASAVEDDAVAPGRGEEGGEASAVGSPCSVTSDCSSVASADFEGVGLGFFGAAADGGAAMVFEDSAASAATVEAEARVAAGARSVFAVECVPLWGHKSICGRRPEMEDAVVAVSRFFDIPLWMLTGNSVVDGLDPMSFRLPAHFFGVYDGHGGAQVANYCRERLHAALVEELSRIEGSVSGANLGSVEFKKKWEQAFVDCFSRVDEEVGGNASRGEAVAPETVGSTAVVAVICSSHIIVANCGDSRAVLCRGKQPVPLSVDHKPNREDEYARIEAEGGKVIQWNGYRVFGVLAMSRSIGDRYLKPWIIPVPEITIVPRAKDDECLVLASDGLWDVMSNEEVCDVARKRILLWHKKNGTNPASAPRSGDSSDPAAEAAAECLSKLALQKGSKDNISVIVVDLKAHRKFKSKS

SEQ ID NO: 153056 - protein, 474 aa, Oryza sativa
  Clone ID: PAT_MRT4530_53046C.1.pep
MEQMSTPNSPEDIKRPIGTKTAKAQRNGKGRRKRKAKVYLSDTDDEIDKLKEVQEMANKGRDELLETQRRVASDNLESKKLAHLAAMEHKEAVMLETYRSLMLQDTKDIPDDVRSEHLMALKYDSGELDPSKIIDQYIVEQNLIDSFARRVMEKIKTKLRIGKIRRKSVTRKTIKRDHTAAHHRLIADYFSEDPLYPESMFRTRFRMGRPLFLRIVSALGRWSPYFTLKVDCSGRQGLSPLQKCTAAMRMLAYGSPADSLDEYLKIGKSTSLQCLDMCARGVIEVFGSEYLRRPTYEDVERILQVNESRGFPGMLGSIDCMHWRWEKCPTAWRGQFTRGDYGVPTIILEAVATRDLRIWHAFFGVTGSNNDINVLNQSPLFLDVLKGEAPRVKFSVNGTMENFGASFLVLSAMVLRAGWLKWSAAPSLLSGATTTTQAARQRGPRILGFGWSARDGDTSHGPRILVSMEWPAAV

SEQ ID NO: 153057 - protein, 1191 aa, Oryza sativa
  Clone ID: PAT_MRT4530_53047C.1.pep
MAANFSACLVPVAVLALFYLVIFPNDLSQLKSALAPCDAASKSVAAAAAADDDVDFRMFFGILTRPDFYERRALLRMAYALQPPPRRAAIDVRFVMCSLDKEEDAVLVAMEIITHGDILVLNCTENMNDGKTYDYFSALPRLFPAGAEPRYDFAGKIDDDTYYRLGALADTLRRKPRRDMYHGFLNPCHIDPAWQYMSGMGYIVSWDVAEWIAASPELRGREIGYEDDVFGRWLRGAGKGKNRFGEEPRMYDYLDREMYGADVNCFRHELIADTVAVHKLKDRLKWARTLRFFNATDGLKPSKMYHLGMSNKMDGVGVETMQEPMPSTKNMLSWPFASHAPWLIPSLYIWRGAWQGSAPPQPPLPLLYAYDAAASAFPMAQMKQGLDHSAIELSDLQERGMDFHPPGAQQPVNIDSGDEEAPTVRTEKRLTWSTEEDIRLVSAWLNNSNDSISGNFKKNDRYWGDVTAEYNSTTPKNRTRQEKQIKDRFHKIKKNVGRFCCVYKEVKSIYVSGQNDMQLREKAEATYQADYKEGPFSFLHCWNILRDQPKWHAYLEELEKPNKPKMDDEVEVMEQMSTPNSPEDIKRPIGTKTAKAQRNGKGKRKRKAKVYLSDTDDEIDKLKEVQEMANKGRDELLETQRRVASDNLESKKLAHLAAMEHKEAVMLETYQSLMLQNTKDMPDDVRSEHLMALKVMEKIKTKLRIGKIRRKSATRKTIKRDHTAAHHRLIADYFSEDPLYLESIGRQGLSPLQKCTAAMRMLAYGSPADSLDEYLKIGKSTSLQCLDMFARGVIEVFGSEYLRRPTYEDVERMLQVNESRGFPGMLGSIDCMHWRWEKCPTTWRGQFTRGDYGVPTIILEAVATRDLRIWHAFFGVAGIDWAIMMAMKKSFSLLFFLPFLLLAIIYFVIFPNEFRLQSSLAACGDSAPATAADAVAKAAPDIRVLLGVLTRADKYERRALVRLAYALQPAPARAVVHVRFVVCNLTAEEDAALVGLEIAAYGDIIVLDCTENMDNGKTYTYFSAVPRLFAGEPYDYVGKTDDDTYYRLGALADALRDKPRRDAYYGFLTPCHADPRTQYMSGMGYVVSWDVAAWVAATPELQNDLKGPEDKLFGRWLRWGGRGRNVFGAEPRMYDYLDGGMRHGPTCFRHLLQADTVAVHKLKDNLKWARTLNFFNATEGHKASPLFHVDH

SEQ ID NO: 153058 - protein, 44 aa, Oryza sativa
  Clone ID: PAT_MRT4530_53048C.1.pep
SIEVDKTYMPRCIKHYQITQQQHTKNLRHFSCRSCCSKRRSRCI

SEQ ID NO: 153059 - protein, 408 aa, Oryza sativa
  Clone ID: PAT_MRT4530_53049C.1.pep
MSPDDSGELDPSKIIDQYIVEQNLIDSFARRVMEKIKTKLRIGKIRRKSVTRKTIKTDHTVAHHCLIADYFSEDPLYPESMFRTRFRMGRPLFLRIVSALGRWSPYFTLKVDCSGRQGLSPLQKCTTTMRMLAYGSPADSLDEYLKIGKSTSLQCLDMFARGVIEVFGSEYLRRPTYEDVERILQVNESRGFPGMLGSIDCMHWRWEKCPTAWRGQFTRGDYGVPTIILEAVATRDLRIWHAFFGVAGSNNDINVLNQSPLFLDVLKGEAPRVKFSVNGNEYNTGYYLADGIYPEWATFVKSIAAPQTGKHKLYAQYQEGARKDVECAFGVLQSHFNIVRHPARSWKRKSVGRIMKACIILHNMIVENERGGGTMENFGASFLVLSAMVLGGSEGAQFGRLAACFGSA

SEQ ID NO: 153060 - protein, 441 aa, Oryza sativa
  unsure (1)..(441): unsure at all Xaa locations
  Clone ID: PAT_MRT4530_5304C.1.pep
MMSGNEIMPISLDDFEGEDRKSMPDGRSDRDFAVGPTGQTAGLTGYYPGSQIGTQAGPTAPLDVGQTRLWTGQTGAIIPIQGIDPMTNASYLYHLRTFDPPVSTAATNPQVPPHVSNAYNDVARAATGCPRRLLARPGRRRRRPLVVPGCRGVRPSVEPFSSVVRVRQASRGSPVVVFVLGSASSSLVPAASRLRPRIAAEVVPSPFASVVPEPSPPRSFVVVVPTPRRVVLLSFRRFPKRGSRSSPKSGYKQKYTDGDGRSRGPKDISRTNEGYTSCGPVVEMSWHRAGVLLPGAQSCLPVPEVPAVGGVGSVKKVKKVWVRKEAKAPEVVVVKEESQDVHVPTGDAVETMQAKDIEADAITVNIGGLTETAGRSNRLSTASLTDPPGRSDRRLATGLTGPRGRSDXRGIKAPGKQPQPKWIPSGLSRSQKKRLQRLRAI

SEQ ID NO: 153061 - protein, 44 aa, Oryza sativa
  Clone ID: PAT_MRT4530_53050C.1.pep
MAAWLGALAGAAVSHRPRAHEMNILTSIGHGSVGLQQLRDHQHV

SEQ ID NO: 153062 - protein, 141 aa, Oryza sativa
  Clone ID: PAT_MRT4530_53051C.1.pep
MAAGNFWVRYARRFLDFNLNLLITVELRMVLSTTPCLYGSHIEIDQSRMTTTPTSEVAIGYMSSFKQKLGATIRVTDKEETCSPAKTKEELCAAPAQLGKAAQLAVGCGAVEVCDHPVPVGSVKRHAPTPLDWANDAADVG

SEQ ID NO: 153063 - protein, 112 aa, Oryza sativa
  Clone ID: PAT_MRT4530_53052C.1.pep
MALGGNGDAARNLVLRMGRWRGSGHDDELSETATKMRGVAWGHALAQRIAQLMPRPALTNSDEEWVSHFGYVVFMLVAADADVLRISDVAGQGRTPNKHTVNGLIFDISSYS

SEQ ID NO: 153064 - protein, 38 aa, Oryza sativa
  Clone ID: PAT_MRT4530_53053C.1.pep
IMSLLFKFQLFLEYCNTFVYNHLLDQTGMSLNENCQAT

SEQ ID NO: 153065 - protein, 124 aa, Oryza sativa
  unsure (1)..(124): unsure at all Xaa locations
  Clone ID: PAT_MRT4530_53054C.1.pep
VRPYDVKRVRNKIHPACIYKXNDLDKCRVVVPYLPTKTDNLSHSTGHSCAIREKVIERLLLLVLEPVGRSDLSRLNFQWSRYDYSNSVAVLAPRPQMVDSIIAISRTFTSSGRVKARPGSRPAV

SEQ ID NO: 153066 - protein, 154 aa, Oryza sativa
  Clone ID: PAT_MRT4530_53055C.1.pep
MGSQSCCHVKALFNRMKPRCLQEEQQHNKTRTVKAEIRQNTLQDILYSPQSFQGEAIGAPSPRRHSPKVCPINPDCSYENNSPNIRDSFSIDRISIRSQNSMRRVSFRLPDESDIFIIPAREDPESCSTDDESVEHVSEQDIDARKIRYAKTRY

SEQ ID NO: 153067 - protein, 72 aa, Oryza sativa
  Clone ID: PAT_MRT4530_53056C.1.pep
RKAIADAGRLHQNVDADASQCKYIMIAEIHYSRFVFKKEHGMKTQLQSTFPHNITDQILGNNQKSQKRWNKP

SEQ ID NO: 153068 - protein, 94 aa, Oryza sativa
  Clone ID: PAT_MRT4530_53057C.1.pep
MARAAPRGKGKVGADSAVVSREPRPALSPRQSRRHVDRSIGITSTRLRCRPGQRKVSDVLLPLRADVTPAREDGWEDGKGKSLLAKVWRWARKT

SEQ ID NO: 153069 - protein, 687 aa, Oryza sativa
  unsure (1)..(687): unsure at all Xaa locations
  Clone ID: PAT_MRT4530_53058C.1.pep
MSSSASPSVAPLAKYAEHLSNLVAIPSLSHENHYFLGPIGNLDPTEFIIAETNRIPFRLANPNLGHWKNTFKSWPSLEKTSLEKSWAVWYKRVSASKQVHWDELGISQALAHTIAKLAKDEPLMAAATYFWSNTINAFLFNQGPMIPTLLDITMITGLDVTSSANPMSLNTKNQFDFRTKSIGGWSGYVATYMGKGFVTSXELEAFLLMWLEKFLFCGSSCGPTTNWQFLAEALETKRQFPLGKILLGYLYQTLNNASAKIAIGSVISASGPWWLSQTXLNLIAMKAVNRPPVTEAEFPRLEPTTNDDGEERTHRKCMSYGEYASTPADAGAKLSAELLKDWFCSFYEGFQKEPQVWFPYEDSLNLDLPSDFRFEDINHERYQKSREVFSAAISPCILRVGIHQGRNIQVSNEFYHPMSSARQFGMGQLPIGMFFADKIQCRGDISSTLMMDRLLNIPRPPLGIIENIELAKFRSRNFDRWWGEWKQHIFHQSASMYMTDLFPDVIPPTTESSPPHKRNSGRDIEYAPGLLPTGGGLTPPGLCFNGXMREPTDVGRKRKIKTLAIDPSALAPKKKAKKPKPKPSDDLPTLDPSVRYAMIEEVAHTITETTMIVIGEGQTTLVTAVAVTTKMEEIGVETTTRDEDKIPEIQVVTLVIARRNQATHRHHHHPPRPLHRQTDIHEGHATT

SEQ ID NO: 153070 - protein, 1564 aa, Oryza sativa
  Clone ID: PAT_MRT4530_53059C.1.pep
MAGGSEFDIQEAAASASASASASASASATAAAAPLLEKKITYWEGCPGCAVERRKAENPGVPYLQFFHIWIIILVSCLPITFIYPFLYFMALDNLVSGSRRSSASAAAAPFPTTAAPASPDPAPINPSPPPITANTSPPSPSSSSSVASNSGDMGDNGDLKAAIDALTKNVAAMQSSIQANAKAIENITASSSGSGPRHHSGEQPPDRPPKHWRPEMPRYDGKTDPLTFINKCESFFLQQRIMPEERVWMASYNLHDDAQLWFMQIQEDEGTPTWPCFKDLINLRFGPPLRSTPLFELSACRRTGTVAEYSSQWQALLPRAGKLEEAQKIQLYTGGLLPPLSLQVQMQNPQSVASAMSLARQFKLMAEYTTAPAKAPGRGVLGAPQARPALPAPPPHPDKTPAVTNQGEGRQAKRLTKEEQAERRRLGLCYNCNESYTRGHNRVCRRIFHIAGVELDDDAAADAHEEPTTESPVFSLHAVAGVPRGGTLQIAVTIGGAPLVALLDSGSTHNFISASAAPRTRLPVESRPRLTAVVANGERVACPGVIRAAPVVIDGTNFDIDLFVMPLAGYDLVLGTQWMATLGEIVWDFATPSMAFHLHGHAFRWTGVTSAAAPSLLSTVASASLLDELLASFADVFAEPVGLPPPRGRDHGIVLKPDAAPVAVRPYRYPAAHKDELERQCAAMIHQGIVRRSDSAFSSPVLLVKKADGTWRFCVDYRALNALTVKDAFPIPVVDELLDELHGARFFTKLDLRSGYHQVRMRPEDIHKTAFRTHDGLYEFLVMPFGLCNAPATFQALMNDVLRDHLRRFVLVFFDDILIYSNTWADHLRHLRVVLTILRQHRLFVKKTKCSFGVNSVGYLGHTISASGVALDPAKVQAIHEWPQPRSARAVRGFLGLAGYYRKFVHNFGSIAAPLTALLKKDGFTWTADAAAAFLALKEAVTTAPVLALPDFAKPFIVECDASTYGFGAVLIQDGHPIAFFSRPVAPRHRSLAAYERELIGLVLAVRHWRPYLWGRRFYVKTDHYSLKYLLDQRLATIPQHHWVGKLLGFDFTVEYKSGATNTVADALSRRDTEEASLSTIMAVSGPRFDFIDRLRQAQARDPALVAIHDEIVAGTRAAPWAITDGLITYDGRLYIPPTSPLLPEIVAAVHDDGHEGVQRTLHRLHRDFHFPNMRRCVQDFVRECITCQRYKTEHLHPAGLLLPLPVPTVVWADIGLDFVEALPRSMVSDRDPVFTSLFWRELMRLMGAKLHMTSAFHPQADGQTESANRVIVMYLRCFTGDRPRQWLRWLPWAEYVYNTAYQTSLRETPFRVVYGRDPPTLRSYEPGETRVAAVARDMEEREAFLADVRYRLEQAQLVHKRHYDRQHRHVSYQVGDWALLRLRQRTMSSLPQATSGKLKPRFIGPYLVTELINDVAVRLALPPQARIHDVFHISVLKKFVGVPPAALPELPPIHHGVVTPEPARVERAHLARGVRQLLVHWRGEPAESATWEDLDAFREQYPQFQLEDELIREEGRDVMWGTAYTRRRRARDVRRAAERAAARVAAQSAITVTVDGKDGLSG

SEQ ID NO: 153071 - protein, 422 aa, Oryza sativa
  Clone ID: PAT_MRT4530_5305C.1.pep
MAVLSRRWRRLPGLLPRLVIDAREFEPAALRAGWHARTKRAMERVAGAVESLLPGDRAIERLRLDAYLLRDESYTVRRVVERLNDAVDSGKVAAGGLELVFRATGGGGAPDQDQPSKRQARRLARLLAAAASPSLLPSVAELSLVNLRFTSPALASLLGRCTGLEELGMYQSDAGFGAVLDVGHARLRRLAVHAVDEAMYKKLRVSSAPRLERVVVANWFCRYAPVSFGHVPCLRELHLKNKAVYYQEPVRLSKMLASTPHLESLTLGFSSWRVCIEPEAPKQLEPMFSKLKSLVLTGIFRGCDLSWTLFFLQAAPVLEEFILEVDKPLDAKAPSDIYGEMPKTDDVTWQFSGFNEEEMHWRIVELVKERAVNLQSIALDDGCQACDVVANEYVLSGGIKNKKPVLLSVSQITGSPPILTLV

SEQ ID NO: 153072 - protein, 90 aa, Oryza sativa
  unsure (1)..(90): unsure at all Xaa locations
  Clone ID: PAT_MRT4530_53060C.1.pep
AFIGHRLPSQGNTSLFGALCAYSCALGKNFPIGHPSXIALGQARLTSEFFRDQLPEKKLQPVDMSILLILLSPRPGCYINQKMRDFFSSK

SEQ ID NO: 153073 - protein, 182 aa, Oryza sativa
  unsure (1)..(182): unsure at all Xaa locations
  Clone ID: PAT_MRT4530_53061C.1.pep
TGKALVIHHLMEEDLXDAHAPXTRSRARTEWSRRFRTVERRRASYHRDGTGHTCRMPPDIRLGRAWLATIPSVIRPVTYRSQAGQTRNTPHLMRRCALVLPALNTVRWALGSVHLTSLTWWPRGDRQEGSGQPDPLGSEGXMPPIHRPDPLGGXRHMDVGXRLLPFKLGTRGSHSPTIMYSY

SEQ ID NO: 153074 - protein, 44 aa, Oryza sativa
  Clone ID: PAT_MRT4530_53062C.1.pep
LIHLLAFAPYTNCDVGLFPSVLGFPRTSVTGPFCVGRLRMDNLL

SEQ ID NO: 153075 - protein, 175 aa, Oryza sativa
  Clone ID: PAT_MRT4530_53063C.1.pep
MANLPSTAAAAAADASGFKLFGKVIQPDGQRGVEESAAAQAPPHPHPPAPPVMEAAAAAAGTSQTLQAAGGGGGGGGGGGGEPLPCPRCGSRETKFCYFNNYNVRQPRHLCRSCRRYWTAGGALRRVASASPGRRRPRPSAARSAAAAAASASAASPPAAVPAASEGAESVDSRS

SEQ ID NO: 153076 - protein, 34 aa, Oryza sativa
  Clone ID: PAT_MRT4530_53064C.1.pep
MAPRQRNSRQRGARGDFVNLQDGFASTVFEDAHR

SEQ ID NO: 153077 - protein, 52 aa, Oryza sativa
  Clone ID: PAT_MRT4530_53065C.1.pep
SARGQNPPWNTLTRTERAFQKQDGVFLASKKFAGKKNGPRWYQEVGLGFKTP

SEQ ID NO: 153078 - protein, 304 aa, Oryza sativa
  Clone ID: PAT_MRT4530_53066C.1.pep
MAQQHSPPPPPAPPSPPPALPCDPMPPPPRHDDTTLTLSLAPPAAARPLQAMVARAKCSSPTGDAPPCTECGRQFLSWKALFGHMRCHPERHWRGITPPGGGGAGAASSTAASQFTLREREVAASLLMLSGAHPARSGAGKGKGKKRLLAPAAAAAPHHSPATCADHKCAVCHRGFATGQALGGHKRCHWPDRSCADQAISMLAVSTAGSSSTTTTSASPPPAPATAATALDLNLNLPPPLALWCILLLLDLCLLNSIRGISGSLEWKSLQVLSFGYVCLVQIRAFLIVLNTEIGVLIDQKSAF

SEQ ID NO: 153079 - protein, 121 aa, Oryza sativa
  Clone ID: PAT_MRT4530_53067C.1.pep
EQGWICVDGQVGGEENDGGGEAAYGQVGGEENGGGGETVVDRQVGGEERWWTGGCAARRMVEEARWWTGGWTARRTTEQASASSSLTVLAAGTISRSTTGDTSPPSCTQPPLSIRPGLWPS

SEQ ID NO: 153080 - protein, 196 aa, Oryza sativa
  Clone ID: PAT_MRT4530_53068C.1.pep
MAMRALVSKLRVPAAASRRALPPFRSFSAASQDKVGGTTARAAAKEGTPISDNSRKVEKFYRKLRWKIEEITMTDRLNEFYIPPKTQIDLSYIIIYRKISAFDSISFTARPPLPSDIVWNPATGRDISLLLQIPSLKRSSMLVSENNQQWCLPINLCLRHLFGPTIAMLYRELQDHETLDSQESIHEAEEHQHRIG

SEQ ID NO: 153081 - protein, 92 aa, Oryza sativa
  Clone ID: PAT_MRT4530_53069C.1.pep
FVYKIVSSLATCVFVACWDMIVVQRGGLFAASKIIPPSTRHLACLIISSVGCVAPCDFFGCPCLPLNPSLCTNHMEFVYSFIPKYKYFLSFL

SEQ ID NO: 153082 - protein, 629 aa, Oryza sativa
  Clone ID: PAT_MRT4530_5306C.1.pep
MEVERRGGGEVNGVVEMEDAVGILVDYLVRPALRKGSRMTPENQADVARQVHMAVILYNYYHRKQFPQLAFADAMRFFKCASLTLGDSLLAYSNMVHQHEKSSGSPGEGVNLSVTDKAVVDACGIAEALDANQDSPDMAMWPISKVAVLLLDSTRKRCLLESGSVGKNVRSLLEKEIDTSSTSEHGSNKPEGQDLENEETGPYVLQKLAFSEVERRTEIKRSSLRLLDEHLAYSLTKKGTTTKLFILQYEQTAKGNFAEMPIEELIKRMIGPVVEKHPYPTTTVVAESYHILPYKDILFDCLHRKWHFDSSLSMPKEETRRNGKSSSHSEIDENSKEQEYNIKGSTQKKIKRDIKVLGSSDKNYSCTSRNKRSSNVNSKRKSEVFRATAADGAEGLDSEIPRVKNALPPVVDVSTMKFVSCSVNVKETAAANAGFVDMEADFHQGGGAKDNKDLKFASFKSYLKKRDDLHRKQRMIEDETVQFDMDIQSVFAGGEWTPEAMSLLEKYGILVDSLDMVEVNGSSYSGDGYETLTIERKKLTVERLLRNKCQLMQELDEVCRENNWILPRYKVMPSLTDGMYVANVDIACLEFSQMTFGDPKTNPRDARESAAANLLAELLKKADANREHT

SEQ ID NO: 153083 - protein, 164 aa, Oryza sativa
  Clone ID: PAT_MRT4530_53070C.1.pep
MVGAEGWRRLRRCSSYRGCSSSTNGGGGRGVGGCVVLAQKATAYARVTRVGDDGMDETLLSNLPYNSDYGYSSGGNSCSTSERLARPAVQVSRAGQAPAKACGPNLAARNWLGFTGAIPSFLTVYVCKINSKYLSGLSSNKKMVGKETTGQIALDDITPMDMAL

SEQ ID NO: 153084 - protein, 71 aa, Oryza sativa
  unsure (1)..(71): unsure at all Xaa locations
  Clone ID: PAT_MRT4530_53071C.1.pep
GRVGRHNERCQPGMGYXPMYFLSRCRAVVKRQTRGPPAHPTSAVDEQVQRDCCQXVAAVDYCWCRCLELNH

SEQ ID NO: 153085 - protein, 213 aa, Oryza sativa
  Clone ID: PAT_MRT4530_53072C.1.pep
MAGGPSGWRRSGAAGGGSRALVAVLRLGRGGAAAGPQEAGSAAAGPWGRGIRNRRATTTTTTTATMTTGQAAGGGCAAAGGGGGPPPPPLSHLSPLLLPCAPSSNDDHGDHHDNNDNDGLGHDNDDDHGDWAATATSAAMRCTSALAALGWLGRCTLMAVQPGSPPHSLPPPRGGSGEGLGARQRENPRGLTWHPEAPWLPLRRPRCGGRARL

SEQ ID NO: 153086 - protein, 181 aa, Oryza sativa
  unsure (1)..(181): unsure at all Xaa locations
  Clone ID: PAT_MRT4530_53073C.1.pep
FGLEKDFFPYPXXPFPNFIPXPPXXFYXVSXRPXKKKISXXLXFLPPGXKNLNIWXPXXKKXAXFFGLXKXXPPPXXKNFXNXKGFGPPPGEXAXXXXXENPKXLAFXXXQKFIXFFFXPLWGXXXXXFLGFSXGXPXGXXKXKTXXPPPFXXXLFXGXXPXXXLPXPXPXXXFGGVFLPP

SEQ ID NO: 153087 - protein, 150 aa, Oryza sativa
  Clone ID: PAT_MRT4530_53074C.1.pep
MPPNIDIRDKPRQIQYGAYGGRQEGSSAISNHDEFVLEKEDYPVVDYVLVIYAAKSATASTRKNQSRVCLLLCAAPSLVDYTILLAGVHLRSGEQLSGTFAFDVLHREKAAIRRDESAISDLAGHGFEEKGYPVVDYESDRQTAMSTTVR

SEQ ID NO: 153088 - protein, 298 aa, Oryza sativa
  Clone ID: PAT_MRT4530_53075C.1.pep
MASNNSRTNSRANYSNEIHDLSTVQNGTMPTMYYGEKAIADFFPPHLLKKVVSEVVATFLLVFMTCGAAGISGSDLSRISQLGQSIAGGLIVTVMIYAVGHISGAHMNPAVTLAFAVFRHFPWIQVPFYWAAQFTGAICASFVLKAVIHPVDVIGTTTPVGPHWHSLVVEVIVTFNMMFVTLAVATDTRAVGELAGLAVGSAVCITSIFAGAISGGSMNPARTLGPALASNKFDGLWIYFLGPVMGTLSGAWTYTFIRFEDTPKEGSSQKLSSFKLRRLRSQQSIAADDVDEMENIQV

SEQ ID NO: 153089 - protein, 118 aa, Oryza sativa
  unsure (1)..(118): unsure at all Xaa locations
  Clone ID: PAT_MRT4530_53076C.1.pep
LXRXRQXAXNCXXLQXFLVFNAVGGGTGSGLGSLXXEXXSVDYGKKSKXGLTGYXSPXVSTCVVEPYNSVXSXXXXVEHTDVAXLLDNXAIYDICRRCXDIXXPTXSHLNRLXFQXXS

SEQ ID NO: 153090 - protein, 366 aa, Oryza sativa
  unsure (1)..(366): unsure at all Xaa locations
  Clone ID: PAT_MRT4530_53077C.1.pep
YCCRLVPSSWLACTTVTDGDIIFTDRLAFAAADWSLRHRSWASTSSPTGLPLLPPTGVSATGLPSPPPTGVSACTAGLLCRRCWASMSLPPAAFAAADWCLRLHGWPIMPPLFWASTSSPSAAFAAADWCLRLHGWPIMPSSLGVGLPLPPPTGVFACTASLLCRRXLGINVFTDRLAFAATDWCLCPPACLRRRRLESPPXVHGRLRLHRPACLRRRRLVSSPARXVRRHRLHRPVASSAADWCLRLHGWPIMPPSLGVYIFTDRLAFAAANWCLRRLAFAAADWCLRLHGWPIMPPSLGVYVFTASCLRRHRLVSPPARLAYYAAVVLGVYVFTVGCLRRRRLVSPHFLRPATSCDANWCYRLH

SEQ ID NO: 153091 - protein, 114 aa, Oryza sativa
  Clone ID: PAT_MRT4530_53078C.1.pep
TPLAHLFPTCLLPEIFLFPLSFLRRRRSPESPRCTSLPAYCGETLKGSLGSDPFAHGSEVCGTGDIDVRRTVVGIGGPSAQQGSFDEASRLLSMIGAVAHGFSVKLAVFRWGYH

SEQ ID NO: 153092 - protein, 201 aa, Oryza sativa
  unsure (1)..(201): unsure at all Xaa locations
  Clone ID: PAT_MRT4530_53079C.1.pep
LNGKSIMPPSLGVYVFTDRLAFAAADXCLRLHDWSIMPSLLGVNAFTDWLAFATADWCLRLHGWPIMPPLLGVYVFTDRLAFAAADWYLRLHGWPIMRRLLGVYAFTDRLAFAAADWYLRLYGWPIMRRLLGVYAFTDRLAFAAADWYLRLHGXPIMPPLLGVYVFTXLAAFAATDWYLRIFSDRPPRMTPTSAIVSTAGH

SEQ ID NO: 153093 - protein, 720 aa, Oryza sativa
  unsure (1)..(720): unsure at all Xaa locations
  Clone ID: PAT_MRT4530_5307C.1.pep
MGIKPKLGPSSGGGWDGVGVAAVDGGGGCGRSPSATLPSSLSLRERRHWGTASAPRWRRLRRRCPFAVAADRRGRCLLDLRLYGECGVTPGEGGGVGASAGGGPRRTRWMREISSSTMTSGNGFNNTTTQYIRTDQGVIPLPQVVISPKGGSMGDYTADYTGIGYMQNLANGMTGHGTGLTASYAAEPSGGSDCVDSLENSIIEDIAELDDGSDCITSESEIALSPKTESQIGHVDVGKDNNNVLRDSGEIESKVAMHTYQRPYPEHVDSVPYPQGFEVPNFTKFTGEDARTTMEYIGQFIEQCGKVGSDDLLKLKLFPLSLSNFASTWYSIPAPNSISTWSQMEHEFHGYFKDVSLMEQRPIDTSSVTCETISVTSMPKTGIVSDSLPVSPIDVDKKKGKSVIIGDLRPKNRIKNTKAEDHKVAKNESSSSQKTKKPKLTFEMLMAKYNKGSAGQRLDNQTSNSKRPRSSCRKGFGQTPKQSEPSTMPTPYNPPNRSGRSKVKKVKKVWVRKEAKAPEVIAIKEKSQDVQVPTEDAAKTIQAEKTEADAVAVDIGSLTEPAGRPMLDFKSLDEIGKVIDQGWSDRHCTAGLTGGTXRSDWICMAGXRSRAAREYYLYGVEVNLGSLRYFKQDDLTVEDYKTLMESNLEDVIDKRLKTLKEMKTLQDGVFREQLMGDSLKKYFPSIWLDRGGWRLHIIARRLGVAIVLVDLSKKLPTHSI

SEQ ID NO: 153094 - protein, 1011 aa, Oryza sativa
  unsure (1)..(1011): unsure at all Xaa locations
  Clone ID: PAT_MRT4530_53080C.1.pep
MRQLDRQIXIHPADSNPQTRVSCATLFYYCRIHVSTVGAPGRGCIEFPXDKCDGINWDXSQQVLIYNHNXFSGIFPPWLHAPPRCEFLRSLRGEEKISHGENWRSFHRIVISIVSTHAQGVINFSQKPFAFTSKRXRRVACIYQYKKHMFLLILYTLPLLIRLICLHACIIGAVILXVASDFTELGPRVKPPTEISSRLGSAICTHAWIVTTLAEWCFRXARLAYYAMAYYAAVVGRLRLHRRHASVATDWCPRLYGWLVTPPFVGVYIFTXTGLPSPPPTGVSAYTAGPLCRRCWASTTSPLACLRRRRLVSSPIRLVGHTTVHGRPRLHRPXAFAAADWCLRLHGWPIMPPLXGVYDFNAGLPSSPPTGVFIVINGRANSRCLGAMTSRVECLNVRSHLLGEIKLISYASGMDQSEHHHRLAFAAADWCLRLYSWSIMPPSLGVYVFTXGLPLPPPTGVFACTTGLLCRRCXASTLSPXPACLRRRRLVSPPTRLAYYAAVVGRLHLHRXLAFAAADWCLRLHGWPIMPSLLGVXRLHRRLPSPPLTGVFAXTASLLCRRRWASTSSPTGLPLPPPTSVFACMTGLXYAVVVGRQRFHRLACLRHCRLVSPPARLAXMPPLLGVYVFTDRLAFAAADWYLRLHGWPIMRRLLGVYAFTDRLAFAAADWYLRLYGWPIMRRLLGVYAFTDRLAFAAADWYLRLHGXPIMPPLLGVYVFTAGCLRRHRLVSPPARLAYYAAVVWLLRLHXPAAFAAADWCLRLHGXPIMPPLFWASTSSPSAAFAAADWFLRLHGWPIMPPLFGVYVFTAGSPSPLNWCLRLHGWFIMTPTSAIVSTAGHIAATAIRRHHLQRKLSTSTADWFLHFHGCMILPVLIGLIVFTAATTTDGRHFLPSPTGYAAADWCFYLHNYSSSLPVCFCCRRLVFTSSRLCNFVTMVEQPHLYYLRHWQTLLPLLRKLCYFADHDIYRSLDISACVNKYNAMLFYYKWCSNIQDFYSDIFFAYIHSSNDY

SEQ ID NO: 153095 - protein, 90 aa, Oryza sativa
  Clone ID: PAT_MRT4530_53081C.1.pep
ARGVCLETYLLGSCSSIFVYGGYATYCVWIRNAKYAQSMSSTMCSIVLNLPIRIFAAVFSFTVGMQHTVCGLGMPNMLKVASNFGRKYSN

SEQ ID NO: 153096 - protein, 239 aa, Oryza sativa
  unsure (1)..(239): unsure at all Xaa locations
  Clone ID: PAT_MRT4530_53082C.1.pep
MKFQSVCLALASANMALANNLLANLADSWIRNNHETQRPYWYGRAVVFEGYEAAIELTKNQTLVDWYRGQMDLVVADNGTIINYDMSKHSLDNYRIGMNLIWWYKRTGEEKYKQAADFIRDRINQHPRTPTGGFWHREPTYPDQMWLDGIFMADSFYAVWTKEFDAKNTTAWDXLVLQWDKIQEVTIDXETGLPVHGFDESKIAVWADPETGASPIVGSRAVGWYFWPPHEGSRRLPQV

SEQ ID NO: 153097 - protein, 82 aa, Oryza sativa
  unsure (1)..(82): unsure at all Xaa locations
  Clone ID: PAT_MRT4530_53083C.1.pep
VRTHGXQWCPGMRFKMAFETEDSSRISWFMGTVAGVQASDPVRWPQSPWRLLQVHLHGTNMRQPQLDHDRVVEFLINWPPRR

SEQ ID NO: 153098 - protein, 379 aa, Oryza sativa
  Clone ID: PAT_MRT4530_53084C.1.pep
MAKPRKNSTTTNTSSSGVAAAAAAAAVKPKRTRKSVPRESPSQRSSVYRGVTRHRWTGRFEAHLWDKNSWNESQNKKGKQVYLGAYDDEEAAARAYDLAALKYWGPDTILNFPLSAYEGELKEMEGQSREEYIGSLRRKSSGFSRGVSKYRGVARHHHNGRWEARIGRVFGNKYLYLGTYATQEEAAMAYDMAAIEYRGLNAVTNFDLSRYIKWLRPGADGAGAPQNPHPMLGALSAQDLPAIDLDAMASSFQHDGHGAAAAAAQLIPARHSLGHTPTTSALSLLLQSPKFKEMIERTSAAETTTTSSTTTSSSSPSPPQATKDDGASPQCSFPEDIQTYFGCAAEDGAAGAGYADVDGLFFGDLAAYASPAFHFELDL

SEQ ID NO: 153099 - protein, 63 aa, Oryza sativa
  Clone ID: PAT_MRT4530_53085C.1.pep
KFCLSESQICNVIILKKYFSLCPLNINTATSSLPDNCTSTTIVSLYRHVMLLGIVNFHGIFNC

SEQ ID NO: 153100 - protein, 66 aa, Oryza sativa
  unsure (1)..(66): unsure at all Xaa locations
  Clone ID: PAT_MRT4530_53086C.1.pep
FSKAFFLVLVPMRTRSGDCRCYAGASSRQFVDVIKFISVSCIHLLKTVILVGCSCVHWLKQLXNRQ

SEQ ID NO: 153101 - protein, 335 aa, Oryza sativa
  unsure (1)..(335): unsure at all Xaa locations
  Clone ID: PAT_MRT4530_53087C.1.pep
EGGATDRYQIGRAIDRPLELPKEDAWKENKEGESIKTTQVQNPPQSQTPSQNQNTAQTQNPNITQNQVQAQFSIYSSNPIQTQLSLQNQLPIKTHIPIQPHISVQTXVPTQIQYPETQSHQTYPPIPCTXNQIHIPQIQIPQSDIPQTHFPQNDITQIQIPQXRIPQVQESQPTFAHMQVPNTQATQNHNQHSQGFSPFRVQEPEIVLEQGYIPQMANHIQXGQIPNQAFQFQSTQHYFEPTRAIDSKNPLRNLQMAXPWPANFXKLSNITKYKXGDTDPHEVFEGGGTSRLKQNGGNDTXKAKRLLTMLEVGGLCWDIYMPPDIYSREAMRDTL

SEQ ID NO: 153102 - protein, 574 aa, Oryza sativa
  Clone ID: PAT_MRT4530_53088C.1.pep
MRRPRRAAAGCGCGRRLRPLLMLLPFAALLSVATFSLHSPVGLVVPAAVTVATSTDTDTDTASSHHHHHGLVGDAVSGIDIRLNATPPLHAAAVRAFRSGGRLLREAFLPGAAPPPAVGGGPDPSPPRCPPFVALSGAELRGAGDALALPCGLGLGSHVTVVGSPRRVAANAVAQFAVEVRGGGDGDGDEAARILHFNPRLRGDWSGRPVIEQNTRFRGQWGPALRCEGWRSRPDEETVDGLVKCEQWGGNYGSKLNELKKMWFLNRVAGQRNRGSMDWPYPFVEDELFVLTLSTGLEGYHVQVDGRHVASFPYRVGYSLEDAAILSVNGDVDIQSIVAGSLPMAYPRNAQRNLELLTELKAPPLPEEPIELFIGILSAGSHFTERMAVRRSWMSSVRNSSGAMARFFVALTRVISAKYIMKCDDDTFVRLDSVMADVRKIPYGKSFYLGNINYYHRPLREGKWAVSFEEWPREAYPPYANGPGYIVSSDIANFVVSEMEKGRLNLFKMEDVSMGMWVGQFVDTVKAVDYIHSLRFCQFGCVDDYLTAHYQSPGQMACLWDKLAQGRPQCCNPR

SEQ ID NO: 153103 - protein, 370 aa, Oryza sativa
  Clone ID: PAT_MRT4530_53089C.1.pep
ESYCLIRSSILASLRFVESIADAQSRVFLAISLFFLRSSTSRSILTHTASICWYTTPSSIDADSRAADLSSATATTTASPPCAASPTPATKACGSAPTPTPPSTTAGRTRSGRAPPPSTSSTAPSTAGRTCSCSGSGGAPPPSASSTAGRTRGSRAWSPSTAGRTCSGRAPPPSAAGGPRSDSKASPPRLPRASTRRSGAPTRPRTRQRGERRRAGPCRRRRKSGRRAPFDHCGLAPGSPELLRRAPRQPVIQRWWWRRSHSPTRRRWPWRSAARTSRERTASRASTPAAASRLRARCGAANSGRAILDGCVVRYESAACLDGPATLPENTQVCNGSADVADGGFVDAARGLVGELAAAAPRASWLAASQ

SEQ ID NO: 153104 - protein, 140 aa, Oryza sativa
  Clone ID: PAT_MRT4530_5308C.1.pep
MIIFTLMKLSLSYLIESRVDDNSLQASLDENAISCVAKPSDGSDCVNNLCNDAIISIAEPNVGSNCLTSLDNNATTIIAEPSVGSDCVTSLDNDGIAEPSGDSDCVASLENNIIEDIADLNDGSDCITSKDEIALSPGIL

SEQ ID NO: 153105 - protein, 86 aa, Oryza sativa
  Clone ID: PAT_MRT4530_53090C.1.pep
RRLSAAPLDAARSAARRRVGRSTRLEEERRRRAWAAPPPSSAAPFAGAAELRRACRSTLPWPPLIHVGVICSPCLVLLSESTAKFR

SEQ ID NO: 153106 - protein, 259 aa, Oryza sativa
  Clone ID: PAT_MRT4530_53091C.1.pep
MSLAVATPASARLSPLTTSSPEPCRRRRLLLSAAAPLRRTRLRRRIAVVASVPDPAARPAEYTPWLIAGLGNPGSKYHGTRHNVGFEMVDRIARDEGITMNTIQSKSLLGIGSIGEVPVLLVKPQSYINYSGEAIGPLAAYYQVPLRHILVMYDEMSLPNGVLRLQRKGGHGRHNGLQNVMECLDSSRELPRLSIGIGSPPGKMDTRAFLLQKFSSEEQLQIDTALEQGVDAVRTLVLKGFSGSIERFNLVQKYKFHSV

SEQ ID NO: 153107 - protein, 513 aa, Oryza sativa
  Clone ID: PAT_MRT4530_53092C.1.pep
MRPERRSRRRPGRPSAGRARAAQAGPAAGAAAASAQQQRSCSPGRRAMWNLTSASGDQASVSSHPAPPPAKKKRSLPGNPDPEAEVIALSPRTLMATNRYVCEICGKGFQRDQNLQLHRRGHNLPWKLKQRNPKEVVRKKVYVCPEAGCVHHDPARALGDLTGIKKHFSRQHGEKKWKCDKCSKRYAVHSDWKAHSKVCGTREYRCDCGTLFSRRDSFITHRAFCDALAEESARAVTAAAAVAGQQQHGGGMLFSQVADVLDHQAAMAMGGHGLMQELCLKREQQQQQQQFAPSWLTAQQQQQQLEAMAGAGNPAAMYGSARLDQEFIGSSTPESGGAQQAGLSFGFSSTSSAPPHPAASSAHMSATALLQKAAQMGATLSRPSSHAHMAAAAAASTHNSSSSAATTNAPPPPPTSNVSSTCVGAGGYGLAFEASHFIAADESSRGARSDRDTGNGVAGAGNDGLTRDFLGLRAFSHGNIMSMAGFDPCMSTTSASSAAPYDHHHHSNKPWHS

SEQ ID NO: 153108 - protein, 63 aa, Oryza sativa
  Clone ID: PAT_MRT4530_53093C.1.pep
VFFQMDMDGYMPHIKGIELNQIYNIIIENIFISQSLHVQNTGYKVRYILKNEILNSSKFKHIG

SEQ ID NO: 153109 - protein, 76 aa, Oryza sativa
  Clone ID: PAT_MRT4530_53094C.1.pep
NVDLVFLTTSLLFHFMVPESGKYTDLETCKVEAEECDTYEENNEEPVAMIEESPPDIGQDGEDGDSCDSSWSMECT

SEQ ID NO: 153110 - protein, 369 aa, Oryza sativa
  Clone ID: PAT_MRT4530_53095C.1.pep
MATAACGESPSRLGSASAIVADTETRYHLLKIGCYSRTKATTPTGSFLSSGQFTVGGHRWRINYYPNGESADSADYISLYLLLDDKATNSSVKVQAQFKFQISSTDQVKNTPSLASTNVNTYGEDSSWSWGHRKFIKREDFEKSNDLRDDSFTIRCDVAVIGEIRTEKTTEIPSATTFVTVPPSDLNQQLVDLLETEKGADVVFEVSGETFAAHRCLLAARSPVFSAELYGLMKEGDTAGVVRIEDMEAQVFKLLLRFMYTDSLPKMEEEDVMWQHLLVAADRHDLQRLKLICEDRLCNYIGVSTVLNILVLADQHHCDGLKKACFSFLGSLENLSAVVTGDGLEHLSRSYPSLMKELFVVMALPPNHA

SEQ ID NO: 153111 - protein, 249 aa, Oryza sativa
  unsure (1)..(249): unsure at all Xaa locations
  Clone ID: PAT_MRT4530_53096C.1.pep
MEEATGAGDVGASDGAPPPVVKMTTEGGNAAAGDRGGAARGRRERSWAAGDERQGGVATRRRRAGRRGGLTSLAAALGGLEAVLIVARSDDSSRHHPPSAAAFVVFPHGGARARRVVRPATAAPEEAIEAPLKRKETASPPPPPDGLVTNKPPGMRFTARRNMRGPDGXVDHLHNSNSFDAISVSGSDGSSGRFTVKNNASMQDSRLSSTCFSTQTTSTASGRLRVARLRGGGRWRGPEDSIGDGPVGG

SEQ ID NO: 153112 - protein, 301 aa, Oryza sativa
  Clone ID: PAT_MRT4530_53097C.1.pep
ELGGMEEATGAGDVAASDGASPPVVKMTTEGGNAAAGDRGGAARGRRERSWAAGDERQGGMATRRRRAGRRGGLSSLAAALGGLEAVLIVARSDNSSRPHPPSAAAFVGFPHGGAHARRVVRPATAAPEEAIEAPLKRKETASPPPPLVRTRMDTLPAVPIRTSRLSCSILRSTCSGNCHAELFEIRISLAELESWELRETSSTVSGSRLSSTCFSTQTSSTASGRVRVARLQGGGRWRGPADGIGDEIGIGKGGEVVGVVGVTGEEEARTPAAAAASPAGRRTSSPGDLLPTAGRPSQRE

SEQ ID NO: 153113 - protein, 152 aa, Oryza sativa
  Clone ID: PAT_MRT4530_53098C.1.pep
DLKKAPQKYFFIRDFFPIQKTPEEALSKFFLKNSPTQSLERCAQQPPFLSLESTHPSPFYFVPPSDLFLPLYFFCAFLPVTIFTVNKFFSLNFFCFFARTLIFTPPPLPVFFFFKKKKKKLNKKKKPQPKFFNFKKKKKKKKKKKKKKKKKK

SEQ ID NO: 153114 - protein, 155 aa, Oryza sativa
  Clone ID: PAT_MRT4530_53099C.1.pep
MHSDLHKASKALNDNKLAKIASLQDEVARLKKKNAILRKRLAPGGLRIRSMPRKSTTTPMCIQLVHRNPSPPPPALEPLPRFVPPSPPTPPLPSPTPAPAPSPTPALTFAPVSASVSNGSGGWLFATSSNSSGSSSFEPDSYDTYLSDSRSCSEH

SEQ ID NO: 153115 - protein, 850 aa, Oryza sativa
  Clone ID: PAT_MRT4530_5309C.1.pep
MGRHASPHIPNAYNDINRGYPPDTRYGQYNNIVPQQPPFRPPSLPPDPPRPETVEDWFRNTIRENFAKLRNRAREYQKPYPDFYDIIPYPRGYKIPEFTKFSGEDSRTTWEHIDQFLAQCGEANWDTCKLCLFSLSLSSTAFAWFTSLPAYSIFSLAQLEQKFHDYFHTSETELRLSDLTSVRHKYNESVADYTKRFRDIKSRCFSLKITDKDLANIAYDGLLGSIKERLNGQIFLDVDHVLHKALAQESRVDDNSLNASLNDSAISCIAKPINGSDCVNNLCNDAITIIAEPNVGSDCLASLDNDATTIMAEPSDGLDCVISLDNDGIAEPSDGSDCVSSLDNDIIEIIAELSDCSDYITSESEIALSPKTESQIGHVDVGKDDDNVLQDSGEIESKVAIHTYQRPYPEHIDSVPYPQGFEVPNFTKFTGEDARITMEHIGQFIEQCGKADSDDLLKLKLFPLSLSNFASTWYSLLAPNSISTWSQMEHEFHDYFKDASLMEQRPIDTSSVTCETISVTPMPKTGIVSNFLPISPIDVDKKKGKSVIIGDPRPKNRIKNAKAEDHKVAKNELSSIQRTKKPKLTFEMLMAKYKKGLPPPMPYYQEWKESPRSASSHSSNSRQDRFLQNNRSGGSKVKKVKKVWVRKEAKAPEVIAINEEYQDVHVPTRDAAKTIQAEKTKADAVVVDISGLTKPAGRSNRQTTASLTDPPGRKPILLGGQDINMLMKKSREMNGDGYNITSLSRRLLDAKASLDEIGKVIDQGRSDRQCTTGLTGGTVVEVNLGSFRYFKQDDLSVEDYKTLMGSNFEDVIDKRLKTLKEMKTLQDSVFREQLMGDSLKKYFLSIWQDA

SEQ ID NO: 153116 - protein, 966 aa, Oryza sativa
  Clone ID: PAT_MRT4530_530C.1.pep
MPANPKLAAKPSPSPPTAAAAASRPKATAKPPLGAGYRDNDDDDDDFQSPPRASSRAARALKPSGNGAASRRPSKRLKPSSSCCSGKENRPAAAGSGRAPAGRAASKGAGVGETLGVVSRVSSGVPGGDKARGGGICGLLRCGSDDFSSVSNGKKGLDRYWRRDGGLHSRPNPMDSTVSMPDATCDLENGGSQVAQMLSSNDRISVQLEGNAKVELGKSESDPTTMRKERNGSGACESDHPARLIEPRLLTLVTNCDFGGADSMDSKELGSAIHPSVSKDRNVENESGGASVCTFALHNRNCHSSCVESELEMLNAKYDLGPRDCKESQEGPGLCSLISEERTVAAEGDATFTFEERGNTSSGLEACKGSHCLDPVEPKLMDSCATHALEGDGCDDFEIGTQLNELINLCMEDYTEGPLSNKVACLEGNGMDCGSFNSSCEVQCPLCGSNISDLSEELRLVHTNSCLDGDKPAKEPNSDNQNEPCGESNVEKRRVMEWLRNLGLSKYEEIFIKEEVDWETLQWLTEEDLLGMGITSLGPRKKIAHALCELRKKNNDANDLAADMLNLENTKKAKIPMNGNKLITEYFRCPSSDQRQKKACKVNTPSNLNSQKKSNAKATGGRRTVKGKVKDTPIWCCIPGTPFRVDAFRYLRGDCCHWFLTHFHVDHYQGLTKSFCHGKIYCSSVTANLVHYKIGIPWDRLHVLPLNEKITIAGVNLTCFDANHCPGAVIILFEPSNGKAVLHTGDFRFSSEMANNRVLQSSPIHTLILDTTYCNPRYDFPTQEIVIQFVIEAIQAEAFNPKTLFLIGSYTIGKERLYMEVARLLQKKIYVGAAKLQILKHLGLPQEIMHWFTANEAESHIHVVPMWTLASFKRMKYLSTQYADRFDLIVAFCPTGWSFGKGKKRTPGRKWQQGAIIRYEVPYSEHSSFTELREFVRFISPEHIIPSVNNDGPDSANAMLAQLLND

SEQ ID NO: 153117 - protein, 361 aa, Oryza sativa
  Clone ID: PAT_MRT4530_53100C.1.pep
MEAERDGEEQRRPLLSSSSPPPPSPGRRTATAFAVRPRSLPDPPFQAPSRDRLTLPASFRRIPFPAAAEHQHQHQQQYQYLGRSSSSALRGGGGGGGGGAGWGVGPEVSAAEVSCVRDPNISWLYLAGGLAIVPQGPYPYGGEYQPSHDGRRDVLDEVEIRQLLIDHVGHRCCWGSRPARTWKITSIEDCNVYVGTLETFIEERDTVTNKEPYDGGKIDGRDKGPVLAVWELDLRKTLSARKVSATRGAASVPDEVFHRAQGIQLCNIQAYQCTPAFFADSYQLNQFSSEVVASRLPVPPSARVISERHIISVVPVIRVTMAHRKQCFSFYVVGYNRDVFIRDYPSKFCWGLCCCFEWLRN

SEQ ID NO: 153118 - protein, 51 aa, Oryza sativa
  Clone ID: PAT_MRT4530_53101C.1.pep
SRSVGQSSSRPRRWTWASRRRSPAPRPPNRASGERRGEGRRGEGSGEARGR

SEQ ID NO: 153119 - protein, 357 aa, Oryza sativa
  Clone ID: PAT_MRT4530_53102C.1.pep
MALAPASSGSGPVVTEVEMNAGADQGATGTVRATVVQACTVFYDTPATLDKAEKLVAEAAGYGSQIVLFPEVFVGGYPHGSTFGLTIGNRSAKGKEDFHKYHAAAIDVPGPEVTRLAALAGKYKIFLVMGVVERVGYTLYNTVLFFDPLGKYLGKHRKVMPTGLERVFRGFGDGSTIPVYDTPIGKIGAVICWENRMPLLRTAMYAKGVQIYCAPTADFSPSWQASMTHIAVEGGCFVLSANQFCRRKNYPPAPEYTFGGLDEEPSPESVIWPGGSSIVSPSGTVLAGPNYEGEGLLTADLDLGEIARAKFDFDVVGHYARPEVLSLTVKTESKLPVSFTSAAEKNSAAKSDGISRT

SEQ ID NO: 153120 - protein, 47 aa, Oryza sativa
  Clone ID: PAT_MRT4530_53103C.1.pep
ANLLPDFQFVALTVLRDVTEQQCHLRTGGNLDMICLMRYVLGQKEPI

SEQ ID NO: 153121 - protein, 99 aa, Oryza sativa
  Clone ID: PAT_MRT4530_53104C.1.pep
QSTLCSCEYNQVHFQIRLLASAMEELIRPPPCRDASNVLLRPVISYGYHPSAYLAPMRVILSWRHKPSNMEFIHPDCSSCICHRVGVGLIPPAQHPRVR

SEQ ID NO: 153122 - protein, 83 aa, Oryza sativa
  Clone ID: PAT_MRT4530_53105C.1.pep
MVQPNHCCGLSGSTLAGRFPPTPGGHLDQEVPTDPRSAFRSTRLKMLDPRVDRTPSSAELTSAPLAICCHVGDYDALPMMVVD

SEQ ID NO: 153123 - protein, 96 aa, Oryza sativa
  Clone ID: PAT_MRT4530_53106C.1.pep
RLGLGHVILPLLPFFLPVSLPYLFLRSGGGGDKAEGSSGGGERRRAGGGGEGGTDVGQITDAAPSEGQEEAADGVTFNTISAHRRPFCFSFISTSS

SEQ ID NO: 153124 - protein, 88 aa, Oryza sativa
  Clone ID: PAT_MRT4530_53107C.1.pep
MSGRRASGRITDDEINELISKLQSLLPESSRRRGATSRSPATKLLKEMCSYIKSLHREVDDLSERLSELMATMDSNSPQADIIRSLLR

SEQ ID NO: 153125 - protein, 135 aa, Oryza sativa
  Clone ID: PAT_MRT4530_53108C.1.pep
MEKQQSAAAARPHWRRREPSDGEVYVVHPTHFRTVVQQLTVENSCLILFLLSQIMSSISWQYGAHVSTCRISITFPKPSAEQSTARLGPGEGDLAAARGGAVDLRRSPAGGQGTRRRGDDRRDMAVMAKPLVATG

SEQ ID NO: 153126 - protein, 296 aa, Oryza sativa
  Clone ID: PAT_MRT4530_53109C.1.pep
MRKRERENPCEICGHYHNSEEGERCGVCGHRSGPMAGEPPATLDPAFPTEVLKDFLFLGSYNNASRSEVLKTLSITHILNTVPDCQNLYRNSFTYHCIQDERSLDFDGANRFLEQCERETSRVLVHCMSGKNRCDSSVVSIHVVSIVVNDRLILLWYKISRSAAIVIGYLMKSRGWRLSQSYQWVKDRRPQVQLTDASQNQLVEYEQKLFGPNVGAPAQSSVPTESFRPLGFGFPKPAGDIQAPVFNQQPVPSIFERVNPSNIPSNFTFGAMEANTPMDDNGAPAPTSGDNPMDSS

SEQ ID NO: 153127 - protein, 105 aa, Oryza sativa
  Clone ID: PAT_MRT4530_5310C.1.pep
MQSISIDNHYPFSNNKQSELGDLVGDRVECRPAPGPAHAQIWTGAPQTLARTNLGGREVDSGSAVDGERGARWRHAAAEEEAARRGGGFGGGGGARWKGEKWRRA

SEQ ID NO: 153128 - protein, 183 aa, Oryza sativa
  Clone ID: PAT_MRT4530_53110C.1.pep
MPCAAAELANGEAAAAAACAVKVGTTGTIGSLMTRELEAIKAAPPHATAAATTPRRLRRQSSPVSVPCGASPRKIAALRKSSSSLSTTSSGGGSGRRTDRVSAEESSACKTAACRRSSSTTPASSPMLAADVDRSGGGGKAKKAAARGRRGVGGVEVVDVRCGNPMSSRLRRLGFSKLSETFA

SEQ ID NO: 153129 - protein, 127 aa, Oryza sativa
  Clone ID: PAT_MRT4530_53111C.1.pep
GRGSKGRESGRGERRGERGGRGKGGNGGKQQQSATHGRQGEGGPAEKRRTGGRRRERGEEGGEQDEGGRRARRRGKGGQTGEEKPKPRSGEGVQEGREEKGTGDEGTASRAEETGSRGEEKERPRKR

SEQ ID NO: 153130 - protein, 98 aa, Oryza sativa
  Clone ID: PAT_MRT4530_53112C.1.pep
QGPSKGSGGGGRSRPPKQSAGQRERGTAKKRRQNQPRRPDATPGETPTARRGRQRERRTKKRRPQRHQNRVAKRGCPPPPPPLPILPSITTRIHRSPA

SEQ ID NO: 153131 - protein, 340 aa, Oryza sativa
  Clone ID: PAT_MRT4530_53113C.1.pep
MSNPSSPATSTAAGEQQLHDQDHRDEAALQQEHAAAGIIPDDEDKLSPPRCEWEFRLAATVPSPALAGASDSIGSLDFDPTGRHLATGGIARKIRIYRVAEPSSPAACICVPAKLSSVRWRPGGGEAVAASHVGCGDYDGVVTEYDVERGVPVWERDEHEGRRVWALYYARGGGAATMVASGSDDRTAHVWDPRAPAGAAGSWATARAGGAVLCVEFDPAGGPQLTTAAREVRSYSGHVSGRSFVGMGVWRGAGLIASGSESGHVFVYDLRWSKPIWVHPFSHADAFVSAVAWRQLAGDDSDGQLVAGGSDGVLKLFTTHRRLTPDVAGVGGDDDDDVAA

SEQ ID NO: 153132 - protein, 37 aa, Oryza sativa
  Clone ID: PAT_MRT4530_53114C.1.pep
ASRLFKLQALTNMKVMTLHVYASASLISVLCGHPLSP

SEQ ID NO: 153133 - protein, 404 aa, Oryza sativa
  Clone ID: PAT_MRT4530_53115C.1.pep
MSNPSSPATSTAAGEQQLHDQDHRDEAALQQEHAAAGIIPDDEDKLSPPRCEWEFRLAATVPSPALAGASDSIGSLDFDPTGRHLATGGIARKIRIYRVAEPSSPAACICVPAKLSSVRWRPGGGEAVAASHVGCGDYDGVVTEYDVERGVPVWERDEHEGRRVWALDYARGGGAATMVASGSDDRTAHVWDPRAPAGAAGSWATARAGGAVLCVEFDPAGGPQLAVGSADRRAAVHDVRALGRGAVASMDGHGRAVTYVRWAATARRVVTSAADGTHRLWALPAPAAAETAAREVRSYSGHVSGRSFVGMGVWRGAGLIASGSESGHVFVYDLRWSKPIWVHPFSHADAFVSAVAWRQLAGDDSDGQLVAGGSDGVLKLFTTHRRLTPDVAGVGGDDDDDVAA

SEQ ID NO: 153134 - protein, 97 aa, Oryza sativa
  Clone ID: PAT_MRT4530_53116C.1.pep
EKPAPPKTMNGSTSPQSPLFGRPFSPGSIYPGGPSTPPSKPPMDDDGFFPPVYQLDKKPLSIVLGLCPPLFQMPPIPLSMLIQACMGICTLAQKINL

SEQ ID NO: 153135 - protein, 76 aa, Oryza sativa
  unsure (1)..(76): unsure at all Xaa locations
  Clone ID: PAT_MRT4530_53117C.1.pep
SVPYGRVEVPIPKFAYKIQLRRXIALVMKVNVMFISTNTKEPRNGGYGESEIPPPLLYGYASCKLHMILRINMLTF

SEQ ID NO: 153136 - protein, 52 aa, Oryza sativa
  unsure (1)..(52): unsure at all Xaa locations
  Clone ID: PAT_MRT4530_53118C.1.pep
GSCVLLEDIVYXVVGIHLRIPICFVLFWRYYYATAKEXXHXSVXHSAPLQRS

SEQ ID NO: 153137 - protein, 253 aa, Oryza sativa
  Clone ID: PAT_MRT4530_53119C.1.pep
MTDDGGGRNRRRRGAEAAGSAGLATARRGVADSKARVTIQPLIPEIFGSSTQPANASPCRQDGQTSWDAVKKERLVQSAQLGVAKLHIGVALEDLPLRGSRRHPIRSGATVAMALHRGGLGSQGHEVTAKLLQRLPQRRPPLPPSAMFMKETGCNPIRWDQRRWHQESRDRSGASGMASSSLLITDQRCIGETWRLEAGRPCAMRGFQADLALMADIACAGATPAAHCRHPKTAEDFLKLSPGRKVNFSLDAS

SEQ ID NO: 153138 - protein, 769 aa, Oryza sativa
  unsure (1)..(769): unsure at all Xaa locations
  Clone ID: PAT_MRT4530_5311C.1.pep
ANPNLGHWKNTFKSWPSLEKLTPDKSWSTWYQRXSKKVHWDEIGIGQALALTIANSAKDEPLMAAATYFWSNTINAFLFNQGPMTPTLIDITMITGLDVTSSANPMSINIKNQFDLKTKSIGGWFGYVAAYMGQGSVTPREHVAFLLMWLEKFLFCGSSCGPTTNWQFVAEALESKKEFPLGKILLGYLYQMLNNASARIAVGSVVGAGGPWWLLQTWLNLIVMKVVNRPSITEAEFTLPGPIVEDDGEERTHRRCMSYGEYASTPTDAGAKLSAELLKDWFCSFYEGFKKDARIWFPYEDSADLELPSDFRFEDINHKKFQKSREVFIAAINPCILPVGIHQGRNIQDSYEFYHPMSSARQLGLGQLPIGLFFADKIQCRGQITSTLMMDRLLNLPGPPLGSIENIELAGFRSKNFDRWWGEWKLHLFHQSATMYMTDLFPDVIPQTTESSPPHQSNSGKNIEYASGLILNGGGLSPPVIGYHAPKTSTLLHGLTRELADAGQKRKTRPSAVNTLVLAPKKKAKFKKTKPTDKPADDLPALDPFIEQALDEEEIGEDVDQAVAEMSDTERTPSASPKQTPPTPSAPVHFTRKKKTAVKKKSAATTSKLAPPQSSSDQTPSAVGSHHVEEEEQPTAPAVPVLADLFSFNIRDYLDEGEEDTTSKALASLSDDVKKTLEKKSKLDQLSEGPIKSNIDRLEARKIELLAQLEECNAELDMEHKKLADLPNTIEEQKARLKSAIKHVADLTKSLKVIPGTDAQDAQAIEEVE

SEQ ID NO: 153139 - protein, 113 aa, Oryza sativa
  unsure (1)..(113): unsure at all Xaa locations
  Clone ID: PAT_MRT4530_53120C.1.pep
ISNPQSPIPGGGVPACRLQQAATGRRLRWRLGNPAAAARPGGRRAXAAEAGRKLRRRAHGEEGRPAATRRRPRRRSAGAXGARGVGGYGPATGRGRRLWGCSDGCRSDRRWSG

SEQ ID NO: 153140 - protein, 272 aa, Oryza sativa
  Clone ID: PAT_MRT4530_53121C.1.pep
MTDDGGGRNRRRRGAEAAGSAGLATARRGVADSKARVTIQPLIPEIFGSSTQPANASPCRQDGQTSWDAVKKERLVQSAQLGVAKLHIGVALEDLPLRGSRRHPIRSGATVAMALHRGGLGSQGHEVTAKLLQRLPQRRPPLPPSAMFMKETGCNPIRWDQRRWHQESRDRSGASGMASSSLLITDQRCIGETWRLEAGRPCAMRGFQADLALMADIACAGPHLLLVNFFPIYKLGPHQHLRHFSYCRHPKTAEDFLKLSPGRKVNFSLDAS

SEQ ID NO: 153141 - protein, 358 aa, Oryza sativa
  Clone ID: PAT_MRT4530_53122C.1.pep
MAQRTLELTLISAKDLKDVNLLSKMEVYAVVSLSGDRRSRQRIATDRAGGRNPAWNAAPLRFTVPASGAGSLHVLLRAERALGDRDVGEVHIPLSELLSGAPDGAVPAKFVSYQVRKISSGKPQGVLNFSYKIGEVTQSGSYPGASPPVAYGQAPPAPAYPPSAAAAAAYPPQSTYPPPTAYPTAAKADGSAAAAYPPQSAYPPPGKGNEPSTAYPPPAGYPPATGSSKPAKAGEPVTAYPAAAGPSTAAPYGTAPPPQYGYGYPAQPPPPQAGYGYPPPPPQAGYGGGYGYPPQAGYGGYQQQAVKPAKKNNFGMGLGAGLLGGALGGLLIGDAISDASAYDAGYDAGFDDGGGFDF

SEQ ID NO: 153142 - protein, 92 aa, Oryza sativa
  Clone ID: PAT_MRT4530_53123C.1.pep
VKTACILYHSRQQGYKMINFNRPFTLHILMHKKTLWILKPLAKVMHIPLAYPQIDQIPQPKLGLSILNNAKVIVIKWPLNQCKKFIPIFCGT

SEQ ID NO: 153143 - protein, 131 aa, Oryza sativa
  Clone ID: PAT_MRT4530_53124C.1.pep
MHGSIGCCKVRIQRRTTGRSVTYTIDADAGGIWGALNCRLPAAWLAASRADRLPSRGAAAAAADPSPPTSPAPMEQLNAKLYDKYTALKKRKLLDEGLDQKRAADIKELQQAMKDWVADLQGENERLIAKL

SEQ ID NO: 153144 - protein, 112 aa, Oryza sativa
  Clone ID: PAT_MRT4530_53125C.1.pep
KVLDLSHTAITSIPECDKLVALQHLDLSYTHIMRLPERLWLLKELRHLDLSVTVALEDTLNNCSKLHKLRVLNLFRSHYGIRDVDDLNLDSLRDLLVLGITIYSQDVLKEMN

SEQ ID NO: 153145 - protein, 64 aa, Oryza sativa
  Clone ID: PAT_MRT4530_53126C.1.pep
MVTCASWAHDDAVTWEVAEVAARGTAVPSARSGRRQSGSRRQVVVGGKAAVVASDGGGGDKRIG

SEQ ID NO: 153146 - protein, 675 aa, Oryza sativa
  Clone ID: PAT_MRT4530_53127C.1.pep
MAEERESFESKWAPSDVTEENLKEMVAHGVLPAKEIIGWHPACGEAFPTPDTHEVVVFSHFFYGGVSLPTSKFFRVILEFYGISLHHLNPNSVVHIANFVHACEAFLGIKPHFALFRRIFFLKPQPNKSKPCVVGGAGFQLRGTLSQKYFSMPFKTSNKGWQANWFYVQNPEPALPEYYCLPPTYQDTWNSLPMGDEAAQALTLLDRMLKLKEQDPESLEFKIMKERIYKIFSSGIVVSYSHILPVVPYNAFNPPPLPLSAVLLADNPVRQAGVQKSSRLLNQAAQSRLINQAPGKGKWKPSDIDPSGKNPKSTNKEAGAATASETKPAEEDCPTGSQSATGNVETENEPPTGNQSVDAETGANQELLTGDQPGDEQNKDISETEGQASSPPLNDTNAGPEASTFDKVEGPARPPLKIITGPMIGDEEEILRIRSAEDSRPPILVKWWDDEMQPQGIVINKQKEDEEVSLLIRTLNQATRLVNRIYLRNEAKTATLEKLVPHLGTAEETRAKLHETRELARKTEHDLRDRVAKLQEANYELSGSSKVQAAKITELERRVKALEKDKSDLIKERDLAIKDVEDHKIKSQAQFEVLVNKIEKLEGARDEVANAATPLIQAMFYNNNDGTSEEDALDLINDAQKAADKIAVDVVERFQDTNLGPTGSNESDDEKTESG

SEQ ID NO: 153147 - protein, 105 aa, Oryza sativa
  Clone ID: PAT_MRT4530_53128C.1.pep
RNNPIARTWFSGNDATDIVVLPSARHRRACGAIGKIRRWPLDGCGNRSGDATLSPWIICKDDSALSACCVGSSGGPGIGDTKSLTNLESPFSMDISRYLPTYLPT

SEQ ID NO: 153148 - protein, 65 aa, Oryza sativa
  Clone ID: PAT_MRT4530_53129C.1.pep
LHFYPLTVLPTLGSKIDELYSSISLTNSLPNHPPTNTTFSISTFFCTPKTKNEVILGWREYCLHY

SEQ ID NO: 153149 - protein, 620 aa, Oryza sativa
  unsure (1)..(620): unsure at all Xaa locations
  Clone ID: PAT_MRT4530_5312C.1.pep
MMSGNEIMPVTLDDFEGEDRKSMEEYIKEITQEALMRACTRTRQGVIIKPGPLPKLAPNLVSNDEWNRWSGAXAGPTGYYPGGQTETQAGLTAPLDXRSNQALGRGYPPDTRQGQYNHIAPQTQPIRTPNPPPNQHRPDNMEEIISGIIRDKFGIETRNRAKVYQKSYPDYYDNVPFPRNYRVPEFTKFSAEDSRTTWEHIGQFLAQCDNDTIESIAELNDGSDCITSENEIALSPKTESKIGHVDIGKDDDNVLRDSGEIESKVAIHTYQRPYPEHIDLVTYPQGFEVLNFTKFTGENAMTTMEHIGRFIDQCGKAGSDDLLKLKLFPFSLSNFASTWYSLFAPSSISTWSQMEHEFHDYFKDASLMEQRPIDTSSVTCETISVTSMPKTEIVSDPLPVSTIDVDKKKGKRVIIGDARPKNRIKNTKAKDHKVVKDGSSNSQKTKKPRLTFEMLMAKYKKGLAGQRFDNQTSDSKRPRSSRRKRFGQTSKQSEPSTIPTPYKPPNRSGGSKVKKVKKVWVRKEAKALKVVAINEESQDVHVPTGDAAKTIQAEKTEADAVIVNIGGLTKTAGWSKRQTTAGLTDHPSRSDRRLVAGLTGPRGRFDRGALEKSEKIESNT

SEQ ID NO: 153150 - protein, 122 aa, Oryza sativa
  Clone ID: PAT_MRT4530_53130C.1.pep
GRLVCRNEQIHWMESTEHSEENSVQDKSMTLTRVHCRSSTCFGSISCAAILASIRWPTFITKRWPEALNAMLYSFLNDYLLFHLHTTVQYKAANLKNVGSEEVKMIFFFQEEIKLVHLTDVR

SEQ ID NO: 153151 - protein, 603 aa, Oryza sativa
  Clone ID: PAT_MRT4530_53131C.1.pep
MSSDDDDDGSGRTKLIIAAVVMLLAIVLGTVAYVVVDRAGDDDGLSKRGMKSTMRSVDLFCAPTDYRVACKDTLERVLARSSDPADHPHAAAAAAITAVERELARGFDRSSVLEAVRASNDSRVAEALRDCRTLLGDCRGDVSRALTSIAWRGVDAVSQDLQAWLSAVITFQGSCVDMFPQGPIKDQVREAMEKAREISSNAIAIIQQGAAFAAMLDLHASESHAAEGEELDVDHDIQHHVDRHLEDQSLPPVPPWLSDEDRRMLTSGEEFVAGLTPNVTVAKDGSGDFTNISAALDALPEAYAGKYIIYVKEGVYDETVNVTSRMANITMYGDGSKKSIVTGSKNIADGVRMWKTATFAVDGDRFTAMRLGIRNTAGEEKQQALALRVKADKSIFFNCRIEGNQDTLFAQAYRQFYRSCVISGTVDFIFGDAAAMFQRCIILVKPPLPGKPAVVTAHGRRDRQQTTGFVLHHSQVVADEDFAGAGGGSSNTSSSSGAAPRLAYLGRPWKEHARTIVMESVIGGFVHAQGYMPWEGKDNLGEAFYGEYGNSGQGANSTGRMEMRGFHVLDREKAMQFTVGRFLHGADWIPETGTPVTIGLFGG

SEQ ID NO: 153152 - protein, 54 aa, Oryza sativa
  Clone ID: PAT_MRT4530_53132C.1.pep
MSATVMQRISFQWTHIDTYYVQHMAKAIQIPTNPPCDERRTKHGIVTAATPTCN

SEQ ID NO: 153153 - protein, 115 aa, Oryza sativa
  Clone ID: PAT_MRT4530_53133C.1.pep
SRSAVSQSRASSISTTDAFLIAVGSSSARPPFSMSVVRCLASSSLCGCSPMYVCCRDACGSWSLLILSDGSVPMDLAEIVGLAGHELWRECGGGESGKPWLEPTFTFSIQLSVKN

SEQ ID NO: 153154 - protein, 38 aa, Oryza sativa
  unsure (1)..(38): unsure at all Xaa locations
  Clone ID: PAT_MRT4530_53134C.1.pep
SPCRTSSWLCAPTRWACPAAPTSATASTTRRXRSTTSS

SEQ ID NO: 153155 - protein, 67 aa, Oryza sativa
  Clone ID: PAT_MRT4530_53135C.1.pep
QADKRMYVCSSVDACKHFNIMLSCQQCVCECVKLLASSSALRPWVYGSHVRMCHTSMVACLFIIIII

SEQ ID NO: 153156 - protein, 134 aa, Oryza sativa
  Clone ID: PAT_MRT4530_53136C.1.pep
WINGEFCSASAYERIACSPAPSYTHRGSMRLIDQRKLPLKEDYIYVTCSGDGWNALTYMGVRGALARAIAAAMALALQVTGLEDFTGTPAKAARSVHQKLDYLVSGRPTGVNLSGAATQHKMQIKATAYLERCQ

SEQ ID NO: 153157 - protein, 64 aa, Oryza sativa
  Clone ID: PAT_MRT4530_53137C.1.pep
MARPRRGGRGGASPGFTTDGDDARQHPSAQMRSAKLVGVVFFMAGEGFEGDEEIEGFLSRFDRH

SEQ ID NO: 153158 - protein, 400 aa, Oryza sativa
  Clone ID: PAT_MRT4530_53138C.1.pep
LSGPGHVYSIAGLARIAGTRGRKGLAYEKLSSVITSSVPLGWMYMERSLYSEGDKKLGDLDKATELDPTLTYPYMYRAASLMRKKDARLALEEINRLLGFKLALECLELRICLYLALEDYKSAICDIHAILTLSPEYRMLEGRVAASKIGTLLGAHVEQWNTAECWLQLYERWSSVDDIGSLSVIYRMLESDAAKGVDPSYSATVISLLEDALKCPSDRLRKGQALNNLGGVYVDCEKLDAAADCYTSALKIRHTRAHQGLARVHFLRNNRDAAYEEMTKLIEKAKNNASAYEKRSEYCEREQTMTDLQIVTQLDPLRVYPYRYRAAVLMDSHKEKEAIAELTRAIAFKADLHLLHLRAAFHEHIGDVPSALRDCRAALSLDPNHQEMLELQKRVNSQEP

SEQ ID NO: 153159 - protein, 98 aa, Oryza sativa
  Clone ID: PAT_MRT4530_53139C.1.pep
LVYNNAEWLPHCDVPRIKAWVEKMAASSIPFFATPGVGRGEERPTSRRAGAPERQRRKGFFFCPLFTFSFVCGFAEPASRLQLGEGGYDGCSWRLTAA

SEQ ID NO: 153160 - protein, 874 aa, Oryza sativa
  unsure (1)..(874): unsure at all Xaa locations
  Clone ID: PAT_MRT4530_5313C.1.pep
MSSSAGPSDAPSAEYAEHLSNLVAIPSLSHENHYFLGPIGNPDPTEFIICETNRIPLRLTNPDPGHWKNTFKSWPSLEKTSLEKSWTTWFMRMSASKRVHWDEIGISQELDLTIANSAKDEPLMAAASYFWSNTINAFLFNQGPMTPTLLDIVMITGLDITSSANPMSLNIKNQYDFKTKSIGGWSSYVAVYMGQGSVTPREHVAFLLMWLEKFLFCGSSCGPTTNWQFIAEALETKRQFLLGKILLGYLYQMLNNASAKIAVGAVVGAGXPWLLQTWLNLIVMKVVNRPTVSESELPRLEPIVEDDGEERTHRRCMSYGEYASTPTDAGAKLSAELLKDXFCNFYEGFQKDARVWFLYEDSADLELPSDFRFEDINHEIYQSSREIFSAAISPCILPVGIHQGRNIQVSYEFYHPMSSARQLGMGQLLIGLFFADKIQCRGEISSTLMMDRLLNLLGPPLGSIENIELAMFRRRNFDRWWGEWKLHLFHQPASMYMTDLFPDVVPQTTESSPPRQSNSGKDIHYAPGLIPNGGGPSPPVIGYDAPKTSALLQGLIKEPADAGKKRKTRSSAVNIAVPTKKKKTRKTKPADDLPTLDPSIEQALDEEIIEDEVDQAAAEVSDTEKTPSASPKQTPPTPSTPVLFSRKKKTAVKKKSVATTSKPAPPPSPPPSPPVQQTSSDKTPSAVGSHHVEEEEQPAAPAIPKTLGSILDRLEASSLDSLVVDCGSIRAWLHEIQALIPDELTDILTLAVYLEQHQFKLEKAKLRLAERRERKDIEATIQANRQLVHEEKSKLDQLSEGPIKSNIDRLEAHKIELLAQLEECNAELDMEHKKLADLPKSIEEQKARLKSAIKHVADLTKSLKVILGTDAQDA

SEQ ID NO: 153161 - protein, 64 aa, Oryza sativa
  Clone ID: PAT_MRT4530_53140C.1.pep
MDLGFGKNVQDCIPMTVGGVVSRLRDIIIWGYILRMRGGPLMVIAQYGNSAVRGGFSKYQEGIG

SEQ ID NO: 153162 - protein, 60 aa, Oryza sativa
  unsure (1)..(60): unsure at all Xaa locations
  Clone ID: PAT_MRT4530_53141C.1.pep
MCHSRSQENKDCTFSSYRNSIQMDKXPGYLEFYGAREQSVLYPLFFXEYIYALAYDHGLN

SEQ ID NO: 153163 - protein, 54 aa, Oryza sativa
  Clone ID: PAT_MRT4530_53142C.1.pep
PIKELTDTPLLLHNGVYKAHSTRCFHPTRKLKCLYNLALFTEHPSLFSPTEGSL

SEQ ID NO: 153164 - protein, 65 aa, Oryza sativa
  Clone ID: PAT_MRT4530_53143C.1.pep
HEEWISHPEEGRVTRPSSHRVPLLPSHLQTTTAFLFLSLSSVSYQTPVWGHWTLDWSRPPPWWTP

SEQ ID NO: 153165 - protein, 165 aa, Oryza sativa
  Clone ID: PAT_MRT4530_53144C.1.pep
MAAEAAARGEGHDDGYFPILEVRILDEAWLRGGLWWRRGIRGEQGLAMAMAQQPGNVNVAGFLQASRRLRNRVIMMLWMRMLLRQLVVRWWLRVHFRRFMWVWHLRVLRARVRLFLWRIRHDHLVYILDTIMVLAYVVFKINASFIGYIEFVKLNCSSASLVGDE

SEQ ID NO: 153166 - protein, 54 aa, Oryza sativa
  Clone ID: PAT_MRT4530_53145C.1.pep
CKALPSVIPINILRHGQKVSIQLDNVHPTIKSRVRGHGLLCNMVPSYIHSFNVY

SEQ ID NO: 153167 - protein, 295 aa, Oryza sativa
  Clone ID: PAT_MRT4530_53146C.1.pep
GAAVDVHPGVAYVALDYVDSQPCKRMLPCERNPWSRRVRALSCLALGAWPQRAAALPAADIQMVEAFMFDVARFQRKGQMVLRSLALRTRSVMAFAFLGFFLSACFPQPRHPALLDAIKARAVDLLLRVQPGTSKPPPRPMPPSSPLDSASAHLLPPVHFAEVKMAEFSPSVAAAAALLAAAGEVAGAHLLGFEAGVAACPFVNSEKLRECGEVMAAACGVGPSWAAAATSAETPVTVLGHHRSASSESERTTTVGSAANSADAKRRCMGPPRQWGASFVFVQKYWMLRAMNILW

SEQ ID NO: 153168 - protein, 918 aa, Oryza sativa
  Clone ID: PAT_MRT4530_53147C.1.pep
MVKTRDDPRDSNDASGSEEQTDGAHVSGASGSRSSPPPENPTVTQMMTMMMQQMQQHYHQMLQQAQQNQQFGPPPSHVSKLLDFLRIQPPTFSSTTNPMEANDWLRAIEKKLILLQCNDREKVAFATHQLQGPASAWWDHYVVTRPDATEVTWAEFCQSFRKAQIPEGIMAQQKREFRALQQGTRTVTEYLHEFNRLARYAPEDVRTDAEKQEKFLFGLDDELTNQLISGVYEDFEKLVDKAIRQEEQRNKIDRKRKTAQISFPQGNNQKPRFMTGQLGGPSTLIVCQHRPYRPSNFNNDYNGGSHNNSKQHNHNSTPPPLMAPAQSDPPAVSVQLEQPKKGAVGKPGPCFNCGKHGHFAGKCPKLNRTGPRFIQARANHVSAEEAQAAPEVVLGTFPVNSYPATVLFDSGASHSFISKRFAGTHGLSVVELKIPMQVHTPGNDMRTAHYCPSVTIEIKRSPFLSNLILLESKDLDVILGMDWLTRNKGVIDCASRTITLTNDKGEKITFRSPASQKSVASLNQAAIEGQTETVEKSPRKLEDIPIVQEYPEVFPEDLTTMPPKREIEFRIDLAPGTAPIYKRPYRMAANELAEVKKQVDEQLQKGYIRPSTSPWGAPVIFVEKKDKTKRMCVDYHALNEVTIKNKYPLPRIDDLFDQLKGAKEHQLYAKFSKCDFWLSEVKFLGHIISAQGVAVDPSNVESVTKWTPPKTVSQIRSFLGLAGYYRRFIENFSKIARPMTQLLKKDEKFKWSAECNQSFEELKKKLVSAPVLILPDQTKDFQLRPHEANYPTHDLELAAVVHALKIWRHYLIGNRCEVYTDHKSLKYIFTQPDLNLRQRRWLELIKDYDMGIHYHPGKANVVADALSRKSYCNAVCTEGMCDKLQQDLEHLNLGIVEHGYVAALEARPTLVDQVRAAQ

SEQ ID NO: 153169 - protein, 244 aa, Oryza sativa
  unsure (1)..(244): unsure at all Xaa locations
  Clone ID: PAT_MRT4530_53148C.1.pep
ARTARALSTEPFSRFAWACQGGGGGGVAEIILXWHIATTLLEAHHGPPHPTEHVAEERRSRKTAARLSRYCAYLVAFQPELLPDNKEGTQLVYGDVMNEQMKVAVGAGQLGYHVYLTSEWGRLDAVRKIADRLTATEIHRDSSAAAYASLTVLEKGAVLGKLLVEEADGDDKAAAGGRAAVWEMVAGVWVELVAYMAPSSVEEHARAHEAGLVKGIEVITMLWALATHTGIARPDDEVPVEGSV

SEQ ID NO: 153170 - protein, 1511 aa, Oryza sativa
  Clone ID: PAT_MRT4530_53149C.1.pep
MVKTRNDPRDSSDARGSEEQTDGAHVSGASDSSSSPPLGNPTVTQMMTMMMQQMQQHHHQVLQQVQQNQRFAPPPSHLSKLLDFLRIQPPTFSSTTNPMEANDWLRVVEKKLNLLQCNDREKVAFATHQLQGPASAWWDNYVVTRPDATKVTWVEFCQNFRKAQIPEGIMAQQKREFRALQQGTRTVTEYLHEFNRLAHYAPEDVRTDAEKQEKFLFGLDDELTNQLISGVYEDFEKLVDKAIHQEEQRNKMDRKRKAAQISFPQGNNQKPRFMTGQLGGPSTLIVCQHRPYHPSNFNNDYNGGSHNNSKQHNHNSTPPPLMAPAQSDPPAVSAQSEQPKKGAVGKPGPCFNCGKHGHFASKCSKLNRTRPRFIQARANHVSAEEAQAASDVVLGTFPVNSYPATVLFDSGASHSFISKRFAGTHGLSVMELKIPMQVHTSGNDMKTSHYCPSVTIEIKRSQFLSNLILLESKDLDVILGMDWLTRHKGVIDCAGRTITLTNDKGEKITFRSPVSQKSVASLNQAAIEGQTETVEKSPRKLEDIPIVQEYPEVFPEDLTTMPPKREIEFRIDLAPGTAPIYKRPYRMAANELAEVKKQVDEQLQKGYIRPSTSPWGAPVIFVEKKDKTKRMCVDYRALNEVTIKNKYPLPRIDDLFDQLKGAKVFSKIDLRLGYHQLRIREEDIPKTAFITRYGLFECTVMSFGLTNAPAFFMNLMNKVFMEFLDKFVVVFIDDILVYSKSEEEHEHHLRLVLEKLKEHQLYAKFSKCDFWLSEVKFLGHVISAQGVAVDPSNVESVTKWTPPKTVSQIRSFLGLAGYYRRFIENFSKIARPMTQLLKKDEKFKWSAECNQSFEELKKRLVSAPVLILPDQTKDFQVYCDASRQGLGCVLMQEGRVVAYASRQLRPQETNYPTHDLELAAVVHALKIWRHYLIGNRCEVYTDHKSLKYIFTQPDLNLRQRRWLELIKDYDMGIHYHPGKANVVADALSRKSYCNALCTEDMCGKLQQDLEHLNLGIVEHGYVAALEARPTLVDQVRAAQVNDPEIAELKKNMRVGKARDFHEDEHGTIWLGERLCVPDDKELKDLILTEAHQTQYSIHPGSTKMYQDLKEKFWWVSMRREIAEFVALCDVCQRVKAEHQRPAGLLQPLQIPEWKWEEIGMDFITGLPRTSSGHDSIWVVVDRLTKVAHFIPVHTTYTGKRLAELYLSRIMCLHGVPKKIVSDRGSQFTSKFWQKLQEELGTRLNFSTAYHPQTDGQTERVNQILEDMLRACALDFGGAWDKSLPYAEFSYNNSYQSSLQMAPFEALYGRKCCTPLFWDQTGERQLFGTEVLTEAEEKVRTVRERLRIAQSRQKSYADNRRRELTFEAGDYVYLRVTPLRGVHRFQTKGKLAPRFVGPYRILERRGEVAYQLELPSNMVGIHDVFHVSQLKKCLRVPKEQASSEHIDIQEDLTYVEKPIRILETSERRTRNKVIRFCKVQWSHHSEEEATWERAAHPHLFANSSESRGRDSV

SEQ ID NO: 153171 - protein, 799 aa, Oryza sativa
  Clone ID: PAT_MRT4530_5314C.1.pep
MTSGNEINKISLEDLDVEARKITEECIKAITQEALMRSCFRTHQGVVLKPEPLIKPSFDMHRPENMEELTSIIIRDKFGIEAMDRAREYQKSYPDYYDNIPYPRGYRVPEFTNFSGEDSRTTWEYVAELNDGSDCITSESEIVLSPKIESQINHVDVGKGDDNVLRYSSEIESKVAMHTYQRPYPERIDLVPYPQGFEVPNFTKFTGEDARTTMEHICQFIEQSGKTGSNDLLKLKLFSLSLSNFASIWYSLLAPNSISTWSQMEHEFHDYFKDASLMEQNPIDNSSVTCDTISVIPFAKTRIVSNPLPISPIDLDNEKVVIRPSQAESTKGKCVIIGDLRPKTRINNTKADDHKVVKDESSSFQKTKKLNLTFEMLMAKYKKGLAGQQFDNQTSDLKRPRSYRRKRFGQTPKQSEPSTIPTPYKPPIVMPWYPYPMSLYGYPFMYYMPWMPQPYMPFHQEWKQSSRSVPSHSFNSSQDRFPQKSRSGGSKVKQVKKVWVRKEAKAPEVVTIKEESQDVQVPTRDAVKTIQAKKTEADAVTAKSGGLIETAGWSDRRLATGLTGPRGWSDRGALEKSGKCGIHLAFEIVQSRKPILLGGQDINMLMKKSKEMNNDGYNITSLSRRLLDAKTRLLWEKYMKGFVELINWPGQRFVLIATDYFIKWAEAVPLKNITYTEANGQAESSNKTLLKLVEKEIEEHQKKWHEVLSEALWTHRIFKHGVTKVTSFELVCGQEAVLPIEVNLGYLRYFKQDDLSVEDYKILMGGNFEDVIDKRLKTLKEMDALQENNPWEILEEILP

SEQ ID NO: 153172 - protein, 916 aa, Oryza sativa
  unsure (1)..(916): unsure at all Xaa locations
  Clone ID: PAT_MRT4530_53150C.1.pep
MQFTFESEVDRIFSAPLGSLANNSKRSCCRNIDNPEALIFSSATAISMLGWNNQDQYPISTSFPRSVLLGALNDRLLLVNPTDINPRQKKGVEIRSCLIGLLEPLLIGFATMQQYFEQKLDLSEVLYQITSRFDSLRVTPRSLDILAKGPPVCGDLAVSLSQAGPQFTQIMRCNYAIKALRFSTALSILKDEFLRSRDYPQCPPTSHLFQRFRELGYACIKYGAGEVMPYMKTTDAGIPSVTADHIGVYLGVMMRRLSQVEVSXKSLVKAIAAASGDNARPASSESTQKNVANAGGDSVGDTLARQLGGPNCFMQMNRQKQQRSSKRLYMVLLMVEVVAGIPSVTADHIGVYLGVMKGRGTVVEVSEKSLVKAIAAASGDNARPASSESTQKNVANAGGGSXGCYSAAGAAIPNAAVDXQATAAEEFKKTLYGVVDGGSSDEDESTSKTKKIHIRIRDKPAASTVDVNKLKEATKQLGLGPPITRTRSLSGTPQELNQXLCRRQVSTTRMVAKGTXPQRPGMPMDPISLPDGGWSPQSQPWSSEPHGCTSPSHGFQXLIPPWRLPVILLLPGIILSRIAQPAPGMSAVRPVHNQNMMANVGLPDGGVPPQAPMQQAQFPQQPGMPMDPISLPDGGVPPQSQPLPSQPQALPPQPHGFQPAIPAMSQPIDLSALEGPGQGKQAPRPPAPTAVRPGQVPRGAPAAECYKMGLAHLEQNQLTDALSCLDEAFLALAKDQSREADIKAQATICAQYKIAVALLQEIARLQRVQGAGALSAKEEMARLSRHLASLPIQAKHRINCIRTAIKRNMEVQNFAYAKQMLDLLYSKAPPSKQDELKSLIDMCVQRGLTNKSIDPFEDPSQFCAVTLSRLSTIGHDVCDLCGAKFSALSAPGCVICGMGSIKRSDALAGPVPSPFG

SEQ ID NO: 153173 - protein, 107 aa, Oryza sativa
  Clone ID: PAT_MRT4530_53151C.1.pep
TGPHFKAFFRQKPTVQVSQLKKKFLLKQPFFVKGFVNTCIKQPPNNVAFFKKTPIVEHYVKLFFFVLNFKPHLIVCPWRPFVLFKKVFVCGGKAYALNRIPRVGENV

SEQ ID NO: 153174 - protein, 1450 aa, Oryza sativa
  Clone ID: PAT_MRT4530_53152C.1.pep
MVKTRDDPRDSNDASGSEEQTDGAHVSGASGSRSSPPPENPTVTQMMTMMMQQMQQHYHQMLQQAQQNQQFGPPPSHVSKLLDFLRIQPPTFSSTTNPMEANDWLRAIEKKLILLQCNDREKVAFATHQLQGPASAWWDHYVVTRPDATEVTWAEFCQSFRKAQIPEGIMAQQKREFRALQQGTRTVTEYLHEFNRLARYAPEDVRTDAEKQEKFLFGLDDELTNQLISGVYEDFEKLVDKAIRQEEQRNKIDRKRKTAQISFPQGNNQKPRFMTGQLGGPSTLIVCQHRPYRPSNFNNDYNGGSHNNSKQHNHNSTPPPLMAPAQSDPPAVSVQLEQPKKGAVGKPGPCFNCGKHGHFAGKCPKLNRTGPRFIQARANHVSAEEAQAAPEVVLGTFPVNSYPATVLFDSGASHSFISKRFAGTHGLSVVELKIPMQVHTPGNDMRTAHYCPSVTIEIKRSPFLSNLILLESKDLDVILGMDWLTRNKGVIDCASRTITLTNDKGEKITFRSPASQKSVASLNQAAIEGQTETVEKSPRKLEDIPIVQEYPEVFPEDLTTMPPKREIEFRIDLAPGTAPIYKRPYRMAANELAEVKKQVDEQLQKGYIRPSTSPWGAPVIFVEKKDKTKRMCVDYHALNEVTIKNKYPLPRIDDLFDQLKGAKVFSKIDLRSGYHQLRIREEDIPKTAFTTRYGLFECTVMSFGLTNAPAFFMNLMNKVFMEFLDKFVVVFIDDILIYSKSEEEHEQHLRLVLEILKEHQLYAKFSKCDFWLSEVKFLGHIISAQGVAVDPSNVESVTKWTPPKTVSQIRSFLGLAGYYRRFIENFSKIARPMTQLLKKDEKFKWSAECNQSFEELKKKLVSAPVLILPDQTKDFQVYCDASRQGLGCVLMQEGRVVAYASRQLRPHEANYPTHDLELAAVVHALKIWRHYLIGNRCEVYTDHKSLKYIFTQPDLNLRQRRWLELIKDYDMGIHYHPGKANVVADALSRKSYCNAVCTEGMCDKLQQDLEHLNLGIVEHGYVAALEARPTLVDQVRAAQVNDPEIAELKKNMRVGKARDFHEDEHGTIWLGERLCVPDDKELKDLILTEAHQTQYSIHPGSTKMYQDLKEKFWWVSMRREIAEFVALCDVCQRVKAEHQRPAGLLQPLQIPEWKWEEIGMDFITGLPRTSSGHDSIWVVVDRLTKVAHFIPVHTTYTGKRLAELYLSRIMCLHGVPKKIVSDRGSQFTSKFWQKLQEELGTRLNFSTAYHPQTDGERQLFGTEVLTEAEEKVRTVRKRLRIAQSRQKSYADNRRRELTFEAGDYVYLRVTPLRGVHRFQTKGKLAPRFVGPYKILERRGEVAYQLELPSNMIGIHDVFHVSQLKKCLRVPEEQADSEHINIQEDLTYVEKPVRILDTSERRTRNKVTRFCRVQWSHHSEEEATWEREDELKAAHPHLFTSSSESRGRDSV

SEQ ID NO: 153175 - protein, 1448 aa, Oryza sativa
  Clone ID: PAT_MRT4530_53153C.1.pep
MVKTRNDPRDSNDASGSEEQTDEAHTSGAPGSSSSPPPENPTVTQMMTMMMQQMQQHYHQMLQQAHQNQQFGPPPSHVSKLLDFLRIQPPTFSSTTNPMEANDWLRAIEKKLNLLQCNDQEKVAFATHQLQGPASAWWDNYVVTRPDATKVTWAEFCQNFRKVQIPEGIMAQQKREFRALQQGTRTVTEYLHEFNRLARYAPEDVRTDAEKQEKFFFGLDDELTNQLISGVYEDFEKLVDKAIRQEEQRNKMDRKRKAAQISFPQGNNQKPRFMTGQLGGPPTLIVCQHRPYHPSNFNNDYNGGSHNNSKQHNHNSTPPPLMAPAQSDPPAVSAQSEQPKKGAVGKPGPCFNCGKHGHFAGKCPKLNRTRPRFIQARANHVSAEEAQAAPEVVLGTFPVNSYPATVLFDSGASHSFISKRFAGTHGLSVVELKIPMQVHTPGNDMRAAHYCPSVTIEIKRSPFLSNLILLESKDLDVVLGMDWLTRNKGVIDCASRTITLTNDKGEKITFHSPASQKSVASLNQAAIEGQTETVEKSPRKLEDIPIVQEYPEVFPEDLTTMPPKREIEFRIDLAPGTAPIYKRPYRMAANELAEVKKQVDEQLQKGYIRPSTSPWGAPVIFVEKKDKTKRMCVDYRALNEVTIKNKYPLPRIDDLFDQLKGAKVFSKIDLRSGYHQLRIREEDIPKTAFTTRYGLFECTVMSFGLTNAPAFFMNLMNKVFMEFLDKFVVVFIDDILIYSKSEEEHEQHLRLVLEKLKEHQLYAKFSKCDFWLSEVKFLGHVISAQGMAVDPSNVESVTKWTPPKTVSQIRSFLGLAGYYRRFIENFSKIARPMTQLLKKDEKFKWSAECNQSFEELKKRLVSAPVLVLPDQTKDFQVYCDASRQGLGCVLMQEGRVVAYASRQLRPHETNYPTHDLELAAVVHALKIWRHYLIFNRCEVYTDHKSLKYIFTQPDLNLRQRRWLELIKDYDMGIHYHPGKANVVADALSRKSYCNAVCIEDMCDKLQQDLEHLNLGIVEHGFVAALEARPTLVDQVRAAQVNDPEIAELKKNMRVGKARDFHEDEHGTIWLGERLCVPDDKELKDLILTEAHQTHYSIHPGSTKMYQDLKEKFWWVSMRKEIAEFVALCDVCQLAELYLSRIMCLHGVPKKIVSDRGSQFTSKFWQKLQEELGTRLNFSTAYHPQTDGQTERVNQILEDMLRACALDFGGAWDKSLPYAEFSYNNSYQSSLQMAPFEALYGRKCRTPLFWDQTGERQLFGTEVLTEAEEKVRTVRERLRIAQSRQKSYADNRRRELTFEAGDYVYLRVTPLRGVHRFQTKGKLAPRFVGPYRILERRGEVAYQLELPSNMVGIHDVFHVSQLKKCLRVPEEQASSEHIDIQEDLTYVEKPVRILETSERRTRNKVIRFCKVQWSHHSEEEATWEREDELKAAHPHLFASSSESRGRDSV

SEQ ID NO: 153176 - protein, 1424 aa, Oryza sativa
  Clone ID: PAT_MRT4530_53154C.1.pep
MVKTRNDLRNSNDASGSEEQTDEAHTSGAPGSSSSPPPENPTVTQMMTMMMQQMQQHYHQMLQQAQQNQQFGPPPSHANDWLRAIEKKLNLLQCNDQEKVAFATHQLQGPASAWWDNYVVTRPDATKVTWAEFCQNFRKAQIPEGIMAQQKREFRALQQGTRTVIEYLHEFNRLARYAPEDVRSDTEKQEKFLFGLDDELTNQLISGVYEDFEKLVDKAIRQEEQRNKMDRKRKAAQISFPQGNNQKPRFMMGQLGGPSTLIVCQHRPYHPSNFNNDYNGGSHNNRKQHNHNSTPPPLMAPAQSDPPAVSAQSEQPKKGAVGKPGPCFNCGKHGHFASKCPKLNRTRPRFIQARANHVSAEEAQAAPEVVLGTFPMNSYPATVLFDSGASHSFISKRFAGTHGLSVVELKIPMQVHTPGNDMRTAHYCPSVTIEIKRSPFLSNLILLESKDLDVILGMDWLTRNKGVIDCASRTITLTNDKGEKITFRSPASQKPVASLNQAAIEGQTETVEKSPRKLEDIPIVQEYPEVFPEDLTTMPPKREIEFRIDLVPGTAPIYKRPYRMAANELADVKKQVDEQLQKGYIRPSTSPWGAPVIFVEKKDRTKRMCVDYRALNEVTIKNKYPLPRIDDLFDQLKGAKVFSKIDLRSGYHQLRIREEDIPKTAFTTRYGLFECTVMSFGLTNAPAFFMNLMNKVFMEFLDKFVVVFIDDILIYSKSEKQHEQHLRLVLEKLKEHQLYAKFSKCDFWLSEVKFLGHIISAQGVAVDPSNVESVTKWTPPKTVSQIRSFLGLAGYYRRFIENFSKIARPMTQLLKKDEKFKWSAECNQSFEELKNRLVSAPVLILPDQTKDFQVYCDASRQGLGCVLMQEGRVVAYASRQLRPHETNYPTHDLELAAVVHALKIWRHYLIGNRCEVYTDHKSLKYIFTQPDLNLRQRRWLELIKDYDMGIHYHPGKANVVADALSRKSCCNALCPEDMCGKLQQDLEHLNLGIVEHGYVAALEARPTLVDQVRAAQENDPEIAELKKNMRVGKARDFHEDEHGTIWLGERLCVPDDKELKDLILTEAHQTQYSIHPSSTKMYQDLKEKFWWASMRREIAEFVALCDVCQRVKAEHQRPAGLLQPLQIPEWKWEEIGMDFITGLPRTSSGHDSIWVVVDRLTKVAHFIPVHTTYTGKRLAELYLARIMCLHGVPKKIVSDRGSQFTSKFWQKLQEELGTRLNFSTAYHPQTDGQTERVNQILEDMLRACALDFGGAWDKSLPYAEFSYNNSYQSSLQMAPFEALYGRKCRTPLFWDQTGERQLFGTEVLTEAEEKVRTVRERLRIAQSRQKSYADNRRRELTFEAGDYVYLRVTPLRGVHRFQTKGKLAPRFVGPYRILERRGEVAYQLELPSNMVGIHDVFHVSQLKKCLRVPEEQASSEHIDI

SEQ ID NO: 153177 - protein, 149 aa, Oryza sativa
  unsure (1)..(149): unsure at all Xaa locations
  Clone ID: PAT_MRT4530_53155C.1.pep
MPQQLIVLLLLFHATAAPAGGQRAGCPSKCGEVDIPFPFGVRVDCALPGLNVSCNHSFAPPRPYIADDNEFIDVSLETGETRVYTPVLQNCFDXSNTSSSSDALWQGLDLTGTPFLVSPDRNEFTATGCDALGLIYGRQDVSFFTGCVT

SEQ ID NO: 153178 - protein, 802 aa, Oryza sativa
  Clone ID: PAT_MRT4530_53156C.1.pep
MPVPCLPDQSAALLRLKRSFTITNDSQCTLASWRAGTDCCRWEGVRCGGANGDGRVRSLDLARCFLESAAIDPALFDLTSLRYLNLARNDFNGSELPATGFEPGAGPLCIHGYSDVYPRFLRKNRHLVCRIVELSSRTNLKSLAELSMMLIKTERVRRCMNIFFTPSYFEYPSLKSWARHWFERLKHLTHLNLSDASIQGKIPVGIRHLTNLVSLDLSTTFYLIDQDDYYLSFGTWSDPSWWVVEPNIGSLVANLSSLRELYLGRVDLSDNGEDWCTALTNSSTPQLQVLSLRHCRLFGPICTSLSSIHSLTEINLQYNDLYGPVPDSFADLHFLRVLDLADNDLEGLFPKRILQNRNLTTVHISYNTNIYGSLPNFSPDSSLTTLIVSSTNFSGPIPSSIGNLKSLNELGVASNDFRQELPSSIGQLTSLKLLEATGAGIVGTIPSWIANLTSLVLLRFSNCGLSGPIPSSIVRKREVCVRVSVWADKWYQNLVREMPKIGDGSKAVAGDDDNSKLVVQQVKEAGVTLRYPMLGENNYGIWAVKMKIFMHAQGVWAAVEGDAADEKIDQMALAAIVQAVPEAVVMAISEKETAKEAWDALKQMNMGEERVKKARVQTLKRELDGMYMSNSEKINDFALKVTTIVNEIRSLGTKVEETTVVEKLLHSVPDKFQPLISTIEQWGDVSEMTVTETIGRLRAFEESSKGQRRDKEGEQQLLAACAEPRLTRAEWEAKVAEESSGGSGSNGVGEKKFRGKFDKSKIECHRCGKFGHFADECDEPRKMTKAVVQLAIADADDEPTLL

SEQ ID NO: 153179 - protein, 1516 aa, Oryza sativa
  Clone ID: PAT_MRT4530_53157C.1.pep
MMKTRNDPRDSNDASGSEEQTDGAHVSGASGSRSSPPPENPTVTQMMTMMMQQMQQHYHQMLQQAQQNQQFGPPPSHVSKLLDFLRIQPPTFSSTTNPMEANDWLRAIEKKLNLLQCNDREKVAFATHQLQGPASAWWDNYVATRLDATEVTWAEFCQSFRKAQIPEGIMAQQKREFRALQQGTRTVTEYLHEFNRLARYAPEDVRTDAEKQEKFLFGLDDELTNQLISGVYEDFEKLVDKAIRQEEQRNKMDRKRKAAQISFPQGNNQKPRFMTGQLGGPSTLIVCQHRPYHPSNFNNDYNGGSHNNSKQHNHNSTPPPLMAPAQSDPPAVSVQSEQPKKGAVGKPGPCFNCGKHGHFAGKCPKLNRTRPRFIQARANHVSAEEAQAAPEVVLGTFPVNSYPATVLFDSGASHSFISKRFAGMHGLSVVELKIPMQVHTPGNDMRTAHYCPSVTIEIKRSPFLSNLILLESKDLDVILGMDWLTRNKGVIDCASRTITLTNDKGEKITFRSPVSQKSVASLNQAAIEGQTETVEKSPRKLEDIPIVQEYPEVFPEDLTTMPPKREIEFRIDLAPGTAPIYKRPYRMAANELAEVKKQVDEQLQKGYIRPSTSPWGAPVIFVEKKDKTKRMCVDYRALNEVTIKNKYPLPRIDDLFDQLKGAKVFSKIDLRSGYHQLRIREEDIPKTAFTTRYGLFECTVMSFGLTNAPAFFMNLMNKVFMEFLDKFVVVFIDDILIYSKSEKQHEQHLRLVLEKLKEHQLYAKFSKCDFWLSEVKFLGHVISAQGVAVDPSNVESVTKWTPPKTVSQIRSFLGLAGYYRRFIENFSKIARPMTQLLKKDEKFKWSAECNQSFEELKKKLVSAPVLILPDQTKDFQVYCDASRQGLGCVLMQEGRVVAYASRQLRPHETNYPTHDLELAAVVHALKIWRHYLIGNRCEVYTDHKSLKYIFTQPDLNLRQRRWLELIKDYDMGIHYHPGKANVVADALSRKSYCNAVCTEGMCDKLQQDLEHLNLGIVEHGFVAALEARPTLVDQVRAAQVNDPEIAELKKNMRVGKARDFHEDEHGTIWLGERLCVPDDKELKDLILTEAHQTQYSIHPGSTKMYQDLKEKFWWVSMRREIAEFVALCDVCQRVKAEHQRPAGLLQPLQIPEWKWEEIGMDFITGLPRTSSGHDSIWVVVDRLTKVAHFIPVHTTYTGKRLAELYLARIMCLHGVPKKIVSDRGSQFTSKFWQKLQEELGTRLNFSTAYHPQTDGQTERVNQILEDMLRACALDFGGAWDKSLPYAEFSYNNSYQASLQMAPFEALYGRKCRTPLFWDQTGERQLFGTEVLTEAEEKVRTIRERLRIAQSRQKSYADNRRRELTFEAGDYVYLRVTPLRGVHRFQTKGKLAPRFVGPYKILERRGEVAYQLELPSNMIGIHDVFHVSQLKKCLRVPEEQADSEHIDIQEDLTYVEKPVRILDTSERRTRNKVTRFCRVQWSHHSEEEATWEREDELKAAHPHLFTSSSESRGRDSV

SEQ ID NO: 153180 - protein, 749 aa, Oryza sativa
  Clone ID: PAT_MRT4530_53158C.1.pep
MWALRGCTGRWNPKKLEDIPIVQEYPEVFPEDLTTMPPKREIEFQIDLAPGTAPIYKRPYRMAANELAKVKKQVDEQLQKGYIRPSTSPWGAPVIFVEKKDKTKRMCVDYRALNEVTIKNKYPLPRIDDLFDQLKGAKMVKTGNDPRASNDARGSEEQTDGAHISGASDSSSSPPPENPTANDWLRAIEKKLNLLQCNDQEKVAFATHQLQGPASAWWDNYVVTRPDSTEVTWAEFCQSFRKAQIPEGIMAQKKREFRALHQETRIVTEYLHEFNRLARYAPKDVRTDAEKQEKFLFGLDDKLTNQLISGVYDDFEKLVDKAIRQEEQRNKMDRNRKLGEPSTLIIRQHHPYHPSNFNNDYNGGSHNNIRSASYVSSVRQLKKESAGKPRPCFNCGKHGHFAGKCPKLKRVGPRFVQARVNHASAEKAQASPEVVLGTFPVNSYPATVLFDSGASHSFISKRFAGAHGLSVVELKILMQVHTPGNDMRTAHYCPSVTIEIKRSRFLSNLILLESKDLDVILGMDWLTRHKGVIDCASRTITLSNDKGEKITFRSPVSQKSVASLNQAVIEDQTEIAEKNPKKLEDIPIVQEYPEVFPEGLTTMPPKREIEFQIDLAPGTAPIYKRPYRMAANELAEVKKQVDEQLQKGYIRPSTSPWGAPVIFVEKKDKTKRMCVDYRALNEVTIKNKYPLPRIDDLFDQLKGAKVFSNIDLRSGYHQLRIREEDIPKTAFATRSCSLFPHTRVEVLLS

SEQ ID NO: 153181 - protein, 942 aa, Oryza sativa
  Clone ID: PAT_MRT4530_53159C.1.pep
ITFRSPASQKSVASLNQAAIEGQTETVEKSPRKLEDIPIVQEYPEVFPKDLTTMPPKREIEFRIDLAPGTAPIYKRPYRMAANELAEVKKQVDEQLQKGYIRPSTSPWGAPVIFVEKKDKTKRMCVDYRALNEVTIKNKYPLPRIDDLFDQLKGAKVFSKIDLRSGYHQLRIREEDIPKTAFTTRYGLFECTVMSFGLTNAPTFFMNLMNKVFMEFLDKFVVVFIDDILIYSKSEEEHEHHLRLVLEKLKEHQLYAKFSKCDFWLSEIRSFLGLAGYYRRFIENFSKIARPMTQLLKKDEKFKWSAECNQSFEELKKRLVSAPVLILPDQTKDFQVYCDASRQGLGCVLMQEGRVVAYASRQLRPHETNYPTHDLELAAVVHALKIWRHYLIGNRCEVYTDHKSLKYIFTQPDLNLRQRRWLELIKDYDMGIHYHPGKANVVADALSRKSYCNAVCTEGMCDKLQQDLEHLNLGIVEHGYVAALEARPTLVDQVRAAQVNDPEIAELKKNMRVGKARDFHEDEHGTIWLGERLCVPDDKELKDLILTEAHQTQYSIHPGSTKMYQDLKEKFWWVSMRREIAEFVALCDVCQRVKAEHQRPAGLLQPLQIPEWKWEEIGMDFITGLPRTSSGHDSIWVVVDRLTKVAHFIPVHTTYTGKRLAELYLSRIMCLHGVPKKIVSDRGSQFTSKFWQKLQEELGTRLNFSTAYHPQTDGQTERVNQILEDMLRACALDFGGAWDKSLPYAEFSYNNSYQASLQMAPFEALYGRKCRTPLFWDQTGERQLFGTEVLTEAEEKVRTVRERLRIAQSRQKSYADNRRRELTFEAGDYVYLRVTPLRGVHRFQTKGKLAPRFVGPYRILERRGEVAYQLELPPNMVGIHDVFHVSQLKKCLRVPEEQASSEHIDIQEDLTYVEMPIRILETSERRTRNKVIRFCKVQWSHH

SEQ ID NO: 153182 - protein, 381 aa, Oryza sativa
  Clone ID: PAT_MRT4530_5315C.1.pep
MEELISAIIRATFGVEAKNRARENQKPYSDFYDVVPYPPNYKIPEFTKFSGEDSRTTYEHVYQFLAQCGRASSMNAYSVPYPQGFEVPNFTKFTGEDARTTMEHIGCFIDQCGKSVIIGDPRPKNRIKNAKAEDHKVAKDESSSIQRTKKPKLTFEMLMAKYKKGLAGQRFDNQTSDSKGPRSSRRKRFGQTSKQSEPSTIPTPHKPPVVMPWYPYPMSLYGYPFMYCMPWMHQPPMPYYQEWKESPRSVPNHSSNSRQDRFPQKNWSGRSKVKNVKKVWVRKEAKAPEVVVINEESQDVHVPTGDALETIQAKKTEADAVAVDIGGLTKTAGRSDRQTMAGLTDPPGRFNRRLTAGLTGEHWRRVRKLRAAQGLPLRPKI

SEQ ID NO: 153183 - protein, 52 aa, Oryza sativa
  Clone ID: PAT_MRT4530_53160C.1.pep
MALTNFVLTVAAVGATALLFTTDIRKSGAMFRRNARQIRAWLEEESASAASR

SEQ ID NO: 153184 - protein, 617 aa, Oryza sativa
  Clone ID: PAT_MRT4530_53161C.1.pep
MEEEEMMRAGGCCCGGGGVWARLLLLVAVVAAPGAVVAQQGNLTSRADLSGLYALRGSLGLRARDWPRRADPCTAWAGVRCSGGRVVSVDLAGLRRTRLGRLAPRFAVDGLRNLTRLEAFSAPGFGLPGSLPAWLGAGLAPTFQLLDISGCAVTGEIPASAIAGLSNLTTLNLAGNLLSGQLPGSALAGLARLKTLNLSGNAFSGELPKAVWSLPELSVLDVSRTNLTGALPDTGLALPSNVQVVDLSGNLFYGGVPGSFGQLFGRTKLANISGNYFDGKLGVSNGDGGNFSFELNCFVDVTGQRSQAECQQFYAARGLPYNVSGPAPTPQPAMPASPGRKKGHKNLKYILIGAICGGVLLVAVIAAILYCLVCSGSRRNGSRNDQRESGVRNTQLGASGTGGGAVTAGTQPSASPANLAKVGDSFGYDQLVEATTDFGDDRLIKHGHSGDLYLGALHDGTSVVVKRITSSMAKKDAYMAELDLFAKGLHERLVPIMGHCLDKEEEKFLVYIFVRNGDLSSALHRKSGEEEEGLQSLDWIKRLKIATGVAEALCYLHHECNPPMVHRDVQASSILLDDKFDVRLGSLSEVCPQEGEGHQNVITKLLRFSSTADQGSS

SEQ ID NO: 153185 - protein, 1516 aa, Oryza sativa
  unsure (1)..(1516): unsure at all Xaa locations
  Clone ID: PAT_MRT4530_53162C.1.pep
MVKTRNDPRDSNDTSGSEEQIDGAHTSGASGSSSSPPPENPTVTQMMTMMMQQMQQHYHQMLQQAQQNQQFGPPPSRLSRLLEFLRIQPPTFSSTTNPMEANDWLRAIEKKLNLLQCNDQEKVAFATHQLQGSASAWWDNYVVTRPATMEVTWAEFCQSFRKAQILEGIMAQRKREFRALXQGTRTVTEYLHEFNRLARYAPEDVRTDAEKQEKFLFGLDDELTNQLISGVYEDFEKLVDKAICLEEQRNKMDCKRKAAQIRTPQGNNQKPRFMMGQLGGPSTLIVRQHHPYNPGNFNNDYNGGSHNNSEQHHHNLTPPPLMAPAESELPAMSAQLEQLKKESAGKPRPYFNCGKLGHFAGKCPKRKRAGPRFVQARVNHASAEEAQAAPEVVLGTFLVNLFLATILFDSGASHSFISKRFAGTHGLSVVELKIPMRVHTPGNDMNTAHYCPXATIEIKRSQFQSNLILLESKDLDVILGMDWLTRHKGVIDCASRTITLTNDKGEKITFRSPVPQKSVASLNQAAIEDQTEIAEKSPQKLEDIPIVQEYPEVFPEDLTTMPPKREIEFRIDLAPGTAPIYKRPYRMAANELAEVKKQVDEQLQKGYIRPSTSPWGAPVIFVEKKDKTKRMCVDYRALNEVTIKNKYPLPRIDDLFDQLKGAKVFSKIDLRSGYHQLRIQEEDIPKTAFTTRYGLFECTVMSFGLTNAPVFFMNLMNKVFMEFLDKFVVVFIDDILIYSKSEEEHEQHLRLVLEKLKEHQLYTKFSKCDFWLSEVKFLGHVITTQGVAVDPSNVESVTKWTPPKTVSQIRSFFGLAGYYRRFIENFSKIARPMTQLLKKDEKFKWSAECNQSFEELKKKLVSAPVLILPDQTKDFQVYYDASRQGLGCLLLXEGRVVAYASRQLRPHETNYPTHDLELAPVVHALKIWRHYLIGNRCEVYTDHKSLKYIFTQSDLNLRQRRWLELIKDYDMGIHYHPGKANVVADALSRKSYCNAVCTEGMCDKLQQDLEHINLGIVEHGFAAALEARPTLVDQVRAAQVNDPEIAELKKNMRFGKARDFHEDEHDTIWLGERLCVPDDKELKDLILTEAHQTQYSIHPGSTKMYQDLKEKFWWASMRREIAEFVALCDICQRVKAEHQRPVGLLQPLQIPEWIWEEIGMDFITGLPRTSSGHDSIWVVVDRLTKVAHFIPVNTTYTGKSLAELYLARIMCLHGVPKKIVSDRGSQFTSKFWQKLQEELGTRLNFSTAYHPQTDGQTERVNQILDDMLRACALDFGGAWDKSLPYAEFSYNNSYQASLQMTPFEALYGRKCRTLLFWDQTGERQLFGTEVLTEAEEKVRTVRERLRITQSRQKSYADNRRRELSFEAGDYVYLHVTPLRGVHRFQTKGKLAPRFVGPYRILERRGEVTYQLKLPSNMAGIHDVFHVSQLKKCLRVPEEQADSEHIDIQEDLTYVVKPIGILETSERRTRNKVIRFCKVQRSHHSEEEATXEREDELKAAHPHLFASSFESRGRDSV

SEQ ID NO: 153186 - protein, 130 aa, Oryza sativa
  Clone ID: PAT_MRT4530_53163C.1.pep
FNTLFQWVYYSCVVVVVVDQEPRSPGKKFYLFRPFGLVCQSRSQWRDLVSTPFASFCCQFALREEGDSAAEESGVSPAMAAALECWSGRPSTDEEMVEQVLMKPHVRSDDSLPTCADAAFAAGEPTTAQA

SEQ ID NO: 153187 - protein, 1501 aa, Oryza sativa
  Clone ID: PAT_MRT4530_53164C.1.pep
MVKTRNDPRDSNDASGSEEQTDGAHVSGASGSRSSPPPENPTVTQMMTMMMQQMQQHYHQMLQQAQQNQQFGPPPSHVSKLLDFLRIQPPTFSSTTNPMEANDWLRAIEKKLNLLQCNDQEKVAFATHQLQDATEVTWAEFCQSFRKAQIPEGIMAQQKREFRALQQGTMSVTEYLHEFNRLARYAPEDVRTDAEKQEKFLFGLDDELTNQLISGVYEDFEKLVDKAIRQEEQRNKMDRKRKAAQISFPQGNNQKPRFMTGQLGGPSTLIVCQHRPYHPSNFDNDYNGGSHNNSKQHNHNSTPPPLMAPAQSDPPAVSVQSEQPKKGAVGKPGPCFNCGKHGHFAGKCPKLNRTGPRFIQARANHVSAEEAQAAPEVVLGTFPVNSYPATVLFDSGASHSFISKRFAGTHGLSIVELKIPMQVHTPGNDMRTAHYCPSVTIEIKRSPFLSNLILLESKDLDVILGMDWLTRNKGVIDCASRTITLTNDKGEKITFRSPASQKPVASLNQAAIEGQTETVEKSPRKLEDIPIVQEYPEVFPEDLTTMPPKREIEFRIDLAPGTTPIYKRPYRMAANELAEVKKQVDEQLQKGYIRPSTSPWGAPVIFVEKKDKTKRMCVDYRALNEVTIKNKYPLPRIDDLFDQLKGAKVFSKIDLRSGYHQLRIREEDIPKTAFTTRYGLFECTVMSFGLTNAPAFFMNLMNKVFMEFLDKFVVVFIDDILIYSKSEEEHKQHLRLVLEKLKEHQLYAKFSKCDFWLSEVKFLGHVISAQGVAVDPSNVESVTKWTPPKIVSQIRSFLGLAGYYRRFIENFSKIARPMTQLLKKDEKFKWSAECNQSFEELKKRLVSAPVIILPDQTKDFQVYCDASRQGLGCVLMQEGRVVAYASRQLRPHETNYPTHDLELAAVVHALKIWRHYLIGNRCEVYTDHKSLKYIFTQPDLNLRQRRWLELIKDYDMGIHYHPGKANVVADALSRKSYCNAVCTEGMCDKLQQDLEHLNLGIVEHGYVAALEARPTLVDQVRAAQVNDPEIAELKKNMRVGKARDFHEDEHGTIWLGERLCVPDDKELKDLILTEAHQTQYSIHPGSTKMYQDLKEKFWWASMRREIAEFVALCDVCQRVKAEHQRPAGLLQPLQIPEWKWEEIGMDFITGLPRTSSGHDSIWVVVDRLTKVAHFIPVHTTYTGKRLAELYLSRIMCLHGVPKKIVSDRGSQFTSKFWQKLQEELGTRLNFSTAYHPQTDGQTERVNQILEDMLRACALDFGGAWDKSLPYAEFSYNNSYQASLQMAPFEALYGRKCRTPLFWDQTGERQLFGTEVLTEAEEKVRTVRERLRIAQSRQKSYADNRRRELTFEAGDYVYLRVTPLRGVHRFQTKGKLAPRFVGPYRILERRGEVAYQLELPSNMVGIHDVFHVSQLKKCLRVPEEQASSEHIDIQEDLTYVEKPIRILETSERKTRSKVIRFCKVQWSHHSEEEATWEREDELKAAHPHLFASSSESRGRDSV

SEQ ID NO: 153188 - protein, 85 aa, Oryza sativa
  Clone ID: PAT_MRT4530_53165C.1.pep
SFGIVMWELLARTEPYKDMKIYDIPRAVIDGHRPPVPESANKDFVAIMKKCWSGNPEERPSFEELQHQFVNMISKIDYNGMYREE

SEQ ID NO: 153189 - protein, 80 aa, Oryza sativa
  Clone ID: PAT_MRT4530_53166C.1.pep
SNSIIILISSLITTLVVCITSNSPPTSYISPMVPDLITNHDIEVVRTGPDSYNLRHRMFCTCAPSGVIYVRHRTVPVYHI

SEQ ID NO: 153190 - protein, 131 aa, Oryza sativa
  Clone ID: PAT_MRT4530_53167C.1.pep
LAKPRILFYLHEISLAKAACTFALKGLKNWMKPEKVPAALTTFPSTAQIVSEPLGVVLVISAWNYPFLLSIDPVIGAIAAGNAVVLKPSEIAPATSALFAKLLPEYVDSFCIKVVEGGVPETTALLEQKWD

SEQ ID NO: 153191 - protein, 294 aa, Oryza sativa
  Clone ID: PAT_MRT4530_53168C.1.pep
SPGLQEYGTRDEFKNEVMLIARLQHVNLVRLLGCCIHGEERMLVYEYMENKSLDNFIFDKARSAQLNWSKRFNIILGIARGLLYLHQDSRFKIIHRDLKAGNILLDGDMNPKISDFGVARIFGDDTDSHTRKVVGTYGYMLPEYAMDGVFSVKSDVFSFGVLVLELVSGRKNRGMYSSGEQTSLLSHAWRLWREGNALALLDEAVAGGGGGGGYSRSEVLRCVQVGLLCVQERPEDRPHMAAVFMMLGNLSAVVPQPRHPGFCSDRGGGGGSTDGEWSSTCTVNDVTVTIVEGR

SEQ ID NO: 153192 - protein, 494 aa, Oryza sativa
  Clone ID: PAT_MRT4530_53169C.1.pep
MAEEEVAAVVGELRGSFRSGRTRAAEWRAAQLRGIVRMVEEREGDISDALHSDLAKPRMESYLHEISLAKAACTFALKGLKNWMKPEKMLIMLTLINDDQVPAALTTFPSTAQIVSEPLGVVLVISAWNYPFLLSIDPVIGAIAAGNAVVLKPSEIAPATSALFAKLLPEYVDSSCIKVVEGGVPETTALLEQKWDKIFYTGSGNVGRIVMAAAAKHLTPVALELGGKCPAIVDSNTDLHVTMKRLAVGKWGCNNGQACIAPDYVITTKSFAPELVDSLKRVLKRFYGEDPLQSEDLSRIVNSNHFRRLTNLIEDKKVAQKIVYGGQTDEKQLKIAPTVLLDVPLDTTLMAEEIFGPLLPIVTVDKIEDSIQFINSRTKPLAAYLFTKDKKLQEEFVSNVPAGGMLVNDVALHLANPHLPFGGVGDSGIGSYHGKFSFDCFTHKKAVLIRGFGGEATARYPPYTIEKQKILRGLINGSFFALILALLGFPKERR

SEQ ID NO: 153193 - protein, 171 aa, Oryza sativa
  Clone ID: PAT_MRT4530_5316C.1.pep
MNQPVQKNTLYVGGLAEEVDEKILHAAFVPFGEIKDVKTPLDQATQKHRSFGFVTFLEREDAAAAMDNMDGAELFGRVLTVNYAFPERIKGGEQGWAAQPIWADADTWFERQQQEEEMQRLQAEQRAAMQAAEKLHREKLAAEKEGEKEEETDTNADPMAAAEAQALKQSS

SEQ ID NO: 153194 - protein, 1060 aa, Oryza sativa
  Clone ID: PAT_MRT4530_53170C.1.pep
MGSRGGALPVAVLVLLLLLVLKNGAAQSRCSSGDLAALRGFSAGLDGGVDGWPAGVGNASSSSTSDGGDCCAWRGVACDEAGEVVGVVLPNATLRGVVAESLAGLAALRVLNLSSNALRGALPAGLLRLRALQVLDVSVNALEGAVAAAAVVDLPAMREFNVSYNAFNGSHPVLAGAGRLTSYDVSGNSFAGHVDAAALCGASPGLRTLRLSMNGFSGDFPVGFGQCRSLVELSLDGNAIAGALPDDVFGLTSLQVLSLHTNSLSGHLPPSLRNLSSLVRLDVSFNNFTGDLPDVFDAVPGLQELSAPSNLLTGVLPATLSRCSRLRILNLRNNSLAGDIGLDFRALQSLVYLDLGVNRFTGPIPASLPECRAMTALNLGRNNLTGEIPATFAAFTSLSFLSLTGNSFSNVSSALRTLQGLPNLTSLVLTKNFHGGEAMPTDIAGFAGIEVLVIANGELHGAIPAWLAGLSKLKVLDLSWNHLAGPIPPWLGELDRLFYLDVSNNSLHGEIPLKLAWMPALMAGGDGSDEAHVQNFPFFIRPNSSARGRQYNQVSRFPPSLVLARNNLTGGVPAALGALTRVHVVDLSWNALSGPIPPELSGMSSVESLDVSHNALSGAIPPSLARLSFLSHFDVAYNNLSGEVPVGGQFSTFSRADFDGNPLLCGIHAARCAPQAVDGGGGGGRKDRSANAGVVAAIIVGTVLLLAVAAVATWRAWSRWQEDNARVAADDESGSLESAARSTLVLLFANDDDNGNGDDGERTMTLDDVLKATGNFDETRIVGCGGFGMVYRATLADGREVAVKRLSGDFWQMEREFRAEVETLSRVRHRNLVTLQGYCRVGKDRLLIYPYMENGSLDHWLHERADVEGGGALPWPARLSIARGAARGLAHLHATSEPRVLHRDIKSSNILLDARLEPRLADFGLARLVRAHDDTHVTTDLVGTLGYIPPEYGHSSVATYRGDVYSLGVVLLELVTGRRPVDMARPAGGGRDVTSWALRMRREARGDEVVDASVGERRHRDEACRVLDVACACVSDNPKSRPTAQQLVEWLDAIAAAAAD

SEQ ID NO: 153195 - protein, 121 aa, Oryza sativa
  Clone ID: PAT_MRT4530_53171C.1.pep
MGANYPGFIGAVLSVVGDVPVDSEAPVVTSSISQEFASPVFEDAHRDRVYVRVFIGLTGTIQYGRAAISIDRAIIFHFHHINLVINTFNTFPMTGFGISLVGAVGTSGLNGRVGCATETTG

SEQ ID NO: 153196 - protein, 200 aa, Oryza sativa
  Clone ID: PAT_MRT4530_53172C.1.pep
MAPSPSGFLHPREQVEASPRISDTRLPLDQTNLISMVEIFPKCVCLHIRSWKSVEAIRDSGNRVEGVDQSPSTELLGPPPLAGCTWPILGGYTMRTFGRAYRNQGPGEDSSRRHAAKAEKVSMRRQHGRKPCGESRGMKHMGFAKDGPCSRAIRAKTAGQKPCREGHGFHQEPDLTGGRPSRPSRLPGVSPLIGPGYLAH

SEQ ID NO: 153197 - protein, 57 aa, Oryza sativa
  Clone ID: PAT_MRT4530_53173C.1.pep
MSLWKVLLMVIALICALHTTSGRPPVVGYPAPRPNGSSGTRCYEGCNPPGRDGNRDP

SEQ ID NO: 153198 - protein, 71 aa, Oryza sativa
  Clone ID: PAT_MRT4530_53174C.1.pep
MESLAVHKASVSFKFKLIGGVETRSSCSTSTCGRRFRIQEDNKGEAASDYALSHLHSVHFEICMVIFKFNN

SEQ ID NO: 153199 - protein, 635 aa, Oryza sativa
  Clone ID: PAT_MRT4530_53175C.1.pep
MDNKHHKNVEAGKSSFHRMVLGQLVGEFGFDEENVPCNTPRSSVRSRFGASASRIVASTSGASVSPGEYVRDPGSILSLQPWIFKRSGSQKNEEKMMLASGSRVVGEGKNLMDSFRDGSAVEVSPRSPGLGSGPGRGRGALRSRRSRRHLIRPLVPMENSYIPQLYSADFEIDECTFGPAPSPASARPFIVTDGRRVISKSRYQPVPVPFHIGFEKEGRRNSSEMVESVIGIAPLPELKKSKRERQGSHNGGMGLSAFESSKPSKSTDLLARLRIFSTGVSIGIISSTLSNKNELDALKGTVKRMENLIQDLHDELEMREGLTVKELPNEMSVKIDDDESKAHVTDSEPMSKIEEELEAELARLELNITSNCLKEQTFDFSEVEQDLIGDIVQGELKIDTTHCDLADHSSESAHGRDSRESSPDYTHDANYPVSPRDLSLRLHKVIQQRLEERIKELETTLAQSEMQTQVQVMATEQILCERTCSDSDSGSPNQESPVYIQETNSLVEPFCLNLAGDALEAYDEAYEEFMRIADSPCTTSTNGKPQVHEDYSVDRSLIWGLEDGSARKLKKVPTWERILKSREPNRTQESDGDDEDEFEDDDQDSKMLIQQIIERTKQGSPVLIHAQRILFSVDD

SEQ ID NO: 153200 - protein, 81 aa, Oryza sativa
  Clone ID: PAT_MRT4530_53176C.1.pep
HLTRPDKHPIQHKFYNTVNSQIQPHSKYKYSNQNFTGCRATKIFKVSLAARCHCSGSIQDHQHKLLLSCHPSHPNPSIILS

SEQ ID NO: 153201 - protein, 170 aa, Oryza sativa
  Clone ID: PAT_MRT4530_53177C.1.pep
WRAAGGWMRWGAHRRGRSSVGDAEGVVARWSRRRDGTAPSGRGRGRREGDERMGAARSSSSTPRARRPPGHARWQKERRRRRAARRQGRQWRAPEGFMWKELGMSVWRGRNRPRRSRGRGSWRGRKRHGASGPGGCAAQAGQGGRPPRVEQNRTAAAGGFKPRRREAAGG

SEQ ID NO: 153202 - protein, 92 aa, Oryza sativa
  unsure (1)..(92): unsure at all Xaa locations
  Clone ID: PAT_MRT4530_53178C.1.pep
CNDDGIRVVSGSFDVCXKLRDIIIFGYMLMXGGLLMVTAQYGYSSALVYNPKLIPWXYSSVFSPGFMVMTSCHKELGSHGWLLEVQGGHRIE

SEQ ID NO: 153203 - protein, 245 aa, Oryza sativa
  Clone ID: PAT_MRT4530_53179C.1.pep
MPVRPPKPGETPIRRPVRPRAGRSDRSTQAGLTGNSARSDRKYQGITEIEYPLSAEIPRAAGANETQDGTLCGAKDVFYYYHIKSKRKNPAIPVCWPLVGMLPDLLVNRHQLHDWITSFLTASQLNFRFIGPTMSSNMRFFFTCDSANVRHIFTSNFANYPKGPDFAEIFDDTLGDGIFNVDGDSWRRQRAKTQLLMYNHRFQSFVFRCSSDKVENALLPLISHFAGTGERCNLQDVFMRLTFDM

SEQ ID NO: 153204 - protein, 35 aa, Oryza sativa
  Clone ID: PAT_MRT4530_5317C.1.pep
MWKLKIKMLRNGNEVLRPLFLRLVSDINLDLFHNK

SEQ ID NO: 153205 - protein, 357 aa, Oryza sativa
  Clone ID: PAT_MRT4530_53180C.1.pep
MDTYGWMMEWKVDRRYRRYREQMRAVEVSFEAVAGGGAAQVYTKLAMRAMSRHFRCLRDALVGQVRALRNAMGESQRDAAGGVAAAAPGATKGDTPRLRVLDQCLRQQRAFQQSGAVDSFPWRPQRGLPERAVAVLRAWLFEHFLHPYPNDVDKHILARQTGLSRSQVSNWFINARVRLWKPMIEDMYKEETKPESSDGNNKLNPSAAGNKQQHRDDPKKNYTATTAEASLVQQSSYHLHLRSSGNRNSSSLMIPAAASTSIDHHHDSSHQLLGGHSYSSAAGLHHGHGGAVSLTLGLQQQQQPFAASMMHQHQQHQHQHQQQQSFMVEAAEEEEDDVLPYRNLMESQLLHDFAGAS

SEQ ID NO: 153206 - protein, 237 aa, Oryza sativa
  Clone ID: PAT_MRT4530_53181C.1.pep
MPMTYHLSLSRCHICIDRRSLITESPCPRCLADWRACHQKEHDADITISDTYNNNPPPVTKGPITRARAQQLNLVVSSFLYSSLYEFENRLLPNDYIVIRNNGGDNETLGEGLRVINDHRGRPSQGGGPNKVDFECNSESSTRFGFCLDYSVENNFAARSVSAREEEEVPEMGQPHLGPSEPYLYAEEVGGLRFLLREGDIYGYKYKPPRKRGDTPRGHKIHKPMQTNMSPDTDIRD

SEQ ID NO: 153207 - protein, 73 aa, Oryza sativa
  Clone ID: PAT_MRT4530_53182C.1.pep
MPTGWIRCRLGDEATDPVAPRHARGASSGAETRVRCIWLRQVDEGGAAVADFGGEATVLRGGREHRHGRRTAI

SEQ ID NO: 153208 - protein, 82 aa, Oryza sativa
  Clone ID: PAT_MRT4530_53183C.1.pep
RGGLEFTSLFQHFQNFTTGIESAHSSHSFVSNWNLFSNQEPPKPLFSPLKPLNRALWYQQGATGFLNENQCGRPGSLSLEPE

SEQ ID NO: 153209 - protein, 1249 aa, Oryza sativa
  Clone ID: PAT_MRT4530_53184C.1.pep
MSVTEYMHEFNRLARYAPEDVRTDAEKQERFLFGLDDELTNQLISGVYDDFEKLVDKAIRQEEQRNKMDRKRKAAQISFPQGNNQKPRFMTGQLGEPSTLIVRQHRPYHSSNFNNDYNSGCHGSSKQHNHNSTPPPLMAPTQSDPPAMSAQSEQLKKESAGKPRPCFNCGKHGHFAGKYPKPKRAGPRFVQACVNHASAEEAQAAPEVVLGTFPVNSFPATVLFDSGASHSFISKRIAGTHGLSVVELKILMRVHTPGNDMNTTHYCPSVTIEIKRSPFLSNLILLESKDLDVILGMDWLTRHKGVIDCASRTITLTNDKGEKITFRSPVPQKSVASLNQATIEDQTEIAEKNPKKLEDIPIVQEYPEVFLEDLTTMPPKREIEFRIDLAPGTAAIYKRSYRMAANELAEVKKQVDEQLQKGYIQPSISPWGAPVIFVEKKDKTKRMCVDYHALNEVTIKNKYPLPRIDDLFDQLKGAKVFSKIDLRSGYHQLRIREEDIPKTAFTTRYGLFECTVMSFGLTNAPAFFMNLMNKVFMEFLDKFVVVFIDDILIYSKSEEEHEQHLRLVLEKLKEHQLYAKFSKCDFWLSEVKFLGHVITAQGVAVDPSNVESVTKWTPPKTVSQIRSFLGLAGYYRRFIENFSKIARPMTQLLKKDEKFKWSVECNQSFEELKKKLVSAPVLILPDQTKDFQVYCDASRQGLGCVLMQEGRVVAYASRQLRPHESNYPTHDLELAAVVHALKIWRHYLIGNRCEVYTDHKSLKWLELIKDYDIGIHYHAGKANVVADAFSRKSHCNTVYTEGMCDKLQQDLEHLNLGIVEHGYVAALEARPTLVDQVRDAQVNDPEIAELKKNMRIGKARDFHEDGHGTIWLGERLCVPDDKELKDLILTEAHQTQYSIHPGSTKMYQDLKEKFWWASMRREIAEFVALCDVCQRVKAEHQRPAGLLQPLQIPEWKWEEIGMDFITGLPRTSSRHDSIWVVVDRLTKVAHFIPVHTTYTGKRLAELYLARIMCLHGVPKKIVSDRGSQFTSKFWQKLQEELGTHLNFSIAYHPQTNGQTERVNQILEDMLRACALDFGGAWDKSLPYAEFSYNNSYQASLQMAPFEALSGWKCRTSLFWDQTGERQLFGTEVLTEAEEKVRTIRERLRIAQSRQKSYADNRRRELIFEAGDYVYLRITPLRGVHRFQTKGKLAPRFVGPYRILERRGEVAYHLELPSNMAGIHDVFHVSQLKKCLRVPEEQASSEHIDI

SEQ ID NO: 153210 - protein, 1498 aa, Oryza sativa
  Clone ID: PAT_MRT4530_53185C.1.pep
MVKTRNDPRDSSDARGSEEQTDGAHVGGASDSSSSPPLGNPTVTQMMTMTMQQMQQHHHQVLQQVQQNQWFAPPPSHLSKLLDFLRIQPPTFSSTTNPMEANDWLRVVEKKLNLLQCNDREKVAFATHQLQGPASAWWDNYVVTRLDATEVTWAEFCQSFRKAQIPEGIMAQQKREFRALQQGTMSVTEYLHEFNCLARYAPEDVRTDAEKQEKFLFGLDDELTNQLISGVYDDFEKLVDKAIRQEEQRNKMDRKRKAAQISFPQGNNQKPRFMTGQLGGPSTLIVCQHRPYHPSNFDNDYNGGCHNNSKQHNHNSTPPPLMAPAQSDSPAVSAQSEQPKKGAVGKLGPCFNCGKHGHFAGKCPKLNRAGPRFIQARVNHASAEEALAAPEVVLGTFPVNSYPATVLFDSGASHSFISKRFAGAHGLSVVELKIPMQVHTPGNDMRTSHYCPSVTIEITRSPFLSNLILLESKDLDVILGIDWLTRHKGVIDCASRTITLTNDKAEKITFRSPVSQKSVASLNQAAIEGQTETVEKSPRKLEDIPIVQEYPEVFPEDLTTMPPKREIEFRIDLAPGTAPIYKRPYRMAANELAEVKKQVDEQLQKGYIRPSTSPWGAPVIFVEKKDKTKRMCVDYRALNEVTIKNKYPLPRIDDLFDQLKGAKVFSKIDLRSGYHQLRIREEDIPKTAFITRYGLFECTVMSFGLTNAPAFFMNLMNKVFMEFLDKFVVVFIDDILIYSKSEEEHEQHLRLVLEKLKEHQLYAKFSKCDFWLSEVKFLGHVISDQGVAVDPSNVESVTKWTPPKTVSQIRSFLGLAGYYRRFIENFSKIARPMTQLLKKDEKFKWSAECNQSFEELKKKLVSAPVLILPDQTKDFQVYCDASRQGLGCVLMQEGRVVAYASRQLRPHESNYPTHDLELAAVVHALKIWRHYLIGNRCEVYTDHKSLKYIFTQPDLNLRQRRWLELIKDYDMGIHYHPGKANVVADALSRKSYCNAVCTEGMCDKLQQDLEHLNLGIVEHGYVAALEARPTLVDQVRAAQVNDPEIAELKKNMRVGKARDFHEDEHGTIWLGERLCVPDDKELKDLILTEAHQTQYSIHPGSTKMYQDLKEKFWWRVKAEHQRPAGLLQPLQIPEWKWEEIGMDFITGLPRTSSGHDSIWVVVDRLTKVAHFIPVHTTYTGKRLAELYLSRIMCLHGVPKKIVSDRGSQFTSKFWQKLQEELGTRLNFSTAYHPQTDGQTERVNQILEDMLRACALDFGGAWDKSLPYAEFSYNNSYQSSLQMAPFEALYGRKCRTPLFWDQTGGRQLFGTEVLTEAEEKVRTVRERLRIAQSRQKSYADNRRRELTFEAGDYVYLRVTPLRGVHRFQTKSKLAPRFVGPYRILERRGEVAYQLELPSNMVGIHDVFHVSQLKKCLRVPEEQASSEHIDIQEDLTYVEKPIRILETSERRTRNKVIRFCKVQWSHHSEEEATWEREDELKAAHPHLFASSSESRGRDSV

SEQ ID NO: 153211 - protein, 896 aa, Oryza sativa
  Clone ID: PAT_MRT4530_53186C.1.pep
YLHEFNRLARYAPEDVRTDAEKQEKFLFGLDDELTNQLISGVYEDFEKLVDKAIRQEEQRNKMDRKRKAAQISFPQGNNQKPRFMTGQLGGPSTLIVCQHRPYHPSNFDNDYNGGSHNNSKQHNHNSTPPPLMAPAQSDPPAVSAQSEQPKKRAVGKPGPCFNCGKHGHFASKCPKLNRTGPRFIQAHANHVSAVEAQAAPEVVLGTFPVNSYPATVLFDSGASHSFISKRFAGTHGLSVVELKIPMQVHTPGNDMRTAHYCPSVTIEIRRSPFLSNLILLESKDLDVILGMDWLTRNKGVIDCASRTITLTNDKGEKITFRSPASQKSVASLNQAAIEGQTETVEKSPRKLEDIPIVQEYPEVFPEDLTTMPPKREIEFRIDLAPGTTPIYKRPYRMAANELAEVKKQVDEQLQKGYIRPSTSPWGAPVIFVEKKDKTKRMCVDYRALNEVTIKNKYPLPRIDDLFDQLKGAKVFSKIDLRSGYHQLRIREEDIPKTAFTTRYGLFECTVMSFGLTNAPAFFMNLMNKVFMEFLDKFVVVFIDDILIYSKSEEEHEQHLRLVLEKLKEHQLYAKFSKCDFWLSEVKFLGHVISAQGVAVDPSNVESVTKWTPPKTVSQIRSFLGLAGYYRRFIENFSKIARPMTQLLKKDKKFKWSAECNQSFEELKKKLVSAPVLILPDQTKDFQLRPHETNYPTHDLELAAVVHALKIWRHYLIGNRCEVYTDHKSLKYIFTQPDLNLRQRRWLELIKDYDMGIHYHPGKANVVADALSRKSYCNAVCTEGMCDKLQQDLEHLNLGIVEHGYVAALEARPTLVDQVRAAQVNDPEIAELKKNMRVGKARDFHEDENGTIWLGERLCVPDDKELKDLILTEAHQTQYSIHPGSTKMYQDLKEKF

SEQ ID NO: 153212 - protein, 57 aa, Oryza sativa
  unsure (1)..(57): unsure at all Xaa locations
  Clone ID: PAT_MRT4530_53187C.1.pep
IVSLTKFGSGQDNXALRKRRIKMFAYTLPKVGTNTIQMTCCTISKIIIIKSCCTCSC

SEQ ID NO: 153213 - protein, 152 aa, Oryza sativa
  unsure (1)..(152): unsure at all Xaa locations
  Clone ID: PAT_MRT4530_53188C.1.pep
SAFGPLLAAAIIIPYGHTHIAWFGLFAVYAILVLYGLSHWYRHHLNLFKLKQGGKATHGXSKGRVTFALVVLALLVFSKYFYMTSLTSYFTFYLIEKFQLSVASSHMYLFLFLGAVAVGTFAGVPIDDKIGRKKVIWFSILGAAPFTLSLPY

SEQ ID NO: 153214 - protein, 94 aa, Oryza sativa
  Clone ID: PAT_MRT4530_53189C.1.pep
MNKERNPPTNRPEQGAVDWHEDTRAHDLAVVRRREADGEEEEAYHFGGRGGEGGELGFRRRCLVWSTRCGEWRRGGEGEGLRLYTGELLEARVY

SEQ ID NO: 153215 - protein, 511 aa, Oryza sativa
  Clone ID: PAT_MRT4530_5318C.1.pep
MMSENEIMPITLDDFEGEDRKSMEEYIKEITQEALMRACTRTRQGVMTKPGPRPKFASDFVSNEEVTQSIQQVASTIDSSMTVFKDRLDATFEGKFDEFLRFKVGPLLADFMVKDKASTTASQAPIDQTSSGTNGVAHIAGLTGPDGRSNRDFTVGPTSQTAGPTGTFNPPVSTAATNPQVPPHVPNAYNDVARGYHPDTRQGQYNHIAPQTQPIRPPNPPPNQHRPDNMEEITSGIIRDKFGIETRNCAKVYQKPYPDYYDNVPFPRNYRVPEFTKFSGEDSRTTWEHVALAQESRVDDNSLNASLDDSAISCVAEPSDGENAMTTMEHIGQFIDQCGKHEFHDYFKDASLMEQRPIDTSSVTCETISVTSMPKTGIVSDPLPVSFIDVGKKKGKSVIIGDPRPKNRIKNAKAEDHKVAKEWKESPRSVPTHSFNSSQDRFPQKNRSGGSKVKKVKKVWVRKEAKAPEVVTIKEESQDVQVPTGTVIKTGPDRWSDRKKPEPEPPPVRSR

SEQ ID NO: 153216 - protein, 197 aa, Oryza sativa
  Clone ID: PAT_MRT4530_53190C.1.pep
MSFDEIGTIIANYSICQDRPNFKTSSPRITSILRLSVMVLRRRLNNLAAAKDVDAKLFVVLQPTEGGPSPPAVGRLHVLIAEDNPDQLRGDRDTLTPGHQPVDSSDLSPPKIHFQIAVVTRTTTSRTNDTKTTTDKVNDITTSHDDDETPAPRPPCLPGHQETVLAGHENVVYLLLWIPYKWSRYDYDWSLGLFGGA

SEQ ID NO: 153217 - protein, 1571 aa, Oryza sativa
  unsure (1)..(1571): unsure at all Xaa locations
  Clone ID: PAT_MRT4530_53191C.1.pep
APMSPPPPKPPHPAPSGHVGPAARAXPPFPRPPPSLASSLLCAPSSSARAPSSSAAAAAFGMVKTRNDLRDPNDASGSEEQTDEAHTSGAPGSRSSPPPENPTITQMMTMMIQQMQQHYHQMLQQAQQNQQFGSPPSHLSKLLDFLRIQPPTFSSTTNPMEANDWLRAIEKKLNLLQCNDQEKVPFATHQLQGPASAWWDNYVVTRPDAMEVTWSEFCQGFRKAQIPEGIMAQQKREFRALQQGTRTVTEYLHEFNRLTCYAPEDVRIDAEKQEKFLFGLDDELTNQLISGVYEDFEKLVDKAIRQEEQRNKMDRKRKAAQISFPQGNNQKPRFMTGQLGGPSTLIVCQHRPYHPSNFDNDYNGGSHNNSKQHNHNSTPSPLIPPAGSAXSEQPKKGAVGKPGPCFNCGKHGHFAGKCPKLNRAGPRFIQARANHVSAEEAQAAPEVVLGTFPVNSYPATVFFDSGASRSFISKRFAGAHRLSVVELKIPMQVHTPGNDMRTTHYCPLVTIEIKRSQFLSNLILLESKDLDVILGMDWLTRHKGVIDCASRTITLTNDKGEKITFRSPVPQKSVASLNQATIEEQTEVAEKSPRKLEDIRIVQEYPEVFPEDLTTMPPKREIEFQIDLVKVTTPIYKRPYRIAANELAEVKKQVDEQLXKGYIRPSTSPWGAPVIFVEKKDKTKRMCVDYRALNEVTIXNKYPLPRIDDLFDQLKGAKVFSKIDLRSGYHQLRIREEDIPKTAFTTRYGLFECTVMSFGLTNAPAFFMNLMNKVFMEFLDKFVVVFIDDILIYSKSEEEHEQHLRLVLEKLKEHQLYAKFSKCDFWLSEVKFLGHVITAQGVTVDQSNVESVTKWTPPKIVSQIRSFLGLAGYYRRFIENFSKIARPMTQLLKKDEKFKWSAECNQSFEELKKRLVSAPVLILPDQTKDFQVYCDASRQGLGCVLMQEGRVVAYASRQLRPHESNYPTHDLELAAVVHALEIWXHYLFGNRCEVYTDHKSLKYIFTQPDLNLRQRRWLELIKDYDMGIHYHPGKANVVADALSRKSYCNAVCTEGICDKLQQDLEHLNLGIVEHGYVAALEARPTLVDQVRVAPVNDPEIAELKKNMRVXKARDFHEDEHGTIWLGERLCVPDDKELKDLILIEAHQTQYSIHPSSTKMYQDLKEKFWWASMRREIAGFVALCDVCQRVKAEHQRPAGLLQPLQIPEWKWEEIGMDFITGLPRTSSGHDSIWVVVDRLTKVAHFIPVHTTYTGKRLAELYLSRIMCLHGVPKKIVSDRGSQFTSKFWQKLQEELGTRLNFSTAYHPQTDGQTERINQILEDMLRACALDFGGAWDKSLPYAKFSYNNSYQASLQMAPFEALYGRKCRTPLFWDQTGERQLFGTEVLTEAEEKVRTVRERLRIAQSRQKSYADNRRRELAFEAGDYVYLRVTPLRGVHRFQTKGKLAPRFVGPYRILERKGEVAYQLELPSNMVGIHDVFHVSQLKKCLRVPEEQASSEHIDIQEDLTYVEKPVRILETSERRTRNKVIRFCKVQWSQHSQEETTWEREDELKAAHPHLFASSSESRGRDSV

SEQ ID NO: 153218 - protein, 103 aa, Oryza sativa
  unsure (1)..(103): unsure at all Xaa locations
  Clone ID: PAT_MRT4530_53192C.1.pep
MAGRHTIILMQPSQNRATRTFMDFNSVNHALDGICGLYERKIRDINPMARDLTYDINDLYNFIDGLTDISALVFDRSLHAFLPYXRRWIKQEMFQHLKRLAQQ

SEQ ID NO: 153219 - protein, 293 aa, Oryza sativa
  unsure (1)..(293): unsure at all Xaa locations
  Clone ID: PAT_MRT4530_53193C.1.pep
HQLTTKFWRKKNVSLGCFACHNTXHHPQTDGQTERVNQILEDMLRACALXDFGGVWDKNLPYAEFSYNNSYQASLQMAPFEALYGRKCRTPLFWDQTGERQLFGTEVLTEAEEKVRTVRERLRIAQSRQKSYADNRRRELTFEAGDYLYLRVTPLRGVHRFQTKGKLAPRFVGPYRILERRGEVAYQLELPSNMVGIHDVFHVSQLKKCLRVPEEQASSEHIDIQEDLTYVEKPICILETSERRTRNKVIRFCKVQWSHHSEEEATWEREDELKAAHPHLFASSSESRDRDSV

SEQ ID NO: 153220 - protein, 103 aa, Oryza sativa
  Clone ID: PAT_MRT4530_53194C.1.pep
MAGRHTIILMQPSQNRATRTFMDFNSVNHALDGICGLYERKIRDINPMARDLTYDINDLYNFIDGLTDISALVFDRSLHAFLPYDRRWIKQEMFQHLKRLAQQ

SEQ ID NO: 153221 - protein, 1516 aa, Oryza sativa
  Clone ID: PAT_MRT4530_53195C.1.pep
MVKTRNDPRDSNDASGSEEQTDEAHTSGAPGSSSSPPPENPTVTQMMTMMMQQMQQHYHQMLQQAQQNQRFGPPPSHLSKLLDFLRIQPPTFSSTTNPMEANDWLRAIEKKLNLLQCNDREKVAFATHQLQGPASAWWDNYVATRLGATEVTWAEFCQNFRKAQIPKGIMAQQKREFRALQQGTRTITEYLHEFNRLARYAPEDVRTDAEKQEKFLFGLDDELTNQLISGVYEDFEKLVDKAIRQEEQRNKMDRKRKAAQISFPQGNDQKPRFMTGQLGGPSTLIVCQHRPYHPSNFNNDYNGGSHNNSKQHNHNSTPPPLMAPAQSDPPAVSVQSEQPKKGAVGKPGPCFNCGKHGHFASKCPKLNRTRPRFIQARAHDVSAKEAQAAPEVVLGTFPVNSYPATVLFDSGASHSFISKRFAGTHGLSVVELKIPMQVHTPGNDMRTAHYCPSVTIEIKRSPFLSNLILLESKDLDVILGMDWLTRNKGVIDCASRTITLTNDKGEKITFRSPASQKSVASLNQAAIEGQTETVEKSPRKLEDIPIVQEYPEVFPEDLTTMPPKREIEFRIDLAPGTAPIYKRPYRMAANELAEVKKQVDEQLQKGYIRPSTSPWGAPVIFVEKKDKTKRMCVDYRALNEVTIRNKYSLPRIDDLFDQLKGAKVFSKIDLRSGYHQLRIREEDIPKTAFTTRYGLFECTVMSFGLTNAPAFFMNLMNKVFMEFLDKFVVVFIDDILIYSKSEEEHEQHLRLVLEKLKEHQLYAKFSKCDFWLSEVKFLGHIISAQGVAVDPSNVESVTKWTPPKTVSQIRSFLGLAGYYRRFIENFSKIARPMTQLLKKDEKFKWSAECNQSFEELKKKLVSAPVLILPDQTKDFQVYCDASRQGLGCVLMQEGRVAAYASRQLRPHETNYPTHDLELAAVVHALKIWRHYLIGNRCEVYTDHKSLKYIFTQPNLNLRQRRWLELIKDYDMGIHYHPGKANVVADALSRKSYCNALCTEDMCGKLQQDLEHLNLGIVEHGYVAALEARPTLVDQVRAAQVNDPEIAELKKNMRVGKARDFHEDEHGTIWLGERLCVPDDKELKDLILTEAHQTQYSIHPGSTKMYQDLKEKFWWASMRREIAEFVALCDVCQRVKAEHQRPAGLLQPLQIPEWKWEEIGMDFITGLPRTSSGHDSIWVVVDRLTKVAHFIPVHTTYTGKRLAELYLARIMCLHGVPKKIVSDRGSQFTSKFWQKLQEELGTRLNFSTAYHPQTDGQTERVNQILEDMLRACALDFGGAWDKSLPYAEFSYNNSYQSSLQMAPFEALYGRKCRTPLFWDQTGERQLFGTEVLTEAEEKVRTVRERLRIAQSRQKSYADNRRRELTFEAGDYVYLRVTPLRGVHRFQTKGKLAPRFVGPYRILERRGEVAYQLELPSNMVGIHDVFHVSQLKKCLRVPEEQASSEHIDIQEDLTYVEKPIRILETSERRTRNKVIRFCKVQWSHHSEEEATWEREDELKAAHPHLFASPSESRGRDSV

SEQ ID NO: 153222 - protein, 54 aa, Oryza sativa
  Clone ID: PAT_MRT4530_53196C.1.pep
SSSAQLASCRSSCSSQAAPFSNHGSLARSDSLGSHVPACPFWMTSYLAPSIFSS

SEQ ID NO: 153223 - protein, 169 aa, Oryza sativa
  Clone ID: PAT_MRT4530_53197C.1.pep
MGIQYHLGKANVVADALSRKSYCNAVCTEGMCDKLQQDLEHLNLGIVEHGFVAALEARPTLVDQVRAAQINDPEIAELKKNMRVGKARDSHDIEHGTIWLGKRLCVPEDKELKDLILIEAHQTQYSIHPGRTKMYQDRKEKFWWASMRREISEFVALCDVCQRVKAEHQ

SEQ ID NO: 153224 - protein, 287 aa, Oryza sativa
  Clone ID: PAT_MRT4530_53198C.1.pep
MYMDLTLGGALLQVEEATEEEEEEEEEEQALGQEPAPAAAAAALVLGRRHGVVVGGGGGGVVVAAEREHMFDKVVTPSDVGKLNRLVVPKQHAERFFPAAAAGTQLCFEDRAGTPWRFRYSYWGSSQSYVMTKGWSRFVRAARLSAGDTVSLSRAADGRYFIDYRHCHRHGGRDISFASAATAMPAAAWPLFGRVQTAAPVSYGGGHGSAAAATMFLDTVAPVAAAGGHRGEVGPSGQRSFRLFGVNVECGGDVDAAAEEEDADDDVDDGDHRRGEEMELVMWTNHR

SEQ ID NO: 153225 - protein, 462 aa, Oryza sativa
  Clone ID: PAT_MRT4530_53199C.1.pep
MVKTRNDPRDSNDASGSEEQTDEAHTSGAPGSSSSPPPENPTVPQMMTMMMQQMQQHYHQMLQQAQQNQQFGPPPSHVSKLLDFLRIQPPTFSSTTNPMEANDWLRAIEKKLNLLQCNDQEKVAFATHQLQGPASVWKAQIPEGIMAQQKREFRALQQGTRTVTEYLHEFNRLARYAPKDVRTDAEKQEKFLFGLDDELTNQLISRVYEDFEKLVDKAIRQEEQRNKMDRKRKAAQISFPQGNKQKPRFMTGQLGGPSTLIVCQHRPYHPSNFNNDYNGGSHNNSKQHNHNSTPPPLMAPAQSDSPAVSAQSEQPKKGAVGKPGPCFNCGKHDHFASKCPKLNRTGPRFIQARANHVSAEEAQVAPKVVLGTFPVNSYPATVLFDSGASHSFISKRFAGTHGFYSTLTKAPCLYGSIPRSTKASTTNVDKAPSQILRLLDHSRTVGGSRQGIRNEEMVYPPR

SEQ ID NO: 153226 - protein, 95 aa, Oryza sativa
  Clone ID: PAT_MRT4530_5319C.1.pep
METEIFIQVRAPYLTGCYSFPLRLGSELAGEAQDKDYTPIQEIFMASRAEDEEARRLREQWEREDKRLCKGAEDEERQGLQSGSVHEFMPCSPKL

SEQ ID NO: 153227 - protein, 132 aa, Oryza sativa
  Clone ID: PAT_MRT4530_531C.1.pep
MSRSLGIPVKLLHEAAGHVVTVELKTGEVYRGAMVECEDNWNCQLDNITFTAKDGKVSQLEHVFIRGSRVRFMIIPDMLKNAPMFKRLEARIRGKGSAIGVGRGRAVAMRARAAAGRGGGPVGRGGAPPVRR

SEQ ID NO: 153228 - protein, 98 aa, Oryza sativa
  Clone ID: PAT_MRT4530_53200C.1.pep
MPQSSRYSSPTTVGSFVVASPVVVERSLCRPGPSTPLRRRAFMVVVSSSGEWSGLGRARSLAHASRYLGTLDDLSNERNTHDAATLRQFAGFSDLKFL

SEQ ID NO: 153229 - protein, 238 aa, Oryza sativa
  Clone ID: PAT_MRT4530_53201C.1.pep
MGIRNRTTEEGKEGGGGRKRRTGGRERREDERVEVIADVKGRGKRALGVEAVLTKAEEKVRTGRERLRIAQSRKKSYADNRRREVTFEAGDYVYLRVTPLRGVHRFQTKGKLAPRFVGPYRILEHRGEVAYQFKLPSNMAGIHDVFHVSQLKKCLRVPEEQASSEQIDIQEDLTYAEKPIRILETSERRTRNKVIRFCKVQWSHHSEEEATWEREDELKAAHPHLFASSSESRGRDSI

SEQ ID NO: 153230 - protein, 264 aa, Oryza sativa
  unsure (1)..(264): unsure at all Xaa locations
  Clone ID: PAT_MRT4530_53202C.1.pep
LTLTKAPSFFMNLMNKVFMEFLDKFVVVFIDDILIYSKSKEEHQQHLRLVLEKLKEHQLYAKXFSKCDFXSRKSNFWVNVISAQGMVVDPSNVESVTKWTPPKTVSQIQEFFLGLAGIXRRFIEKFLKDCQTMTQLLKKDEKFQWXAECNQSFEELKKRLVSAPVXLFLPDQTKDFQVYCDASRQGLGCVLMQEGRVVAYASRQLRPYESNYPTHDLELAAVVHALKIWRHYLIGNHCEVYTDHKSLKYIFTQHLVRVNPAAMA

SEQ ID NO: 153231 - protein, 72 aa, Oryza sativa
  Clone ID: PAT_MRT4530_53203C.1.pep
MESAGGGLAETAAGRGEEMRRQKFGTRTVACRVFFTVHRLPLDEFLHWVHAIFYHIAQIRAPHPLASIMMTG

SEQ ID NO: 153232 - protein, 46 aa, Oryza sativa
  Clone ID: PAT_MRT4530_53204C.1.pep
SLCIILPNYPSDSTDTIMIELYTVLYIKMSQFLLISIHNIEHQSIA

SEQ ID NO: 153233 - protein, 129 aa, Oryza sativa
  Clone ID: PAT_MRT4530_53205C.1.pep
TPSALVSAIANPLHGSGPLRSGNASSSDEIQLRIDPVHGDLDEEIDGLHSRVRLLKGVAQEINAEAKFQNDFLSQLQMTLIKAQAGVKHNMRRMNKSIIQQGSNHVVHVVLFALFCFFVVYLLSKFSRR

SEQ ID NO: 153234 - protein, 139 aa, Oryza sativa
  Clone ID: PAT_MRT4530_53206C.1.pep
MANPLHGSGPLRSRNASSSDEIQLRIDPVHGDLDEEIDGLHSRVRLLKGVAQEINAEAKFQNDFLSQLVLCLAFSFKLVVMTCFPLQMTLIKAQAGVKHNMRRMNKSIIQQGSNHVVHVVLFALFCFFVVYLLSKFSRR

SEQ ID NO: 153235 - protein, 144 aa, Oryza sativa
  unsure (1)..(144): unsure at all Xaa locations
  Clone ID: PAT_MRT4530_53207C.1.pep
AYAEYKDPSRPICQVLXFCLSKMKQATLXSGGMRGTLPWMAPELLTMSGTKVSEKIDVYSFGIVMWEILTGEDPYDGMHYGGVIGGILSNTLRPLVPTSCNLEWRKLMEQCWSTEPERRPSFAEVATRLRSMLEASQSVTLRVN

SEQ ID NO: 153236 - protein, 76 aa, Oryza sativa
  Clone ID: PAT_MRT4530_53208C.1.pep
MWRGGRGGNYPSVLESDGSGVRGTKGKLIRAPRRKRQGACEQAECDPRSKKNVLREPYVLHARRNNDYIYVDLFHW

SEQ ID NO: 153237 - protein, 63 aa, Oryza sativa
  Clone ID: PAT_MRT4530_53209C.1.pep
HAPLRQLLSSTTAAPLYFFSFSFFYIFWGIFKLLGGTTHIPPIPIPLTLPLNSRLPLSTTHQT

SEQ ID NO: 153238 - protein, 155 aa, Oryza sativa
  unsure (1)..(155): unsure at all Xaa locations
  Clone ID: PAT_MRT4530_5320C.1.pep
LLVFLTTTDKSASAQNTTVALYLRVTPKGYIEXQGTITTTGFRVVTTCHLPLTNPWDTQQTKRSFSEPGTECTDSSGTPXSYTRRGRSRXSAKLPGTSQELPLTLYLFSNVQRYNRGSCNSAQSCVLXSEVSSSFYSLHMTVTAIGIVQNTLQPS

SEQ ID NO: 153239 - protein, 105 aa, Oryza sativa
  Clone ID: PAT_MRT4530_53210C.1.pep
MGVVAALGFGRGREEQARLEEDDDASPSWAGWSAQGRAAWADRVDADHVRERRGEGELGHCGCGPRRLGAAAAQRGEGDPRGMGEEGKNFSCDRDKIFADKAGME

SEQ ID NO: 153240 - protein, 172 aa, Oryza sativa
  Clone ID: PAT_MRT4530_53211C.1.pep
MAAAAAEATTDGGGKMIILISADGKRFEVTEAVASQSQLISNMIEDDCTENGVRLPNVDGDILTMVVDYCNMHAGDAAAAGDTMKASSTEEELKKFDAELVQALENPVLFKLILAANFLNIKSLLDMTCQRVADMMSGKTPEQMRETFSIENDFTPEEEAAIRQENAWAFDD

SEQ ID NO: 153241 - protein, 511 aa, Oryza sativa
  Clone ID: PAT_MRT4530_53212C.1.pep
VTRRRRRGPRHVLGSPPAPSTRRSPSPGALLLPSHTLASDPESISPSRRRLGLDSRLLEEFAPSPAAELHPSRERRCGVPAASACGREREERVTMVSMEVTDEMFKCMEVGLAFRDYNGRISSMDFHSKATNYLVTACDDESIRLYDIQNAVCLKTINSKKYGVELVCFTENPTYVLHSSKNGWDDSLRLLSLVNNCFLRYFKGHLDSQYQQRILSVLIRVVSISLCSENGNILSGSLDRTVLLWDSRVEKAQGLLRVQGRPAVSYDDQGLVFAIAYGGYIRMFDARNFEKGPFDIFSVGLDRVVSILLCSENGNILSGSLDRTVLLWDSRVFHGNNIATYNVKPVVSNSTLEASFAIAYGGYIRMFDARNFEKGPFDIFSVGNDDSEANVIKFSSDGRRLLLTTKAGRVHVLDSFHGNNIATYNVKPVVSNSTLEASFSPDGNHIISGSGDGSVYAWNVRSGKVARWGSTDSEPPLIRWAPGSLMFLTASSELSCWVPDLSKLGSFTVSK

SEQ ID NO: 153242 - protein, 134 aa, Oryza sativa
  Clone ID: PAT_MRT4530_53213C.1.pep
HVEITVSHFQDIKKLAHFNKNPLLDVPLEAVNWSSRIGSSTCHQPVPQLQYPTLHLLKIYKLRNTYMLLRSGAHHDPIEAHLNFAALCKLLWLMMRMPQSNEEAGMASSAGEKMGLRIQKAGSPLSWTSASTIL

SEQ ID NO: 153243 - protein, 79 aa, Oryza sativa
  unsure (1)..(79): unsure at all Xaa locations
  Clone ID: PAT_MRT4530_53214C.1.pep
KNLLGIIANFILHVLSRGHSDPSNFFCLNRALESLLFGLFGAEAWGRXRGGAGXQFXPNRWSRITGGQWAVXFYKSREL

SEQ ID NO: 153244 - protein, 524 aa, Oryza sativa
  Clone ID: PAT_MRT4530_53215C.1.pep
KNILIILIKSILLKYSNPSLLHKSSSSFPPMEKLAAKTLVLDVEGGLLRSSSLFPYFMLVALEAGGFLRGLVLLLLYPLLCVMGSDMALKVMAMVSFCGLRASRFRAGRAVLPKWFLEDVGEEGFDVMRSAMRRVCVTKMPRIMVEGFLKEYLEVEVVSGREMKVIWGFFTGIMEEEEGGDQEEVLLEEKKMLVDVVGFSTSLEFLQHHLFTHTTQEVYLVTREEKARWSALPRDKYPKPMVFHDGRLAFRPAAGDTLAMFTWLPFGAALAVARLAVALAVPYRYSTPILAATGLSWRLKGEAPTPLAGAGDGARRRGQLFVCNHRTLIDPVYVSVALDRPVRAVSYSLSRLSELISPIGRTVRLTRDRDSDGRAMARLLDGGDLVVVCPEGTTCREPCLLRFSPLFAELSDDVVPVGIAVDTAMFYATTAGGLKCLDPLYYIANPRTCYAVQFLERVDTSPARERRAPSTDVANLVQRRMGDALGYRCTMLTRKDKYLMLAGNDGVVNTTQDNHSAPGKKKMQ

SEQ ID NO: 153245 - protein, 146 aa, Oryza sativa
  Clone ID: PAT_MRT4530_53216C.1.pep
PTRSPSPREMARVTAEGVADMVDESVAMAFGHTSGSSSNYVRIQASKAATALHGAAAAGAMLSQRNVESVLFRGRRMSERTNAEKVDAAAAEVVKEHERRRRSPLPNVVIKQVGTPRVSSATTASSGTARTAASTLASPASYGSRQ

SEQ ID NO: 153246 - protein, 49 aa, Oryza sativa
  Clone ID: PAT_MRT4530_53217C.1.pep
SYIALFHCLFVIRRCLPPCFVCSQFVHLSFDWTGRAELFVFVSPDLYVT

SEQ ID NO: 153247 - protein, 63 aa, Oryza sativa
  Clone ID: PAT_MRT4530_53218C.1.pep
KKRENRKSLLVFLNDITRNIIPSNGTEILLVYYGYRVHPQAHGYTIVAFHPRVFEGYHIYFIP

SEQ ID NO: 153248 - protein, 138 aa, Oryza sativa
  Clone ID: PAT_MRT4530_53219C.1.pep
HVSLARVLLHPTSSLTSGGMRRAARPLAIVAPEQLPWVRWRWIWMPPDSSLAVWWPHCSGEPKVEDPCPGCCGGRARAGAAGGGGTPPCRHGEGREGARASVLCLAPGVRPPARPRVRQGRVRRCFAWLCGRVGGRVG

SEQ ID NO: 153249 - protein, 58 aa, Oryza sativa
  Clone ID: PAT_MRT4530_5321C.1.pep
SVFRCTRVANYSIFSWFHSFSSILLLFNDSVMHAIKLTTFFMQIGHRCWQFCVEFRRF

SEQ ID NO: 153250 - protein, 93 aa, Oryza sativa
  Clone ID: PAT_MRT4530_53220C.1.pep
MARHFGPAQAQHGPTEVEPAPAWPDHRAVPRPLYRHVGLARHGTIGWQPDPIGGRKNRLILKKAQCSTRAFGPVRHGPTAGGPCLGGRCIPWA

SEQ ID NO: 153251 - protein, 302 aa, Oryza sativa
  Clone ID: PAT_MRT4530_53221C.1.pep
MHQGTAGSYLRTAAMGNLFCCVQVDQSTVAIREQFGKFDAVLEPGCHCLPWFAGKRIAGHLTLRLQQLDVRCETKTKDNVFVNVVASIQYRALAGKANDAFYKLSNTRSQIQAYVFDVIRASVPKLNLDDAFEQKNDIAKAVEDELEKAMSAYGFEIVQTLIVDIEPDEHVKRAMNEINAAARLRVAANEKAEAEKIVQIKRAEGEAEAKYLSGLGIARQRQAIVDGLRDSVLGFSVNVPGTTAKDVMDMVLITQYFDTMKEIGASSKASSVFIPHGPGAVRDIATQIRDGLLQGQATTTSH

SEQ ID NO: 153252 - protein, 97 aa, Oryza sativa
  unsure (1)..(97): unsure at all Xaa locations
  Clone ID: PAT_MRT4530_53222C.1.pep
DPPRXXXXXPXTXEXXSXXPVKWRQVXQXXSXPTRXSXRSRRVXXXXVRFXGPPPPPPPXXRPNPXNXXRPPVTIEAKANRSXXXXXSLLXXYPPPG

SEQ ID NO: 153253 - protein, 97 aa, Oryza sativa
  unsure (1)..(97): unsure at all Xaa locations
  Clone ID: PAT_MRT4530_53223C.1.pep
MRASESASTTRALFSSASVYLDQYALLLLTLCRSLHSYYTCSTRADSCTQYPTTTAITASMRVPGMSPHAVDAGLSXRAQEISRQRYEMLDMLHDLP

SEQ ID NO: 153254 - protein, 1298 aa, Oryza sativa
  unsure (1)..(1298): unsure at all Xaa locations
  Clone ID: PAT_MRT4530_53224C.1.pep
VKTGNDPRASNDARGSEEQTDGAHISGASDSSSSPPPENPTVTQMMTMMIQQMQQHYHQMLQQAQQNQQQAQQNQQSGPPSSHLSKLLDFHHIQPPTFSSTTNPMXANDWLRAIEKKLNLLQCNDQEKVAFATHQLQGPASAWWDNYVVTRPDSTEVTWAEFCQSFRKAQIPEGIMAQKKREFRALHQETRIVTEYLHEFNRLARYAPKDVRTDAEKQEKFLFGLDDKLTNQLISGVYDDFEKLVDKAIRQEEQRNKMDRNRKVAQISFPQGNNXKPRFMTGQLGEPSTLIIRQHHPYHPSNFNNDYNGGSHNNSKQHNHNSTSPPLMAPAQSDPPAMSAQSEQLKKESAGKPRPCFNCGKHGHFAGKCPKLKRVGPRFVQARVNHASAEKAQASPEVVLGTFPVNSYPATVLFDSGASHSFISKRFAGAHGLSVVELKILMQVHTPGNDMRTAHYCPSVTIEIKRSRFLSNLILLESKDLDVILGMDWLTRHKGVIDCASRTITLSNDKGEKITFRSPVSQKSVASLNQAVIEDQTEIAEKNPKKLEDIPIVQEYPEVFPEGLTTMPPKREIEFQIDLAPGTAPIYKRPYRMAANELAEVKKQVDEQLQKGYIRPSTSPWGAPVIFVEKKDKTKRMCVDYRALNEVTIKNKYPLPRIDDLFDQLKGAKMVKTGNDPRASNDARGSEEQTDGAHISGASDSSSSPPPENPTANDWLRAIEKKLNLLQCNDQEKVAFATHQLQGPASAWWDNYVVTRPDSTEVTWAEFCQSFRKAQIPEGIMAQKKREFRALHQETRIVTEYLHEFNRLARYAPKDVRTDAEKQEKFLFGLDDKLTNQLISGVYDDFEKLVDKAIRQEEQRNKMDRNRKLGEPSTLIIRQHHPYHPSNFNNDYNGGSHNNSKQHNHNSTSPPLMAPAQSDPPAMSAQSEQLKKESAGKPRPCFNCGKHGHFAGKCPKLKRVGPRFVQARVNHASAEKAQASPEVVLGTFPVNSYPATVLFDSGASHSFISKRFAGAHGLSVVELKILMQVHTPGNDMRTAHYCPSVTIEIKRSRFLSNLILLESKDLDVILGMDWLTRHKGVIDCASRTITLSNDKGEKITFRSPVSQKSVASLNQAVIEDQTEIAEKNPKKLEDIPIVQEYPEVFPEGLTTMPPKREIEFQIDLAPGTAPIYKRPYRMAANELAEVKKQVDEQLQKGYIRPSTSPWGAPVIFVEKKDKTKRMCVDYRALNEVTIKNKYPLPRIDDLFDQLKGAKVFSNIDLRSGYHQLRIREEDIPKTAFATRSCSLFPHTRVEVLLS

SEQ ID NO: 153255 - protein, 1408 aa, Oryza sativa
  Clone ID: PAT_MRT4530_53225C.1.pep
MVKTRNDPRDSNDASGSEEQTDGAHVSGASGSRSSPPPENPTVTQMMTMMMQQMQQHYHQMLQQAQQNQQFGPPPSHVSKLLDFLRIQPPTFSSTTNPMEANDWLRAIEKKLNLLQCNDQEKVAFATHQLQGPASAWWDNYVATRLDATEKREFRALQQGTMSVTEYLHEFNRLARYAPEDVRTDAEKQEKFLFGLDDELTNQLISGVYEDFEKLVDKAIRQEEQRNKMDRKRKAAQISFPQGNNQKPRFMTGQLGGPSTLIVCQHRPYHPSNFDNDYNGGSHNNSKQHNHNSTPPPLMAPAQSDPPAVSAQSEQPKKRAVGKPGPCFNCGKHGHFASKCPKLNRTGPRFIQAHANHVSAVEAQAAPEVVLGTFPVNSYPATVLFDSGASHSFISKRFAGTHGLSVVELKIPMQVHTPGNDMRTAHYCPSVTIEIRRSPFLSNLILLESKDLDVILGMDWLTRNKGVIDCASRTITLTNDKGEKITFRSPASQKSVASLNQAAIEGQTETVEKSPRKLEDIPIVQEYPEVFPEDLTTMPPKREIEFRIDLAPGTTPIYKRPYRMAANELAEVKKQVDEQLQKGYIRPSTSPWGAPVIFVEKKDKTKRMCVDYRALNEVTIKNKYPLPRIDDLFDQLKGAKVFSKIDLRSGYHQLRIREEDIPKTAFTTRYGLFECTVMSFGLTNAPAFFMNLMNKVFMEFLDKFVVVFIDDILIYSKSEEEHEQHLRLVLEKLKEHQLYAKFSKCDFWLSEVKFLGHVISAQGVAVDPSNVESVTKWTPPKTVSQIRSFLGLAGYYRRFIENFSKIARPMTQLLKKDKKFKWSAECNQSFEELKKKLVSAPVLILPDQTKDFQVYCDASRQGLGCVLMQEGRVVAYASRQLRPHETNYPTHDLELAAVVHALKIWRHYLIGNRCEVYTDHKSLKYIFTQPDLNLRQRRWLELIKDYDMGIHYHPGKANVVADALSRKSYCNAVCTEGMCDKLQQDLEHLNLGIVEHGYVAALEARPTLVDQVRAAQVNDPEIAELKKNMRVGKARDFHEDENGTIWLGERLCVPDDKELKDLILTEAHQTQYSIHPGSTKMYQDLKEKFWWVSMRREIAEFVALCDVCQRVKAEHQRPAGLLQPLQIPEWKWEEIGMDFITGLPRTSSGHDSIWVVVDRLTKVAHFIPVHTTYTGKRLAELYLSRIMCLHGVPKKIVSDRGSQFTSKFWQKLQEELGTRLNFSTAYHPQTDAISPVCKWYRLKHCTDESAAHHFSGIKQGIMCTLRVTPLRGVHRFQTKGKLAPRFVRPYRILERRGEVAYQLELPPNMVGIHDVFHVSQLKKCLRVPEEQASSEHIDIQEDLTYVEKPVRILETSERRTRSKVIRFCKVQWSHHSEEEATWEREDELKAAHPHLFASSSESRGRDSV

SEQ ID NO: 153256 - protein, 58 aa, Oryza sativa
  Clone ID: PAT_MRT4530_53226C.1.pep
ARLAQHSTSCVLPPAGANGSRSVLVVARVLHLAGTAVTSQDRRRFHSLARRRLDRASC

SEQ ID NO: 153257 - protein, 1603 aa, Oryza sativa
  unsure (1)..(1603): unsure at all Xaa locations
  Clone ID: PAT_MRT4530_53227C.1.pep
CQRPYRARATDDMLRTVSLIIRLQPTAPPPPKPPPTPPVSPFPAAHSARNPKPTSPPTFPAPPASSGARKRRGGFEISPTLSLLLHMVKTRNDPRDSNDASGSEEQTDGAHVSGASGSRSSPPPENPTVTQMMTMMMQQMQQHYHQMLQQAQQNQQFGPPPSHVSKLLDFLRIQPPTFSSTTNPMEANDWLRAIEKKLNLLQCNDQEKVAFATHQLQGPASAWWDNYVATRLDATEVTWAEFCQSFRKAQIPEGIMAQXKREFRALQQGTMSVTEYLHEFNRLARYAPEDVRTDAEKQEKFLFGLDDELTNQLISGVYEDFEKLVDKAIRQEEQRNKMDRKRKAAQISFPQGNNQKPRFMTGQLGGPSTLIVCQHRPYHPSNFDNDYNGGSHNNSKQHNHNSTPPPLMAPAQSDPPAVSAQSEQPKKRAVGKPGPCFNCGKHGHFASKCPKLNRTGPRFIQAHANHVSAVEAQAAPEVVLGTFPVNSYPATVLFDSGASHSFISKRFAGTHGLSVVELKIPMQVHTPGNDMRTAHYCPSVTIEIRRSPFLSNLILLESKDLDVILGMDWLTRNKGVIDCASRTITLTNDKGEKITFRSPASQKSVASLNQAAIEGQTETVEKSPRKLEDIPIVQEYPEVFPEDLTTMPPKREIEFRIDLAPGTTPIYKRPYRMAANELAEVKKQVDEQLQKGYIRPSTSPWGAPVIFVEKKDKTKRMCVDYRALNEVTIKNKYPLPRIDDLFDQLKGAKVFSKIDLRSGYHQLRIREEDIPKTAFTTRYGLFECTVMSFGLTNAPAFFMNLMNKVFMEFLDKFVVVFIDDILIYSKSEEEHEQHLRLVLEKLKEHQLYAKFSKCDFWLSEVKFLGHVISAQGVAVDPSNVESVTKWTPPKTVSQIRSFLGLAGYYRRFIENFSKIARPMTQLLKKDKKFKWSAECNQSFEELKKKLVSAPVLILPDQTKDFQVYCDASRQGLGCVLMQEGRVVAYASRQLRPHETNYPTHDLELAAVVHALKIWRHYLIGNRCEVYTDHKSLKYIFTQPDLNLRQRRWLELIKDYDMGIHYHPGKANVVADALSRKSYCNAVCTEGMCDKLQQDLEHLNLGIVEHGYVAALEARPTLVDQVRAAQVNDPEIAELKKNMRVGKARDFHEDENGTIWLGERLCVPDDKELKDLILTEAHQTQYSIHPGSTKMYQDLKEKFWWVSMRREIAEFVALCDVCQRVKAEHQRPAGLLQPLQIPEWKWEEIGMDFITGLPRTSSGHDSIWVVVDRLTKVAHFIPVHTTYTGKRLAELYLSRIMCLHGVPKKIVSDRGSQFTSKFWQKLQEELGTRLNFSTAYHPQTDGQTERVNQILXDMLRACALDFGGAWDKSLPYAEFSYNNSYQSSLQMVPFEALYGRKCRTPLFWDQTGERQLFGTEVLTEAEEKVRTVRERLRIAQSRQKSYADNRRRELTFEAGDYVYXLRVTPLRGVHRFQTKGKLAPRFVRPYRILERRGEVAYQLELPPNMVGIHDVFHVSQLKKCLRVPEEQASSEHIDIQEDLTYVEKPVRILETSERRTRSKVIRFCKVQWSHHSEEEATWEREDELKAAHPHLFASSSESRGRDSV

SEQ ID NO: 153258 - protein, 1577 aa, Oryza sativa
  Clone ID: PAT_MRT4530_53228C.1.pep
MVKTRNDPRDSNDASGSEEQTDGAHTSGASSSSPSPPPENPMVTQMMTMMMQQMQQHYHQMLQQAQQNQQFGPPPSHLSKLLDFLRIKPPTFSSTTNPMEANDRLRAIEKKLNLLQCNDQEKVAFSTHQLQGPASACLTVHGGPGAPGLTPADAVGPTRQPHQRARAADGRAPRGSRSVRPKAATAARPAGGGAPAPPMVAGGGHRHGGAAAERREGKGETRRRSTAHPRSTATTKRRPERRKAAARLGSTGTAALQRSTSETERWTRSARMRRSRRRRRRGGRWSGATTAADRSSAATAERESDGASSILARRKGGERRKRMEEVRGGVVLGRDKFRALQQGTMSVTEYMHEFNRLARYAPEDVRTDAEKQERFLFGLDDELTNQLISGVYDDFEKLVDKAIRQEEQRNKMDRKRKAAQISFPQGNNQKPRFMTGQLGEPSTLIVRQHRPYHSSNFNNDYNSGCHGSSKQHNHNSTPPPLMAPTQSDPPAMSAQSEQLKKESAGKPRPCFNCGKHGHFAGKYPKPKRAGPRFVQACVNHASAEEAQAAPEVVLGTFPVNSFPATVLFDSGASHSFISKRIAGTHGLSVVELKILMRVHTPGNDMNTTHYCPSVTIEIKRSPFLSNLILLESKDLDVILGMDWLTRHKGVIDCASRTITLTNDKGEKITFRSPVPQKSVASLNQATIEDQTEIAEKNPKKLEDIPIVQEYPEVFLEDLTTMPPKREIEFRIDLAPGTAAIYKRSYRMAANELAEVKKQVDEQLQKGYIQPSISPWGAPVIFVEKKDKTKRMCVDYHALNEVTIKNKYPLPRIDDLFDQLKGAKVFSKIDLRSGYHQLRIREEDIPKTAFTTRYGLFECTVMSFGLTNAPAFFMNLMNKVFMEFLDKFVVVFIDDILIYSKSEEEHEQHLRLVLEKLKEHQLYAKFSKCDFWLSEVKFLGHVITAQGVAVDPSNVESVTKWTPPKTVSQIRSFLGLAGYYRRFIENFSKIARPMTQLLKKDEKFKWSVECNQSFEELKKKLVSAPVLILPDQTKDFQEGRVVAYASRQLRPHESNYPTHDLELAAVVHALKIWRHYLIGNRCEVYTDHKSLKWLELIKDYDIGIHYHAGKANVVADAFSRKSHCNTVYTEGMCDKLQQDLEHLNLGIVEHGYVAALEARPTLVDQVRDAQVNDPEIAELKKNMRIGKARDFHEDGHGTIWLGERLCVPDDKELKDLILTEAHQTQYSIHPGSTKMYQDLKEKFWWASMRREIAEFVALCDVCQRVKAEHQRPAGLLQPLQIPEWKWEEIGMDFITGLPRTSSRHDSIWVVVDRLTKVAHFIPVHTTYTGKRLAELYLARIMCLHGVPKKIVSDRGSQFTSKFWQKLQEELGTHLNFSIAYHPQTNGQTERVNQILEDMLRACALDFGGAWDKSLPYAEFSYNNSYQASLQMAPFEALSGWKCRTSLFWDQTGERQLFGTEVLTEAEEKVRTIRERLRIAQSRQKSYADNRRRELIFEAGDYVYLRITPLRGVHRFQTKGKLAPRFVGPYRILERRGEVAYHLELPSNMAGIHDVFHVSQLKKCLRVPEEQASSEHIDI

SEQ ID NO: 153259 - protein, 52 aa, Oryza sativa
  Clone ID: PAT_MRT4530_53229C.1.pep
MSPPLSTTAKLLLSLPPSDSTTERAHGLGSGKSARFASLPFFVNPLGDDGGS

SEQ ID NO: 153260 - protein, 440 aa, Oryza sativa
  Clone ID: PAT_MRT4530_5322C.1.pep
MWPAAAASLHVLVLPPLPPPGCRTRRAAPVLARRGRGVRHAARRDTPPNPVDAVDCVGTGADVECYVDDRPGAEVGPIRREATPPPSPQDAVDCVGTGTDVECFVDGPGAGAGVGAEPLLARVSEEEEDGVSASAAALVGREWWEWASLVSPFFFWGTAMVAMKGVIPKTGPFFVAALRLLPAGALLVAFAAARGRRQPSGWAAWVAVAAFGLVDAACFQGFLAEGLQKTSAGLGSVIIDSQPLTVAVLAALLFGESIGAIGVGGLVLGVVGLLLLEVPALSVEGNDTAIWGSGEWWMFLSAQSMAVGTIMVRWVSKYSDPIMATGWHMIIGGLPLLVISVLNHDPALNGHLQELTLNDVLALLYTSIFGSAISYGVYFYNATRGSLTTLSSLTFLTPMFASIFGFLYLGETFSPVQLGGALLTLVAIYMVNYKSIVGEK

SEQ ID NO: 153261 - protein, 1505 aa, Oryza sativa
  Clone ID: PAT_MRT4530_53230C.1.pep
MVKTRNYPRDSNDASGSEEQTDGAHVSGASGSRSSPPPENPTVTQMMTMMMQQMQQHYHQMLQQAQQNQQFGPPPSHVSKLLDFLRIQPPTFSSTTNPIEANDWLRAIEKKLNLLQCNDQEKVAFATHQLQGPASAWWDNYVVTRPDATEVTWAEFCQSFRKAQIPEGIMAQKKREFQYLHEFNRLARYAPEDVRSDTEKQEKFLFGLDDELTNQLISGVYEDFEKLVDKAIRQEEQRNKMDRKRKAAQISFPQGNNQKPRFMTGQLGGPSTLIVCQHRPYHPSNFDNDYNGGSHNNSKQHNHNSTPPPLMAPAQSDPPAVSVQSEQPKEGAVGKPAPCFNCGKHDHFACKCPKLNRTRPRFIQARANHVSAEEAQAAPEVVLGTFPVNSYPATVLFDSGASHSFISKRFAGTHGLSVVELKIPMQVHTPGNDMRTAHYCPSVTIEIKGSPFLSNLILLESKDLDVILGMDWLTRNKGVIDCASRTITLTNDKGEKITFRSPASQKSVASLNQAAIEGQTETVEKSPRKLEDIPIVQEYPEVFPEDLTTMPPKREIEFRIDLAPGTAPIYKRPYRMAANELAEVKKQVDEQLQKGYIRPSTSPWGAPVIFVEKKDRTKRMCVDYRALNEVTIKNKYPLPRIDDLFDQLKGAKVFSKIDLRSGYHQLRIREEDIPKTAFITRYGLFECTVMSFGLTNAPAFFMNLMNKVFMEFLDKFVVVFIDDILIYSKSEEEHEQHLRLVLEKLKEHQLYAKFSKCDFWLSEVKFLGHVISAQGVAVDPSNVESVTKWTPPKTVSQIRSFLGLAGYYRRFIENFSKIARPMTQLLKKDEKFKWSAECNQSFEELKKKLVSAPVLILPDQTKDFQVYCDASRQGLGCVLMQEGRVVAYASRQLRPHETNYPTHDLELAAVVHALKIWRHYLIGNRCEVYTDHKSLKYIFTQPDLNLRQRRWLELIKDYDMGIHYHPGKANVVADALSRKSYCNAVCTEGMCDKLQQDLEHLNLGIVEHGYVAALEARPTLVDQVRAAQVNDPEIAELKKNMRVGKARDFHEDEHGTIWLGERLCVPDDKELKDLILTEAHQTQYSIHPGSTKMYQDLKEKFWWVSMRREIAEFVALCDVCQRVKAEHQRPAGLLQPLQIPEWKWEEIGMDFITGLPRTSSGHDSIWVVVDRLTKVAHFIPVHTTYTGKRLAELYLSRIMCLHGVPKKIVSDRGSQFTSKFWQKLQEELGTRLNFSTAYHPQTDGQTERVNQILEDMLRACALDFGGAWDKSLPYAEFSYNNSYQSSLQMAPFEALYGRKCRTPLFWDQTGERQLFGTEVLTEAEEKVRTVRERLRIAQSRQKSYADNRRRELTFEAGDYVYLRVTPLRGVHRFQTKGKLAPRFVGPYRILERRGEVAYQLELPSNMVGIHDVFHVSQLKKCLRVPEEQASSEHIDIQEDLTYVEKPICILETSERRTRNKVIKFCKVQWSHHSEEEATWEREDELKAAHPHLFANSSESRGRDSV

SEQ ID NO: 153262 - protein, 497 aa, Oryza sativa
  Clone ID: PAT_MRT4530_53231C.1.pep
MTMATSREVFKYHPLPTPGVENSFKDEIQSKVLGTIGDVMNSFDPKSFPQHVEGALGTAGNIINSFESKLAEHKQFDFGGKTNFYGYDCADDGWGSAPLKADKPVNLRNLLGGLIAIISRGGKNSEIQPPKDTKSSVAFLGSGSDGETFLHASVYVPSAPPLLDEEALNYNVYRVVIEAEPPEWLPDSYANSCMQCAASFTVVTRGRHHCRFCGGIFCRTCSKGRCLLPAKFRERNPQRVCDACYDRLDPLQNLFINSISNATQTAKHDVMDWTSTRGWLNLPIGLTMEHEIYKAANSVRSYSQIARLNPERSIPHAVLSGASGLAILTVVKAGALLTYKLGTGLVVARRSDGSWSPPSAIVSVGLGWGAQVGAELMDFIIVLRGLEAVRTFSSQMHFSVGAGLSAAAGPVGRVLEADLRAGDKGSGVCYTYSCSKGAFIGVSLEGNFVATRRDANLRFYGDPYLTTSDILMGDMQRPNAAKFLYTALDGLYSGLSR

SEQ ID NO: 153263 - protein, 1326 aa, Oryza sativa
  Clone ID: PAT_MRT4530_53232C.1.pep
MVKTRNDPHDSNDASGSEEQTDGAHVSGASGSRSSPPPENPTVTQMMTMMMQQMQQHYHQMLQQAQQNQQFGPPPSHVSKLLDFLRIQPPTFSSTTNPMEANDWLRAIEKKLNLLQCNDQEKVAFATHQLQGPASAWWDNYVATRLDATEVTWAEFCQSFRKAQIPEGIMAQQKREFRALQQGTMSVTEYLHEFNRLARYAPEDVRTDAEKQEKFLFGLDDELTNQLISGVYEDFEKLVDKAIRQEEQRNKMDRKRKAAQISFPQGNNQKPRLMTGQLGGPSTLIVCQHRPYHPSNFDNDYNGGSHNNKQPKKGAVGKPGPCFNCGKHGHFAGKCPKLNRTGPRFIQARANHVSAEEAQAAPEVVLGTFPVNSYPATVLFDSGASHSFISKRFAGTHGLSVVELKIPMKVHTPGNDMRTAHYCPSVTIEIKRSPFLSNLILLESKDLDVILGMDWLTRNKGVIDCASRTITLTNDKGEKITFRSPASQKSVASLNQAAIEGQTETVEKSPRKLEDIPIVQEYPEVFPEDLTTMPPKRKIEFRIDLAPGTAPIYKRPYRMAANELAEVKKQVDEQLQKGYIRPSTSPWGAPVIFVEKKDKTKRMCVDYRALNEVTIKNKYPLPRIDDLFDQLKGAKVFSKIDLRSGYHQLRIREEDIPKTAFTTRYGLFECTVMSFGLTNAPAFFMNLMNKVFMEFLDKFVVVFIDDILIYSKSEEEHEQHLRLVLEKLKEHQLYAKFSKCDFWLSEVKFLGHVISAQGVAVDPSNVESVTKWTPPKTVSQIRSFLGLAGYYRRFIENFSKIARPMTQLLKKDEKFKWSAECNQSFEELKKKLVSAPVLILPDQTKDFQVYCDASRQGLGLVHALKIWRHYLIGNRCEVYTDHKSLKYIFTQPDLNLRQRRWLELIKDYDMGIHYHPGKANVVADALSRKSYCNAVCTEGMCDKLQQDLEHLNLGIVEHGYVAALEARPTLVDQVRAAQVNDPEIAELKKNMRVGKARDFHEDENGTIWLGERLCVPDDKELKDLILTEAHQTQYSIHPGSTKMYQDLKEKFWWGPPVGPFFHLPLPLPKPAAAETATDAAGSPPHPAIGAAASAIPRSTSSAVLPSNSIAGARISSHSELKSFPVEDVSKRLVSSLPSRIACGMESPAAGVNLEILVREFLGVTRRARPRAWRGSEEAVPAAGRHGTARTMTSGRASMRFEELAVGKIMDPNFPYQSPSFTLGDFDPNYMSGFDGGDSFGRIFRNRERKCFDTHRLEEIENLRSPQAPCGVVCQEARNTTPAAATYGKPRRYGTQLGVRSHGCSGISCPVNRQARFTPELWGVPCF

SEQ ID NO: 153264 - protein, 102 aa, Oryza sativa
  Clone ID: PAT_MRT4530_53233C.1.pep
MFSPMRGVPAVPWCSGRRLTPAKRLHSRTWMSSCVAVSEPHGTRPLEIGAWSTDPWLAPPPPPAISGAAAPPSPSSSPVAVTTVGCAVVRGSSATLPFPSPV

SEQ ID NO: 153265 - protein, 67 aa, Oryza sativa
  Clone ID: PAT_MRT4530_53234C.1.pep
MYRGSCRARAWSESACGMFLLGWVPWPSWERTPVLHCSGWANRNNQKDEKDVKALMGASPIVAYRVR

SEQ ID NO: 153266 - protein, 182 aa, Oryza sativa
  unsure (1)..(182): unsure at all Xaa locations
  Clone ID: PAT_MRT4530_53235C.1.pep
HGTAFPHFLFPNRPPPSLPVWLPPPSPHPPPSTPCSPTGSPPLIPQXPPPPPDIPPPPSSPNPPSVPPPILPLPPDPPPPHPLCASASRIPHRPFPPLTPRSLTPPQKSTPHSPPIPHNPPYPSXSPPPKSNSQPPSPPPSIRPNLHQILVAAPPPNNXPPPSHRPHAPXPPLPSPPAPHPP

SEQ ID NO: 153267 - protein, 146 aa, Oryza sativa
  unsure (1)..(146): unsure at all Xaa locations
  Clone ID: PAT_MRT4530_53236C.1.pep
MAAAWFTMREAHAGAVLGFRRGSGARRGARRTRRRRAHXASGGRRERLTGVSLTRSGRAGADEAPSWQPRGPACGGRRGRPRWTADGGDIRRGNTRGFKGGGXGHRSDGRDKRERITGPDSPERGRRRRIAVAHAGGEQRGETAAV

SEQ ID NO: 153268 - protein, 177 aa, Oryza sativa
  Clone ID: PAT_MRT4530_53237C.1.pep
METARRRRHDAAARQGNGGDKTARGGAGRKAAAQQRAAAARCRGGAGLEMERGRGGVVMPIVHHRIRIKTHVDLTGSVGGMMMVAAVAAAGSVEYGHGEGGGGVHRRVLQARGGGYVNSSLVADRQREAERHLNSTLKSEIGNLNLRTQTRSQCLHVLPCLLHPSGNATGAPDSTMD

SEQ ID NO: 153269 - protein, 129 aa, Oryza sativa
  Clone ID: PAT_MRT4530_53238C.1.pep
MAAAWFTVREAHAGTALGFRRGSGARRGARRTRRRRTHVQPHGSRWTARASGVRRERLTGVSLTRSGRAGADVVPSSQPRGPAGGGRRGRPRWTADGGDIRRGSTRGFKGGGGHRSDGRDKREGITGPD

SEQ ID NO: 153270 - protein, 539 aa, Oryza sativa
  unsure (1)..(539): unsure at all Xaa locations
  Clone ID: PAT_MRT4530_53239C.1.pep
TARTASYETAISVPVPGRSAGTHAARPNXWAGAGARRRPIRGARERGSGPVDQVHLAGSRVRPACRXHGSRRDGHTQGXVLGFGEEAVHARRTGGRGVRRAHAQPLGSPWTPRASEERREAADRGQLXPSPAELAPTWCLRGSHAGRREEEDGGGXRWTADGGDIRRGSTRGFKGGGGHRSDXGTRGSESPARIHWREAGDDESWRRMPAASKEGKRRRXTRGRFKAVGSSMGVGEPVSGAGWDGGAPRRAGDERRPPGADGNGGEAMPGGSGARGGVHARSRERAGRENGGGTTEPGAAMGGRRRGXELSGLGPGKGKEKGARSPLLASFARTGLPGAXRRRAVRATAGQGRQWRGSVESEAGGTLAVTGDARAADAXMQGAAKAVDRAVEKDSRAREGQLGXGQGGGGELAHRRQRLCLQAQVDKGGRERGRTGEGKREIGRLGGGQARRGTGGAGGDHAGARARREGTTEFKXAAAGTGKAVVDAASEREKTRERERNGAPSRLGCVQRTCEGRGKRTERRDGPREKDSTHKNLRE

SEQ ID NO: 153271 - protein, 102 aa, Oryza sativa
  unsure (1)..(102): unsure at all Xaa locations
  Clone ID: PAT_MRT4530_5323C.1.pep
GLPSSVEFRRPSLFSCRFSPACPAGPLGPPAPPAPHTPWRTPTSSRSELGLLTWLFVDGFAXIRSWLGNGFSPHMSVCLSLEDAKKMMFLPLKFPQKKKSAP

SEQ ID NO: 153272 - protein, 87 aa, Oryza sativa
  Clone ID: PAT_MRT4530_53240C.1.pep
AGLVQMRSLQKRTGSYFRYGGSLTTPPCGENVVWSVLGKVREISQEQLHLLMSPLPTKDARPAQPLNGRAVYYNPPGSAVSFQEFAK

SEQ ID NO: 153273 - protein, 924 aa, Oryza sativa
  Clone ID: PAT_MRT4530_53241C.1.pep
MLELTPHKLALCHLVQVFAPPPQAGVSAPALPFTFESVAHPNRLGLFLFALTPSCEDFREPPLEELLRQLKAVDALVNGWLCEQLTSTLSALTSPDDLFNFFDKLRGVLSAPEGANVEDEFLDPNSQLGVFLRCCILSFNTMTFEGVCHLLANLVEYCNSADTSYDLAEDEDFNSEMEMSNFMDTNMHVRDGVFDKYNQGYAPRSHMVDSSSSLVHAPASLHDFEEANMFKADDNLGPTCLRSRWQLEAYLNQQADILEKDPSSVPLNSFNATMSQLQKLAPELHRNCEEFLVTMVYFDLYSTCQVQFLQYLNALTHDDYVAALDNLHRYFDYSAGMQGLFSRTASPFQDIIVGKYESALLCLGNLHCYFGHPKKALEAFTEAVRVSQMNNDDSCLAYILGAISNLLSKIGMSSTVGTIGSPYSLGNNIGLGTPLSIQQQLLVLLKRSLKRADTLKLTSLLSFDHLSLAKFDLKHVQRPLVSFGPNASTKLRTCPADVCKNLRLSSRVLTDFGTDGLSASNDNGSFSTSWLRNLSAASNSWCSSSKKSGKLLTNDFDNFHFHAQPSPIPASVLQLAGSAYLLRATAWEHYGSAPMVRMNSLVYATCFADAASSSELSLAYVKLIQHLATFKGYSAAFSALKLAEEKFPLSANSHIQLLKMQLLHERALHRGHLKVAQQICDEFAVLSSSVSGVDIELKTEARLRHARTLLAAKQFSQAANVANSLFSTCYKYNMQVENASVLLLLAEIQKNSDNAVLGLPYALASQSFCKSFNLDLLEASATLTLTELWLALGSTHAKRALSLVCQSLPMILGHGGLELRARAHIVLAKCYLSDPKFSEKPVPLCPFIMAVSEDPSAVLDPLNQAAEDLEVLEYHEMAAEAYYLKAMVYNNLGKLDEREEAAASFKEHTLALENPYNEEDSLAC

SEQ ID NO: 153274 - protein, 68 aa, Oryza sativa
  Clone ID: PAT_MRT4530_53242C.1.pep
KGKPFKAIYHSKGNMNPGKTGGFNRGTRGSPRKMGGLRKQTKRPPRLNNTLGWTKKTDGGDRKTAFFA

SEQ ID NO: 153275 - protein, 55 aa, Oryza sativa
  Clone ID: PAT_MRT4530_53243C.1.pep
FSSRGQWWCYHILYPPHLIVYPYFLVAQHNMVGPGQWGGGQRHPSVYPTPIIFLP

SEQ ID NO: 153276 - protein, 63 aa, Oryza sativa
  unsure (1)..(63): unsure at all Xaa locations
  Clone ID: PAT_MRT4530_53244C.1.pep
IRPSXHPAXSLRPRPQPAPPRPLXPPSPATTGVAASVPDQVRRRCIHPRLRPXPQPASXLPSP

SEQ ID NO: 153277 - protein, 69 aa, Oryza sativa
  unsure (1)..(69): unsure at all Xaa locations
  Clone ID: PAT_MRT4530_53247C.1.pep
QYAAMLLQKMQKYGATGWLVNTGWXGGRYTRTIIDVIHFGELLXNYKKTXVFWLEIPIKIDGIRLNPRP

SEQ ID NO: 153278 - protein, 365 aa, Oryza sativa
  Clone ID: PAT_MRT4530_53249C.1.pep
MRCIHEKDDGNSKPSYYWLTKNKDIHVVTPQTKRSPRPPSGVAALERDLVDFTRTFEVPEGLAQHVTSPMQAQVTWYRKLLAAYKDIKYPPKESADAAVLVAAPLRGIERTNLEDILWILFNGILAFYGFPIPTISKEASENHPSSIPKGVLFVLKTLPVNAKCIVDGDGFTAYVDTLDPIELRQDCNASCQSRNSKKQKLWDKTAADLQISLENTGQKKMFFGGREILARKYEIRLRGIDAPEIGMQYGKESQDALVKLIARKCVTLHVYGQDQFKRFVCDIHCGGVFIQEQMLVNGHAWHFKNYDKRPQFAKWEKMARDARQGLWAYDNLEKPWEWRKNKRKASRHHNSDSPSWMIIGDWFQL

SEQ ID NO: 153279 - protein, 34 aa, Oryza sativa
  Clone ID: PAT_MRT4530_5324C.1.pep
KKKKKKKKKIKKKKKKKKKNKKKKEDHQTEKKLK

SEQ ID NO: 153280 - protein, 58 aa, Oryza sativa
  Clone ID: PAT_MRT4530_53250C.1.pep
KGYSPGFTGVYNIQFHSSSLFGATLGNTEPTSHPLWCPTTHFTGAQPFCGTHVAFVVN

SEQ ID NO: 153281 - protein, 43 aa, Oryza sativa
  Clone ID: PAT_MRT4530_53251C.1.pep
FAKWEKMARDARQGLWAYDNLEKPWEWRKNKRKASRHHNSDVR

SEQ ID NO: 153282 - protein, 77 aa, Oryza sativa
  Clone ID: PAT_MRT4530_53252C.1.pep
TTPQPHARGGGNKVLTLLIFGGCRINRQRSFEYHSQSFLSAGKEIEVSPPYFVEDVGFLFGHIGREVLLSCLQCGFL

SEQ ID NO: 153283 - protein, 141 aa, Oryza sativa
  Clone ID: PAT_MRT4530_53253C.1.pep
MCLFIMFVWCTPAYPVTGINTLVFWKSYFSGCDKEKAKLDMLSAGPIQPNIDRLEARKIDLIAQLEECNAELDLDKQKLANLPNAVEEQKSRLKLAIKNVADMIKYLKVISGTDAQDIQAIEEVDQIRQRAVSAIQRYLSG

SEQ ID NO: 153284 - protein, 170 aa, Oryza sativa
  unsure (1)..(170): unsure at all Xaa locations
  Clone ID: PAT_MRT4530_53254C.1.pep
VFHYQLPHSTDVYIHRSGRTARKSMAGCSIALISPADKDKFYSLCKSLSKENLQQFSVDHAYMPAVMNRLTLARQIDKITRKXSQENANKSWLXRNAESMGLLLENXDSEEETVQXISQGKAPSANPPKASQDLGELLQPPLEPKIFFRRYLYGGGGFTRSLKVTGRVFP

SEQ ID NO: 153285 - protein, 639 aa, Oryza sativa
  unsure (1)..(639): unsure at all Xaa locations
  Clone ID: PAT_MRT4530_53255C.1.pep
MRVAPKVLVLVRDAAGYGAALADALRPTPGLTRESTPLELPLAKYGLDGEKASGELVNFSDSSGDPQHQGKSSTDVDLEGQRQAVNPAPGKGAEPRSPSNGGGAVSSPPIANMRATPPPPPRPPARAYPGTSPMGSSPALPRSTNPAALLAHLAAVLTSPDWFLNPSLPRLPALLTPSLPESLPVPLPVRLAAAAARVAAPSRHLLAVALPVVLRLHSLSPPPLRPLFDRPFASLLAHLSRFALAPLALRLFAHMHRHAPPAPTAPTYNAVIRSLCRRADLARALRYLSLMVRSGWRPDAYTFNSLIVGYCRTNQVDVARDLFDKMPLRGFAQDVVSYATLIEGLCEAGRIDEAVELFGEMDQPDMHMYAALVKGLCNAERGEEGLLMLRRMKELGWRPSTRAYAAVVDFRCRERKAKEAEEMLQEMXKRDWHREMLQKDVKPSTVNYTIVIHKLLKERNYGLVARTWGEMVSSGCNPDVVTYTTSMRAYCIEGRLNEAENVLMEMSKNGVTVDTMAYNTLMDGHASIGQTDHAVSILKQMTSVASVPNQFTYFILLRHLVRMRLVEDVLPLTPAGVWKAIELTDVFGLFDVMKKNEFLPNSGTYSSILEGFSEDGRTEEATSLVSLMKEDSISLNEDI

SEQ ID NO: 153286 - protein, 149 aa, Oryza sativa
  Clone ID: PAT_MRT4530_53256C.1.pep
MEIKLVFFFLLLLGFGNAEEELDTETCDVAKLSAEIGTYCEFDQGRMYPGRCCDSIIDAADGHDGGGTQCICRVWMEDAVRKTGITFRELLHKYIDCGGLQPSLPHLADSACSAAPEMVGTLPGPGKISGADTTNVGVIFSAMRPAIIP

SEQ ID NO: 153287 - protein, 42 aa, Oryza sativa
  Clone ID: PAT_MRT4530_53257C.1.pep
SEVTFVSIFCSFTFEVFFFFIYFIPCTMVELCIIVSLNALVF

SEQ ID NO: 153288 - protein, 82 aa, Oryza sativa
  Clone ID: PAT_MRT4530_53258C.1.pep
MEAAIVEAAWLDLAFPRLDPTYPGLISPSGRSRAIIEEVGWSSPARSGATGLHGGVDGYRIGSLPMVATSDLVTTAVGGGIG

SEQ ID NO: 153289 - protein, 462 aa, Oryza sativa
  Clone ID: PAT_MRT4530_53259C.1.pep
MSFRSIVRDFRDSFGTLSKRSFEVKISGFSGRHRGKSIGPSSELDDTPVVAQQSKWAGLPPELLRDVMKRLEEDDSNWPSRKDVVACASVCTTWRDMCKDIVRNPEFCGKLTFPVSLKQPGPRDGVIQCFIKRDKSKLTYHLYLCLSSAVLDETGKFLLSAKRSRRTTHTDYIISMDSKNISRSSSGYIGKLRSNFLGTKFIIYDTQPPYNARTLCSQERTSRRFSSRKVSPKVPTGCYPIVQVNYELNVLGTRGPRRMQCAMHSIPASAVEPGGIVPGQPKELLPRLFEESFRSMATSFSKYSITDHSTDFSSSRFSEFGGGALQGQEQEQDGDDVNKERPLVLRNKAPRWHEQLQCWCLNFRGRVTVASVKNFQLIAAAPQPSSGAASEPSQAGQAAQQQTQPSQPSSSSSSSSSNHDTVILQFGKVAKDMFTMDYRYPLSAFQAFAICLTSFDTKLACE

SEQ ID NO: 153290 - protein, 57 aa, Oryza sativa
  Clone ID: PAT_MRT4530_5325C.1.pep
GEDDLLTTNTTRVRHAVHDNSCSANLLKVHQQGSDTERIVGAKITKRAGRSVMTQHM

SEQ ID NO: 153291 - protein, 94 aa, Oryza sativa
  unsure (1)..(94): unsure at all Xaa locations
  Clone ID: PAT_MRT4530_53260C.1.pep
MMVVTVGMVGNTLQPSLGLHLNRPAKTWIQRMXGRFGRTWGRPNPAQFRXVAFSIVLLRRLVNFGPIHRANSEFLAYSHTRLVLDIVRLIYRLS

SEQ ID NO: 153292 - protein, 38 aa, Oryza sativa
  Clone ID: PAT_MRT4530_53261C.1.pep
ISRISLLAIYFYVGDARKDGTSPCSKTLLFKTKHSDAQ

SEQ ID NO: 153293 - protein, 148 aa, Oryza sativa
  Clone ID: PAT_MRT4530_53262C.1.pep
MVDDTCAPPPIATRHLSLLSLSLQQQQRRNGIVGARKGSARTRGSHRCICRRVPVSALHAHLISGVRHQRRRRRPLCVDESYSGGRRTTATRALQLAKRRRHGRCRGVVRSYASATTQTILLPLLAHPFLSIWEDFNFSVILPPFRNV

SEQ ID NO: 153294 - protein, 221 aa, Oryza sativa
  unsure (1)..(221): unsure at all Xaa locations
  Clone ID: PAT_MRT4530_53263C.1.pep
MAGCATSTSWNTPLHTHTRTVRRHILLRGVPVTLIVLLLPPQPTCLHRISLVNSRFXRRVLTSRRFLHHFSDLHISAPGAPLVGFFHNHNHGAWANNRSIPIGINDTGDCRRSHHRGATTRNPDGVFALGDAAEWHVVGSRGGRVLLLSPTQLRLLVLEPMLGRRQYIPVPPAPKYRPSYFSNAQHRSNRGARTGPRLVARSPALPRARLKSRERKRERMR

SEQ ID NO: 153295 - protein, 294 aa, Oryza sativa
  Clone ID: PAT_MRT4530_53264C.1.pep
AYNAVFSFLFTFFNKKKEKWKDELRHRRPRHRVRQPGLGEDPRARRRHFPRRPRCARRRPHSLGTTISWPQQRSIYGENARDGTPTNPCAPGSVPGGSSSGSAVAVAVAANLANPGVVLRAMLAKKEELAAAGNIGSDPYKRRRIGADIGHGGVGTGGDMAEMAQSRGNPDLKGAMGSRGTRRQSHWRSWRRASGREGGAAVEGGGGWRRCSGVGRWRGRRCSGCSATPRCVTPSRRCFAFRLRDVCAATCAGGATATAVRSVDGRTAIAAASAGVAAMGNPTAAAITQVLHNK

SEQ ID NO: 153296 - protein, 81 aa, Oryza sativa
  Clone ID: PAT_MRT4530_53265C.1.pep
MGPYDSQRMMRGKADTSQVMLSTVKRLRGKIYKRLPRLATKLPLQSIALKFLMKTENQLTTITPHLIPAADPWYHFSMGKC

SEQ ID NO: 153297 - protein, 107 aa, Oryza sativa
  Clone ID: PAT_MRT4530_53266C.1.pep
RFFITFNTISTGVPYKDASRLQGRLHRQQLFDLNSQHAMQPLQAGCQQLLVQLQRAWQSYPITWNYTYYSQRVWIDGRRHIQTLIPWQISCRALTYVTRLNTGIHSL

SEQ ID NO: 153298 - protein, 309 aa, Oryza sativa
  unsure (1)..(309): unsure at all Xaa locations
  Clone ID: PAT_MRT4530_53267C.1.pep
MASGSSSSNDAAADLTVLVDDFYFSVLSHGRNDDDDSADGDDGELFPISDEKYASELQLQEVIMSSSVAATTARSSSAPVIFIGECSSSHAASSSSRLTSIPAAAATTLVFCKICMDAVPPSAAHRASRGCDHAFCAACLAGYVGAKIQERIADVRCPEERCRGALDPELCQGILPREVFDRWGAALCEAMVLAAPRAYCPFKDCSAMMLDDAGEAVTESECPSCRRLFCAQCAVPWHAGVDCAAYKKLGKGDRGKEDLLVVEMAKGKKWKRCPKCKYFVEKSQGCLHITCRCGFXILLWMWETVAADT

SEQ ID NO: 153299 - protein, 257 aa, Oryza sativa
  Clone ID: PAT_MRT4530_53268C.1.pep
MAAASVLLLLPSPFLRPSSPAHRARCGIATTTTTSTSGRRGLFLFASRCRPGPRRRAASAAVPPEHGLSQPQPQARAVGSYEAALGDAKDALYAALEGMNRGIFGMTSEKRSEIHALVELLESKNPTPEPTDKLQDKVDGCWRLVYSTISILGKKRTKLGLRDFISLGDFFQMIDVKEEKAVNVIKFSARALKILSGQLTIEASYKITTKTKVDITLDSSTITPDQLMNIFQKNYDMLLAIFNPEGWLEITYPFRLM

SEQ ID NO: 153300 - protein, 152 aa, Oryza sativa
  unsure (1)..(152): unsure at all Xaa locations
  Clone ID: PAT_MRT4530_53269C.1.pep
MEAPSAKPRSRRATHGYMVLDRIVRCWSGVGGDDDPTASEIAYTCSGHPIRVSLRVADPPAVSRLYVHRPGWPRVYDLGDAEVIAAHRGSILLSARVPFADLDTIAPGQFPLDYFVYTARPGEGLRPSLTRLPPCFIGGFSSPXVDRHFKPH

SEQ ID NO: 153301 - protein, 89 aa, Oryza sativa
  Clone ID: PAT_MRT4530_5326C.1.pep
YHPGQLPDAHGGRRQERRRRQGEQAGGEGAPRRRRRGAGGREVRKTDEQPAEEAGIVQAVGDVRVSRIRSCSVLTPKLCLVIAISEIAL

SEQ ID NO: 153302 - protein, 102 aa, Oryza sativa
  Clone ID: PAT_MRT4530_53270C.1.pep
MFQVLHPCAVYKANAHLLRSHALPSPRSPIRDHAFLQADTCFSSQDDDVLSLLERHLDPLIHEASVQHSIYSPDFDSQRISSPVFTTSFAAQGGSDADQGAK

SEQ ID NO: 153303 - protein, 51 aa, Oryza sativa
  unsure (1)..(51): unsure at all Xaa locations
  Clone ID: PAT_MRT4530_53271C.1.pep
CYTNTPTFLLVHLPLPSLSWHYSQPTPTTXDLRDHRIAEQRSGGNPSAAAS

SEQ ID NO: 153304 - protein, 116 aa, Oryza sativa
  Clone ID: PAT_MRT4530_53272C.1.pep
MASSLEKIKKQLTSASGRHLLQGPLLKRSETLRKWNERWVILDPTTGTMEYKIKRTDVATKGTLIFDSTSTISLSPLNFHGLPKYNSCCFYIGTPAKKEYFLCAETPGAARAWVST

SEQ ID NO: 153305 - protein, 527 aa, Oryza sativa
  Clone ID: PAT_MRT4530_53273C.1.pep
MDKAYIAVFSIAILFLLVDYFRCRRRRGSGSNNGENKGMLQLPPSPPAIPFFGHLHLIDKPLHAALSRLAERHGPVFSLRLGSRNAVVVSSPECARECFTDNDVCFANRPQFPSQMPATFYGAGFGFANYGAHWRNLRRIATVHLLSAHRVRGMAGVVSGEIRPMVQRMYRAAAAAGVGVARVQLKRRLFELSLSVLMEAIAQTKTTRPEADDADTDMSVEAQEFKNVLDELNPLLGAANLWDYLPALRVFDVLGVKRKIATLANRRDAFVRRLIDAERQRMDNGVDGGDDGEKKSVISVLLSLQKTEPEVYKDIVIVNLCAALFAAGTETTAMTIEWAMSLLLNHPKILKKAKAEIDASVGNSRLINGDDMPHLSYLQCIINETLRLYPVAPLLIPHESSADCKVNGYHIPSGTMLLVNVIAIQRDPMVWKEPNEFKPERFENGESEGLFMIPFGMGRRKCPGETMALQTIGLVLGALIQCFDWDRVDGAEVDMTQGSGLTNPRAVPLEAMCKPREAMSDVFRELL

SEQ ID NO: 153306 - protein, 676 aa, Oryza sativa
  unsure (1)..(676): unsure at all Xaa locations
  Clone ID: PAT_MRT4530_53274C.1.pep
MPPPRLPCLAAFLALALVVVVCAAEPDADRAALLDFLAGLGGGRGRINWASSPRVCGNWTGVTCSGDGSRVVALRLPGLGLSGPVPRGTLGRLTALQVLSLRANSLSGEFPEELLSLASLTGLHLQLNAFSGALPPELARLRALQVLDLSFNGFNGTLPAALSNLTQLVALNLSNNSLSGRVPDLGLPALQFLNLSNNHLDGPVPTSLLRFNDTAFAGNNVTRPASASPAGTPPSGSPAAAGAPAKRRVRLSQAAILAIVVGGCVAVSAVIAVFLIAFCNRSGGGGVXSYQGRELGEMNPDVLEQYCLPAMMMSHFVVRXRIVFFEGPALAFDLEDLLRASAEVLGKGAFGTAYRAVLEDATTVVVKRLKEVSAGRRDFEQQMELVGRIRHANVAELRAYYYSKDEKLLVYDFYSRGSVSNMLHVPICSHVKLEPSKFIFLVLDFCLKLAMLIENELIGKRGEDRTPLNWETRVRIALGAARGIAHIHTENNGKFVHGNIKASNVFLNNQQYGCVSDLGLASLMNPITARSRSLGYCAPEVTDSRKASQCSDVYSFGVFILELLTRGRSRGQITGGGNEVVHLVRWVQSVVREEWTAEVFDVELMRYPNIEEEMVEMLQIAMACVSRTPERRPKMSDVVRMLEDVRRTDTGTRTSTEASTPVVDVQNKAESSSAAH

SEQ ID NO: 153307 - protein, 89 aa, Oryza sativa
  Clone ID: PAT_MRT4530_53275C.1.pep
CIFGPRVSAGQCSSQKAVSGTGYDPILNQLCEMVRSCRPWHKENAAHIRGELGVSVAKLTSISGPCILVLIFLSPIFCRIYILVMAMVV

SEQ ID NO: 153308 - protein, 63 aa, Oryza sativa
  Clone ID: PAT_MRT4530_53276C.1.pep
MATRAMGGRSDGGMGGGWSRWRNKECGGGDPPTPLSHIQPPVRNQCSDLGCQFEYGLDLNLAF

SEQ ID NO: 153309 - protein, 864 aa, Oryza sativa
  Clone ID: PAT_MRT4530_53277C.1.pep
MAAVELGACHKDNGRVEGLLVKKDREFVDKVLAVQKNRYFHDESVSDNDVRNIVLSYLMHNCFKETAETFLSSTGLELPVDYTVDVDKRKAIFSFVLEGNALKAIDLTEELAPNLLENDMDLHFDLLSLHFIELVRSRKCTEALEFGQKKLTPFGKVPKYVEKLEDFMALLAYEEPEKSPMFHLLSPEYRQNVADSLNRAVLAHANRPAYSSLERVIQQATVVRQYLQQEVGKDSYPPFSLKAFLNKEIVSLNQSAVHLLLCLMLGLYKLLSFKGFNGKNPILVGPWGGLGGTLWDDGVHSTVRQVVITHGAAIDSIKIEYDLKGKSVWSEKHGGDGGTKTDQVKLDYPQEILTSVSGYYGSLGGCIVVRSLTFRSNLSKYGPFGSEEGTPFSLPVAVTGKVIGFHGKSGWFLDSIGCHFKKEKNATPSSNAPSALRSITRPHDKNGNRYADSNAGYDMVLAVRDRGDSYSVLTSNNPKEQYPNQSQDATLWNKMVSLPSFYSDNGTMTISTPVRFGPWGGNGGTIFDDGIYTGVRQINLKRGLGISTMKVLYDRNGQAIWGDKRGSSGAARAEKVVFDFPSEILTHITGYFSSTMIMGSTVIKSLTFHTTKKSHGPFGDETGTFFSSCLTEGRIVGFHGRDGWYIDSIGVHVLEGKVLSQRADRALTETSPSRHADMLAVAQREIGDEVTYGVVKEPIPVGPGPWGGEGGKPWDDGVYTGVKQIYIMRADFIGSVQIEYDRSGQSIWSTRHGNGGQITHRIKLDYPHEVLNCIYGYYNTCQDEGPRVLRSITLVSNRGKYGPFGEEVGTYFSSATTEGKVVGFHGRSGLYLDAIGVHMQHWLGDRNRTAAPSSNKYYISKYLF

SEQ ID NO: 153310 - protein, 232 aa, Oryza sativa
  Clone ID: PAT_MRT4530_53278C.1.pep
MLGLLVKKDREFVDKVLAVQKNRYFHDESVSDNDVRNIVLSYLMHNCFKETAETFLSSTGLELPVDYTVDVDKRKAIFSFVLEGNALKAIDLTEELAPNLLENDMDLHFDLLSLHFIELVRSRKCTEALEFGQKKLTPFGKVPKYVEKLEDFMALLAYEEPEKSPMFHLLSPEYRQNVADSLNRAVLAHANRPAYSSLERVIQQATVVRQYLQQEVGKDSYPPFSLKAFLNK

SEQ ID NO: 153311 - protein, 162 aa, Oryza sativa
  Clone ID: PAT_MRT4530_53279C.1.pep
MHGCGWGEPGARNTPAAAVHTVTAATEDEGDERVRGTAPAGEKVGWAQETATGTVAAADVDEGGGTGACKDEGMDEHGDGGARWMWVRTVGWTRTTAVARRMRARTTAATEDEDGDRGVADAGDDGGRDAGHGVVDASEDGGHDAADAGEDSGCGAAVAAGG

SEQ ID NO: 153312 - protein, 56 aa, Oryza sativa
  Clone ID: PAT_MRT4530_5327C.1.pep
KSVFFNQNNLMFIAHPLFSRLRISSSPKDRGRHTRSQQTKQFPWVPCTIQINYVIN

SEQ ID NO: 153313 - protein, 85 aa, Oryza sativa
  Clone ID: PAT_MRT4530_53280C.1.pep
ALLVKCCGDQITASVSWHWVNMFSFYEVVSFVGKLIQLHPQHLSISIRAFKGAYLTFSTPYLMYLLLVHLFQSPGPLCEPMQLAS

SEQ ID NO: 153314 - protein, 171 aa, Oryza sativa
  Clone ID: PAT_MRT4530_53281C.1.pep
MGNSLRCCLACMLPCGALDVVRVVHLSGRVDEFTSCPLTAADVLAAHPNHALTAAWSPGGAGAGGAPCRKIVIVSPDSELKRGRIYFLIPSACSAPAADKMMTRRKKKKRCHGNGNGKGGSAAAASTAEQDNYLMELLSEKRGTSHRRRRSGARAGVWRPQLESIAEEPSD

SEQ ID NO: 153315 - protein, 271 aa, Oryza sativa
  Clone ID: PAT_MRT4530_53282C.1.pep
MATLSSCSRLSTGGGAVQRRPRRPASAATITCHRSSSSSSSARVVRTGAAAAPAAATAPAVPQTNECSLPTWAEFELGKAPVYWKTMNGLPPSAGEGLILFYNPAATKMTPNAQFGIAFNGGFNQPIMCGGEPRQMTLQERGSADPPIYTIRIRVPQHAMTLVFSFTNGVDWDGPYTLKFRVPKPWLNKPLSFFNEGLADELNREGACDRAIFPDENVVITSCEMGSYYEEGGDRCKLDIVSGCMDPNSHMFDPLATVDDGSCPMDSDSEE

SEQ ID NO: 153316 - protein, 447 aa, Oryza sativa
  unsure (1)..(447): unsure at all Xaa locations
  Clone ID: PAT_MRT4530_53283C.1.pep
MEKGQEIGASAGEKGSEQHAIDVRPGEHGAIGVVAGAAAEAPEKERLAVVEEEPRKKSKRVAALDAFRGLTIVLMILVDDAGGAYERMDHSPWNGCTLADFVMPFFLFIVGVAIAFALKRVPKLGAAVKKITIRTLKMLFWGLLLQGGYSHAPDDLSYGVDMKKIRWCGILQRIALVYFVVALIEAFTTKVRPTTVRSGPYAIFHAYRWQWLGGFVALFIYMVTTFSLYVPDWSYVYHNDGDVNDGKQFTVLLAVFPDHVQCGVRGHLDPACNAVGYVDRVVWGINHLYTQPVWIRSKXISSILSGTIGIHYGHVLVHFKXIPINKQLYSLSYVCFTAGAAGVVLSAFYILIDVWGLRTPFLFLEWIGMNAMLVFVLAAQAIFPAFVNGWYYDSPGNTLVSWIQKHVFINVWHSQRLGTLLYVIFGEIVFWGVVSGILHKLGIYWKL

SEQ ID NO: 153317 - protein, 81 aa, Oryza sativa
  Clone ID: PAT_MRT4530_53284C.1.pep
MAPATATDEISPDQQIPFIVQAYYTNTAKREYNYRPTVRNTTSVAAVEDQMLPLFLTVEQKRRAYSLNQIFVFFTCPALSG

SEQ ID NO: 153318 - protein, 919 aa, Oryza sativa
  unsure (1)..(919): unsure at all Xaa locations
  Clone ID: PAT_MRT4530_53285C.1.pep
WRWSTRSRSLGKALLQTMTSYLLTAAPITPSSVASMQRGWGRRLVADMGSVLAAPTSWDASPSTPSPXPACMVVAPSTREMGLQRELFPEEPLMLTPTSSSPVRPDVDASSVLVPAERDGDFFNLPGPRLAPSFGLALLVPGPLAVYRRRRELTGPRAFPLYRPGLEEWADPRSLPALADLVGPPPLSLFGKRPHQPRHRHRPSSYTPRRSERLAAQNSGKHIHMITRAQRVVMKRLGIIEDENKADERDILRYLELFKAPLAPSHVQALAALCSVAESKLDVLDRSLSIQSCGHALDGVDFIPADGTRGGCLRLGGMIASLFPVFTRDGGRFLFVSPTWKLVVGAWCVVGDFNLLATDGDKNNGNAWEAAPAGSNALSSLHFKLRATAAALRSWGARRISELRQQLAIAHEDSIIATTEEDKLQAAYDYFLKILGMPCPPSASLAFDAIGLAVHDFSDLERDITEDEAKKAILEMSSDKAPGRMALVPPSTRNGVVKNLHRSKTPAMLLKIDIAKAFDTVSWEFLLDLLRHLGFGVRWRDCIAALLFTASTSVIINGSSGKRIRALGSTTLFNGQLSALLRNRGVWDKLRRPFEYGGLRIRNLRLMGIALRARWSWGMDKMLYFGKIIGCRMVVQWKTEDLSSLSFVKNSGMTVAAALRNNSWVSDIRDGLSVQALGEYLDLWDVIAGISLDPASRDEMIWKAAPDDTRITTLRVEIISFQQIKNESIGAACPTIEVNLIFESFAFAYLSDKPVTLTNKFFKHPNGNIIEGFGIVQDVPVYFEDREAVLDFHVFEIRDIVILIGLSIEQLLINTLRLDSLKITLGGNEFSVPFSRASQPKAQLPSTPQNPRRSPSPPPPSRHLVPWGAHLPFWSTSPMPALLQIWEEEGKEKKGKEGSGGNRGEDGNVGFDYPLPMEA

SEQ ID NO: 153319 - protein, 90 aa, Oryza sativa
  Clone ID: PAT_MRT4530_53286C.1.pep
FCFFFFFFFFFFFHYLLKQGGKNQTTGTPERANKHTDQKNQGGTRKQQDTPLKKRTRENRGPKGLERNDTGATEKQPKMTQGKAPGENKR

SEQ ID NO: 153320 - protein, 1085 aa, Oryza sativa
  unsure (1)..(1085): unsure at all Xaa locations
  Clone ID: PAT_MRT4530_53287C.1.pep
MRHIVRLAIEGLPPHAAEPEELKQLLNKLPPMSSPGGASPVPAAPTSWDASPSTTSPVRCPLSPALPQLSSLGLAALGPXVPTRHYSPLVTAPACMVVAPPVREMGLQRELFPEEPLMSTPASSSPVRPDVDASSLSPPRDGAAIDPEASATAAGGXADLVGPPPSSLLGKRPRQPXHRPSPYTPRRSEHLAAMNGGKHIHTITRAQRVVMKRLGVIEDENKADEQDILRYLELFKAPLAPSHVQALAAFCSVAVPAXPKTAASAAMLKXLFLMSCTLLVWNVRGLNHPGKMSLVAEVVRTSSASIFCCQESKLDVLDRSLSIQSCGHALDGVDFIHASGTXGGGLFTAWRRDHFSVSCLHKGRWSLSLCFSNLEGGASWTLTNVYGPQLDSDKLLFLEELLLVGQLVVGAWCVIGDFNLLGADGDKNNGNVNRWLISKFRHTIDALELREVYLFGRRYTWSNEQERPTLTKIDKVLINGDWEEIFRDAHLQALSSSASDHCPXLLACDQMMHRPRKFKFKSYWAKLEGFEDVVRQAWALRAIAAALRSWGAKRISELCQQLAIAHEVVFQSSASLAFDAIGLAVHDFSNLERDITEDEAMKAIMEMPSDKAPGPDGFSATFYKKCWEIIKNDLVAALNLAWKSNFQLLHLVNTASIVLLPKKEEPNQLSDFRPISLIHSFAKILTKILALRLAPRMDELIGPTQSAFIKRRRIQENFLYVQEGVVKNLHRSKTPAMLLKIDIAKVFDTVSWEFLLGLLRHLGFGVRWRDCIXPCSSLPPLLFYADDAVIFFHPSRRDALTINFVLKLMGEALGLVSNLLKSSLTPIHCSDAQVDGVTYVLSCPVKLLPIVYLGSPLSVRKPTKEQIQPMIDLLAKSLAGWKPKLLSPDARLSLIKHVLMALPLYFMLVLEHPVWAINEIEKKCRGFHWKGDEEAAGSCSLIAWDKLCRPFEYGGLGIRNLHLMGIALRARWIYXLRRTQPERPWARFAPPADKKTLHCFAISCKVVLGNGEDALFCKDNWLPDGGSVENRAPILFFFVKNSGMTVAAALRNNSXVSDIRGGLSVQALGEYLDLWEVIAGISRPC

SEQ ID NO: 153321 - protein, 1440 aa, Oryza sativa
  unsure (1)..(1440): unsure at all Xaa locations
  Clone ID: PAT_MRT4530_53288C.1.pep
MSWALATLFSARARGGGVLSWTPRMSAIEQNLRGHALVAVLSGRQEVSPAMVVEELRRSCGVLHDNVCVEVTRPSDFLISFAREEDCTAVLDLSGCLAAAGARITFRRWHRAIHARSTKMRHIVRLAIEGLPPHAAEPEELKQLLNKAVNPSAIPKEFALDIPEPMQEWWNEPETDNPDMIEVLLAEGPPAPPSEKRCLTFDLLLHIXRWSTRSRSPGKALLQTTTSHLLAAALITPSSVASMERGRGRRLVADIASLVRVLVRXPARPAVVPTSTPRCIPEGVSVLALEASSPAKSTTPLLAATASPPATTPPPQAAPFLPPMSSPGGTSLVSAAPTFWDASPSTTSPVRCPLSPALPQLSSPGLAALGPPSPCVITHPPSALACMVVAPPVRERGLQRELFPEEPLMSTPASSSPVRPDVDASSVLAPAERDGDFFNLPGARLAPSFVSTLLVPGPLAVYRRRRELTGPRAFPLFGLGVEEWADPRSLLADPVTLSPPRDPSQSPPHDKAAGSPEAAVDGPRLLPASPVTPSSPRVSALSPPRDGVAIDPEASAAAPAALADLGRWSLSLCFSNLEGGASWTLTNVYGPQLDSDXLFLEELLVVGQLVVGAXMMHRPRKFKFESYWAKLEGFEVVVRQAWAAVPAGSNALSSLHFKLHATAAALRSWGAKRISELRQQLAIAHEVVFQLDKAQDDRLLSAGERSLRASLKGRCLALTSLERIRLRQRARLLFLKHSGTTAQFFRLKINARRRKKAIPSICQDDIIAITKEDKLQAAYDYFLKILGTPCPPSASLAFDAIGLAVHDFSDLERDITEDEAKKAIMEMPSDKAPGPDGFSATFYKKCWEIIKNDVRGELSPLANVHLPLRGSLYADDAVIFFHPSRRDAVTINFVLKLMGEASGLVSNLLKSSLTPIHCSDAQVDEVTDVLSCPVKLLPIVYLGLPLSVRKPTKEQIQPMMDRLAKSLAGWKPKLLSPDARLTLIKHVLMALSLYFMSVLELPVWAINEIEKKCRGFLWKGDEEAAGSCSLVAWDKLCRPFEYGGLGIKNLCLMGIALRARWIWLRRTQPERPWARFAPPADKKTLHCFAIGCKVVLGNGEDALFWKDNWLPDGGSVENRAPILFSFIKNSGMTVAAALRNNSWVSDIRGGLSVQALGEYLDLWDVIAGISLDPASRDEMIWKAAPDGRMKCPLGKIIWKSRAPARCKFFMFLAMRNACLTADNLQRRGWSLAQHIFMDCAYTQQIWGQVRTRLGLSCSSPSADFTDWWLTARKSVAKVDRKTFDAGVILVTWLIWKERNVRVFDGIAATVPVLCSAMGDKWETWMAAGLVSPICHPVANFAAMEKMTVEKTWTDKASVEFKRDLEKRAMKEWTERDFRELKSTVRIIAVTLALIFIIFLVSFFVPMTKTFQILWWQWGLLCILTSIITLWRIERALTPLA

SEQ ID NO: 153322 - protein, 1312 aa, Oryza sativa
  Clone ID: PAT_MRT4530_53289C.1.pep
MSRSFFPTCSSLKVEMEEMCREMDELRSEVEALTAECRAKAELAEGLKRAGAEQAARLREARAEAERQAREVAARDEEISSSGEARRELEARLAEKEQALRHLCAAHEGLRSSARERSDALEAEKRELVAALEESEARRLEQEAAARSCGEEVARLRRLLSEKEKKCSEAEQRALAPKEVMMRDDMLLKMEDQKAAVEGKLKWKSEQFRHLEDALKKVQDEFRAAKKEWGSDRSMLVDQIGTLEVNLDSKTRMAEDFRSRLEMCSQALAHEEGRRKLLEAEMSELKHLYGNVVSDYEEARSTIESLAAKRDGEIASLRSSLAEKVTLLKEMEYGKARLEQENEDMRSSLKEHQEAQIGGADAVVSLKVLQQKFRALEQTHRNCIDKLRDKEAEWKTQMEKLGSELDGCLSQLDSKDTLIKQMQIELLSSYSSLEMQAVQNWEASVALVIVESKLYDSCSYFETIQLDMQKNCAQLEHNFAAARKQLEEDNCAIAQSQAERAQQVEVIATLHQRIEQLEHMEKEREEMQRQLDTYNLDNASRDVHCLKGESSEEEKGLHEKLQKALSDLDEAYSAVSERESELSQIEINLHKQKQAMEHLEELKLSMENELKGYMDENNVLKRDLIATTEIEKSLREEKEKLLGALNEANSALSEKNCELRQSEIILHQQKQALEHLEELRVNMETEIKGYIDEICVLKRDLDATHMAKIEAEKTYSEENEKLLCALDEVNCCLLDKKNELDQVTENLHQQMQAVEEFEKLRVSMETELGRYMDENSVLKSDLVSALNSKMDAEESLREEKDKLCSIIDERCRNIDELQQHIAVLEEENLDKKLDVAGLIKSEADRSIQEVNRKYSEIVEVFDKKLLELETRLSFFEQKYTCREQELMEMFDQEEADWYTLIAEKENAISEIQENVESAQVDIKHLVESASEKLAEVQVEVRQLYCLAGNLNSLNLIQEHDNLFKDMLIEECERELKAVQVNLALEKQQSNNLKNDLEQLKAKATAEMLENVKEHLEVANKLRSLEERKEVLDEHVGELKSRTKNMCNAFVQERKNLFDELTGLVDTIGAAIHVDEDLMTSLTKIMHKVNNEEAFRNSISLVYRGSETDKIRPESPGLKNLWPVFFNYSFSVYMVTEFFSCIFICMIVAAYCPFITDVPVISSPMFIVRLNFKVAEDNMTNICFRKEGLHWSKQPRTVQACCKEVLVADIRLANRHAGIVDKEFHIPLFCEKRHGYWLQRLSPNYHSNSQQALRLSISMATMAAFAASWPPAGCAPLTFLDMEGSGRTGHAGGGRSRRRWQQQQQQQLWRRRS

SEQ ID NO: 153323 - protein, 148 aa, Oryza sativa
  Clone ID: PAT_MRT4530_5328C.1.pep
MWLEVEEMMEREVDAAVAVRPVVFAEFDGRRWARARAGGQQSFCRMVNRPMMIRMWAPQTSAVPTSRPPMPCGAGAWRGGGGNGRVGGLAGEGWVGPGAGTEETADHVASLATLPLATVAAVAPLPRNLVSIRGSVSGAALVRFRVTG

SEQ ID NO: 153324 - protein, 167 aa, Oryza sativa
  Clone ID: PAT_MRT4530_53290C.1.pep
YTVRRIGGFVTWSAEPVPDHQASGVKALSILQRVMMEVRIQSSPHCHHRIWKVLVMGTKKLTRKMMKMRASVTAMILTVLFSSLKSLSVHSFIARFSRSLLNSTEALSVQVFSTVIFSIALRRGEAGAGRRSKGSFASIRTGSARRRVPPQAAAAAARAMRSMRGFN

SEQ ID NO: 153325 - protein, 73 aa, Oryza sativa
  Clone ID: PAT_MRT4530_53291C.1.pep
LILSLHANISTASTFTDDEMNSSYIPKWHHLSLHGQRVIKPHICIFTSISSASFFSFLLLPFFFPDLQQGRHG

SEQ ID NO: 153326 - protein, 401 aa, Oryza sativa
  Clone ID: PAT_MRT4530_53292C.1.pep
MSFAGVSFICDGVHVCSSPANGAAGSAAYGYHLLVINNYTRTKQAIPNGFRIKSGKFKLGGHTWHIKYCPNGDRSTISGFVSFHLVLDCDGGDGAVAAEPVNAKFEFSFADQVAKHQATRLRATKVCEFSRDCSAWHVGRFVRREALERSRYLVDDCFTVRCDIMVVHAGAGANGVAAATAAPSMAGAVESFGRLLDTKLGADVAFEVGGETFAAHRCVLAARSKVFDAELFGPMKEGTAASVVRIDDMDADLFRGLLSFIYTDELPEREDHGGEKETSSDDDDDDDDDDNGAQSDQKHKQFTWLQQLIVAADRYDLQRLKLLCEEEMYDHIGEKTVETMLILADHHHCRVLKDACLGFLGSHGNLQKMMAADGLDRVIKNFPSLTKEIIGRFAVVMANKS

SEQ ID NO: 153327 - protein, 98 aa, Oryza sativa
  Clone ID: PAT_MRT4530_53293C.1.pep
MASHDLTTATCEKTRQWPHQYHSKILIKQGQCLCHAELLTEFVNWIFKDWKTIAGDNALDYAAEFSHMLGFDGVKMLGLMQICVTKHTAEPWSSSGPL

SEQ ID NO: 153328 - protein, 120 aa, Oryza sativa
  Clone ID: PAT_MRT4530_53294C.1.pep
MSGSVMMMQRLARQAAARVVTQHARSGSGSGLAGAVRGYNNVSASHAAAAGSASGSANKQAARAMATTASRQRQVTETVMAASQNNAARIRKLEEEVMFYRSFAAFLLGAYVAAKVMEKA

SEQ ID NO: 153329 - protein, 582 aa, Oryza sativa
  unsure (1)..(582): unsure at all Xaa locations
  Clone ID: PAT_MRT4530_53295C.1.pep
KTKHLIEGDRNTKYYHMIANGKHRKTKIFQLEQEEGLIKGDEDLKKYITKYYENLFGPPEENNFSMVESQKEDIAQVSDLENEMLIKIFTEEEVKQAIIQMEQNKAPGPNGFPVEFYQVFWEVIKEDLMAIFTEFHEGILPLHSLNFVIITLLPKQKEPRQIKQYIPICLLNVSFKIFPKVMTNRIALVAQKVIRSSQTAFLPGRNIMXGVVILHETIHEMHRKKRSGVILKLDFEKAYDKVDWTFLQQTLRMKGFSQTWCNWIXQIVRGGSVAVKVNDHIGNFFQTKKGLRQGDLLSLILFNLVADMLSILIQRAKDQRRFQGVIPHLVDNGFSILQYGDDTILLMEHDLDEAKNLKLVLSTFEKLAGLKINFHKSELFFYGKAKDVENEYVMLFGCRSGTYPFRYLGIPMHHKKLSNKDWQIIEERFQWMLSSWKGKCLLVGGRLVLINSVLSSLAMFMLSFFEVPKCILKKLDYYRSRFFWQSDGHKRKYRLARWSVICTPKDCGGLGIHNLNVQNKRLLSKWLYKLINEDGVWQKLLRKXYLAKKTITLVGKQPGDSHFWAGLMEVKKTLFFLVALFK

SEQ ID NO: 153330 - protein, 193 aa, Oryza sativa
  Clone ID: PAT_MRT4530_53296C.1.pep
MEQRAAAAAQQRQGRRQSAAACGIRRARAETRHPVYRGVRFRAGKWVSEIRELRKPSRIWLGTYATPEMAAAAYDAAALALRGRGAALNFPDAARSRPAPASASADDVRAAATAAAAAMAHQEEDDDSRRQLEDGGGGGGVVDEDDVLEMPRLMVSMAEGLMISPPPVMLGLQADGGGIMDEGGGVVRLWDHS

SEQ ID NO: 153331 - protein, 84 aa, Oryza sativa
  Clone ID: PAT_MRT4530_53297C.1.pep
MAGCREVQVPLNRFLSQYINVYELEEHEEAATMWAKVESVRVRMLFFDKYMHGFSLEPNDTSELSMEDKKVNRVMPLPNTFRDT

SEQ ID NO: 153332 - protein, 79 aa, Oryza sativa
  Clone ID: PAT_MRT4530_53298C.1.pep
MAKPPRLLPTTITNVAVVATRGRPTLRYVATRGSDADATGQNVRGYSARSIATASIRLLNTTDPSYSIRDQRPTGFDGS

SEQ ID NO: 153333 - protein, 94 aa, Oryza sativa
  unsure (1)..(94): unsure at all Xaa locations
  Clone ID: PAT_MRT4530_53299C.1.pep
MDCALEAHACVAGSIAVAVSGRRFSCKGRXLLQILHPSWIGTTLAWYSTDLKXKHNNMIFCMCDEQARXSNVAVKPXLELDNANEPPPVIIQTM

SEQ ID NO: 153334 - protein, 65 aa, Oryza sativa
  Clone ID: PAT_MRT4530_5329C.1.pep
QQAALNLDGEPTPANQLIPVEHYTMERVNALWAQPLATVPGSPANLEPVGELPGSAEPGVRPNPH

SEQ ID NO: 153335 - protein, 558 aa, Oryza sativa
  Clone ID: PAT_MRT4530_532C.1.pep
MVFLLVCMCSLLLMFLISYALQLFGDARRRLPPGPTPLPLIGNLLDIASDLPHRSLARLAGRHGPLMAVRLGTVVAVVASSSSTAREVLQTHNGSLTGRVPPDAWHGVGHAANSVFVLPPRRKWRALRRIGAEHLLSARQLDGRRLLPLLRDAVLDLLRRVSEMSAASGGGAGAPVQVGHAAFAAMMDMQWRAMFSAGLEDDDARVLQDAAREAVALSLKPNLSDFYPALAAVDLQGLRRRFAGRVGTVYHLVDEQIERRMRRRREAAGDDGEARSEDDLLDVLLDMSEHGKDDGKVAIDRDLIRTFLTICRYLQSYPDAFLCMGSQLSIRSSGCLGFITVTSTTSVINDIFLATVDTIASTLEWAMAELLQDRETMRKLQEELKKVLGSKTHAEYADMDRLPYLRAVIKETLRLHPVVPIVPNVAEEMVEIHGHVVPRGSTILVNLWAVHRDAEAWPEPNRFLPERFMLRQHGQEAAGRALGTATTEFGLIPFSAGRRVCLGLPLATRMLHAMLGSLLHRFEWTLPLEVEENGVDMSENLGLTMTMATPLQAIAKSI

SEQ ID NO: 153336 - protein, 65 aa, Oryza sativa
  Clone ID: PAT_MRT4530_53300C.1.pep
MVPSLPPSLATSCPIHQERLTNEKADKMIREADDQQDVPLTNDSTSLLSGVSAWLREATARRPHE

SEQ ID NO: 153337 - protein, 144 aa, Oryza sativa
  unsure (1)..(144): unsure at all Xaa locations
  Clone ID: PAT_MRT4530_53301C.1.pep
MSAAQGKRGAPASGVPGSAAQGCRSTVDRDHEGGPXPGADRTGGGDPAQFGSRPXPTGHGDGDGXARAHALLATATGGGGGGAKATRRRRRXAAARKEREGNRGERTPHQGWPARRKTTANGDGERRRRPRANGDDGRTRSGMP

SEQ ID NO: 153338 - protein, 129 aa, Oryza sativa
  Clone ID: PAT_MRT4530_53302C.1.pep
MVAAGCGIDARRAPPSRLLDRAIATVSPYSYCTGSQLDFGRGGESSDAPHGSLCIDFGCSAGVSVLINRLSSSSFPALFFRYFTGASFDTSMYSGYDSKQMALPATMAQPRSYSEALVRQGVSVGFFSS

SEQ ID NO: 153339 - protein, 202 aa, Oryza sativa
  Clone ID: PAT_MRT4530_53303C.1.pep
MAGVGGGGRVARRARAMGGGDAWAERQQWRRQKQGDANQRPYNLGANPCPKWGPPVGPVSHLAPRRCARNRRRAHASASSGPRSPPHRAVAAVGFARSRATPSTPPSSRFAAGAPFPPCDGHSGPRPPVAAVCPWSPSPFAVVFLRTGHPWSLPPVRSALGRSGPSVPWTGGGPPAWSQCTVDREPWATDPGAPLAGAPLSP

SEQ ID NO: 153340 - protein, 103 aa, Oryza sativa
  Clone ID: PAT_MRT4530_53304C.1.pep
MVAAGPKPRWRSVSGARRRHVSLPSELTEGAGAVSRWRQEYAQATVAGDGSRRQQEAAADGGRRHGQHIERSLRLVGGAGDDNCWTAGGAGGWPTGDVSDVSG

SEQ ID NO: 153341 - protein, 345 aa, Oryza sativa
  unsure (1)..(345): unsure at all Xaa locations
  Clone ID: PAT_MRT4530_53305C.1.pep
VRSAQRGERGAGKWGPRVSGPRXAGPPWTGTTRVIHRRSTGPTAQIGPEQIGRXDRGGRRARLGIKAGRPARASGDDTRSTATATGGXRRRRRPKATAHDLKRRRGTRRERERSKGERTPHQGWPTRRKTTANGDGEPREDDGNRRTGFGEEGEIREREMNHGGWHPWPKAAVEVELTGARGDANSGDESXRGRGGRGGGRGRXGGIPPANAGSGGGERGGIRKSNPGHLGCGRGREREGSGRGRCGACAGVADMARRRRRHGRGGGCGRGARWETGPTGGPHLSATXERRRAAGPRGLAGPWPSAGLAGGGGEKGGMGRRPIQRKKRKEKKEKGKRRKKDFSWD

SEQ ID NO: 153342 - protein, 100 aa, Oryza sativa
  Clone ID: PAT_MRT4530_53306C.1.pep
GAHGRTSERGGAAEWQRGTDAVARFQRAEPNRSQEIGSNSGNRDGGGMWERRSRTSGMRERCRAHHARGTSVVPHPRPAGPAARPHSRATVLRIGGSRGL

SEQ ID NO: 153343 - protein, 356 aa, Oryza sativa
  unsure (1)..(356): unsure at all Xaa locations
  Clone ID: PAT_MRT4530_53307C.1.pep
MRQLEESYTTSPAVAHVGLWADVXGGGGADRRGPHVSGSRAAGPPWTGTTRVVHRRSTGPMAQIAPGPIGRATATQLSSAQGRPTGHGDGXARARARVAGDGNRRRRRRRXKAAARKEREGNRXGEDASPRVAGAEEDDGERRRRXTGKRRRRADEVRNALREEKREARGREANHGGRXSWPKAAVGVXLTGARGDAGSGNESRRSEVADGSGRGRXGGISPANAGSGGGERGGIRKSNPGHLGRGHGREREGSGRGRCGTCARVADVARRRRRRGRGGGCGRGGXGARWETGPTGGPHLSATRXEEAGGRPARPSWALAFGRPSGRGGRKENRPVAHSKKKRKEKKGKRKRIFPG

SEQ ID NO: 153344 - protein, 878 aa, Oryza sativa
  Clone ID: PAT_MRT4530_53308C.1.pep
MSMSGPREACDVTGLDEFYKRMQARVWRTRGQLIFAAAVVTILVGSGVYSRRHRRHGFARFVFLGASTLYLPVVSYLVSDIGGENCGLPKDVKECKDMSAFFLEAWAILALIFGANSFVIAAADDHGGQNVHRPVAELLVRAIWTSYISVHHFRIIFPLDRVFISMSCGFVLVRIVVKLYAFLKAQRSFAHGRNPRLIAGYMDQLKQDIMSSSSSSHHAQAVNVALPLLVMGEDEQQVEEGPHGYRFRDRKGNESLVTIGKVQIMSSTDGVLSSWPPLKDLCLSFSLFKLLRRRFARCVVVEEGSEIGPNMVCTLFDSDTEPERIVSIVADELSFACDFYHSSLPVSCSVFWLFVLNILFSFAGTACCLFIAIRTIQHVVSVAQVGPMSSDPFYHQITCVLICGKNDQAKQFGSILFFMVLSFLFVIVLIFDEVWEIVSYMCSNWTKVTLICYYITKPTWQQSPRMRRLIRCVLQFRCNLLGYWSDKMGQTSLMDTNMNIGPIVRIKQLLGLPVQTKQVKIPTEVKAAIINTLKSQNWRPTDCITSLQQSHIGKSFSWACKGDGTSDVILVWHIATCIFEIRHSTEPLIADSISNKITATYLSQYCAYLLSSASELLPDDKAWSKKSYESVKKIVDPIFSGRNDKPLEYEYILLLLVEKSRSDMILNKGLTLGKQLVEGIEDEEMGWTVLAGFWSEMILYIAPSDNIDAHRRAIARGECSYSIPTTTPKKIDVRFIVVVISYATLLVIDVRFIVLAVFPFIALAFIAALCVALIRAEADNGGEPGASSSSASSAAATDREGNKNTTTTAAEEAEQLTAMSVVPYWALCVTGHGPRHGPRRHPVSPLPQRHTGRAGPDADEAQLAVRRRRGSGRRAGVA

SEQ ID NO: 153345 - protein, 347 aa, Oryza sativa
  unsure (1)..(347): unsure at all Xaa locations
  Clone ID: PAT_MRT4530_53309C.1.pep
RHQGGSGADGRGPHVSGSRAAGPPWTGTTRVVHRRSTGPTAXIAPGPIGRAAATRLSSTQGRPTGHGDGXARARARVTGDGNQRRRRRREGDAKAAVXAAARKEREGNRGERDASPRVAGAEEDDGERRRRXTGKRRRQADEVQNALREEKREVRGRETNHGGRHPWPKAAVGVELTGARGDAGSGDESRRRKRGRGAGRGRXGGIPPANAGSGGGERGGIRKSNPGHLGRGRGREKEGSGHGRCGACAGVADVAQRRRRRGRGRGCGRGGXGARWETGPTGGPHLSATRXEEAGGRPVRLSWALAFSWPSGRRGRKXGMGRRPIQRKERKEKKEKGKRREKGFFLG

SEQ ID NO: 153346 - protein, 52 aa, Oryza sativa
  Clone ID: PAT_MRT4530_5330C.1.pep
PIKPFADYPEVIYLYYNSFKQAHTIPLYELALLRQKLEHYFPMGPVIAEPFI

SEQ ID NO: 153347 - protein, 61 aa, Oryza sativa
  unsure (1)..(61): unsure at all Xaa locations
  Clone ID: PAT_MRT4530_53310C.1.pep
ERARAQVVSNGGKTVIDGVLRPGQLLVIPQQYAVLKKAERXGCQYIEVKTHASAFFSHRTA

SEQ ID NO: 153348 - protein, 359 aa, Oryza sativa
  unsure (1)..(359): unsure at all Xaa locations
  Clone ID: PAT_MRT4530_53311C.1.pep
MRQLEESYTTSPAVAHAGLWXDVSGSRGERGAGKXGPPGQRPKAADPPWTGTTRVVHRRSTGPTAQIAPGPIGRAAATRLSSAQGWPTGHGDGXAHARARVAGDGNRRRRLRREGGGAXAAARKEREGNRGERDASPRVAGAEEDDDERRRRXTGKRRRRADEVQNALREEKREVRGRETNHGGRHPWPKAAVGVELTRARGDAGSGDESRRRKGGRGGGRGRXGGIPPANAGSGGGERKSNPGHLVCGRGREREGSGRGRCGACAGVADVARRRWRRGRGGGCGRSGXGARWETGPTGGPHLSVTRXEEVGGQLARPSWALAFGRPSGRGGRKENGPAAIQRKRERKRKKKKKNFPRD

SEQ ID NO: 153349 - protein, 53 aa, Oryza sativa
  Clone ID: PAT_MRT4530_53312C.1.pep
MTNMRMISPIKAGGDVDGAKDNDTNQRVVQLWQRNNKSITDEVPGEEDEDVHQ

SEQ ID NO: 153350 - protein, 124 aa, Oryza sativa
  unsure (1)..(124): unsure at all Xaa locations
  Clone ID: PAT_MRT4530_53313C.1.pep
LLEPVKAGQAPXFMEVWSADFQLCPAATMDQHAVKAFAVAIIDRMDPAYCESNLAGAIAAVKDPGCAMKVELIMXIDHNRCGGIKALLSLKDGAPDFFHLDEDXAMTWSPAQNKVRTEHASLAF

SEQ ID NO: 153351 - protein, 45 aa, Oryza sativa
  Clone ID: PAT_MRT4530_53314C.1.pep
MTMTAVADCGPDINDALGSPLLAACWGVGGGANVTRALSTGHAQG

SEQ ID NO: 153352 - protein, 48 aa, Oryza sativa
  Clone ID: PAT_MRT4530_53315C.1.pep
LELKALFLLILKYVLLKGGTFANGVCRCPPGKNAMPSYSMGHFYKPIS

SEQ ID NO: 153353 - protein, 70 aa, Oryza sativa
  Clone ID: PAT_MRT4530_53316C.1.pep
GSEHATSHSWVTQPPTQACKAAKPGKHAASLFPLVVTQHPANHCAPKNGAFPGLSQPPYAPLGVQACYLA

SEQ ID NO: 153354 - protein, 56 aa, Oryza sativa
  Clone ID: PAT_MRT4530_53317C.1.pep
MAIELVGYFAMPCVTSMIGVAKCDDKDARYEDCEKMIHVFDKDGDGRISLDEFRAV

SEQ ID NO: 153355 - protein, 55 aa, Oryza sativa
  Clone ID: PAT_MRT4530_53318C.1.pep
LLVFLNDIKRNICPSNDAEILLVYYGYRVHPQAHGYTIVAFHPRVFQVYRIYFIP

SEQ ID NO: 153356 - protein, 127 aa, Oryza sativa
  unsure (1)..(127): unsure at all Xaa locations
  Clone ID: PAT_MRT4530_53319C.1.pep
EYAMRGHLSEKADVFAFGVLMLETVAGRSNTNNSLEESKIYLLEWGSPHQXPPMSRVVAMLIGDVDVAEVVTKPSYITEWQLRDGGSSSYTTSSYAGSSNPEFSRQRETNPLARSSPTITKASLVGR

SEQ ID NO: 153357 - protein, 160 aa, Oryza sativa
  Clone ID: PAT_MRT4530_5331C.1.pep
RRGWVLCVCFAEALLVARQYTLPCRSAPTPSRQPLLPRSAVPEESEVFQGGNHARGAFLGSAIVYESKNLSVRLSLLMLIDSLAVSFGSANEYEPRDYVLAMLLGLAIMSTSQRNFFSLLSPSSQPARLRHGNSFHLMAFNMISHFFLWSGQMSTGLGVV

SEQ ID NO: 153358 - protein, 127 aa, Oryza sativa
  Clone ID: PAT_MRT4530_53320C.1.pep
KHIFNFDKDIMSLDGKERLISGGSPICHHSDDTSMIISFTRGPFLFVFNFNPDASSRLYSVGVDEAGEYQLILNTDETKYGGRGELTSNQYMKRTSDNRVGGCRNSLELTLPSRSAQVYKLVRILRI

SEQ ID NO: 153359 - protein, 840 aa, Oryza sativa
  unsure (1)..(840): unsure at all Xaa locations
  Clone ID: PAT_MRT4530_53321C.1.pep
CLSVAKVAHGHWEPCSGAVGRRVTNLSVVGEIPLELQNFTYMLDLYXNLGYNYLTGAVPSFFGKFTFMKYLAFPFNALSGPLPKELGNLTNLLSLGISFNNFSGQLPKELGNMTNLQQMYIDSCGFSGPFPSTFSKLQNLKILRSSDNDFTGKIPDYLGIMPKLEDIRIGDIVNGSSSLAFISNLTSLSNLILRNCKISGNLAPVDFSKFGVLTLLDLSFNNITGQIPQTILNMTNLEFLFLGNNSFTGSLPDAISPSLKAIDFSYNQLTGGLPSWATQNNFQLNLVANNFELGTIGHSTLPSGLNCLQQDTPCFRGSAEYYSFAVDCGNNRTTRGLDGTIYEPDAANLGAASYYVTSDTRWGVSNVGNYFLATDGVNIINSPQKIQNVLDSRLFETARMSASSVRYYGLGLENGNYTVLLQFAEFAYPDSQTWLSLGRRVFDIYVQGDLKEKNFDIRKMAGGKSFTAVNRSYTARVSKNFLEIHLFWADFTPTVRNGVPKRRSKAGAIAGITIGALVLGVVSLFGIFLLVKKRRTIAEQQEELYNLAGQPDVFSNTELKLATDNFSYQNIIGEGGYGPVYKGKLPDGRVIAVKQLSETSHQGKSQFVTEVATISAVQHRNLVKLHGCCIDSKTPLLVYEYLENGSLDRAIFGIARGLTYLHEESSVRIVHRDIKASNVLLDTDLTPKISDFGLAKLYDEKKTHVSTRIAGTMGYLAPEYAMRGHLSEKADVFAFGVLMLETVAGRSNTNNSLEESKIYLLEWAWGLYEMGQALRVVDPCLKEFDEKEAFRVICIALLCTQGSPHQRPPMSRVVAMLIGDVDVAEVVTKPSYITEWQLRD

SEQ ID NO: 153360 - protein, 1027 aa, Oryza sativa
  unsure (1)..(1027): unsure at all Xaa locations
  Clone ID: PAT_MRT4530_53322C.1.pep
MREMRRWCSRMSGLVWVVLVCSWTWRIAAAQAPQPPKTDPLEAAALNTILGRWGKKASSEWNISGEPCSGLASDKSDWDNYPNINPFIKCDCTFSNNTLCHITRLXVYASTVVGEIPLELQNFTYMLDLNLGYNYLTGAVPSFFGKFTFMKYLAFPFNALSGPLPKELGNLTNLLSLGISFNNFSGQLPKELGNMTNLQQMYIDSCGFSGPFPSTFSKLQNLKILWSSDNDFTGKIPDYLGIMPKLEDMAFQGNSFEGPIPPSLANLTKLTNLRIGDIVNGSSSLAFISNLTSLSNLILRNCKISGNLAPSXCKKSVMNHRDLSFNNITGQIPQTILNMTNLEFLFLGNNSFTGSLPDAISPSLKAIDFSYNQLTGGLPSWATQNNFQLNLVANNFELGTIGHRYLSGLNCLQQDTPCFRGSAEYYSFAVDCGNNRTTRGLDGTIYEPDAANLGAASYYVTSDTRWGVSNVGNYFLATDGVNIINSPQKIQNVLDSRLFETARMSASSVRYYGLGLENGNYTVLLQFAEFAYPDSQTWLSLGRRVFDIYVQGDLKEKNFDIRKMAGGKSFTAVNRSYTARVSKNFLEIHLFWAGKGTCCVPTQGYYGPMISALSVTPNFTPTVRNGVPKRRSKAGAIAGITIGALVLGVVSLFGIFLLVKKRRTIAEQQELYNLAGQPDVFSNTELKLATDNFSYQNIIGEGGYGPVYKGKLPDGRVIAVKQLSETSHQGKSQFVTEVATISAVQHRNLVKLHGCCIDSKTPLLVYEYLENGSLDRAIFGHSILKLDWAMRFDIILGIARGLTYLHEESSVRIVHRDIKASNVLLDTDLTPKISDFGLAKLYDEKKTHVSTRIAGTMGYLAPEYAMRGHLSEKADVFAFGVLMLETVAGRSNTNNSLEESKIYLLEWAWGLYEMGQALRVVDPCLKEFDEKEAFRVICIALLCTQGSPHQRPPMSRVVAMLIGDVDVAEVVTKPSYITEWQLRDGGSSSYTTSSYAGSSNPEFSRQRETNPLARSSPTITKASLVGR

SEQ ID NO: 153361 - protein, 230 aa, Oryza sativa
  Clone ID: PAT_MRT4530_53323C.1.pep
MGWLTGSHTGLQLRSTYQPARQQIDDPANLATPVAGASSFNRDPPLRGQGRVTFLPHGSVGARAPHFAAHYKNADPKSPWESAYIRRKKPNPTPTPNQTDPLPPPHCRTAPPVAEEVVVLPAAAGSVRAPRDGRRRQSLYKPPYLAIAVAAAVPLRAAVPGSPRHHHPSARHRAWSPRSSRCCVPRRAAAMPLRSRRAPGRRRRAWISWPPPSFCAPPRLDPLAAASRCA

SEQ ID NO: 153362 - protein, 95 aa, Oryza sativa
  unsure (1)..(95): unsure at all Xaa locations
  Clone ID: PAT_MRT4530_53324C.1.pep
TCYCRIWSLFSCGCGAAPAGARPWCPGDPCTSSPPRRRSPPPPPPPRRPRSAPSPPGCRCPTPPTTPPPRPPRGGXAPPRPNRSPPPPPCPRPLS

SEQ ID NO: 153363 - protein, 72 aa, Oryza sativa
  Clone ID: PAT_MRT4530_53325C.1.pep
MTVIWRMQVTTAVWRTQETVVVVQDKGGCVVEAEGNGACAADAKTVTAGLDELSCLASPTTSLSSACSSATN

SEQ ID NO: 153364 - protein, 83 aa, Oryza sativa
  Clone ID: PAT_MRT4530_53326C.1.pep
GGVGIIFITRRVRFLGQNKVGVMQSPPLFLSEFLPMGKSRERSIQKHDLGVPAFLAEKGEWYAYIANGSPATCNGAGYYVWTR

SEQ ID NO: 153365 - protein, 649 aa, Oryza sativa
  unsure (1)..(649): unsure at all Xaa locations
  Clone ID: PAT_MRT4530_53327C.1.pep
MASSGRRRDVLLLLLLLVLVARAAAADMAGDRAALLALRDAVGGRHLPWDPSAPTPCGGAWRGVGCSTAPPPAXRVTELRLPGKSLRGAVPVGTVGNLTALRTLSLRMNAISGGIPADIGGCVQLRSLNLSGNRLAGGLPEGLFSLALLEKVDLSGNRLTGGVSPEFSRLASLTTLNLDRNGFDGTLPGNLTLPNLARFNVSYNGQLGGAVPASLAGMPASAFLGTSLCGAPLAPCANPSPTPPSPPGDSKGGGKLSRGAIIGIVLGAVAALVVALTVGFLACFRRRATAPRSRSTAAAAAAHDVAEPITVTVARTDMDAAVKQSHSPPPPGEGSTKLVFVGGAPERPYDLDTLLRASAEVVGKGAAGTTYRATLDGGEPVLAVKRLREVSLSEREFRDRVAAIGAVSHDSLPRLLAYFYSREEKLLVYEFVVGAGSLAALLHGNGEKLDFAARARIALAVARGVAFIHRGGPISSHGDIKSSNVVVTATRDAAYVTDYGLAQLVGGAAAPPTTKRGAGYRAPEVVDARRVSQSADVYSFGVLLLELLSGRPPLDATPDGGAAVDLPRWMRSVVQEEWTSEVFDAAIGNEARTEGEMMRLLQLGMECTEHHPDRRPAMAEVEARIERIVEDACRNADSGSTDGSRSMSA

SEQ ID NO: 153366 - protein, 62 aa, Oryza sativa
  Clone ID: PAT_MRT4530_53328C.1.pep
MSVHNMWSYKGQVVQYPTEYKKQYGQRWLSLVLRRFFLDENSFRFIRGIGNYTQKEQNQHKS

SEQ ID NO: 153367 - protein, 98 aa, Oryza sativa
  Clone ID: PAT_MRT4530_53329C.1.pep
MTTCLPYFRKLLADLNNRAAGDDDDDAVPPVTCVVADHLLGFSLDATVAVLASRCRPLPTLACRLPPPRPRLASRLRPPPARRRRSRYRPCAPREREE

SEQ ID NO: 153368 - protein, 285 aa, Oryza sativa
  unsure (1)..(285): unsure at all Xaa locations
  Clone ID: PAT_MRT4530_5332C.1.pep
IAGKSLIPFIGSSSNSTYNLDGEPTPANQLIPVEHYTMERVNALWAQPLATVPGSXLRIWSPLASSLVRXEPGVRPNPHWLRSAVRSLSPHHVTKTKIRGDSPVXRTTTGELGLLKAAPPPAERYVGTMFTKAGDEVLHKYTTPXATPSTPKEDRFRIQGVLTPGGGYGKGLLRPLTTSEKEGAAESRSPPPMKVKRHLTPPPIIRADGXFQEDEVKSQEPSVYKLAAQVKKLRKENIELRDRNAELGVELAELRNNFDTLSRGLCAKIKRAFIEMGKENKYYAN

SEQ ID NO: 153369 - protein, 57 aa, Oryza sativa
  Clone ID: PAT_MRT4530_53330C.1.pep
VRRVQTQFSLWWACFTLQSSVRSETLLLLFRQATFSCPLHDTTIVSHHLHWLDHPPG

SEQ ID NO: 153370 - protein, 274 aa, Oryza sativa
  Clone ID: PAT_MRT4530_53331C.1.pep
MASSQANLDKMQLRQSYRNLWHSDLTSTIQADFPYCCLALWCGPCVSYMLRKRALYNDMSRYVCCAGYMPCSGKCGESRCPEFCLATEVFLCFGNSVASTRFLLQDEFNIQTTKCDNCIIGFMFCLQQIACIFSIVAAIVGSEELSEASQILSCLSDMVYCSVCACMQTQHKIEMDKRDGKFGPQPMAVPPMQQMSRIDQPIPPPVGYTPQQPAYGQPYGGYPPAPPAQGYPPAAYPPAGYPQGGAYPPPGSYPPPGSYPPQGSYPPPQGYYGK

SEQ ID NO: 153371 - protein, 218 aa, Oryza sativa
  Clone ID: PAT_MRT4530_53332C.1.pep
WVIECSSCLQAVVLSQLLLPWTHIAVAAGAKSSSPARGPKAPAPPLVPGPPSTPRLPPWLPSCCALRVKVGTVHCGGWTFLLMQATATAATEPEYRTGWSSSCVIPLALFSVDPSASPGPSFQLLGVLQNLKGITSDQIASQCVLQSYASGNVQLFNKTDAQMLTQFSAHFLSTTDEGCNFAAYVPSEEGTPLQRAEWIKYLGAFTNSEDRANTVYDA

SEQ ID NO: 153372 - protein, 667 aa, Oryza sativa
  unsure (1)..(667): unsure at all Xaa locations
  Clone ID: PAT_MRT4530_53333C.1.pep
MADHPRPPPCVLLERVVRFVEAAGLTSGGASRDPDVAAIIEVGGWSWSTVQMMGSVEEMERLMAPSVKPVAFLGDPPQVSSLHMLLPPPASLDLLGIGEISSTHKGIVVIYADKCYLLYDASNNHLTAIPPIPDSVTSAPIFLPLGRGAVLVSAAGADDDDYIFADIVTSPSTRGINPALPKATIFARVKNGGEWIQSSIPPLPLPPHLCGPTYFFHIDTAFSFAGTIFWVDPLKGILICDDILSSPQGPRLAFVPLPHCIDAHDKPRHCFSPNEHRSIGRVSGAIKFLALIGYCEASCPENEVKLKTWSLSPDFKHWKEETTLTVGDIWASESFNQMGLPHVLPFSPVLSVNEDGIMYAVLNDVKKEPIPRLNEFGDSLGMQLVPKANYMIRFDMLQNKVLSSTKISKKATSRWLTNTFLATDFSAYLQDRQNAEAAGKVGASAKGKRKRMSSRQAGRSKCQGQXDEGEMGWTPFAITVNDRRLRHLHPRVEQPDQAQRQQQDGHHRRSTQPAGPPSSPRLDREIPCAGSAAAALPTSKFRRRRVPLLWIRRRRPPYLQASPPLEPAASTSPQLPQPLSSSITMSGGMAPSISLAAATGVKAGGRGGAPAVAEVVAGSRGGAPAVTEEAAGTGADERRRSPRRRRVLHPSGTSSSGRFCRMDLSRI

SEQ ID NO: 153373 - protein, 80 aa, Oryza sativa
  Clone ID: PAT_MRT4530_53334C.1.pep
YGLVAAAVYPAGKLNTPPAVAARSVAGRPPLTRPTSRRRTTTPRLLIIDHYRHLLEISTILLLPLSLLLLSIPAPFTTVK

SEQ ID NO: 153374 - protein, 156 aa, Oryza sativa
  unsure (1)..(156): unsure at all Xaa locations
  Clone ID: PAT_MRT4530_53335C.1.pep
SAARRERAAAARRPGAGGGGAATAEERRLGDEEGGGRSGGSTARRGGPPLAADAEGCGGTAVARRQGGPPLAVAAKERXLGDEEYDRRRGGPPLAAEERRLGDEENDRRRRRRHGFPHGCHRRFLRSSLREPALPPQHLAVAATPRGHWRSPSTSH

SEQ ID NO: 153375 - protein, 114 aa, Oryza sativa
  Clone ID: PAT_MRT4530_53336C.1.pep
VLLSVRFSYLKGLGGSNRIRRNLFNLSLSSPLRRRDDEENFALALPPATATLYIQLRKIVSPKLVTVLKCFLGPFFLSRCLKLLQLTLVLKCSLSSMAHCLPYHCTRYWCQAGV

SEQ ID NO: 153376 - protein, 173 aa, Oryza sativa
  unsure (1)..(173): unsure at all Xaa locations
  Clone ID: PAT_MRT4530_53337C.1.pep
ARRERAAAARRPGAGGGGAATEGGGRSGGSTARRGGPPLAADAEGCGGTAVARRQGGPPLAVAAKERXLGDEEYDRRRGGPPLAAEERRLGDEENDRRRRRRHGFPHGCHRRFLRSSLREPALPPQHXRGRRHTSRSLALSLHKPSPPHLAVSAALPPRRERETEYGERRRYG

SEQ ID NO: 153377 - protein, 252 aa, Oryza sativa
  unsure (1)..(252): unsure at all Xaa locations
  Clone ID: PAT_MRT4530_53338C.1.pep
LPSQCLHGLKSDASFSLFSLQLQSRLPQSQLGSRTTLQGQWKSGGPYREGGDDGGPRGEGSSNGGLGGEDGSGSGPGTRRRGAGGGGAAARRRXGGGRSGGSTARRGGPPLAADAEGCGGAAVARRRGGPPLAVAAKERXLGDEEYDRRRGGPPLAAEERRLGDEEDDRRRRRRHGSPHGSHRCFLRSSLREPAPLPQHLAVAAAPRGHRRSPSTSHRRCTSRSPPLSLHESPPPPAQRERETEYGERRRYG

SEQ ID NO: 153378 - protein, 58 aa, Oryza sativa
  Clone ID: PAT_MRT4530_53339C.1.pep
SRNHQEEVREAFLLFSPFTLIIQYVPESVSDNEPLDCHLQVVAKGTFSCTHSRRYLLF

SEQ ID NO: 153379 - protein, 111 aa, Oryza sativa
  unsure (1)..(111): unsure at all Xaa locations
  Clone ID: PAT_MRT4530_5333C.1.pep
TSNIFYQRESIDNRHHNGLAAPSSTRNPXVIHWNRIGGRGHHRMFERHRGQINSTQXAFDKEPSNCLXNPCMLLCRRKQATSSAARGRVXSTREFRTVPAGVPAFPYSESY

SEQ ID NO: 153380 - protein, 45 aa, Oryza sativa
  Clone ID: PAT_MRT4530_53340C.1.pep
KKSWEPFFSPGFEKNHHQGANWGGFILLYPETSFKLNYFGGWFWD

SEQ ID NO: 153381 - protein, 103 aa, Oryza sativa
  Clone ID: PAT_MRT4530_53341C.1.pep
MKASSPSQGQSPRTPLPRATFGIGEHTRSYSEPWLTGTKLASTCNDSCVNDVENFSRTVSGAKSTQLVGLSSALHPKMLASVLSHYAVKWLPNVVAVSLLSLS

SEQ ID NO: 153382 - protein, 105 aa, Oryza sativa
  Clone ID: PAT_MRT4530_53342C.1.pep
MGAGGGGMRGLAGPRRAARSWPPDLLAQRRARGGGGGCYGVAGKERSSSGAASSPAATARRGKKTCSAVELQARIVSQVVGNGVRLRFPHLLKKPKTFKSYSDMI

SEQ ID NO: 153383 - protein, 569 aa, Oryza sativa
  Clone ID: PAT_MRT4530_53343C.1.pep
MKRFFQPVPKDGSPAKKRPAAAAAASASDSDSLGGDAPAAAACAVGEGDSPPAPREEEPRRFVTWNANSLLLRMKSDWPAFCQFVSRVDPDVICVQEVRMPAAGSKGAPKNPGQLKDDTSSSRDEKQVVLRALSSPPFKDYRVWWSLSDSKYAGTAMIIKKKFEPKKVSFNLDRTSSKHEPDGRVIIAEFESFLLLNTYAPNNGWKEEENSFQRRRKWDKRMLEFVQQVDKPLIWCGDLNVSHEEIDVSHPDFFSSAKLNGYIPPNKEGVRMGILEQRVKMTSGIQLSQEKPLNTLRDQACSTSREEHTSASASKWGWSHFNQFNIGKGWEYANFSYKNINACEGIRFCPLSVPQYYSRLWTARIHPVREAALRQYIVPALTIVDYSNYQATLSYSSSELVMLYKPWLAMLKSSMERSKFELLISLETFFTTACMGRGHLCQGKLVDAYRYLHKEKDMDCGFSWSGHPIGNLSLQFINSNGLTGLKIILYRGKRMRIDYFLVSEKLKDQIVSCDIHGRGIELEVQMEYDRYLNPMKISYMNPGFYGSDHCPVSLELSEEVEAPKPKSSN

SEQ ID NO: 153384 - protein, 78 aa, Oryza sativa
  unsure (1)..(78): unsure at all Xaa locations
  Clone ID: PAT_MRT4530_53344C.1.pep
EQRRRWPTTSSEGRRDTGQRXQRRSSDLWRRRDGGRCSPCSCESNGGGGDRRRRRECKHVHGVLHWEEQRDGAGGGSS

SEQ ID NO: 153385 - protein, 96 aa, Oryza sativa
  unsure (1)..(96): unsure at all Xaa locations
  Clone ID: PAT_MRT4530_53345C.1.pep
MAVATASEPSRADGVEDGGSLASRRGWRRGWWRRLPSXLPPWMGSKTTVATVVALEAXTTEVVDDGGCNGGCQRRWWRERKGKEKRGEGGEVGTDS

SEQ ID NO: 153386 - protein, 61 aa, Oryza sativa
  Clone ID: PAT_MRT4530_53346C.1.pep
YNCVTISDRGAKKKKKKKKKKKKKKKKKKKKKKKKKKKKKKKKKKKKKKKRGGPFKKNKFN

SEQ ID NO: 153387 - protein, 86 aa, Oryza sativa
  Clone ID: PAT_MRT4530_53347C.1.pep
AEPPFYIIIVIAQELDEFRRNIGSYTYRMKNEKKTRSNILQGILGYILIALFHPEHRVATCGENGCHFHAYAITASPEKMRCFFFG

SEQ ID NO: 153388 - protein, 431 aa, Oryza sativa
  Clone ID: PAT_MRT4530_53348C.1.pep
MAATDRRLLFLLAASLAVAAVSSHNITDILDGYPEYSLYNSYLSQTKVCDEINSRSTVTCLVLTNGAMSSLVSNLSLADIKNALRLLTLLDYYDTKKLHSLSDGSELTTTLYQTTGDASGNMGHVNITNLRGGKVGFASAAPGSKFQATYTKSVKQEPYNLSVLEVSDPITFPGLFDSPSAASTNLTALLEKAGCKQFARLIVSSGVMKMYQAAMDKALTLFAPNDDAFQAKGLPDLSKLTSAELVTLLQYHALPQYAPKASLKTIKGHIQTLASTGAGKYDLSVVTKGDDVSMDTGMDKSRVASTVLDDTPTVIHTVDSVLLPPELFGGAPSPAPAPGPASDVPAASPAPEGSSPAPSPKAAGKKKKKGKSPSHSPPAPPADTPDMSPADAPAGEEAADKAEKKNGATAAATSVAATVASAAALLAASFL

SEQ ID NO: 153389 - protein, 81 aa, Oryza sativa
  unsure (1)..(81): unsure at all Xaa locations
  Clone ID: PAT_MRT4530_53349C.1.pep
GQYQMQETELLQYQVHTTYNVSDRKIYGLTANSLTQXAAKNHDKTQAWEQMALVAQQYQYQNIYIDDAIKDNIHLARARDL

SEQ ID NO: 153390 - protein, 599 aa, Oryza sativa
  Clone ID: PAT_MRT4530_5334C.1.pep
MQGSVVTARRAVHGILVAVVVVQRLLAAGASPPADPVHCASGTARCTVTNAYAAFPDRSTCRAAAAAYPASEEELLRVVAAAAASGTKMKAATRYGHSVPKLSCPGAGDGRGLAISTSALNRVVAVDAAGMAITVESGVTLAELIDAAAGAGLALPHSPYWLGVTVGGLLSTGAHGSSVWGNGSAVHEYVNGMRIVTPAPAREGYAKVRVLAAGDPELDAAKVSLGVLGVISQVTLKLQPMFKRSVAFQHCGDGDLAERVVAFAGEHEFADILWYPGHGKAVYRIDDRVPSNTPGDGVYDFVGFRATPTLAIQAKRLVEDGLEATGNAAGKCLAASTTNSILAARNYGLTRNGQLLGAFPGTAVVGYQNRIQSSGSCLAGADDGLLTACPWDPRVEHGTFFFQSGISVPLSRAAAFIRDVQRLRDLNPDALCGVELYDGVLMRYVRASAAHLGKPEDSVDFDLTYYRSRDPATPLLHEDVVEEVEQMALRKYGGVPHWGKNQNAAFEGAAAKYGGARAAAFMRVKRAYDPEGLFSSEWSDKVLGVAGAGGVSVVRDGCALEGLCVCSEDAHCSPEKGYLCRPGRVYKEARVCRRVADDL

SEQ ID NO: 153391 - protein, 73 aa, Oryza sativa
  Clone ID: PAT_MRT4530_53350C.1.pep
VLFLFPLPPPPPPPSSPLVLLLLLLRLPPPPPPSETLSLVVSGLGYSFGVRGEWMDECGDREDDDRRVGGGRR

SEQ ID NO: 153392 - protein, 78 aa, Oryza sativa
  Clone ID: PAT_MRT4530_53351C.1.pep
MALMLGGDGRRVHGGSLRRADRGDALIGGRRRRRRRGGLPNVHALASDAARVRSPPHALPMCAHRSLPPALPALAYRS

SEQ ID NO: 153393 - protein, 50 aa, Oryza sativa
  Clone ID: PAT_MRT4530_53352C.1.pep
LNIGGFSILEFKGNLKYNEFNIQETKTRNQGHKNYQRAKPTKDQDPNRTK

SEQ ID NO: 153394 - protein, 200 aa, Oryza sativa
  Clone ID: PAT_MRT4530_53353C.1.pep
MRAPFRERLGSRAHTTRTSTPRAPSRKGGFPMNPPRSIFPELHPAGHAIIRIVDSCRAPAHIRSMRAAHARIIFIMRLPSHPASAAVRVKLIQAYAACAALPAARAVLDASPDRTTVFFNVLLRGLTAASLHRDALILFASMRPQGHACFPDHYTYPLALKSCAATDGLVLGRQIHSSTARLGLDGNVFVAHSAISMYAR

SEQ ID NO: 153395 - protein, 58 aa, Oryza sativa
  Clone ID: PAT_MRT4530_53354C.1.pep
VSEEKKRHLLPRKNLCVCLCTSVCSSPESYCVCLLLRECAAHVNLILGQDKKRHPIVD

SEQ ID NO: 153396 - protein, 298 aa, Oryza sativa
  Clone ID: PAT_MRT4530_53355C.1.pep
MAGKMDKTTVIVSAVAASLGALSAILGFAADAAKHSDCASALGMAVAASIFLMMAKVTVAAGGGCRESRAVVPSATKRTVAVACAAISWIATVIAFVMFLDTGGISVVHGSSSRSAAAELGICAAIFLMITHVAMAAAGCCCRSFCIPSETARVVCAITSWIVPVIVFVLLLHAAVEESDCDKIHKGVYAGTGVLVLVSTVLGIISYLMLRTRPEPTPPIVVPMVIAFQPVYPNPLLVPVPVQAPPPNQAFAHPATLPPQGGWYGQAPNQQFAAPAPAQGYGWQAPNQQHFPCAGVVP

SEQ ID NO: 153397 - protein, 98 aa, Oryza sativa
  unsure (1)..(98): unsure at all Xaa locations
  Clone ID: PAT_MRT4530_53356C.1.pep
HEQLPLDDPECLLNDKHGHCRTFDVIYNVWXETFFYMAKNIEIYGCILLNPSMVTPGAECKDRATPDQVSDYTLKLLHRRXPPAVPXIMFLSKWARLY

SEQ ID NO: 153398 - protein, 90 aa, Oryza sativa
  Clone ID: PAT_MRT4530_53357C.1.pep
TDSAKTRCTDISPCDVAAQPQRVNSPRAAPHGRTHSHRETHQPGAPKTLHMRRRGTDNKTKEEKPTLAAPAQRVEWAGARRRRQKQRPGP

SEQ ID NO: 153399 - protein, 551 aa, Oryza sativa
  Clone ID: PAT_MRT4530_53358C.1.pep
MLGRNAMLGPPRRGEGETSRRGEGSEGDGNGEGDAVDRLSALSDGVLHHIMSFLKAWEVVRTCVLSRRWRHTWASAPCIDLRVRYNDVDSEPPEELRDFVNRLFRRREASAPVDTLRLQSSDPDELFDNDDANAWIRTAINRNARFIHLTGHRTEIGVLKHRALVSTHLKILKLSYVLIDDKILKQLSSGCKSLEELDLKDCAMTGHEISSASLKILKMDKCKINVDLSITAPNLVLLNLITPYIQVPSFKNLESLVSCSVILDDFFLGDAYEHSSDEDDIDETTDEDDIDDQKKTYKTGYGFGFPQKGYGLAGNKDDYGYGSDIESDDNTYEYSEIAKEYGDQQYAQNSSTIVQGVGTSQQTKTISGGHNFLHGLSNARSLELLAGAGEVVLSRELKSCPIFSNLKTLSLGEWCMDAEFDTLIFLLQRSPNLERLFLELKLNFNTRKALESGAKPMGRSFTCKDLQMVKIRCSKDDARVHMLAHLFRANDIPFEKIYVRRSGSSRLRGEKFMRDLGKHELEFWGSDSEFCGPNSEFCGSDSEFEDSDMEF

SEQ ID NO: 153400 - protein, 56 aa, Oryza sativa
  unsure (1)..(56): unsure at all Xaa locations
  Clone ID: PAT_MRT4530_5335C.1.pep
LVLLYIKAPSKSNPTAPLQHHLWSSQQXRPPGRPTAAAERSGARQLFPPRWPPPVT

SEQ ID NO: 153401 - protein, 66 aa, Oryza sativa
  Clone ID: PAT_MRT4530_53360C.1.pep
MAMAEGSSCSCCLMMCAVVMCRRSVKRKLDEKGGAEARANSGRRKGEQGVDGRQKSEHRLAQGASR

SEQ ID NO: 153402 - protein, 105 aa, Oryza sativa
  Clone ID: PAT_MRT4530_53361C.1.pep
SRVDPRARHYGIPASPFFQSDGFHLKNTQVWPQLGLVAHHFPYQAINIFQSIVQQLQLHQFGDFSFDRNLAQAQALLAFNGPSKFGFPPGFYGAPSPIPPLGGVL

SEQ ID NO: 153403 - protein, 62 aa, Oryza sativa
  Clone ID: PAT_MRT4530_53362C.1.pep
RSPIMKENSARSLSIQTEPTKLVSCSRAGSGSARFTNELKPRLGLGSFRIRAEPSQASPSRA

SEQ ID NO: 153404 - protein, 41 aa, Oryza sativa
  Clone ID: PAT_MRT4530_53363C.1.pep
GELNLTRNHISDLKIPYYIILENAPRRRRDGLPRLGHGPRA

SEQ ID NO: 153405 - protein, 214 aa, Oryza sativa
  Clone ID: PAT_MRT4530_53364C.1.pep
MEARRKMRFAMVCSSNMNRSMEAHSLLGRAGLDVASYGTGTHVKLPGPSLHEPNVYDFGTPYNVIYDDLRRKDPDLYKRNGLLPMLKRNTSVKLAPQRWQDNAGDGLFDVIFSFEERVFDLIVDDMHNREQRMLKNALIINMDVKDNHEEAGVGAKLALDLCQKPSLLDQHMLDGLGWVFLEGADEDWEEIIDDLIITFEKQHKRKLTYNMAFY

SEQ ID NO: 153406 - protein, 308 aa, Oryza sativa
  Clone ID: PAT_MRT4530_53365C.1.pep
MLGGDGRTKTVCVTGAGGFVASWLVKLLLSRGCYTVHGTVRDPGDAKNAHLMSLDGAAERLRLFKADLLDYGSVAAAIAGCDDVFHVDILAPAVTGTTNVLKACSEAKVGRVVVVSSVSAAMVNPNWSEGKAIDEDCWSDVDYCRATKNWYTLGKTLAEIEAFDYAKRSGLDLVTLCPSLVIGPLLQPTVNASSTVILGCLKGDCEVKIKLRNFVDVRDVADALLLLYETPGVSGRYICSSHARRMPHIIDLLKSWYPGYKFADKFVEVSDEPQFNSGKLEKLGWKIKPFEETLRDSVESYRAAGVLD

SEQ ID NO: 153407 - protein, 222 aa, Oryza sativa
  unsure (1)..(222): unsure at all Xaa locations
  Clone ID: PAT_MRT4530_53366C.1.pep
APRFLCPAPPESANPFVEQXVQFSVAAAEVTVADKEGKDALDKLCFCKVATIFYSYREQIEARGLPLTPDXEVLLSLPPFCPITFNSEVANGIXNNDWSKPEVAKTGLGSSAAMTTSIVAALLHYLGALGAQLVSSLFSFEKIPVVTQEQGPLTFIQPTAGNHLDMMARDDVLAEDDVNMSSNGTPSKSVYRQFGTAYSRSMNYIELKHAKVRKIPGWLGKE

SEQ ID NO: 153408 - protein, 171 aa, Oryza sativa
  unsure (1)..(171): unsure at all Xaa locations
  Clone ID: PAT_MRT4530_53367C.1.pep
AGIRHEVGERRRCAVTGAGXFVASWRVKLLLSRGCYTVHGTVRDPGDAKNAHLMSLDGAAERLRLFKADLLDYGSVAAAIAGCDDVFHVACPVLLSAPNPEVDILAPAVTGTTNVLKACSEAKVGRVVVVSSVSAAMVNPNWSEGKAIDEDCWSDVDYCRATKDWYTLGKT

SEQ ID NO: 153409 - protein, 578 aa, Oryza sativa
  unsure (1)..(578): unsure at all Xaa locations
  Clone ID: PAT_MRT4530_53368C.1.pep
MGWHHPDVARPPGLPSRGLSSTGSLSNTMTAWAGGIFCPPSPSVVPPAHLALPTLQWPDPSQWNPQSLASSLNTTTLTTPTSNEWYMDSGASSHMSAHPGILTASHQPSHSLPSHIVVGNGSLIPITATGTAYLHYPNHSFELNDVLVSPHIIKDLISARRFARDHWCAVLLDPFGLSVKDYQPRIEIARCNNSRDLYPSLRTPYHXATSAQAFVAMPSNTDLWHCWLGHLGHEALTRLSQASVISPPKSATSLCHGCXLGRHVRLPFTMSFTGARAKFKLIHCDLWTSPIVSVSSFKYYLVISDDFSHYVWTFPLKFKSDTFSTLSQFFGFAKTQFSTTIQSIQCDNGREFDNSSAQXFFLTNGVSLRLFCPHTSPQNGMVERMLCSLNNIVRSLLFQASLPPPFWVEALHTATHLINRHPTKTLXHHTPFFSLYGAHPSYTHLRVFDCKCYPNLSATTPHKLAPRSIMXVFLGYPKDHKGYRSFGPSSNRIYISCHVGFDEHSFPYAEIINNADATNLDFLEDFSATIPGPIGRRRITAQPGSASHDGSQHGPATSRGPLTPRPHGPPSPPPGLPA

SEQ ID NO: 153410 - protein, 94 aa, Oryza sativa
  Clone ID: PAT_MRT4530_53369C.1.pep
MWEDAPESMYHSFEVVLEAQDGLEGPPKGRGGRICRRPRQLKRGQSSLRREVDGLTRTVLALPTIVLEREPVEDRPREGRPGGLATSGWCQPMD

SEQ ID NO: 153411 - protein, 749 aa, Oryza sativa
  Clone ID: PAT_MRT4530_5336C.1.pep
MANHDLVLGHGEDPELALGQNHHDFGQDHGLGLGHSHELGLGHAHEHDLVLGQSHEHEHEHDHDLGLGNHHDSQLVLAHDHHGHTSELALGHGHDEDPHSLDGQDHDGLAMTENHVLTLTDAHQLDVDQNMDQLSLEQAHELALQPAHDFSHGPLAVAPVVQSRKMVVSSEFQLVVGQEFPDVMSCRRAIRNTAIACHFEIQTVKSDKTRFTAKCSADGCPWRIHAAKLPGVPTFSIRTIHDNHSCVGINHLGHQQASVQWVANTVEERLRENPHCKPKEILEEIHKSHGITLSYKQAWRGKERIMAAVRGSFEEGYRLLPEYCRQVERTNPGSIARVYGNPDDNCFRRLFISFHASIYGFVNACRPLIGLDRTILKNKYLGTLFLATGFDGDGALFPLAFGVVDEESDENWIWFLSELHELLEKNTENMPRLTILSDRRKGIIDGVDFNFPTAFHGHCMRSLSETFRKEFNNSVLVNLLWEAANALTVIEFETKLLEIEDTSPEAVCWIRRLPPRLWATAYFEGTRYGHLTANITESLNSWILDASGLPIIQMMECIRRQLMTWFNERREASMQWTTILVPAAERRVQEAIERARGYQVARANEAEFEVISPHEGTNIVDIRNRCCLCRGWQLYGVPCAHGVAALLSCRQNVHRYTESCFTVATYRKTYSQTIHPIPDKTLWNETSDQGQEEENKVDVIINPPKSLRPPGRPRKKRIRAEDRGRIKRVVHCSRCNQTGHFRTTCAAPI

SEQ ID NO: 153412 - protein, 97 aa, Oryza sativa
  Clone ID: PAT_MRT4530_53370C.1.pep
MGRYWWKNGKWLHSPRLYPYVDVLEIQAFLSKAAGASSLMGIKVGSESDPPGICLYLNILVRDLIQSSFSVIGLVSEGIHRGSHFDSSFHGTRKNFD

SEQ ID NO: 153413 - protein, 52 aa, Oryza sativa
  Clone ID: PAT_MRT4530_53371C.1.pep
LLFLASRSQHELEVSTKQAIFVGSSVSDTIKTCIAMGNERAALKVKSEYMVL

SEQ ID NO: 153414 - protein, 220 aa, Oryza sativa
  Clone ID: PAT_MRT4530_53372C.1.pep
RKPPNVTWLFTSPAQWPDSNERRSRTDGANSPAPPNSHTGRPNSVVSPPPSGARPHPTPTEDASGLDLEEPGPAIPLTPPPPADAITLPQHRMQGGRPPKPEVTRDTPDLAGGEDHRPYPAVPVLPSPSSRDKEAAGAEWGGAAVTAGNPRSGENEGGREEKGRRRREEPPSAAATRADAAGKPPRTRPFRLPCRLDMKNATYIRHFAYDLRTVNVYDTG

SEQ ID NO: 153415 - protein, 324 aa, Oryza sativa
  unsure (1)..(324): unsure at all Xaa locations
  Clone ID: PAT_MRT4530_53373C.1.pep
RIPLAPKVFFLTNGVSLRLFCPHTSPQNGMVERMLCSLNNIVRSLLFQASLPPPFWVEALHTATHLINRHPXRLSTHHTPFFSLYGAHPSYTHLRVFDCKCYPNLSATTPHKLAPRSIMXVFLGYPKDHKGYRSFGPSSNRIYISCHVGFDEHSFPYAEIVNNADATNLDFLEDFSATIPGPIGRRRITAQPGSASHDGSQHGPATSRGPLTPRPHGPPSPPPGLPASSSSWAVSHGPPACLGPPASPGTWSLGSVPSALPPAASSTTRATPFPTAAALAPDLMRLLPPSSATTRPGSARVPRISAPPPQLGVSPVINDHTMVK

SEQ ID NO: 153416 - protein, 49 aa, Oryza sativa
  Clone ID: PAT_MRT4530_53374C.1.pep
QPNFVFHRSIFRFYPIMDPLLVPPSLAGWSFPNWPLFPSSSSSSTPLVR

SEQ ID NO: 153417 - protein, 112 aa, Oryza sativa
  Clone ID: PAT_MRT4530_53375C.1.pep
NGGTVVQNDGCTLDVFQEQGMLHGRGVPRDLSPQELNVAMLYVLTNCSMVDKFQESEKYEKSRRRLTTVNSGVCLSSFTSDDQQLDYYGVIEDIIKLTFDAGRKIEIVLLQC

SEQ ID NO: 153418 - protein, 955 aa, Oryza sativa
  Clone ID: PAT_MRT4530_53376C.1.pep
MTLHLCRYGFQLGYERWTSHGEPEILEEDEAEQHIGLVDQMNEMLTDAIAAHDVNPSEEPTPTAAELYRLLEEVDTPVHENTRQTRLSIVARLMSIKTQNNMSEACYNEIMNLLHDSLGDEAGNKLPKNYHRSKKLVHSLGMPYKKIHACTNNCMLFYKENEHKENCTVCGEARYEESARGNRSKRVPRKVLRYLPITPRLQRLYMSETMAKHMRYHARPLFVAPYNLPPEMCTKDNNILLSLVIPGPEHPGKNLNVFMEPLVDELLDLWMNGAVTYDRFLKQNFNMKAAVVWTIHDFPAYGLVSCWSTHGKLACPICGGGTKAFQLKHGHKACWFDCHRRFLPSNHEFRRSLKCFRKKTKVLDPPPERLTGDEIYKQLMSLVPDRTGKHTFEGFGETHNWTGISGLWKLPYFKKLMLRHNIDVMHNEKNVAEAVLSTCLDIQDKTKDNVKARLDMADICDRPTLNMTKSTNGRWQKPRAKYCVTKEDKLTIMKWFKDLKFPDRFAANLKKAVNLSQCKFIGLKSHDFHIFIERLLPVALRGFIPEKEWKDLSELSFFYRQLCAKEIDKEQMHRLEKEIVVLLCKLEKMFPLGFFNSMQHLILHLPYEARVGGPVQFRWMYPFERCMCKLRLKVRNKARVEGSIVEAYIVEETTNFMSIYFNKDIRTTWNKPNRYNNGGTVVQNDGCTLDVFQEQGMLHGRGVPRDLSPQELNVAMLYVLTNCSMVDKFQEKFSEEKHAMHNNLSVEGLDQLMREEFVDWFKNACRNDPSADDDLWNLATGCKPRVLSYNSYDINGYRFRSEKYEKSRRRLTTVNSGVCLSSFTSDDQQLDYYGVIEDIIKLTFDAGRKIEIVLLQCRWFDPIRGKRSTPTLGMIEIKSTSKLTNFEPFAMAHQATQQGNEEPSDNIGSDEIHEESDESGGEEGSEEQVDDGDDEDEDNDDEENGNDSEYDDDDY

SEQ ID NO: 153419 - protein, 173 aa, Oryza sativa
  unsure (1)..(173): unsure at all Xaa locations
  Clone ID: PAT_MRT4530_53377C.1.pep
TLNKTIIPGLVQPVRINQRTEHITHKAPHHSNTLGDFMPRXSAXFPQQLGPYFFSLPSPASIPTHNTSSXQLQWVFPFHTLYLIMNLRILSRCPGQCGQSTHASHLSSXSSQQHVEQQHHPTIFSSQGFHQAKQSCSPYIQVPPCKLLGACSPKAMSSPXGTPSSPFSTFSVG

SEQ ID NO: 153420 - protein, 89 aa, Oryza sativa
  Clone ID: PAT_MRT4530_53378C.1.pep
MANELMSLRMLDKHFGDDEAVMSADELVKLYRGLFAWFDRDGSGAVELEEFRAEMKEVLLAVASGLGFLLVQMVVEDGRKGDLLLLMIR

SEQ ID NO: 153421 - protein, 429 aa, Oryza sativa
  Clone ID: PAT_MRT4530_53379C.1.pep
MDYQPKVAMHKITTSLHLVHRILDSILDRAYDDKLDRLYESVNNDDQRGGLKILASQAHHIHELAKEVQINFSGYMEMQRKEEKRFGSMISSLKKENQDIRSMLKIAVTEKEAAENRLCVLKGDKDQGRSAILQIAEKGLHKVGFGFIMDVITGESEREENMSSNSATEISTTGRESDQGVDSLTSVVGKTMENMQNEINDLRQALHKSRSDCDRLQLLAAEQAQKIVKYELHIKDLEEREIFLLHSVTEKGLMFLFAMLKVEELTVDLKEVEREAARWREACELEVEAGKDAIKQLNQELGPFQVALLTEELRRVKADLEAANSKLQLKEKLAATAMAAQAAADECLKLADSRSAGLQLRIEELTKQIEQEDEHAGKERGSAHRRTRYACWPLRRLRVISASSSARKWFVDQNGRLPPGTEALLQIRI

SEQ ID NO: 153422 - protein, 72 aa, Oryza sativa
  Clone ID: PAT_MRT4530_5337C.1.pep
VDPPGCRFFFFFFFFAKTVQISSMGYCSHSKSPLGNRTSSLITVSFIYTKHHKIISDTSALFNYARTASSNH

SEQ ID NO: 153423 - protein, 1065 aa, Oryza sativa
  unsure (1)..(1065): unsure at all Xaa locations
  Clone ID: PAT_MRT4530_53380C.1.pep
MGKGGQEEGKRRDGSDASGSEPAAAAFPAWARTPSECLAELGVAADRGLSSEEAAARLRRYGPNELERHAAPSVWKLVLEQFDDTLVRILLAAAVVSFVLALYDGAEGGEVGATAFVEPLVIFLILIVNAVVGVWQESNAEKALEALKEIQSEHATVKRDGRWSHGLPARDLVPGDIVELRVGDKVPADMRVLQLISSTLRVEQGSLTGETASVNKTSHKIELEDTDIQGKECMVFAGTTIVNGSAVCVVTGTGMDTEIGKIHAQIQEASQEEDDTPLKKKLNEFGEALTAIIGVICALVWLINVKYFLTWEYVDGWPRNFKFSFEKCTYYFEIAVALAVAAIPEGLPAVITTCLALGTRKMAQKNALVRKLPSVETLGCTTVICSDKTGTLTTNQMSAVKLVAIGRWPDTLRSFKVDGTTYDPSDGKINEWPSLSMDENLQMIAKIAAVCNDASIAHSEHQYVATGMPTEAALKVLVEKMGLPGGYTPSLDSSDLLRCCQWWNNAAKRVATLEFDRTRKSMGVIVKKADSGKNLLLVKGAVENLLERSGYIQLLDGSVVLLDEGAKALILSTLREMSASALRCLGFAYKEDLAEFATYDGEEHAAHKYLLDPSYYSSIESNLIFCGFVGLRDPPREEVHKAIEDCRAAGIRVMVITGDNKETAEAICREIGVFGSTEDISSKSFTGKEFMSLSDKKKLLRQTGGLLFSRAEPKHKQEIVRLLKEDGEVVAMTGDGVNDAPALKLADIGVAMGITGTEVAKEASDMVLADDNFSTIVAAVGEGRSIYDNMKAFIRYMISSNIGEVASIFLTSALGIPEGLIPVQLLWVNLVTDGPPATALGFNPPDKDIMKKPPRRSDDSLITPWILFRYMVIGMYVGIATVGVFIIWYTHGSFLGIDLAGDGHSLVSYSQLSNWGQCSSWEGFKVSPFTAGARTFNFDVNPCDYFQGGKIKATTLSLSVLVAIEMFNSLNALSEDGSLLSMPPWVNPWLLLAMSVSFGLHFLILYVPFLAQVFGIVPLSFNEWLLVIAVAFPVVLIDEVLKFVGRCLTAXVPENNQESRRKIRC

SEQ ID NO: 153424 - protein, 106 aa, Oryza sativa
  unsure (1)..(106): unsure at all Xaa locations
  Clone ID: PAT_MRT4530_53381C.1.pep
SSSSFASRKDDARAVVETAGARLRLRLREDAGGGEGCWMPSXCPGPERSIASRRSLTIRRRSGDGGRRARTSRSRSGVHRMQEQHQAYEAALQAKTAPSASARPNP

SEQ ID NO: 153425 - protein, 648 aa, Oryza sativa
  Clone ID: PAT_MRT4530_53382C.1.pep
MAYPSSSMNTLRECRTCQLTSLVQLPDLFGDADEVIPDEEQQEGEDTAPCGEQRLVLLPERSVHALVHGLAEPVQHGARRRVMSCTFPFRSSAAASCVAPPGSSSDRSTQLPKYPLYMGNLINGEIGEVFNMYKLSFRKKKVTAEWRSAVRPMMWRCQWLELRMKDLLSQVSKYDRELALINKGKELQQAVNMTNGSRSESAQSSKSRENSCMERRKRRRLEETVNTSLYIKKHEILSYFFDKQNKGAETDGILIDDDSSGPVGNDVKGGIHTVGLLEPKEYDMVAEQLTLQKFLLTIDGIRSQVLRLQDRLSKVRSKQENMVSLVDHAHIKVSEKRLRTQKRSFSYKKDRYSKSKKKKNLNILSKEEDKPAHAVISTLSKRAPDCQTEVTMYSSEEKSGERCQSHKKAITVDLLLPNGHMGDLCKDNDDVLIDNQAANEGYQPFENAKQPMDKSLELTEKVCETANLRVGSNSSPVEVTSTSAPFRVENASVSLEARSTPGQVVKQEPVFEKPPALKHVYSGKRRRKLKMKEGSGPVSGLTQSKEASKTPATKKKTESTSPAAKKLKIEETTAPDEGKKAVKTHSTGKKRKAGKSCSSTKNQEAENSSCAARKDISESTPSKPRIEKAVLVAVNSRRSQRVRKPKIY

SEQ ID NO: 153426 - protein, 53 aa, Oryza sativa
  Clone ID: PAT_MRT4530_53383C.1.pep
MEILFIGGVVASRVSSIGRLVRSSLRGHQHTLPGRQAGRGRSFQFLRLSFSRE

SEQ ID NO: 153427 - protein, 446 aa, Oryza sativa
  Clone ID: PAT_MRT4530_53384C.1.pep
MLDILEEFINLYGYTYLRLDGSTQPEERQTLMQRFNTNPKFFLFILSTRSGGVGINLVGADTVIFYDSDWNPAMDQQAQDRCHRIGQTREVHIYRLISESTIEENILKKANQKRALDDLVIQRGSYNTEFFKKLDPMEFFSGHSSLHAENQQKDCSLSAGPSNGTNLALSNVDVEAAIRQAEDEADYMALKRLEQEEAVDNQEFSEEAAGRLEEDDLVNEDDTKPDEHTNEEHKYQCSDLVKDKHVALSINQLDEEKAITLAGGDGDIDMLADVKQMAAAAAAAGQASSSFENQLRPIDRYAMRFLELWDPIIDKAAINYQVNVEEEEWELERIEKLKEDLEAEIDEDQEPLSYEYSWTTEEDAVLCATVNEYGPLWELASDSLHSVPEFHITQSLSDLGISDSEFTYFDNLPQEAETEFVPYQYDSDVLSGIEELDPLTDFTDIG

SEQ ID NO: 153428 - protein, 122 aa, Oryza sativa
  Clone ID: PAT_MRT4530_53385C.1.pep
MLTMAGARLSLVFLCFVVEVVIYELVRGASARKTVSEYVLRKGDFFVNITNWGAAMMTDVLPDFKGNLADDVLGLYTIADYVNDNNDFGPITGRIVHRIDRGGFDLHGKAYLHVHQRPMEPD

SEQ ID NO: 153429 - protein, 181 aa, Oryza sativa
  Clone ID: PAT_MRT4530_53386C.1.pep
MAVAGEWWAAALEAKALLQASLPQHLLQIDAEETSGPWRTRWMSWGCLTSIGLSTHLGVLLYSPLHGGDPVCDAVKPGTKCGPLDRYDRMADINWYLQRKICGSGGEPTTLQELRCAPPVFCGHNGAPGVVVSGDDGGIPGVIGSDGGAPGIICSCGGSAPIIVFGDDGSTPRVIASDDDG

SEQ ID NO: 153430 - protein, 449 aa, Oryza sativa
  Clone ID: PAT_MRT4530_53387C.1.pep
MALRMSIAAMSVLAVAAVLVVAGTAAAAAASCPATPPDAGATLQVSHAFGPCSPLGAESAAPSWAGFLADQAARDASRLLYLDSLAVKGRAYAPIASGRQLLQTPTYVVRARLGTPAQQLLLAVDTSNDAAWIPCSGCAGCPTSSPFNPAASASYRPVPCGSPQCVLAPNPSCSPNAKSCGFSLSYADSSLQAALSQDTLAVAGDVVKAYTFGCLQRATGTAAPPQGLLGLGRGPLSFLSQTKDMYGATFSYCLPSFKSLNFSGTLRLGRNGQPRRIKTTPLLANPHRSSLYYVNMTGIRVGKKVVSIPASALAFDPATGAGTVLDSGTMFTRLVAPVYLALRDEVRRRVGAGAAAVSSLGGFDTCYNTTVAWPPVTLLFDGMQVTLPEENVVIHTTYGTTSCLAMAAAPDGVNTVLNVIASMQQQNHRVLFDVPNGRVGFARESCTAA

SEQ ID NO: 153431 - protein, 34 aa, Oryza sativa
  Clone ID: PAT_MRT4530_53388C.1.pep
MRECISIHNGQAGIQVGNACWELYCPEHGIQAGG

SEQ ID NO: 153432 - protein, 100 aa, Oryza sativa
  Clone ID: PAT_MRT4530_53389C.1.pep
MVGGSGRRSCTWAPPGVGPLLRGYAEEAREPIVLLQPPNGTEEGEPVKDGGIELGDKHGGHGSLEEDGGEWVVLLATALLLAAHHTRSLSFIGCPLGKDG

SEQ ID NO: 153433 - protein, 63 aa, Oryza sativa
  Clone ID: PAT_MRT4530_5338C.1.pep
LGALAAPPPGHHYSPHNDDLASSGGTNDDGDGGAAVVVFDDTEGANDRLSCESGYFDDARHAN

SEQ ID NO: 153434 - protein, 86 aa, Oryza sativa
  Clone ID: PAT_MRT4530_53390C.1.pep
TKHSDRYNQKRLWRIRYLYLFLAKDAVELNYIISSAIIVFSTILYSKHPSNVIDVSIVLLVSENYPSLILLAYELLIYMTLLKLQI

SEQ ID NO: 153435 - protein, 93 aa, Oryza sativa
  Clone ID: PAT_MRT4530_53391C.1.pep
MPVLASDEEVAMPEQRSAVVVLVPPDRRGFIPLADWIRDLSAAFPRIDLDSLVPPAPQPHPLVVREERPSPSLVAGLTVEEAKKSVFLSVAFD

SEQ ID NO: 153436 - protein, 134 aa, Oryza sativa
  unsure (1)..(134): unsure at all Xaa locations
  Clone ID: PAT_MRT4530_53392C.1.pep
LNLHLHHRRRAEGGGDRGWEPVGGGGGRPRTAAIGDGGXGRPGARWAAGSKPTATYRPRAARADERHRSLDNRFPLPAAPATARPAAPVVALRSPTSDSPSLPLPPPLAQPRPSPLSARRRAIPPPLLCCTATP

SEQ ID NO: 153437 - protein, 50 aa, Oryza sativa
  unsure (1)..(50): unsure at all Xaa locations
  Clone ID: PAT_MRT4530_53393C.1.pep
PLWVLMAGSFGRTCPMSAHVWGPPGGSWPWAPYVRVVSTWVNAXXPKNPK

SEQ ID NO: 153438 - protein, 1052 aa, Oryza sativa
  Clone ID: PAT_MRT4530_53394C.1.pep
MPGRVTVLDLSSCQLDGLIPPCIANLSSIERLDLSNNSFHGRIPAELSRLEQLRHLNLSVNSLDGRIPAELSSCSRLEVLSLWNNSLQGEIPASLAQLVHIQLIDLSNNKLQGSIPSGFGTLRELKILNLATNTLVGNIPWLLGSGSSLTYVDLGGNGLSEGIPEFLANSSSLQFLSLTQNKLTGALPRALFNTSSLTAIYLDRNKLIGSIPPVTAVAAPIQYLSLAENNLTSEIPASIGNLSSLVGVSLAANNLVGSIPESLSRIPTLEMLILSINNLSGQVPQSIFNISSLKYLELANNSLIGRLPPDIGYKLPNLQRLILSKTRLSGPIPASLVNASKLEIIHLVDIGLTGILPSFGSLSHLQQLDLAYNQLEAGDWSFLSSLANCTQLQRLCLDGNGLQGHLPSSVGNLPSELKWLWLKQNKLSGTIPLEIGNLRSLEVLYMDQNLFTGTIPPSVGNLSNLLVLSFAQNNLSGHVPDSIGNLVKLTELYLDGNNFSGTIPASLGQWRHLEKLNLSHNSFGGSIPSEVFNISSLSQSLDLSHNSFAGPIPLEIGGLINLGSLSISNNRLTSNIPSTLGKCVLLESLHMEENLLVGSIPHFLMNLRSIKELDLSSNNLSGSIPDFFASMNYLKDLNLSFNDFDGPVPSTGIFRNASRVSLQGNDGLCANTPELGLPHCPALDRRTKHKSIILMIVVPIAAIVLVISLICLLTVCLKRREEKPILTDISMDTKIISYKDIVQATKGFSTENLVGSGSFGDVYKGTLELEVDLVAIKVFNLNRHGGPSSFIAECEALKNIRHRNLVKVITLCSTLDPKGEEFKAIIFQYMPNGSLETWLHQKVYDHNQKQVLTLGDRISIALDIAYALDYLHNQSASPLIHCDLKPSNVLLDLQMTAYVSDFGLARFMCTTTAACANSTSLADLKGSIGYIAPEYGMGGPISTKGDAYSYGVLLLEILTGKRPSDDKLKDGLSLHELVESAFPHKLDEILDPIMLQSDLNGGKYHTEIMQSCIIPMVKLGLLCSSISPKDRLGMSQVSAEMGTIRQSFLELQ

SEQ ID NO: 153439 - protein, 185 aa, Oryza sativa
  Clone ID: PAT_MRT4530_53395C.1.pep
MEEKGASPAAAAATSGEPGAAAGTMKVVVAVDASEESLNALSWALDNVIGRRAGAVSVVVVHAQHGPDHFVYPVAAHGIGSIAYAPASAIESMRKAQEEISRKVVSRALDVCKQREVSATGAIVEGDAKEAICQAVEEMHADMLVLGSRGLGKIKRAFLGSVSDYLVHHACCPVLVVKPTKAHDK

SEQ ID NO: 153440 - protein, 64 aa, Oryza sativa
  Clone ID: PAT_MRT4530_53396C.1.pep
RCPAPTTARSGSPRSRPRPPPPSSSPPPLPAPRSSPPPPRETRPSPPSRSRSLTSLPVAPCVRG

SEQ ID NO: 153441 - protein, 74 aa, Oryza sativa
  Clone ID: PAT_MRT4530_53397C.1.pep
MAGKGDANVAGVLPLPPQHGPATSAGGRCQRAWVGAGGSEATASGGKNFAGGDGEARTAQEDQPSPAQSSPTSC

SEQ ID NO: 153442 - protein, 106 aa, Oryza sativa
  Clone ID: PAT_MRT4530_53398C.1.pep
MATTVELDGDGADSGWRWSCAGISGSDGEVHGTEAGCGEPTGDGRRGRGWRRQDVDFMEVDHVVVLCGDLGQRRRGAWHGGRLRGTDGGWPTWTRLATAGRGFYGG

SEQ ID NO: 153443 - protein, 171 aa, Oryza sativa
  Clone ID: PAT_MRT4530_53399C.1.pep
MEEEEAGVRERRGVLKVVVASGTNLAVRDFTSSDPYVVVRLAAMNKKTKVINSCLNPVWNEEMSFSIEEPAGVIKFEVFDWDRFKYDDKMGHAFLELQPVAAAAKLRRALRLTTGETKLRKVAASVDNCLMCDSFVTYADGEIVLDARLRLRDVESGELFVTVKWIDANAK

SEQ ID NO: 153444 - protein, 793 aa, Oryza sativa
  Clone ID: PAT_MRT4530_5339C.1.pep
MAGQTVYYAGQTVPYSSQIGPPVAGLTAPLTTGQTGPWASQTGSLGVSLGFHTTTSTIDFNYYSSPVNTVSHATPHIPNAYNDINRGYPPDTRYGQYNNIVPQQPPFRPPSPPPDPPRPETVEDWFRNIIKENLAKLRNRAREYQKPYPDYYDIFPYPRDYKIPEFTKFSGEDSRTTYLANIAYDRLLDSIKEKLNGQIFLDVDHVLHEALAQESRVDDNSLQASLDENAISCVAKPSDGSDCVNNLCNDAIISIAEPNVGSNCLTSLDNNATTIIAEPSVGSDCVTSLDNDGIAEPSGDSDCVASLENNIIEDIADLNDGSDCITSKDEIALSPKIESQIGHVDVGKDNDNVLRDNSEIGSKEAMHTYQRPYPEHVDSVPYPQEFEVPNFTKFTGEDARTTMEHIGQFIDQCGKADSNDLLKLKLFPLSLSNFASTWYSLLAPNSISTWSQMEHEFHDYFKDASLMEQRPIDTSSVTCETISVTSMPKTGIVSDLLPVSHIDVDKKKGKSVIIGDPRPKNRINNAKAEDHKVAKDESSSSQKTKKPKLTFEMLMAKYEKGLAGQDRFSQKNRSGGSKVKNVWVRKEAKAPEVVAINEEYQGVHVPTRDAAKTIQAEKTKADAVAVDIGGLTEPASRSNRQTTAGLTDPPGRSDRRLVAGLTGTRGRFDRGVEVNLGSLRYFKQDDLSVEDYKTLMGSNFEDVIDKRLKTLKEMKTLQDGVFREQLMGDSLKKYFPSIWFTYVHQKGRGACVYTKFGTYGRNKEKLPKFGKCQASFTGPVRPQRYLLGQRKGD

SEQ ID NO: 153445 - protein, 273 aa, Oryza sativa
  Clone ID: PAT_MRT4530_533C.1.pep
MGRPPMPSTGGPGFRFTQEEVAEMESLLRHLNNGIPDGSLIQSLADRFTASAARAGKVGVRSKQVWYWFQNRKYSQRSRNSTKMLPAASGDHKSAFARSSVQKSVKNSLEGGQLEFEAKSVRDGAWYDVAAFLSHRLSQSGELNITIWVRFSGFGARDDEWIDVRTCVRQRSHPCVSTECAAVLPGDQILCFQEGKHQALYFDAHVLDAQKRRHDARGCRCRFLVCYDHDDSEEIVPLRKMCRRPETDYRLEILHAAGAANAAKEAVVDSVIA

SEQ ID NO: 153446 - protein, 54 aa, Oryza sativa
  Clone ID: PAT_MRT4530_53400C.1.pep
LTKLPLVISSFAFFCGRINGFLGHHNFTSNYPLQRPMHEWLDPGVIQAISTGGP

SEQ ID NO: 153447 - protein, 72 aa, Oryza sativa
  Clone ID: PAT_MRT4530_53401C.1.pep
PSLSGGALAAVGVRQLPSRAGENSLSHAAANVGFCWYVGDKCFRVVLLLLLRCHLVRSRPQLSSLRGLSLFS

SEQ ID NO: 153448 - protein, 54 aa, Oryza sativa
  unsure (1)..(54): unsure at all Xaa locations
  Clone ID: PAT_MRT4530_53402C.1.pep
ATSSLALSVASAPPDDHPTTSSDTSDSMPLFCAVRTRVTLRARVMRXXXISGLG

SEQ ID NO: 153449 - protein, 1343 aa, Oryza sativa
  Clone ID: PAT_MRT4530_53403C.1.pep
MSQSSGIGYETAAHMVEETKNADRSGPIGIITSVLFATVFGWMDLLAVTAVVTNVPSRLPSRDSAGDYAMAQGSYTASERTYGSAVARIVGRGKVTIAFFLFGMACIPTTSRTASAITINGAMPLSRVWYRVNKHEVPLNVVWLGVAVAFVMALTSLGSQVAFQAMGSIATLGMYIAYALPVFFRVTTARRSFVPGPFHLGRYGVVVGWAGVVWVATVTVLFSLPVAYPVANKETFNYTPVAVGGVLLLSVALFGPVFIAALFFPLVRRARRAAAIREYATAGSSPPACNGFACGGAFESSTTGGACSRRGGAPAPFACDCPAAQPCALPCPASMRALVASSALLRRSAARANLSGAGFCNGAPPVSSPLRRFPLQGIKKSEGISVSLRRLQVFALDVQLDYETDPPLDGVKVLEKESTLSVAVSQLASDFDRESNLCLERFSRTRRTPVISTGSLKLDIALGIGGLPKGRMVELFGKEASGKTTLALHVVKEAQKKGGCCAYIDAENAFNPSVAEAIGVNVEKLLIAQPDSAENSLSIVNTLVGGSIDVVVVDSVRTKLSSNQTPGIFKEVACGGNALGFYAAVRMRTSRRELRYNEAQATGIGISVQIIKNKLAPATLKEAGIDIRFGKGICYESEILELASSLGVIMKDDSGYWINGEFLPNKAEAEKFLRENAAVADEICAALAIAAFASFPSGTHIAKIRYSMRSIGVCYGMNGDGLPSRSNVVQLYKSNGIGAMRIYSADREALDALRGSGIDLALDVGERNDVGQLAANADSWVQDNVKAYYPDVKIKYIVVGNELTGTGDAASILPAMQNVQAALASAGLADSIKVTTAIKMDTLAASSPPSAGVFTNPSVMEPIVRFLTGNGAPLLANVYPYFAYRDSQDIDLSYALFQPSSTTVSDPNGGGLSYTNLFDAMVDAVRAAVEKVSGGGSSVVDVVVSESGWPSDGGKGATVENARAYNQNLIDHVAQGTPKKPGQMEVYVFALFNENRKEGDATEKKFGLFNPRQDTAALLLLGVFISIPVDNEGVQSVGVCYGMIGNDLPSKSDVVQLYKSNGITDMRIYLPDVEAMNALRGTGIGLIVGVANDILIDLAANPASAASWVDANVKPFVPAVNIKYIAVGNEISGEPTQNILPVMQNINAALAAASITGVKASTAVKLDVVTNTFPPSAGVFAAPYMTAVAKLLASTGAPLLANIYPYFAYIGNKKDISLNYATFQAGTTVPDPNTGLVYTNLFDAMVDSVYAALDKAGAAGVSIVVSESGWPSAGGDSATIDIARTYVQNLIKHAKKGTPKRPGVIETYVFAMFNENQKPGEATEQNFGAFYPNKTAVYPINFQ

SEQ ID NO: 153450 - protein, 500 aa, Oryza sativa
  Clone ID: PAT_MRT4530_53404C.1.pep
MARAPSFLLLPLLLLVSSSLTPAATGAAFVGLDSFLAAGAARDPSAGNDTFGALPAALLRQLSTPSPLLPTRLLSLSAQVPVTVRLAGASFPPATGRLLESFVNSAVSSSRFLSSRRPHRLALSHKIHLEVAASSSQLAPRAAAAVRAHLDSSAAPFHAAALSSVPYSVVDDLVAEDYRALVDTGSAPSVYIYLLNLGPQPRPYAYTAASSPADAHSPGFSRCLAPVWAGKERYIWIDLGAGPVDYGPALSGEGVLPRGEFHPLAALHGRPRSEKALVADLASLVLSAYKSLLVPSLRIPVHYESSLLVQVFHIHGHERDTSGLDWGSIEQSIRDGNLAYEGQRLKFDLNRIRFLFDNYTLIVSEYLDSKRMRQVLSDSLEELHKVAGVHDNDDYDKVVPVFVFDLDYDKLLLLDRYHQAVAFRDMVISVRTRSSQTVSDYSCNGRHVITMTRNLDRPIIASVLQSMWGAEEHRLHRLHLLQVRRCAQHEQLSVLELGKL

SEQ ID NO: 153451 - protein, 322 aa, Oryza sativa
  Clone ID: PAT_MRT4530_53405C.1.pep
MAAMSASGRRVFLLGALLLVAVSCHGGFGGVGVAEGLSTRYYAKTCPAVESVVRSVMARAVAADRRMGASVLRLFFHDCFVNGCDGSVLLDDAPPGFTGEKGAGANAGSARGFEVVDAAKARVEAACRATVSCADVLALAARDAVALLGGTTWPVRLGRKDARTASQAAANGNLPGPSARDMTALSGAHTVGRARCATFRGRVNGGDANVNATFAAQLRRLCPAGTGGDGNLAPLDAETPDVFDNGYFRELTKQRGLLHSDQELFAAGGGGRSSSQDALVRKYAGNGAKFARDFAKAMVKMGNLAPAAGTPVEVRLNCRKPN

SEQ ID NO: 153452 - protein, 265 aa, Oryza sativa
  Clone ID: PAT_MRT4530_53406C.1.pep
MAAMSASGRRVFLLGALLLVAVSCHGGFGGVGVAEGLSTRYYAKTCPAVESVVRSVMARAVAADRRMGASVLRLFFHDCFVNGCDGSVLLDDAPPGFTGEKGAGANAGSARGFEVVDAAKARVEAACRATVSCADVLALAARDAVALLGGTTWPVRLGRKDARTASQAAANGNLPGPVSSLTSLLATFAAKGLSARDMTALSGAHTVGRARCATFRGRVNGGDANVNATFAAQLRGLGPGGTGGDGYLLPLDAETLRVFDNGFFR

SEQ ID NO: 153453 - protein, 74 aa, Oryza sativa
  Clone ID: PAT_MRT4530_53407C.1.pep
KTMAGQTPGDGKNISPDIRTNIGRGTINPQRYTRGNTLMALYYYTQAHTGAYEEWVYGRNSSPPPPRPNSPANP

SEQ ID NO: 153454 - protein, 559 aa, Oryza sativa
  Clone ID: PAT_MRT4530_53408C.1.pep
MEAQPTAATLPNNSGGPSPAGGGGYPQWVILAEHVPLEDEDEGGDDPNSCFTADAASKVTDTETEAASRSSAGNHVGVSFLLKAPPAVSRLRFRCVPSGSRGGDRRFPSMRVVAVHRDSLLLRMQYRKGRAYDNDIGVDYFLYNAGAAATATLQKEEDDDEEDKEDDGGEETYRGRGYRRWAAPKRWVRDLGVKTTGILHRRGDGDDGDLVVVAELIAKEEDGGTPEELLVLRSDGEWTLTRPPVVHDDGKAEEVSRWKSDLVVPIGDTMLCWVDLYRGIIVCDLFDEIPQLRYVSLPVDAPAAKFDNGRGDYSINPRMCPRQKRSFWVSDNGGELRFLDVSPRCCCGDLGATTCNNARNAFVISSWTLKMNDMRWVMDAMVDATELWSLDAYTGHGLPRVRPEYPLMIMDDPRLVFFVVQEEYQPEISFSDRGKWRVMFDMRSKKILSVSQYDESDTSWQPYSWLTYFPSKISNYFTSIGACSNVAKRPLIVTDKPAMSKGVVASPEEILAALEEVPELDCDDMLRAYSILCDDIGRHRFRSLLGLPQTCNVVELISL

SEQ ID NO: 153455 - protein, 66 aa, Oryza sativa
  Clone ID: PAT_MRT4530_53409C.1.pep
ISIIHPSFHYIFFSNREKPNRNPHVLFGYLHCQSYAHMYQLVRVPTIWQGCAAGVPCWIPLCVLPT

SEQ ID NO: 153456 - protein, 802 aa, Oryza sativa
  Clone ID: PAT_MRT4530_5340C.1.pep
MAGGSRGRRRGRGRRRFAVPPSRNGSSSQGTEWCPVPPEQLPVNEYESLAASLPFSWAAGDLTVYCSRLALTGAAFALFVGLPVASFGGRGGAGGDAVHLALGATGSGILAVTLAVVRMYLGWAYVGNRLLSATVEYEETGWYDGQVKPVLNRVKFTLVGLAVSLILCILLYANTENPKDPFENTVGRAIPGVYDDTSARSFEPDAFCGEPDLGLSSPRLLRLLKLISPPSYSRAGRATRNPSSSEHEVAPRLGSDRAVDAGFGGGGGRLGMAGRRAMRPSGSSMRGVVARLAAARSPAVSFLVAAAAGAALVGGVYFWLVVSSFRLPDSRAVGCLPDGEGSWAIGMYYGKSPLELRPIELEGRSNGNSSAWPVANPVLTCATPTEGGYPSNFVADPFLYVQGDTLFLFFETKTVSTMQGDIGVARSLDQGATWEFLGIALDEAWHLSYPFVFKYENEIYMMPEGNKKKELRLYRATKFPLEWTLEKDCSGTYGRKVKLYKIEKLTKEEYKEVPVNLGIEEAKKGRNAWNGMRYHHIDAQQLASGGWVAVMDGDRVPPRSPDTAADARRERELFGGDGCVCGSVREIVVVWNKGNHPTSDAFDSTVPVRIRVEEINSLNNRFRGDPLIKTRAVLELDDDIMMTCSDVEKGFRVWGGGPEGGRGSDARRVGGRRRQYRNERYARGKKGYNLILTGAAFMDSVFAFCKSWFIEAKEGRDYVHKNFNCADLLMNSLYANPRSSRTAECAHSARGMDTSKRSLLAFSRDTQKHYDIRTKCLAKFASIYGPLPQKWLFGMREDGWDK

SEQ ID NO: 153457 - protein, 68 aa, Oryza sativa
  unsure (1)..(68): unsure at all Xaa locations
  Clone ID: PAT_MRT4530_53410C.1.pep
TAQPAHVRDQRAXVGHLVTXGFKLSDWXTSFFLVCKXEXCDSIESAGDIVRXSEPGDRSTIGVPLNHS

SEQ ID NO: 153458 - protein, 166 aa, Oryza sativa
  Clone ID: PAT_MRT4530_53411C.1.pep
MVWSCEIDGYGDNVELRARRRLCKIQVGGCSGGVEPRVEEVLTTLLLPMSSYKRRVKYFPDCKPRPVHILFAFSVEIALADAFAFLLWQLVELCDPGYKLKEYTLAPASWEYIRSTYSPTVRASSSTSKIIRKDGWKGDNSDEHTLVVVMVLEMIQGMDVWEGWHG

SEQ ID NO: 153459 - protein, 59 aa, Oryza sativa
  Clone ID: PAT_MRT4530_53412C.1.pep
SRVCWPNTTLTMGAMAQVVGKPCFRALLIPRRLIYLQIQGSLYPAHKLVASRLELLGPH

SEQ ID NO: 153460 - protein, 102 aa, Oryza sativa
  Clone ID: PAT_MRT4530_53413C.1.pep
HGLARLVLAVGVFRPQVWRSMSAFSFWLGALGCQFHLVLALWFSVVPVLWVQVFLVRFGRSRGAVSLFPLFFCSFGVFRRLCIGCFLSGVLQWFFCSFFFAY

SEQ ID NO: 153461 - protein, 77 aa, Oryza sativa
  unsure (1)..(77): unsure at all Xaa locations
  Clone ID: PAT_MRT4530_53414C.1.pep
EPDRSXEXRLGKILTSXXWXCWCXGPPEKGRRRRNGCXAXLGSGRRNXXMKTRLXLDVYXXIADFGXFTLXXRRXGX

SEQ ID NO: 153462 - protein, 124 aa, Oryza sativa
  Clone ID: PAT_MRT4530_53415C.1.pep
MVVSPQAVGGGKCPVLGCVVDLNCECLPGQRFSDDAACRGPPERRQQSTASSVRASVLVMSPSHRLRPLCRSASSVERGGCKRRDSLRGMMTFGWLGRQLLGSIVTLAAKPMKSMCGNMQCRLG

SEQ ID NO: 153463 - protein, 88 aa, Oryza sativa
  Clone ID: PAT_MRT4530_53416C.1.pep
MSEMQPHAVCLPFPAQGHITPMMKLAKVLHSRGFHVTFVSTEYNHRRLVRSRGAAAAAGIPGFRFATIPDGLPPSDADATQDPPSLSY

SEQ ID NO: 153464 - protein, 69 aa, Oryza sativa
  Clone ID: PAT_MRT4530_53417C.1.pep
RKKFSPRRDRSGIIRAPPPPPPGGPSVFSHTFRSLKKKKKKKKKKKKKKKKKKKKKKKKKKKKKKKKKK

SEQ ID NO: 153465 - protein, 167 aa, Oryza sativa
  unsure (1)..(167): unsure at all Xaa locations
  Clone ID: PAT_MRT4530_53418C.1.pep
QNNIVPINYITWIVVEASNWKLLVELEHRAYWAIRNWNMDFERAGEXGKCXIAELEEWREKAYHNAKIYKERMKRWHVKRIKIKKFKRGDKVLMFNSRVKLFDHGKLRSKWEGPFDVIDTSSHGAITLHDDSDNIFKVNGQRLKIFLEPDETLDEEVDIIELIDYES

SEQ ID NO: 153466 - protein, 229 aa, Oryza sativa
  Clone ID: PAT_MRT4530_53419C.1.pep
MAGRLVSLVAGHLLADRRGVDDKLRRVRRLVVRIESAVEAAEARRITGRALLAWLSDLVDGAHQGRYFLDAFPVVADHDGDGDVEVAPSSFNPAKRLRVAARRLVFRDGGGVAAELDGVLADLESVSGDLTGFIMMLQSCPPAMHRPLATNIYADSQMFGRQVQRRRVFDFLLQDGDGDDGGEPAAAELGVLSIIGRSGLGKTTLVQHVCDDPAVRRRFSRIILVDFHC

SEQ ID NO: 153467 - protein, 879 aa, Oryza sativa
  Clone ID: PAT_MRT4530_5341C.1.pep
MTKPPSKTKVEPSNVMPVTLDNFEGEDRKAMEEYINELTREALMRATTRTHQGVIIKPRPRPKLAPDVSGYYPGGQTGSQAGPTAHHDAGQTGPWAGQTGTIVPIQAIDPMTNASYLHYFKTFDPPVSTATSNPQVPPHIPNAYNDVSRGYPPDTRQGQYNHIAPQTQPIRPLNPPPNQQGPNNLEDIISDIMRNRFGIETRNRAKVYQKPYPDYHDNVPFPRNYRVPEFTKFSGEDSRTTWEHESRVDDNSLHASLDDSAISCIAEPSNGSDCGNNLCNNAIEDIAELNDGSDCITSESEIASSPKTESQIGHMGVGKDDDNVLRDSSEIESKVAMYTYQRPYPEHVDSVPYPQGFEVPNFTKFTGEDARTTMEHIGQFIDQCGKAGSNDLLKLKLFPLSLSNFASTWYSLLAPNSISTWSQMEHEFHDYFKDASLMEQRPIDTSSVTCETISVTSIPKTGIVSDSLPVSPIDVDKKKGKSVIIGDPRPRNRIKNAKAEDHKVTKDESSSIQRTKKPQLTFEMLMAKYKKGLAGQRFDNQISDSKRPRSSRRKRFGQTSKQSELSTIPTPVVMPWSGGSKVKKFKKVWVRKEAKAREVVAAKEGSQDVHVPTGDAVETKQAKEIEADAVTANIRGLTETAGRSNRQSTAGLTDLTGRSDRRLVAGLTGPRGRSDRRVLQKSGKIESNIGASTSTKNMKNHCFAPGKQPQPKWIPSGLSRSKKRRLQRLRAIGQKEKEAEDVENKTCNNLEPQKASRQVWRSKEPMLDFKSLDEIGKIIDQGRSNRHCTAGLTGGSQRSDRLCMAGLTGQIGWSDRHCVAVEVNLVSLRYFKQDDLSVEDYKTLMGSNFEDVIDKRLKTLKERKTLQDGVFRGQLMENT

SEQ ID NO: 153468 - protein, 102 aa, Oryza sativa
  unsure (1)..(102): unsure at all Xaa locations
  Clone ID: PAT_MRT4530_53420C.1.pep
MLAVLQASLYVGYVTSRRDNRLLSKVLTKRYVFVFSYGIIHLRVNHSPXKPSFSSSALSSXYPRVITIYNSVSGXSPLISDYILIKAFQVHKKIIDLLRAQL

SEQ ID NO: 153469 - protein, 122 aa, Oryza sativa
  Clone ID: PAT_MRT4530_53421C.1.pep
RQQLERIGRGRTGGHAGHERAAGVWATIRRDYRRLGHRSPRQSLSLSLRHGHKLPPDVACDVEAVVGAAKGFHAGATWARGLLERCGAICITAPAAAKHRREPSCLEQQQPLCHHLRIHRRE

SEQ ID NO: 153470 - protein, 1327 aa, Oryza sativa
  Clone ID: PAT_MRT4530_53422C.1.pep
MEGASLHLHVLARIPETAQQAFLRWGLLRDSSNSTKLQHLQEWQEMYSPCFWMDAFALIHLIFIMSILVQFLYKRIRSILLDHEYLGPEKWINLFMLVICTLLFVISARGKTGITLVDNSITEPLLSPSTGQQTEIKRPCPYGKANLLQLVTFSWMNPVFAIGYKKPLDKNDVPDVYGKDSAEFLSDSFKKIIDDVENRHGLNTKSIYTAMFLFIRRKAIMNAGFAVLSASASYVGPSLINDLVKYLGGERQYGLKRGYLLAVAFLSAKVVETVAQRQWIFGARQLGMRLRAALISHIYQKGLRLSCSSRQKHTSGEIINYMSVDVQRITDVIWYTNYIWMLPIQLSLAVYVLHQNLGVGAWAGLAATLAIMACNIPLTRMQKRLQAKIMAAKDGRMKSTTEVLRSMKILKLQAWDMQYLQKLEALRNEEYNWLWRSVRLSAVTTFIFWGAPAFISSITFGACILMGIPLTAGTVLSALATFRMLQDPIFTLPDLLSVFAQGKVSGDRVAKYLQEEELKYDAVIEIPRNDTEYDIEIDHGIFSWELETTSPTLKDVELKVKRGMKVAICGMVGSGKSSLLSSILGEMPKLAGTVRVSGSKAYVPQSAWILSGNIRDNILFGNPYDKEKYDKIIQACALTKDLELFANGDLTEIGERGINMSGGQKQRIQIARSVYEDADIYLFDDPFSAVDAHTGSQLFKDCLMGILKDKTILYVTHQVEFLPTADLILVMQDGNIVQKGKFDELLQQNIGFEAIVGAHSQALESVINAESSSRVTSTENSKPADTDDEFEAENETDDQIQGITKQESAHDVSQDINEKGRLTQDEEREKGGIGKKVYWAYLRAVYGGALVPVTIAAQSFFQIFQASNDQSVLDLEIANKLGWCVFSVIQILGTIGVMSQVAWPVFAIFVPVTVVCFMCQRYYIPTARELARLSQIQRAPILHHFAESLTGASSIRAYGQKDRFRKSNLGLVDNHSRPWFHNISSMEWLSFRLNMLSNFVFAFSLTLLVSLPEGFINPSIAGLAVTYALNLNSQLASIIWNICNTENKMISVERILQYSRIPSEAPLVVDYRRPPNNWPLDGNINIRCLEVRYAEHLPSVLRNISCTIPGRKKVGIVGRTGSGKSTLIQALFRIVEPREGTIEIDNIDICRIGLHDLRGRLSIIPQDPTMFEGTVRGNLDPVNEYSDQRIWEILDKCQLGDIVRQSPKKLDSTVVENGENWSVGQRQLFCLGRVLLKRSNVLILDEATASVDSSTDAIIQETIRDEFRDCTVLTIAHRIHTVIDSDLILVFSEGRIIEYDTPLKLLENENSEFSRLIKEYSRRSKGF

SEQ ID NO: 153471 - protein, 71 aa, Oryza sativa
  Clone ID: PAT_MRT4530_53423C.1.pep
MDETSWHALGALEESLGPALELGRSHRPPCFPSTVLLYVMQHLTKIIRTVVVFNILVVNDQICNISIGDED

SEQ ID NO: 153472 - protein, 78 aa, Oryza sativa
  Clone ID: PAT_MRT4530_53424C.1.pep
GMHHCEQVVGITPPCPCTCTDAHKFGLGRHSQVFFSSSFFPFFARAQILWYSGSGTTDVYDFISKSLYYSLTLLYRLE

SEQ ID NO: 153473 - protein, 104 aa, Oryza sativa
  Clone ID: PAT_MRT4530_53425C.1.pep
NSSQLIPNLQSNSAQPWRRRRWLPPWPSPTSSSSAPSRHRPRRRPGDPPPPPPLAPPLVRPCRTPLPAAPTPPAPRLAAPPGVSPRLSPRIPSPPPPWRTLAMP

SEQ ID NO: 153474 - protein, 341 aa, Oryza sativa
  Clone ID: PAT_MRT4530_53426C.1.pep
MESFASLAGGGSSSTTARLPELISPENPDHISPPPLLYQLLAGPASSARQHGHDGHHHGGGGGEAAAAAVQGQVSPAGAEAAVKAEIMSHPQYSALLAAYLGCKKVGAPPDVLTKLTAVPAAQQLDEADGHPRRRHEPRRDDDPDQLDQFMVSTCSMLTRYREELERPILEAAEFFSRVETQLDSLAESNCEGTGSSEEEQDPSDKQLKHQLLRKYGGSLGDLRQVFSKRTKKGKLPKEARQKLLHWWELHYKWPYPSEMEKMTLAQTTGLDQKQINNWFINQRKRHWKPTPVAGTAFPTMEAAGGGFRHSGHGGGLAAAAALPLYMGRPFVVDGMYRLGS

SEQ ID NO: 153475 - protein, 65 aa, Oryza sativa
  Clone ID: PAT_MRT4530_53427C.1.pep
SLSCLLPFRSARTPARPRRRKPCKTGAESGEASAGSEQIGARIVRISPPGGEIRAGSGGIWGRYR

SEQ ID NO: 153476 - protein, 98 aa, Oryza sativa
  Clone ID: PAT_MRT4530_53428C.1.pep
DFSFDGKQAHTPFSYNQPNSASLPLEKKVGTTVCFTKPNLKQYMDRCVSQSHGITPGLCHQVRLYEKQHHLPPLVGSLESLSITGSPLLNDCSLLFCS

SEQ ID NO: 153477 - protein, 384 aa, Oryza sativa
  Clone ID: PAT_MRT4530_53429C.1.pep
MESFASLAGGGSSSTTARLPELISPENPDHISPPPLLYQLLAGPESSARQHGHDGHHHGGGGGEAAAAAVQGQVSPAGAEAAVKAEIMSHPQYSALLAAYLGCKKVGAPPDVLTKLTAVPAAQQLDEADGHPRRRHEPQRDDDPDQLDQFMDAYCSMLTRYREELERPILEAAEFFSRVETQLDSLAESNCEGTGSSEEEQDPSDKQLKHQLLRKYGGSLGDLRQVFSKRTKKGKLPKEARQKLLHWWELHYDKWPYPSVRTHIYASHLINSTTFFCTKLDLMKMRELLGCTCVYEQEVEKMTLAQTTGLDQKQISNWFINQRKRHWKPTPVAGMTFPTVEAAGGGFRHSGHDGGLAAAAAAAALPLYMGSWPFVVDGMYRLGS

SEQ ID NO: 153478 - protein, 92 aa, Oryza sativa
  Clone ID: PAT_MRT4530_5342C.1.pep
MAGGSRGRRRGRGSRRFAVPPSRNGSSSQGTEWCPVPPEQLPVNEYESLAESLPFSWAAGDLTVYCSRLALTGAAFALLRRPHPSQIVRRRQ

SEQ ID NO: 153479 - protein, 209 aa, Oryza sativa
  unsure (1)..(209): unsure at all Xaa locations
  Clone ID: PAT_MRT4530_53430C.1.pep
VSAPDLKKNEKERKRDAGCLPTQARTCATSRARRPSSSRSPSPVAADAAVARRLPPPPSPAADXCRRRSLTKMLPSPPPLPATVNAAAAAAAAVRRHRSASRRRQRRRPLTPTHIGKKMXGGERIGGEEVWRGSXVAFSCKXNKKIKGCGSFGXEWSCGAAKTXLQPRSLFSSSSSANSAXKKRKIXPFDTTPAPDKLELGARAVTNGA

SEQ ID NO: 153480 - protein, 550 aa, Oryza sativa
  Clone ID: PAT_MRT4530_53431C.1.pep
MGREERFPVWEAALGAGVAAAFATGLVGVYLSMPDSDYSFLKLPRNLEELQILTGHLENYTSDYTIQVLVGYCSVYIFMQTFMIPGTIFMSLLAGSLFGQLRGVALVVFAASAGASSCFFLSKLIGKPLVFSLWPDKLMFFQKQVGINSNILVALLIVLNIRFKILRGIRSLLKRVTPTLPNTFINLASPIVDVPYHIFLLATLIGLIPASYVTVRAGIALGELTSLSDLYRVMITEAPIRMPSPEARRGRRLAGDDRDGRLPSLGLLLRVPCGTIAVAEAGQHGHHDLLGGRGAAPLQEAPGPRGVRVEPLGRADNGVHVTGDVRRQLLEVWRSANEGSSSPPLRSAGRALACRRRPPAFRTDSFRGASMLNMLGISAGVTIAAYGEARFDAFGVMLQLAAVAAEATRLVLIHILLTSKGMSLNPITSLARSHIAPCCLVFLTPPWYFAELRMPPPLHYTPPAARLPPLRSAARSLPTPLRSAARSLARRCCSAPLGRSLRAHPPPRVVFIDLLRPVLEQAAPPPRPAADDVVAALSPIAGADALLSTR

SEQ ID NO: 153481 - protein, 40 aa, Oryza sativa
  Clone ID: PAT_MRT4530_53432C.1.pep
MARMKAHNGTGGWRLSFGATRRRKSYGGNGVVGSSPFSAA

SEQ ID NO: 153482 - protein, 119 aa, Oryza sativa
  Clone ID: PAT_MRT4530_53433C.1.pep
MATARWLGVDSSGCCGGGCDCGHRRYGGLGWLAEGVGDGRIWPVRHRLVEGSETGLAQRGATDGSEGRLGARGAIGGDGGWLGARGAADGGRLDWRERRVRWRRRPRCEEELPVGVARS

SEQ ID NO: 153483 - protein, 41 aa, Oryza sativa
  unsure (1)..(41): unsure at all Xaa locations
  Clone ID: PAT_MRT4530_53434C.1.pep
EXKGRATHASGVRDVLGLPEQVLWRVRLLTGGAYYSYTLHS

SEQ ID NO: 153484 - protein, 51 aa, Oryza sativa
  Clone ID: PAT_MRT4530_53435C.1.pep
LLLPITLTKRIKPRRGLHATIARRANTKMIFNVVGFYYYASTIIFELWLVP

SEQ ID NO: 153485 - protein, 46 aa, Oryza sativa
  Clone ID: PAT_MRT4530_53436C.1.pep
SSNKLKKVKLAHMSSPPFNNLSLSLLSYSRPLPPRHWRRRRPAASV

SEQ ID NO: 153486 - protein, 85 aa, Oryza sativa
  Clone ID: PAT_MRT4530_53437C.1.pep
KKKNFKKKREFKKTPETKSPLPKKNKKNLPKILNPRVSSREKKPECFCKFHPRGGKPLGESWAYLPKGRGKKKFGGGKILVVKQK

SEQ ID NO: 153487 - protein, 139 aa, Oryza sativa
  Clone ID: PAT_MRT4530_53438C.1.pep
PQNGTEASVRWSTTRALGLAVADGRTTPPDRPNAGPRTTRRCRFVFVFGPGHARACHDGAAGRRFQFSDTDLAVARCHLPRQAHRQRCGLREVHVGSRRLHRAPVPRRPAPSPSPAAAAIVVRPLTATNVAMSPLPGVR

SEQ ID NO: 153488 - protein, 1070 aa, Oryza sativa
  Clone ID: PAT_MRT4530_53439C.1.pep
MAELLSALLPALLKKAGESLGTEFSFIGGIERRRSELYTLLLAVNQVINDAEDQASKKPAVKSWIAKLKLAACDADDALDELHYEELRCEALRRGHKINTGVRAFFSSHYNPLLFKYRIGKRLQQIVERIDQLVSQMNRFGFLNCSMPVDERMQTYSYVDEQEVIGRDKERDEIVHMLLSAETDELLILPIVGIGGLGKTTLAQLVFNDVKVKAHFQKHMWVCVSENFSVPVIVKGIIDTAIGNDCGLKFDNLELLQQRLREELGQKRYLLVLDDVWNEDKQKWGALRTLLGSCGMGSAVVVTTRNVKVASIMESISPLCLENLNPEDSWIVFSRRAFGTGVVETPELVEVVHISGDECLALENLAKIKKIPKNVHHMAFEGQQKIGFLMQHCRVIRSVFALDKNDMHIAQDIKFNESPLRVVGLHIFGIEKFPVEPAFMKHLRYLDLSGSYINTLPEAASALYNLQVLILNRCRRLTHLPDGMKFMISLRHVYLDDCARLTSMPAGLGQLINLRTLTKFVPGNESGYRINELNDLKLGGKLQIFNLIKVTNPIEAKEANLECKTNLQQLALCWGTSKSAELQAEDLHLYRHEEVLDALKPPNGLTVLKLRQYMGTTFPIWMENGITLRNIVKLKVTDSINCMKLPSVWKLPFLEVLRLKDMKKLKYLCNGFCSDKECDHQLVAFPKLKLLSLERMESLENWQEYDVEQVTPANFPVLDAMEIIDCPKLTAMPNAPVLKSLSVIGNKILIGLSSSVSNLSYLYLGASQGSLERKKTLIYHYKENLEGTTDSKDHVLAHHFSSWGSLTKLHLQGFSALAPEDIQNISGHVMSVQNLDLISCDCFIQYDTLQSPLWFWKSFACLQHLTIEYCNSLTFWPGEEFQSLTSLKRLDIRYCNNFTGMPPAQVSVKSFEDEGMHNLERIEIEFCYNLVAFPTSLSYLRICSCNVLEDLPEGLGCLGALRSLSIDYNPRLKSLPPSIQRLSNLTRLYLGTNDSLTTLPEGMHNLTALNDLAIWNCPSLKALPEGLQQRLHSLEKLFIRQCPTLVRRCKRGGDYWSKVKDIPDLRVTGD

SEQ ID NO: 153489 - protein, 1468 aa, Oryza sativa
  Clone ID: PAT_MRT4530_5343C.1.pep
MAPPSKWKICSSFSFLILSIFHLYTSTSALTDTISRVQSLSGSTTVVSKEGNFELGFFSPGNTGNLYVGIWFRTTSKKAVIWVANRDNPVTSATSPELKISEDGNLVLLNKFGEPKWSSNGTWNKPRKSIVAVLLDNGNLILRDQGNSSDVIWQSFDHPTDTILSGQRFGINKITGEYQDRVSWKDPEDPAPGPFSNHVDLIRLNQYVSLWNQSKVYWQSGNWTGQAFTSIPGMPLNTEYNYVFINNSHQLKFIYTTKDVSIITRIVLTVNGQLQCHTWSNKSEEWIVQWSLPAALCAVYSVCGPFGVCKTGFDEKCYCLPGFRPVSSRSWDLGAWNQGCVRKTDISCVDSNKHNGQQEKHAFLKIANIKVPGNPMQLNVQSEEECRSICLNNCICTAYAHQHECIVWNSELRDLKQLSAGNVDAIDIYVRLAASDLQVQYNEHKTHHMRLIAVLGSTFVALCAFGAIIWTFRKRNATQKAFSNDDSLILYSYSFLQHCTKNFSDKLGQAPMDEIGEDCQSLESDRFPSQGRSDHRNFFINYDERERFNNIATQYIKTDQDVMKGNVPLPQVAVSPKVTQSIQQEVASTIDSSMTVFKDKLDATFEGKFDEFLRFKFGPLMADYMFKNKASTTASQAPIDQTSSGTDGAAHIAGPTEPDGRSDRDFTVGPTGQTAGPTGYYPGSQTGTQAGLTAPLDVGQTEPWTGQTGTIIPIQGIDPMTNASYLYHLRTFDPPVSTATTNPQVPPHVPNTYNDVARGYSHDTRQGQYNHIAPQTQPIRPPNPPPIQHRPDNMEEIISEIIRDKFGIETRNRAKVYQKPYPNYYDNVPYPRGYRVPKFTKFSGEDSRTTWEHVGQFLAQCGEANSDTFKLRLFSLSLSGTAFTWFTSLPVNSIFSWAQLEQKFHDYFHTSETELRLSDLTSVRHKYNESVADYIERFRDVKNRCYSLKITDKDLADIAYDGLLDSIKERLNGQIFLDVDHVLHEAPAQESRVDDNSLNASLDDNAISCIAEPSDGSDCVNDLCNDAITIIAEPNVGSDCLASLENNATTIIAEPSVGSDCVTSLDNDGIAEPSGGSDCIASLENSIIEDIAELNDGSDCITSESEIALSPKTESQIGHVDVGKDDDNVLRDSSEIESKVAMHIYQRPYPEHVDSVPYPQGFEVPNFTKFTGENAMTTMEHIDRFIDQCGKAGSDDLRKLKLFSLSLSNFASTWYSLLAPSSISTWSQMKHEFHDYFKDANLMEKRPVDDSSVTCEIISVTSMPKTGVVSDPLSVSPIDVDKKKGRRVIIGDPRPKNRIKNAKAEDHKDAKDESSSFQRTKKPKLTFEMLMAKYNKGLAGQRLDNQTSDSKRPRSSCRKRFGQIPKQSEPSTIPTPYKPPVVMPWYPYPMSLYGYPFMYYMPWMHQPPMPYYQEWKESPRSTSSHSSNSRQDRFPQKNRSGGSKVKKVKVWVRKEAKAPEVVAINEES

SEQ ID NO: 153490 - protein, 1222 aa, Oryza sativa
  Clone ID: PAT_MRT4530_53440C.1.pep
MAELLSALLPALLKKAGESLGTEFSFIGGIERRRSELYTLLLAVNQVINDAEDQASKKPAVKSWIAKLKLAACDADDALDELHYEELRCEALRRGHKINTGVRAFFSSHYNPLLFKYRIGKRLQQIVERIDQLVSQMNRFGFLNCSMPVDERMQTYSYVDEQEVIGRDKERDEIVHMLLSAETDELLILPIVGIGGLGKTTLAQLVFNDVKVKAHFQKHMWVCVSENFSVPVIVKGIIDTAIGNDCGLKFDNLELLQQRLREELGQKRYLLVLDDVWNEDKQKWGALRTLLGSCGMGSAVVVTTRNVKVASIMESISPLCLENLNPEDSWIVFSRRAFGTGVVETPELVEVGKRIVEKCCGLPLAIKSMGALMSTKQETRDWLSILESNTWDEESQILPALSLGYKNLPSHMKQCFAFCAVFPKDYEIDKDDLIHLWVSNGFIPSKKMSDIEENGNHVFWELVWRSFFQNVKQIGSIFQRKVYRYGQSDVTTFKIHDLMHDLAVHISGDECLALENLAKIKKIPKNVHHMAFEGQQKIGFLMQHCRVIRSVFALDKNDMHIAQDIKFNESPLRVVGLHIFGIEKFPVEPAFMKHLRYLDLSGSYINTLPEAASALYNLQVLILNRCRRLTHLPDGMKFMISLRHVYLDDCARLTSMPAGLGQLINLRTLTKFVPGNESGYRINELNDLKLGGKLQIFNLIKVTNPIEAKEANLECKTNLQQLALCWGTSKSAELQAEDLHLYRHEEVLDALKPPNGLTVLKLRQYMGTTFPIWMENGITLRNIVKLKVTDSINCMKLPSVWKLPFLEVLRLKDMKKLKYLCNGFCSDKECDHQLVAFPKLKLLSLERMESLENWQEYDVEQVTPANFPVLDAMEIIDCPKLTAMPNAPVLKSLSVIGNKILIGLSSSVSNLSYLYLGASQGSLERKKTLIYHYKENLEGTTDSKDHVLAHHFSSWGSLTKLHLQGFSALAPEDIQNISGHVMSVQNLDLISCDCFIQYDTLQSPLWFWKSFACLQHLTIEYCNSLTFWPGEEFQSLTSLKRLDIRYCNNFTGMPPAQVSVKSFEDEGMHNLERIEIEFCYNLVAFPTSLSYLRICSCNVLEDLPEGLGCLGALRSLSIDYNPRLKSLPPSIQRLSNLTRLYLGTNDSLTTLPEGMHNLTALNDLAIWNCPSLKALPEGLQQRLHSLEKLFIRQCPTLVRRCKRGGDYWSKVKDIPDLRVTGD

SEQ ID NO: 153491 - protein, 250 aa, Oryza sativa
  Clone ID: PAT_MRT4530_53441C.1.pep
MPGLAADQDTVSLVRRVSRALNRRLTDLVGLLFHHKSAGSLGAVAGFAIAVVFAWKFLRSSPARPRRPPGPKRPLVGPAAPDSAARDAAEPANPGKLTTRQIVVKRLGGCRKVTCQLLGVVFEEITPQELQTHATVRPSVVELLLEIAKYCDLYLMETVLDDKSEENALLALESAGLFKTGGLMKEKVLFCSSEVGRTSFVRQLEADFHIDTSLDIISQLSVPSDSHVLHVYLRFFATSGSFGANSLFPQ

SEQ ID NO: 153492 - protein, 282 aa, Oryza sativa
  unsure (1)..(282): unsure at all Xaa locations
  Clone ID: PAT_MRT4530_53442C.1.pep
KELIALQVPKWVIKRIDRFWRSFLWKGEDPDKTNPGSSLVNWQTVCKPKTLGGLGIPDLERFSRALRLRWLWLGWKDENKPWASMNVPCDDTDKRLFQVATTIELGNATKIRFWHDNWLQNSCPKDIAPLCFRLAKRKQKSVQHELHNNNXLVSFRQITSIEEIHELVRLGSMLQGDMLTPCPDDISWNWNDSKVYTSKSAYLFQFQGSFVSIDFSSPWKAPAEPKVKFFGWLVLHQKTLTTXNLLRRHWPCNWICCLCTSAFEDTNYLFSECPFVKKVWSL

SEQ ID NO: 153493 - protein, 111 aa, Oryza sativa
  Clone ID: PAT_MRT4530_53443C.1.pep
MPRVAEPTFGEIDGCDEPTVTRRVPVPREKNLERINSKRGMRSYQLGKQLSFRWTIDTGPRIGVHVRVLPDEWRAGFLALDVPNSRSTAVAAVLAHHSPIAALPAGRRREK

SEQ ID NO: 153494 - protein, 44 aa, Oryza sativa
  Clone ID: PAT_MRT4530_53444C.1.pep
GVGTRVPRRRWRERRCRGRGRPRRRAPRHQAPLGMSMDTDEEEE

SEQ ID NO: 153495 - protein, 259 aa, Oryza sativa
  Clone ID: PAT_MRT4530_53445C.1.pep
MDGCVVAGLINDQAPIPGYRRQKIAFWQIEDRVVVGYFYMGEACWDAVDVVRHNGAFHFLTKGEDIIVGNPVFAEAGAPPQVQWEYRCFSSQGRGYDGQHVVARYLVESSGELLMVVRCSPRPGEFTSAFKVFRMAQPEEDDDAPSLDGRTMLFVGRPCSRSDGDVVRYIWRELPSLEGRMLFVGRGCSRSYDADQYPGFEGGIYFFDHRIAGPLGDAPAQYPCSDCGKWTGKPALQVDRFFPEQDPSNYTSQVWLLNG

SEQ ID NO: 153496 - protein, 108 aa, Oryza sativa
  unsure (1)..(108): unsure at all Xaa locations
  Clone ID: PAT_MRT4530_53446C.1.pep
MSVCTMRAEAIIHXICMFGYTLLLYLCPSSVIYAGMSHAXVGGRRTSKETNXSVDTKARIPRFIKRFKNRXIPRKKFVSRFIAKSIKAYIPCELSINTHIVASLKVDR

SEQ ID NO: 153497 - protein, 917 aa, Oryza sativa
  Clone ID: PAT_MRT4530_53447C.1.pep
MPAIHDLHMLRQSSRAMQTSITEITAGLDKVTELVLALRAGFEAKGVALETTTTTPSPPLATAPPSLPSSLFAAAVEEPVMTMPSSPPSVQSAEVLQPLAVVPFSQLSFASEAAAVLSHLTTVRSALAGAPSTQPSPWKTIVSRRHRSLLRPQQQRGIFQQLPRAAAAITLSVARRRGASRAAPTAWDPGGPRAPGKGAQLLQHSAWLPPQLEDELSRRRDGDVMGRTQPLSLLDKVVGGFTSFLQLLASIEKFSTLYLYHLPSNLSYAKGMRQMYEPFENLARELHMCPCCQRAFTPDEEDEFVKKQRTTCESTADRMNKISLECSNAEDFFQQLNKLNATYEEFVKLGKEAIPLAEKNLKQLLADESEKAQTFDDFVSVLAQVKMDKDAVQVLLQPVETIDRHVQEIQQLGPQVENLEYKLDVRGQGVKSLEQIQLELNSVQRTRDTLNNEVDDLRDQQRTLTDGLTNAQMRWHDIREEKLKASGAVHKFQKAEEDLGHLAEEKEKLTLEEKHLEESLGPLSKERESLLQEHEALKEKLDQEYHQLAERKREFQQEIDALETHNERIKGYLNSKKGEKLNELQEKHTQLQSDLQKSKERKEEKSAELSKNKELLKSQDQLKRNIDDNLNYRRTKDEVERLTHEIELLEDKILSIGSLSTIEADLKQHSQEKDRLLSEYNRCQGTQSVYQSNISKHKLELKQTQYKDIEKRYFNQLLQLKVDGMNVQTTEMANKDLDRYYAALDKALMRFHTMKMEEINKIIKELWQQTYRGQDIDYISINSDSEGAGTRSYSYRVVMQTGDAELEMRGRCSAGQKVLASLIIRLALAETFCLNCGILALDEPTTNLDGPNAESLAGALLRIMESRKGQENFQLIVITHDERFAQLIGQRQLAEKYYRVSKDEHQHSKIEAQEIFD

SEQ ID NO: 153498 - protein, 479 aa, Oryza sativa
  Clone ID: PAT_MRT4530_53448C.1.pep
MGSRVLLLRRMEKGWRPMSRALYPSPGSTSVAPPHELRAPRRCSPSYTSHKVFHRDVGFFSGWQSYNLQIYCCIHTSRPVNSQNHTIAEPQQKQEDVALVDESGRPKAKRKKLKGRRAVTRFLKSLRWKKKREFQRMTAEEKILYKLKLARNKEERLVAALTKIEPDDPSEPTHDPEVLTPEEHFYFLKMGQKSKNYVPVGRRGIYQGVILNMHLHWKKHQTLQVIVKTFTPDEVKEIASELARLSGGIVLDIQEGNTIIMYRGKNYAQPPPEIMSPKVTLPRKKALDKSKYRERLRALRRYIPRLEQELVDLHAQMKLARDYKGQNAAEDITCISDSVNSTSAKEYSSCSVRKRSVSDLLSESIEGSGRLEDENYEVSADSASESITYSESEDLSDIFETDSEEEQVQESKEQPLYLDKLDKFPSENNDNEPDDFEEHLRKIASLSDRTDSSAKELKVSELDEIDKIFLRASSLLKKR

SEQ ID NO: 153499 - protein, 675 aa, Oryza sativa
  Clone ID: PAT_MRT4530_53449C.1.pep
MEHGSIIASAVGVGVGVGVGIGLVSSRLTGLATGGGATAAEVEAELRCLVVDGRDVGVSFDDFPYYLSEQSKLALTSTAFVHLSPTILPNHIRVLSASSRTILLCGPSEAYLQSLAKALANQFSARLLLLDVIDFACKLHHKYGGPSNTQTRERSMTEAAFDRVSSLVGAFNLFRKKEEPTGTGPLSRETGILDLRTSTCCPHNTPSVRVQLSLVPPEKDHDPESSKYLASVKPCWSLNEKVLIQSLYKIIVSASEISPVILYIRDVDDLLGSSEKAYCMFQKMLKKLSGRVIVIGSQFLDDDEDREDIEESVCALFPCILETKPPKDKVLLEKWKTQMEEDSNNNNNQVVQNYIAEVLAENNLECEDLSSINADDDCKIIVAYLEEIITPSVSYHLMNNKNPKYRNGNLVISSESLSHGLRIFQESNDLGKDTVEAKDETEMVVPDNEYEKKIRPTVIPANEIGVTFDDIGALADIKECLHELVMLPLQRPDFFKAIIFIDEVDSMLGKRDNHSENEASRRVKNEFMAHWDGLLSKSNERILVLAATNRPFDLDDAVIRRFEHRIMVGLPTLESRELILKTLLSKETVENIDFKELAKMTEGYTSSDLKNICVTAAYHPVRELLQKEKNKVKKETAPETKQEPKEKTKIQENGTKSSDSKTEKDKLEYSIVSPK

SEQ ID NO: 153500 - protein, 613 aa, Oryza sativa
  Clone ID: PAT_MRT4530_5344C.1.pep
GDTLFLFFETKTVSTMQGDIGVARSLDQGATWEFLGIALDEAWHLSYPFVFKYENEIYMMPEGNKKKELRLYRATKFPLEWTLEKVLIDKPLIDSSLVQYDGLWWLFASDFTRHGIEKNAELEIWYSNSPLGPWSEHKQNPIYRSDKSLGARNGGRLFIFEGSLYRPGQDCSGTYGRKVKLYKIEKLTKEEYKEVPVNLGIEEAKKGRNAWNGMRYHHIDAQQLASGGWVAVMDGDRVPSGDSTRRSLFGYMGFLVAVALVTFVGFVKGAISCYIPPSFWVPLTRRSELSRILPVHRFNLKIRRYSTSIGRNISATKARLSEKTWSNTLFFCVIALIGIVNVCIAVHFLLGGNGAEEAYTHQGQHSQFTMVTMTYEARLWNLKLFVEHYSRCESVREIVVVWNKGNHPTSDAFDSTVPVRIRVEEINSLNNRFRGDPLIKTRAVLELDDDIMMTCSDVEKGFKVWREHPERMVGFYPRMIDGDPLQYRNERYARGKKGYNLILTGAAFMDSEFAFSKYWSQEAKEGRDYVHKNFNCEDLLMNFLYANASSSRTVEYVHPAWAIDTSKLSSVAISRDTQKHYDIRTKCLAKFASIYGPLPQKWLFGMREDGWDK

SEQ ID NO: 153501 - protein, 88 aa, Oryza sativa
  unsure (1)..(88): unsure at all Xaa locations
  Clone ID: PAT_MRT4530_53450C.1.pep
DITNSMTAKEIIXKLGLHSLSKRHWYIQSTCATSGEGLXEVLDWLSIIISLIGNVVARAESLQPGAPLVIDRPPPRGVSVIPITIKIL

SEQ ID NO: 153502 - protein, 812 aa, Oryza sativa
  Clone ID: PAT_MRT4530_53451C.1.pep
MEHGSIIASAVGVGVGVGVGIGLVSSRLTGLATGGGATAAEVEAELRCLVVDGRDVGVSFDDFPYYLSEQSKLALTSTAFVHLSPTILPNHIRVLSASSRTILLCGPSEAYLQSLAKALANQFSARLLLLDVIDFACKLHHKYGGPSNTQTRERSMTEAAFDRVSSLVGAFNLFRKKEEPTGTGPLSRETGILDLRTSTCCPHNTPSVRVQLSLVPPEKDHDPESSKYLASVKPCWSLNEKVLIQSLYKIIVSASEISPVILYIRDVDDLLGSSEKAYCMFQKMLKKLSGRVIVIGSQFLDDDEDREDIEESVCALFPCILETKPPKDKVLLEKWKTQMEEDSNNNNNQVVQNYIAEVLAENNLECEDLSSINADDDCKIIVAYLEEIITPSVSYHLMNNKNPKYRNGNLVISSESLSHGLRIFQESNDLGKDTVEAKDETEMVVPDNEYEKKIRPTVIPANEIGVTFDDIGALADIKECLHELVMLPLQRPDFFKGGLLKPCKGVLLFGPPGTGKTMLAKALANAAGASFLNISMASMTSKWYGESEKCIQALFSLAAKLAPAIIFIDEVDSMLGKRDNHSENEASRRVKNEFMAHWDGLLSKSNERILVLAATNRPFDLDDAVIRRFEHRIMVGLPTLESRELILKTLLSKETVENIDFKELAKMTEGYTSSDLKNICVTAAYHPVRELLQKEKNKVKKETAPETKQEPKEKTKIQENGTKSSDSKTEKDKLDNKEGKKDKPADKKDKSDKGDAGETTLRPLNMEDLRKAKDEVAASFASEGVVMNQIKEWNELYGKGGSRKREQLTYFL

SEQ ID NO: 153503 - protein, 66 aa, Oryza sativa
  unsure (1)..(66): unsure at all Xaa locations
  Clone ID: PAT_MRT4530_53452C.1.pep
RDIPLGLFPKGXEMFAGIVNYHGNRKEFISMSYCRAQQRGPEQDDHPSATGIKSVPITRTGDLFIC

SEQ ID NO: 153504 - protein, 178 aa, Oryza sativa
  Clone ID: PAT_MRT4530_53453C.1.pep
MATMDTTVPHIMDEQEDIMIKSYKCWNPIRPPATLLVSNGRLICIRPPFSARIGLICTGKINNLQRGIDGENLVLNSRQQSLFTRNGPILVGPTKAEIQASQLDLYEGTFPNSNFLSRHYQPISLPAEVEGPEGGAGTQQVWGWETFSTRSSVRKWGQVRKSRTEGRDVPAQPIPNHY

SEQ ID NO: 153505 - protein, 569 aa, Oryza sativa
  Clone ID: PAT_MRT4530_53454C.1.pep
MGLPRSGVLVFGLVCVFQLSHSSSDDDFTKVRAVNLGGWLVVEGWIKPSLFDGISNGDMLVGSLVLGGLELMLWQCRCILLSSHVTVGFSPQDGTQVQLKSVGLQKYLSANGGGGGNLTVDQDVASTWETFRLWRVSYREYQFRCIKGQFLTASNGDVISATADSPGDTESFYIERNNSMLHIKLLNGGYLQVTNNNQLTSNYPSQPGWDDGMATFEMTIVANNLHGDYQLANGLGPDQAMVVLTEHRKNFITGKDFYFLSKNGINAVRIPVGWWIAYDPNPPAPFVSGSLDTLDRAFYWAHFKSAQYGGSDFDIRIYGLKCIIDLHAAPGSQNGMEHSASRDGSVDWPSPANIEKTLDVINFLAQRYANNPSLLGIELLNEPSAGAVPLGTLVSYYKTGYQIVRSYSDKAYVIFCQRIGNADPMELYQADLGPTNTVVDLHYYNLFDPFFEKLNATENIQFIYNNRMPQVQALDKANGPLVFIGEWVNEWNVTDASQTEYQLFGKAQLEVYGEASFGWSYWTVRCNSVHWDYEWNKRNRYLIGGSPLESPKYMLLVAGCLLYLLFILT

SEQ ID NO: 153506 - protein, 132 aa, Oryza sativa
  unsure (1)..(132): unsure at all Xaa locations
  Clone ID: PAT_MRT4530_53455C.1.pep
MHQLLDRKRLFPPQKLANEVRGSPTYILGPLPFHNQCRTIQQSPTLYIGVPXPFTAPSPFPHGLSAIQLLDRKGLFPPQKLDNNMSSSPTYILGPLPFHNQCGTIQKXLHLKVLCNPCATSVSCASRPVMEH

SEQ ID NO: 153507 - protein, 237 aa, Oryza sativa
  Clone ID: PAT_MRT4530_53456C.1.pep
MEASRRWPYAAWFMAVLGLVAVFSSSEAYVFYAGGRDGWVVDPAESFNYWAERNRFQVNDTIVFLHDDEVGGSVLQVTEGDFDTCSTGNPVQRLEDVAAGRSVFRFDRSGPFFFISGDEDRCQKGQKLYIIVMAVRPTKPSEAPEPAGAAGPVSSKSWSWQAFPPAGATTPPPLPPSWGSAPEHAQAPGKSSLGGSGGGEMSRSSSLGAPPPTSGAAGLAGVVASVVVGVLGALLMF

SEQ ID NO: 153508 - protein, 104 aa, Oryza sativa
  Clone ID: PAT_MRT4530_53457C.1.pep
IRYILSQNSVSLTVTLAVSFLSSQTIEQHVKCQLFFNWNKYATTNQLQLISVLLLMMMKRYNCSGKNSETEANNLLLNCCYLERGEVGFEELGPIPVLVLRTRG

SEQ ID NO: 153509 - protein, 882 aa, Oryza sativa
  Clone ID: PAT_MRT4530_53458C.1.pep
MGMAMRCVLVLFSVSPVLLLFNFEMLEVALHLASREKELDTAAVTPSASLSFLSRFRIMLGMNHHRSRGRRHKRYSEAPAPAPAPVPAHQARSEAPAPLVHVPRKGMPSTHRSHIAPARSPVHKVKDGGHTKIPRSAIVALGVVGLCLVVLGVVIAAFSVRRSRKFKKVCTKAFKPFRHGSRDQRSPAATRKVSSHPSPDPLTLSSIVQYQQNLPNLKQSSESKSLSIQSTIPMGTELIVSDHAVINNSQSDEVESFHSIPCSDLSAGSITELPQQICDRRAIMNRSEYFLQTHDSPSDSSYQSLSPDCTSRLSPKDQTFTASSHLSLRSKTCPEKSDGENAEINCHDGLEITCISGSMEHQEAPIEERARINFRNPPSQHIFPPSYRTDTSQSKINIAFTMTNSKVESSSKESSRIETSSSMGIPKPAPPPPPQKNPPPNLKGQCYGQPPPPPPLPLQIQVGKDGSPLPRLKPLHWDKVRAAPNRSMVWNDIRSSSFEFEFDEQMIKSLFAYNLQGSMKDEEAMNKTASTTKHVIEHHRLQNTTILLKTLNANTSQVCNSVIQGNGLSVQQLEALVKMKPTKEEEEKLLNYDGDINMLDPAENFVKVLLTIPMAFPRMEVMLYKENFDDEVAHIKMSFAMIEGACTELKSSKLFLRLLEAVLKTGNRMNVGTLRGGASAFKLDALLKLADIRGTDGKTTLLHFVVKEMARSKGLKALEKLNETPSSCHDTPTEREEYSSMGTEFVSELSNELGNVKKVASIDLDTLRNSISNLSCGLAQLRNLVEKDLASDDKNNNFLQCMKSFLNHAENTMQGLKADEAQVLLNVRELTEYYHGEVSKDESNLLQIFIIVKDFLGLLDKVCREMRGTKHNQTLNLVLPLK

SEQ ID NO: 153510 - protein, 53 aa, Oryza sativa
  Clone ID: PAT_MRT4530_53459C.1.pep
LPLCNNKACSYKFDYMQNCTRVMNHHVGEQHADVSMRRIFPFPINSCQNHCNI

SEQ ID NO: 153511 - protein, 141 aa, Oryza sativa
  Clone ID: PAT_MRT4530_5345C.1.pep
FFFFFFFYRNHSHSFHFTPSINNNLQVHFVFFLFKEKKRKMVPPLRRGSGLASEQSQQANSQTQHCGVTQCIASLPGGWSRAVRVAPRAYLRQTSSCAPACLWVSSTPSVGKFSWGNPGVTPSAQDGLLQPPRGLLFPPLN

SEQ ID NO: 153512 - protein, 152 aa, Oryza sativa
  Clone ID: PAT_MRT4530_53460C.1.pep
MGGTFSTAFAMAVAATSPTIGTAPFSSLTIRLWLRPKPLLFNFWLLLPVPKCFSWVESVSEEGEEECVEEDSEESGAGGEDDDGEDNDEKPRPEPVAASGFEFASAAGGLRGARPVRRADPGVARGRGNGVKVVDPVDMDREQRPSDQFNER

SEQ ID NO: 153513 - protein, 47 aa, Oryza sativa
  Clone ID: PAT_MRT4530_53461C.1.pep
KIKGPRPKMGVMIRPYHNMALKAYIRISVAKPEHTHAIIKGLKALHR

SEQ ID NO: 153514 - protein, 326 aa, Oryza sativa
  Clone ID: PAT_MRT4530_53462C.1.pep
MAATSSTASAMAVAATSPTIATAPFSSLPLCLRLRPKPLLFTSRLLLPVPKSSSWVESVSEEGEEEGVEEDSEESGAAGEDDDGEDNDEKPRPEPVAASGFEFASPPEGYVEPAPFDELPPESPEDVAAAYEALYGPAFSGETVMGNNVFEVKVVDPVDMDREQRPSDEFSERVVQVNRVTKVVKGGRQLSFRAIVVVGDMKGHVGVGVGKAKEVTEAITKAAMNGRRNLVTVPLTKYSTFPHRADADYGAARVMLRPACPGSGVIAGGAVRVVLEMAGVENALGKQLRSKNPLNNARATIKATQMMRQFKDVAAERGLPMEQLWK

SEQ ID NO: 153515 - protein, 77 aa, Oryza sativa
  unsure (1)..(77): unsure at all Xaa locations
  Clone ID: PAT_MRT4530_53463C.1.pep
REWSGSHQQVDPRTARHAGPSPRSPEGSDALPLLLXSPGLGVVMPLSFSRNKGRSLVALSVVSFIIDEESGAGNESE

SEQ ID NO: 153516 - protein, 142 aa, Oryza sativa
  Clone ID: PAT_MRT4530_53464C.1.pep
MLGEVEEGLVEALLGVSEEEKGVEEVVAGGSGKTERVLWAFGAPRVQGADTQCVVVAALTLGDGAGVEDFVARDRRRRRWWLRRRTRGHSGAVAAGPGAAHRHLLHRCSQRRRRRGPGAGHGGGLISLSVFNSFYFTSINPP

SEQ ID NO: 153517 - protein, 384 aa, Oryza sativa
  Clone ID: PAT_MRT4530_53465C.1.pep
MVRWRRWICCNCQVNESDQLENGHAKVLTSNADGVTKGLKDSATEKAQPQNSALTINIPVLSLDELVEKTDDFGSSALIGEGSYGRVYYAVLDSGTKIAVKKLDSNENEPTSEFLTQVALVSRLKHENFVDMLGYCTEGNLRLVAYEFATMGSLHDVLHGRKGVQGAQPGPALDWMQRVRIAVDAAKGLEYLHEKVQPSIVHRDIRSSNILLFEDFKAKVADFNLSNQAPDMAARLHSTRVLGTFGYHAPEYAMTGQLTQKSDVYSFGVVLLELLTGRKPVDHTMPRGQQSLVTWATPRLTEDKVKQCIDPRLNGEYPPKGVAKLAAVAALCVQYEAEFRPNMSIVVKALSPLLTISLLLVLLYRSFKSWEINQISHHMLLLLS

SEQ ID NO: 153518 - protein, 113 aa, Oryza sativa
  unsure (1)..(113): unsure at all Xaa locations
  Clone ID: PAT_MRT4530_53466C.1.pep
NFLSPLHRRCQAAEKSNRHRPPKSPSPSPLPPPXPPRPXPPPPXPRAPPPRPRLPPPXTPARSGPAPPLLLPPSRPPQPPSSPXPSPPPASPPRPCHRPPPPFLLFSSPHAAA

SEQ ID NO: 153519 - protein, 108 aa, Oryza sativa
  Clone ID: PAT_MRT4530_53467C.1.pep
ETRGLQYFFGKTAPRAAFFFKGNTPIKRGDRVPTPHPISMDFPAIKLNLKTPKINRPYFFKEKEPGLGMQSIPKKLPCFFIPETPEWEPSQEPPKVSLFKGLTRDFGQ

SEQ ID NO: 153520 - protein, 35 aa, Oryza sativa
  Clone ID: PAT_MRT4530_53468C.1.pep
MWQVHQCVRMPAAVLPLQGVSAASGATGCPRGTGK

SEQ ID NO: 153521 - protein, 222 aa, Oryza sativa
  Clone ID: PAT_MRT4530_53469C.1.pep
MAAAGVSRSMVLTLLGFCVSVLFIVFVCSRLACALLRRRRGRARLRRASPLAVSGVLSIYVDRHGHHQPSSAAGAASGTGGLDPAAVAAFPTRAFSPAASSSASASTQCVVCLAEYEEKDVLRVLPYCGHGFHVACIDIWLMHHSTCPVCRISLCDYPDSKHTMSPVPSAVIIPLPQCSPGAARSDQCNWLLVGTGHSPRASTICSIGNIREKVDPWFAVIG

SEQ ID NO: 153522 - protein, 535 aa, Oryza sativa
  unsure (1)..(535): unsure at all Xaa locations
  Clone ID: PAT_MRT4530_5346C.1.pep
MTSGNEFNGITTQYIRTDQGVVRGNVPLPQVVVSPKVTSDSPNPYFAIQKTVPTIAGQTVPTIVGQTVLYPGQIAPPVAGVTGSLEISPGFHTMTSSTDFNYYSSPVNAVSHATPHIPNAYNDINRGYPPDTRYGQYNNIVPQQPPFRPPSPPPDPPRPETVEDWFRNIIRENLAKLRNRAREYQKPYPDYYDIFPYPRDYKIPEFTKFSGEDSRTTCEHVDQFLVQCAEPSVGSDCLTSLDDNAITIIAEPSVGSDCVTSLDNDGIAEPSGGSDCVAGLDNSIIEDIVELDDGSDCIIRENEIALSPKTESQIGHVDVGKDNGNVLRDSSEIESKVPMHTYQRPYPEYVDSVPYPQGFDVPNFTKFTGENAMTTMEHIGRFIDQCGKAGSDDLLKLKLFPLSLSNFASTWYSLPAPSSISTWSQMEHEFYDYFKDTSLMEQRPIDTSSVTCETISVTSMPKTGIVGDPLTVSSINVGKKKGKSVIIGDPRPKNRIKNAKAEDHKVVKDGSSXFHKAKKPKPTFEMLMAKYKKGL

SEQ ID NO: 153523 - protein, 72 aa, Oryza sativa
  Clone ID: PAT_MRT4530_53470C.1.pep
ARGLVPNSARGRELVALAPSTMKIKIIAPPERKYSVWIGGSILASLSTFQQMWISKEEYDESGPSIVHRKCF

SEQ ID NO: 153524 - protein, 117 aa, Oryza sativa
  unsure (1)..(117): unsure at all Xaa locations
  Clone ID: PAT_MRT4530_53471C.1.pep
TFFFHGLLCRCHLLPPGCLCRCELPQLHAFFPAPFCSSTCPPPPADRAPXYVVELRVEDGVELNGEEVVGHVNIAMPSKLRFALVNPLKTNCSWPPPSAARRRRLPQTRRFGDFRKN

SEQ ID NO: 153525 - protein, 146 aa, Oryza sativa
  Clone ID: PAT_MRT4530_53472C.1.pep
RTSPTTSASSPPPPLPPPPPPPPPRRPSAGGTGGAGRRSRRGGGGPPARAPAGTPASARATAPPTRGSSSRASSAALRRRRRPAVAGAAPRGTAAPAPATPTPPLRYRRRCRRGRSGTTEARPETTPAAARARHRRRRYQYQPLAP

SEQ ID NO: 153526 - protein, 178 aa, Oryza sativa
  Clone ID: PAT_MRT4530_53473C.1.pep
HPRVALLFISSGVPGDGSSRRTSLPPRPSASIPILPPAPGEADLPCARRLPPFRIPGALSLAQALVMLIMPPCRCHLPPPGCPCRCELPQLHAFFPAPFCSSACPPPPADRAYVIELRVEDGVELNDEEVVGRVNVAMPSKLRFAPVNPLKTNCSWPPPFAARRRRLPQTPLPHTPPS

SEQ ID NO: 153527 - protein, 36 aa, Oryza sativa
  Clone ID: PAT_MRT4530_53474C.1.pep
HTLTQMYIITNHDRYLTMGRIMVYLFLLRPAHLHSD

SEQ ID NO: 153528 - protein, 93 aa, Oryza sativa
  Clone ID: PAT_MRT4530_53475C.1.pep
GGTPDWDPVPDIDILMLSSALDGLDSYTDLVAGSLVADSIFSALTCFPPSQERLLHVSTHVGSSSKQDDSDVSITEEGNTTRTRSDRAAGLAS

SEQ ID NO: 153529 - protein, 279 aa, Oryza sativa
  Clone ID: PAT_MRT4530_53476C.1.pep
MDPNPRLLILLVLLAFSATVAVAEDGESTGGSKVSLGRRAGGFLHGLKKEAVVEGDHGVALDEVGPGLFDALFASLSMILVSEIGDETFIIAALMAMRHPKSIVLSGALSALYVMTVLSTGLGRIVPNLISRKHTNSAATVLYLFFGLRLLYIAWKSDPKGSQKKEMEEVEEKLESGQGKSTLRRFFGRFCTPIFLEAFILTFLAEWGDRSQIATIALATHKNAIGVAVGASLGHTVCTSLAVIGGSMLASKISQRTVATIGGVLFLGFSVSSYFYPPL

SEQ ID NO: 153530 - protein, 95 aa, Oryza sativa
  Clone ID: PAT_MRT4530_53477C.1.pep
LLAKAKVCGPIPFLPQPAKGGSGASPRGRGTPRASQSRGCKPRGAPLNLGVTREERKGRTPPFRRRDSCIMLGLFPFFSLSFFFFFFFFFFICFF

SEQ ID NO: 153531 - protein, 77 aa, Oryza sativa
  Clone ID: PAT_MRT4530_53478C.1.pep
IGGGGAPPPTGAAPPPTPTGAGSGAGAPGGGAVNDMVCSAASAIYSWQDLLPDAQTAGRAPPNLQAPRLGDSHTPCP

SEQ ID NO: 153532 - protein, 655 aa, Oryza sativa
  Clone ID: PAT_MRT4530_53479C.1.pep
MWSFVQDGCWSGIVLGGGGGVVTVAFPITREVIDFPPRLVRPRRDYVGGEWVPSEAAIAHQPKQAAAVRIYRVGDKVEVRRDREVYGRSWFHAKVTKVIDKMSYLVEYSDLEKETVEYLHWQFIRPSEVRSPQDCDLRFGPGAAVEAYCDGAWSPGVVRRIVGEGEYEVSVNGKNNEIVVTKARELLQPQYKWNGKNWRIVSAKRRLSHQFVSGKNRRSPADEHSSDDEQKQDTESSAWTMSRKRSKKEFKATELPEVNLPEDSNAVSREGDSGSNTKYQQDDASNLTTVLQSAVATMKGFEESDSQHNSWDATSTVQPKRRKQAARRLKRYSLERQLKGETHIQQQLDKTLEDNLNANQVTYQELLPLTPPGFESIASGKRSRDWNTDGLSEINLHSSLFDDELAATISSICQDNHNGDAETDNMVTQVAEISHLMDKPMLPFDLSVGYELPGQQALFTKTKDTWSAFEMMEVFRKDPQEPHFLPLQQFPEAVRENMAIGLFWSYIDAGDAISKLRITDSTKIFEKHNTTLNYLVENGFNVQSLQCKLNKALQFKLDRTHSLAYREKLKEQVLEKQSSLSRIGASRDENDSAMAKLEMELGRHRWDGQMMSKKMEDEEAELSRLKAEDSNAQEACRDAEKQFRSVLVEEECINN

SEQ ID NO: 153533 - protein, 73 aa, Oryza sativa
  Clone ID: PAT_MRT4530_5347C.1.pep
AHHCWDRGIWSQPGPRRLLGDHREITARRAEEDPPKQLAPGPPRGGGSGERREMQFSVNEASEGGGGQNQPPA

SEQ ID NO: 153534 - protein, 69 aa, Oryza sativa
  Clone ID: PAT_MRT4530_53480C.1.pep
FFFQGERYIIIKIWGHDKTQDGVNVTWKKYTKDSISQIEQSGCITTFRVKMNLRYPRIFPAWVVHRYGE

SEQ ID NO: 153535 - protein, 429 aa, Oryza sativa
  Clone ID: PAT_MRT4530_53481C.1.pep
MERKQAEYSNLDERYAIQGEKYQGQQYSHIYFTRLHHMRNLLHALVPSWKPHLPVTTVLGLEEGKDCIIVGTLYKHMKLKPSILDEYSKERSAIPLVKPHNFMHPDDHLILEDESGRVTLAGAIPPAAYVTGVVIALHGKETSAGNFLVEDILEAGIPPQITLPSINEDKYVVFVSGLSIGSEKFNPLQFQLLIDHITGHLGDENEQSIASNIVRVVVAGNSVHISPRFFNGQAVASKDQSRIAEPIKELDIMLTQLVASLPVDMMPGSNDPANFSLPQQPLHRCLFAGAATYNTFSSCSNPHQFELDSVRFIGTSGQNIDDLYKYSDAKDKLEFVERTLRWRHLAPTAPNSLGCYPYTDKDPFLVESCPHVYFVGNQDKYETQLLQGLEKQKVRLICIPRFCDSGVAVMLNLRNLECSTLSFSTSFDA

SEQ ID NO: 153536 - protein, 426 aa, Oryza sativa
  Clone ID: PAT_MRT4530_53482C.1.pep
MAIGGWQDERYAIQGEKYQGQQYSHIYFTRLHHMRNLLHALVPSWKPHLPVTTVLGLEEGKDCIIVGTLYKHMKLKPSILDEYSKERSAIPLVKPHNFMHPDDHLILEDESGRVTLAGAIPPAAYVTDEDKYVVFVSGLSIGSEKFNPLQFQLLIDHITGHLGDENEQSIASNIVRVVVAGNSVHISPRFFNGQAVASKDQSRIAEPIKELDIMLTQLVASLPVDMMPGSNDPANFSLPQQPLHRCLFAGAATYNTFSSCSNPHQFELDSVRFIGTSGQNIDDLYKYSDAKDKLEFVERTLRWRHLAPTAPNSLGCYPYTDKDPFLVESCPHVYFVGNQDKYETQLLQGLEKQKVRLICIPRFCDSGVAVMKNRMEFLDRVPSGKEQNRTKLCQRKQNKTASHLLTQVEVKTKDAQSKHHMSHMPF

SEQ ID NO: 153537 - protein, 503 aa, Oryza sativa
  Clone ID: PAT_MRT4530_53483C.1.pep
MGATGDKPPHAVCVPYPSQGDITPTLHLAKLLHARGFHVTFVNTEFNHRRLLASRGAAALDGVPGFVFAAIPDGLPAMSGEDEDATQDIPALCQSTMTNCLGHLLALLSRLNEPASGSPPVTCLVADGLMSFAYDAARVIGVPCAALWTASACGFVGCRLYRELIDRGLVPLRDAAQLTDGYLDTVVDGAAARGMCDGVQLRDYPSFIRTTDLGDVMLNFIMREAERLSLPDAVILNTFDDLERPALDAMRAVLPPPVYAVGPLHLHVRRAVPTGSPLHGVGSNLWKEQDGLLEWLDGHRPSSVVYVSYGSIAVMTSEQLLEFAWGLADSGYAFVWVVRPDLVKGGEGDAAALPPEFHAAVEGRGVLPAWCPQEKVLEHDAVGVFLTHSGWNSTLESLAAGVPMLSWPFFAEQQTNCRYKRTEWGIGMEIGGNARRGEVAAMIREAMEGKKGREIRRRAQEWKEKAVRVTLPGGPGDTNLDRVIHDVLLSCKDKISRVNGESV

SEQ ID NO: 153538 - protein, 503 aa, Oryza sativa
  Clone ID: PAT_MRT4530_53484C.1.pep
MDLLWTLLAEYKCSTLRSPGSGWWKTNKQAQAQGPPAAVAAEEAPTARKECYGVFCTTYDLRADEKTKSWKSLVNVAVSGAAGMISNHLLFKLASGEVFGPDQPIALKLLGSERSIQALEGVAMELEDSLYPLLREVSIGIDPYVVFEDAEWALLIGAKPRGPGMERSALLDINGQIFAEQGKALNSVASRNVKVIVVGNPCNTNALICLKNAPNIPAKNFHALTRLDENRAKCQLALKAGVFYDKVSNMTIWGNHSTTQVPDFLNAKINGRPVKEVIKDTKWLEDEFTKTVQKRGGVLIQKWGRSSAASTAVSIVDAIRSLVNPTPEGDWFSTGVYTTGNPYGIAEDIVFSMPCRSKGDGDYELVKDVAMDDFLWERIKKSEAELLAEKRCVAHLTGEGNAFYAIRSLVNPTPEGDWFSTGVYTTGNPYGIAEDIVFSMPCRSKGDGDYELVKDVAMDDFLWERIKKSEAELLAEKRCVAHLTGEGNAFCDLPGDTMLPGEM

SEQ ID NO: 153539 - protein, 72 aa, Oryza sativa
  Clone ID: PAT_MRT4530_53485C.1.pep
LQSCRLFECRLKMGWTLGLVRALPNQAFLCPCRVISFISRAVWPVGAASVVIFGHVQVFGLDTPQMICRSFF

SEQ ID NO: 153540 - protein, 195 aa, Oryza sativa
  Clone ID: PAT_MRT4530_53486C.1.pep
MQPRVGCQVPPERKNKSRSKKGGDAPNCIDREDRLHRPQDFEADADSTPMTTPGLPNFTVNNYVAELERALEVVETESARARVELEIDRAGRKVAGEEMDDDDTDSASAAVSRPAVPVVAEATTVLLLPVVHEGDGDEALAHAPRRTKTDVDVGIVEVDTEPKAQGWHVAQPYRPRDLYDMGTEPSDSDEDDPTS

SEQ ID NO: 153541 - protein, 108 aa, Oryza sativa
  Clone ID: PAT_MRT4530_53487C.1.pep
MDGGQNQAGDEASEDPYAYYQEGDEDDGTHRGTYMGPSRRWTSMNRAHLRRKQVENGHPYHCGKVVVSNDKRGYREIIITKLTVGFKIPVCRWFEVQQSLVMNRRLAY

SEQ ID NO: 153542 - protein, 84 aa, Oryza sativa
  unsure (1)..(84): unsure at all Xaa locations
  Clone ID: PAT_MRT4530_53488C.1.pep
FXISKRQLIESSIQTSHYPVTAHCNITYSREHIQTSHKRSTSKHSRESPPKTYPDKCSCLITPFQRSSSSRPRCTSTTLSLKKM

SEQ ID NO: 153543 - protein, 624 aa, Oryza sativa
  Clone ID: PAT_MRT4530_53489C.1.pep
MTKISCFSALLAGKRKLSKVTSKIGYGKKSGGNEFQKVKPVEFMEGTDTVDIVKGGGDIVLACDTKVVAFNAAELACEGRDKDDDMVSVKRDTSDVDLVAGGDADSSGYNSDAADKDASSAAAAPDASEPGVGLMVPAMASRLERSCSNIETARRGSKAFELPAKSLSYGDLMALPAGGSATATPVGAPDDSPAASVKTTCSADHVMLKKCSSSQVLPSRSRKLWWRLLLRSHRNLHRPAATVPAAVPSAEQRHDGYASDTLDAGAATADVKNKGIAVGHEPIPNQWMAFSSEATSLDRVSAWVNSLVDNPFKANEECIVEHDDDDDDTARPHCTEIGEPSSFGGKFPAQARRRMAGEAIKANSIIQTLTTSSSVAHISGMGLTVIPVISPFSSLRAVNLSGNLIVQISSGSLPKGLHSLDLSRNKISVIEGLRELTRLRVLNLSYNKISRIGHGLSNCGAIRELYLAGNKISDVEGLHRLLKLAVVDLSFNKITTTKALGQLVANYSSLRALNLVGNPVQTNIGDDALRKSASGLLSRLEYLNKQPVRPQRAREAAKDSVAKAALGNGGWSSRRRPTPSSRRLSQSPGSSVKNRGRDNGSGSHRGSRSRSKSRPHQGFSLARK

SEQ ID NO: 153544 - protein, 1063 aa, Oryza sativa
  Clone ID: PAT_MRT4530_5348C.1.pep
MTSGNKFNRISTQYIRTDQGVMRGNVPLPQVVISSKEKEDYCVSGLGFRWTGRTGDGSRERTAENDPSKTDGRDRSVYDRLTEEGDDDVSDDVTTGGGGSAARACMLAGERRRFGTNGEHQRVERDAANSPVTKGAAEDQRTATATTKKRRRSSGRRRRWCSGDLRRRRRGGRGRRRDGDHDGGLPERRRRLERRRRTAGATAATAALGHTALGRVPYPGQIAPPVAGLTAPLTTGQTGPWAGQTGSLGVSPGFHTTTSSTDFNYYSSLVNTVSHAIPHIPNAYNDINRGYPPDTRYGQYNNIVLQQPPFRPPSPPPDPPRPETVEDRFRNNIMENFAKLRNRARENQKPYPDLIFMTLSHILVVIKFLNLPSLVVRIVGPHGSMFRDIKSRCFNLKITDKDLADITYDGLLDSIKEKLNGPIFLDVDHVLHEALAQESRVDDNSLQASLDENAISCIAEPSDGSDCANNLCNDAIMSIAEPKVGSDCLASLDNNATTIIAEPSDGSDCVTSLDNDGIAEPSNGLDCVASLENNIIGNIAELSDGSDCITSESEIALSPKTESQIGHVDVGKDDDNVLRDSGEIESKVAMYTYQRPYPEHVDSVPYPQGFEVPNFTKFTGEDARTTMEHIGQFIEQCDASLMEKRPVDDSSVTCETISVTPMPKTGIVSNPLPISPIDVDKKKGKSVIIGDPRPKNRIKNAKAEDRKVTKDESSSSQKTKKPKLTFEMLMAKYKKGLAEWKESPRSASSHSSNSRQDRLPQKNRSGGSKVKNVKKVWVRKEAKDPEVVAINEEYQDVHVPTRDAAKTIQAEKTKADVVAVDIGGLTEPAGRSNRQTTAGMTDPPGRSDRWLAAGLTGPRGRSERGALEKSEKIESNTGASTSTKNMKNHWLAPGKQPQPKWIPYGLSRSQKRRLQRLRAIGQKEKEAEDVENKTCNNLEPRTTPKRVWRPKEVKVKRSVISQSSDKSNLMREESSVIRDKSPSHDAMDVSTVFILPSKSCNQESRFCLGGKTLICSSGNQEKMNGDGYNTTSLSRRLLDAKARYLKDPPLKVDRKIRRGSEAC

SEQ ID NO: 153545 - protein, 297 aa, Oryza sativa
  Clone ID: PAT_MRT4530_53490C.1.pep
MTSHARVVSLDPLEAAAAPMPVAGAGWWDLVNGSTAWQDGIFLSLAALYGLVAASSFIQVVRIQYRVPEYGWTTQKVFQLLNFIVNGARCSIFAVRRQVQQVNPEIFQHVILDLPGLAFFTTYAMLALFWAEISYQARGLETEGLRSGFYTINGVIYVIQVLLWALLWHNPNPSMIVLSKLFIAGLSFSAALGFLLYGGRLFFMLKRFPIESKGRQKKLREVGRVATICFLCFLARCIMMCFDAFDKKADLDVLDHPILNFIYYLIVEILPSSLVLFILRRIPSKLRLAQYHPLNSG

SEQ ID NO: 153546 - protein, 110 aa, Oryza sativa
  unsure (1)..(110): unsure at all Xaa locations
  Clone ID: PAT_MRT4530_53491C.1.pep
SRGGRDXLPRRDWLXVIQPMTIPRVQSAQQVFACYLVAPPALXLKFXAYAXLEELVLSDYVGDQWMAAMXMIAMQGLEPREICCSRIELAAESVSVVLPIKMPNGTPSLE

SEQ ID NO: 153547 - protein, 300 aa, Oryza sativa
  Clone ID: PAT_MRT4530_53492C.1.pep
MPRRARSPRLPPPPHHPSPPPPPLLSVGPGAAPRAARPSHGDVFWEEPDDGGSGSDDEDGDGAEAEAERQEATGRRSSFSSFPSPSLFSRLGAARRQEQREEEELRGEIELLLTPEEMAILDQNETPDITKISSPKWHPLHSYALALQIPLMDSLLDSGVDINLLDKDGFTPLHKAVIGKKEAVISHLLRRGANPHVRDRDGATPLHYAVQVGALQTVKLLIKNRVDVNVADNDGWTPLHLAIQSRNRDIAKILLVNGADKTRRTKDGRTALDISLCFGRDFKSYDLAKLVKLVPANRKM

SEQ ID NO: 153548 - protein, 196 aa, Oryza sativa
  unsure (1)..(196): unsure at all Xaa locations
  Clone ID: PAT_MRT4530_53493C.1.pep
TWYPXEFTRIPMTDMRXMRGDPATGYPGRSYRFYQGNPVYKFGYGLSYSKFTRRLVAAAKPRRPNRNLLGGVIPKPAGDGGESYHVEEIGEEGCERLKFPATVEVHNHGGMDGKHSVLVFVQWPNATAGASRPARQLVGFSSQHVRAGEKARLTMEINPCEHLSRARDDGTKVIDRGSHFLKVGEEDDEWEISFDA

SEQ ID NO: 153549 - protein, 69 aa, Oryza sativa
  Clone ID: PAT_MRT4530_53494C.1.pep
MATTTILCVLCFTDSLAYLRFHGNDGSALAAARGARPWGLGRWSVTIGLDLVTTDATGPRAVGDGLGPT

SEQ ID NO: 153550 - protein, 140 aa, Oryza sativa
  Clone ID: PAT_MRT4530_53495C.1.pep
MKTKSSSVLSNSFPILLLIFLAAAASVPQIAMSAEQPEQAAPAAQEATVQIVYLDRPADADPEEFHIRTLAPVLGSEEKAKEAVLYHYKHAASGFSAKLTPQQVEELKKQPGVLQVVPSQTYQLHGPGAGTGTMNTFSLV

SEQ ID NO: 153551 - protein, 149 aa, Oryza sativa
  Clone ID: PAT_MRT4530_53496C.1.pep
MLLQSEATLLELLRRLQQLELTVDTLTVTEIGKAVSSYRKHNSKQIRHLVQLLIDALDGIVTLWQVQPKGPAISLLSTTDCFSPKHRWPEDVAWHPDGELIFAMYSADNGDSQVSLMNHSISGQVRTLLEVAHFFTSIARFSPCVENAH

SEQ ID NO: 153552 - protein, 92 aa, Oryza sativa
  Clone ID: PAT_MRT4530_53497C.1.pep
MARRKNRKCNASILILAKPNRLETYTASRAYLIVKGKDFQWRVEHMWLDFDLAIGNNVITDTTLLIVAGDTRQWSVLTCDLPASASLHDGFT

SEQ ID NO: 153553 - protein, 354 aa, Oryza sativa
  Clone ID: PAT_MRT4530_53498C.1.pep
MASELRALAAVSAAAAAAMAYARFATARLAPGVPRLAALLPVLALLPFLPFAFASIHLRTISAFSLVWLCAFKLLLLAAGRGPLHPSLPLVRFAACAALPIKVVDDEKRKPTTSTSSSSRRLAPAFVLSYAAKAAVFAALVSARCYREGMPAYAVVAFDGAHVYLMLELFLASAAAAARVVLGAELEPQFDRPYLATSLADFWGRRWNLMVPAVLRPSVYLPVRARHGAAAGVAAAFLVSGLMHEVLFYYITLDPGCTTGEVTAFFALHGACVVAERWWLEEARRRAWRWRAPRRAVATAMTLAFVTGTGSWLFFAPVTRSGLDKAIVAECEGFMAFLEEAGWKAAAAARLLPS

SEQ ID NO: 153554 - protein, 80 aa, Oryza sativa
  Clone ID: PAT_MRT4530_53499C.1.pep
FYVVVPLSPLSVFSARHCICLYKSPVVTLCKQFPCVPPVFHSLIVYKNCIKIIILAPFGMGRKKKKKNTQKKKKKKKKLL

SEQ ID NO: 153555 - protein, 738 aa, Oryza sativa
  Clone ID: PAT_MRT4530_5349C.1.pep
MTKPSSKTEVEPSHVIPVTLDDFEGEDRKAMEEYINELTRPKLAPDVVSNDEVSQSINQQIASTIDSSMTNFKDRLDVMFKEKVDGFLRNRLGSLMDDYILKDKAYTTVDQSPIDPIGSNTDGAAFTAGPTGPNGRSDHDTAVGPTGQMAGPTGYYPVGPTGQMAGQTGYYPTGQTGPQAGPIAQHDAGLTGPARTFDPPVSAATTNPQIPPHIPNVYNDISRGYPPDTRQSQYNHIAPQTQPIRPPNPPQNPQGPNNMEDMISDIMRNRFGIKTRNRAKSYKKPYPDYYDNVPFPRNYRVPEFAKFSGEDAEPSDGLDCVTSLDNDGIAEPSGGSDCVDSLENSIIEDIAELDDGSDCTTSESEIALSPKIESQIGHVDVRKDDDNVLRDSGAIESKVVMHTYQRPYPEYVDSVPYPQGFEVPNFTKFIGENAMTTMEHIGRFIDQCGKDGSDDLLKLKLFPLSLQSFASTWYSLLAPNSISTWSQMEHEFHGYLKDASLMEQTPIDTSSVTCETISVSSMPKTGIVSDPLPVSPIDVDKKKGKSFIIGDLRPKNRIKNAKAEDHKVVKDGSSNSQKTKKPKLTFEMLMAKDKKGLAGQRFDNQTSDSKQPRSSRRKRFGQTSKQSEPSTIPTPYKLPFNRSGKSKVKNVKKVWVRKEAKAPEVVAINEESQDVHVPTGDAAKTMQAEKIEADAVTVNIGGPTETADRSNRQSTAGLTDPPGRSDRWLVASRTGPRD

SEQ ID NO: 153556 - protein, 93 aa, Oryza sativa
  Clone ID: PAT_MRT4530_534C.1.pep
MAAVAAEQKKVVVHFRSTGNAPQLKQSKFKIGGNEKFLKIIDFLRRQIHQDTVFLYVNSAFSPNPDELIIDLYNNFGIDGQLVVNYASSMAWG

SEQ ID NO: 153557 - protein, 408 aa, Oryza sativa
  unsure (1)..(408): unsure at all Xaa locations
  Clone ID: PAT_MRT4530_53500C.1.pep
QRCSFYADDVIMFSRPTVNDLSIIKNVLDIFVHALGLMTNMQKSSITPIRCNEEELEVIVNVLPCEIKDFPCSYLGLPLNVKKLSKTDLHALVDKVADDLPMWKASLMNRIGRLISVRVVLFAIPIYLMIAMDLPKWVAKAIDKRRRGFLWSGQENTNGGNCLMAXDRVRRPLAYGGLSILNLEYMSWALWIGWLWLQKIDNSRVWQGLLVQVPRVSHDLFSSAVLSQIGNGQSNLFWVDRWVHGRIILEMAPNLCELKRIIKHCTVAQALDNXKWIMDIRGPLTVQVLAEYIRIWEAVHXVVLQEGILDQHYWKFSKSGVYTSKSAYETFFMGAVKFAPWRRIWKSWAHLKCKFLRWLAIHNCCWTADHLAKRYLPHPXRLPLCDQAKETMQHILVSCVFSRQGLSL

SEQ ID NO: 153558 - protein, 51 aa, Oryza sativa
  Clone ID: PAT_MRT4530_53501C.1.pep
MKKNSLLSKLKDKGAHMSGATILDTAITIINAMRTYLSTPLPNLEVYWAGP

SEQ ID NO: 153559 - protein, 143 aa, Oryza sativa
  Clone ID: PAT_MRT4530_53502C.1.pep
PLFFPLIFAKHPGVFFTTNLGHSNFFFPEIPFWANFEGKKVFWGPGETPPKVFPPPFFPKNQKIFFQNPSPPFSLLKTQKFHLFFWEICAPHPIFRLNPGGYFCPFWYFPPFFFFLRPCFFFQKKTCPSKPPPKTKLLFFFWP

SEQ ID NO: 153560 - protein, 110 aa, Oryza sativa
  unsure (1)..(110): unsure at all Xaa locations
  Clone ID: PAT_MRT4530_53503C.1.pep
MAASPSRRRLWQLRWDLQALGRPPQGDVGIEVAASKGEREGRIGQRAAEDLFVNQYSLMSDGYRSLNDNNXVELSVGSGNDGRTKAVEVTEPGGGALTGESRPSGNGDCS

SEQ ID NO: 153561 - protein, 897 aa, Oryza sativa
  unsure (1)..(897): unsure at all Xaa locations
  Clone ID: PAT_MRT4530_53504C.1.pep
NDKTIVLILKIENPVELKDFXPISLCNIIYKNVSKCLVNRLRPILDDLIPQSQSAFVPGRLITDNTLIAFECFHFIQKNKQPQKVACAYKLDLSKAYDRVDWCFLEQSMVRLGFSHCWVSWFMNYITTVRYSVKFNGTLLSTFAPTRSLWQGDPLSPFLFLFVADGLSLLLDKKVHNGDLSPMHICRQAPSISHLLFAEDTLLFFKANNQQDLVIKEVLENYAQSTSQLINPVKCSMMFGPSSPTAVCESIRSILQVAHPSFEXGFPTSEGRLKKGRFQSMQARIWKRLIQXADNFLSSGGKEILIEVVIQTIPVYVMGLFKLPESVSEDLTRLTRNFWWGAENNKRKTHWKSWDDCLTKPKSFGGLGFRDFKIFNQALLARXAWRLLMNPHSLXARVLKARYYPTGSLIDTCFGGNASPRWRAIEYGLELLKKGIIWRGWNGRSIXVWRDYXIPRDYSRKPITKRGNCRLKWVSNFTTENGAWDLNRLNXHFWPVDANIXCWNIRISSHVEEDCVAWYLDKNGIFLVRSAYMLGLDLSHVNSSSSSSPLRMKKSWNLIWNCNVPQKSRXFAWRADSNCLATMXNKYKRKMEASASCXLCGLEVEDTIHALCRCPLAGYLWLAMKDLGSMXLALHNLRAGSSXIFDHLEPLPEPQRAMFLMILWRNWYVXNEVIHSKPAPPVEASKRFFQSYVHTLLEIRQHDVINLEKGKHVVSVNLSSSVSAKKKTCSXNQRWEPPXRDGYMKLNVDGSFDVDMKNGGTGAILRDCSGKIIAASCSHLHSCGSALKHXLQAIKEGCLLALXWTLFPIVIETDCMVVLHLIQSKEKNLSELAFLVKEMSDLLTGNREFLLRKIHRNQNYTGNVLANKARCDVLXKIWLEREFDDISHIVMNDYIPE

SEQ ID NO: 153562 - protein, 170 aa, Oryza sativa
  unsure (1)..(170): unsure at all Xaa locations
  Clone ID: PAT_MRT4530_53505C.1.pep
LQVIQRRHGPASSVTIXLLLLVASQALVVSGESSSSAMQSKTLNMNKLLNISEDHSPNGGRHWMQRMQPDSCSEQNVVVYQNNAEHLPSGIPTYSVEIINVCTACTVYDVHISCGEFASAELVDPSQFQRIGFNDCLVKGGGRLGPSEAVSFQYSNSFAYPLAVANVACE

SEQ ID NO: 153563 - protein, 65 aa, Oryza sativa
  Clone ID: PAT_MRT4530_53506C.1.pep
NQTQTVEELLRQMRRRYQIYQMQQMQRQCQEPRQGHQPQMQVQVPTRNLNQSQSQEFPISAPGIS

SEQ ID NO: 153564 - protein, 522 aa, Oryza sativa
  Clone ID: PAT_MRT4530_53507C.1.pep
MDDKLLQLLLLALAVSVVSIVTISKLVYRATNKPRLNLPPGPWTLPVIGSLHHLVMRSPSIHRSMRALAEKHGPLMQVWLGEVPAVVVSSTEAAEEVLKNQDARFADRFITTTLGAITFGGGDLAFAPYGERWRHLKMLCTQQLLTAARVRSFRRIREEEVARLVRDLAASAAGGGEVAVNLSERVARLVNDIMVRCCVGGRSKHRDEFLGALCTALSQTSWLTVADLFPSSRLARMLGTAPRRALASRKKMELILEQIIQEREEMTTDRSGDGEAGPTNECFLDVLLRLQKEGDTPIPITMELIVMLLFDIVSGGTETSTIVLNWTMAELIRTPRVMTKAHAEVRQTFQAKSTITEDDDISGLTYLKMVIKESLRMHCPVPLLGPRRCRETCKVMGYDILKDTTVFVNAWAMCRSSIYWNDAEEFKPERFENKCIDYKGSNFEFIPFGSGRRMCAGMNLGMADVEFPLASLLYHFDWKLPDGMSPEDIDMQEAPGLFGGRRTSLILCPITRVAPSDLQVIV

SEQ ID NO: 153565 - protein, 132 aa, Oryza sativa
  Clone ID: PAT_MRT4530_53508C.1.pep
MAAAAAPSSPAAADPTDGFTAVRLGERNFQLQWPYDVKNSSRYSFDGTVRRLWVFSDDKPHTPRSKTKPRTEIRMTKLSARRLLRGVYQIMRGVLVIRRLMVEDFQVPVHTRKQIPGSVQSGWTSSDRDKRL

SEQ ID NO: 153566 - protein, 77 aa, Oryza sativa
  Clone ID: PAT_MRT4530_53509C.1.pep
MAARPPDPELIEFYFLKVRQGDPISPMIFILAMDSLNSLFVKAEELGLLQPLGIPHRVSLYADDVVAFVKPTVGELQ

SEQ ID NO: 153567 - protein, 482 aa, Oryza sativa
  Clone ID: PAT_MRT4530_5350C.1.pep
MGSRFPSHQLSNGLYVSGRPEQPKEKAPVICSTAMPYTGGDIKKSGELGKMFDLHVEKSRKSGPLGNQPSRNTSFGGAGSNSGPVSNALGRSNYSGSISSSVPGAGGSARAKSNSGPLNKHGEPGKKSSGPQSGGVTPMARQNSGPLPPVLPTTGLITSGPISSGPLNSSGAPRKVSGPLDPSVSMKMRATSFAHNPAVTNLNADDGYSIKGSIPKTILWMVILLFLMGFIAGGFILGAVHNPILLVVVVVIFCFVAALVIWNICWGTRGVTGFVSRYPDADLRTAKDGQYVKVTGVVTCGNFPLESSFQRVPRCVYTSTCLYEYRGWDSKAANTEHRQFTWGLRSMERHAVDFYISDFQSGLRALVKTGYGARVTPYVDESVVIDINPDNKDMSPEFLRWLRERNLSSDDRIMRLKEGYIKEGSTVSVMGVVQRNDNVLMIVPPSEPISTGCQWAKCILPTSLDGLVLRCEDTSNIDVIPV

SEQ ID NO: 153568 - protein, 90 aa, Oryza sativa
  unsure (1)..(90): unsure at all Xaa locations
  Clone ID: PAT_MRT4530_53510C.1.pep
MEIQYELNSDRDPNRSPMDLGGPSHGSYIFVRGVIGXGIASVWEYGEKNARGGEGRAGAIDYFLYIDARYFVRVHSTSXRLLPLRSASSG

SEQ ID NO: 153569 - protein, 76 aa, Oryza sativa
  Clone ID: PAT_MRT4530_53511C.1.pep
MSPKKKEVWKMKTRVYKQQKKEEYLVRYIVQKMTLFNRLLHLTASHLMIQSQRDGERGRGRGMVVAEEVARMWARG

SEQ ID NO: 153570 - protein, 123 aa, Oryza sativa
  unsure (1)..(123): unsure at all Xaa locations
  Clone ID: PAT_MRT4530_53512C.1.pep
RGETRNRTPPPPRDATXARDSDGRANAXTQRPGTPAPAQTKAAPAAEAPRPRRATAPPRSSAPPPSEKGPTQGPRGXRDPDNEQEERDQDQGPPRPXTPTKGPRRRKTXREPPPTXHTPTKET

SEQ ID NO: 153571 - protein, 99 aa, Oryza sativa
  unsure (1)..(99): unsure at all Xaa locations
  Clone ID: PAT_MRT4530_53513C.1.pep
GCRIRHENCWHYVVLCNLFSTLFSRSRSLTGSNQPEPSNMXXALPCIGDKTPTVAPKKVKXKTKGKPXRSGTPDSPAMCTRSKNKXPXMGTRXKXKLMD

SEQ ID NO: 153572 - protein, 162 aa, Oryza sativa
  unsure (1)..(162): unsure at all Xaa locations
  Clone ID: PAT_MRT4530_53514C.1.pep
MFLTGTKKIKKHQNMIFGHIGVTGCVRGKNSLRDSRGELLSINADIATRGCDVFSRNQKVQKAPKHDFWTYWSVLGAFVAKTHFATRAANFCQLMPILPLVGAMFLXRNQKVQKAPKHDFWTYWSVLGAFMAKTHFATRAAIFCQLMPILPLVGALFLTGTK

SEQ ID NO: 153573 - protein, 162 aa, Oryza sativa
  unsure (1)..(162): unsure at all Xaa locations
  Clone ID: PAT_MRT4530_53515C.1.pep
MFLTGTKKFKKHQNMIFGHIGVYXCVRGKNSLRDSRGELFSINADIATPGCDVFNRNEKVQKAPKHDFWTYWCVLGAFVAKTHFATRAVNFCQLXADIATRGGVVFNRNQKVQKAPKQDFWTYWSVLGAFVTKTHFATRAMNFSQLMPILPHVSATLYTGIK

SEQ ID NO: 153574 - protein, 156 aa, Oryza sativa
  unsure (1)..(156): unsure at all Xaa locations
  Clone ID: PAT_MRT4530_53516C.1.pep
MPILPHVGALFLTGTKKFKNHQNMIFGHIGVXIGCVRGKNSLRDSRGELLSINADIATRGCDVIYRNQKVQKAPKHDFWTYWSVLGAFVAKTHFATRATNFCQLMPILPHVGAMLYXRNQKVEEAPKHYFLTYWSVLGAFVAKIHFANFCQIMPIL

SEQ ID NO: 153575 - protein, 60 aa, Oryza sativa
  Clone ID: PAT_MRT4530_53517C.1.pep
RRVASFPTAAASFLSSISLFVVASSLVRSARNHVGLLRQVPRLAHPERCPRWNSRQGHPR

SEQ ID NO: 153576 - protein, 438 aa, Oryza sativa
  unsure (1)..(438): unsure at all Xaa locations
  Clone ID: PAT_MRT4530_53518C.1.pep
MRPGITGLRLSGGRGLPVFNAXALVDRWRPETHSFHLPSGEMTITLQDVAMILALPIRGHAVMGKSDTFGWLAQVEQLFSMPLTIEQGQGIEYHLPHRVMRQFGKRQEFPVENISIRVDLDKYDRVKTKKVKDWGLEHSRYIDDWMIAGRNDRTYRLSLRPTCMEADIEEDRDSDEGRNPYDVRTRKVRQRCRKLATRLGYKSVGLDKGRGKGKVHATPSDDDDDDDEDCIAPDAKEIGMLQLSMHLKPQPTSYNLRSTRPGKKSATTLAPCWKGRRQPEGEAEGLGGRGEEGGASHPDFGRFVDPRSLEDVAEVSSVREKGMIAAPASSPRQKVLGGCASHPGAVDAPSLGCLISPSQLKQKFIRDGEVISVIFTGGSAGGGEAANSVGLVVQDRRHVDIQPSPSLCTGEEELLLPQGAATGGPGYETFYYYLIILS

SEQ ID NO: 153577 - protein, 80 aa, Oryza sativa
  Clone ID: PAT_MRT4530_53519C.1.pep
LVICPVKRQVLIEADKQTKILAGYPITHEGACPHHTASGSSICTEKTPHDAASHQLASSGSTAFSHAKRILSHLRLFSNL

SEQ ID NO: 153578 - protein, 612 aa, Oryza sativa
  unsure (1)..(612): unsure at all Xaa locations
  Clone ID: PAT_MRT4530_5351C.1.pep
VASLENNAIEDIAELNDGLDCITSESDIALSPKTSSQIGRVHVXKDDDNVLRNSSEIESKVAMHTYQRPYPEHVDSVPYPQGFEVPNFTKFTGENAMTTIEHIGRFIDQCGKAGSDDLLKLKLFPLSLSNFASTWYSLLAPSSISTWSQMEHEFHGYFKDASLMEQRPINTSSVTCETISVTPMXKTGIVSNSLPINPIDVDKKKGKNVIVKDPRPKTLRINNAKAEDHKVAKDESSSIQRTKKPKLTFDMLMAKYKKGLAGQXFDNQTSDSKRPRSSRRKRFGQTSKQSEPSTIPTPYKPPIVMPWYPYPMSLYGYPFMYYMPWMPQFSTPFHQGWEESPRAVPSHSNSRQDRFPQKNRSGGSKVKKAKKVWVRKEAKAPEVVAIKEESQDVHVPTGDAMEITQAKEIEADAVTVNIGGLTEIAGRSNRQTMAGLTNPPGRFDRRLVAGLTGPRGRSDRGALEKSEKIESNTGGSTSTKNMKNHHLAPGKQPQPKWIPSGLSRSQNRRLQRLRAMGKKEKETKDVENKTCNNLDPRTTSRQVWRPKEVKVKRPVISHSRDKSNLMREESSVIRDKSPSHDAMDVGAVFILPSKSCSRESRFCLRGKTLICS

SEQ ID NO: 153579 - protein, 56 aa, Oryza sativa
  Clone ID: PAT_MRT4530_53520C.1.pep
MASSDIYKVQDANNYSFVFTPWQESQGTTQKGTQAPGGGPSIRDAIDDGELKKMKK

SEQ ID NO: 153580 - protein, 731 aa, Oryza sativa
  Clone ID: PAT_MRT4530_53521C.1.pep
MESLPEDVLLEIFSRLPARSAARLRAMSRSWRAELSSPSFVDLHLRRANTTAPPKLFCCPCDDKLMLADQWCLYDLQLGGGPGRELVRGGEFGDVLPAPLTKPLRGLVLVMCYGRNGVYVCNPSTGGEALALPDTELPSKATFRPSLGPGPPYYRNVAYGLGYCSAAKEFKVVRMFSEGHYEETATRCEVFVLDSPAYWRPAAGKPPPACIVENTGVFLDRSVHFLCSDGGGMVSFNVADESFGSLPAPPPLAAAVYGVADWRIRERMTELDGCLCVCQYACGSDGHGPCRLWLLRRHGGGDETAARWEKLCCIDPIPWPSRSIVPLCMYGEKILMRTGRSVVFAVDAAACGGGAPEILFRPDEHEATAGEFEDTQLPALGLYEESLVPVGRTVEEIVFSSPATRAWSDVLKWLPARTVSELSVVCKAWRAMVTTDRFIRSHAVHANMAARRPRIRFVMDPVGGVPADIDRHTDEIHEPDISPKPFVCSQPCHGLNVGSFSDVLDFVCNPIMDYHEELPLIESDDDYDDDGDDDIFYGRIALGYDEEIYWLVDPALGPASATTTTPPTSACELVALDCRNAVARHHYDVVRGPPMPPCGRVSVLRLHGALCVACSDRDANAIDVWAMQQGAGTAVWSMVYRIELAGYSPEYTSEKTTVMGVDPTSGRILLNTEQSLGYYDPKTGELETIYRVRRMYQEANDGSGAWYDGRFCAVVCEESLFWYPVWRDYAQ

SEQ ID NO: 153581 - protein, 517 aa, Oryza sativa
  Clone ID: PAT_MRT4530_53522C.1.pep
MEDKVLLAVGASLVLVFLSKLISSYAKKPRLNLPPGPWTLPLIGSAHHLVSWSESVHSVIGKLAREHGPVMQLWLGEVPTVVASSPEAAQEILRDHDLIFADRHLTSTTAAITFGGTDVVMAQYGERWRHLRKLLTQELLTVARVRSFRRVREEEVARLVRDLSAAAASGATVNLTDMVNRLVNDTVLRCSVGSRCKYREEFLAALHAILHQTSALSVADLFPSSKLASMVATGPRNVLANRNKVERIIEEIIQERKNQIETDMMSGNDDVGDKAAVESKSCSLDVLLRLQKEGGTPIPITNQVITVLLWDMFGAGTDTSSTTLIWTMAELMRSPRVMAKVQAEMRQAFQGKNTITEDDLAQLSYLKMVLKESFRLHCPVPLLSPRKCRETCKIMGYDVPKGTSVFVNVWAICRDSMYWKNAEEFKPERFEDNDIELKGSNFKFLPFGSGRRICPGINLGWANMEFALANLLYHFDWNLPDGMLHKDLDMQESPGLVAAKCSDLNVCPVTHISSSCA

SEQ ID NO: 153582 - protein, 138 aa, Oryza sativa
  unsure (1)..(138): unsure at all Xaa locations
  Clone ID: PAT_MRT4530_53523C.1.pep
MAVSPVRGVRSLPSHSTASRRQRSRDASRQAGRRRDSGAPAPATPPGWPAPAVPPGARAQPWRRRRAGARTDTSSLRPAAPSGHRLVASRRPQSCSRRPGVPLPAPAPPEXRRSTLPAASTAAPSRQPPRPAGGRRHS

SEQ ID NO: 153583 - protein, 83 aa, Oryza sativa
  Clone ID: PAT_MRT4530_53524C.1.pep
MAVSPVRGVRSLPSHSTASRRQRSRDASRQAGRRRDSGAPAPATPPGWPAPAVPPGHSPAPVVPASRSRLPPRPSPTVDAASG

SEQ ID NO: 153584 - protein, 50 aa, Oryza sativa
  Clone ID: PAT_MRT4530_53525C.1.pep
KSYDVACTRRKLDPLSGALFRVIVQVSSAVVYSLHSQQQLSVFINSKIWI

SEQ ID NO: 153585 - protein, 158 aa, Oryza sativa
  unsure (1)..(158): unsure at all Xaa locations
  Clone ID: PAT_MRT4530_53526C.1.pep
MAQHSNVPKFGNQESEDNVLDTAHSDKAQKGQSGSKMINPNDTKENSDIVSSADLPHSKPRVHSEDPSGKGSVRTTHELQKSREDGDPKQFTDSPARHGGGDSSHRGHGVSSADNRKRPSRQSTGPEHNIDRSPLHRQAXKTPGRDSPSXEGKKSYDS

SEQ ID NO: 153586 - protein, 142 aa, Oryza sativa
  unsure (1)..(142): unsure at all Xaa locations
  Clone ID: PAT_MRT4530_53527C.1.pep
XXXXESXXTLXTSWNGFTIRGDIRAXVXEIVIAGEXXDFXXGPVALNDLDVQVEKKSFQSQTIRNTGGREEXXTPTXGSXXXGRGRXXPWGAMDLFHIECIXSPWAXNLXXXNLEGDXSNQASLDSIRQDHXXGXXXXXMSD

SEQ ID NO: 153587 - protein, 108 aa, Oryza sativa
  Clone ID: PAT_MRT4530_53528C.1.pep
MSYKRWFERKSDEGKGGYLVKVIEAGVSWASKGTLGMKRCLQHRGDAMSYTNSLGADFNVRRRKTGDLRGDGTCGHATVETMEQTPVQGSRILGKHELDLKLVCTVLM

SEQ ID NO: 153588 - protein, 69 aa, Oryza sativa
  Clone ID: PAT_MRT4530_53529C.1.pep
RFDPAFAQRPPSVRPRVRDDHGGGGHHGGGGGGYPGGQCHHGCCGGYGYHGGCRRCCATAYKRGPGGRP

SEQ ID NO: 153589 - protein, 592 aa, Oryza sativa
  unsure (1)..(592): unsure at all Xaa locations
  Clone ID: PAT_MRT4530_5352C.1.pep
NQGISSSTMMSGNEIMSVTLDDFEGEDRKSMEEYIKEITQEALMRACTRTRQGVIIKPGPXKLAPDLTGYYPGGQTGSQAGPTAHHDAGQTGPWAGQTGAIVPIQAIDPMTNASYLYHFKTFDPPVSTAANSPQVPPHVPNAYNDVARGYPPDTRQGQYNHIAPQTQPIRTLNPPPNQHRSDNMEDIISDIIRDRFGIEIRNRARSYKKPYPDYYDNVPYPRNYRVPEFTKFSVEDSRTTWEHESRVDNNSLQASLDKNAISCIAEPSDGSDCVNDLCNDAIEDIAELNDSLDCITSESEIALSPKTNSQIGHVDVGKDDDNVLRDSNEIESKIVMHTYQRPYPEHIDSVPYPQGFEVPNFTKFTDEDARTTMEHIGRFIDQCGKASSDDLLKLKLFPLSLSNFASTWYSLLAPNSISTWSQMEHKFQDYFKDASLMEQRPIDTSSVTCETISVTSMPKTGIDSNPLPISPIDVNKKKRKNVIIGDPRPKTRINNAKAKDHKVANDESSSFQKTKKPKLTFEMLMAKYKRGLAGQRFDNQTSDSKRPRSSRRKRFGQTSKQSEPSTIPTPTRHIFLTCNHVPHTTTVYGRKT

SEQ ID NO: 153590 - protein, 70 aa, Oryza sativa
  Clone ID: PAT_MRT4530_53530C.1.pep
IALMEPDGRHLLAPIHLRHEHFPHAVLGTWQDHPMVGRKPDAQDVVTLTNGHVDFDCEFESHGGSDAVGT

SEQ ID NO: 153591 - protein, 29 aa, Oryza sativa
  Clone ID: PAT_MRT4530_53531C.1.pep
VSGNYSRVRTSEDKLCRKDLSWSILYVLG

SEQ ID NO: 153592 - protein, 45 aa, Oryza sativa
  unsure (1)..(45): unsure at all Xaa locations
  Clone ID: PAT_MRT4530_53532C.1.pep
NDSLITVLARRKAPVGYYVVRFMCXXRGRDLCFLKNCLKXXXXXF

SEQ ID NO: 153593 - protein, 125 aa, Oryza sativa
  Clone ID: PAT_MRT4530_53533C.1.pep
YSSSVSGIVIRCNQCHSSWWRFAVTVVTGLRHEAATQSSLTFIAIVVLAEGLEDIVLRRLTIFFCDWRFASIRASRGFRLLFLDRICRGRLWLDYKFWHLRWPDLISFFIGIIRSTSLGQDICCI

SEQ ID NO: 153594 - protein, 108 aa, Oryza sativa
  unsure (1)..(108): unsure at all Xaa locations
  Clone ID: PAT_MRT4530_53534C.1.pep
MPQIAQICPNPRAVTHHGSPAGAREEEEPADGNPSSPEDVPEEAAAAVEKAPADGEPGGVGRAXARARRRRGRGRGSGGHALGAGGGAWLSGGRVRGGGERLRQAAVG

SEQ ID NO: 153595 - protein, 1116 aa, Oryza sativa
  Clone ID: PAT_MRT4530_53535C.1.pep
MICQRFAVKSGIDIIESFRNLKQYGSVDSYIDKFEELMPLVKRNKPHLNEYFFLDYFISGLKDHIKRPLKSLTIYSLVQTYEHARNYDIPSAHPRQYNSSTQPNTKAPFVPARRELPALEHKPTTGTQPRGAVIVANGEVLTTTTMCIDQPYEIQGHSFATTFRVLDVKGYDIIFGCDWILQHSPVTLNFHSRELSLHINGQLEVTLSDVSIPRGQTLVNSAHMGKLLSHNAVGAVLLVAPTQCHSLQTSSVTHPLVSSVLLQFLDVFAEPQHIPPERDCDHTIPLLPDSKPVNVRPYRLPHHKKNALEELIKQLLDSNVIQPSVSPFSSPAILVKKKDGSWRLCIDYRQLNAQTVKNKFPIPVIEDLLDELHGARYFSKIDLRSGYHQICMHPADIFKTAFSTHMGHFEYIVMPFGLTNAPATFQALMNRILSPYLRKFVLVFFDDILIFSQSIEDHAHHVQLVLQLLRKYNLFAKPSKCTFGQQHVEYLGYIISEQGVATDPAKIVAVQQWPSPLNVTQRRGFLGLAGYYRRFIKDFGIICRPLFNALKKNEFQWETDQQLAFQTIKDKLSQAPVLALPNFSLHFILETDASGYGIGAVLMQQGRPLAYLSKSLGPKAAGFSTYDKEAIAILEALKKWKHYFLASSLLIKTDQASLKYINEQKITDGTQHKLLIKLMSFDYKIEYKKGKENKAADALSRAPQQETLQAIIVIVPEWITQVLATYPADPKCKSLITKLSIHPTARPPFTLHSGILRYKDMIYVGKDTNLLQQQLKESFHSSPLGGHSGERATYQCLKLLFYWPGMKSDIATLVKECPTCQKNKFENKLPPVSDRDRIFTSHVWKKLFEDAGVKLHLSTTHHPQSDGQSERVNQCLETYLRCLTFSRPKKWHSLLDQAEWWYNTNFHTSLNMTPYQALYGQQPPMVGEALLPASLLTGCRNRKQAKAALLDSVKASLDKAQSRMKQYADTKRSERTFQVGDMAYLKMQPYRHNALGLHSSLKLYSCYYGPFRVLNKIGSVAYKLLLPPNFQIHPMFHVSQLKHHIGPKAVPEPGLPLIDSDGNILTAPLAVLERRLIPRHNAPVVQWKILWENLPIEAATWEDASFISKTFPWFNP

SEQ ID NO: 153596 - protein, 64 aa, Oryza sativa
  Clone ID: PAT_MRT4530_53536C.1.pep
LAISIFDNHVSKIHYTEQKQVSNFQLCGRSNYSILSLLERKRNGSMQNFPFFMSVSYKFFFGTS

SEQ ID NO: 153597 - protein, 41 aa, Oryza sativa
  Clone ID: PAT_MRT4530_53537C.1.pep
GTRARVSSCKSCRRLHFCGSAPPQRLQPVLTADLLLFGRTR

SEQ ID NO: 153598 - protein, 183 aa, Oryza sativa
  Clone ID: PAT_MRT4530_53538C.1.pep
MDWPASASTCIAILLFVFLISWPSLCASDDRLAIGKTLSPGATLVSDGGAFAMGFFSPSSNSTNATSSGLYLGIWYNNIPKLTVVWVADQAAPIADHPSSPASTLAVASDGNLVLSDGATGRVLWRTNVTAGVNSSASSGGGVGAVAVLANSGNLVLRLPDGTALWETFENPGNAFLPGMKIG

SEQ ID NO: 153599 - protein, 73 aa, Oryza sativa
  unsure (1)..(73): unsure at all Xaa locations
  Clone ID: PAT_MRT4530_53539C.1.pep
LHSTSYQPEYQTLTQHSPCSIIYSXNSQLSXLNIXNSRGXRGSPXGHCXMGRLSFLGRSSVAWIKPTRXLXRP

SEQ ID NO: 153600 - protein, 57 aa, Oryza sativa
  Clone ID: PAT_MRT4530_5353C.1.pep
ISPLNCSLIVFGSLLFVLTNPFLKLAPACMKRLFLFGAAEHEEFVHPCVANASCSVI

SEQ ID NO: 153601 - protein, 426 aa, Oryza sativa
  unsure (1)..(426): unsure at all Xaa locations
  Clone ID: PAT_MRT4530_53540C.1.pep
MKLLLFVLEKLSGIKINFHKSELFFFGEAKECQEQYSQMFGCQIGKYLMEYLGIPMHFRKLNNHNWEVIEEIIEKKLSSWKGKHMSVGGRLVLVDSILXLSVFMMCFFRYRKDFFERNDYYRSPFFSSXGDNHKKKFRLVRWDIICQPKENGTRVHNIEIQNQCLLRKWLFNMINXKEFGKNCMLRRYLKNHSITQVRSRQGDSHFXSGLMKVKGKLLNLGSWVVNSGKQVRVWEDRWVGNSSLQGKXPFVYNIVYRRNVLIATVPLNVYFSIVLVGHNLVDWHNLGTLILHTNFNENNDSFKWNLHQTGHFFVQSMYLSLVNNGHIXKLKMLVKFKIFLRGFCLNXVILTEDNLAKRSWNGSKRSCFNMNNETIQHRFFDYHIEEFLWRIVYSSVGLIPSNSISNVVGNWLAVSPFSREHHRLSS

SEQ ID NO: 153602 - protein, 383 aa, Oryza sativa
  Clone ID: PAT_MRT4530_53541C.1.pep
MEHHHLLLQLSPPPPPPPLPAAHLMMSPSFFDAGVFADVGGDWMEDLMHLGELFGVGVGGDDDDNGGVDGGVGGGDDRMQEWQNNCEGAGSPDHQPSCGDGDGDGDGDVSPRDGELGDGDGDNSATRKRRDRSKTIVSERKRRVRMKEKLYELRALVPNITKVRTQCLIARVGVAMAAPPCAIANTSLMIAWQMDKASIIADAVVYVKDLQAHARKLKEEVAALEEARPIRPPPPSAAAQRPQRQPRRVAAAAAQLARAADAAAVTTAAAAPHGARVAHVGAAQVGEGRFFVTVECEPAAAAARGGGGGVAAPVCAAVESLSCFTVESSTVGCSPDRVVATLTLKVSEAEEDVSAISECTVKLWVMAALLKEGFRPQPTVQIS

SEQ ID NO: 153603 - protein, 173 aa, Oryza sativa
  Clone ID: PAT_MRT4530_53542C.1.pep
ARGLLKINENGRFTLQCPANASAEDKAKAVAKQDHDLFNVARLITGGLYINICLHDYLRAITNTHHSSSDWSLDPRVAIDKQFDGEGVPRGVGNQVSVEFNLLYRFHSCISKRDEHWINNFFLKLFPGRKAEDLQDVSWDELGQALFNFERSIPKDPSVRTFDGLERQENGTF

SEQ ID NO: 153604 - protein, 88 aa, Oryza sativa
  Clone ID: PAT_MRT4530_53543C.1.pep
SEKKKKKKKKKKKKKKKKKKKKKKKKKKKKKKKKKKKKKKKRKKTKRRSKKKKNRGASFEKKGGGPKKNSKRKSLEKHGRVKTWGTPK

SEQ ID NO: 153605 - protein, 45 aa, Oryza sativa
  unsure (1)..(45): unsure at all Xaa locations
  Clone ID: PAT_MRT4530_53544C.1.pep
NLXLVNPLIAQTKGERTSTSSGNLHVSAATKLHSSPPPKSSFVLQ

SEQ ID NO: 153606 - protein, 239 aa, Oryza sativa
  Clone ID: PAT_MRT4530_53545C.1.pep
MAAAEVQSAAGWGRQLQQDGGGWRKGPWTSQEDALLVEHVRQHGEGRWNSVSKLTGLKRSGKSCRLRWVNYLRPDLKRGKITPQEESIIVQLHALWGNRWSTIARSLPGRTDNEIKNYWRTHFKKGKPSKNIERARARFLKQRREMQQSQQLQQPTLMPTPTPQSKDIIVAETGDARTDDDAGGAAAAVAPSSSSASLSMAGREAEDLIMHQDAMDDLMMCPAMSTTSSSTAPPSPAIS

SEQ ID NO: 153607 - protein, 66 aa, Oryza sativa
  Clone ID: PAT_MRT4530_53546C.1.pep
TMSRYRSTQLPNFLGLNLIRFDKNKINREQCCSFSYCPPMQSVSPKNCGICMIRGLDLWWSPRRGC

SEQ ID NO: 153608 - protein, 58 aa, Oryza sativa
  Clone ID: PAT_MRT4530_53547C.1.pep
CMINYHVIIQKYSSAALGEGATSSGEVHPRNLMVKTNDYGRYDPSPAFSKPRFKIIPN

SEQ ID NO: 153609 - protein, 60 aa, Oryza sativa
  Clone ID: PAT_MRT4530_53548C.1.pep
DLGLRCAVDISSYEGGYISMGLSAQVVVGPQDTAKVNFWGKTSSEDIVADRKYECSDALL

SEQ ID NO: 153610 - protein, 47 aa, Oryza sativa
  Clone ID: PAT_MRT4530_53549C.1.pep
MALALQPTAVRPATEMGSTQASEIKLVNEIRLYIDIFRFLPPDDIYC

SEQ ID NO: 153611 - protein, 460 aa, Oryza sativa
  Clone ID: PAT_MRT4530_5354C.1.pep
MEHEFHDYFKDASLMEKRSVDDSSVTCETISVISMPKTGIVSDSLPVSSIDVDKKKWKSVIIGDPRPKNRIKNAKAEDHKVAKDESSSFQRTKKPKLTFEMLMAKYKKGLAGQRFDNQTSDSKRPRSSRKRRFGQTSKQSEPSTIPTPYKPPVVMPWYPYPMSPFGYPFMYYMPWMHQPPMPYYQEWKESPRSVQNHSSNSRQDRFPQKNRSGGSKVKKVWVRKEAKAPEVVAINEESQDVHVPTGDAAKTIQAEETEADAVTVNIGGLTKTAGQSNRQTTAGLTDPPGRSDRRLVAGLTELRGRFDRGALEKSEKIESNTGAFTLTKNMKNHCLAPGKQPQSKWIPSDLSRSQKRRLQRLRAIGQKEKEAEYMENKTCNNLEPRMTPKRVWRPIEVKGKRSVISQTSDKSNMMREESSVIRDKSPSHDAMDVGAVFVLPLKSCNQESRFCSRGKTLLCL

SEQ ID NO: 153612 - protein, 35 aa, Oryza sativa
  Clone ID: PAT_MRT4530_53550C.1.pep
MESRSTGHPGDDANDIGTLGQPIMLASFVPSTEKD

SEQ ID NO: 153613 - protein, 52 aa, Oryza sativa
  Clone ID: PAT_MRT4530_53551C.1.pep
MDASQKLGAATGHVHGRGHDLVLVCSGSSSFWPSYFLLIREYGSHKSLLQLW

SEQ ID NO: 153614 - protein, 853 aa, Oryza sativa
  Clone ID: PAT_MRT4530_53552C.1.pep
MAMSECAATMPATTAHHHHHHAVAYFGLSCALAVLHRRSGGGGGGCDLGAGPRRCRWSRRRELALRERVGELEREVEELRRRRGEDARANEKVAGIFAAHEQRWFAERKGLRRQVHAVVAAARAREAAHGEAVAELTRQLEEQEQRAAEAAEQEAGRREEAEGKLRAAEEAAERAGKEAQEHAAELRKHRAALAELATARRELEAELARAARRGDAAEAELGEALERRDEAASTAAELSAECARLRRDAEHKDKILSAMLRKSKIDMEDREMLVREVKMCKARRKQAELEADRWRKMWESRHRRGSRSSARCAAAADHPGCSDKLTSPDAAVAPCAHDTKILFVDRVEDADAAKKCRHTAAPPPPPTKDPTTVECVDRYPSHVDDKPVVEEYQDLQEWFKMETEKYTSMIRRRHSAEVEAFTEQLRLKDEKLEAFRWRAASMDAEASRLRSRLQELEARLSEQEQRRAALEALLVARDDENRSLMERLAASDDQGRALDVVVVDGGGGGCEHRAPRSPEGAEAADARLAVAEIKSLEPVSPGGDTNKVFDMEETEARDVEISVQNDVSAAVSPDELQLVEHDDHRAIAPARNSYTCEIEEEEDEEKELPSSSSSSSLALVVAAPPEQRTTASKMDIQALAVSYKIKRLKQQLLVLENLAAAAAGGKDTVTTATNPSTNTAAATAAGGGGGGRQQYPRSYQMMVSFLSKHVKRYQSLEDKIDDLCTRMEESKRGGGRERHHRRRRQRRESEEDGSGDREQSAALARFLEETFQLQRYMVATGQKLLEMQSRIAPSLERAAGNGGGNDGVDMGRFMDVVGALLRDVQRGLEVRIARIIGDLEGTLTFHGILHTTF

SEQ ID NO: 153615 - protein, 495 aa, Oryza sativa
  Clone ID: PAT_MRT4530_53553C.1.pep
MDSGNVVVCDNGTGYVKCGFAGENFPTSVFPCVVGRPLLRYEESLQEQELTDIVVGAACADLRHQLDVSYPVTNGIVQSWDDMGHIWDHAFYSELKVDPSECKILLTDPPLNPVKNREKMIETMFEKYNFAGVFIQVQAVLSLYAQGLLTGLVIDSGDGVTHVVPVVDGFSYPHITKRMNVAGRHITSYLVDLLSRRGYAMNKSADFETVREIKEKLCYLSLLSHFIELKRENMYSYDYKREYQLGLETTILVKSYTLPDGRVIKVGTERFQAPEALFTPDQYQHNIDKTFVEQELIDVEGDGMADMAFRCIQEMDIDNRMTLYQHIVLSGGSTMYPGLPSRLEKEMLDRYLDVVLKGNKDGLKKLRLRIEDPPRRKHMVYLGGAVLAGIMKLNALHTMLLLVNNNPLSNDVQAGNSEFMRRNQARVVAPMIQKCVPSQERPAFREHLQPNSARACATRLQDLGQYKEAKEAAITLLISTMTPSFLDDRVVMADY

SEQ ID NO: 153616 - protein, 529 aa, Oryza sativa
  Clone ID: PAT_MRT4530_53554C.1.pep
MSPTISPVLVFLLLSLHQSICSSAHDAASASSFSSCLATHGVSNFSLPASPSYNTTLNFSIRNLRFTLPDVTRPAAIVLPWSKEDLRRAILCARNSSLAIRVRSGGHSYEGLSYTTENHVPFVVIDLMNLNRVQVDSVSATAWAEAGATLGELYYAVGRSSQSLAFSGGSCSTIGLGGVISGGGFGLLSRKFGLAADNVLDAVLVDPNGRVLDRNSMGEDIFWAICGGGGGSWGVVYAWKLRLVPVPHNVTVFIVDRTGPVEYVAGLVHWWQHVGPNLPDEFYLSVYFPTGSSDGNVSVSFEGQVLGTKQQTLSVLSQSFPMLGVTESDLSEMSWVESTAKFANVGTVSDLSNRSPGTNSYTKSKSDYVKAPISRHDMVEIARYLSAGPPGSIILDPYGGAMARIGSDATPFPHRAGILYSIQYTVYWGQSDQARANEYIIWLRSLYTYMTPHVSKDPRGAYVNYLDLDLGANNWTHPIGGSSMEAVARARSSWGAAYFGNNFNRLVSTKTTIDPSNVFNNAQSIPPLN

SEQ ID NO: 153617 - protein, 72 aa, Oryza sativa
  unsure (1)..(72): unsure at all Xaa locations
  Clone ID: PAT_MRT4530_53555C.1.pep
ARGDLAQNKLNGEIPRLIYWNEVLQYLGLRSNNLEGSLSPEMCQLTGLWYFDVKNNSLTGIIPDTXIGNCTS

SEQ ID NO: 153618 - protein, 91 aa, Oryza sativa
  unsure (1)..(91): unsure at all Xaa locations
  Clone ID: PAT_MRT4530_53556C.1.pep
HMYHDMYMKVMGHMCKSKRVLMESIHESKAXKARENTLSDQFESKRAXSKSSCDSNIVSMQDRLAQGPRETSAPAGAAHAVNAAAPKKAEK

SEQ ID NO: 153619 - protein, 78 aa, Oryza sativa
  Clone ID: PAT_MRT4530_53557C.1.pep
FFFFLNWMTFLFRFVSPRCFNLSHTMMHDFIFSPVLLYCTNFKYPDTTERYGMLPRDAVLYAWVRLPHYLTGHVYGPT

SEQ ID NO: 153620 - protein, 66 aa, Oryza sativa
  Clone ID: PAT_MRT4530_53558C.1.pep
IGDSVGNFFFFLEEKIGIGVGTNPPFRKVGKKFGGSFVPLFPGVVKKQRGIKKEKFSFFKGRFGIF

SEQ ID NO: 153621 - protein, 443 aa, Oryza sativa
  Clone ID: PAT_MRT4530_53559C.1.pep
MAALNGKVVVAVMVVAMVVAAPGASAAITCGQVGSAIAPCISYVTGRGGLTQGCCNGVKGLNNAARTTADRQAACRCRETRASATMSQAAGNPYAAELAAAKKAVTLAARLCQAVQKDILQSGVQSKADQSPVTVADYGSQILVSLVLKMEAPASSSFSMVAEEDSEELRKEGAEEILENITELVNETIVDDGTYSIYFSKEGILSAIDDGKSEGGPSGQHWVLDPIDGTKGFLRGDQYAIALALLDEGKVVLGVLACPNLSLGSIGNLNGGSSGDQVGALFSATIGCGAEVESLQGSPAQNISLCSIDNPVEASFFESYEGAHSLRDLTGSIAEKLGVQAPPVRIDSQAKYGALARGDGAIYLRFPHKGYREKIWDHAAGSIVVTEAGGLVTDASGNDLDFSKGRFLDLDTGIIATNKQLMPSLLKAVQDAIKEQNQAASPL

SEQ ID NO: 153622 - protein, 879 aa, Oryza sativa
  Clone ID: PAT_MRT4530_5355C.1.pep
MMSGNEIDEVTWEDLDAEQRKMMVVTQELLMKSYIRNNQGVVKGNVSLPQVVVSPKTGIGYMQNLDNGMTGHGIGLTASYAGQTVSTMAGQTVYYAGQTVPPMAGQTMSYPGQIAPPVAGLTVQLTTDQTGPWAGQTGCLAGQTGLSIAGQTGSLGVSPGFHTTISSTDFNYYSSPVNTVSHATPHIPNVYNDPNRGYSHDNWYGQYDNIAPQQPPFRLSNPPPNSSTPEIMEERNRARVYQKPYPNFYDVVPYPPDYKIPEFTEFSGEDSRTTCEHRFRDIKSRCFSLKIIDKDLANIAYNGLLDSIKERLNGHIFLDVDHVLHEALAQESRVDDNSLNASLDDSAISCIAEPSDGSDCVNDLCNDAVTSIAEPCDGSDCVTRLDNDGIVELSDGSDCVASLENSIIENIAELSDGSDCITSESEIALSPKIESQVGQVDVGKDDDNVLRDSSEIESKVAMHTYQRPYPEHVDSVPYPQGFEVPNFTKFIGEDARTTMEHISQFIDQCGKAGSDDFLKLKLLPLSSSNFASTWYSLLAPNSISTWLQMEHEFHDYFKDASLIEQRPIDDSSVICETISVTSMPKTGIVSDPLSVSSIDVGKKKGKSVIIGDPRPKNRIKNAKAEDQKVAKDESSSFQNAKRPKLTFEMLMTKYKKGLAGQRFDNQTSDSKRPRSSRTERFGQTPKQLEPSTIPTPYKPPVVMPWYLHPMSPFGYPSMYYMPWMPQPPMPCHQGWKQSPRTVPSHSNSRQDRFPQKNRSGGSKVKKVKKCGIYLAFEIAQPRKPILFGGQDINMLMKKSREMNGDGYDITFLSRRLLDAKARLMNKPSQYFKQDDSSVEDFKTLMGSNFEDVIDKRLKTLKEMKTLQDGVFREQLMGNT

SEQ ID NO: 153623 - protein, 81 aa, Oryza sativa
  Clone ID: PAT_MRT4530_53560C.1.pep
CRRLGHRPPWQSSSSPSRLTHEPSQPSPLLRREPPPPPPRALEPSPLPLDRWVDAATREKRNGKRKRKRKRRKRKGMEMGG

SEQ ID NO: 153624 - protein, 108 aa, Oryza sativa
  Clone ID: PAT_MRT4530_53561C.1.pep
LILFKQLAYDANFLRVPDIRWLGVFTSDFEDYRLPDCCLLHLSSEDRRKAEGILSRCYLHREAPQWRLELEAMLQKGVKFEIEALSACSISFLSEEYIPKKIKQGRHI

SEQ ID NO: 153625 - protein, 177 aa, Oryza sativa
  unsure (1)..(177): unsure at all Xaa locations
  Clone ID: PAT_MRT4530_53562C.1.pep
MFAHKTLRIPGPGRHPPAATATATAPSHPPPSSSPAATHRPREWATRRPPKNSALDPLLKPPQSTVAPSMDLLQNYYGLARPPKGDPENEGTEMATYSIGQHTKARSLSTGFSLVNGEVDDAEKPIRRRQKSDAEFSTREGNSGGVLMKAGXGLALRPKSGSRPEINNSQQDLVATA

SEQ ID NO: 153626 - protein, 113 aa, Oryza sativa
  unsure (1)..(113): unsure at all Xaa locations
  Clone ID: PAT_MRT4530_53563C.1.pep
QKTLMAFIVAIFCAQISEAXIRFKHRHSHQKALDRPLYSXLQVLDRQLTRRXEVLTDDSLPGHARAEMQCWQHLLDLSLXCQCTDIRQMVMSYNESMPMHIEQGCSSTLIENY

SEQ ID NO: 153627 - protein, 375 aa, Oryza sativa
  unsure (1)..(375): unsure at all Xaa locations
  Clone ID: PAT_MRT4530_53564C.1.pep
GGEEGGPRRDRAAARGQQAAGRGGRHGRRGEAEAEGRERKRVAVVGAGADGGGVDAVPPPMSSCGRYIFHRVCRLDTIAGVAIKDGVEVADVKRVNGLTTDLQMFAHKTLRIPLPGRHPXXAFACNNNNINYFREWATRRPPKNSALDPLLKPPQSTVAPSMDLLQNYYGLARPPKGDPENEGTEMATYSIGKAITVCLDDELRIGDQXNKLIYESDPHPGQHTKARSLSTGFSLVNGEVDDAEKPIRRRQKSDAEFSTREGNSGGVLMKAGPGLALRPKSGSRPEINNSQQDLVATAVPSYGDGLQAVRKSSSTPEFQDSDNSIASVWLKSKWNLKPDAFTLPLPILLLDSIPKPIFDTFPKQIAAWRNKAARD

SEQ ID NO: 153628 - protein, 165 aa, Oryza sativa
  unsure (1)..(165): unsure at all Xaa locations
  Clone ID: PAT_MRT4530_53565C.1.pep
VPSVLLLVFVTTTDKSASVRNTAIALHLRVTPKGYRTQGTITRTGFRAVTTCCLPLTNPWDTQQTKRSFSEPGAECTDNSGTPPEFFLESYTHRGRSRMSAKLPGTPSELPXPSLHLILMYKRYNRASCNSAQSCVYXVSESSSFYKLQMTVTSMGNDQCALQPS

SEQ ID NO: 153629 - protein, 83 aa, Oryza sativa
  Clone ID: PAT_MRT4530_53566C.1.pep
LTLHNMKHAHLGLMLFCLVLLVFFAIPAQIRGQSTSRAPVGVSIGELKLSVCFSAPPSWSCCSKDNLCYPSLEACLEKCKYDE

SEQ ID NO: 153630 - protein, 109 aa, Oryza sativa
  Clone ID: PAT_MRT4530_53567C.1.pep
MASQVSAATSVPQLHGLRTYCCSTSMGTLASVTMTKKRSQGIRCDYIGSSTNVIMGTTTTLMLIAGRFGLAPSTNRKSTVGLKMEARECWLQTWDPAGFTLAYTLACGA

SEQ ID NO: 153631 - protein, 110 aa, Oryza sativa
  Clone ID: PAT_MRT4530_53568C.1.pep
MPTTRVAARTATDRSRRRRGRPEVSKAARSPNPLPSRKFRARTPMPHAHSPDPPPPLRAGRRRSRSRSLGGIRPSRGRHRRIHRPLMPSLPGGALGEGEGEEKRKKERRG

SEQ ID NO: 153632 - protein, 74 aa, Oryza sativa
  Clone ID: PAT_MRT4530_53569C.1.pep
MSSNISEGMGQQPIGKIFLLQRHGQRNVVLSFKKGRRCPEPQVKQIWNHLGGVEMVDSCGMGHMDEPPGAIHRG

SEQ ID NO: 153633 - protein, 503 aa, Oryza sativa
  unsure (1)..(503): unsure at all Xaa locations
  Clone ID: PAT_MRT4530_5356C.1.pep
CLRRGSRLRRDHCSWDGVTCSDGGGGGGVVXXLSLSDMKLTWTLPAAMCDFVNLTRLDLSNTGLPGTFPGATLYRCSQLRFLDLANNTLHGALPRDIGNLSPVMEHLNLSWNSFSGAVPPGVAALPALKSLHLNSNRFTGVYPAAEIGKLAGLECLTLADNAFAPAPVPVAFAKLTKLTYLWMSDMSIIGEIPEALSSLTELTLLDLSSNNLTGAIPAWVWRHEKLECLYLFNNSLTGELPRNVMTENLIEIVLSMNQLRGEMSEDFGNLRNLTLLSLYMNNLTGTIPASIGLLPKLSTIWLDNNNLFGELPPELGKHSPLSSIGISNNNLSGPLPETLCANGELYGIYASNNNFSRNLPANLGDCVLLQELVLDNNRFSGDFPEKIWLLPELEIVMIPNNFTGVLPAVLSSNIQHIEMGNNMFSGSIPRTAIGLLVFTAENNQLDGELPADMSKLANLIELKVPDNRITGPIPASIKLLLNLKSLNLSGNQLIGAISDGVRP

SEQ ID NO: 153634 - protein, 140 aa, Oryza sativa
  Clone ID: PAT_MRT4530_53570C.1.pep
RRRGWTPARTTRASPGRPRRPRARRRAPPARRAARRRRGPSPRTAGGSANCRRRLRRPPARPRRSPRARPSAPPAAVQRRHRRRRISPPPPHRRGRGPGRSRGRRRSRGACRRRAPRPRRARRRRRRRGRGRRRPRGEEP

SEQ ID NO: 153635 - protein, 73 aa, Oryza sativa
  Clone ID: PAT_MRT4530_53571C.1.pep
NQMGNLILVSLRHLYKWGVPILIHSIPLTLHSHLIKILPFKNESDTSKVFTTGTLSFYSKIYCPLSPPEALTI

SEQ ID NO: 153636 - protein, 774 aa, Oryza sativa
  Clone ID: PAT_MRT4530_53572C.1.pep
MNLDKAIDAPGGFLFEWWSIFWDIFIAQTDREHSDVATSYIETQQAKAEHQKQQQQQYHHQQHQHQQIQMQQMLLQRAAQQQQQQQQQQQQQQQQLHRDGSHLFNGITSGFSGNDLLMRHNPAIANAMAVKIYEERLKLPSQRDSLDEASIKLQQRYGEKYGQVLDPNQASLLKAATCGQSSGPILPGGIGDLSSTLQQVQARSPRLPIPEQNIKIRINPILTNRDVISDGSLLGLQGSNHGGRNFMLKGWSLMQKPLLQSPQQFQQLQFLTPQQQLLLQTHQNMASLPANDVETRRLWMLHNNKNMAIHLDGQINNNSGHIIPNIGSPDQIGGSRNKIDMLIAKIAHLQQLQQQGHSQQQQLQQSTISHQQAQSLNQLHHQQAQSIGSMLDGSIPNSFGLANRASKKRKKIVSSSERANSSGTSNNVGSSSSSAPSTPFTHTPRDEMSMPQLKYNGGKSKSLSMFGYDDTKSLISPTNPLGDVDQLQEDGSLDENVESFLSQEDMDPQETMGHCMDASKGFGFIEVAKARASTNKVDCCHFSSDGKLLATGGHDKKVVLWFTDDLNIKAIFEEHSMIITDVRFSSIMTRLATSSFDKTIRVWDANNPEYSLHTFIGHSTSVVSLDFHPNKEDIICSCDSDGEVRCWSIDNGSCVNCVRVFNGGAIQLRFQPHHGKYLAVVSEKMISILDAETLHIYRSDLQGHLKNIHSVCWDATGGYLASVSEDSIKSLELWDIREKNIVTINNAHDGMIPSLAASNASGLIASIIIGQNGS

SEQ ID NO: 153637 - protein, 89 aa, Oryza sativa
  Clone ID: PAT_MRT4530_53573C.1.pep
MRIIVSLLSTAGRAHIATSRASAVVGSVGYKMMACRALPLLTLPAPLRLLRPCDDLLARFESVRRRACAYLLVRCCANLVGPVGQEDPA

SEQ ID NO: 153638 - protein, 32 aa, Oryza sativa
  Clone ID: PAT_MRT4530_53574C.1.pep
GWYSYRIAGNYSNPIIYCAGEYLLFPVLFANS

SEQ ID NO: 153639 - protein, 59 aa, Oryza sativa
  unsure (1)..(59): unsure at all Xaa locations
  Clone ID: PAT_MRT4530_53575C.1.pep
GSKFTYPGLRRCSFFLGSPNLNYLAVVLQSRVXKNPGLPKFNTLEEDPPFRRCHNWKRA

SEQ ID NO: 153640 - protein, 154 aa, Oryza sativa
  Clone ID: PAT_MRT4530_53576C.1.pep
MDGLPAELCIKIFHLLDHQSLASAPQVCRKWNTLTSDDELWRRLFKDRWGADAAAFYAPEGSRSWKDVFIVQDRCDRYGLGVRIIREGSDYYLIYQGEIQRYLGSRQHVSCDSKDAPAQSSEDEQRQISDRILFFLGDLEAACADAKRVKVRRP

SEQ ID NO: 153641 - protein, 151 aa, Oryza sativa
  Clone ID: PAT_MRT4530_53577C.1.pep
MGNASSMLTQYDIEEVQEHCNYLFSQQEIVSLYERFCQLDRSAKGFISEDEFLSIPEFSLNPLSKRLLRMVDGLNFKDFVSFLSTFSAKASVQQKIELIFKVYDIDGKGKRVITNVLEEAGYTRDCTLSLEDFTRIIDHPGLKMEVEVPID

SEQ ID NO: 153642 - protein, 175 aa, Oryza sativa
  Clone ID: PAT_MRT4530_53578C.1.pep
MGNASSMLTQYDIEEVQEHCNYLFSQQEIVSLYERFCQLDRSAKGFISEDEFLSIPEFSLNPLSKRLLRMVDGLNFKDFVSFLSTFSAKASVQQKIELIFKVYDIDGKGKVTFKDLVEVLRDQTGSFMTEEQRERVITNVLEEAGYTRDCTLSLEDFTRIIDHPGLKMEVEVPID

SEQ ID NO: 153643 - protein, 50 aa, Oryza sativa
  Clone ID: PAT_MRT4530_53579C.1.pep
MGNALRFSYSSDLVSTDTGKMCNRNNLKDTLLSVYGNNLKDAVDDELVEA

SEQ ID NO: 153644 - protein, 65 aa, Oryza sativa
  unsure (1)..(65): unsure at all Xaa locations
  Clone ID: PAT_MRT4530_5357C.1.pep
GCPSTASDARRRKQRRKRRSRRRTSDEAKKDAGGRARRRXRKXEGRRRWRRTRQRSRSRGGVEGG

SEQ ID NO: 153645 - protein, 387 aa, Oryza sativa
  Clone ID: PAT_MRT4530_53580C.1.pep
MTTLLRRLLLGATPADALLTGRLPFSTSSRRTPHRFRRSRRSPNPAPPSPEAVSAAIATLPSRLTPPLLSYSLSSVSDARLLLPVLTHSLRLATFRPDPGPFLVAIKRLAAADLYADFDRTCALAFSLLPSLPSPGPFLRTALYFYCQFRKIGKAFHVYTLMRASADPAARPSADTYHALFTALLSRGGGDTMVHYMYMDTVSALFRQMLEEGVPPDTRALNVLVKGYAQSLHLNDALRVFHQMRPVYGCEPDALTYSYLVHGLSEQGRTRNAREVFDEMLAKGLAPTEPACNTFVSALAMAGEAGEAERVMWDMARAGRVVDDVTRRAVVEELWRSGRRDDAERVVREMEERGIVGGAERRALLRSLHDEFGDDDLDVDDRWRNTR

SEQ ID NO: 153646 - protein, 87 aa, Oryza sativa
  unsure (1)..(87): unsure at all Xaa locations
  Clone ID: PAT_MRT4530_53581C.1.pep
KKKIFFWGGNLGWGRGSQWGGGLGGSKMFPIVGAPXPPKPFVLGAPPTKAIFGEMKMPVETGKNGGLGFTPCKCGPNCRGCSFCSCN

SEQ ID NO: 153647 - protein, 87 aa, Oryza sativa
  unsure (1)..(87): unsure at all Xaa locations
  Clone ID: PAT_MRT4530_53582C.1.pep
PQCGSSWWAFRLXRPSGQYHAGTSRGRWQHAMGLCIDVSGRRTTFTQLIQVSGSPAFMQCSLVQTGGHALTVAVGGKMVATSEMAAA

SEQ ID NO: 153648 - protein, 86 aa, Oryza sativa
  Clone ID: PAT_MRT4530_53583C.1.pep
MTELGAPHRETAQAPLCRFGRGLGEEGGHLTLGPDVPEGARPRGRFLVAASRKPPSSPVNVQPRCAVALAVAVASSRRWRVRVTEG

SEQ ID NO: 153649 - protein, 207 aa, Oryza sativa
  unsure (1)..(207): unsure at all Xaa locations
  Clone ID: PAT_MRT4530_53584C.1.pep
ASSRSTSSPSSAMRTSRRTSRGVTSSWSSSSSSAPSERAAKPDSSSAPSLGPPSRAXGAPSAAVDAVXSSSSSLMSTPSSSSSVSPHTSLRSMSLPISSSSPAPPNTCTTSRTCRRSSSPAISSSGRPSHTARTRAAAFDTSGSTSGSSVWCSIPANISRNARSATEAPSSSRSSAISSRSGARQITSSIVSMSWSTTPSASSSLSW

SEQ ID NO: 153650 - protein, 159 aa, Oryza sativa
  unsure (1)..(159): unsure at all Xaa locations
  Clone ID: PAT_MRT4530_53585C.1.pep
RLLRCSLDRRGVFALDAPFTXQVCLLIQLXEGCPTEEGGVTPSVYSRKEPVHLTDKEKXQKLQVWSRIMPYRESFAWAMIPLFENNQAGGAASPSSPXAPSMSGSSSQDSIVEPISKLTLDGKLNHYSSGSSVIVEISNLNQVNHIYRTLTFSILFKKK

SEQ ID NO: 153651 - protein, 66 aa, Oryza sativa
  Clone ID: PAT_MRT4530_53586C.1.pep
GFVGQHTTPNLKTSPPPLASDDYFPDEYCRTTGPWITPPSRWSSSVMTLMIKLLMRRGISLQSMNR

SEQ ID NO: 153652 - protein, 65 aa, Oryza sativa
  Clone ID: PAT_MRT4530_53587C.1.pep
SRKSALPRAQKAIYTSTTRSTASKPPKNLGTQKLDVRLRRVKAACIQSVKGKLDTNEEEHKRQPD

SEQ ID NO: 153653 - protein, 81 aa, Oryza sativa
  Clone ID: PAT_MRT4530_53588C.1.pep
PLLPQNVPGPWPAHGRRHGQGRSPPGRGNGCWPQNQGGFLSPDFASGPPLQFSFCLRVPFLWRVKNLSCYDETLGLFGQSF

SEQ ID NO: 153654 - protein, 289 aa, Oryza sativa
  unsure (1)..(289): unsure at all Xaa locations
  Clone ID: PAT_MRT4530_53589C.1.pep
KFVLEWCCSLXRLTLIDLEELTEWITQDCNTFFPDLQTLEIKNCPNLLELPFIDNIGDPRKKDVNMTWFPKLEEFEISLCIEISSFPPIPWTQTLDYVRITDVGSNLMEELKYSKTSSLSITGNNNLHSLEKVLVFNNLTELQELSMEKCPPLDMESLLMLSSLKILSVSGSGSLFVPLTSLSDAKWQLPVEELYISDCVANGKELSQLLSHLTKLSVLYIGNFKRITRLDVAVEQQQLRTLVSSTAIHIEHTQPAEQHEGIAEEAEVEDDGLLLLGSNLCRSLQEPQP

SEQ ID NO: 153655 - protein, 133 aa, Oryza sativa
  Clone ID: PAT_MRT4530_5358C.1.pep
VKVDAAMHKVTVTGTVDGDTLVKRLYKSGKQAVPWQHPHVAPAPEAVKAIEAVAAAAGNAAAVVAVVPVHAVPALVAGHLLPRLLQPRDGARAAAAGRVPHVRRREPQRLQRHVNATRRRRRRRLAGQAGREK

SEQ ID NO: 153656 - protein, 489 aa, Oryza sativa
  Clone ID: PAT_MRT4530_53590C.1.pep
LPVVPGQDQEVWSCVQDVQPFALLLALLIPNLLHFVIRRKYSSYNLPPGSLGFPLIGQSISLLRALRSNTDYQWYQDRIKKYGPVFKMSLFGSPTVLMAGPAANHFVFSNQDLIFTQTKAINTILGRSILTLSGEELKQVRGALQGHLRPEMVTKYMRKMDEEVRRHIDLNWVGHKTVKVAPLAKRLTFDIICSVVFGQGIGPIREALATDFETLVQALLSLPVNIPFTKFNKGLSASRRIRKVLRQIAREREAALQQGHSSSADDFFTYMLVLRSEGTHSLTVEDIVDNAIVLLTAGYGNSAVLITFLLRYLANDPDILGKITEEQEEIASSRGPNEPLTWDDVSRMKYTWKVALETLRTVPPIFGSFRTAIKDIEYRGYHIPKGWKVFTAQSITHLDGNFFNDPVKFDPTRFDNQTSIPPYCFVPFGGGPRMCPGNEFARTETLVTMHYLVRQFRWKLCCKEEGYRKDPLPMPVLGLPMELETRSPP

SEQ ID NO: 153657 - protein, 793 aa, Oryza sativa
  Clone ID: PAT_MRT4530_53591C.1.pep
MRNLPDTLSSLMGFNKHLTPSWIESVSHIIDGLSPTKPQMKVMVEKDENISDDNTESEAKVQKIQDELVSLNAQLKQITLQRREALNNYLDLKGNIRVFCRIRPFHHEESYSSRNLFTLDESNVFLKVAETKRKQYKFDKVFDQFSTQGDVFSEVEPVIKSALDGYNVCIFAYGQTGSGKTYTMEGKPTNLGVIPRGIQTLFNQASECNNRFLFTFSMLEIYMGNIRDLLAPRSKTNGIKNVPSLSIKSDPDGGIEIEDLVAVTVNSFQEVKRLYEMGTRLRSTASTMANSTSSRSHCLIRISLTSLNATERRKATSKLWMIDLGGSERLVKTKATGKRLKEGKAINLSLSALGDVIDALQTKKPHVPYRNSKLTQVLRDSLGCESKTLMLVHISPDEGDLCETICTLGFATRVRSIRLESEEPPEMKARKETLLIDLGQKVNDLEHECEDIRRKIKNLEESMEHLTGPQPTIYSNFDMSHLSSEELKTDVSSNVRNSKNRREASSRLPRFMKPTASSQHRIGLNNRTPIINRLKPPVPPRRRPSSVYAESVMVPVNAAPWQSECSSECSMSLTSDMNWTPSIRDGTECSQDASEYEIKQVIFSEHEKSSHDQVTCYTDYPLAESRDIQIKIEEKGIVDIDNWLHQQIVEKTSTFRSKMVLDIPGVTEAEIHVSSIPSPTTMACTKEDSQVKDEVMGLTLQSSTDYVEDIKQSKTDNQFTAKELCTPPFKEFSSNNEVKGHKNEHPVYHGRPRRSLQEELENCTLEKPNMDSKSHRSHDDKHKTGNVLSYTGE

SEQ ID NO: 153658 - protein, 141 aa, Oryza sativa
  unsure (1)..(141): unsure at all Xaa locations
  Clone ID: PAT_MRT4530_53592C.1.pep
MGRSPCCEKAHTNKGAWTKEEDDRLIAYIKAHGEGCWRSLPKAAGLLRCGKSCRLRWINYLRPDLKRGNFTEEEDELIIKLHSLLGNKWSLIAGGSRKNGQRDQELLEHAHQEEAXLSRGIDPVTHRPISVRKKQHHQIIR

SEQ ID NO: 153659 - protein, 377 aa, Oryza sativa
  unsure (1)..(377): unsure at all Xaa locations
  Clone ID: PAT_MRT4530_53593C.1.pep
MPMPIGPGIRGYPDPWVKLPSPGTREGTVVVPEPGTRILKPEPAKTCLLHYRFYCLVRVEGFSFSQXGSVELGAEEREGLIRAHVLEHHKDEVDDLDDYLGRGGGETCKEMDHDCKHWIPENSKMREGLEWTNGCPFSYSRKDHLNRHLLTHQGKLFACPMEGCNRNKKEFICPEENCGKTFKYASKLQKHEESHVKLDYSEVICCEPGCMKAFTNLECLKAHNKSCHRHVVCDVCGTKQLKKNFKRHQRMHEGSCVTERVRCHLKDCKLSFSKKSNLDKHVKAVHEQKRPFVCGFSGCGKSFSYKHVRDNHEKSSAHVYVQANFEEIDGERPRQAGGRKRKAIPVESLMRKRVAAPDDDAPACDDGTEYLRWLLSG

SEQ ID NO: 153660 - protein, 516 aa, Oryza sativa
  Clone ID: PAT_MRT4530_53594C.1.pep
MDISEVLGATAEWAVTLVAMAVGLLVVAYLYEPYRKVWHVPGPVPLPLIGHLHLLAMHGPDVFSVLARKHGPVFRFHMGRQPLIIVADAELCKEVGVKKFKSIPNRSMPSPIANSPIHKKGLFFIRGPRWTSMRNMIISIYQPSHLASLIPTMESCIQRASKNLDGQKEITFSDLSLSLATDVIGLAAFGTDFGLSKLPVTPDDSNIDKIAADTSVEAKASSEFIKMHMHATTSLKMDLSGSLSILVGMLLPFLQEPFRQVLKRIPGMGDYKIDRVNRALKTHMDSIVAEREAAMEHDLAASQQRKDFLSVVLTARESNKSSRELLTPDYISALTYEHLLAGSTTTAFTLSTVLYLVAKHPEVEEKLLKEIDAFGPRYCVPMADDLQTKFPYLDQVVKESMRFYIMSPLLARETLEQVEIGGYVLPKGTWVWLAPGVLAKDPKNFPEPEIFRPERFDPNGEEERRRHPYAFIPFGIGPRVCIGQKFSIQEIKLSMIHLYRHYVFRHSPSMESPLEF

SEQ ID NO: 153661 - protein, 410 aa, Oryza sativa
  unsure (1)..(410): unsure at all Xaa locations
  Clone ID: PAT_MRT4530_53595C.1.pep
FLQNILLMQRWREWVSEFLTPQNSXIWRNYNYXETIRHVKGIRHGDPLFPFLFILAIDPLQCMLDKTTKTXNLKQVXGRAVHFRTSMCADDAAVFINTIKEDVCAFAELLNRFGQSTRLCTNLQKXSHVVLIRCDNLDLDDVLXGTPATTTNFPMKYLGLPLTARRLQRRDLQPLYDKSMNCIAGWRGKHNGLAGLSTLVKSILTSQPDFLLTGLKASKEXVEILDKQRRKFLWAGREALTGGKYKINXHAGGLGILNLEKXFARALHLRWFWHEWRSPEKAWVGSGTPXDDTDKFLFAAAMTLTIGEXQNKVFWDXAWYQGRRLKDITPLVYATTKKKSASLQQASQSDQWLVDLNLLTSSGWTTELISQLVNVWGVVHNLXLTEHEEDKITWKLTSHGEYTTASAYNA

SEQ ID NO: 153662 - protein, 117 aa, Oryza sativa
  unsure (1)..(117): unsure at all Xaa locations
  Clone ID: PAT_MRT4530_53596C.1.pep
IFSEGRLDYLGSRCLIHAQSILAIWAVHVALMGAVKGYRILDGPLGXVSQPIYRLGSFXRLGLDDDMKALGGLKVRVIKNWRLVMFSMCGLLRTASNTDYGTLENVVCDVHNVDNNN

SEQ ID NO: 153663 - protein, 144 aa, Oryza sativa
  Clone ID: PAT_MRT4530_53597C.1.pep
MMESRYVKVDSRFFLVDDNSSSSSSSCAAAGGGGGDGDYHYLDACFLCKRDITFNRHIFMYKGNAAFCSDDCRQDQMDMDSALAAVKRRHRTLQRSRDMSSSSSPAPAAAQCAANEAGLFAVIPRRPTVADLTTHAAPAVSGTV

SEQ ID NO: 153664 - protein, 244 aa, Oryza sativa
  Clone ID: PAT_MRT4530_53598C.1.pep
MVAAAGTMELEILGINFGCVLAALADAKIPEKDCLLPLASKLLGYAIVAASTTVKLPQILKILKHGSVRGLSVASFELEVVGYTIALAYCIHKGLPFSAYGELAFLLIQAIILVAIIYYYSPPMGTKTWMKALLYCGLAPTVLGGKIDPALFEVLYASQHAIFFFARLPQIWKNFMNKGTGELSFLTCFMNFAGSIVRVFTSIQEKTPLSVILGSAIGIVMNGTLLGQIVLYQKPAPKKEKKRD

SEQ ID NO: 153665 - protein, 50 aa, Oryza sativa
  Clone ID: PAT_MRT4530_53599C.1.pep
FFFFWAVTTLPFLPINYSTKQREHLKSITVSDRTSEPGVYKRIEWAIKDP

SEQ ID NO: 153666 - protein, 82 aa, Oryza sativa
  Clone ID: PAT_MRT4530_5359C.1.pep
PNNEQELIFFTRNLMVFQCIRYSLRKGIGQDDLFPSLSKEKGDKIVLVVGQLTRLLMKTSLDLCIYLVLLCCSHGPVHSRGH

SEQ ID NO: 153667 - protein, 219 aa, Oryza sativa
  Clone ID: PAT_MRT4530_535C.1.pep
MARTEKVAGDGCSGGGGGGGEGQVEVEVGVGMGMDGKGMIECRICQEEGDEGAMDSPCACTGTLKFAHRKCIQRWCDKKGNITCEICNQVYSPNYVLPPTKCCSAEMDMDLRQSWVGRIDPHDSHFLAIAIAEQQLLQAEFDDCVSSNSSGATCCRTVVLILMLLLLVRHVVVFVRDVSMLQDATVLFSATLQFAGFFLPCYVIARSCYAFQHRRRRQV

SEQ ID NO: 153668 - protein, 88 aa, Oryza sativa
  Clone ID: PAT_MRT4530_53600C.1.pep
MAIKDWFTGNPGRLTMLTTSGGTGGEGGRDGIGSAGVSGCPAAGFTTAYEGTAHCLLRGGGETLAWCGWLGAGYAKGLVTIFPICSIM

SEQ ID NO: 153669 - protein, 148 aa, Oryza sativa
  Clone ID: PAT_MRT4530_53601C.1.pep
PGRGPGPERTGRPTGRRRRRCERWRWRVLRPASSPSSSVTPRPSGAPSPSPAAAPAGAGRRRRPRRKEEEERRVAATRGCPWTPPAPTASSTGPPAAASSCGAAPTTSACPPPRCSPRPRASPTAQKKMGEVQVLEILADSRHRKLKF

SEQ ID NO: 153670 - protein, 148 aa, Oryza sativa
  Clone ID: PAT_MRT4530_53602C.1.pep
QCPVGYSQTMASLLQSSPTYQSNHKTNRTKFQGLEYIKKEKKNKMRGKTYKLSRPHSGCLLLLRHDQLIDRSINLCYPPLHYSAVKDLAQSHRGRLHQAILSQFIVSKRMMRQYDTDEKNRVAIYDTDEKSRVFACQSIQGIVRYVQC

SEQ ID NO: 153671 - protein, 340 aa, Oryza sativa
  Clone ID: PAT_MRT4530_53603C.1.pep
MRSWVRLPLGANFSGFNSVVFSVRLPLGANFPRFNGVVLSVVGDVPVDSEAPVVTSSISPRFASPVFEDAHRYRVCVRVFIGRNALFFYSDARRKSLVAANTSAFAARSSRCLHSMGSLGSPAGRRSARRFHDLRDVVSEHADAATATLSVVVFSAVAGILHLMQDTDEARKEDTPTKTNPYFRSNQLMEDLIRERASYNETTPDEKTVVREYMEDDQAIRARFKDWMKEHGRTYKQDEVEEARRFKIFKSVARFSDAANDDSANAGHSTRFGLNEFSDWNQEELARMCCCMPARSDGDLASGIADMEYKDQGCFKSPTIAAAMSGYICLRRVLALFSSV

SEQ ID NO: 153672 - protein, 609 aa, Oryza sativa
  Clone ID: PAT_MRT4530_53604C.1.pep
MAHAFAGGTSAICRCPHDPGRAALVSRPRHRLRVLASSLPTPAIEGQGVELSVTTRRGRVLPVLKDCSLRVPPGQLWMLLGPNGCGKSTLLKVVMPTVESDVAFGLGKLNLSLDEKQRVAIAGALAEASKVLLLDELTTFLDEYDQMGVIKAVRKSVGAGGEVSALWVTHRLEELRYADGAIYMEDGQTIIQDGSVGIYRPHPVQSGLHRFIRMEGHEGGEEEGLGDQFERLPDEVLLDVFGRIGDVKALGRCALVSRRFHALVPLVDSVFVRVDCVISDDPPPSSAGSAQAAAAAEGGPPAARGRGALAHLARLVLGGIVRPIQALGQILSPAAATVSRRSAAPPAAPAPAAADVSHHSPSEVLRSFKELRRLHIELPTGELGIEDGVLLKWKADFGSTLGSCVILGASSVTSKPPPPPAAPPPTAADSSAASPDSSREPDELGNIPESLYTNGGLKLRVVWTISSLIAASARHYLLQPIIADHSTLESLDLTDADGQGVLTMDKRQLQELRVRPVSASGNSHRTLMPALSMRLWYAPHIELPGGQLLKGATLVAIRPSEDVLREGGGIEVAGPTGASWILDAFEEPYRTAAQVLLKRRTYSLEMNSF

SEQ ID NO: 153673 - protein, 62 aa, Oryza sativa
  Clone ID: PAT_MRT4530_53605C.1.pep
MANASSLIPFCIRSAPCSPWRAAHYVMLNIYFDWENVTLQDSFVGRLFSMTPPMFSPSVKPL

SEQ ID NO: 153674 - protein, 273 aa, Oryza sativa
  Clone ID: PAT_MRT4530_53606C.1.pep
MAHAFAGGTSAICRCPHDPGRAALVSRPRHRLRVLASSLPTPAIEGQGVELSVTTRRGRVLPVLKDCSLRVPPGQLWMLLGPNGCGKSTLLKVLAGFLNPSSGTVYINRPCSYVFQNPDHQVVMPTVESDVAFGLGKLNLSLDEVRSRVSQSLDAVGMLSYSQRPIQTLSGGQKQRVAIAGALAEASKVLLLDELTTFLDEYDQMGVIKAVRKSVGAGGEVSALWVTHRLEELRYADGAIYMEDGQTIIQGDVSTISKYIKKKQARYFGHFEL

SEQ ID NO: 153675 - protein, 55 aa, Oryza sativa
  Clone ID: PAT_MRT4530_53607C.1.pep
MATMMSPRDGALLQDATDQVERSANQVQNSAVWGPEAVKGLSPLLFAVMAAAKNS

SEQ ID NO: 153676 - protein, 55 aa, Oryza sativa
  Clone ID: PAT_MRT4530_53608C.1.pep
EEGTQSLAAHVPECYRMVFIMHMSTYRDLMDGHMITDACSYGLSRILKPCSRDAL

SEQ ID NO: 153677 - protein, 98 aa, Oryza sativa
  unsure (1)..(98): unsure at all Xaa locations
  Clone ID: PAT_MRT4530_53609C.1.pep
LVSVKQMLSCCNKTDASTSKYSTGPHTVNSXLAVSSSLKKAGYNPYRVPYVPIFGFEGDNRIERSSNLDCYRGPTSLEALDHLNAPRSPSGKPLRFPF

SEQ ID NO: 153678 - protein, 380 aa, Oryza sativa
  Clone ID: PAT_MRT4530_5360C.1.pep
MASADAVSPAPATSAAAQQQLRTVVLRVSIHCLGCKKKVRKVLRSIEGVKDVKVDAAMHKVTVTGTVDGDTLVKRLYKSGKQAVPWQHPHVAPAPEAVKAIEAAPQQPEAAPAGDDDGGKGSDAAAAAAKEAAAQAESSEEKKTEEKPEAEKEAEKKEEEQEAKPSDEAKKDAGGESEAAPEAKAKGDDVGAEPAKEAVPAAAVKEASNDDEGAKDEKSKPKDAGDAAPPAAATTTERSLHFSPPPTPAAHKQHEEHYPYPYYGAPQPVMSYHMAQPTTSVSYYAPRPEPAYSMQQHPPPPAYSAPPPQQQQYPPPSPSPQPQAMQQQWSPSYLYMPYPHSSPDTYYRDYYSPPGTAHAPPLQDEYRMFDDENPNACSVM

SEQ ID NO: 153679 - protein, 96 aa, Oryza sativa
  Clone ID: PAT_MRT4530_53610C.1.pep
GRPGVARPFGDADRDSMDLFIEQGATEHYDKLTPQLYTHNKDYKGRLGVMLTATARCVFPDQRLQAALTTGLFSRIHVKVFGDGRCASRRWELEKW

SEQ ID NO: 153680 - protein, 54 aa, Oryza sativa
  unsure (1)..(54): unsure at all Xaa locations
  Clone ID: PAT_MRT4530_53611C.1.pep
EMRKGEKRGKERMLTWPXDMWGPRGSHAKSAATSDKTGVKTTKSKCYGRCDYHI

SEQ ID NO: 153681 - protein, 470 aa, Oryza sativa
  Clone ID: PAT_MRT4530_53612C.1.pep
MAVAPPEVGPAAAAAVAGGKKEVRALDGASAIGEEEEVEVEVEEEEEAEEEREDEEEGEEDGGDEEEEEEEGVKWLKHYSSMQSILVVGDGDFSFSRALAVAFCSGENLVSTSLDSYEALRGKYANAESNIMVLKLMGATTLHGVDAKTMKHHTDLKMRRFDRIVFNLPHAGFKAKEGDMRMINLHKDLVRGFFRNARCLLRPSGEIHVSHKRGKVYENWEIEKLASESSLIMVEKVDFHIEDYPGYNHKRGDGPRCDEPFPLGPCCIFKFSIRNHKKQKKCHSKKIGSIPSLGGSHVHPEILASDWSPSQPFRPVNAVNMPVTFDPYSLRIAQSHQPGFPVNFVGLWTAAACSLQHCNIHPMLNIVRPSLHLLPIASIIAPQMGRITSTSLFAPQEQPKPVLRPLQSVSSYDLAREHQMNLRREFEMRGQTMPAGTSLDYFEFLEYLFRDPAEKEKWLQTMITLHATRW

SEQ ID NO: 153682 - protein, 78 aa, Oryza sativa
  unsure (1)..(78): unsure at all Xaa locations
  Clone ID: PAT_MRT4530_53613C.1.pep
FLISDHNHGSGCYHFWNKEAKVTRMEMLKYNYTRIIFSLGKLECMQLPFSWLANGVLYQIWAFPXSVNKIVLHSPYGC

SEQ ID NO: 153683 - protein, 961 aa, Oryza sativa
  Clone ID: PAT_MRT4530_53614C.1.pep
MVSGRSITSGAAAPCHLRPTDRHTMAACRSRQRPPLPPKTRAKGPARRSAVDIVLPVEKLTGIHGGCTGERLYGGHGVSPWQAIQYVGERKYAMLSEPDLQVKAWMKEVRELAYDIEDTIDAFMARSEKSNEPTGIRGFIINNILKLRELLSSCTISQEIEKLKNQVLEVNDRRKRYKLDVSVSMGTGCESIDPRLPAFYSEVGGLVGIDGPRDKIIKLLRENAADEDCGFVNRLKMVSIAGFGGLGKTTLAKQVYEKIKWQFDCAAFVFVSQIPDMKRVLLDLLCGLGASGNTWDDEKQLIDKIREFLHDKRYIIVIDDIWSISSWEILKCVLPENNSGSRIITTTRILDVSMICCSTFNGSIYRIKPLSDDDSRRLFCRRIFHGEHSCPSHLEELSKAILRKCGGLPLAILHIASLLATKSNTKEEWELVLNSIGSALENSHTLQGLKKILLLSFYDLPPQLKTCLLYLSIYPEDCMINSKELIRKWIAEGFIAEDSGKRLDQVAESYLNDLINRSMILPFDITHADGVQYYQVHDVVLNIIISMSKEENFVTIIDGHKCSSLQEKIRRVSLQFNDSEDVVVPTNITNRSCVRSLSIFGITKQVPYFMDLQSLRVLDLGYCTLLQNQHIECLGSMLQLRYLVLHSQLITELPDEIGNLQHLEMLDVTLCSIQALPDTIVRLQKLVCLYVSTKVKLPEMIGTMQCLEELFHISSNSIRLAGDLKCLKKLRDLAIAVEDPVGTKSSTLRYREVVRSSLTELGRHNLQSLSLNYKGDENFILDSSMGSCFSTQRLRKLIIGKTLSRVPEWMSIFDNLTHLQLCISRMEQSDINILKGIDSLIFLRLVFTGHAPDGRIVIDNRGFQALKELYLLCFIPGMWPVFEPGAMQELQKYHLTFKLQKVHCKNSVLDFGLQHLSSLQHISAIIIPSGATSEDTLVAEDAIRSATSIHPNQPIAEIFVE

SEQ ID NO: 153684 - protein, 101 aa, Oryza sativa
  unsure (1)..(101): unsure at all Xaa locations
  Clone ID: PAT_MRT4530_53615C.1.pep
MASXTLLKSXFLPKKSEWGAXRQAAAPKPVTVSMVVRAGAYXXKLVXTAKTIASPGXRGXLAMDESNATCGKXLAXIGLEEHXKANRXAYRTXLVTAXGLG

SEQ ID NO: 153685 - protein, 901 aa, Oryza sativa
  unsure (1)..(901): unsure at all Xaa locations
  Clone ID: PAT_MRT4530_53616C.1.pep
LTRQFMAGALVSASTGVMESLLGKLSSMLEKEYAKKKTVEKDVLFLRNELSSMNTVMQKYAMLSEPHLQVKAWMKEVRELAYDIEDTIDAFMARSEKSNEPTGIRGFIINNILKLRELLSSCTISQEIEKLKNQVLEVNDRRKRYKLDVSVSMGTGCESIDPRLPALYSEVGGLVGIDGPRDKIIKLLRENAADEDCGFVNXLKMVSIAGFGGLGKTTLAKQVYQKIKWQFDCAAFVFVSQMPDMKRILLDLLSGLGASGNRDDERQLIDKIREFLHDKSRIITTTRILDIAALCCSTFKGSIYRLEPLSESDSRRLFCKRIFHGEHSCPSHLVELSKAILRKCGGLPLAILHIASLLATKSNTKEEWELVLNSIGSALENSHTLQGLKKILLLSFYDLPPHLKTCLLYLSIYPEDXKISPKKLIRKWIAEGFIAEDRCNRLDQVAESYFNELINRSMILPVSIAYDGSIQICQVHDLVLNIIISMSKEDNFVTVIDGQKCSSLPEKIHRLSLQFNDSEDAVIPANITNKNSVRSISVFGSTKQVPYFMNLQSLRVLDLGYCTLLQNHHIECLGSMLQLRYLVLHSQFITELPGEIGNLQHLEMLDVTLCSIQALPDTIVRLXKLVCLYVSTKARLPERIGTMQSLEELFHISSNSIRFVEDLKCLTKLRDLAISVEDPVGTEGYKLRCREAVLSSLTELGXTQPAVTLTELITKXDENFILDSSMGSCFSTQRLRKLIIGKTLARVPEWISIFDNLIHLQLYISGMEKSDINILKGISTLLFLRLVFTGHAPHGRIVIDNRGFQALKELYLLCFVPGIWPVFEPGAMQELQKYHLTFKLLKVHCSSGVLDFGLQHLSSLQHMSAIIVPSGATSEDTFAAEDAIRSATSIHPNQPTNLLYK

SEQ ID NO: 153686 - protein, 69 aa, Oryza sativa
  unsure (1)..(69): unsure at all Xaa locations
  Clone ID: PAT_MRT4530_53618C.1.pep
LTYLPAIFSRFQFSFACSCLLEIVAMYDWKIAFWIRNXKIGYCVVCTVYCYSXGEIRDNWIKKKKKKKK

SEQ ID NO: 153687 - protein, 762 aa, Oryza sativa
  Clone ID: PAT_MRT4530_53619C.1.pep
MTMLPATAAALLVLVLQLMWSAEAQVAVGSGPPAGCPDRCGNVSVPFPFGIRDGCSLEGFGLTCNTTSNPPRLMIGNSTLQVVNISLANSTLRAVDIDGAVNITYGQIDGNGTWVGVVASPYIVNETLNQLLVTGCNIQVTLVGSGGNVISGCSSFCSINDMYTGGVFRSPGNKCAGIGCCQQQVSIGRPSYRVELTNLDRDREFSGRVPEAVRIAELGWFDGLAADLLNVSLADTSRRNPVPVVLDWAVASTGLDVTLNAGLNKQAANNWSCPTAASGRKSACISSNSFCRNIADNYRSGYVCRCDKGYDGNPYVAGGCQDINECERAKENGCFGECTNTPGAFLCRCPHGARGNATIPNGCTKSNLGLTIGVGIGSGAGLFILALGAVFLTRRIKQRRARTLRQKFFKQNRGHLLQQLVSQKADIAERMIIPLAELEKATNNFDESRELGGGGHGTVYKGILSNLHVVAIKKSNVTVQREIDEFINETEVPLLVYEFISNGTLYHHLHVEGPTSLPWEDRLRIATETARSLTYLHSAVSFPIIHRDIKSHNILLDGSLTAKVSDFGASRCIPTEQNGVTTAIQGTLGYLDPIYYYTGRLTDKSDIYSFGVVLMELLTRKKPYSYRSAEDESLVAHFSTLHAQGNLGDILDAQVIEEGTKEVNDVATLAVACAKLKAEERPTMRQVEMTLESIRQEVLHSVSTKKSKELHVSWNHAISEGSIFYQAVDTSIVIVSDVGSSDNLCDGAVIGRNRFPGTQCRQ

SEQ ID NO: 153688 - protein, 103 aa, Oryza sativa
  unsure (1)..(103): unsure at all Xaa locations
  Clone ID: PAT_MRT4530_5361C.1.pep
THPGKGGRDGTGRALRRPMSLPDTPRHDRGLPAALQXSGGKPYVWCAWLQGVRRRVLSRPLCDVDLNVNIVVCVPRPVLDGDFNAHSTWNSIREYLGVTLLDL

SEQ ID NO: 153689 - protein, 641 aa, Oryza sativa
  Clone ID: PAT_MRT4530_53620C.1.pep
MIDPWAAWLICLHHWTLLLFLVPSAARRQTNKPISERGERIKENGYVMEQQLASISVTESAEGMWRQQEDHRDGRAVSGEDATAGGGATGRRKKVAESVHVKLQASRAFFRSLFVGEQYHSVGVRTTTRICSREAVTAAAIPDEEKLRSERTRSAVAPDEEELCSECARSAAAVVLAAKRLISVYKERIDELVCAALECQSVSAKGKQEIESFSCFLSDTNSSLKQWSSRLKLALQASPEKSKNESKFTSAACSVPATIGNDRLLCSNIDEPDLVVSPSPLVSWRAGACMVDSGKQLFLLTPLTKTKTCSSRCPKSSTTQLKTTTGLDQLNLPNIPVLKLTISDDDCLDLEQSAKANESNTCVMTPNFIKAKKGSSGNSLFSPFSFTVQKSGRALPSPCLRTALSCKQQMFSPISEGSRKEEIPSTGPTQSGKPSEASGDISSDEISKDLASRYPDFYGFNQPTMTTYRRREADDTLDWFLSPLKTCVLMDPSDEKPIAPPARDSKSFIDTPCKGLESDNLQKIKELSDDKPIQTSSVHSKALLGTPWKGLESNILKKGQGISDDKPIQTPAIHSRALLGTPWKGLESTNLKGKQAGETTLKRELWTRFEAVSTNELHFDSSVFQRSDGRRFIDILEEEAS

SEQ ID NO: 153690 - protein, 525 aa, Oryza sativa
  Clone ID: PAT_MRT4530_53621C.1.pep
MALSSMAAAQESSLLLFLLPTSAASVFPPLISVVVLAALLLWLSPGGPAWALSRCRGTPPPPGVAGGAASALSGPAAHRVLAGISRAVEGGAAVMSLSVGLTRLVVASRPETAREILVSPAFGDRPVKDAARQLLFHRAMGFAPSGDAHWRGLRRASAAHLFGPRRVAGSAPEREAIGARIVGDVASLMSRRGEVPLRRVLHAASLGHVMATVFGKRHGDISIQDGELLEEMVTEGYDLLGKFNWADHLPLLRWLDLQGIRRRCNRLVQKVEVFVGKIIQEHKAKRAAGGVAVADGVLGDFVDVLLDLQGEEKMSDSDMIAVLWEMIFRGTDTVAILMEWVMARMVMHPEIQAKAQAEVDAAVGGRRGRVADGDVASLPYIQSIVKETLRMHPPGPLLSWARLAVHDARVGGHAVPAGTTAMVNMWAIAHDAAVWPEPDAFRPERFSEGEDVGVLGGDLRLAPFGAGRRVCPGRMLALATAHLWLAQLLHAFDWSPTAAGVDLSERLGMSLEMAAPLVCKAVARA

SEQ ID NO: 153691 - protein, 209 aa, Oryza sativa
  Clone ID: PAT_MRT4530_53622C.1.pep
MSFPGGFPTSAAVAKSMATAEWLPDGRVVPPAATVMRPRWWASISFSGGDGVVPDGGGCNGDGGVAGGAAKAIHVDAASRIIAMPVQQRPQSAHTCSGMGDAPYVSMSLNPLFITRIDFSDVAWTRRHRGQGGERRRRATIGGEVVGGGTELECCGEVQGPPLLSLLLRYHVSLRRPTLWPRQPFLPRVAPAPPDNGQWLAGRRAAQRS

SEQ ID NO: 153692 - protein, 117 aa, Oryza sativa
  Clone ID: PAT_MRT4530_53623C.1.pep
MATEVLRPHNVLLPSPAQRRIRATAATHQRTANNHQSDARTKPTTAGSRRRQGRGSSAARKAAARPVAVEVYAGPAFSVSPEPSSVPLPQFPFRKAAVTAAVDDAATRDLRRMLRLE

SEQ ID NO: 153693 - protein, 71 aa, Oryza sativa
  Clone ID: PAT_MRT4530_53624C.1.pep
FSISNRPSCVSAPGVRRTLMLCTRFLFRPRGDARGVVVNTFLSDKLMVCSSCCLFFHGPGVLKLPFLCVGL

SEQ ID NO: 153694 - protein, 106 aa, Oryza sativa
  Clone ID: PAT_MRT4530_53625C.1.pep
PKGPPGLGKPPFPGAGGPFFTLGGKPWPKKVCKKVLPSQGGPPFFFFSFKFVSPPPSFKKVVPSGWPLVFLGTFSPFFFFPQGVPLWVPQKNFLALNPFWFFFWGF

SEQ ID NO: 153695 - protein, 89 aa, Oryza sativa
  Clone ID: PAT_MRT4530_53626C.1.pep
CQGGCGCSRAIYPIQTHLSTHPLSSSPPPPRPPPPAPPPPPRHRGPPLPSPPHAPARYVNLSRRCDVPRRRAPRGPSSPALSPSCRLAR

SEQ ID NO: 153696 - protein, 106 aa, Oryza sativa
  unsure (1)..(106): unsure at all Xaa locations
  Clone ID: PAT_MRT4530_53627C.1.pep
MENQEADCSVPLEFYFFSSQAEIIESPFHIENNTIGYRQELTKKKFLGCYAQGKQEAHNYSTIQFSPNPKGHLFQLRDLGLCDLGILVGFQSRFVXFGKNFFPWXP

SEQ ID NO: 153697 - protein, 185 aa, Oryza sativa
  Clone ID: PAT_MRT4530_53628C.1.pep
MEQPLFELSAPRCEFYEPPPSSEPIYTTGYEIGPELISMVRENSFSVIDLENPYHHLWDFEQVCSCLKIHGMKQETVWWKLFSFSLHERAKQWYTSTVGCVNGSWEKLQDRLCLAFFPVTRITALQVEILSFWQIENEPIGAAWSRFTNLVQSGQPLSLPDYVLLQHFHMGLNKESAFYLDITAG

SEQ ID NO: 153698 - protein, 76 aa, Oryza sativa
  unsure (1)..(76): unsure at all Xaa locations
  Clone ID: PAT_MRT4530_53629C.1.pep
DVSESKDHRDLGEMWNRTTRVTQTDAMMAXSHQANGGGKPPHWEDQQRTTVKNPINSTIPSIEENNARDVAAALRD

SEQ ID NO: 153699 - protein, 305 aa, Oryza sativa
  Clone ID: PAT_MRT4530_5362C.1.pep
MALLRKLFARKAMDGLSCISERVYVFNSCLSTEPLVVDDDDDEEARNDHLISTVIQLKSCHPHGASLMLLNLFAAGGGEEASSLLPVDALRRHGVAAVAEYPCGHRHGPSLPLATARALLATCVDWLVTDGQRNVLLMRCDRGARPALALAMASLLVYMEEEPAPPELVTTTTLAAVYGRAPVALLLAAGSALDPRPSHLRYLQYVARLRGMTTRHGPPTPSPLLVLDCLILRPVPDFDGNGGCRPVVRVHGRRDAAADYDGDRADDASPKILFSTPRIKQHFRQYNQVDQIWSRIDGSARNENG

SEQ ID NO: 153700 - protein, 72 aa, Oryza sativa
  Clone ID: PAT_MRT4530_53630C.1.pep
MLAGWETLASCPASVIHSLIKVLLVVTFMQWPATAIVVVPNSNCFTFDNNSRLVDFADLIGKNFEYNEKGSV

SEQ ID NO: 153701 - protein, 178 aa, Oryza sativa
  unsure (1)..(178): unsure at all Xaa locations
  Clone ID: PAT_MRT4530_53631C.1.pep
ALSPTRRRARGAGGAGHGSRRGGRRTRATPRAPRGRGRGRRRLQGRKGEARTARSCGRTRSTEAARGARRRRRXQPPTAAHRRGADDVRQRRQPXTPRAACRRALPTPPSPPPPPAPRNRTHLAATETGPAPMPSRRDRASPPPPPSAAACAAPNRTPPAATATGRARARGGRPRPTA

SEQ ID NO: 153702 - protein, 224 aa, Oryza sativa
  Clone ID: PAT_MRT4530_53632C.1.pep
MASSSLFLLGALLVLASWQAIVAYDPSPLQDFCVADMNSPVRVNGFACKNPMDVSSEDFFNAAKFDMPRNTFNKLGSNVTNLNVMEFPGLNTLGISLARIDYAPMGVNPPHIHPRATELLTVLEGTLYVGFVTSNPNKLFSKVVCKGDVFVFPKAMIHFQMNLDHDKPAVAQSALSSQNPGVITIASAVFGSQPPISDDVLTKAFQVEKKLIDWLQSQFWENNY

SEQ ID NO: 153703 - protein, 93 aa, Oryza sativa
  Clone ID: PAT_MRT4530_53633C.1.pep
RWSAAAEEASKVQPAHAAGVAPPLAAARERPRDSTCPGPIFTVKTSVGQGHTGVIKVGYTCDRITHGMPLRPYTKRKPGVGGTHMTYSMPFGA

SEQ ID NO: 153704 - protein, 136 aa, Oryza sativa
  unsure (1)..(136): unsure at all Xaa locations
  Clone ID: PAT_MRT4530_53634C.1.pep
MRSSAQQHQMNGIRAVASPERERPARGSNIINNNGGPPTSPDDKKGSSSGSEGSIWPKFAVALTNKEKEEDFWVFKGSKLPQRPKKRAKVIQRTVNLVCPGTWLCDLTLERYEVREKKVSKKRPRXESNAQHGQRL

SEQ ID NO: 153705 - protein, 891 aa, Oryza sativa
  Clone ID: PAT_MRT4530_53635C.1.pep
MASSQGLKKNYRCDRSLQQFYTGGPFAVGSSPGGGEGEVEGGEAEAEAFLACACGGEVRLVSAADASAIGEPIEGENEAVTALALSPDSRLLFTAGHSRLIRVWDLASRTCTRSWKGHDGPIRAMACHASGGLLATAGADKKVCVWDVDGGFCTHFFRGHAGVVTTVMFHKDPKRLLLFSGSEDATVRVWNLESKKCVAVLKEHFSAVTSLALSEDGQTLLSAGRDKIVNVWDVRKYNSKKTIPAFEMIEDVSFIGPGSNLLSCLGEPANIKRKTDGYFLTVGERGVVRIWCLESAQCIYEQQSSDVTVNTENEESRRGFTSAVMLSDDQGLLCATADQQFLFYCPTRTDGGDFQLNLYKRLVGYNDEILDLKFVGEDEQYLAVATNLEQVRVYDVASMSCSYVLSGHTEIVVCIDTCISSSGKTLVVTGSKDSTVRLWDMERRSCIGIGKGHLGAIGSVAFSKKSKNFFVSGSSDRTIKIWSWDDTLDDVGSEVPLKAKAVVAAHDKDINSLSVSPNDGLVCSGSEDRTACIWKLPNLVPSVVLKGHKRGIWSVEFSPVEQCVITSSGDRTVKIWAVADGSCLKTFEGHTSSVLRASFLSHGTQFVSCGSDGLVKLWTIKTNECIATFDKHDGKVWALAVGKKTEMLATGGTDAVLNLWHDCTMEDKQEDFRKKEEELLRGQELENAVSDYDYAKAIQLAFELRRPHRLLELFTQLCRESDLEDPIEKALIGLPKEGLRVLLEYIREWNTKPKLCHVAQFVLFRVLRSLPPTDILEIKGISELLEGLIPYSQRHFSRVDRLVRSTFLLDYTLTRMSVVDPDIDEGTTRDDANGSSVENCEIAQAKPDALVAEENLQKSVKKRKSSKSSKKGGKKVKIASTGGSKDVPIEA

SEQ ID NO: 153706 - protein, 162 aa, Oryza sativa
  unsure (1)..(162): unsure at all Xaa locations
  Clone ID: PAT_MRT4530_53636C.1.pep
GGGRRAAAASSSSAAAVFERRFASAAAKNSYDEILTGLXEPGGGTEFGKYYSLPALSDPRIERLPYSIRILLESAIRNCDEFQVTGKDVEKILDWENSAPKQVEIPFKPARVLLQDFTGVPAVVDLACMRDAMSKLGSDPNKXINPLVPVDLVXIDHSVQVD

SEQ ID NO: 153707 - protein, 654 aa, Oryza sativa
  Clone ID: PAT_MRT4530_53637C.1.pep
MVKTNRFINSLSKRGYIGSYHYEKDAKYRPFSALLPEGSNPKMLYVKLVLIILMCGSFVSLLNSPSIHHNDDHHTESSAGVPRVSYEPDDTRYVSDVTVDWPKISKAMQLVAGAEHGGGARVALLNFDDGEVQQWRTALPQTAAAVARLERAGSNVTWEHLYPEWIDEEELYHAPTCPDLPEPAVDADGDGEEVAVFDVVAVKLPCRRGGGWSKDVARLHLQLAAARLAATRGRGGAAAHVLVVSASRCFPIPNLFRCRDEVAPRDGDVWLYRPDADALRRDLALPVGSCRLAMPFSALAAPHVAAASAPPPRREAYATILHSEELYACGALVAAQSIRMASASGAPSEPERDMVALVDETISARHRGALEAAGWKVRAIRRVRNPRAAADAYNEWNYSKFWLWSLTEYDRVVFLDADLLVQRPMSPLFAMPEVSATANHGTLFNSGVMVVEPCGCTLRLLMDHIADIDSYNGGDQGYLNEVFSWWHRLPSHANFMKHFWEGDSGERLAAARRAVLAAEPAVALAVHFVGMKPWFCFRDYDCNWNSPQLRQFASDEAHARWWRAHDAMPAALQGFCLLDERQKALLRWDAAEARAANFSDGHWRVPIADPRRNICATAAGDGEAAAACVEREIENRRVEGNRVTTSYAKLIDNF

SEQ ID NO: 153708 - protein, 36 aa, Oryza sativa
  Clone ID: PAT_MRT4530_53638C.1.pep
AVPCLPVRLDLGSMAVALDSLPAYITDSSPLSILYL

SEQ ID NO: 153709 - protein, 77 aa, Oryza sativa
  unsure (1)..(77): unsure at all Xaa locations
  Clone ID: PAT_MRT4530_53639C.1.pep
PPLCSIPPLFPLQGEFRVVRLTRLFRGQAVXGDQLLPVSLVKTVSPVETKTPPASYRRLASSFMQVASLVFRAEKGS

SEQ ID NO: 153710 - protein, 53 aa, Oryza sativa
  Clone ID: PAT_MRT4530_5363C.1.pep
FQLCLFSIYILLQRLYNINVLGCFPNVCSFDVKIGRDYCVKTCVFVCVVSSNV

SEQ ID NO: 153711 - protein, 126 aa, Oryza sativa
  unsure (1)..(126): unsure at all Xaa locations
  Clone ID: PAT_MRT4530_53640C.1.pep
NTSNEWTIYKILKSNEFCNPVRPPEIALTSNGPSTFMPTPIWVILDFMENFSHHLXQTHPVSYPNSFRGSSTACHGWYNIVCGVAIAWHPGLVLVGSHVANVALDQSESYPLTRRSGHERERHHSR

SEQ ID NO: 153712 - protein, 417 aa, Oryza sativa
  unsure (1)..(417): unsure at all Xaa locations
  Clone ID: PAT_MRT4530_53641C.1.pep
MKVILCVFEQLSRLKINFQKSENFYAEKSKKEEDKYRQLFGCNLGSFPFRYLGIPIHYPKLQNIDCKKVEDRFKRKLSTWKXKNISYGGRLILLNSVLSNLPIFMLSFFEIPXGVPQRLDFYRSHFFXSSDNQKISIXDESGLGVQNLDIKNRCFLAKCLFQLVNGESLWQDLLQNKYLKGKPLTQISHKPGISQFWAGLKRIKARFFRFGSFRHNNGTYVRFWEASRLGHXPLKYQYPSLHNVTXKKHCSLAYVMSTTPINISFRWAIIGPKSVEWDDLVCRLASIASSNENNCFIWSLYKNGQFSVQSMYSTIVNSNVXYHKRILWEVKVPLKIEVYMWFFXKKVILTKDNLTKRNXRGDKECCFCNAQRXTFNTFFFECHEEHDTMCSGVTLLELVVKDLLFRFEWRDESNEPN

SEQ ID NO: 153713 - protein, 424 aa, Oryza sativa
  Clone ID: PAT_MRT4530_53642C.1.pep
MASSAASSLLVAVVVLVLVAAAEAAAANETSSSATAALRAGRELRRYRRVQALLRRVNKPAVRTIESPDGDLIDCVAAHLQPAFDHPRLRGQRPLRGPPERPRGWRPRPGPNDTAAGDAGVQLWASSAGGASCPEGSVPIRRTTEADVLRASSVRRFGRAPTARVRRDSVSGGHEHAVGYVAGEEYYGAKASINVWAPKVSTPEEFSLSQIWVIAGSFGNDLNTIEAGWQVSPQLYGDNSPRFFTYWTTDAYQTTGCYNLLCSGFVQTNSRIAMGAAISPTSGYKGGQFDISLLVWKDPNHGNWWLEFGNGELVGYWPSFLFSHLASHASMVQFGGEVVNTRADGGAHTATQMGSGHFAGEGFGGASYFRNLEVVDWDNSLVPLAAGFHVTADHPDCYDIQGGVNAVWGNYFYYGGPGKNVKCT

SEQ ID NO: 153714 - protein, 153 aa, Oryza sativa
  Clone ID: PAT_MRT4530_53643C.1.pep
MGLVVPRPPGGAQRARKQRPAPSFGLRNESHQNTQLEPRFTVRASVAITASRALLSRIHRAASRKPTRLARYGLAATVTAAGLPSLDGSRRCVVGGWWHVAITVGKAVGPLGRGDVLGACSPAVFHIAVATGDFPRTVLFHERKLAEFHHLSM

SEQ ID NO: 153715 - protein, 150 aa, Oryza sativa
  unsure (1)..(150): unsure at all Xaa locations
  Clone ID: PAT_MRT4530_53644C.1.pep
YSFNNLDLPGHAIILLDEDIISSDTLITSHTXPMIIPSPSPVRPPETILTSNGPSVFMPTLIWVILDFVESLSRYLXQTHPLSCPNSSRGSSTARHGWYDIVCGVAIARRPGLVLVGSHVANVANVTLDXSESYPLTRRLGHERERHQLV

SEQ ID NO: 153716 - protein, 44 aa, Oryza sativa
  Clone ID: PAT_MRT4530_53645C.1.pep
NYHVQHICSYGILCIKIRSCQVALSRLMLYSCTTDPSLCMVSPS

SEQ ID NO: 153717 - protein, 110 aa, Oryza sativa
  unsure (1)..(110): unsure at all Xaa locations
  Clone ID: PAT_MRT4530_53646C.1.pep
FWNPIRPPETALTSNGPSTFMPTRIWMILDFVESLSRYLXQTHPVSCPNSSRGSSTARHGWYDIVCGVAIARRPRLVLXGSHVANVTLDQSESYPLTRRSGHERKRHHST

SEQ ID NO: 153718 - protein, 1243 aa, Oryza sativa
  Clone ID: PAT_MRT4530_53647C.1.pep
MLRLRRKDSRNGDMASATAGWMKICRDGDNAGGEGTVAANSNTGVDESSEFELKDGALPFYILDAYEEPFGANSGTVYLFGKVEVGKRFHSCCVVVKNMQRCIYAIPSSSIFPRDTISRLEKNSTTSDSSPSLRASLHELASGLKSEIADKLSDFNVSNFAMTPVKRNYAFERTDLPNGEQYVLKINYPYKDSALPTDLRGQHFHALLGTNNSALELLLIKRKIKGPSWLSISKFLACPATQRVSWCKFEVTVDSPKDISVLMTSTTLEVPPVVVAAVNLKTIINEKHNVHEIVSASVICCHRVKIDSPMRSEDWQKRGMLSHFTVMRKLEGSIFPIGLSKESSDRNQKAGSNVLALESSERALLNRLMIELSKLDCDVLVGHNISGFDLDVLLHRAQTCKVPSNMWSKIGRLRRSVMPRLTKGNTLYGSGASPGIMSCIAGRLLCDTYLCSRDLLKEVSYSLTQLAETQLKKERKEVSPHDIPPMFQSSGALLKLVEYGETDACLALELMFHLSVLPLTRQLTNISGNLWGKTLQGSRAQRVEYLLLHAFHARKFIVPDKFARSKEFNSTKRKMNPDTEAARPDEADPSIDDEGHHVDQGKTKKGPSYAGGLVLEPKKGLYDKYVLLLDFNSLYPSIIQEYNICFTTVDRSADGNVPNLPASKTTGVLPELLKSLVERRRMVKSWLKTASGLKRQQFDIQQQALKLTANSMYGCLGFSNSRFYAKPLAELITLQGREILQNTVDLVQNNLNLEVIYGDTDSIMIHTGLDDISRAKGIAGKVIQEVNKKYRCLEIDLDGIYKRMLLLKKKKYAAIKVALDGSLRENIERKGLDMVRRDWSLLSKEIGDFCLNQILSGGSCDDVIESIHSSLVQVQEQMRGGQTELEKYIITKSLTKAPEDYPDAKNQPHVQVALRLKQNGYSGCSAGDTVPYIICSQQDSESTHSERIDSQRAQREPEGWKNLYTMVCLRILASYYLQQRINPVVSRVCAAVSRGTEPARLAECLGLDSSKFQSRLTESDNQDTSSMLLSVIDDEDERYRGCEPLRLSCPSCSTTFDCPPVSSLIIGSSSGNVSNPNEGNDASINFWRRMRCPRCPDDTDESRVSPAVLANQMKRQADSFINLYYKGLLMCDDEGCKYSTHSVNLRVMGDSERGTICPNYPRCNGHLVRQYTEADLYRQLSYFCYVVDATRCLEKLDQKARLPFEKEFAALSQTINLALMEVQKIRDRCAFGWVQLKDLAISI

SEQ ID NO: 153719 - protein, 159 aa, Oryza sativa
  unsure (1)..(159): unsure at all Xaa locations
  Clone ID: PAT_MRT4530_53648C.1.pep
MKDEVPVSPPPPEADYTTARVNLPSAAAEDFSATADVTIKHPPETAVNAFWNPVRPPETALTSNGPSAFMPTPIWVILDFVESLSRYLXQTHPVSCPNSSRGSSTARHGWYDIVCGVAIARRPGLVLVGSHVANVALDQSESYPLTRRSGHERERHHRK

SEQ ID NO: 153720 - protein, 71 aa, Oryza sativa
  unsure (1)..(71): unsure at all Xaa locations
  Clone ID: PAT_MRT4530_53649C.1.pep
ATQTTYFTDCLRRTIRECCCGMVKNHXSLCQVTREAYAKCIRWRTCNLPTAQTIGAMDMPCMRNFTCIKHT

SEQ ID NO: 153721 - protein, 32 aa, Oryza sativa
  Clone ID: PAT_MRT4530_5364C.1.pep
GALRQSGLYKTPLADRNHTDNKRFHLLTQNLI

SEQ ID NO: 153722 - protein, 74 aa, Oryza sativa
  Clone ID: PAT_MRT4530_53650C.1.pep
MDIYNVLGREMGGNAELIERSALQTRSGQSKELARAIMTACKKGRYKNTENFRTGAGSRGHRELRGVPDEANAG

SEQ ID NO: 153723 - protein, 106 aa, Oryza sativa
  unsure (1)..(106): unsure at all Xaa locations
  Clone ID: PAT_MRT4530_53651C.1.pep
GXVVDLLGRSGXLEKXXRFXHXMPXDPXPXVXGXFLGXCXXHGDXAXAEXVXKKLNXFXPCXXGNXTLLSXAYASAHRWSEAXNVRQCXADTDVXXSPGCSAVEAA

SEQ ID NO: 153724 - protein, 1579 aa, Oryza sativa
  Clone ID: PAT_MRT4530_53652C.1.pep
MDEGSADAGASGRRSRARGSEAVARSAALERLRAIRDGGARAAAAVQVRIEAPIYDTVAEEDYAALVARRRKDAGAFIVDDDGLGYADDGREEDWTHRTIHSSSDEGSDGEDGAPRKRKQPRPQSKRPPQQSAAAASLSAAAAMMGKQRLSSMFTSSVFRKPGSDRGRDSSLAADSIVDDVIAEFAPDDNDREERRRRVGRVCAPAPAPTTTAHIKAENVAVDTAMAFRSDNVFEAHEVSDHGNDMDMELKPDVEMEPKLDTPLGASAELANNSNSLEEPKQEANGEVKIEKVHRLNAKIKTEDSRNGDMASATAGWMKICGDGDNAGGEGAVAANSNTGVDESSEFELKDGALPFYILDAYEEPFGANSGTVYLFGKVEVGKRFHSCCVVVKNMQRCIYAIPSSSIFPRDTISRLEKNSTTSDSSPSLRASLHELASGLKSEIADKLSDFNVSNFAMTPVKRNYAFERTDLPNGEQYVLKINYPYKDPALPTDLRGQHFHALLGTNNSALELLLIKRKIKGPSWLSISKFLACPATQRVSWCKFEVTVDSPKDISVLMTSTTLEVPPVVVAAVNLKTIINEKHNVHEIVSASVICCHRVKIDSPMRSEDWQKRGMLSHFTVMRKLEGSIFPIGLSKESSDRNQKAGSNVLALESSERALLNRLMIELSKLDCDVLVGHNISGFDLDVLLHRAQTCKVPSNMWSKIGRLRRSVMPRLTKGNTLYGSGASPGIMSCIAGRLLCDTYLCSRDLLKEVSYSLTQLAETQLKKERKEVSPHDIPPMFQSSGALLKLVEYGETDACLALELMFHLSVLPLTRQLTNISGNLWGKTLQGSRAQRVEYLLLHAFHARKFIVPDKFARSKEFNSTKRKMNPDTEAARPDEADPSIDDEGHHVDQGKTKKGPSYAGGLVLEPKKGLYDKYVLLLDFNSLYPSIIQEYNICFTTVDRSADGNVPNLPASKTTGVLPESFNNLVLHGFLTAMRNLGFGLDCGDMISVGLLMRGFLMIKLLKSLVERRRMVKSWLKTASGLKRQQFDIQQQALKLTANRFYAKPLAELITLQGREILQNTVDLVQNNLNLEVIYGDTDSIMIHTGLDDISRAKGIAGKVIQERDSMHSGERPVNISALMQVNKKYRCLEIDLDGIYKRMLLLKKKKYAAIKVALDGSLRENIERKGLDMVRRDWSLLSKEIGDFCLNQILSGGSCDDVIESIHSSLVQVQEQMRGGQTELEKYIITKSLTKAPEDYPDAKNQPHVALRLKQNGYSGCSAGDTVPYIICSQQDSESTHSGGIAQRARHPEELKRNPDKWMIDIDYYLSQQIHPVVSRLCASIQGTSPARLAECLGLDSSKFQSRLTESDNQDTSSMLLSVIDDEDERYRGCEPLRLSCPSCSTTFDCPPVSSLIIGSSSGNVSNPNEGNDASINFWRRMRCPRCPDDTDESRVSPAVLANQMKRQADSFINLYYKGLLMCDDEGCKYSTHSVNLRVMGDSERGTICPNYPRCNGHLVRQYTEADLYRQLSYFCYVVDATRCLEKLDQKARLPFEKEFAALSQTINLALMEVQKIRDRCAFGWVQLKDLAISI

SEQ ID NO: 153725 - protein, 129 aa, Oryza sativa
  Clone ID: PAT_MRT4530_53653C.1.pep
LDPRPPSLPPWPLSSSPPTSPPHPHPLVRLLLSSSSYAPLHPHLPLLDRPRPPRGRRRALKERLVRLQRPRRGGRRPRPFLRRFLSQVAGEIGSLPGHVRPSRAHPPPPPFPLLWPLLATASTTAEPRH

SEQ ID NO: 153726 - protein, 546 aa, Oryza sativa
  Clone ID: PAT_MRT4530_53654C.1.pep
MGGRGALPVVAGVVLVLLVVAARGASAAGGGGGGGAAAAAVNGDRLRAEQIRKQAKDAAASAAALAAASRRLHLDRARHLRLLSSLHRNLTATLRDLSAAASASASASASEAGLRAKDLIRAARAAIADAKPLFDPQLKIQRLKDAIFAQNELLARAKKRGAFASLIAAKSIPKPLHCLAVRLTAERIARPENYADPVPPPHALEDPAMFHYAIFSDNVLAASVVVRSAVANSLDPSKHVFHVVTDRMNLGAMQFRCKKQFYVQISSMFYSNLSSLLLKVIIRLMDLKGAHYEVKAFEDYKFLNSSYVPVLRQLESANLQKFYFENKLENATKDASNMKFRNPKYLSMLNHLRFYLPEMYPKLHRILFLDDDVVVQRDLTGLWKIDMDGKVNGAVETCFGSFHRYWQYMNFSHPLIKEKFNPNACGWAYGMNFFDLDSWRREKSTEQYHYWQSQNENRTLWKLGTLPPGLITFYSTTKPLEKSWHVLGLGYNPSISMEEIRNAAVVHFNGNMKPWLDIGMNQFRHLWTKYVDYDDSFIRQCNFAPP

SEQ ID NO: 153727 - protein, 53 aa, Oryza sativa
  unsure (1)..(53): unsure at all Xaa locations
  Clone ID: PAT_MRT4530_53655C.1.pep
KPKQAPQEQEARESQRXEQVNKVRPSXPRQRGPTIIISPFSPRRPTVDLDKIA

SEQ ID NO: 153728 - protein, 540 aa, Oryza sativa
  Clone ID: PAT_MRT4530_53656C.1.pep
MGGRGALPVVAGVVLVLLVVAARGASAAGGGDPEAGEGRGGFLAAALAAASRRLHLDRARHLRLLSSLHRNLTATLRDLSAAASASASASASEAGYASAGDEVRRLDLQAKDLIRAARAAIADAKPLFDPQLKIQRLKDAIFAQNELLARAKKRGAFASLIAAKSIPKPLHCLAVRLTAERIARPENYADPVPPPHALEDPAMFHYAIFSDNVLAASVVVRSAVANSLDPSKHVFHVVTDRMNLGAMQFRCKKQFYVQISSMFYSNLSSLLLKVIIRLMDLKGAHYEVKAFEDYKFLNSSYVPVLRQLESANLQKFYFENKLENATKDASNMKFRNPKYLSMLNHLRFYLPEMYPKLHRILFLDDDVVVQRDLTGLWKIDMDGKVNGAVETCFGSFHRYWQYMNFSHPLIKEKFNPNACGWAYGMNFFDLDSWRREKSTEQYHYWQSQNENRTLWKLGTLPPGLITFYSTTKPLEKSWHVLGLGYNPSISMEEIRNAAVVHFNGNMKPWLDIGMNQFRHLWTKYVDYDDSFIRQCNFAPP

SEQ ID NO: 153729 - protein, 417 aa, Oryza sativa
  Clone ID: PAT_MRT4530_53657C.1.pep
MASGKMENGQQQQQQEVRRRRNGEVVVDGSEILQLVENKEAFGKFVEQKFRLLDADGDGRLSVRELQPAVADIGAAIGLPARGSSAQADHIYSEVLNEFTKGKKESVSKSEFQRVLSDILLGMAAGLKRDPIVILRINGEDLNEFVESPRYEPEMAAIFSQVESGNSTLQQCMLAAIRQLTVDHGMPPASDSWSRKRNHFIQGNKYNRVTVILLPRLTKQSGDEVMENIIEPALQELHGDNLEQPVTQEVFFQEFRKFLAILTQRLQGHPVIVAHTENTFDGNGIKKLLSNKLELDKLLDCVWRGVPKEKDRTAKQYIRVAFDRMADSINLPPYGAVEQVDAVVDEAFKMAKAEDGKAVDETEFKKLLTEILGAVMLQLDGNPISVSTNSVLHEPMSTSSTLLSPSPPSPMVSSPSE

SEQ ID NO: 153730 - protein, 126 aa, Oryza sativa
  Clone ID: PAT_MRT4530_53658C.1.pep
RTRGFHVVTDRMNLGAMQVIIRLMDLKGAHYEVKAFEDYKFLNSSYVPVLRQLESANLQKFYFENKLENATKDASNMKFRNPKYLSMLNHLRFYLPEMYPKLHRILFLDDDVVVQRDLTGLWKIDM

SEQ ID NO: 153731 - protein, 58 aa, Oryza sativa
  Clone ID: PAT_MRT4530_53659C.1.pep
LGYNPSISMEEIRNAAVVHFNGNMKPWLDIGMNQFRHLWTKYVDYDDSFIRQCNFAPP

SEQ ID NO: 153732 - protein, 222 aa, Oryza sativa
  Clone ID: PAT_MRT4530_5365C.1.pep
MKAAMATSTLLFLLLAGAAHGAPEDTTTKTIRLPTDGGSAQQAPTTKRPWKCCDNIEQLPEKISPPFWRCNDELEPSQCVAQCEVCQEAPGPFPGPLICSDVYWGADPGPFCTPRPWGDCCDDTVCTREYIPTCRCVDKVASCAAACKDCRPVESSEPPRYVCQDQFKGQPGPMCTPNGGSRSTTDRSIHLFVNINKRSRDDRSFDHSFFLKKKQKKKKNPR

SEQ ID NO: 153733 - protein, 131 aa, Oryza sativa
  Clone ID: PAT_MRT4530_53660C.1.pep
MGGEERELSRVPPFVASTPPQRTTARGPRALSRAASELPPWDGVGGAIAATAILCDNSSTDLRELSHKDVEVYVDIVRSHSSAASACVGMGRRRSTKNPPPRPRACRCCGLLLCSDRERPLGDHEFSTVVS

SEQ ID NO: 153734 - protein, 76 aa, Oryza sativa
  Clone ID: PAT_MRT4530_53661C.1.pep
LQPRNHQVSSHRHPRPLSPKTPLILLLLPCVVNQLLLIVVRKRFSVQASQSLSYLLYCSGVVSTYIDRLAELQRPA

SEQ ID NO: 153735 - protein, 177 aa, Oryza sativa
  Clone ID: PAT_MRT4530_53662C.1.pep
MVHHRSENILLWSTKLCGWWSQSQAGREGCIGKRSPNCGRVVVSTRLVVGEASQLTTTGAALLAFIGSPRGAAGASCSPASLRRLKGVAASRFPRGATPLPALPARLATGCSGVPACSPHLACLRNRLFALQVAASCSHCHRLATRTCPAAARLPRRTGLLEPPPLPPVMDWGMGNG

SEQ ID NO: 153736 - protein, 75 aa, Oryza sativa
  Clone ID: PAT_MRT4530_53663C.1.pep
VHASNWWWMFYVMLWICPRPPPFLFAYIVGHRRISLILGGRWRVILHGLRQRLGRGEGRDVEHAPESGPRRSRRR

SEQ ID NO: 153737 - protein, 64 aa, Oryza sativa
  Clone ID: PAT_MRT4530_53664C.1.pep
QIKLEKKRARAAEKMQKAIKDAQKKADKKKIKEHAATDNQIASVERAMVKMSRTGKLPWSLAFL

SEQ ID NO: 153738 - protein, 344 aa, Oryza sativa
  Clone ID: PAT_MRT4530_53665C.1.pep
MGVSDNTVGLSLAVASSAFIGASFILKKIGLIRAGKGGVRAGGGGYTYLLEPLWWAGMMTMLLGEIANFVAYTFAPAVLVTPLGALSIIVSSFLAHFVLKERLEKLGVLGCVSCIVGSVIVVIHAPQEHMPNSVEEIWNLAIQPGFLTYAVATLVVVAALVLFFEPRYGQTNIMIYLGICSSMGSLTVVSIKAIGVAIKLTLDGMNQVAYPHTWLFVIIAIICVVSQINYLNKALDTFDLAVVSPIYYVMFTTLTIVASGIMFKDWAGQSFSSIASEFCGLITILTGTIMLHTAKEEETGSSAALPWPLDRGSISWCISLGSDNLLKNVNEDYFAALQSSPAPV

SEQ ID NO: 153739 - protein, 155 aa, Oryza sativa
  Clone ID: PAT_MRT4530_53666C.1.pep
MAKTPVLYGSALYIYVVFVEAATSRDQRIHENEENINLSLRTRRTFIHRLWSLWLKETVELLCRLCVITIEGRRIEGMEEEDQVGTGVEVAIRLRRSIFPGNDIRIEHRTSFDDEAIINIQRDLCHFIHHECCHKDGLFFDPEGSLAMSDEYKSL

SEQ ID NO: 153740 - protein, 497 aa, Oryza sativa
  Clone ID: PAT_MRT4530_53667C.1.pep
MLPMVMLQGGGAAASSPSSKRRNQQRRQRRKRAAARKKQGGSPASENNGEEHADAQGCLPDNSTSKSENYKERAFSTQGDLPQKAGCDLEANLCAESVQSSSSQLVHSNENSNPKRPEVKNANSAGNSEHCMLDTRKTTDHDTSSMPLQDSRFDANVRIDGLHSTTEERVCQSTVGDGFTGMSNASYNPYSVQENQRIGPFMREPYTLHSHFLHPSHVRGYIGNKFMGFPPVHPMNAFDPFNQGFNFFHTGNIPPYGVSDVHRGLNIYGLSTMGKWEYDYGRHMDYTNVERNELRMTEEAYLSTHNSANFIRPSSLPLTYQQKPPITLLPRVSLTGFRKKKLLILDLNGLLADINQDYHNSHMADAKDMSKCTFTGHKTLENIHKPLVLKELRKLWNKEEPDLPWEQGYYSPSNTLLVDDSPYKALRNPPYTAIFPQPYSYLNSNDNSLGPGGDLRVYLENLTVAEDVECYVRNNPFGQPFITQSDPHWSFYAQIAS

SEQ ID NO: 153741 - protein, 61 aa, Oryza sativa
  unsure (1)..(61): unsure at all Xaa locations
  Clone ID: PAT_MRT4530_53668C.1.pep
KMLCTVACHRRTVSXLDPSLVGPPFFFFFFFFFFFFFFFLTFIHHSFNTINKIIHNNNTIT

SEQ ID NO: 153742 - protein, 384 aa, Oryza sativa
  Clone ID: PAT_MRT4530_53669C.1.pep
MRADRLMAEGGKRIDLGAPLRSVRHADALPYHKADLNSGPVRHPGAVPFVWEQRPGQPKSVRTRRAPPSPTTASHPQPLEHGVEDEIDGSPYHDALGEHYVGILHGVDASPACSRTGAPAPAPARDEKRAQVAEAAVLQAKKEVTEKQVVSVAAVLRKGDDDDDDEERFSDALDTLSRTESFTVNCSVSGLSGMPEPTSRAAAGAEAGVRGIMMDRFLPAAQAVAIGSPQYTFRKAGAASATSNSGRELARAAGSNASGSSGDDPGRRTPQSWEDVYKHKLEQKYVRPGEDGRSKLTSESNQLTFWSDSQAGNGSSPFHHSAGGGLIECRTPVLGVARPKREFARKFPPSITKREFARKFPPPSLGLDLLLYLKGLPHGPNNLT

SEQ ID NO: 153743 - protein, 62 aa, Oryza sativa
  Clone ID: PAT_MRT4530_5366C.1.pep
ITMSHGLDTTTIFHVGLDDTSSHRHDQVLYFNKHCIHLQLRLKTQNTNEKMFSSSCCLLQQH

SEQ ID NO: 153744 - protein, 107 aa, Oryza sativa
  Clone ID: PAT_MRT4530_53670C.1.pep
GGAELLRRRRRGRCRPSCSSAPSSSSSLVVDVGEEGAAGARTWGGGEPAARGRRRRRGGSRPAAESSSSPAAEVGSRGGSRPRRTWGEEGSRRREGRRRGRGEPSAR

SEQ ID NO: 153745 - protein, 61 aa, Oryza sativa
  Clone ID: PAT_MRT4530_53671C.1.pep
MSSDEEPDGSKSIDLSLPTPRAGGFLATGHGSGQLMIALALGVTTTAVASVAWICRCGPWE

SEQ ID NO: 153746 - protein, 170 aa, Oryza sativa
  Clone ID: PAT_MRT4530_53672C.1.pep
MALAPPLCDLLAAPPPSTSAAADAAHDHAGALAPHRRASPLRRRGRLFLACRVPAAAPSARGVAAEAAAGRPTVLVTEKLGDAGLELLRRFANVDCAYELTAEELRAKVSLVDALVVRSATRVTREVFEAARGRLRVVGRAGVGIDNVDLQAATEAGCLVVNAPTGNTVA

SEQ ID NO: 153747 - protein, 153 aa, Oryza sativa
  unsure (1)..(153): unsure at all Xaa locations
  Clone ID: PAT_MRT4530_53673C.1.pep
CNPRGYTVLHIAARRREPKIIVSLLTKGARPADVTFDGRKAVQISKRLTKQGDYFGVTEEGKPSPKDRLCIEILEQAERRDPQLGEASVSLAMAGESLRGRLLYLENRVALARIMFPMEARVAMDIAQVDGTLEFNLGSCANPPSXRQRTTVD

SEQ ID NO: 153748 - protein, 45 aa, Oryza sativa
  Clone ID: PAT_MRT4530_53674C.1.pep
MARGFGPAQARHDLYFGTMARPGMARSGRVGPTDIGPSPVMLGPC

SEQ ID NO: 153749 - protein, 615 aa, Oryza sativa
  Clone ID: PAT_MRT4530_53675C.1.pep
MEPPTSHVTNAFSDSDSASVEEGGADADADVEALRRLSDNLAAAFRSPEDFAFLADARIAVPGGGGGGGDLLVHRCVLSARSPFLRGVFARRAAAAAGGGGEDGGERLELRELLGGGGEEVEVGYEALRLVLDYLYSGRVGDLPKAACLCVDEDCAHVGCHPAVAFMAQVLFAASTFQVAELTNLFQRRLLDVLDKVEVDNLLLILSVANLCNKSCMKLLERCLDMVVRSNLDMITLEKSLPPDVIKQIIDARLSLGLISPENKGFPNKHVRRIHRALDSDDVELVRMLLTEGQTNLDDAFALHYAVEHCDSKITTELLDLALADVNHRNPRGYTVLHIAARRREPKIIVSLLTKGARPADVTFDGRKAVQISKRLTKQGDYFGVTEEGKPSPKDRLCIEILEQAERRDPQLGEASVSLAMAGESLRGRLLYLENRGNLHIYHNGFIMLVSLELTVFGLGNKRKFLYDVVALARIMFPMEARVAMDIAQVDGTLEFNLGSGANPPPERQRTTVDLNESPFIMKEEHLARMTALSKTVELGKRFFPRCSNVLDKIMDDETDPVSLGRDTSAEKRKRFHDLQDVLQKAFHEDKEENDRSGLSSSSSSTSIGAIRPRR

SEQ ID NO: 153750 - protein, 55 aa, Oryza sativa
  Clone ID: PAT_MRT4530_53676C.1.pep
VALQALPMVIIITSQFICLLQPQAQAQASGSHLPSMLSLPRYAALHAKLLCHRFW

SEQ ID NO: 153751 - protein, 211 aa, Oryza sativa
  Clone ID: PAT_MRT4530_53677C.1.pep
MAAASIPASSQPFKLILGSSSVARKHILTEMGLEFEVMTADIDEKSIRRENPDELVTVLAEAKADAIMSRLNISDYQKEGDRPTLLITSDIVVVHEGIIREKPTTKEEARQFLKGYSGSHVSTVGSVVVTNLTTGKRLESLDKAEVYFHDIPDEIIENLIDERVVFRVAGGLLLEHPLTLPFVEAVVGSSDSVMGISKDLANKLIQDALSA

SEQ ID NO: 153752 - protein, 67 aa, Oryza sativa
  Clone ID: PAT_MRT4530_53678C.1.pep
RVISWWCYISKMLFGLAKAPLRVPRKFTDPKNLLLHKIQIRWNAWTFSARMCIIIIPRSCTHPVSHG

SEQ ID NO: 153753 - protein, 127 aa, Oryza sativa
  Clone ID: PAT_MRT4530_53679C.1.pep
PPPFRGTIPPPPFLLVLVPPAPGGGGKKTGHFRRFPLFGPRNGPFLGGGGFPGWGLACPGFSPVFWPKGGPLLGPKRFCLLEARGIPPPKERVLGPPPREGKKKKERLPFGLGPAPPPKKNNFPGFP

SEQ ID NO: 153754 - protein, 381 aa, Oryza sativa
  unsure (1)..(381): unsure at all Xaa locations
  Clone ID: PAT_MRT4530_5367C.1.pep
MVQLYLGPWPWANRRRRLRASRFWWLYDDDDGDQFNPLNTPRATEQVQTKSKGVVGAGRGVVGAGGAGGVVGGVLDGGALGAGGAGGVLGAGGVGRRRLRRRLLTRRRRRRGLASVADVLESNSEIRGRAAVGYLSMLCKITWTVLLGTTLSHPLDQTKSMAQIACTGGRPSRAGAPTRPTAAPRSSHDASSLACGPPDLLAYLPLPSLHKPACGKTSASFVSSAVGLPLDSIKMEWAPLEDLIDPKHAKKRPVSLYIPNLETDPLTLAWKVTVLQFASSLPTTTSNGTHPSSLVCLHTVRSSSAQNHSTAGVEKTGVQRQRPQQTEASRHSCSYSYMKNGLPHMQLSTIEEEXTKFRNNARGIICDQTSLLLLRLINFIV

SEQ ID NO: 153755 - protein, 127 aa, Oryza sativa
  unsure (1)..(127): unsure at all Xaa locations
  Clone ID: PAT_MRT4530_53680C.1.pep
MSGRAAVARSGAAAWRPGGGVSRRCRGARSGGVGRPGGMPRRRRGVAAVWRDGVASSRRRGRACRIVAVAVXGRYVVSGGSRVEVGVGIGGRRSRARLSPKRCVGGGGDEDRETTVRDDGGVGAGFP

SEQ ID NO: 153756 - protein, 49 aa, Oryza sativa
  Clone ID: PAT_MRT4530_53681C.1.pep
FFFFNEPKEFCFAKEGQKNSTVQNNQPSWNSIVCLLSLPKNIMNALTTH

SEQ ID NO: 153757 - protein, 87 aa, Oryza sativa
  Clone ID: PAT_MRT4530_53682C.1.pep
WFFLKVGYSQRLCLVMDTISYKYTGSYKEGIASIDMKLQYGADDIGASSLFKHPITSISKCTRTLLLPGKQGHCYLGVYIRLPGTED

SEQ ID NO: 153758 - protein, 58 aa, Oryza sativa
  unsure (1)..(58): unsure at all Xaa locations
  Clone ID: PAT_MRT4530_53683C.1.pep
MAALAAASTAFXAKPRLAXXPSSPAARXSXSCSXSGNNGXXXEMAQSLXASXKXFSXA

SEQ ID NO: 153759 - protein, 224 aa, Oryza sativa
  Clone ID: PAT_MRT4530_53684C.1.pep
MWAIFAFAMRAPAAAAGVVGAAPDRSAADSAALAAGDRRTDAIHDLAKSVPALGWDGDNVCGFEAVTCERGGSGKVTELNLANRVLAGTLPPTLSSLTSLTALQLQGNALAGAVPSLAGMASLTRLALDGNAFTSLPPDFLLGLTSLQYLSIDNLPLQPWPAPDAIANCSSLETFSASNALRSGGGADHARRRIPPPPPELACSAAHPRRRQPGKERERGERKK

SEQ ID NO: 153760 - protein, 126 aa, Oryza sativa
  unsure (1)..(126): unsure at all Xaa locations
  Clone ID: PAT_MRT4530_53685C.1.pep
SFVFHRNLANNNLEGQIPDNISSCINLISFNAYGNKLNGTVPRSLHKLESITYLNLSSNYLSGAIPIELAKMKNLDTSGLSCNMVGGSIPSAIGSLEHLLXLNFSNNNLVGYISAEFGNLRSIMEM

SEQ ID NO: 153761 - protein, 130 aa, Oryza sativa
  Clone ID: PAT_MRT4530_53686C.1.pep
MSDEATRRLAGGGGGGAALRASSDVDRKPAAAGSPPPGAAAAAGHKIQLKSADMKEEMRQEAFDIARVAFEKHTMEKDIAEYIKKEFDKNHGPTWHCIVGRNFGSYVTHETNYFVYFYIDSKAVLLFKSG

SEQ ID NO: 153762 - protein, 85 aa, Oryza sativa
  unsure (1)..(85): unsure at all Xaa locations
  Clone ID: PAT_MRT4530_53687C.1.pep
KAAPEGENRGPGGGRAGATDDRTREAAXATHGESRDAKTNIFFXTGRTRGRGSRTGAYEQPHRDASEGMNGKELDGRNSTGNEGP

SEQ ID NO: 153763 - protein, 1043 aa, Oryza sativa
  unsure (1)..(1043): unsure at all Xaa locations
  Clone ID: PAT_MRT4530_53688C.1.pep
MARHLAPPGSFHRLLASRHYPPSSPAPPPRPLLLLPKTLIPPAAAAMEFPRRGRRDVAAASAPASSSPETEVAPGAWGKVSAVLFDMDGVLCNSEELSRLAGVDLFAEMGVDVTGDDFVPYMGTGEANFLGGVAKLKGVKDFNAESAKKRFFEIYLDKYAKPNAGIGFPGALDLVTECKNAGLKVAVASSADRIKVDANLAAAGLPLSVFDAIVSADAFENLKPAPDIFLAASKXLAGVQAAKAAXMRCIXAVMTTLEEDALQQASPSLIRKNIGDISIRDILYGGSNAYLKKKTLHILLCRTHYICFVSLVGTRRNILRYGSLGIAVSCLIYTTRNWKLVIFLNTYNYHFYTVHGMSLAASITQSSLSEQLTPCSLYLPKGCLIISRVEIVRYLLVMKDLKGRVVLLDFWTYCCINCMHVLPDLEFIEKKYKDKPFTVVGVHSAKFDNEKDLEAIRNAVLRYNITHPVVNDGDMYLWRELGVNSWPTFVVIGPNGKVLAQISGEGHRKDLDDVVGAALEFYEENKLLQNSSLPLALEKDKDSRLLASPLKFPGKLAIDVLNNRLFISDSNHNRIVVTNLEGEFICQIGSSEEGLLDGTFDTASFNRPQGLAYNSKKNILYVADTENHALRTLTWFIVLSLHVILISDCHMFTIAYYTVSTSQNINIGKLKVLNSPWDVCYDPSKETLYIAMAGQHQIWKHNTLDGVTEVLSGDGYERNLNGSSYPLCINEHVVYVSFYSHGIALESHFYCECWNCSLYPLLCYLGPTWFLQYLFGDHDGTGSDVLLQHPLGVVYASDNQIYVADSYNHKIKRLDPVTRKVTTIAGTGRAGYKDGPALSAQLSEPAGLVEVGDGRLLVADTNNSTIRYIVLNEKGAEVRTLDLIGVQPPSPKPKTLKRLRRRLSADTDVINIDGGSSIEGYLSLAISVPDGYHFSKEARSKFDVDIEPADAIEIEPVNGFLNSGQASLKYRRKSSSSSTGRINCKVYYCKEDEVCLYQSVAFDVKFREEAVPSPAQITLSYSVVPRDTSSSAQLIAAGKNGKV

SEQ ID NO: 153764 - protein, 75 aa, Oryza sativa
  unsure (1)..(75): unsure at all Xaa locations
  Clone ID: PAT_MRT4530_53689C.1.pep
MVGCEHMILMVVLMTIKDRFTSFGCETLTVPNTSQHRQRLDTLYSKAHCGVPDXEVAEISPRGSLGSLCLWFLRG

SEQ ID NO: 153765 - protein, 85 aa, Oryza sativa
  unsure (1)..(85): unsure at all Xaa locations
  Clone ID: PAT_MRT4530_5368C.1.pep
SXCXKITALCPVALLEKASXLLRWQXKHPATKLPWKVHGXPVLXVSSPLYLTAADXXDLEAEEERELEMAHGRLLXIGXXCAGVR

SEQ ID NO: 153766 - protein, 93 aa, Oryza sativa
  unsure (1)..(93): unsure at all Xaa locations
  Clone ID: PAT_MRT4530_53690C.1.pep
QINLVVXRSLPPRRVPVFIGREDTAKFSEGCKHRWSHDRDMAAHDGNWEAACLTAIIWVSQNGQLXPPPXWLLXRGGSRVFQLVDVLEGGFLV

SEQ ID NO: 153767 - protein, 36 aa, Oryza sativa
  Clone ID: PAT_MRT4530_53691C.1.pep
ASGNDFHLEIKPVYLSITASAPAALTSTRNCSRTRG

SEQ ID NO: 153768 - protein, 190 aa, Oryza sativa
  unsure (1)..(190): unsure at all Xaa locations
  Clone ID: PAT_MRT4530_53692C.1.pep
DFVPYMGTGEANFLXGVAKLKGVKDFNAESAKKRFFEIYLDKYAKPNAGIGFPGALDLVTECKNAGLKVAVASSADRIKVDANLAAAGLPLSLFDAIVSADAFENLKPAPDIFLAASKTLGVDTDECIVIEDALAGVQAAKAAEMRCIAVMTTLEEDALQQASPSLIRKNIGDISIRDILYGGSNAYHSM

SEQ ID NO: 153769 - protein, 109 aa, Oryza sativa
  unsure (1)..(109): unsure at all Xaa locations
  Clone ID: PAT_MRT4530_53693C.1.pep
HVEEHAETFPQAXGATSVSGEEDAGAEXXATSRRPREGNSIARRPAVLGFWGGEGEGAAAVPGRKAGSAGRRXGGGSFLVARGAAPWRGGRVVCQVLGSPLASSSGRVG

SEQ ID NO: 153770 - protein, 198 aa, Oryza sativa
  Clone ID: PAT_MRT4530_53694C.1.pep
YKKHFPPLLTDNVWRLRNIGKDGPIDKRLEAEGIKNVQDFLKLNTMNPNKLKSLVGMSDRQWSATLKQAKSCDMGGKCYVFKSEGCEIKFNPVGEILAVRFGGYINQAEGLMENSGWEPSEMSQESMISSASQNAMYVDSLGTATTSTAEMVTNNISTLEPASTVPDSALYSWNSGMAADDHFSWQNNTNLVPWDHAN

SEQ ID NO: 153771 - protein, 99 aa, Oryza sativa
  unsure (1)..(99): unsure at all Xaa locations
  Clone ID: PAT_MRT4530_53695C.1.pep
SPQYAKPPTPFLQSAAFQIKNTQVWHQPALVAHHSPXQAFTIVQAKAHHLQLHRFGDPPLDRNRAQAQALLPFNVPSKYGIPPRYYGAPRPIPPLGGVL

SEQ ID NO: 153772 - protein, 520 aa, Oryza sativa
  Clone ID: PAT_MRT4530_53696C.1.pep
MSVRRPRVEEEVDDDDQDGSSGSAEEHQQRRHGARRLRPVLSFRSVVRRAVAAETIQQIVLNLEPVIRRVVREEIRNIFPQYGHDLPHRSLPLQIQDVGVSPPLKLVFTKQLKLPIFTNNKLVDIDNNPIEIQLVDTRTNLIVTPSNTHLGYSAIKLEVLVLDGDFRYDEDGARWTDDQFSTAIVKAREGRRPLLVGTVSVTMSNHGVAVIDDVSFTDNSSWIRSRKFRIGVRVVMLTDSCGLRIQEAVSESFTVKDHRGELYKKHFPPLLTDNVWRLRNIGKDGPIDKRLEAEGIKNVQDFLKLNTMNPNKLKSLVGMSDRQWSATLKQAKSCDMGGKCYVFKSEGCEIKFNPVGEILAVRFGGRMCSLHELLPHQMVQIKQLVSQAYQQWDQMEEVQNEMALVDKSLIPFHDEKPMISSGMPSYINQAEGLMENSGWEPSEMSQESMISSASQNAMYVDSLGTATTSTAEMVTNNISTLEPASTVPDSALYSWNSGMAADDHFSWQNNTNLVPWDHAN

SEQ ID NO: 153773 - protein, 72 aa, Oryza sativa
  Clone ID: PAT_MRT4530_53697C.1.pep
MAVVAWRRGVGESLAGGGDSSGRRRIACAVETKRRGKGGRTDAVIEGDLHKKQISIDECGRLKEGGFTVLKK

SEQ ID NO: 153774 - protein, 250 aa, Oryza sativa
  Clone ID: PAT_MRT4530_53698C.1.pep
GAAVEGERGDRWRSGDGGDRRGREVAGGGARVARKGKRGRRNGELGQLAAAAGEETVGRGEERRGAWHGAAAWERSGVAPTSSLFERTLTNLLAGIPALLAGLLALLAGLPISFPSTPRASSPKRRSSTLEPPLCRSPVAATADHNDCLARTRKREGTYTTGRIWRSSEPAAAPIDTLRSTPLPRRCAVRCFSPRLPRAQVGRARTGLPAASPSPSKPLCPTTRQPLPRSLAAHRLHPRIATPPAAGLSH

SEQ ID NO: 153775 - protein, 143 aa, Oryza sativa
  unsure (1)..(143): unsure at all Xaa locations
  Clone ID: PAT_MRT4530_53699C.1.pep
MPSSTADLALPYGLHTVGERRCILDLEVEITGVEAERQRIXQDWLVVVAGHRREEEGDGPTGHLPSSVPCAAPPPLAXPRRSSDRATPPPSHSSDCAAPLVGPRPXVLSAPAVEKRERRGDRRMWQSSHHFFKKNNRGDPPVS

SEQ ID NO: 153776 - protein, 149 aa, Oryza sativa
  unsure (1)..(149): unsure at all Xaa locations
  Clone ID: PAT_MRT4530_5369C.1.pep
VTVSTKTPRATEQVQTKSKDVVGARQGVVGAGGAGGVGGGVLDGSVLGAGGAGGVVGTGGVGRRRLRRRLXTRRRRRRGPASLADVLESSSEIRGRAAVDYLSMLYKITWTVLLGTTLSHPLDQTKSMVQITCTGRYQVPAGPQLFPQA

SEQ ID NO: 153777 - protein, 131 aa, Oryza sativa
  Clone ID: PAT_MRT4530_536C.1.pep
MAAAAVALLAFLLAAASAASSASAAAATLVEGGVVGRAAVVMRRGGRTCRGTVGECMEFLGVDGEGEDELAAAATGKRRVLQGGSGYIGYDALRRDSVPCSQRGASYYNCQPGAEANPYSRGCSAITQCRG

SEQ ID NO: 153778 - protein, 110 aa, Oryza sativa
  Clone ID: PAT_MRT4530_53700C.1.pep
GKEGTLDAARRASAFVRGDDVVHKLFTELAYRYKNRAGGYTRLLRTRIRVGDAAPMAYIEFVDRENELREAKPATPQPPQRSPLDPWAKSRASQQWAGPKISEGSRKEGL

SEQ ID NO: 153779 - protein, 70 aa, Oryza sativa
  Clone ID: PAT_MRT4530_53701C.1.pep
NIRNKNHMYSNIITKCNSDVKCFCPFKPSSKSINILSIKSSKARQAHIQSFSKRDSKNKKQTSALIDPSC

SEQ ID NO: 153780 - protein, 212 aa, Oryza sativa
  unsure (1)..(212): unsure at all Xaa locations
  Clone ID: PAT_MRT4530_53702C.1.pep
SSIAGAKVNIIVGSHVWAEDPELAWVDGEVVKIKGEEAKIQATNGKKVSXNSFLAFSXDIIAAAGGVDDMTKLSYLHEPGVLQNLATRYELNEIYTYTGNILIAVNPFQRLPYLYDPHMMQQYKGAPFGELSPHXFAMADVAYRAMIHEGKSNSILVSGESGVGKTETTXMLMRYLAYLGGRAATEGRIVEQQVLESNPVLEARSHPNTCRN

SEQ ID NO: 153781 - protein, 69 aa, Oryza sativa
  Clone ID: PAT_MRT4530_53703C.1.pep
YIFFFLADQWAHRLRRAWCFVVNFAHDDAPSRTHPSALRLSAGTKGHGGGGHVYLALMFPAQRFGLALR

SEQ ID NO: 153782 - protein, 121 aa, Oryza sativa
  unsure (1)..(121): unsure at all Xaa locations
  Clone ID: PAT_MRT4530_53704C.1.pep
MHLNTIVNFPMTNGIIRIYSIFSSIAGAKVNIIVGSHVWAEDPELAWVDGEVVRXKIQATNGKKVSXNSFLAFSLMYCYLCLCCQFFXIIAAAGGVDDMTKLSYLHEPGVLQNLATRYELN

SEQ ID NO: 153783 - protein, 108 aa, Oryza sativa
  Clone ID: PAT_MRT4530_53705C.1.pep
MADSGDFTWCARSLGKSCGCAGLDDAELVPSDGSAVAAAKQSSATRRWVIVKVTHTLINIFGILSRYFLKLMKSLRVSRFHTPYLCAHLWKTGSAFLEIDDVTTTGIS

SEQ ID NO: 153784 - protein, 193 aa, Oryza sativa
  unsure (1)..(193): unsure at all Xaa locations
  Clone ID: PAT_MRT4530_53706C.1.pep
MRPILLAGHERALTQIKFNKDGDLIFSVAKDQQICAWFSHNGERLGTYHGHVGAIWTVDVNPTSTMIASGSADNTIRLWEVKSGRLIKTWEFPTAVKRVEFNEDGTKLLGVTEKRMGYLSNIVVIDINPDLNAEQNDEKSLTIVCDESKATVAGWSALSKXIIAGHEDGSVSRYDAKTGDLLDNVPVHELTSL

SEQ ID NO: 153785 - protein, 62 aa, Oryza sativa
  Clone ID: PAT_MRT4530_53707C.1.pep
PSRRNRSLGRLLFRREDTNSSSSQVGLRVGRPWVVQSSYFLSTLHQPCSPVRVKAGSSIGAR

SEQ ID NO: 153786 - protein, 113 aa, Oryza sativa
  unsure (1)..(113): unsure at all Xaa locations
  Clone ID: PAT_MRT4530_53708C.1.pep
FFFFFFFFFFFGKTXTXWTFFTVIGNHHFFLNPLGTKLVPKSKSHXSYYKETSRXCSXSKHHCLNLRTLLRMVLRCYSWREXLCYPSFTSVLCLRXGLHLKIGNWXXXSNQHN

SEQ ID NO: 153787 - protein, 48 aa, Oryza sativa
  Clone ID: PAT_MRT4530_53709C.1.pep
NFSDKPGNHNFELLKKLVLPDGSVLRARLPGRPTRDCLFVDPARDGAR

SEQ ID NO: 153788 - protein, 189 aa, Oryza sativa
  Clone ID: PAT_MRT4530_5370C.1.pep
MGRGKIEIKRIDNATSRQVTFSKRRSGLFKKARELSILCDAEVGLLVFSSTSRLYDFASSSMKSIIERYNETKEDPHQTMNASSEAKLWQQEAASLRQQLHNLQEYHRQLLGQQLSGLDVEDLQNLESKLEMSLKNIRLRKDNVMMDQIQELSRKGSLIHQENMELHKKVSLVHQENINLQKKVAVPTA

SEQ ID NO: 153789 - protein, 157 aa, Oryza sativa
  Clone ID: PAT_MRT4530_53710C.1.pep
VALEPDVLSALQLPEYRYHLEALLYAHAVPGTILSSNITDGETVDSLNGPLTFTVNDQGVFVSGGGFNLSQVVEADDEASNGVVHVVDQVFLPTNLVQTTWQNLLDVPEGFDVLKELLEATNLNVALESSEPLTIFAPSDDVFAGVSQETLDALNLT

SEQ ID NO: 153790 - protein, 94 aa, Oryza sativa
  unsure (1)..(94): unsure at all Xaa locations
  Clone ID: PAT_MRT4530_53711C.1.pep
TGRYRENSTMKTRKATFEARLQKNVEHIAATLERLSCASRGKVMQRGHQLLVGRNLQSQEQKGQISLCQASRVRRAQXSMTIIFPEMATSLKDS

SEQ ID NO: 153791 - protein, 50 aa, Oryza sativa
  unsure (1)..(50): unsure at all Xaa locations
  Clone ID: PAT_MRT4530_53712C.1.pep
LRGTTVINTRCXALSIPRHRADRRGHPQCYHRSAHTFHTWGAVXRAQTPT

SEQ ID NO: 153792 - protein, 131 aa, Oryza sativa
  Clone ID: PAT_MRT4530_53713C.1.pep
MREWQRPDSPAAAAPAQMSSTCGAHGGRAKWMDGWMGGWNAAARAVTANAVLGSGEGTTPLWLALCRGRTMDGDTNAAGAMGVEVKPFTMEGGGRRKPGAEADADAKAHTIGTAAASSSPTVSPRWRGIMW

SEQ ID NO: 153793 - protein, 190 aa, Oryza sativa
  Clone ID: PAT_MRT4530_53714C.1.pep
MEWTRHARNMNTKEKEADKNADATINRNNRRSYKTRAWNSGGDAGVATARFPSCRRSRPDELDVRRPRRPGQMDGWMDGVMVERGGRPLLAAAFRRGWNAAARAVTANAVLGSGEGTTPLWLALCRGRTMDGDTNAAGAMGVEVKPFTMEGGGRRKPGAEADADAKAHTIGTAAASSSPTVSPRWRGIMW

SEQ ID NO: 153794 - protein, 131 aa, Oryza sativa
  Clone ID: PAT_MRT4530_53715C.1.pep
MRARRVVAAAAVLLLFAVVAVARLDLDDDGDDSEVLDELLAVDEEEERGELGGGGEAAAAEAVRRAQSMVLVLDNDNARSAVEENAEVLLLGYAPWCERSAQLMPRFAEAAAALRAMGSAVAFAKLDGERY

SEQ ID NO: 153795 - protein, 220 aa, Oryza sativa
  Clone ID: PAT_MRT4530_53716C.1.pep
SLPLTRRHRRRRRPRLPLLRRRRIRRLAATDPRATTIAAALDCRHSAVTHRRIRRRRRRRPRLPPLRRRHIRRRRHPRLPPLRLRRIRRLAATDPRRRLALNQSPSPSSHPSSSRIYVTVPSPHPHDDPRRRNGSWWPGRILGPDELPASQVMSPKTRTPVKLLGREDASVDAALFSRLTPAPAPSSGHVRVRDSKSRWSDFSTPALASHRLRSARQQGS

SEQ ID NO: 153796 - protein, 93 aa, Oryza sativa
  Clone ID: PAT_MRT4530_53717C.1.pep
MYGSIPVMKGEAKIALPQGGKGAACKIPCPLAAHLQAAHPHRTRIAFLEAVPLAALDYQHDIDKCLVIIDTVRLRGQPNGPGIFGAHWRINVS

SEQ ID NO: 153797 - protein, 150 aa, Oryza sativa
  unsure (1)..(150): unsure at all Xaa locations
  Clone ID: PAT_MRT4530_53718C.1.pep
LQEFGTRTEDAITRTAFGRSYEDGNXVFKLQAQLMAFASEAFRKVFIXPGYRFLPTKKNTSSWKLDKEIRKNLVTLIGRRQEAGDDEKLDGCAKDLLGLMINAAASSNGGKRSALPVSPITVHDIVEECKTFFXFAGKQTTSNLLTWAIV

SEQ ID NO: 153798 - protein, 29 aa, Oryza sativa
  Clone ID: PAT_MRT4530_53719C.1.pep
STSRIMGFMEYPAKTYPTSYNCSLQVKNL

SEQ ID NO: 153799 - protein, 203 aa, Oryza sativa
  Clone ID: PAT_MRT4530_5371C.1.pep
MAAPFVYCRPTDDGTSESALLRAAFDGNLGRLKGILKSLGIEKGKTQYAVLALNKHGIGMLHAVACQGHLNVCKFLVEELGGDVNIAGKEDITPFMAAAESGDVPTVQYFLDHGGDVTKADVRGCTVLHHAAGTGCCKVTEFLLSKGIPVDIDCGLGTPLFHAANNGKDKTLKILLDHKADWRSQDKIIVGAPQTFGPSNNLR

SEQ ID NO: 153800 - protein, 180 aa, Oryza sativa
  Clone ID: PAT_MRT4530_53720C.1.pep
ADLSKCVRDFHHGGNKARKHHFPFLTADHGGGAAAASPLFGCQPFTITPSSESRSSSSSRHSNGKMFAHDGGLDNCALSLLSDNPTPTAQITIPQPLFAGGGQYGGGGGGDVSLTGLSYVRMAGKDTSILAKSATTTATTATTPTTTSAQLQYHGYYHHHVSADQGSSDAAIQALPFSSW

SEQ ID NO: 153801 - protein, 142 aa, Oryza sativa
  Clone ID: PAT_MRT4530_53721C.1.pep
CFFNFLFFFFFFFFFFFFFFWEGNSPLNLIRKESKLPMGICFLDNKNKRFRHFFIYKRKNALPHKQDLGGTKYPGAKRLQEPRKNGLVWFTLCQRNSLKKKGGQMKKTSFMNIQDPPLKRKVPEFLKKPGQKPGAFFFIGNT

SEQ ID NO: 153802 - protein, 171 aa, Oryza sativa
  Clone ID: PAT_MRT4530_53722C.1.pep
PDPKDKKPESWDDDDDGVWKPRMIPNPEYKGRWKRKKIKNPNYKGKWKIPWIDNPEFEDDPDLYVLKPLQYVGIEVWQVKAGSVFDNILICDDPEYARSVVDEVRAANKEAEKEAFEEAEKRRKAREDEEARRAREEGEKRRRDRDRHRGRDRYRDRYRGHHRRYDYHDEL

SEQ ID NO: 153803 - protein, 63 aa, Oryza sativa
  Clone ID: PAT_MRT4530_53723C.1.pep
MGGVSLPHRHPAPPPFFASLPPKQAARKPRGCKDDGGAFPLPPWRELRENGETLARATWDGGG

SEQ ID NO: 153804 - protein, 71 aa, Oryza sativa
  unsure (1)..(71): unsure at all Xaa locations
  Clone ID: PAT_MRT4530_53724C.1.pep
MAAPDVEYRCFVGKLFCDTDYRILEGKFFIYCDLHRLRKACIKKTLLIHCLQELMXLHHESEEDVTDTEQA

SEQ ID NO: 153805 - protein, 626 aa, Oryza sativa
  unsure (1)..(626): unsure at all Xaa locations
  Clone ID: PAT_MRT4530_53725C.1.pep
MATAAGMGIGAACLVAPQVRPGRRLRLQRVRRRCVAELSRDGGSAQRPLAPAPLVKQPVLPTFLVPTSTPPAPTQSPAPAPTPPPLPDSGVGEIEPDLEGLTEDSIDKTIFVASEQESEIMDVKEQAQAKVTRSVVFVTGEASPYAKSGGLGDVCGSLPIALALRGHRVMVVMPRYMNGALNKNFANAFYTEKHIKIPCFGGEHEVTFFHEYRDSVDWVFVDHPSYHRPGNLYGDNFGAFGDNQFRYTLLCYAACEAPLILELGGYIYGQKCMFVVNDWHASLVPVLLAAKYRPYGVYRDARSVLVIHNLAHQGVEPASTYPDLGLPPEWYGALEWVFPEWARRHALDKGEAVNFLKGAVVTADRIVTVSQGYSWEVTTAEGGQGLNELLSSRKSVLNGIVNGIDINDWNPSTDKFLPYHYSVDDLSGKAKCKAELQKELGLPIRPDVPLIGFIGRLDYQKGIDLIKLAIPDLMRDNIQFVMLGSGDPGFEGWMRSTESGYRDKFRGWVGFSVPVSHRITAGCDILLMPSRFEPCGLNQLYAMQYGTVPVVHGTGGLRDTVENFNPFAEKGEQGTGWAFSPLTIEXNAVGIADGNFDIQGTQVLLGGSNEARHVKRLYMGPCRLTV

SEQ ID NO: 153806 - protein, 124 aa, Oryza sativa
  Clone ID: PAT_MRT4530_53726C.1.pep
YGTLQLFHLKNQGNCSRQLLTPDGRLSVSSAYELFFMARELCVSSELIWTTKTPSKVRFFLWLAAKGHCSTADNLEKKGWPHEEHCVLCQREDESCSHLLLTCDYTQRVWLLMKKWIGMCLLDI

SEQ ID NO: 153807 - protein, 242 aa, Oryza sativa
  Clone ID: PAT_MRT4530_53727C.1.pep
MAAAARDDDLGNGDLDDDLSNPRRRSRGRTEAEAVRPPIHAASPEAARLAETGGGERRTAGRIWRGRRSHRRRRHLDEAKTSTALSSSTIGGGGEPPVAGAAGETRVAGSEGGAWRRRAAVATFTKVAPSALLTASAAQGGRYRSSLRSPRWPSPVPVPHLAGGNKAKALLSDGDDDGELGQRMQASDDAPPSPWWQQHERRELVHGGDMQRQEGHEQGSGDGAAGGERGGKRWWGPQMASG

SEQ ID NO: 153808 - protein, 126 aa, Oryza sativa
  unsure (1)..(126): unsure at all Xaa locations
  Clone ID: PAT_MRT4530_53728C.1.pep
PSTRDTAPGGFRVLTVKFACFLIANKGFIGVSADELSGHCIGLQRLHPIGFYWIILLLCCYXSLADCLYIVIYIKHITDSSKLYRYQLDQTDWHACILSRFGPALELSRSPRPVCVFRVNRGVGPH

SEQ ID NO: 153809 - protein, 149 aa, Oryza sativa
  Clone ID: PAT_MRT4530_53729C.1.pep
MNESALTAVARMAMSMGNGDMAFDVVKQMKDQGIAPKLRSYGPALTAFCNSGNVEKAFEVEAHMLESGVRPEEPELETLLKASVAAQQGDKSPTASKVGKRKWDSGAITKAIENNGGGWHGRETCRASCINESANANPLRPPGPSTNSH

SEQ ID NO: 153810 - protein, 39 aa, Oryza sativa
  Clone ID: PAT_MRT4530_5372C.1.pep
FLVFTDERACANMKEITQYQHSPHESTGRNDANQSFVNK

SEQ ID NO: 153811 - protein, 689 aa, Oryza sativa
  Clone ID: PAT_MRT4530_53730C.1.pep
MAMAPLFVPPPHLLFLLPATTSSSPAASLRRLLLPPLSCHARQVLDVMPQGDRVAGPRAAEGAGAKGATAQVGVATREAGTAGRHGRGRHGGGARPWRRGEDRPARGGQHAADDGEVQGTRRGGDLKQRREGRRWTRGETQARESGKAGNSGRCQSNGSGGNASRKGKKKAKGGENEVKLRVELDMCSKRGDVIGAINLYDSAVKEGIKMGQHHYSVLLYLCSSAALGFVQPAKSGNAGSGIASIGQLHSSSTQSVGNLEGDDVQSEGHSEDQEGNKTDLFASDDGTEKPSRIPVSDELREYARTRGFEIFEKMRSEEEKVPMNESALTAVARMAMSMGNGDMAFDVVKQMKDQGIAPKLRSYGPALTAFCNSGNVEKAFEVEAHMLESGVRPEEPELETLLKASVAAQQGDKVYYLLHKFRTTVRQASSTTAKLLEDWFQSPTASKVGKRKWDSGAITKAIENNGGGWHGLGWLGRGKWTISHSHIDRNGACLACGEKLTIIDLDPKETEDFATLVAKLAIKRERRSNFDNFQINIVADVIRQRFQSRKLPLIVVHNRHLTGERMQKPSNRKLVEKWKLSNAIYATPTGSNDDWYWLYAAIRCKCLMVTNDEMRDHTFQLLERDFFPKWKERHQVRFNFEDSCVTLQMPPPCSVVIQESENGQWHIPVVSEEGSLEKDRTWLCVTRRN

SEQ ID NO: 153812 - protein, 79 aa, Oryza sativa
  Clone ID: PAT_MRT4530_53731C.1.pep
VSNGDDDLPRTVEVTAEEDDLLTQDLGSLPYTAKVTAGDDLQTQDLGSLSYTVEVTAEDDDLLNEDLESLPLSVEVSQE

SEQ ID NO: 153813 - protein, 89 aa, Oryza sativa
  Clone ID: PAT_MRT4530_53732C.1.pep
MAKPQVEYLFIDTPKNYSVAWFYTPPCCLVGPRASPAHVHDTSLTSNTSRTDIDAQSEDETGAVILLLTPPSPCLPRPPPMNRLPDSYK

SEQ ID NO: 153814 - protein, 48 aa, Oryza sativa
  Clone ID: PAT_MRT4530_53733C.1.pep
HEILVHFVLLCMSSHSGTRLQESTNVARLDITCTMGSKVCMIRFRQLL

SEQ ID NO: 153815 - protein, 54 aa, Oryza sativa
  Clone ID: PAT_MRT4530_53734C.1.pep
LSMLNPHLRAKLRWCWARRTVHEHHHPTSSVTCSHACRYRSGRGRAYVLQACRT

SEQ ID NO: 153816 - protein, 63 aa, Oryza sativa
  Clone ID: PAT_MRT4530_53735C.1.pep
MHNAARAGRFKALEMGYDGEAAKIADEKASTFNEPSRARREVSVYGSVGLVCSCGRSVRLISS

SEQ ID NO: 153817 - protein, 890 aa, Oryza sativa
  Clone ID: PAT_MRT4530_53736C.1.pep
MSSAQSQRLSAQPKLHIADLIASFGIPCEPKRVAQTKLGVETRPTCSPRRPGGKGAVDLAGAEASRRKAAAVADAAETTADGCGSSRSRDGASAAGCLPPDVGKRRHRGGEGRQDGKRDRAFHIRWAMWSKGYMRRASQFDPTIDKTSAWLEAARVEMDLSGANRVDEFSGGGANRVHKLPTVAQIESTSSPMMLRSGRLQPPSSSSDGEELASSLRNEKLCEEPKGRTSSGQTMSPYIIPLCLILFIIKASHSMGAQINETTIPQGSEINTAGPQSWVSPSGRFAFGFYPEGEGFSIGVWLVTDPSRFILWTAFRNDPPVSGGSILLTAGGSLQWIPPNQGFQGKVIWSTFGTPTDTLLPGQNLPPGNQLFSSVSNTNHATGKYRLSNQPDGNLVMYPIGAIDPDSAYWNTGFEFLSANQSTQGCWRAQTGGCTGNSPNGDIGLVATMVTVKNTSWSDRSYNVPPQSPTIEECKAICMSDCACEIAMFDSYCSKQMLPIRYGKRVPGSNTTLFVKVYSYEPKRTASATSIAMLTSGAALGMLSLVLLSVSVMLCKRRPFLRYTRAPQHHETEFDEESIGIRPYSFHDLELSTDGFAEELGRGAYGTVFKGVLTNSGNKGIAVKRLERMAEDGEREFQREVRAIARTHHRNLVRLFGFCNEGAHRLLVYEYMPNGSLANLLFKRDATLPNWSNRIAIALDVARGLQYLHEEIEVPIIHCDIKPENILIDSSGMAKIADFGLAKLLIGNQTKTFTGVRGTRGYLAPEWSKNTAITVKVDIYSFGVMLLEIISCRKSMALKLAGEECNISEWAYEYMFSGEMKEVAAGKGVDEVELERMVKIGIWCTQNEPVTRPVMKSVVQMMEGTEMVGRIHALPLPIAVGVGVPGVAME

SEQ ID NO: 153818 - protein, 194 aa, Oryza sativa
  Clone ID: PAT_MRT4530_53737C.1.pep
FKERQAKPWSHAKRACIKLMKVLIILQDKYPYSFAHETVLPAAVDFCLTMITNPEQADTSFEEFLVQCMVLVKLVLECQEYKPGQIGFEAVGSSEHAIFDQRKNNLSATASSMVMSVLPADRIMLLCDILIRRHFIYTATDMNEWHSNPESFHHEQNLLQCTEKRRPCAEALFIILFDNYGVVYGHFMVIPSLI

SEQ ID NO: 153819 - protein, 34 aa, Oryza sativa
  Clone ID: PAT_MRT4530_53738C.1.pep
KPHAVNAAPLHLGERRIHLWERLIRRALAISDHH

SEQ ID NO: 153820 - protein, 197 aa, Oryza sativa
  Clone ID: PAT_MRT4530_53739C.1.pep
CSFQQWPDKADFNKAMTNFVQSLAAYSLVCYFLQIKDRYVFLIINPIDLFRHNGNIMIDSYGNLLHIDFGYLLSRTVEFEKAPFKLTEEIIDVLGGEKSKLFAKYEELCVQGFFAIRKHYRKILTLVQMTLTLPIMGGQFLPCLNGDSLLKNLRKRFHLEDNKAKIETLVKSLIVESSDNWRTNIYDAYQKILQGIH

SEQ ID NO: 153821 - protein, 341 aa, Oryza sativa
  Clone ID: PAT_MRT4530_5373C.1.pep
MSTSGSESDSVAAKRSMKPKYSKFTQQELPAWKPLYTPGIVIGAFSLIGIIFIPIGLVSIAASQEVVELVDKYDGECVTANDKVGFIQDTKTDKACTRTITVPKPMKGPIQVYYQLENFYQNHRRYVKSRSDKQLRSKEFSSVIKTCDPEAISEGGAPIVPCGLIAWSLFNDTFTFSVNKKTVQVNKKNIAWSSDRTIKFGSDVFPENFQKGGLIGGGQLNEKLPLSEQEDLIVWMRTAALPTFRKLYGRIETDIMASDEITVVIQNNYNTYSFGGTKALVLSTTSWIGGKNNFIGFAYVAIGTISFLIALAFVGLNMVKPRTLGDPSYLSWNKENPDYVQ

SEQ ID NO: 153822 - protein, 426 aa, Oryza sativa
  unsure (1)..(426): unsure at all Xaa locations
  Clone ID: PAT_MRT4530_53740C.1.pep
MRLLLFLLQLRRCRRGCCRRSAPLPWPLARRRSAPLAVRLPAAAALLRRPPARCNVRPPSATPSAAPPCSTCSGAPAPAPQNHQIRLRLLLLHLLPPPRRSRSIAGEAPAMAGGGGAGGMSESVLRKVLLSYCYVGVWIFLSFAVIVYNKYILDPKMYNWPFPISLTMVHMAFCSSLAVALVRLLRVVEPPSSPAMTPQLYTSSVVPIGALYAMSLWFSNSAYIYLSVSFIQMLKALMPVAVYSIGVLFKKETFRSSSMLNMLSISFGVAIAAYGEARFDVRGVALQLAAVAFEATRLVLIQILLTSKGISLNPITSLYYVAPCCLGFLLMPWDFVASQVAPSVHTPGLFVLGSNSLSPRAESAEVLLVDKPRAHHGRRVMVTDALFXRFSWPVLRDTVTXAGSLQLRITFLGPAYYNHVSCGHSA

SEQ ID NO: 153823 - protein, 813 aa, Oryza sativa
  Clone ID: PAT_MRT4530_53741C.1.pep
MPKVHVADQLQNLNLTTEEENVAEFSDDDETGDPQEVEWMLVGKVLSPAIVHATTVFRAMKPARGNPYGLKIRSIDEKADNIFVTKFKVERDLQRALGGSPWMNLEPPTRLDDKHRGELAMGLVGVVRKLEVDSDGKASGPYLRGRVAIVVAKSLRRGMLLKTKKDAAPEWFYLQYEKLPYYCLACGIVGHLELEYEKPVVRYGSGKLPYDIRLRAPEIRKKKLLSFQAAVAESFGSGSSGGSKQPKGSSLRSKDGRPKNPTYAMKMMRPCHLRETRPLLERRLLIRGWLQIVTYPRITMKILRLCCEKGKRMGLGQLEAVQEVHVVVFLSETRCFSNKVQGLRSSLSFPNGIGVGTYGCGGGLALLWNNEIKVVHKLTTESDHCCLVIECNRSKRRREVDRALSMMGAHKAPGPDSFTVGFYQAHWETIGPSVTRAVLNFLNGGELPEAINQTTLVLTPKVREVLHIDMEALAEKYLGLPTALGRATKDTFEFMPTKIRNLVGTWSGREASCAVLKGRYYHESEFLQATRKKHSSHTWRAILARRDILFKGLVRRIGDGNSTRIWQDRWLPGHFRGKPITEPVRQHVHVVSDLLIPSGSWNTELIKQLFLDVDAQAILSLPRQLDATSHASPSGDTTWSRIWKLCVPPKVRVFWWRVTKTLSGIKVLHLHPLTWACDLVDPSRWHGEEPRPVRAATQWAIDTAFDLWQLIHPEKERTMIVLRDENGRTCGGTARWYEYCLNALAAEALACCDGMMLAREKGVQRLILETDCQVLTGLWEMRAQQCSEISALLTHMEILSRRLELHRLQFTFY

SEQ ID NO: 153824 - protein, 305 aa, Oryza sativa
  Clone ID: PAT_MRT4530_53742C.1.pep
MRDLLQVAGASGFLSLLLLPRATDETQTKFHSLEDTLARAESWLMSSQMSGVPIVPMNVQTEALLTKICGDVASSTVNMNSLGDLANMATVSLYGFEDYHGVDIGVVRAIRLWYAPFAGEMALEIKLQPGDTRLGFAISRTEEGFIYVSSVAEESTPGVASTRSGLLELYRRARRASKLLVVSRVGDDKVLPWATSTAGDIRCFDTVSLSQRLSLHRHALRPVTLHFLMWERLPPAAVIRGGAAARPTVQMIVQGDEEGGGDAADESTDEVAFDGDGPEIVLSGKDDSDDRSFRFQNIGLPDSWL

SEQ ID NO: 153825 - protein, 64 aa, Oryza sativa
  Clone ID: PAT_MRT4530_53743C.1.pep
MSGAGEEDKKPAEGGGAHINLKVKGQDGNEVFFRIKRSAQLKKLMNAYCDRQSADMNAIAFLFD

SEQ ID NO: 153826 - protein, 588 aa, Oryza sativa
  Clone ID: PAT_MRT4530_53744C.1.pep
MGEGSQNGRSWYGEKSSGMVFKGGQEGADGEPPPGTRAGDWGQHAELVGGLLRELELAELMRREATRRPLEQLQGALRRCYALATACQEDGGYLHRLLLGARMADELRAAQHEIDMYIRLIPLIALVDSSSNHRDKAMDGAATAIKYSSNRHISYSAMTKSWTKLYGGPFGLTCDVLTCPLKFKTWKINLGSLVRHPNLHCQDFSLRHGTTLYLQEQKILDIEELVELCTRTEESCPGFSKFDFSQIVHATDNFSENSNIGRGGFATVYKLARVQHNNLVKLLGWCIHGKERILVYEFADRGSLQHYIFDKMRKSLLDWPQRVNIIKGVAEGLVYLHKLSMLWIVHRDLKPDNILLDYNMNPKISDFGSSSSLSSEVAEEHTRRVVGTSGFKAPEYASRGVYSVKTDVFSFGVLVLVIISGRKNSILYKQRDAIGDLVRDVLITLSNGREKQRVFSVILDYSINLKNIRTKAWHMWRDGRLHELVDPSLGNVYELDQIIRCTQVALLCTQEDPTVRPTMPDVAAMLSSGSVILLDDPKKPSELSNEVEKGGDETSTCMDQSSQTIDITITSSAPVSTRVRIIIDQEII

SEQ ID NO: 153827 - protein, 88 aa, Oryza sativa
  unsure (1)..(88): unsure at all Xaa locations
  Clone ID: PAT_MRT4530_53745C.1.pep
VXIXCQQTCEETXKLRWXTSPFSXLXXXNXXCXGXPTXVSFYXLXXXXYSXXXXXLFLXXCPXXXXRGIXYFNXXRXHXENSSLCSLY

SEQ ID NO: 153828 - protein, 76 aa, Oryza sativa
  Clone ID: PAT_MRT4530_53746C.1.pep
CLLRSLRRRQEESRLNRGGAAIEQSRGGNPGEHPHPLSDSSLSPIPPGRGICLRSLTSLLDLEEALLLNLRALNLF

SEQ ID NO: 153829 - protein, 215 aa, Oryza sativa
  Clone ID: PAT_MRT4530_53747C.1.pep
MASDDDRHHDRGGWIRPEEKHRSSGVAWALVILCTLLAVGVIVAGATVFAVYLIYKPRMPYLVVSDAQLVRLDYDQGGTIDYLEALVTVMARNTNSRADASFARVDLALRFHGADVARLRAAPFVVASASAAPLRYDVVSKGRALDAGGMRAMDASLKSGVVPLDLLGRARTRWKVGIFASLKFWTRISCRLHFFYPGNGTVMASDRNTCTSRSP

SEQ ID NO: 153830 - protein, 75 aa, Oryza sativa
  unsure (1)..(75): unsure at all Xaa locations
  Clone ID: PAT_MRT4530_53748C.1.pep
SSDPRSAARSLSPRHKXKIRGDSPARQPTTGELGLLKVRRLFQDDQKAALPPAEHYVGTLFTLAGNDTKVEENQH

SEQ ID NO: 153831 - protein, 154 aa, Oryza sativa
  Clone ID: PAT_MRT4530_53749C.1.pep
MKDVVGSPGTWSGMSLRVSQCVFAGASVVAMASAYGFSNYTAFCYLIASMGLQLLWSFGLACLDIYSLQTKRDLHNPVLVSLFVVGDWVTAILSFAAASASAGVTILFERDVHFCRMYPQLSCGRYELSVILAFITWSFIATSAVSMFWLLASL

SEQ ID NO: 153832 - protein, 351 aa, Oryza sativa
  Clone ID: PAT_MRT4530_5374C.1.pep
MVSSPSLWRPPVPIKDAIEQDAITPFPKPEAPEEEEEESQGDCYRRLMSSLPVKVYGERRYLEYQATWWPESAVQAVIAIQRRFRPRPSDVLLASYPKSGTTWMKALVFAIMSRKVYPLRDHPLLRLNPHDCVVHLSGAYATGKEAVVEALPSPRIMAVHMPFSTLPASVVVDSSSGCKIVYVWRDPKDVLVSLWHYYRKLRPEEAHVSEFHDLYESFCQGDTVFGPWWDNVLGYFRASVEMPTRVLFLRYEDMLEDTASAVVAIANFVGCPFSAEEERAGVVDAIVKLCSFEELKNLDTNMSGSNGHLIKLPSSSYFRKGVAGDWVGHMTREMADRIDSIIQGKFQGRTQ

SEQ ID NO: 153833 - protein, 509 aa, Oryza sativa
  unsure (1)..(509): unsure at all Xaa locations
  Clone ID: PAT_MRT4530_53750C.1.pep
MRRMERDAWLLCAALAAATVVYYXRPACTTHRAQRRLPRGPTPLPAIGNVLSLRGDMHHALARLARERYGPVMPLRLGLVTAVVVSSPDAAREAFTKHDRRLAARAVRDTSRVRGFADRSMIWLPSSDTRWKTLRGVVATHVFSPRSIAAARGVRERKVRDIVGYFAAHVGEVVDVGEAVYSGVVNLVSNAFFSGDVVDVGEESAHGLREAVEDIILAIAKPNVSDLFPFLRPLDLQGWRRWAEKRYDTVFDILDNITNSRLADASAGNHAGDFLDSLLGLMSYGKIARDDVTTIMFDVFGAGTDTIAITVQWAMAELLRNPSIMAKARTEMEDVLAGKKTIEENDTEKLPYLRAVIKEAMRLHPVAPILLPHQAAEDGVEIGGYAVPKGSTVIFNVWAIMRDPTAWERPDEFMPERFLQRAEVDFRGKDFEFMPFGAGRRLCPGLPMAERVVPFILASLLHAFEWRLPDGMSAEELDVSEKFTTANVLTVPLKAVPILASSASELQAS

SEQ ID NO: 153834 - protein, 202 aa, Oryza sativa
  unsure (1)..(202): unsure at all Xaa locations
  Clone ID: PAT_MRT4530_53751C.1.pep
HASVEVVVKLDWRESMPHPDERVEYELWTNSNDECGARCDEQMEFVRGFRGHAQIMERGGYALFTPHYITWYCPEAFKLTQQCKSQCINHGRYCAPDPEQDFGEGYEGKDVVVENLRQLCVHRVANETGRPWAWWDYVMDYKIRCSMKEKKYSKGCAEDVVKALGLSLDKVLECMGDPEADTDNAVLAKEXEDQIGRGSRGD

SEQ ID NO: 153835 - protein, 91 aa, Oryza sativa
  Clone ID: PAT_MRT4530_53752C.1.pep
KPVFLTDRTEDQGRVTTDNLLSQGYCSWEKRLFQPVGLQTTTQAFKTDERQKLVDAGYVIVGNIGDQWTDILGSPEGCRTFKYPNPMYYVA

SEQ ID NO: 153836 - protein, 121 aa, Oryza sativa
  Clone ID: PAT_MRT4530_53753C.1.pep
MSERRRREKLNEMFLILKSLVPSIDKVDKASILAEPIPYLKDLERRFQELESGKKMSSPPKRNPCSETIIGGAARAGPGAVKGHHHWVLSESQEGTPSDVRVIIMDKDELHLEVHCRWKEL

SEQ ID NO: 153837 - protein, 163 aa, Oryza sativa
  unsure (1)..(163): unsure at all Xaa locations
  Clone ID: PAT_MRT4530_53754C.1.pep
MSSSGKEKKQMDRGKSGKKPQGGGSGEGGGAAENKPKGESLVARLLHHCQHMAHIGWDGSTSTTTSLRSWNHAAPPYVXSSSSTTASTSLALAAPATSRRSRHRRGLGCAAPVLPSVVARANSGRPFLFRPQLPEPCLRRRAAPSSPVGRRAPLPLRRAWRGD

SEQ ID NO: 153838 - protein, 37 aa, Oryza sativa
  Clone ID: PAT_MRT4530_53755C.1.pep
MGGLDHLVMGKCYIDLGQEEDPYDYYYDDFDNLENPQ

SEQ ID NO: 153839 - protein, 74 aa, Oryza sativa
  Clone ID: PAT_MRT4530_53756C.1.pep
QLGLVGPPLPHQGLNIVRAIGQQLQPPPVGGPPLGRNLGPAPALLAFNAPPRYGVPPRGYGAPRPLSPPGGVLE

SEQ ID NO: 153840 - protein, 49 aa, Oryza sativa
  Clone ID: PAT_MRT4530_53757C.1.pep
SDEDLSSYLLRWARERPTPDSYRSIPAYTGLPRTRERESALSSTADGCQ

SEQ ID NO: 153841 - protein, 62 aa, Oryza sativa
  Clone ID: PAT_MRT4530_53758C.1.pep
MCMMDSAQYFSGELIKEEFPTPSPKYNLIVLNNILLKAIRWEPPLVLKMLSKAPFGITMVLV

SEQ ID NO: 153842 - protein, 182 aa, Oryza sativa
  Clone ID: PAT_MRT4530_53759C.1.pep
MNKGKIFKLAKGFRGRAKNCIRIARERVEKALQYSYRDRHNKKRDMRSLWIERINAGTRLHGVCIHCTQAVKKEISLVVARKDLIIRRSILCLSLSKQTIQDNTTRLTSWSLSSSFLAFDYQVNYGNFMHGLMKENIQLNRKVLSELSMHEPYSFKALVDVSRSAFPGNRPPVKKEGLAAIL

SEQ ID NO: 153843 - protein, 56 aa, Oryza sativa
  Clone ID: PAT_MRT4530_5375C.1.pep
VDEQKIVNKVYRSRTPKASHLNDCNIGTGPGSLKLAELVLEQSKQFFLGFEGNTVS

SEQ ID NO: 153844 - protein, 168 aa, Oryza sativa
  Clone ID: PAT_MRT4530_53760C.1.pep
HPPSPFFLPLSPLSLSLRNGGGGGGDEAEGNGGGGGGWGAAATAVGSSGCGLVRTPDGTTKLLIWSTEMLYGTTTTTLLIVAFTSALRVKEELAGDELHLSVRSPSLVSSTPSMRTLAGVIDRAKQPTGTVMAVAVVEGVGRKVAVAGDGDEVVARGTVAATITCRHH

SEQ ID NO: 153845 - protein, 257 aa, Oryza sativa
  Clone ID: PAT_MRT4530_53761C.1.pep
MGEGDAGQESYHAMSKSRPPDQYWMDGQDLCRKPAWKSATRAKSPPIDFEAHETEEEDRIIIAAHAIHGNKRACIAKLLDGRTDNAIKNHLEFYSEASILQRWSMQTWLLQGILNPGVQSASVPPEFKIFRIPLTRNGGGGGGDEAEGNGGGGGGWGAAATAVGSSGCGLVRTPDGTTKLLIWSTEMLYGTTTTTLLIVAFTSALRVKEELAGDELHLSVPSLPLAAPPSMRTLAGVVLFISTMLPLPLLTSPLPFS

SEQ ID NO: 153846 - protein, 63 aa, Oryza sativa
  unsure (1)..(63): unsure at all Xaa locations
  Clone ID: PAT_MRT4530_53762C.1.pep
ADNKLSHRKQLVTXITPSSNTTHYRVKLVRLQVPVRNSRVRPHASVSYPDESGKXLYPDLVML

SEQ ID NO: 153847 - protein, 167 aa, Oryza sativa
  Clone ID: PAT_MRT4530_53763C.1.pep
MAQESLRLVSHPIAAHEGRLPRHYTLEGQGAKKDISPPVEWYGVPDGTRSLALVVHDVDAPDPDGPIVPWTHWVVANIPPSVKGLPEGFSGKEGAAAREYGGIQEGVNDWKQPGWRGPIPPSRGHRIQFKLYALDDEVHLGNKVTKDKLMDAIEGHVLGEAELMAVF

SEQ ID NO: 153848 - protein, 687 aa, Oryza sativa
  Clone ID: PAT_MRT4530_53764C.1.pep
MATPTHFTPSQTHAAASHHHPSAAAAASAASARLHASAQPASAAASASAAAAALCPPFPAAGAACPPAQGPIFGGGPGAKPTGGGGARGGPFSAAAGRKRGEALRVAPDDRRALGAALASSRGELVAPDDYCHVLRELGDRDKSALRAFEVFHAALPHVGNGAVDKGKLLTASIGALGKMGRPDLARRAFDDGVAGGYGNTVFAHSALISAYARSGLANEAMGVLESMKGAGLRPTTVSYNAVIDACGKGGVDLRFTLGYFRQMLKDGLCPDRKTFNSLLAACSRVGHLEDARAVFDEMIHLGIGRDIYTYNTFIDAICKCGNMELAMQVLLDMEAKGVKPNVVTYSTLIDGYSKLEKYEEALKLCEKMKSMRIQLDRVCYNTLLAIYVKAGKYAEIANVCDEMEELGIEKDTVTYNSLINGYGKQGRLDIVSILVQDMRKRGVAPSVLTYSTLIDIYSKAGMHGDAFNVYLDFKESGLKPDVVLFSSFIDTLAKNGLIEWALSLLNDMTEMGIKPNVVTYNAIIDAFGKSKVMMEDDSEVGDMGIVGVYGGQIVRVANPVSRGGRSATDVRMRRSQELFFILELFQKMVQQGVRPNVVTFSAILNACSRCNSFEDAALLLEQLRLFDNFVYGVAYGLLVGSREVWSQAPSLFVSLRRCSIQSEPRSRWIGSTSEGSCHPALWWQPG

SEQ ID NO: 153849 - protein, 148 aa, Oryza sativa
  Clone ID: PAT_MRT4530_53765C.1.pep
MSKSGGAAAGPTAAAAAAAVQKQKTLLQKADADVSSLVDNFAALINIARVNDPPVRNTQEAFQMDMRGSRMVHSADSLLKLVSELKRTAIFSGLASLTENVDRRIEIFSQQVEGTERMLERIGQEAAGSLKELEAHYYSSVVRTPPDE

SEQ ID NO: 153850 - protein, 909 aa, Oryza sativa
  Clone ID: PAT_MRT4530_53766C.1.pep
GIAFFSRPTSRPSRQLLRFAPLPPRDSRRGGGRSHPPRRARSSAAIIASMRAALIASFPRLHGSTGGQPLAAGFHASLLCGPPPAGTSRPRGIPRGTLGYGAPRACLGFAVLGQTPQIPRRPRGVRRKAHEDRARVDVDDLGLRTARPVCGRNARVRGDAGRRCCAGMGDVESGKRVHGWMLRNGVHLDVVLCNAVLDMYAKCGQFERARRVFGAMAERDAVSWNIAIGACIQSGDILGSMQLFDESPLRDTTSWNTIISGLMRSGHAADALSHLRRMAQAGVVFNHYTYSTAFVLAGMLLLPDLGRQLHGRVLIAALEGDAFVRSSLMDMYCKCGLLEAAASVFDHWSPLTRDMNFAWSTMVAGYVQNGREEEALDLFRRMLREGVAADRFTLTSVAAACANVGMVEQGRQVHGCVEKLWYKLDAPLASAIVDMYAKCGTLEDARSIFDRACTKNIAVWTSMLCSYASHGQGRIAIELFERMTAEKMTPNEITLVGVLSACSHVGLVSEGELYFKQMQEEYGIVPSIEHYNCIVDLYGRSGLLDKAKNFIEENNINHEAIVWKTLLSACRLHQHNEYAKLASEKLVQLEQCDAGSYVMLSNIYATNNKWHDTFELRVSMQERKVRKQPGRSWIHLKNTVHTFVAGDASHPQSAEIYAYLEKLVERLKEIGYTSRTDLVVHDVEDEQRETALKFHSEKLAIAFGIISTPSGTPLRIFKNLRVCEDCHEAIKYISLATGRCWVNPDKEVLAILQAESKSKQDKSFLTFIDKCIEVCKESREGSHLNPSSGLFQPNEKKDVMLKLYAVPYMILSCGWILSHTCTIMAMKKLPWHHGRVNNIINVVGLLFVNDARMATRVLFPFLQAECLDLWAKILNWVIQVQQILNSEMCQRGLMGSWLFFTKLGKNDRL

SEQ ID NO: 153851 - protein, 93 aa, Oryza sativa
  Clone ID: PAT_MRT4530_53767C.1.pep
MNFLQILQIKLHSILFVVLQLSSIVLNQNMALLNVVLKTMNLVSLLFQLILQSTNDFFAGLSGAIDSVCNHIIDILKKDVLPNPNLAMILRNV

SEQ ID NO: 153852 - protein, 30 aa, Oryza sativa
  Clone ID: PAT_MRT4530_53768C.1.pep
QTRGLSYDAEPRVPFLSKSELVARRITICH

SEQ ID NO: 153853 - protein, 94 aa, Oryza sativa
  unsure (1)..(94): unsure at all Xaa locations
  Clone ID: PAT_MRT4530_53769C.1.pep
MTVMTVGMVGITLQPYRXLHLSRPAKTWIQRRPGGFGRTRGRPNLAXIRQVASSITPMRRLVNFGPVHRVNFEFLAHSYISLILDIVRLIDHLI

SEQ ID NO: 153854 - protein, 944 aa, Oryza sativa
  Clone ID: PAT_MRT4530_5376C.1.pep
MACQTVYYAGQTVPTIAGQTVPYPDQIGPPVAGLTSLLTTGQTGPWAGQTGSLGVSPGFHTTTSSTDFNYYSSPVNTVSNATPHIPNAYNDPNRGYSHDTRYGQYNHIAPQQPPLRPPNTPPDPHRPKNMEELISAIIRATFRVEAKDRARENQKPYPDFYDAVPYPPDYKIPEFTKFSGEDSRTTYEHVDQFLAQCGKASSMNTYLANIAYDGLLDSIKERLNGQIFLDVDHVLNEALAQESRVDDNSLHASLDDSAISCIAEPSGGSDCLNNLCSDAITIIAEPNVGSDCLASLDNDATTIIAEPSVGLDCVINLDNNGIAKPSDGSDCVASLENSIIENIAELSDGSGYITSESEIALSPKTESQIGHVDVGKDDDNVLRDSSEIESKVAMHTYQRPYPEHVDSVPYPQGFEVPKFTKFTGENAMTTMEHIGRFIDQCGKAGSDDLLKLKLFPLSLSNFASTWYSLLAPNSISTWSQMKHEFHGYFKDASLMEQRPIDTSSVTCETISVTSMPKTEIVSDPLPVSSIIDVGKKKGKSVIIGDPRPKNRIKNAKAKDHKVTKDESSSSQKTKKPKLTFEMLMDKYKKGLAGQRFDNQTSDSKRPRSSRRKRFGQTPKQSEPSTIPTPYKPPVVMPWYPYPMSLYGYPFMYYMPWMHQPPVPCHQEWKQSPRTVPNHSSNSRQDRFPQKNRSGRSKVKKVKKVWVRKEAKAPEVVAINEDSQDVHVPTGDAAKTVQAEKTEGDITTVNNGGLTEIVGRSNRQTTAGLTDPPGRSDRWLVAGLTGPRGRSDRGALEKSGKIESNTGASTSTKNMKNHCLAPGKQLQPKWIPSGLSRYQKRRLQRLRAIGQKEKEAEDVENKTCNNLEPRTAPRQVWRPKEVKVKRPVISHSRDKSNLMREESSVIRDKSPSHDAMDVGAVFVLPSKSCSRESRFFSGGKTLICS

SEQ ID NO: 153855 - protein, 60 aa, Oryza sativa
  unsure (1)..(60): unsure at all Xaa locations
  Clone ID: PAT_MRT4530_53770C.1.pep
HKRHYHGTFHXGVICMLPSSNFQLLIQELQTSNACLALERDLYQLFPSTGGPCPLLDGDT

SEQ ID NO: 153856 - protein, 41 aa, Oryza sativa
  Clone ID: PAT_MRT4530_53771C.1.pep
TLRINKLSSTYIANLSHKQVPRASLNELLVSRRILPPLLKS

SEQ ID NO: 153857 - protein, 43 aa, Oryza sativa
  unsure (1)..(43): unsure at all Xaa locations
  Clone ID: PAT_MRT4530_53772C.1.pep
INDRTAIYTKSKGDQFQQDAKXWGAMQRRQRHPVRKGLASTGK

SEQ ID NO: 153858 - protein, 103 aa, Oryza sativa
  Clone ID: PAT_MRT4530_53773C.1.pep
MARRRERIMGATSATPWVRGAGEPRPGGRGNPRKATGEQLESEKKRMERMRIRSPETARIAICGEDAMLNKACFVSGTKHDLDGGQGQYAAKDNECVRNLKDM

SEQ ID NO: 153859 - protein, 291 aa, Oryza sativa
  Clone ID: PAT_MRT4530_53774C.1.pep
MAIQLGVDASWEFVNRERLRRMGRTYNLLKMVEAVLPGLIDDPYHASDFLRDMEHKIRTRATFSGVSFRVLAVEFCNLLRDYNDRIIADPPVSTREELQDHINELIAQLDDLLHQTCTLRQDDPVGGGMNIKSDCDEPSPHCSCVGQTDISWVTYFWNSVEFELTYCLAVGGGMKIKADCDESSPYAAMLVSQDVALCCKYRTNGQILGDCFLEFCLIMLCAAGGNKTNTPGPDAQSALRALALARSGMNIGRIGSRSQLLLVCCPDLVSCDLLNDDGPGYEQASLKDQRI

SEQ ID NO: 153860 - protein, 57 aa, Oryza sativa
  unsure (1)..(57): unsure at all Xaa locations
  Clone ID: PAT_MRT4530_53775C.1.pep
TGRFAXYHFHLIXNWCVXXXAQIKPXEKLCXEGYYTVLPXMNFYTSHIAIWXAGRTX

SEQ ID NO: 153861 - protein, 475 aa, Oryza sativa
  unsure (1)..(475): unsure at all Xaa locations
  Clone ID: PAT_MRT4530_53776C.1.pep
MSSPSPSSEAAAAHHHHHQRRQHAGAAGGSGLVPLAALIKEEARAERPMGSGSRICARDEEDGGGGGGAEGGRRWRRPLLRYGCAAQSKKGEDFFLHMLDCVRPAISRSSSLSLAPRPPDTFAVYTVNDGQNGNAAAVNTSDYLLNHVLSVIPSGLSRXECFHALPRALVAGFVKTDKEFQHKDQTAGITATFVIIDGWTITVASVGDSRCILDAQGGAVSLLTVDHRLEENVEERERVTASGGEVGRLSVVGGAEIGPLRCWPGGLCLSRSIGDIDVGEFILSNAGGRLIIASDGIWDALSSEAAAKCCRGLPAELAAKQVVKEALRTRGLKDDTTCIVVDMIPPDQTIRHPSPPKKINKLKSLIFRKKTKDHPNKLTKQLSAAGMVEELFEEGSAMLSERLGNDSSGRRTSSSLFTCAICQVDLEPSEGISVHAGSIFSSSSSKPWEGPFLCSDCRDKKDAMEGKRPSGVKVL

SEQ ID NO: 153862 - protein, 352 aa, Oryza sativa
  unsure (1)..(352): unsure at all Xaa locations
  Clone ID: PAT_MRT4530_53777C.1.pep
GHNGDAAAIYTRXNLLNHVLSAMPRGLSREEWLHALPRALVAGFVKTDKEFQHKGQTSGTTATFVIIDGWTITVASVGDSRCILDAQGGAVSLLTVSHRLEENVEERERVTASGGEVGRLSVVGGAEIGPLRCWPGGLCLSRSIGDIDVGEFIVPVPYVKQVKLSNAGGRLIIASDGIWDALSSEAAAKCCRGLPAELAAKQVVKEALKTRGLKDDTTCIVVDMIPPDQTIRHPSPPKKINSXKSLIFRKKTKDHANKLTKQLSAAGMVRRSFRKNGQQCFHKKFGNDSSGRRTSSSLFTCAICQVDLEPSEGISVHAGSIFSSSSSKPWEGPFLCSDCRDKKDAMEGIRTL

SEQ ID NO: 153863 - protein, 81 aa, Oryza sativa
  Clone ID: PAT_MRT4530_53778C.1.pep
WNCYSAAKTAFVLAYFLSEYNAQISFEVFLDMYDRNFHMCRMLCVKLSKTLDMMNHLAHGISDLCDSGLKYNASKVEMLCS

SEQ ID NO: 153864 - protein, 118 aa, Oryza sativa
  unsure (1)..(118): unsure at all Xaa locations
  Clone ID: PAT_MRT4530_53779C.1.pep
MARTRVLLLDVLIDDEVVLWGAVGRALAKTDNKSNDIVNGPLLTCKNKDERTLIVXTEDEVKTVQCDIDDEPGGNTGRVMVHLRSGMYREKVMITETKKGILPRGNSMGRTSINHEGA

SEQ ID NO: 153865 - protein, 153 aa, Oryza sativa
  Clone ID: PAT_MRT4530_5377C.1.pep
PPKENPQRKKGGGRGKNRQKKPKEKAKEAREQARQRGQKHGKRKTNTSPDKTTAPPQKTPRNRSKRRGHTTALPRPPAGKGGRGAKKMRWGKKRGPPPPKGQKSRPKKKATSPSIKRAHQIAYETHGNSGSTRFIYYLYPLSFFFFFISFFIL

SEQ ID NO: 153866 - protein, 514 aa, Oryza sativa
  Clone ID: PAT_MRT4530_53780C.1.pep
MAAAAAAASYSSTSWRVRPGLTPFRSPLQPHPQGRLQRIAIFATRIRIATPSAAMQSSSTRHRLRPLPPFRYSDRLEAVNHDHETIPERLAVVTGGNRGIGLEVCRQLALQGVTVILTARDEKRGKDAVESLCHESNLSNIIFHQLDILDGNSRASLARYINSRFGKLDILVNNAGVGGVAVDQDGLRALNIDPRVWLSGKAVNLIQSVIVQTYDEAVKCLNTNYYGLKWITEALLPLLKQSPSGARIVNTTSLRSELKRIPNEKLRDELRNIDIWDEARIEAMLNEFLLDLKNERLEEAGWPTMLPAYSMSKTVVNLYTRILAKRHPEMRINCVHPGFVNTEINWNTGIIPPEEGAREALPYDEQETTNLAVQCAIMSSTQEKRGEQMARAREAAREITPEGTERARVVGEEEAGPEHHRAGILEAAQRGAWSLVSAVGRTLGVVRDTAAQTKPSEYGDAAEAKDTTVEKARETKDASKQQNEELKATDSVAGERGGDAATSGRGQVAGKEED

SEQ ID NO: 153867 - protein, 81 aa, Oryza sativa
  unsure (1)..(81): unsure at all Xaa locations
  Clone ID: PAT_MRT4530_53781C.1.pep
SXRTPSASTPWPTGRRMGWPSLAAIRSPGTLFGSPPRSPDPDYTSCNSNLSIMNQESMRSCSIVCSCRLACKPNNNYYSPS

SEQ ID NO: 153868 - protein, 387 aa, Oryza sativa
  Clone ID: PAT_MRT4530_53782C.1.pep
MAAEADARKVCGLPERVQLHGAMLALQFGYAGFHVVSRFALNMGISKLVFPVYRNIIALILLVPFAYFLEKKDRPQLTLSFVVQFFLLALCGITANQGFYLLGLDNTSPTFASAIQNSVPAITFAMAAALRIERVRLDRRDGVAKVLGTLACVAGASVITLYKGPTIFGPKLQLQAVAEVPLRAAIAGEGKNWTLGCVYLIGHCLSWSGWLVLQAPVLKKYPARLSVTSYTCFFGVIQFLIIAAFMERDADAWAFHSGSELFTILYAGFIASGVAFAVQIWCIDRGGPVFVAVYQPVQTLVVAIMASLTLGESFYLGGIIGAVFIIAGLYLVLWGKSHERARLAKDAAAIATDRDAAPCRIIAAGKQSSSVTQPLLLPTSSSSDNAV

SEQ ID NO: 153869 - protein, 529 aa, Oryza sativa
  Clone ID: PAT_MRT4530_53783C.1.pep
MASSAAAAFYRDREDAAPPSSGPGGGGAMAAYDPSYVPDSVKTFVSHLYRHIRDRNVYETHQMYEGGFTRLSDRHFRDTPWPPAEAVAAHCDGDHVFLLLYRELWFRHAHARVQGLTPAQRAESWDNYCSLFSVVLQGVVNMQLPNQWLWDMVDEFVYQFQSFCQYRAKLKNKTHEEIALLKQYDQAWSVYGVLNYLKALVEKSMIGEILEREKVGLEQFTATDGYDYEGGSNVLKMLGYYSMIGLLRVHCLLGDYHTGLKCLAPIDISQQGVYTTVIGSHISAIYHYGFASLMMRRYADAIREFNKILLYILKCKQYHQKSPQYDQLLKKNEQMYALLAICLSLCPQHKLIDENVGTQLKEKYNDKMTKMHRYDDEAYAIYDELFSYACPKFITASPPVLREPYTNYNQDAYRLQLKLFLYEVKQQQLLSGIRSYLKLYSTITIGKLAKYMDVDEVTLRTILMTYKHKMHSIDSDGKVISSADFDFYIDEDIIHVVESKLTKNHGDYFLRQILKFEEMITQLDKVQFD

SEQ ID NO: 153870 - protein, 914 aa, Oryza sativa
  unsure (1)..(914): unsure at all Xaa locations
  Clone ID: PAT_MRT4530_53784C.1.pep
MEAAAAFSPPRVSPDARAMFATLPASPSPHLRLAARPRALSASAPTTAAVAATKQRFLAPPRPDPAAPGGCGGGGARDVVAMVVPFLRGTAWQQPPPDLASFLYKNRIVYLGMCLVPSVTELMLAEFLYLQYDDAEKPIYLYINSTGTTKNGEKLGYETEAFAIYDAMRYVKVPIFTLCVGNAWGEAALLLAAGAKAALCSSLPLPREAERPACLPPPRRRRARPVALARRAGIHCVSLTLDPKLASGSAPTLHLGSGDFIHGVNTILRYIARVASVTSFYGQDAIQAAYVDQWLDYAPVILSGSEFEAACSFLDGYLASRTFLVSYGLSIADIVVWSNLAGQRWESLRRSKKYQNLVRWFNSIADYSDTLDEVVSAYVGKRGIGKSPAPSLKEKLPDSKQNISIPEVDLPGAKVGEVCVRFAPEPSGYLHIGHAKAGLLNKYFAERYKGRLIVRFDDTNPSKESNEFVENVLKDVETLGIKYDIVTYTSDYFPQLMEMAENLIKQGKAYVDDTPKEQMRSERMDGVESKCRNNTVQDNLSLWKEMINGTERGMQCCVRGKLDMQDPNKSLRDPVYYRCNTDPHHRIGSKYKVYPTYDFACPFVDALEGVTHALRSSEYHDRNAQYYRILQEMGLRRVEIYEFSRLNMVYTVLSKRKLLWFVQNKKVEDWTDPRFPTVQGIVRRGLKVEALVQFILEQGASKNLNLMEWDKLWTINKKIIDPVCGRHTAVLKDQRVLFTLTNGPEEPFIRVLPRHKKYEGAGKKATTFTNKIWLESADASVISIGEEVTLMDWGNAIIKEIKTQNGIITELLGELHLEGXPDIDDLVPLSLVEFDYLISKKKLEEDENFLDNLNPCTRKETLALGDANMRNLLRGEVIQLERKGYYRCDAPFVRSSKPVVLFAIPDGRQQASLN

SEQ ID NO: 153871 - protein, 108 aa, Oryza sativa
  unsure (1)..(108): unsure at all Xaa locations
  Clone ID: PAT_MRT4530_53785C.1.pep
LARITVAALMFTVHDPVVSALHVRRAAPRSRFRPSAAXPPCRRRSTTTACVGRXHDATPPISSNAFGHPRPCLPVTFHHHRSNRERGRHLRNVLVVAINLIATADDLH

SEQ ID NO: 153872 - protein, 172 aa, Oryza sativa
  Clone ID: PAT_MRT4530_53786C.1.pep
MACDVDGFGAVAGSAEAAVGAEVERAGNGPRLLWRAALAPLVGPVVLKVATIANGGVGCESSSYLRSYAHYFSAPRCRRNSSRPLTAVAAPALTSHSEGVPPLVVVISCPIAAALVVVPPHRYGEAGRERRAEAIRMGKRRAVVQTSEARRLRDQDLNGAWPSSEAAGKAGV

SEQ ID NO: 153873 - protein, 94 aa, Oryza sativa
  Clone ID: PAT_MRT4530_53787C.1.pep
RSVIRSFRPHLVWVRFEKAPRETALATASGTKGKKGQQVPPPPKRERPRPKESPPPAVASTAITPASLSDSVSGCAIAPTRPRTRGRTRGRTRG

SEQ ID NO: 153874 - protein, 61 aa, Oryza sativa
  Clone ID: PAT_MRT4530_53788C.1.pep
ISSLHSIESYLCCTTSIVSFPILVEFLVSSTFLPIFLYASKTFHYSSFVLITISLHATQQR

SEQ ID NO: 153875 - protein, 164 aa, Oryza sativa
  Clone ID: PAT_MRT4530_53789C.1.pep
MDPDAALRVELVGVVAVGAVVVVLAAGAFPGGRWRKRAAARVDDVERALGAATLMTYEQAAAAAAKKASSSSRAAAAAEEQGEDRCAYCQSEYAGADEVRVVQCGHFFHAGCIDRWLRKHRRCPLCRGGLSPLPPLPKPGCRPMPPRTSRPAASSATATASAAG

SEQ ID NO: 153876 - protein, 724 aa, Oryza sativa
  Clone ID: PAT_MRT4530_5378C.1.pep
MASLENNAIEDIAKLNDGSDCITSESEIALSPKTESQIGHVDVGKDDDNVLRDSSEIESKVAMHTYQRPYPEHVDSVPYPQGFEVPNFTKFTGEDARTTMEHIGQFVDQCGKVGSNDLLKLKLFPLSLSNFASTWYSLLAPNSISTWSQMEHEFHGYFKYASLMEQRPIDTSSVTCETISVTSMPKTGIVSDPLPVSSIDVGKKKGKSVIIGDPRPKNRIKNAKAEDHKVAKDESSSFQKTKKPKLTFDMLMAKYKKGLAGQRFHNQTSDSKRPRSSRRKRFGQTPKQSEPSTKPTPYKPPIVMPWYPYPMSPFGYPFMYYMPWMHQPPMLYHQGWKQSPRTVPSHSNSRQDRFPQRNRSGGSKVKKVKKVWVRKEAKAPEVVTIKEESQDVQVPTGDAAKNIQAEKTEADAVAVDIGSLTETVGRSNCQTTAVLTDPPDQSDRRLVTGLTGPRGRSDQGALEKSGKIESNIGASISTKNMKNHCLAPGKQPQPKWIPSGLSRSQKRRLQRLRAIGQKEKEAEDVENKICNNLKPRIAPRQVWRPKEVKVKRPSRKPILLGGQDINMLMKESREMNSDGYDITSLSRRLSDAKARYLNDPTLKVDRKIRRQALKYYIAEKQMEYYLDNDQSKVARRVVHEGICKIHQSARHWFVLVAMDYFTKWAKAVPLKNITCMEQDDLSVEDYKTLMGNNFEDVIDKRLKTLKEMKTLQDGVFGERLMGNT

SEQ ID NO: 153877 - protein, 154 aa, Oryza sativa
  Clone ID: PAT_MRT4530_53790C.1.pep
MAPAFCSVYCIAPMIAYWMNTSRSNLGDRPQLDFRKIATRIQNQEVVTRSDEAGAHLEGARGDQSTWTRRYVVDDLDSTSPLVALMVELSARSATCCTPGSALPVAGETASSRALDAELELVVTRAATPEAGQDCALDEREEDDIRVVAAAAIN

SEQ ID NO: 153878 - protein, 91 aa, Oryza sativa
  unsure (1)..(91): unsure at all Xaa locations
  Clone ID: PAT_MRT4530_53791C.1.pep
DGGRAPXVTTXTGGAXLGGGWSTAPDPPMTRAAVAAATVHPLDSTTSGLAVEGRELLRVDDLHVGMPPCRIHFPQSARGGDVGRRRGRGGE

SEQ ID NO: 153879 - protein, 73 aa, Oryza sativa
  Clone ID: PAT_MRT4530_53792C.1.pep
AGWTFNGKSVASFQYSESVVSHCMNHWIVIDFGFVMACFSVDRVTEVDSVRWFRRGHECSVHRPRTCEYKTRK

SEQ ID NO: 153880 - protein, 287 aa, Oryza sativa
  Clone ID: PAT_MRT4530_53793C.1.pep
MRRRQGPWVTSSFPLSVVGMAVVEDSQVKTSGMDLAKGSTAAHGRRGEGECMVAAATTATTSVGEPPASGAYRHCQGLVFHVKFGVDIILELRLYLPMLGNPRPDEIRHRLELCWSDRLYTAGVSTTSTPSRDILRRGTRRLTTTCKAEPSGGNSTLELAAGAAGLASSSVVAWSLYTLKTTGCGLPPGPGGALGAAEGVSYLVVAALIGWSLTTKVRTGSGLPAGPFGLLGAAEGVSYLAAAAIAVVFGFQFFEVGSLPDDSQPPRHGTIFERLKMVVIFGRLKMG

SEQ ID NO: 153881 - protein, 62 aa, Oryza sativa
  Clone ID: PAT_MRT4530_53794C.1.pep
LNSSPLKNPRTRTRRRIIRRRKCSLQQSNRLPPDLTCSTVGTSSQASLITGSSATLPNLGTL

SEQ ID NO: 153882 - protein, 114 aa, Oryza sativa
  Clone ID: PAT_MRT4530_53795C.1.pep
MTNDKGAGAAEGSPSTPPPTRWPARHRSSLLRASEIHRRHYPAPVRTRQEPAIVTGEPCRWTTAVTTSQSSPYTKRQATMAIFPRCCHPSSLRWTPTVTLAVVRQVEGDWEWRR

SEQ ID NO: 153883 - protein, 60 aa, Oryza sativa
  Clone ID: PAT_MRT4530_53796C.1.pep
GPFTNSGPGGAPGISGPVLGGDPFFLFGGVFKTGGNYGKRFSLGKIFFPLKFHKKFNPET

SEQ ID NO: 153884 - protein, 85 aa, Oryza sativa
  Clone ID: PAT_MRT4530_53797C.1.pep
MAATRKYCHGGLPFRVGRRLAGGDRGGPATRFPGDDSGLLPGKMVAATELVESWGSGPGSVDGGSHWRAGGYSCGALASVLVAGY

SEQ ID NO: 153885 - protein, 65 aa, Oryza sativa
  unsure (1)..(65): unsure at all Xaa locations
  Clone ID: PAT_MRT4530_53798C.1.pep
PGSEPPVASPPTEKDAEEQSVLAKRQSXLAIREMSPAQPSEPRSVGRRAQLSPRPSRRRPCPVAA

SEQ ID NO: 153886 - protein, 287 aa, Oryza sativa
  Clone ID: PAT_MRT4530_53799C.1.pep
MVELVMVVTTPIVEEERQDEREWTKEEDWEKKNKDNYIESWTMWQASGNRLVATAHSASLLQTSAGAIFIRFKLSSGCYHIKLFEDMQIKRPTECRYIQIGLTNMKFQQQIRKITEVLASIVAKNHTDQNESYSVASQEVSWQKPYMDLLKHQTCRQRVGEKAKHQIILCLIEFADCSCPSCYRRGVKVRSLWYFLHWLLGIAICATGITNVYIGLHTYHERTTKSVKLWTGLLTFELSLLLFFYLLIDRWSYMMKQGNAPIEQLRPTDNRKTYPTTLRKELGMVQE

SEQ ID NO: 153887 - protein, 72 aa, Oryza sativa
  unsure (1)..(72): unsure at all Xaa locations
  Clone ID: PAT_MRT4530_5379C.1.pep
SAISQATGDQMVHGSHSYXAADADAAVGCMVKSVSGNMCVPQILIEALRKSPNIFYGVSILGFCLCPQDWLP

SEQ ID NO: 153888 - protein, 131 aa, Oryza sativa
  Clone ID: PAT_MRT4530_537C.1.pep
MGSTTAGNQPIRGARAWYARPRQGKRLVDKDTPQPRVAGVDVGFDSATRVRRVERRAASSGCSSSRAGEKQSMAVPVIPVTMTTTYLGQNFARSISWVMYGYERYRMNVFRSEFPSAKISRKIFLSILSRH

SEQ ID NO: 153889 - protein, 115 aa, Oryza sativa
  Clone ID: PAT_MRT4530_53800C.1.pep
PCKFGKHVNSGDNLNLISIIRYCCVNLGESVDALLGSGHFLSSLKLYMHHCVIIIWSIQPNPRLQTYYSKKNGKERLGIILSKVWLFRILSDIHYKSLSGTHISFSWNLFSYTVG

SEQ ID NO: 153890 - protein, 49 aa, Oryza sativa
  unsure (1)..(49): unsure at all Xaa locations
  Clone ID: PAT_MRT4530_53801C.1.pep
PFPGVSQIKVLAQCKCHPKKRGLTGPSITKAHEFGAFTPLQYKSYXRRL

SEQ ID NO: 153891 - protein, 293 aa, Oryza sativa
  Clone ID: PAT_MRT4530_53802C.1.pep
MAATHPGSSREHASAAAMTLCLARWQGGGNDHSGSTWRGGNGEEETSAAARCGAEAVAVATMLGGGDEAMTVAAQRQEEVTALAAVASWRSQRHEVKADGEQAAGEENQAAGVLEHIPGPGEPGNSIVQERVIISNPMNTLLFLHIYTGGKASSAGGDVSAAVVSSMATSRGGERSHRHIGQVRCECSHMSMHSTWNRCLHDGISRTISPACSSSRHIEHGSPFPASRSPPPLSPYATRRAMGAYMVTHGKNLWSQHAFQVTADLESGLYECECKTWITQAAHMLRGCSAISR

SEQ ID NO: 153892 - protein, 140 aa, Oryza sativa
  unsure (1)..(140): unsure at all Xaa locations
  Clone ID: PAT_MRT4530_53803C.1.pep
GTQKRGPFGVFLIYRITKFREPGGGPLGNQGPGIKKGGPTKKGPPPTKKGGLGNWGALLGGGAPNFLTRKGAFWGPSFFPGRGSRGAFSEFSPPRAYYPGGGGGPXGAGPRGNLGGPGPPGEGGDEPPRGNGGPRPGPFP

SEQ ID NO: 153893 - protein, 63 aa, Oryza sativa
  Clone ID: PAT_MRT4530_53804C.1.pep
VHLAQTTLHPISMCQIAQYFTSLEVSPPKSIFVDQAIVDDGAADLLLQLQYHKVSDLPWFFCT

SEQ ID NO: 153894 - protein, 564 aa, Oryza sativa
  Clone ID: PAT_MRT4530_53805C.1.pep
MTKVFTRSLLMYFNKIVRSLRPLVHSPPPQPAAADNIVRWPSDDELLPAPDTTTTSVVTTVCKVEGGLLMSPSTFPYFMLVALEAGGGGGGLLRGLLLLLLYPALRLLGHDRAIRVMAMVSFAGVRKDGFRLGSSTLPRLLLEDVSAEVFEAAVRRRRCVCVSGMPREMVEPFLREYLGVDAVVAPEVRAFGGYYLGLMESDGEVLRRLDMEEVIGGGEKEETCGDGDGRVVVGIGGRGRSFSRIFQKYCKGYRRDREVYVATKSARRRWRPLHPRRYAKPLIFHDGRTAFRPTAAATLAMFMWLPLGAPLAILRTAVFLLLPFSISVPLLAALGMHSRRISSSSLPPAAAAAHNLFVCNHRSLVDPLYVSAATGRTDLSAATYSISRLSEILAPIRTFRLTRDRATDRAAMQAHLSLPGGGGGGLVVCPEGTTCREPFLLRFSPLFTELGADVQPVALHSAVSMFHGTTAGGWKLLDPLYLLMNPTPAYVVQLLDPVAVGGEGGGGGPELANEVQRRIAEALGYTRTALTRRDKYLALTGNDGGVDRRRVAGSHHHQEGVLNG

SEQ ID NO: 153895 - protein, 120 aa, Oryza sativa
  unsure (1)..(120): unsure at all Xaa locations
  Clone ID: PAT_MRT4530_53806C.1.pep
MGKIKIGINGXSRIGRLVASVALQSEDVELVTGNDPFITTDYMTYMVKYNTVHGXQWKHRDVKIKDSKTLILGEKPVSGFGIRNPDEIPRTEARAENXEEAPDVFTDKEKAAAHLKGGAK

SEQ ID NO: 153896 - protein, 74 aa, Oryza sativa
  Clone ID: PAT_MRT4530_53807C.1.pep
IAVLSSKEGPPKSRIPKLGGSEVNESNIVPITLDKLTPEQKKDLEVIKVLQMVLKEFKVMVLKELKVMVLRDFK

SEQ ID NO: 153897 - protein, 168 aa, Oryza sativa
  Clone ID: PAT_MRT4530_53808C.1.pep
GLQEFGTRPSPNLRPLPLRLATSPVSAGAGGGAAWRRGARLRRRSWRGGGSYSIASRAWTTRKIRGRSPSTSPSRRVCRRSPCRPSSTLSRATRTSYRTSPPPTPSASSSTPRRAPPAASTSTTTHPVASPCFANSSPSGPATPTRPPESPSVSRSESADPCPTSPTS

SEQ ID NO: 153898 - protein, 116 aa, Oryza sativa
  Clone ID: PAT_MRT4530_53809C.1.pep
MAEKLPASPSSASKEGPPKSRIPKLGGSEVNESNIVPITLDKLTPEQKKDLETRQGTIVQRYKMKLVADVAGTSSSKDGEIQQVSDSTTQSGDKGAADGSQGVQGDGSQRAQGDGS

SEQ ID NO: 153899 - protein, 239 aa, Oryza sativa
  Clone ID: PAT_MRT4530_5380C.1.pep
MASEYTTGDHRAHFNRCIPWLPTISAQIFLLRHQVGYRHIDCSPQYGNQKEVHGPVRAKKGTKLSVENYLKPDIPATWQAMEKLYDSGKARAIGVSNFSCKKLEDLLNVARVPPAVNQVECHPVWQQGKLRKLCQSKGVHLSAYAPLGSPGSPGNDGPNVLSHPTVISIAKKLQKSPAQVALRWGIQMGQSVLPKSDNEVWTRENIDIFDWCIPEELMAKFYEIQQAWLHILTNYLLKA

SEQ ID NO: 153900 - protein, 135 aa, Oryza sativa
  Clone ID: PAT_MRT4530_53810C.1.pep
MGENLDEDLYKEPFPAKLKTDVAISRSLAMKQKRRPEGTEERRRSGCGIGTSVIRNDADAWTGGPLKFEGLFGRTGHTGPRDAPALLAVVVAELPTLRAFQLGFGDVMNRELEKPQRCAMSLARDCHARSNRDVH

SEQ ID NO: 153901 - protein, 81 aa, Oryza sativa
  Clone ID: PAT_MRT4530_53811C.1.pep
LLSWLLTSISYSKEGHPSTPDVSHCCFLYLPPAQLQRASLHCEPPSRYAHPPPVALHARPPPPPAPPPAPAPPPTPAPAQP

SEQ ID NO: 153902 - protein, 219 aa, Oryza sativa
  Clone ID: PAT_MRT4530_53812C.1.pep
KERREDRLGEDPAEALGSSGAGRGQRLRRCSCMGGAAEVPGALPWEHGGAATVALVQGRGRRLALVAQGVGGREQIRSAVAARGSRTSGAVVLPLAGHTLPWENEGVVAALVCGRGRRSAVTVQGSGQRGANPARRQRHGEPDLGSKAVLLPAGRALPWEHGSEGDKSRRNGFGAGESHGRASSSTAGGGRVHGGLAGRSGVGAFMEMTTEARIWIWIW

SEQ ID NO: 153903 - protein, 38 aa, Oryza sativa
  Clone ID: PAT_MRT4530_53813C.1.pep
KVRSLGHLNLTPGLLFRMSISLWETLSNGTNGETGAHF

SEQ ID NO: 153904 - protein, 175 aa, Oryza sativa
  Clone ID: PAT_MRT4530_53814C.1.pep
PQKKKRNKIHTNPLRIEPMHRAISLSLQEPNMNTRFLLLLPFAAAGPSPSLRPRLPSCRAAAPGQIWRRGGADAAAAAPASLPMEGAAADARERRGEGAREPRGEEKKKERRRQAPACAVARVALSCAEGVERESQGEEGRRGGERDRERERTDASASYPSRPSRGREGEFRGRV

SEQ ID NO: 153905 - protein, 553 aa, Oryza sativa
  Clone ID: PAT_MRT4530_53815C.1.pep
MTTMRASAALLLVAAAVLAAVRAEDPYHFFDWKVTYGTRTIMDVAQKVMLINDMFPGPTINCSSNNNIVVNVFNQLDHPLLFNWHGIQQRKNSWMDGMPGTNCPIQPGTNWTYKWQPKDQIGTFFYFPSMGMQRAAGGYGIITVHSRLLIPVPFDEPAGDYPVLVGDWYTKDHTVLAKNLDAGKSIGRPAGLVINGKNEKDASNPPMYTMEAGKVYRFRVCNVGIKTSLNVRIQGHSLKLVEMEGSHTVQNSYDSLDVHVAQCVSFLVTADQKPGDYLLVASTRFLKEYSAITAIVRYNGSNTPASPKLPEGPSGWAWSINQWRSFRWNLTASAARPNPQGSYHYGQINITRTIKPCTSKGKVDGKERFALNGVSHVDDAQTPLKLAEYFNASSGVFEYNLIGDVPPATTVPQKLAPNVISAEFRTFIEVVFENPEKSIDSFHINGYAFFAAGMGPGIWTPECRKTYNLLDTVSRHTIQVYPRSWTAVMLTFDNAGMWNIRSNMWERYYLGAQLYVSVVSPARSLRDEYNMPEIALRCGKVVGLPMPPSYLPA

SEQ ID NO: 153906 - protein, 2195 aa, Oryza sativa
  Clone ID: PAT_MRT4530_53816C.1.pep
MAASTSTEVVVPAGAGAGAGAGRWRRDALAHTLGSRRLPEGVADAGERVPDAVAPGVMPFIRAADKVEQDSPRVAFLCRRYAYNKVQRMDPSSVQRGVRQFKTYMSVKLDQILDKSSIKNNYDVDNLASHLQPYKWEQDDTQVMGNDAKEIQRFYKSYCAELSRISEKRNFEEVARRYQVASALYEVLRDVTNNKVDSEVMKIAKVIEEKSVHFKNYKYNIIPLNFPGSSEAIVELHEIKGAIDALNSIDGLPMPHMSTMHTDGNKSIRDLLDWLSLAFGFQKSNVENQRENLVLLLANIGTRTAGQDHPLVDTVNKLWKKILQNYQSWCSYLHVSSSIMNVETVTQNKQQLMLLHIGLYLLIWGEASNVRFMPECLCYIFHHMARQLHKMIEENNFQSPPGFEEEGSFLKTAIEPIYKVLQKEKLLCLQTVILILTKKRKHIRVKVSVSFRFLPRRSEKCFARLNWPWDLTADFFYQGRTTSTKPKTNFVEVRTFLHIFRSFNRMWMFFILAFQAMLIVSWSSSGSLSALADATVFRSVLSVFITAALLNFIKVTLDIVLTFQAWGNMDWIQIVRYLLKFFVAIAWIIILPLAYSSSIRYPSGAGKLLNSWNIMERSNWRVIGLIMWWIQPRLYVARGMHEDILSIIKYVFFWVVLLTCKLAFSFYVEISPIIGPTKFLLNQGVGNYEWHEIFPFLPHNLGVVITIWAPIVMVYFMDIQIWYAIFSTAFGGVSGALSHVGEIRTLGMLRARFKSMPEAFNKSHATAHREYMFHLKCSSLHGRMEKAHCFESLNQGSDPIDTPFTGFLTKECCGGPRGKGLGFCLGHHRHSSFPSQANLSQFNAHWFFRHNQTVFFAKEIKLCENESVGGYNAYRGHLLGGKSPLTYCPLMWVADIWARELGAHMSATQSQRAYSTMPFTVGLTLNFYFDRERDILMAPSFSSSFSVTPWPPFLVAKMLMVSGIYQVPTALHMAMTSKEGDYHELIEKIRLDQARFNAVIECYESLVLILKNLLLDNNDQKIVDAIDKTVLDSVENNTLLEDFHMAEIGKVSNTLAKLLHLLSNESTDGTAERKIINALQDFMEITTRDFMKDGQGILKDENERKQRFTHLDMDMIKESFWKEKFVRLHLLLTMKDSAMDVPTNLDARRRITFFANSLFMKMPKAPQVHDMISFSVLTPYYNEEVLYSSHELNKKNEDGISILFYLQKIYPDEWKNFLERIGVDPENEEAVKGYMDDVRIWASYRGQTLARTVRGMMYYRRALELQCYEDMTNAQADLDGEESARSKAIADIKFTYVVSCQLYGMHKASKDSREKGLYENILNLMLTYPALRIAYIDEKEVPLPNGKMEKQYYSVLVKGNDEEIYRIRLPGKPTDIGEGKPNNQNHAIIFTRGEALQAIDMNQDNYLEEAFKMRNLLEEFLIKHGKSEPTILGVREHIFTGSVSSLAWFMSNQETSFVTIGQRVLANTLKVRFHYGHPDVFDRIFHLTRGGISKASKVINLSEDIFAGFNSTLRQGNVTHHEYIQLGKGRDVGMNQISNFEAKVANGNGEQTLCRDIYRLGHRFDFYRMLSLYFTTVGFYFNSMVAVLTVYVFLYGRLYLVLSGLEKSILQDPQIKNIKPFENALATQSIFQLGMLLVLPMMIEVGLEKGFGRALGEFVIMQLQLASVFFTFHLGTKTHYYGRTILHGGAKYRGTGRGFVVRHAKFAENYRMYSRSHFVKALELLILLVVYLAYGISYRSSSLYLYVTISIWFLVFCWLFAPFVFNPSCFEWHKTVDDWTDWWHWMSNRGGIGLAPEQSWEAWWISEHDHLRNGTIRSLLLEFVLSLRFLIYQYGIVYHLHIVHGNRSFMVYALSWLVIAIVLVSLKVVSMGREKFITNFQLVFRILKGIVFIVLISLVVILFVVFNLTVSDVGASILAFIPTGWFILQIAQLCGPLFRRLVTEPLCALFCSCCTGGTACKGRCCARFRLRSRDVLRKIGPWDSIQEMARMYEYTMGILIFFPIAVLSWFPFVSEFQTRLLFNQAFSRGLQISRILTGQNGLTSTIRCNFSWHRYGGSGIYLFLALVSLVTLVFLLGIMIPQVPYNNAVNYGPNGYGGRDQNNKPSTPMRSHLLTMTPKILTIGIADEHFGAVVRRAGRNITEIIQASGARIKISDRDNWNIRSYSGSRVYDNAQGVSQFREVIKSREETRGIII

SEQ ID NO: 153907 - protein, 350 aa, Oryza sativa
  unsure (1)..(350): unsure at all Xaa locations
  Clone ID: PAT_MRT4530_53817C.1.pep
MVNSVLSSLPTYYMSSLKLPKKVILHIDRARRHCLWRKNTDLETKTHSLAAWDLVCKPKKKGGLGIINLEIQNTDLLIKHLDKFFNKKEMPWVQLIWNRHYNESDKPPHAHKEKGYEDXQYXSFMMASDFHQNFHLPLSNQAMQEWGILSERLQNLXITNEPDIWSYLWNSDHYHPNKVYSMFFEHHQVARPLSIIWKSKCTMKLKVFLWLMLMNRLNTKEMLHKKNFNIQGGINCLMCNSLTEESMAHLFFSCPFAQQCWQHIGINWNSALEFMNMITSTXNSFHHFFFFEVLSIGCWNIWCRWNDLIFNNIALSFTKWKVDFLRDFALHMHRAKEMDKPKWQSWLNTF

SEQ ID NO: 153908 - protein, 58 aa, Oryza sativa
  Clone ID: PAT_MRT4530_53818C.1.pep
PPKRKTNSFIFSPNFRGSEPETGKTNIDKDPKLGQKTNYLGEICTGKPPDHSILALLQ

SEQ ID NO: 153909 - protein, 59 aa, Oryza sativa
  Clone ID: PAT_MRT4530_53819C.1.pep
MKKQTTNTVIVFPSRNKKQKRKEDGRRFSGDQTAARVRLKFALNDCQQHRNTYPLLVPE

SEQ ID NO: 153910 - protein, 350 aa, Oryza sativa
  unsure (1)..(350): unsure at all Xaa locations
  Clone ID: PAT_MRT4530_5381C.1.pep
WAGQTGSWEFLQVFIPXTSNIDFNYYSSPVNTVSHATSHIPDAYNDVARGYPPDTRQGQYNHIALQQPPLRPPNTPPDPHRPKNMEELLSDIIRATFGVEAKDRARENQKPYPDFYDAVPYPPNYKIPEFTKFSGEDNRTTYEHVDQFLAQCGRASSMDTYNDGIAEPSGGSDCVDSLENSIIEDIAELDDGSDCITSESEIALSPKTESQIGHVDVGKDNNNVLRDSTEIGSKVAMHTYQRPYPEHVDSVPYPQGFEVPNFTKFTGEDARITMEHIGQFIDQCGKAGSNDLLKLKLFPLSLSNFASTWYSLLAPNSISTWLQMEHEFHGYFKDTSLMEQRPIDTSSVTC

SEQ ID NO: 153911 - protein, 138 aa, Oryza sativa
  unsure (1)..(138): unsure at all Xaa locations
  Clone ID: PAT_MRT4530_53820C.1.pep
PAEGRRRREDARAVAVTKTPENINLTRGEYPRAWKTTCMHPFEYIQSIARHAPPPENFLCSDSPLALLRCLLSEKLYKLCRVXTNRLAVLAVMSGVWISIECRVVFILLNAEIYLQIVMRFENDLLAAMEGNEVHIYT

SEQ ID NO: 153912 - protein, 219 aa, Oryza sativa
  unsure (1)..(219): unsure at all Xaa locations
  Clone ID: PAT_MRT4530_53821C.1.pep
MCIKPLSRTSQGILDGSDETNFFETSSTEMNFNSGVGEKRARLSTTHCTQQVIPEEEGSPSSPASNGQPPFRAAVNPEADQPDTSADPTPSRPPSPGADVIRGGADKRAPLGSGSRDRSTARDRSTAGPRDRRPRSAPSRLGGGDRSGRRARLGSKAGRPAIASGGCMRSPATATGGAGGCSGGRRRRRXRPKRWGTRWEGLEGEGWSMAGGNHGRRRR

SEQ ID NO: 153913 - protein, 179 aa, Oryza sativa
  Clone ID: PAT_MRT4530_53822C.1.pep
TLKLATHRQLPELLKFKLIYRSKQACVQYIYIVGGTFNLTCSSKLTTYPSSAESYLTIVSRPIVSVRSSSQVGGTECRRRPSSGDCCGRLGFHTRYVRLRPLLELPDERVGAFVHLAVLPIVRRHEHLPAGDRRLDGACGHRRRPCPGRHSGWRRLWWSGRRRSCRLHGRRCGTRSDLG

SEQ ID NO: 153914 - protein, 110 aa, Oryza sativa
  unsure (1)..(110): unsure at all Xaa locations
  Clone ID: PAT_MRT4530_53823C.1.pep
LLELVSSGGGLGLLQRGVTLDSDWLIWIKYYNCFTAFNYCFEMPALCKRTFSLPWIYLASYLLFRYDLLSTVGSTQSCSFPXTRIEVLLSXRCLEEVGFVAAVKLRNSGS

SEQ ID NO: 153915 - protein, 162 aa, Oryza sativa
  unsure (1)..(162): unsure at all Xaa locations
  Clone ID: PAT_MRT4530_53824C.1.pep
MELGRPGCPVDRLPDSLRHXRGVACCLLGTGANPKVWCDRLEGVMRRVLSRPLSGMSCSGGWLGLLQRGVALDSDWLILLNYYNXFTVFNYWFXMPALCKXPRSLLWLCSASYLLRYDLLSTVGSTQSCSLFPHTRVEVLLSWSRLREVGSVVAVKLRNSGS

SEQ ID NO: 153916 - protein, 140 aa, Oryza sativa
  Clone ID: PAT_MRT4530_53825C.1.pep
RPAPRDGGAGSCPRRRHGAATAAYRRGRTPWEIKERAGAYLVRYDMPGMTREDVTVSVQDRKLVVVAEKAAKDGEAVEAADGEDEGEAWPAASFGRYRTRVELPENVEVERIAAEVRDGVLYLTIPKVASGGKVVNIQVH

SEQ ID NO: 153917 - protein, 459 aa, Oryza sativa
  unsure (1)..(459): unsure at all Xaa locations
  Clone ID: PAT_MRT4530_53826C.1.pep
LIHINQSLSNVTPRCNRPKPPPEHDIPERGRDRTLRITPSNRSHHTLGFAPVPSKQRAAPLSCRGESGSRSTEHPGRPNSITPTLAWVRRLEKSYTTSPAVAHAGLWADVSKGWGGADMRDPRVSDSKRERGGWAGSTAPIYPRVDRTAAAAAAPGLGSASKPIGRPGLAAAARARHVAGDGIRRRRRRESGGSGRRQRPKAXRARAAATHGEAGKEGRGGASPRVAGAEEDDGERRRQATGGXRRPADELRRALRKEKRGVREREIDHGDRNPWPKAAVEVKPTGARGDGCSGGEPRRGRGGRGTGRGRERRDSPADAGEWGGERGGIRISNPGHLGRGRKWEREGKGRGRHGARTGVDDVGRGRRRRGRGVSCGGGCSSGICGRRETGPTRGPHLSATPXMREAGGRLSGWASXACARPSRRRGRKXGEMGRRPILTKMRKKXGKRKRKRKKDFPWN

SEQ ID NO: 153918 - protein, 253 aa, Oryza sativa
  unsure (1)..(253): unsure at all Xaa locations
  Clone ID: PAT_MRT4530_53827C.1.pep
MAIKDRFAGCPGRTXVLTTSPTYPGEGGRDGVGSAGVSGXSASGFTAAREGXARCLLGTGANPKVWCDRLEGVMRRVLSRPLSGMSCSGGWLGLLQRGVALDSDWLILINYYNCFTAFNYCFXMLALCKRTFSLPWIYPASYLLFRYDLLSTVGSTQSCSLFPHPRVEVLLSWRCLEEVGFVAAVKLRNSGSXISGRDTTSPSPRRPLDRSPWRRRGWGSSGGRRCSSRPPSPVQPMREIKIAHVWPSLPTGP

SEQ ID NO: 153919 - protein, 111 aa, Oryza sativa
  Clone ID: PAT_MRT4530_53828C.1.pep
GEIYINRWSQPNQKYIIGWSIRMGWMTCIILFKKNHLLKGSPLGFIYYIRDQVPGCIGGWGGFILGHIFGESQDAFLGGQTKTGGPGWVLDWHEFWSLPRRIFEGWGRPWG

SEQ ID NO: 153920 - protein, 150 aa, Oryza sativa
  unsure (1)..(150): unsure at all Xaa locations
  Clone ID: PAT_MRT4530_53829C.1.pep
GTXXRPLCCLCXVKGGAMKRTMDARWAHIVYALLVPEAFFRDPDGRDGVASRSLRRPLAISAATLLSLPGEGRRYEAHDERARRRHVIFTVVATSLYSAGSPYFTSVAVSSGVTVAAAAACLIRHISQRGARDHQVRRPRPPYRRIQKPG

SEQ ID NO: 153921 - protein, 201 aa, Oryza sativa
  Clone ID: PAT_MRT4530_5382C.1.pep
MGDYTADYTGIGYMQNLANGMTGHDTGLTASYAVQTVPTIAGQTVHSRSDRALFSQIGPPVAGLTAPLITGQTGPWAGQTGFLGVSPGFYTTTSSTDFNYYSSPVNTVSHTIPRIPNAYNDINRGYPPDTRYGQYNNIVPQQPPFRPPSPPPDPPKPETAEDWFRNTIRENFAKLRNRAREYQKPYPDFYDIRQHILCTRE

SEQ ID NO: 153922 - protein, 353 aa, Oryza sativa
  Clone ID: PAT_MRT4530_53830C.1.pep
RVRFDEWDAHRQQSAAKVRRSTVRVVVRGADGAPMANATVIVELLRAGFPFGNALTKEILDLPAYEKWFTSRFTVATFENEMKWYSNEWAQNNEDYRVADAMLKLAQKYNIKIRGHNVFWDDQNSQMKWVTPLNLDQLKAAMQKRLKSVVTRYAGKVIHWDVVNENLHFNFFETKLGPNASPMIYNQVGALDKNAILFMNEFNTLEQPGDPNPVPSKYVAKMKQIQSYPGNSALKLGVGLESHFSTPNIPYMRSALDTLAQLKLPMWLTEVDVVKGPNQVKFLEQVLREGYAHPSVNGMIMWAAWHAKGCYVMCLTDNSFKNLPVGTLVDKLIVEWKTHKTAATTGADGAVEL

SEQ ID NO: 153923 - protein, 356 aa, Oryza sativa
  Clone ID: PAT_MRT4530_53831C.1.pep
MGSESGRAVAAMVSLQLLFSALQVFIKLALNDGMDARVLVAYRFMFAATFLCPIAFLRERKKRPPLTMKVVLQLFLCGLFGFSINQNLYVLAIKLTSATFITAISNLTPATTFLLAILTRLETLKLKKPAGQAKLLGTLVGMGGAMLLTFYKGPKIMVLDQLPHPKFAHLTENPQSHPISTGNQIIGSFLGIISCFTYATWLVIQAKVSKVYPCHYSIAAMVCLFGALQSTVMALCVHRDMEHWRLGLNIRLYSSAYAGLIASGSAFPLLSWCLRKKGPLFISVFSPLMLIFVALMSSIILNEALHLGSVLGSVLIVGGLYMVLWGKAKEAADLSEDENQGKESIPVTTGGENEMK

SEQ ID NO: 153924 - protein, 594 aa, Oryza sativa
  Clone ID: PAT_MRT4530_53832C.1.pep
LVNNNWITWFSLKNVRSVIRLQQPNAAPVNTRPYRYSLLTTKFSKFTSNLELWPKRIWEEIDNGNRQLEYLGHIISKTRVATDPAKTLVMQNWPVPSLVDDLRGFLGLTGYYRKFVKYYGLLAKPLIELLKKNLPFQWSSVTQQAFETLKQAMITTPVLSLPDFSKPFVIETDTFDTGIGDVLSQEGHPIAYYSKALGTANQKLSIYEKEFMAIMMAVDRWRPYLLRGPFVIKTDHKFLCHLDTHVLDSEMQKKAMTKLIGLQYHFQYKKGVDNKSADALSRVGQFFACSSVSLVQPPWIQEIVNSYAVDMQAQKLLQELAVISPNDQGVWQDISLDFIDGLPLSDSKNVILVVVDRFTKFAHFIPLKHPYTAQHVASVFLDRVASIYELPKTMVSDRVAIFTSQFWKVLFAKMKKSVASRPYPKLAFKYFGPFEILSKVGSVAYRLKLPVDSQVHPVFHVSQLKHFVPSHVPVFSELPTTVQLDISALEPTEILDRRLVKKGNAALTQVLVRLGVLPPECATWEDYSVLRAHFPLATVWGHPVSHGGGSVTPVGVAPEDAGITQQRYREDGLRKRRLPVKKAYLCNKCVCARA

SEQ ID NO: 153925 - protein, 70 aa, Oryza sativa
  Clone ID: PAT_MRT4530_53833C.1.pep
MPPPEQDKDKALPKPKLPKPKPKPKPEPEMSTWSASASAPEHDQTAGPYGTVAPHATPAVATGKPRGGLG

SEQ ID NO: 153926 - protein, 61 aa, Oryza sativa
  Clone ID: PAT_MRT4530_53834C.1.pep
PTIALGPVTLPTGCSEFNCFGSAPFGPSASPPVAKGAVSPAVPTRPQNAPTPVTPRLLVPL

SEQ ID NO: 153927 - protein, 464 aa, Oryza sativa
  unsure (1)..(464): unsure at all Xaa locations
  Clone ID: PAT_MRT4530_53835C.1.pep
MRRPKNKYGFVTAVLSSATPLLLGYDLVMVCGSATLPEPPGVKLLACVAVASCVLGALAAVGAQCVVGDRCTVLLSAAVLCAGALARGLATSFAAFEAGVFVNGVGMGLALMSVPAYAGELSPSSLHRGLTSHPDGFVCLGCILGGLCFSPRFLNLPVRVAWRLTVATGTAIPALLGFAVLLMPELPQWLLTKDHARRVLSRTLSLEDAELRLLETKTELGEPHDVGCDDTVATPAWRTRWREERALWLELLARPTEPVRRNIVSALVAKAFQQASGIGSXLYVQRAFRDAGVPSDTRMTRALVAFGLVVFAFFAVSTVLLELAWLLVKALAGGCCPRRAPAPADHPSSPHAHRGGVAMGMKRRREQLKWARSLSATMLMSLMALVWLLLGPVQMADASSSSGWPRWLRTAVAAVNRAVRAAILWSFAWVYEVTAVYGNLLACSAIIVFAWFLVYFGVLGAKER

SEQ ID NO: 153928 - protein, 310 aa, Oryza sativa
  Clone ID: PAT_MRT4530_53836C.1.pep
MEDEVVGGGGGSHGVKLEWRRPTAAIGRASDRALGGGNNRNSSLSCQQGSSWAQAAERRPGERRRWGKQRHGQCPARELLPAAVAVELEVGPGVMEVDTVDSEPRPTPAPHPPSLRVLAVNPRPISSLFARGLAAGASVERGSPPAGCRMPRLLLWTAAVVGELARAALERRDAEVGGRHRRKKREMLWVLEDAGWRRREAQTVGCEELGRALLELQGATDQDFDAVTVQPRHGTAVPGPGRRASGHMASIPRGAWNRTRFWLGSFGRTNYVALAYYQAAYRFRGNTAWLNLPDNAASRGLLHASVDAKL

SEQ ID NO: 153929 - protein, 119 aa, Oryza sativa
  unsure (1)..(119): unsure at all Xaa locations
  Clone ID: PAT_MRT4530_53837C.1.pep
TASSLITSPKXIGMKSHQMLKNKTMQQLLRVLSMGEASTSLKKNPLGFPRYMPSPLPTLGLKGKRTRSFGKAVVGWLKIKPPIKWGILVRKKPPKKRAHLVKLNNYQHVKGVLAPVKCY

SEQ ID NO: 153930 - protein, 148 aa, Oryza sativa
  Clone ID: PAT_MRT4530_53838C.1.pep
MRPQRPTALVWTGPVAKIAGADADEIERGHGGLQAGYGFGSIRIAGIRAPRRRPPPPPRIHPRIARDVDGGGGHGTSTTEASSGGSGGVRASTSAGGGTGGDSTSSAAPAACGRARVREEAPAATARAQRLRFSPLPSCPHAPPPPLV

SEQ ID NO: 153931 - protein, 82 aa, Oryza sativa
  unsure (1)..(82): unsure at all Xaa locations
  Clone ID: PAT_MRT4530_53839C.1.pep
WASATRRAARRSSRSPSTPRAVSPSTPSSGSGRRXAAGDEILHLEHEFHQLHATKMEELLRQVATAVASSLQGIGGKKTEMP

SEQ ID NO: 153932 - protein, 33 aa, Oryza sativa
  Clone ID: PAT_MRT4530_5383C.1.pep
PRGPLWILGDVFMGAPHPVCASGKIRVGFRKSP

SEQ ID NO: 153933 - protein, 158 aa, Oryza sativa
  Clone ID: PAT_MRT4530_53840C.1.pep
MASTALSSAFSLLSLPSSSSPAAAAAAAPRSFAVPSRARPRRAVAVVASTATDSPKVLELGDAIAGLTLEEARGLVDHLQERLGVSAAAADEAPAEKTEFDVVIEEVPSSARIASIKVVRALTNLALKEAKDLIEGLPKKVKEGVSKDEAEDAKKQLE

SEQ ID NO: 153934 - protein, 185 aa, Oryza sativa
  Clone ID: PAT_MRT4530_53841C.1.pep
MASTALSSAFSLLSLPSSSSPAAAAAAAPRSFAVPSRARPRRAVAVVASTATESPKVLELGDAIAGLTLEEARGLVDHLQERLGVSAAAFAPAAVVAAPGAGGAGAAADEAPAEKTEFDVVIEEVPSSARIASIKVVRALTNLALKEAKDLIEGLPKKVKEGVSKDEAEDAKKQLEEVGAKVSIA

SEQ ID NO: 153935 - protein, 93 aa, Oryza sativa
  Clone ID: PAT_MRT4530_53842C.1.pep
FHRQPSIVFLNNFFSLLHAYSPATPAYLCSLILQSYSTFIVIYLFCVLFVVSMLSCVILFHPPMLLFSFVRICYVGFLLMLVHVNSFSLPLIS

SEQ ID NO: 153936 - protein, 50 aa, Oryza sativa
  Clone ID: PAT_MRT4530_53843C.1.pep
LAMGACAITTSSPSIRGVMFEGRCVTGHRGVVSLPRGLMSTQLGFGRVVV

SEQ ID NO: 153937 - protein, 345 aa, Oryza sativa
  Clone ID: PAT_MRT4530_53844C.1.pep
MADGEAVAIYIDVPASHGAAIAQGKIHRFPRGLRGIGGSDERYIAPTVVAIGPYRHGEPPHLQDMEKAKLAAANHFFAASVEDVYGKLLSVVGKARDCYDDDDKIPWLVLDTLMEMEFLNVDVRNFVAGLGDKFFPKNGDKAGRWWSVVWATGQRGNITKLKRDINGGQSYESYRPAHLLVLLRFSQIWRMPEREINYVAANTSLLSSSAVELAQIGVNLTASTAATSSGAAASYVYGDFVVSSYLSALAMLMDREEDVQQLRGHRVVLSTFSNTQTLDLFKRIGQHLSLGSRYFVVLEQIEAYRRNRPARTMVYKFLYKHIKAISVILSIVSVFVGIFKALRGR

SEQ ID NO: 153938 - protein, 64 aa, Oryza sativa
  unsure (1)..(64): unsure at all Xaa locations
  Clone ID: PAT_MRT4530_53845C.1.pep
SYHNDSCARPNKEIAQEKNRLMSNQRLTKISGMHALQPPRRSIDRSTRPXAWRXVWAXAWXXAW

SEQ ID NO: 153939 - protein, 311 aa, Oryza sativa
  Clone ID: PAT_MRT4530_53846C.1.pep
MATRLLCWTALLLPIIAATAAASPLPEACPVPTAAEEILGPGGTCTTLDRRGDPVGVIEGDEVTLAKAITLLHMNKDDYIAVLFYASWCPFSQECKPNFEILASLFPSIRHFAFEESSIRPSIISRYGIHGFPTLFLLNSTMRVRYHGPRTVKSLAAFYRDVSGFDVSMTSEAVLHSVDGIELKKDAEQENCPFWWARSPEKILQQDTYLALATAFVILRLLYLLFPKIGSFAKRAWRRHTLFPNLVGVHEYFFTYLEQARHKFFRLYPSKRGNLQEGARNATAWASKSLASVSIGEPSTIGRTNSTNELR

SEQ ID NO: 153940 - protein, 68 aa, Oryza sativa
  Clone ID: PAT_MRT4530_53847C.1.pep
FQITLSGDPDRACVDEQNRNAQAYNSKLEKLFQALQGSLHGSKIVYLDAYQAFKEILDNPAKYGMVVQ

SEQ ID NO: 153941 - protein, 59 aa, Oryza sativa
  unsure (1)..(59): unsure at all Xaa locations
  Clone ID: PAT_MRT4530_53848C.1.pep
MSRTLLSHILHRPPTLLAYXVVGEEDRSRSAYALFDSTAPWLKLLYSDTRRLLLSLGRK

SEQ ID NO: 153942 - protein, 108 aa, Oryza sativa
  unsure (1)..(108): unsure at all Xaa locations
  Clone ID: PAT_MRT4530_53849C.1.pep
MKSPMEEAHAMPVTSFFPVAGIHKLIAIFLVVLSWILVHKWSLRNQKGPRSWPIIGATVEQLKNYHRMHDWLVEYLSKDRTVTVDMPFTSYNYXIADPVNVXHVLKAN

SEQ ID NO: 153943 - protein, 755 aa, Oryza sativa
  unsure (1)..(755): unsure at all Xaa locations
  Clone ID: PAT_MRT4530_5384C.1.pep
TGVYTGDYTGIGYMQNLANGMTGRDTSLTAPXAGQTVPTIXGQIGPLVAGLTAPLTTGQTGSSAGQTGSLRISLGFHTTTSSTDFKYYSSPVNTVSHAIPHVPNAYNXGYPPDTRYGXYNYIAPQQPPLRPPNTPPDPHRPKNMEELISTIIRNTFGIEAEDRAREYQKPYPDFYDMIPHPRGYRIPEFTKFSGVDSRTTWEHVDQFLAQCAELSDGLDYITSESEIALSPKTESKIGHVDVGKNNDNVLRDSXEIESKIVMHTYQRLYPEHVDSVPYPQGFEVPNFTKFTGEDARTTMEHIGQFIDQXERPIDTSSVTCETISVTSIPKTGIVSDLVPVSSIDVGKKKGKSVIIGDPPPKNRIKNAKAEDHKVAKNESSSSQKTKKPKLTFEMLMAKYKKGLAGQRFDNQTSDSKRPRSSRRERFDQTPKKSEPSTIPTPYKPPVVMPWYSHPMSPFGYPFMYYMPWMPQPPMPCHQAWKQSPRIVPSHSNLRQDRFPQKNRSGGSKVKKVKKVWVRKEAKAPEVVTINEESQDVHVPTGDVLKTIQAEKTEADAVAVDIGCLTEIAVRSNRQTTAGLTDPPGRSDRRLAAGQTRSRDRSDRGALEKSGKIENNIGASTSTKNIKNHCLAPGKQPXPKWIPSGLSRSQNRRLQHLRAIGKKEKKAEDVENKTSNNLEPQTTPKRVWRPKVVKVKRSVISHRSNKSNLMREESSVIRDKSPPHDAMGISAVSILPSKSCNLESRFCLGGKTLICS

SEQ ID NO: 153944 - protein, 169 aa, Oryza sativa
  unsure (1)..(169): unsure at all Xaa locations
  Clone ID: PAT_MRT4530_53850C.1.pep
MEEAQAAVMAHLDQVSGLVQALSAELRRGIGPAADSLLAFVRAVDWTAIXQEPWLICLMVFHATLLLTAVGLRRNANFQLFMLCDALADSGVYLAEKINSYMAEHWKSIATRNYFDRAGVFVSVVWSGPLIFISMVIVVSSLITLCRLMVKWKRAELRHRAQLARDKQD

SEQ ID NO: 153945 - protein, 75 aa, Oryza sativa
  unsure (1)..(75): unsure at all Xaa locations
  Clone ID: PAT_MRT4530_53851C.1.pep
GSLRYFIFLFLIIFDFFILLFIXIYYLFHFFLFFYLFIILLFFIFLFLXYFFIFFIFFFYFFFFIFLLLNFLIFF

SEQ ID NO: 153946 - protein, 70 aa, Oryza sativa
  Clone ID: PAT_MRT4530_53852C.1.pep
SASPSKFLVEEGSRRRGRHCADEGGEASGDGVAVAAAAAGERHEVEVAARVRRCIALGPTAGDGLGRRRR

SEQ ID NO: 153947 - protein, 73 aa, Oryza sativa
  Clone ID: PAT_MRT4530_53853C.1.pep
QCNYWSLKIAHTKLKVPICSPHDKDLLKSVPSRVIARTLGFDSMSSFMHLVLLQQHNMRNTVDLIIHAGGRVG

SEQ ID NO: 153948 - protein, 263 aa, Oryza sativa
  unsure (1)..(263): unsure at all Xaa locations
  Clone ID: PAT_MRT4530_53854C.1.pep
RAPTPSAHVTATVGDRRDRGDGNGAGEKXGKIGRGKGREGAWVYRAAMSVWKPTLGGQGRELALGGRGQNGDRGGKDDAGGREKGKRGRERGLASLPLWRKGGGRGSDAAEGGAGLSLRPLNKVDMHCCRCPQVSVVTYENGIGSLPRFYFCSFQKFLSPTQSSTDLIAAVQQVFAKGAQNIHREEKRNMIEMPSPSLTKEEEKTDAPTSSEERTTETCCFKWTMRRAPYGKTETVFPEEGEDDVTKATIDTTIAHIKIKMPK

SEQ ID NO: 153949 - protein, 72 aa, Oryza sativa
  Clone ID: PAT_MRT4530_53855C.1.pep
SRVWQTAWCEEELPVDVARSSAHEGWPAGAPVQWSHMSAEVEWWWSISISTSRLGMVTTTDSSASRRGFSAA

SEQ ID NO: 153950 - protein, 51 aa, Oryza sativa
  Clone ID: PAT_MRT4530_53856C.1.pep
SMTPHARVAKLESLESGAPFFFFLTRKGYTLNIQETNWRNRGKNMNSDQIE

SEQ ID NO: 153951 - protein, 75 aa, Oryza sativa
  unsure (1)..(75): unsure at all Xaa locations
  Clone ID: PAT_MRT4530_53857C.1.pep
NTINFASKHRYDIIMPSLRTIVLATAASAVTLVNADYVIDPDSVPLSLRKVWCQNEVETCPMICGQTSKGDTKXN

SEQ ID NO: 153952 - protein, 109 aa, Oryza sativa
  unsure (1)..(109): unsure at all Xaa locations
  Clone ID: PAT_MRT4530_53858C.1.pep
QTLRDREPXPCRLMLRQLTSSYTLTLLGKSTSSVLEGCDPDCKVPVLWWVTADGSCAFSNHSYRLKGSCGKSLAPSPHGCLYSNALEGXSXYENPKNKVTAVPANEGEI

SEQ ID NO: 153953 - protein, 113 aa, Oryza sativa
  Clone ID: PAT_MRT4530_53859C.1.pep
MSTAGRKMTTMLAIALLMAILFASLSGTEAIICKARSKMYRGKCRGNRNCAMICVHEEYTGGYCSKGVFSKCMCTKRCGGGGGGGGGGGGGGGDEPPLREARVHRSSPPLEPK

SEQ ID NO: 153954 - protein, 110 aa, Oryza sativa
  Clone ID: PAT_MRT4530_5385C.1.pep
LLMDCVCCTAGSGRGTRISTFRSTGRETVTHRYKYTRATAGSMNYIYCGASDLYHQLALTVTHTVAYCTYHREPEIAHTISCHSTTTVIIIITSMCYLLLTVVFREKEIR

SEQ ID NO: 153955 - protein, 123 aa, Oryza sativa
  Clone ID: PAT_MRT4530_53860C.1.pep
TGGPNPKPNPLRGGTQGPKGWPPEKKNQSPPRGSQPGPFPGQGGGPKRGPTGHWPPETKTWGKGAPRPPRGAPGPEKTTPPPPPKKPPPPAPGKAPPPGRGPFFPTGTPPGGRGTCRRAPPGG

SEQ ID NO: 153956 - protein, 179 aa, Oryza sativa
  unsure (1)..(179): unsure at all Xaa locations
  Clone ID: PAT_MRT4530_53861C.1.pep
NKKXXKXQPSXKQXXXNSHTXKXHNPXXXPEVAGQIIEHSGTPGHARXLAXGRGRGGXGRGRGYHXXNNNHFNNQELPTXGQHHNHHXQQTTTTKVDKPWWTTHHVGXFRPIXTDXTKXLXQAPDXCQLDDQXRQXFPGXFXMXRMETRGFHLGAEXXXXKXLTXRVLMXTXXRGLXXP

SEQ ID NO: 153957 - protein, 53 aa, Oryza sativa
  Clone ID: PAT_MRT4530_53862C.1.pep
PRAEARYVGCSGFMSMAYSVQAVNPRYGANNPEWTKLFREAEENGIELPDDSY

SEQ ID NO: 153958 - protein, 517 aa, Oryza sativa
  Clone ID: PAT_MRT4530_53863C.1.pep
MGALRRKASSSLAGPLAAQRRERTGEPGAAAAAAAKNSAVTLASAVDDSHHVPATRHGDVAGLIGVVVPFGSMESYDRLRLIGEGACGAVFRARHVATGETVVVKIAHKNGGGGGGGDEALLREAEMLAACVGNPAVVRLREVARHPETSKLHLVMDYVGPSLADLLTHRLDGALTEAEARGVMRQLLAGVGQMHARGVIHRDIKPGNVLVGAADGRVRICDLGLGGPASAAPPRTQLVGTLWYMSPEQYLGGGEYGPAVDMWALGCVMAELLTGETLFPADTEYHQVVLVAGVLGVADEKMDGLPLGVTTRPSQLRRKVPEEKLSPAGFDRAQRLVARDMTAVAAWQRRGRHGGDSAGELAAGGGVELGGGGYRGGGDSVTVVQGVGDGDGGGDGIGRGRKGSGFGPYAATTRCSAATAAVSPDPRLSAGSGGWPAVVVGDGDQLAMASDDSWRRRRRWWPRQLAATASADDASEGLGGSMAEDDNEAAAGRGSDSWRRWLVAATTVTGGMAALDG

SEQ ID NO: 153959 - protein, 58 aa, Oryza sativa
  Clone ID: PAT_MRT4530_53864C.1.pep
ETESSFLPSFDSTVCSKGSVVSRCYPCRCRFFFFNKCNGHSIQNLKPSFCWFYHPRVR

SEQ ID NO: 153960 - protein, 626 aa, Oryza sativa
  Clone ID: PAT_MRT4530_53865C.1.pep
MSGVASLGLRSSGSYGSLQQSNGQSPAPAPSPPLAARKAGKMSFGGAGAGGRGLLFARICKLTSRRRRMLLLLLVAAAVLFCFLFSSLVSKDEDAPPGIETMLGISDQVRSFVNPVWTSSGRPITQGDSLNGNGLNTASRPEKQSDSDSSHKKLQGLSWSFPPSIVLEHHPCENFSFFPPPIDRKRTGPRPCPVCYVPVEQALALMPGAPSASPVLRSLNYLSGDNLISKESNHGSLFGGYPSLEERDKSYDIKDSMTVHCGFARGKIPGVNTGFDIDRADLSEMWQCQGIVVASAIFGNYDIMQQPKNISVFSKDTVCFFMFLDEETEAAIKNTTTIDNSKRIGLWRVVVVRNLPYSDARRNGKCLPDLKAIVMLLVKANDAMLNVPKLLLHRLFPNVRYSIWIDGKLKLVRDPYQLLERFLWRKNVSFAISRHYRRFDVFEEAEANKVGGKYDNASIDYQIEFYKREGLTHYSSAKLPITSDVPEGCVIIREHIPITNLFTCLWFNEVDRFTSRDQLSFSTVRDKIRKRVNWTADMFLDCERRDFVVQAYHRELWEQILRSPPPPQPRLVRQQPRKMLPDNTAKEPGKASGSKRVSAKRTRDKKSGSKRAHRSKVTGGKEFIQL

SEQ ID NO: 153961 - protein, 119 aa, Oryza sativa
  unsure (1)..(119): unsure at all Xaa locations
  Clone ID: PAT_MRT4530_53866C.1.pep
CACAHRCSRRSVSPSTCAAPRARRRRAGSRRAARTRRARAPSRWRSAAAGRTPARPRRRPTRSRTRRRAPPRRTXSRCRWRSAPRTPALPPSTPSRSRSRRRRRCRSPTPTTTATTGSG

SEQ ID NO: 153962 - protein, 69 aa, Oryza sativa
  Clone ID: PAT_MRT4530_53867C.1.pep
TDGSTVPNIWTGPIRSYNPAKSAANHDAFICTNFRTTGLNSSGTRTTRTGAVGIPTARHLGSSPPTVLG

SEQ ID NO: 153963 - protein, 68 aa, Oryza sativa
  Clone ID: PAT_MRT4530_53868C.1.pep
PSSYSPSRRVKKVVQFHTIERVDQRTAGPTSLAAETPDSSPESTGGGGEFSRRGGGTSGSREQFWCKS

SEQ ID NO: 153964 - protein, 235 aa, Oryza sativa
  Clone ID: PAT_MRT4530_53869C.1.pep
EEMLLAHEVSDNQQASAEHEHFRDQINSHSESLPQCLPELNRQHNDSISQTASGARYQLGSTAYSSPKVENTDATGISVLLLQKSSSNKWPVVEGRTLSATNILCSEPYYTRDSISAMRRSFGRDSSSATSSIDLGSSRQSDVRFERLRSGKRGDFEKARMSSTMSHQSVASVSDMSISGSSASLCPQSDVIGDTCFPIDTLERSASRTTVSIEEHDSSCMDALSSGMECSSAVQ

SEQ ID NO: 153965 - protein, 1186 aa, Oryza sativa
  Clone ID: PAT_MRT4530_5386C.1.pep
MGDYTADYTGIGYMQNLANGMTGHDTGLTASYAGPDRALFWPDRTSYGRSDRTTNQGVSPSFHTITSSTDFNYYSSPVNTVSHAIPHIPNAYNDINRGYPPDTRYGQYNNIVPQQPPFRPPSPPPDPPKPETVEDWFRNTIRENFTKLRNRAREYQKPYPDFYDAVPYPPDYKIPKFTKFSGENSRTTYEHIDQFLAQCGRASSMNTCKLRLFSLSLSGTAFAWSTSLPENSIFSWAQLEQKFHDYFHTSETELRLSDLTSVRQKYNESVVDYIERFRDIKSRCFSLKITDKDLANIAYDGLLDSIKEKLNGQIFLDIDHVLHEALAQESRVDDNSLQASLDENAISCIAEPSDGSDCGNNLCNDAVTSIAEPNVDSDCLISLDDNAITNIAEPSIGSDCVTSLDNDGIVEPSNGSDCVASLENSIIENIAELNDGSDCITNKSEIALSPKTESQIGHVDVGKDNENVLRDSSEIESKIFMHTYQRLYPEYVDSVPYPQGFEEPNFTKFTGEDARTTMEHIGQFIDQCGKAGNDDLLKLKLFPLSLSNFASTWYSLLAPNSISTWSQMEHEFHGYFKDANLMEQRPIDTSSVTCETISVTSMPKTGIVSDPLLVSSIDVGKKKGKSVIIGDPRPKNRIKNAKAEDHKVTKDESSSSQKTKKPKLTFEMLMAKYKKGLAGQRFDNQTSDSKRPRSSRRKRFGQTSKQSKPSTIPTPYKPPVVMPWYPHPMSLFGYTFMYYMPWIPQPHMPYHRGWKQPPRTIPSQYNSRQDCFPQKNRSGRSKVKSVKKVWVRKEAKAPEVVAIKEKSQDVQVPTEDAAKTIQAEKTETNAVAVDIGGLTEPASQSNRQTTAGLTNPPSRVLKDPTLKVDRKIRRGSEACQWIGNVQLASTAVLNPIIKLWPFRGWVWDFIGQIYSSSSKGYWFVLIAMDYFTKWAEAVPLENITCTEQDDLSVEDYKTLMRSNFEDVIDKRLKILKDMKTLQDGVSREQLMGDSLKKYFLSIWFTYVHQKGRGSMCLHLNLAPMDEIGKNCQSLESVGFPSQGPVRPQRLGVAIVLVDLSRKVTNNLLLLDQTKTSTEPEAEAPALSFTPALTSADGAHQEPLVVATKNSIPRIAHMPMVPTRRLSCPEHFVTTSEGVHQLSRYSLADWFRNELGNGIWGSWIFLALSFVILGLNREIWRQPQILN

SEQ ID NO: 153966 - protein, 112 aa, Oryza sativa
  unsure (1)..(112): unsure at all Xaa locations
  Clone ID: PAT_MRT4530_53870C.1.pep
MTDKPKGICKQIGFQTHSCDDGGGGLGPHARAYNASKHTIVMPPASSAPIASAAVSSAGEPSMVKERLRVLGHLVPGCRKLPAPMLLXANYVAALEMQSRPCSHRPLGRHPR

SEQ ID NO: 153967 - protein, 115 aa, Oryza sativa
  unsure (1)..(115): unsure at all Xaa locations
  Clone ID: PAT_MRT4530_53871C.1.pep
MSWATPSSSGILRRSTSVGARRLCYGVQWALXPSITSEIFGXPFGTIFNVVRASPVGSYILSVRCGLHLRHGVAAGSSVHGSGNPCFALSFVIMACVCVVGSAVAFMLFVRTRRF

SEQ ID NO: 153968 - protein, 73 aa, Oryza sativa
  Clone ID: PAT_MRT4530_53872C.1.pep
MGVIAQSGHPPLATPQPRAHETVLGIQKKGKGEQPGLRTCIHTESSTQKLLLLTFQAVHMLGLAWGRICILRR

SEQ ID NO: 153969 - protein, 100 aa, Oryza sativa
  Clone ID: PAT_MRT4530_53873C.1.pep
MVLSMAGSSARHIQSHGTSACRGDAPRVSATAISSVHTVPATPTVAHTTGGFDTTAYLPPHEGGGSSTGKDCSLQLPCARQAGAAPSQSPWPVNYPQELV

SEQ ID NO: 153970 - protein, 69 aa, Oryza sativa
  unsure (1)..(69): unsure at all Xaa locations
  Clone ID: PAT_MRT4530_53874C.1.pep
YNSLPGLISVLMYDVLCTAAHLSXCCLISVTLHLSIHRYFMQLQHKTTVTGENESCVXQHILYRVLQYS

SEQ ID NO: 153971 - protein, 89 aa, Oryza sativa
  Clone ID: PAT_MRT4530_53875C.1.pep
MGEFDDYWARAYRGDSGVPHSDPQRLVTTWTGAFALGAAACVHHHASALASNIKSLPHYAMDLGNLSLLDETLWQHICNYLVDFNQKEF

SEQ ID NO: 153972 - protein, 245 aa, Oryza sativa
  unsure (1)..(245): unsure at all Xaa locations
  Clone ID: PAT_MRT4530_53876C.1.pep
LSATRSHRAALPRPGAAACSWTTSLVASTSMPTLYSFYIIXDALTFFQMNSCKLDHLKFRXDRDQCYSAPSGYXMCFYGQHFFACADLLWHTKGPAKCKFFLWFAFQRHCWTADLLXKRGIDSHSVYLCCAQELETVNHILLDRVFAWQVWLRVLSPLGWATLSPSRGSCLQDWWPSSRACLPEHLRPGFESLIVLVSXQLWEERNSRVFDSALSLVSEVLQFILSEGHLWSLADIANFGVLLGE

SEQ ID NO: 153973 - protein, 125 aa, Oryza sativa
  unsure (1)..(125): unsure at all Xaa locations
  Clone ID: PAT_MRT4530_53877C.1.pep
LLVRTTISSSIDAQTATEGLIDNLSDQVXDAVLDGCLVDXHDNRAAXDTCTRTNMDMLVGHNYTKDNSHYYQIVMERCPNIVLESDAASLAVDDCKELVNIKXKTPDIAHGVPYLFNKNPEKIDA

SEQ ID NO: 153974 - protein, 96 aa, Oryza sativa
  Clone ID: PAT_MRT4530_53878C.1.pep
ALAFCQFKTTVASSLRHIRLLPSPLSHSTACSSIRSTGRHRDGGEELGGLEEEEGEPVVGEAIREAALGGGAGDGGVVGEATREAARGSGVWGRRR

SEQ ID NO: 153975 - protein, 60 aa, Oryza sativa
  Clone ID: PAT_MRT4530_53879C.1.pep
EISQGFKPLFGFQNQFFLSLQEVGEANPFGFFKDPNLWAIYSKGFPLNPKDIQLVKKIFV

SEQ ID NO: 153976 - protein, 836 aa, Oryza sativa
  unsure (1)..(836): unsure at all Xaa locations
  Clone ID: PAT_MRT4530_5387C.1.pep
MAGQTVCYAGQTVPTIAGQTVLYPGQIAPPVAGLTAPLTTGQTGLSIAGQTGSLGISLGFHTTTSSTDFNYYSSPVNTASHAIPHIPNAYNDINRGYPPDTRYGQYNNIVPQQPPSRPPSPPPDPPRPKTVEDWFRNTIRENFAKLRNLAREYQKAYPDYYDIIPYPRGYKIPEFTKFSGEDSRTTWEHVDQFLAQCGEANWDTCKLRLFSLSLSGTAFTWFTSLPVNSISTWAQLEQKIHDYFHTNETELRLSDLTSVRHKYNESVADYIKRFRDVKNRCFSLKITDKDLADIAYDGLLDSIKEKLNGQIFLDVDHVLHEALAQESRVDDNSLRASIDESAISCIAEPSNGSDCVNNLCNDAITIIAEPNVGSNCLASLDNNATTIIAKPSDGSDCVTSLDKYGIAETSDDSDCVASLENSIIENIAELSDGSDCITSESEIVLSPKTESQIGHVDVGKDDDNVLRDSSEIESKVAMHTYQRPYPEHVDSVPYPQGFEVPNFTKFTSEDTRTTKEHIGQFIDQCGKAGNDDLLKLKLLPLSLSNFSSTCPIDVDKKKGKSVIIGDPRPKNRIKNAKAEDHKVAKDESSSFQMTKKPKLTFEMFMAKYKKGLAGQRFDNQTSDSKRPRLSRRKRFGQTSNQSEPSTIPTPYKPPVVMPWYPYSMSLYGYPFMYYMPWMPQPPMPYYQGWKESPKSVPSHSSNPRQDRFPQKNRSGGSKVEKVKKVKKVWVRKEAKAPEVVDVKEESQDAQVPTGDAVETIQAKEIEADTVIVKSGGLIEASSRSDRQPVAGLTDPIGWSDRRLVAGLTXGALEKNGKIESNTGASTSTKNIKSHCL

SEQ ID NO: 153977 - protein, 127 aa, Oryza sativa
  Clone ID: PAT_MRT4530_53880C.1.pep
MSLCRAVVMQSRGLLLRTRRRTFSTTGATDQEQVRRTNIVREIDELKAKVKREMIEDVEKVKRVENEDRNVLSRLLTFCGMPRGVFRDNLVFGCNVVAVFVASGVVGACSAGWRDARRKRAKFGTNA

SEQ ID NO: 153978 - protein, 58 aa, Oryza sativa
  unsure (1)..(58): unsure at all Xaa locations
  Clone ID: PAT_MRT4530_53881C.1.pep
MASNKVVFSALLLIIVSVLARTATIADHHKDQVVYSLXRRCQPELATPRTSLPLSRPG

SEQ ID NO: 153979 - protein, 285 aa, Oryza sativa
  Clone ID: PAT_MRT4530_53882C.1.pep
MEMTRSLTLVPLPATLRPASAACRRRRRRRGLPFGALFSPSPPSNQQQQEMHIRALQPRQDWVGEWVRSNDTLVRGLPILGGGASLLAVLLNRAVSGIAAVADASSSQSRADILTLALSVTDILAGLVWLSIRPKSISPVVPRGVECKRVGTGVLDSALRELLWTWDSLTTATCCKSLVVVYGEDGNAVMVDAQKFMQGSLYRSAMESKKQSYLANLALYPGRTELPFLPANTQALILQPIGDKGIAVIGGDTIRGFTNLDQVLFLIYSLLTYIVPRFVLGDSHR

SEQ ID NO: 153980 - protein, 75 aa, Oryza sativa
  Clone ID: PAT_MRT4530_53883C.1.pep
RSRPSLIYRRDGVSGCLILLSFCFEQIASMNFHESFCFLYIRFTSLLHAVPREGESCCSLSSKAAHVGPKSIVQP

SEQ ID NO: 153981 - protein, 68 aa, Oryza sativa
  Clone ID: PAT_MRT4530_53884C.1.pep
MLDPRQDSRVNFFSSNSGRLPFFSGANDTPNFGKEHTGPLTRQGSSDYAGGGALLVACVSVKRQRLAD

SEQ ID NO: 153982 - protein, 101 aa, Oryza sativa
  Clone ID: PAT_MRT4530_53885C.1.pep
MLGRNGIAGYLQPIYVGLERDSKGGRQWGGGHRDEEVGRAIGDAAAATRREWEGGGDGGTREIKHCGERSGATARRSGPTQSWGEAGAPGEGLGQESGGRG

SEQ ID NO: 153983 - protein, 150 aa, Oryza sativa
  Clone ID: PAT_MRT4530_53886C.1.pep
MAVAAARRGRGSASGGGGVVLLCLVAAALLMEAVPAAEAGGKTYYVGDAAGWGRNLDWWLAGKTFYAGDVLVFKYNKEYHDVAVVGGKGYRRCKVPRNKDTAVLRTGYDQVTLRRGNNYFICGMPGHCDAGMKLAVKALCFLYCTGSLMI

SEQ ID NO: 153984 - protein, 189 aa, Oryza sativa
  Clone ID: PAT_MRT4530_53887C.1.pep
MGCFDPGYLTSGHGRMEKFGGGVGVSPFHLHLDTCHPHLPPSYYSMDHKEYAYRHATKEFKQLGMEPKQSTTPLFPGAGYGNTAASPYATDLSKEDDDEKERRQQQHSFLLGAGLRLEKPAGYNHAAAAQKPLRHIFDEWPHEKSSKGSWMGLERETQLFMSITMAANDLPITTTFATTMGGAGLLAHN

SEQ ID NO: 153985 - protein, 76 aa, Oryza sativa
  Clone ID: PAT_MRT4530_53888C.1.pep
GVRVCERCERERTLRDAHAMPSGVRVVCCAVPVDGVNHGMGVCACGCDGGGGTGCGVADADAGMEMEIVNIHKGEY

SEQ ID NO: 153986 - protein, 307 aa, Oryza sativa
  Clone ID: PAT_MRT4530_53889C.1.pep
MMMMSGRPSGGAGGGRYPFTASQWQELEHQALIYKYMASGTPIPSDLILPLRRSFLLDSALATSPSLAFPPQPSLGWGCFGMGFGRKAEDPEPGRCRRTDGKKWRCSKEAVPGLPKVSPFHLQLDTTHPHPPPSYYSMDHKEYAYGHATKEVHGEHAFFSDGTEREHHHAAAGHGQWQFKQLGMEPKQSTTPLFPGAGYGHTAASPYAIDLSKEDDDEKERRQQQQQQQQQHCFLLGADLRLEKPAGHDHAAAAQKPLRHFFDEWPHEKNSKGSWMGLEGETQLSMSIPMAANDLPITTTSRYHNDD

SEQ ID NO: 153987 - protein, 382 aa, Oryza sativa
  unsure (1)..(382): unsure at all Xaa locations
  Clone ID: PAT_MRT4530_5388C.1.pep
IEPPRYTNFSILVTKSCQHDFEMLMAKYKKGLAGQRFDNQTSDSKIPRSSRWKRFGQTPKQSEPSTIPTPYKPPVVMPWLGESKVKKVKKVWVRKEAKAPEVVTIKEKSQDVQVPTGDAAKIIQVEKTEAGTVTVNIGGLTETAGRSNRQSTAGLTDPPGRYDRRLAAGLTGPRGRSDRGALKVSGKIESNTGASTSTKNIKNHCLAPGKQPXPKWIPSGLSRSQKRRLQRLRAIGQKKKEAEDVKNKTCNNLEPRMTPKRVWRPKEPMLDFKSLDEIGKVIDQGRSDRHCTAGLTGGXRRSDRLCMAGLSGQTGRSNRHCVSVEVNLVSLRYFKQDDLSVENYKTLMGSNFEDVIDKRLKTLKEMKTLQDGIFREQLMRDS

SEQ ID NO: 153988 - protein, 102 aa, Oryza sativa
  Clone ID: PAT_MRT4530_53890C.1.pep
LLHGPQGVRVRARHQGGAHGEHAFFSDGTEREHHHAAAGHGQWQFKQLGMEPKQSTTPLFPGAGYGNTAVSPYAIDLKPLGHFFDEWPHEKEQQGLLDGART

SEQ ID NO: 153989 - protein, 199 aa, Oryza sativa
  Clone ID: PAT_MRT4530_53891C.1.pep
MESQRRRWFSCVAASAAIPTSSRTPALYGGPYAVATAHTPAAAAAYHAQVSPFHLHLDTTHPHPPAAAVLLLHGPQGVRVRARHQGGAHGEHAFFSDGTEREHHHAAAGHGQWQFKQLGMEPKQSTTPLFPGAGYGNTAVSPYAIDLSKENDDEKERRQQQHCFLLGADLRLENSAGHDHAAATQKPQTSRPLLRRVAA

SEQ ID NO: 153990 - protein, 83 aa, Oryza sativa
  Clone ID: PAT_MRT4530_53893C.1.pep
YTGPGVQTLSQQQNGAVICEQERSIRSSTLQEEKARSRPGNNAHTKSTMNLTFMTVRCQRSLASGALGHYCCRSSWSHSTACE

SEQ ID NO: 153991 - protein, 51 aa, Oryza sativa
  Clone ID: PAT_MRT4530_53894C.1.pep
LLLYVNVWWHDHPEIITCQLYACGVHMLLKLVDKSVIDFDGSFCTGALGTS

SEQ ID NO: 153992 - protein, 194 aa, Oryza sativa
  Clone ID: PAT_MRT4530_53895C.1.pep
MAGLSLQHPWAFAFGLLGNLISFTTYLAPIPTFYRIYKSKSTEGFQSVPYVVALFSAMLWIFYALIKSNEALLITINAAGCVIETIYIVMYLAYAPKKAKVFTTKILLLLNVGVFGVILLLTLLLSHGEQRVVSLGWVCVAFSVSVFVAPLSIIKRVIQSRSVEYMPFSLSLTLTLSAVVWFLYGLLIKDKYVA

SEQ ID NO: 153993 - protein, 304 aa, Oryza sativa
  Clone ID: PAT_MRT4530_53896C.1.pep
MPTCLPPPPRAAIAAVLTSLLPPPPGASASLAPAGPAAAVARQIRRNDGHHPGAAVGMSSASVAERERESEAGEFTEVVVVRHGETAWNASRIIQVPCSVPPAPSPIQQAVAVARRLSNEAKPAAIYSSDLKRAAETAEIIAKACSLPNVVFDPALRERHIGDLQGLRERHIGDLQGLKYEDAGKEKPEAYRAFLSHKRNRQIPGGGESLDQLSERCVSCLYNIVEKHQGERIILVSHGGTIRELYRHASPMKPLHGKIHNTSVSVILVSGATGRCIVKACGDISHLKETGVLENAFGGDKNSA

SEQ ID NO: 153994 - protein, 44 aa, Oryza sativa
  Clone ID: PAT_MRT4530_53897C.1.pep
RGQAKPEGHDLCQEITRTEKSTVMLRLMPMMLTLIDDHMHTDGL

SEQ ID NO: 153995 - protein, 62 aa, Oryza sativa
  Clone ID: PAT_MRT4530_53898C.1.pep
RLGTRWQVCGPLYDSRLECAMVHFTTKLTTRRYDACDQVRRRSYSATPATSYSPVMYMLTNV

SEQ ID NO: 153996 - protein, 109 aa, Oryza sativa
  unsure (1)..(109): unsure at all Xaa locations
  Clone ID: PAT_MRT4530_53899C.1.pep
ADGGDGAARQRRERRRDRGRTXGGIGRRSGEVKWSSWGGQTGAVSCGVSGGNGGGRGGGRVHVVGCELGCGRAPDFAATWGGSGGHGGGWSRRKGMTGGVHGSHLSEGE

SEQ ID NO: 153997 - protein, 192 aa, Oryza sativa
  unsure (1)..(192): unsure at all Xaa locations
  Clone ID: PAT_MRT4530_5389C.1.pep
IGPLYVHLKRLGVLELGKMNTTLLGKXLWKLEXNEHGIWQDLLRSKYLYQKTLTQKKPNPSDYQFWKGLINVKETFLQLXEKKIENGRNTLFWEDSWMGGXRRPLADQFPGLYNITLTKKVLVAQVVEKGFGXIKFRRTLYDRKLEEWNKLQNIWQSIALSDVEDKTVWKLTKDGVFTIESFYTAFILQNTW

SEQ ID NO: 153998 - protein, 852 aa, Oryza sativa
  Clone ID: PAT_MRT4530_538C.1.pep
MSPASLLLLFSSLTLVAAAISADEQGGGSCSPRTCGNVTISHPFGFVPEQETDTKCGRLGFEVHCSNNTPYLGYYRRKYRFQVLDIFYGNSSLLVADVHKLDDFRNSSSKGCHVMTANTSSKVGQPFSVSSANLNLIFYNCTAETAAAAVRRDGGLVETKCSGGGTLVRVGGHYSDSGSYEEYSVEGCGATLVPVLGTSSGEANASSYEELISDGFLLTWQPPSVKSQDVPFGALQNDGQLKYFGLGFMMVHPISASSTIRRDFPNANPEEGCAASTVCGKVTISSPFAVVPEQATESKCGWLGFQVICRNDTPYLGYYKLGYRIQVLDIFYGNNSLLVSDVHKLGGFDVFSGASKEYSCHVPRTNTSSKVALPFSISTTNLNLFLYSCSKALVPRDGDGDLVETRCGNKTFARVGGNYSDSGDYPAFYMEGCNATVVPVLGTDARSYEQLIRDGFLLTWQGPPSSGRSRIGTTVKLQPGGRNCLFKYVANESKIEEALKEYDSLAPKRCNTRIIHFDIKPQNILLDEDFCPKVADFGLAKLCRLKDSALSMAEARGTVGFIAPEVFSRGFGVVSTKSDVYSYEFRQLICRLIMHQTSSQLVLASFLLLLCHHAHADCEPATCGNLTINPPFWLDEPGRPPCGPPTFQLQCRGSEAFVAHSFFQTYQVVRIFTGNSSVVVVDRSLPLESGCPVPWFNISIGFVMGPFLISRANKELVFVHNCTTTKRRPPQGFRRMPCSPDESFVFLGDGRPRLLLPGCSMSVVPVLGLQDGDYVASMRRGLLLEWMLVPGDCQKCSASGGQCEYSSDGMGFSCKCPSGVHNPTSCVAGGEFFASRMPLALGHENTLMERDE

SEQ ID NO: 153999 - protein, 111 aa, Oryza sativa
  unsure (1)..(111): unsure at all Xaa locations
  Clone ID: PAT_MRT4530_53900C.1.pep
FIYYFXXXFYLXXFRXNGXXIFQRTSGSLYXCTXXXMYKLELHDQQLYNVQCTLGXFXCRSLMHTQLQGGSFHQMPAPIISQKFLLFLCNTETSECXIQMATVHILLAKKG

SEQ ID NO: 154000 - protein, 120 aa, Oryza sativa
  unsure (1)..(120): unsure at all Xaa locations
  Clone ID: PAT_MRT4530_53901C.1.pep
LDPGPRSRCRPLQRPFCPRREYVRRDIVSFIVEDPLVVLYLSPQVPSSAVAGIALPALSFSLXRRPPLQPRRSSSSIVAFGRHCRRLVRKKEKKPGSHLPEAEDPGKPVVALKAEFAASV

SEQ ID NO: 154001 - protein, 615 aa, Oryza sativa
  Clone ID: PAT_MRT4530_53902C.1.pep
MPLALMFAFALALRSSSSSFLLSVGAPPACSSYIGKSVDDQRMGERWPAVEQGQRRDGRRNSELSGEGEEQRVAWRQERREDWHAEAELLRHSDGLSLGFAVMDDSATMLGGEREHVSLSAAAAAAGHCALVAATVRDSSGLHMGRWLHHGLKKAEDLQFLVEDEQSKVTPTTCSMECPNGSSPSTTARSIYDDEGATPTIILELGDGEGKDRMPFIISKDLSELTPIMCLTICSSLDVEPDFTVAAVVTCSNTAMDSKELVATDGATGTTNIDPRVCSKETHTKCLLFGPDVNGVTDRGVIVFQSRMGVFKVVPISSQSMELMVDEKATCTDTTHLPKVMHPSHLMLGPNVNTGTIQAGVAYSLLLGAPEGIASSGKATLVMAQKLNSNFCLKWVALNRCSTKCSKGYKKLLMSHPKRNPWPPPCSVGVHFGVRRISEIIARGAGENQNRKVKTCSYDSIFDFCENNPSDGSAAARFSIDGIDTRTDSEMIYASIANRDYWSVKLFEVIKEGCPIRHLLLGDVKIEQLLQCETFSTRQTNIEQVIKLQLSNSKEIQELQVPWDPGGFLHRLGDKPNFKKRGLSRTRVGCTWAAGCTTGWSAHRQEAQARQLKII

SEQ ID NO: 154002 - protein, 36 aa, Oryza sativa
  Clone ID: PAT_MRT4530_53903C.1.pep
MDLERTGLRAPSDEALAWWPHTEGENHVLAPQGEWR

SEQ ID NO: 154003 - protein, 689 aa, Oryza sativa
  Clone ID: PAT_MRT4530_53904C.1.pep
MECSNGSSPSTIARSIYDDEGATPTIILEVGDGEGKDRMPFIISKDLPELTPIMCLTKCSSLDVEPDFTVAAVVTCSNTAVDSKELVATDGATGTTIIDPRVCSKETHTKCLLFGPDVNGVTDRGVIAFQSRMGVFKVVPISSQSMELMVDEKATCTDTTHLPKVMHPSHLMLGPNVNTGTVQAGVAYSLLLGAPEGIASSGKATLVMAQKLNSNFCLKWVALNRCSTKCSKGYKKLLMSHPKRNPWPPPCSGGVVRRWKEWYVPWAAGNYLGIIFYFMPPWPPPNQIGTIILWLLVNTWLTEVELKPWPDPQPSQYNGGVMWGEQVPWPAPVFAHLMGYDFCSANCIRDQTPSVALYCAPKGDLNHEKSNRAHKDTLVAIFNLEQFHYVGGEEKVTEGMLYGLSTISCNYLIIPAATMTTTFLSVPSSTQNIYGACWLEAQEGLNDIAKGRTYKICKSMRMTLNHVESWLQNPTNILYNGQLFNCPAGIHFGVRRISGIIARGAAENQNRKVKTCGYDSIFDFCENNPSDGSAAARFSIDIGTDSEMIYASIANRDYWSVKLLVVIKEGCPIRHLLLGDIKKEQLLQCETFSTRQTNTEQVIKLQVSNSKEIQELQVPWDPGGFLHRLGDKPNFKKRGLSGTRVGCTWAAGYTTVARLSDNGELRHHFSHKEEKDEEIKKKTKKEGDG

SEQ ID NO: 154004 - protein, 95 aa, Oryza sativa
  Clone ID: PAT_MRT4530_53905C.1.pep
RSKSQSGILQSGGIIRERGLVEFHTFEFFLLICALERHCPLLSAVSVSHQGLLSIDCSALIHSLSPAASPPTLMDQCSSLPGKSWLFTRASYSRR

SEQ ID NO: 154005 - protein, 223 aa, Oryza sativa
  Clone ID: PAT_MRT4530_53906C.1.pep
MEERTEHRGAIVHHGKAEAEAVAMAQQLGLCVPDEEAGGAPTERRKEEEELRNAKAKANLKASGIAVVFGFTVLTASLCLPTEAKHASNTRFIVSLLLAFATFTAIYVSIFFMFSTAIVGMSAMTLSKRAVNVAATANRWFFLVAAIRITSALSLCLLACAVLAASYVVLGYFLMLAAFVLLAITSLVFLLLRHCVPSGRSDLLDGQPEPEEARLKAMEDRRQ

SEQ ID NO: 154006 - protein, 184 aa, Oryza sativa
  Clone ID: PAT_MRT4530_53907C.1.pep
MSGVRRAAGRPKIGDLATSDVVVRLRTPEGRDEWLYCHSGVLAAGSRYFADRLSDDWPTCQILGSRYCVEVHCQELDLSPHVTALRLLYAAEPCSRFGVRGALGVLQAAAHLACPRVAAACVDYLESAPWDEADEEEILRTIPCLGPQYECVLARLRPIDPAPVAGILLSAFRHATSTRSPPQE

SEQ ID NO: 154007 - protein, 97 aa, Oryza sativa
  Clone ID: PAT_MRT4530_53908C.1.pep
RSKSQSGILLNGGMIRGRGLVEFHTFEFFLLICALERRCPLLSAVSVSHQGLLSLDCSTLIHSPSPAASPPTLMGQCSSLPGKSWPLPELPTPEGRE

SEQ ID NO: 154008 - protein, 90 aa, Oryza sativa
  unsure (1)..(90): unsure at all Xaa locations
  Clone ID: PAT_MRT4530_53909C.1.pep
MAPKAEKKPAAKKPAEEEPAAXKAEKAPXGKKPKAEKRLPAGKPXKGSGEGRKAXRKKAKKSXETYKILHXFKVFKQVHPDIGISFKAXF

SEQ ID NO: 154009 - protein, 65 aa, Oryza sativa
  Clone ID: PAT_MRT4530_5390C.1.pep
LKIVFITCNCPHWQQQIIHCMCLHRRCCNSDYVGYYCLVYQATSVDHKFHLMTMVIHRAHGQCRQ

SEQ ID NO: 154010 - protein, 43 aa, Oryza sativa
  Clone ID: PAT_MRT4530_53910C.1.pep
PFVVSGAFSGERAVGFGVPKVWEINNLGKRCEDFSVLGQRPAQ

SEQ ID NO: 154011 - protein, 95 aa, Oryza sativa
  Clone ID: PAT_MRT4530_53911C.1.pep
VDHHADPVLQPPFPLHRPRRDGHGAQDLHQQQHRHHRPRHRHRPRCYHDERPRRRRRGGEAAAGGSSRRRRRRHGDGDDARRREIERQPRHALPL

SEQ ID NO: 154012 - protein, 60 aa, Oryza sativa
  Clone ID: PAT_MRT4530_53912C.1.pep
GFQGKCGDIASINQIFKWEQNFCNIPQNLKGSLLSFNLINTNLGCEPAILGFLWGHQTPV

SEQ ID NO: 154013 - protein, 67 aa, Oryza sativa
  Clone ID: PAT_MRT4530_53913C.1.pep
MSLDVGHPDLKTTGTYTYHQAVVREKGEGQRQLALRQTGSLARTGLALSVASMLWGTKYTTAMKLGL

SEQ ID NO: 154014 - protein, 68 aa, Oryza sativa
  unsure (1)..(68): unsure at all Xaa locations
  Clone ID: PAT_MRT4530_53914C.1.pep
NTGRVGVIKNREKHKGSFETIHVXHALGHAFATGLGNVFTIGKGSNPCLSFPKGKGIELSTMIAHSNT

SEQ ID NO: 154015 - protein, 45 aa, Oryza sativa
  Clone ID: PAT_MRT4530_53915C.1.pep
PVHARHPSSKVGLWTEIRMSTESSLSFIISRDKAHASADAWADAW

SEQ ID NO: 154016 - protein, 380 aa, Oryza sativa
  unsure (1)..(380): unsure at all Xaa locations
  Clone ID: PAT_MRT4530_53916C.1.pep
SRTKIGALHLIIKTDSKLVASHFSKTFEAKEDTIAKYLEEARLNERHFLGITVKAITREEKGEADXELAKAATAGQLLENSFFEVVAQPSNERKEVLCIENKDDWREPILKYLVSAQLPEKEEEARRIQLISRKYKVVEGQLYKSGVIAPLLNYVTREEGMKMVVDIHEGLCGAHQAPCSVASKVIRQGIYWPTIMKYTERYIKTCRACQKFGPTSKAPPKELQPIPPVWPFYRCGIDIVVPLPREKGDLRFVIVAIEYFSRWIEAEAVARITSAAVHKFVWKNIMCRFGIPREIVCDNGKQFXSGKFQDMCKGLNLQINFASVGHPQTNGAVERANGKIMEAIKKRLKGSAKGKWPEDLLSVLWALRTTVVRSTGMNSF

SEQ ID NO: 154017 - protein, 335 aa, Oryza sativa
  Clone ID: PAT_MRT4530_53917C.1.pep
MAAAARLLARISRQGVASAAAARRQAEAAALLGASAGRHLAPPCSSIKALPLLNQPRLYSTSTFQRFGFSSSAPQQDDKAANKQTEDGVNKSTQSEASNETNSSPGTENASQAGSQDSVPQSNRRRRGTKRTAFSDSDTEDLDLSKEDLTKLVLEKEELLKSKDEEVKDMKDKVLRSYAEMENVIARTKRESDNAKKYAVHGFSKSLLDVADNLSRASSVVKESFSKIDTSNESAEAVKLLNTLLEGVEMTEKQLGEVFKKFGVEKFDPLNEKFDPNKHAALFQIPDPSKPSGTVAAVVKVGYMLHDRVLRPAEVGVTEGGPIEEEPEEKSDKSD

SEQ ID NO: 154018 - protein, 40 aa, Oryza sativa
  Clone ID: PAT_MRT4530_53918C.1.pep
VGCLPRLPIWVCTWLCSIYHSGSHSSRPSCRIPASPGYPL

SEQ ID NO: 154019 - protein, 299 aa, Oryza sativa
  unsure (1)..(299): unsure at all Xaa locations
  Clone ID: PAT_MRT4530_53919C.1.pep
MAAAARLLARISRQGVASAAAARWQAEAAALLGASAGRHLAPPCSSIKALPLLNQPRLYSTSTFQRFGFSSSAPQQDDKAANKQTEDGVNKSTQSEASNETNSSPGTENASQADTEDLDLSKEDLTKLVLEKEELLKSKDEEVKDMKDKVLRSYAEMENVIARTKRESDNAKKYAVQGFSKSLLDVADNLSRASSVVKESFSKIDTSNESAEAVKLLNTLLEGVEMTEKQLGEVFKKFGVEKFDPLNEKFDPXKHAALFQIPDPSKPSGTVAAVVKVGYMLHDRXLRPAESGVTERWSN

SEQ ID NO: 154020 - protein, 763 aa, Oryza sativa
  Clone ID: PAT_MRT4530_5391C.1.pep
MGDYTADCTGIGYMQNLANGMTGHDTGLTASYAGQTVPTIAGQTVPYSGQIGPPVAGLTAPLTTGQTGPWAGQIGSLGVSPGFHTTTSNIDFNYYSSPVNTVSHATPHIPNAYNDINRGYPPDTRYGQYNNIVPQQPPFRPPSPPPDPPRPETVEDWFRNIIRENLAKLRNRAREYQKPYPDYYDIFPYPRDYKIPEFTKFSGEDSRTTCEHVDKFLAQCAELSDGSDYITSESEIALSPKTESQIGHMDVGKDNDNVLRDSSEIESKIVMHIYQRPYPEHIDSVPYPQGFEVPNFTKFTGEDARTTMEHIGRFIDQCERPIDTSSVTCETISVTPMLKTGIVSDPLPISPTDVDKKKGKSVVIGDLRPKNRINNAKAEYRKVTKDESFSSQKTKKPKLAFEMLMAKYKKGLAGQRFDNQTSDSKRPRSSRRKRFGQTPKQSEPSTIPTPYKPPVVMPWYPYPMSLYGYPFMYYMSWMPQPSMPCHQEWKQSPRSVPSHSNPRQDRFPQKNRSGGSKVKEVKKVWVRKEAKAPEVVINKESQVVHVPTGDVVETIQAKGIEADTVIVKSGGLIEASSWSDRQPVAGLFEPLGRFDRRLVAGLTGPRGRSDWGALEKSGKIESNIGASTPTKNMKNHCLAPEKQPQPKWIPFGLSRSQKRRLQRLRAIGQKEKEAEAVENKTCNNLEPRTTPKRVWRPKEVKVKRPVISHSRDKSNLMREESSIIRDKSPSHGAMNVGAVFVLPSKSCSQESRFCSGGKTLICS

SEQ ID NO: 154021 - protein, 68 aa, Oryza sativa
  Clone ID: PAT_MRT4530_53920C.1.pep
PPPPARRNPSGSSGDGRVRRRRRCCKCGARRLCSTTAAARAPPRGQSSARGGGGSGAGEAESFSLDRN

SEQ ID NO: 154022 - protein, 259 aa, Oryza sativa
  Clone ID: PAT_MRT4530_53921C.1.pep
MASGRIALLCLLGLLLVAASPAAIAAKDDKIFYQITFMWPGAYCAQTKAGCCMPKTDVAPASDFYVAGFTVYNATTNSSLSSCSNTPFDMNQIGDVTRLMQYWNNIRCPSKSGQKGWKNAWETSGVCSDLTESAYFDTALALRDKINPLSRLVSNGIKPDFGLYSVKKIKEVIEEGIGAPALIQCSKGPFNKFQLYQIYVCVAEDAKTFVECPSPRKPYTCGDDILFHPFKKWMLKTNSTKSYAAADAIDQLLEAVMEI

SEQ ID NO: 154023 - protein, 84 aa, Oryza sativa
  Clone ID: PAT_MRT4530_53922C.1.pep
MTGSVREGKRSPDPPLPSPPMPLRFFIFSLSRFSIFCRIKERRRRWPLLQPVGGSRRRYYRKEAQGLSMGGCEGARWWRRWMPG

SEQ ID NO: 154024 - protein, 112 aa, Oryza sativa
  Clone ID: PAT_MRT4530_53923C.1.pep
MEGMDPVACGAPDRSIRLHNGEGKEVVVEEVDLAAATTMTTTTIVMMTLAAMTTTIAGSQQGFSGSASTLPLLDLAKGYEDGDGPTSASLRLDGGCRPIEMWVTVVVDNDVQ

SEQ ID NO: 154025 - protein, 72 aa, Oryza sativa
  Clone ID: PAT_MRT4530_53924C.1.pep
WKNSITRVRVRIRIMKSTDMRQHIHGRPRAASESCHSTTGLAEHARIRSTWMCCDTLQDHQRSALYSMPYVG

SEQ ID NO: 154026 - protein, 40 aa, Oryza sativa
  unsure (1)..(40): unsure at all Xaa locations
  Clone ID: PAT_MRT4530_53925C.1.pep
IXLFYIGATIWAGGYLSSGRNFPYISXXRRLKASIQVKYT

SEQ ID NO: 154027 - protein, 91 aa, Oryza sativa
  Clone ID: PAT_MRT4530_53926C.1.pep
MGYWWDRVVLPVRRAWLGVAARFGVRQTGLWRLRQEVSTCEYEDVRVMWEMLSRTSTAGAGAGRAAPPARRHSRFRQPRPWTESICLCAGF

SEQ ID NO: 154028 - protein, 74 aa, Oryza sativa
  unsure (1)..(74): unsure at all Xaa locations
  Clone ID: PAT_MRT4530_53927C.1.pep
SCRIIAPAXGDLSLKLTDDDFLRGEDYELKTIADQVNDEGMPTFLMMKDGDVKESDVAAMKGELESKLELHMAM

SEQ ID NO: 154029 - protein, 317 aa, Oryza sativa
  unsure (1)..(317): unsure at all Xaa locations
  Clone ID: PAT_MRT4530_53928C.1.pep
MGFSANTTKASFGWSSIGKSTRKVPQLVSEIQNRPRTAKPDIRRPPTYKTGGGVRGRRVVRPATAAPRWRRAGSRRRELAGLLVPSCXGDGGRATRSRRCDAPAAYSGTVTVATIAYQRRPPPAPGAADSDEAERTNLTLALAFAGWGAGRSISSPPLLPRRPRRPEILGVERGVERGGVRDKPQDLVGHADAVEIAHRGEVKAAPVAAALLPCSRVVAADTLLPWSHGHRAYNLLDDGHDTVQANVELGLAVDSREYGIGAQVAKFVGLKGYGLAVVGRVPGSPRLRRASPLRPPPPPSWRRPPPLLLAPASFADK

SEQ ID NO: 154030 - protein, 95 aa, Oryza sativa
  unsure (1)..(95): unsure at all Xaa locations
  Clone ID: PAT_MRT4530_53929C.1.pep
FDPRRVPNPTXPRAPDGVLLVGGGALDXGAPXXRQLHQDPXHLPPASPAEGEEAGRRRLVGEXXAXREPCXGHXAGGRXVEEDXGGGGRLXGRAA

SEQ ID NO: 154031 - protein, 732 aa, Oryza sativa
  Clone ID: PAT_MRT4530_5392C.1.pep
MTSGNGFNNITQGVVRGNVPLPQVVVSPKAQLEQKFHDYFHTSETELRLSNLTSVRHKYNESVADYIKRFRYIKSRCFSLKITDKDLANIAYDGFLDSIKEKLNGQIFLDIDHVLHEALAQESRVDDNSLNASLDYSAISCIAEPSDDSDCVNNLCNDVITIISEPSVGSDCLTSLDDNATTIIVEPSVGLYCVTNLDNNGIAEPSNGSDCIASLENSIIENIAELSDGSDYITSENEIALSPKTESKIGHVDVGKDDDNVLRDSGEIESKVAMHTYQRPYPEYVDSVPYPQGFEVPNFTKFTGEDARTTMEHIDQFIDQCGKAGNDDLLKLKLFPLSLSNFASTWYSLFAPNSISTWSQMEHEFHGYFKDASLMEQRPIDTSSVTCETISVTSMPKTGIISDPLPVSSIGVGKKKGKSVIIGDPRPKNRIKNAKAEDHKVTKDKSSSSQKTKKPKLTFEMLMAKYKKGLAGQRFDNQTSDSKRPRSSRRKRFGQTSKQSEPSTIPTPYKPPVVMPWYPHPMSSFGYPFMYYIPWMPQPHMPCHQGWKQSPRTIPSHSNSRQDRFPQKNRSGGSKVKKVKKVWVRKEAKASEVVTVKEESQYVHVPTGDAVETTQAKKIEAAAVTVNIGGLTKTAGRSNRQSTAAGLTGPRGRLDWGALKVRGKIESNIGASTSTKNMKNHCLAPGKQPQLKWIPSGLSRSQKRRLQRLRAIGQKEKEAEDVENKTCINLEP

SEQ ID NO: 154032 - protein, 225 aa, Oryza sativa
  Clone ID: PAT_MRT4530_53930C.1.pep
MDPTCHGDHVSTLSLFLLSLSFLPLALCCRTGGGACSRRVVRPATAAPRWRRAGSGRRELDGLLVPLVRSVMAVERREARRDAPAAYNGARGVEHVGVRDKPQDLVGHADAIEAARRGEVKAAPVADTLLPWSHGHRAYNLLDDGHDTVQANVELGFAVDSREYGIGAQVAKFVGLKGYGLAVVGRVPASPRLRHASPLRPPPPPSPSRRHPPPLLLAPASFADK

SEQ ID NO: 154033 - protein, 164 aa, Oryza sativa
  Clone ID: PAT_MRT4530_53931C.1.pep
MRPSGAESSAPPLPIRSRARLPPPSLLSRVSTAASPPSTNLTLALAFVGWGAGRSISSPPLLPRRPRRLEILGVEAAEAEIVRDKPQDLVGHADAVEAAHRGEVKAAPIAAALLPCSRVVAADTLLPWSHGHCAYNLLDDGHDTVQANVELGLAVDSREYGIGA

SEQ ID NO: 154034 - protein, 259 aa, Oryza sativa
  unsure (1)..(259): unsure at all Xaa locations
  Clone ID: PAT_MRT4530_53932C.1.pep
PWPPSPIRGDLRPRPEPPTTMRPSGAESSAPPLPIRSRARLPPPSLLSRVSTAASPPSTNLTLALAFVGWGAGRSISSPPLLPRRPRRLEILGVEAAEAEXMSSRSRCRCRRSSLLATRRRRMMRRHGAVESSEQLVDSFTHRSVDLVGHADAVEAAHRGEVKAAPIAAALLPCSRVVAADTLLPWSHGHCAYNLLDDGHDTVQANVELGLAVDSREYGIGAXVAKFVGLKGYGLAVVGRVPGSPRLRRASPLKYFSSG

SEQ ID NO: 154035 - protein, 255 aa, Oryza sativa
  Clone ID: PAT_MRT4530_53933C.1.pep
PWPLSPIRGDLRPRPEPPTAMRPSGAESSAPPLPIRSRARLPPPSLLSHVSAAASPPSTNLTLALAFAGWGAGRSISSPPLLPRRPRRPEILGVEVAAAEMASCSCCRCSRGSLLAARRRRMMRRRGAVESSEQLVDSFTHRSVDLVGHADAVEIAHRGEVKAAPVAAALLPCSRVVAADTLLPWSHGHRAYNLLDDGHDTVQANVELGLAVDSREYGIGAQVAKFVGLKGYGLAVVGRVPGSPRLRRASPQFCH

SEQ ID NO: 154036 - protein, 201 aa, Oryza sativa
  Clone ID: PAT_MRT4530_53934C.1.pep
PWPPSPIRGDLRPRSKPPTTMRPSGAESSAPPLPIRSRTRLPPPSLLPRVSAAASPPSTNLTLALALAFAGWGAGRSISSPPLLPRRPRRPEILSVEAAAAETASRSHCRCRRGSLLAARRRRMMRRRGAVESSEQLVDSFTHRSVDLVGHADAVEAAHRGEVKAAPVAAALLPCSRVVAADTLLPWSHGHRTYNLLDDGH

SEQ ID NO: 154037 - protein, 77 aa, Oryza sativa
  Clone ID: PAT_MRT4530_53935C.1.pep
IVAYSKDGVSRIKTGNVHPGLDIIRSILFMRTAWWHSQPWATMCEAPYACVQHLLTNHRCTVNPPWYISAAHLRLPV

SEQ ID NO: 154038 - protein, 149 aa, Oryza sativa
  Clone ID: PAT_MRT4530_53936C.1.pep
MESSVQSTVVEVVTAVHARLGSLRATRRRSLAPYAGPVLTFQGLVLEGSRRQANCNKEEAAAPQNCVGAGATRDDAGYPGGLVARDFAGRRGRWRQTAALSRSVLVLFSLRTRACDLFASLAFHRFVCAHCWAGPGTGGRCRAGREARD

SEQ ID NO: 154039 - protein, 81 aa, Oryza sativa
  unsure (1)..(81): unsure at all Xaa locations
  Clone ID: PAT_MRT4530_53937C.1.pep
PESPPPPSPPATRRCRMAPVPPLGSPHCPARRPPLHSPNLPPXPAATTPPEPPPXQPPPAASRRRPYPPRAALSPSSAPQP

SEQ ID NO: 154040 - protein, 89 aa, Oryza sativa
  unsure (1)..(89): unsure at all Xaa locations
  Clone ID: PAT_MRT4530_53938C.1.pep
VPGRCKPVSTHCGHYLHSVQLRPHVEDKHFFRLAXANGKYSYKEALMGFFIGSTSYXPFHIISKTWAPSKSKTFMWLVAHNKVWTTHMV

SEQ ID NO: 154041 - protein, 855 aa, Oryza sativa
  Clone ID: PAT_MRT4530_53939C.1.pep
MAAAAVGGRGERLSSSSPTAAAPQVDAGKYVRYTPEQVEALERVYTECPKPSSLRRQQLIRECPILSNIEPKQIKVWFQNRRCREKQRKEASRLQTVNRKLNAMNKLLMEENDRLQKQVSRLVYENGYMRTQLHNPSAATTDTSCESVVTSGQHHQQQNPAVLHPQRDANNPAGLLAIAEETLAEFMSKATGTAVEWVQMVGMKPGPDSIGIIAVSHNCSGVAARACGLVSLEPTKVAEILKDRPSWYRDCRCVDIIHVIPTGNGGTIELIYMQTYAPTTLAAPRDFWTLRYTSGLEDGSLVICERSLTQSTGGPSGPNTPNFIRAEVLPSGYLIRPCEGGGSMIYIVDHVDLDAWSVPEVLRPLYESPKILAQKMTIAALRHIRQIAHESSGEIPYGAGRQPAVFRTFSQRLSRGFNDAVSGFPDDGWSLLSSDGSEDITISVNSSPNKLVGSHVSPNPLFSTVGGGILCAKASMLLQNVPPALLVRFLREHRSEWADPGVDAYSAASLRASPYAVPGLRTSGFMGSQVILPLAHTLEHEEFLEVIRLEGHGFSHDEVLLSRDMYLLQLCSGVDENATSASAQLVFAPIDESFADDAPLLPSGFRVIPLDTKMDGPSATRTLDLASALEVGPGGASRASVEASGTCNRSVLTIAFQFSYENHLRESVAAMARSYVRAVMASVQRVAVAIAPSRLGPQIGMKHPPASPEALTLASWIGRSYRAHTGADIRWSDTEDADSPLALLWKHSDAILCCSLKPAPMFTFANNAGLDILETTLVNLQDISLEMILDDEGRKALCSEFPKIMQQGFTYLPGGVCKSSMGRQASYEQAVAWKVLSDDDAPHCLAFMLVNWTFM

SEQ ID NO: 154042 - protein, 103 aa, Oryza sativa
  unsure (1)..(103): unsure at all Xaa locations
  Clone ID: PAT_MRT4530_5393C.1.pep
MSTNFIIHSNYIDYDASLSGKCNGVGIMIVHTIVLCHDDDIRVVFRNLSVVFRLLDIVIWGYILRIRXGGPLMVTAQYGYSSARVYSPKLLSWGGYSSVFSPG

SEQ ID NO: 154043 - protein, 144 aa, Oryza sativa
  unsure (1)..(144): unsure at all Xaa locations
  Clone ID: PAT_MRT4530_53940C.1.pep
NTGTGGWGFVAMDSKGXSAGSLSWMGNALHVEALAMMKSLEKVSQQGMTKIEVKTDAQMLGKALISQDLNRRPDGVIFRKLRAFLRSNFDVFSISVFPRSCNKVADCLASFGVGIVATSSKCFWSQAPTFVSPLVSGDLPGDTG

SEQ ID NO: 154044 - protein, 197 aa, Oryza sativa
  unsure (1)..(197): unsure at all Xaa locations
  Clone ID: PAT_MRT4530_53941C.1.pep
DSARGCHWGGTXXRPLRPLEALAPXVPLXEXXXXILXGXCSLPFXFKXXLYXCQRPSXARCHXWXGXXXXRVAXLWXGRPXCXXXXXXPXXHXXGLXXRXXPDXSXDPXQXYXPXEIQTKLSXTXXXTXSYXXXNVSCPTCENRSRGTFGXVXPDXXMNLTLXRSLHXXGXFXSQASXTXQVLNTKQLVGGXXFTXP

SEQ ID NO: 154045 - protein, 476 aa, Oryza sativa
  Clone ID: PAT_MRT4530_53942C.1.pep
SEINLYLTLCNVMLAAYVSRSEVAEARKVFDGMPMRDLVSWNTMIHGYAMRGEVGLAREIFDGTEDRDAFSWSSMISAYAKSRRSKEALELWREMHAASIIPDCITLVSVVSACSDLGALAVGAEVHRFVESNRIELDLKLGTALIDMYAKCGDIESAQRVFDRMPEKDVQTWSSMIIGLANHGLGHESLSLFSKMISEGMKPNGVTFVGVLIACTHVGLVSEGKKYFRSMNEVHGIEPTVEHYGCMVDLLGRSGHVEEARQLIRSMTFEPDTIIWRALLGACRIHKNVEIAEEAMAKLRVLDPLGDGHYVLLSNIYAQANSWEGVAEMRKTIRRDNIQRIPGRSSIEWDEKIHEFVSGDRLHPRSKEIYRVLEEMMDRLKQAGYKPMTGLVLQDIDEQSKERSLAEHSEKLAIAFALLTTPARSTIRITKNLRACEDCHSAMKLISLVYDRKLIVRDRNRFHHFSEGQCSCKDYW

SEQ ID NO: 154046 - protein, 303 aa, Oryza sativa
  Clone ID: PAT_MRT4530_53943C.1.pep
MESPPESSSSSPVLLNIGGKRYATTVETLTQREPSSMLAAMFSGRHTLPRHPDTGMVFVDRDGKHFRHVLNWLRDGAVPDMSESEYQQLLREAEYYQLLGLADCINDRLGWKNDENFSEAELTRKDVIKCIQAPRVRFRGVNLSGLDLSKLDLSEVDFSYACIKNANFSSAYLRKAKFRLTEATCSSFQSANLHECELIGANLEGSVLDKANLQSANLQDACLKQCCFIETDLRSAHLQGANLMGANLSGANLEGANLKGAKLAGTNLECANLQRAYLREVDLRETHLTGAKLGGANLLGAIR

SEQ ID NO: 154047 - protein, 100 aa, Oryza sativa
  Clone ID: PAT_MRT4530_53944C.1.pep
MTSSTRRRIDVRHPSPRHSLGTTIASYMYAFSIMEQFVTSAFFSASEDFSLLSGKVSDTTFFPGDGRGGCAGPVLVEAMCWLFREGSSSAMAIVSDVVLH

SEQ ID NO: 154048 - protein, 61 aa, Oryza sativa
  Clone ID: PAT_MRT4530_53945C.1.pep
LPIKVYQLNQQNTIQKRLYFTCHTCHIQNYVYQSKMTQGKYPCINHPVINTERYEDGKTVS

SEQ ID NO: 154049 - protein, 1204 aa, Oryza sativa
  Clone ID: PAT_MRT4530_53946C.1.pep
MDLSRSLFRRIASRDDKSLSCIDKQKGKKEDIDELEDIAEVDKQLERYQRDTLKAIRPQQIYCMGFFENKNGLYRISREVELSVLTKPVELKIVAKEFENGLKYSGYKYIHQGMYIIGIKGMTRKKIGAKVLITLLDKRWDTIDKAALGFLEGDMNENMLITYIAPDLMMPIKEFIDKMSFGFQTKGYEEFKGTNLLVSIEFIGRLTNRSASKYKINVNDVIENMHSKGITFMSPLKISSEERAGEEWKISDLIESKTLSQPENYISYQNSKGNTSIRFINYKPRTTDDLETEASDRNIIDNRRHSVSEFMEKLDQESEIKYYENKLKEINEEYNNSMKCEWPKIRDKELYFYRELARVKKVKKNEDMAVEIFKNQETKIEQIKKKEQDEHDKEEQNLGKILSEEEQWAENEKLFLESYEEEINLINEMENIENEIDNAEQYNDFINTLDEVGLHNLENAMEAMEVDLGTGKRKRYGEGTVKNEGERERPARAAGKWPPDREEFSYNYIPGQYRHMGTKRRDFEKPVKFQNQRSDGAILNLAAHDPIDWPNIISIWKCLIVQKYIQNQHNIGSKVEDMITYLETFLGESAKVLWEQWVEKNPNNYEELKRAGSNPHNFANVISNIIIAEDPELGYTTLQNERLKEIEKLTLTSWKGIKEFSQHYLYNATTAKQGYNRGIVERYFNKLPDPLGSMIFEEYKKETEGAEINISQAITFVFKQLRKICTGIQAQRSMKHSDYNFCNKIVQIPLSYGEDKPRSKRIYKHQNRNHNNIRTKKRFLQQSVQTTVIHEQGITFIPYQNNVPYISEVRKRGGVSPKLDNLEVPNLEPEERINEYELSENIDNYYISNSNIECIGLQAFAPNWYRDIKSKRDIEKIIQRLEDIQIIGEIPMKYWEKNAIECKINIINPEYIIKTSPIEATPKDIEEFKMHIEELLKLGAIRESRSPHRKVEQNGLILSKKKMEICKEKINFLGHEIGEGKIHLQEHIAKKILEFPDAMNDKKKLQQFLGLVNYARNHINNLAKLAGPLYAKLRKNGQRYFNSEDIKLVRLIKERVKELKPLELPLEESYFIIETDASQLGWGAVLKQRPTKYSSKSEEKVCRYASGSYKLKTVGNTYREILAIINAINAFRLYLGFKEFTVRTDCEAICRYYNQLNSKKSSTRRWILFEDIITGNGYKVIFEHIKGKDNHLPDLLSRLPILQE

SEQ ID NO: 154050 - protein, 1378 aa, Oryza sativa
  Clone ID: PAT_MRT4530_53947C.1.pep
MDLSRSLFRRIASRDDKSLSGIVKQKGKNEDIDELEDIAEVDKQLERYQRDTLRAIRPQQIYCMGFFENKNGLYRISREVELSVLTKPVELKIVAKEFENGLKYSGYKYIHQGMYIIGIKGMTRKKLGAKVLITLLDKRWDTIDKAALGFLEGDMNENMLITYIAPDLMMPIKEFIDKMSFGFQTKGYEEFKGTNLLVSIEFIGRLTNRSASKYKINVNDVIENMHSKGITFMSPLKISSEERAGEEWKISDLIESKTLSQPENYISYQNSKGNTSIRFINYKPRTTDDLETEASDRNIIDNRRHSVSEFMEKLDQESEIKYYENKLKEINEEYNKSMKCEWPKIRDKELYFYRELARVKKVKKKEDMAVEIFKNHETMIEQIKRIEQDKHGKEEQNLGKILSEEEQWAENERLFLESYEEEINLINEMENIENEIDNAEQYNDFINTLDEVGLHNLNNAMEAMEVDLGTGKRKRYGEGTVKNEGERERPARAAGKWPPDREEFSYNYIPGQYRHMGTKRRDFEKPVKFQNQRSDGAILNLAAHDPIDWPNIISIWKGLIVQKYIQNQHNIGSKVEDMITYIETFLGESAKVLWEQWVEKNPNNYEELKRAGSNSHNFANVISNIIIAEDPELGYTTLQNERLKEIEKLTLTSWKGIKEFSQHYLYNATTAKQGYNRGIVERYFNKLPDPLGSMIFEEYKKETEGAEINISQAITFVFKQLRKICTGIQAQRSMKHSDYNFCNKIVQIPLSYGEDKPRSKIIYKHQNRNNNNIRTKKRFLQQSVQTTVIHEQGITFIPYQNNVPYISEVRKRGGTSPKLDNLEVPNLESKERINEYELSENIDNYYISNSNIECIGLQAFAPNWYRDFKSKRDIEKIIQRLEDIQIIGEIPMIYWEKNAIECKINIINPEYIIKTSPIEATPKDIEQFKMHIEELLKLGAIRESRSPHRSAAFIVRNHAEEVRGKSRMVKNYKRLNDNTIEDAYNIPNKQEWINRIQGSKYFSKFDLKTGFWQVKMAEESIEWTAFTCPQGHYEWLVMPLGLKNAPAIFQRKMQNIFNENQEFILVYINDLLVFSRTYKEHIAHLEIFFRKVEQNGLILSKKKMEICKEKINFLGHEIREGKIHLQEHIAKKILQFPDAINDKKQLQQFLGLVNYARNHINNLAKLAGPLYAKLRKNGQRYFNSEDIKLVILIKERVKELKPLELPLEESYFIIETDASQHGWGAILKQRPTKFSAKSEEKICRYASGSYKLKTVNNTDREIMAIINAINAFRLYLGFKEFTVRTDCEAICRYYNQLNSKKSSTRRWVLFEDIITGNGYKVIFEHIKGKDNNLPDMLSRLPELQTYVDFCFLLWLLVSTVLLYASKILLCLSELLLLG

SEQ ID NO: 154051 - protein, 1046 aa, Oryza sativa
  Clone ID: PAT_MRT4530_53948C.1.pep
MSFGFQTKGYEEFKGTNLLEINEEYNNSMKCEWPKIRDKELYFYRELARVKKVKKNEDMAVEIFKNQETKIEQIKRKEQDKHGKEEQNLCKILSEEEQWAKNERLFLESYEEEINLINEMENIENEIDNAEQYNDFINTLDEVGLHNLDNAMEAMEVDLGTGKRKRYGEGTVKNEGERERPARAAGKWPPYREEFSYNYIPGQYRHMGTKRRDFEKPVKFQNQRSDGAILNLAAHDPIDWPNIISIWKGLIVQKYIQNQHNIGSKVEDMITYLETFLITYLETFLGESAKVLWEQWVEKNPNNYEELKRAGSNPHNFANVISNIIIAEDPELGYTTLQNERLKEIEKLTLTSWKGIKEFSQHYLYNATTAKQGYNRGIVERYFNKLPNPLGSMIFEEYKKETEGAEINISQAITFVFKQLRKICTGIQAQRSMKHSDYNFCNKIVQIPLSYGEDKPRSKKIYKHQNRNNNNIRTKKRFLQQSVQTTVIHEQGITFIPYQNNVPYISEVRKRGGISPTPKLDNLEVPNLEPEERINEYELSENIDNYYISNSNIECIGLQAFAPNWYRDIKSKRDIEKIIQRLEDIQIIGEIPMKYWEKNAIECKINIINPEYIIKTSPIEATPKDIEEFKMHIEELLKLGAIRESRSPHRSAAFIVRNHAEEVRGKSRMVINYKRLNDNTIEDAYNIPNKQEWINRIQGSKYFSKFNLKAGFWQVKMAEESIEWTAFTCPQGHYEWLVMPLGLKNAPAIFQRKMQNIFNENQEFILVYIDDLLVFSRTYKEHIAHLEIFFRKVEQNGLILSKKKMEICKEKINFLGHEIGEGKIHLQEHIAKKILEFPDAMNDKKKLQQFLGLVNYARNHINNLAKLAGPLYAKLRKNGQRYFNSEDIKLVRLIKERVKELKPLELPLEESYFIIETDASQLGWGAVLKQRPTKYSSKSEEKVCRYASGSYKLKTVGNTDREILAIINAINAFRLYLGFKEFTVRTDCEAICRYYNQLNSKKSSTRRWILFEDIITGNGYKVIFEHIKGKDNHLPDLLSRLPILQE

SEQ ID NO: 154052 - protein, 1355 aa, Oryza sativa
  Clone ID: PAT_MRT4530_53949C.1.pep
MDLSRSLFRRIASRDDKSLSCIDKQKGKNEDIDELEDIAEVDKQLERYQRDTLRAIRPQQIYCMGFFENKNGLYRISREVELSVLTKPVELKIVAKEFENGLKYSGYKYIHQGMYIIGIKAPDLMMPIKEFIDKMSFGFQTKGYEEFKGTNLLEINEEYNNSMKCEWPKIRDKELYFYRELARVKKVKKNEDMAVEIFKNQETKIEQIKRKEQDKHGKEEQNLGKILSEEEQWAENERLFLESYEEEINLINEMENIKNEIDNAEQYNDFINTLDEVGLHNLDNAMEAMEVDLGTGKRKRYGEGTVKNEGERERPARAAGKWPPDREEFSYNYIPGQYRHMGTKRRDFEKPVKFQNQRSDGAILNLAAHDPIDWPNIISIWKGLIVQKYIQNQHNIGSKVEDMITYLETFLGESAKVLWEQWVEKNPNNYEELKRAGSNPHNFANVISNIIIAEDPELGYTTLQNERLKEIEKLTLTSWKGIKEFSQHYLYNATTAKQGYNRGIVERYFNKLPDPLGSMIFEEYKKETEGVEINISQAITFVFKQLRKICTGIQAQRSMKHSDYNFCNKIVQIPLSYGEDKPRIRLSFKEILGIRIPVKVKLTPKVSYKILALVDTGCTKNIIHDKYFTRCPEIVHTIDDNKAEVSTDMSGIKKIHNQLAYNMEVYINATKYIIDEITIRDLSMINDDMIIGLRFLQQSVQTTVIHEQGITFIPYQNNVPYISEVRKRGGVSPKLDNLEVPNLEPEERINEYELSENIDNYYISNSNIECIGLQAFAPNWYRDIKSKRDIEKIIQRLEDIQIIGEIPMKYWEKNAIECKINIINPEYIIKTSPIEATPKDIEEFKMHIEELLKLGAIRESRSPHRSAAFIVRNHAEEVRGLKNAPAIFQRKMQNIFNENQEFILVYIDDLLVFSRTYKEHIAHLEIFFRKVEQNGLILSKKKMEICKEKINFLGHEIGEGKIHLQEHIAKKILEFPDAMNDKKKLQQFLGLVNYARNHINNLAKLAGPLYAKLRKNGQRYFNSEDIKLVRLIKERVKELKPLELPLEESYFIIETDASQLGWGAVLKQRPTKYSSKSEEKVRMKKSMNYNGVEFFTFGEDNKLKVFPPNTYKFKPKTHIILDEVQECILDNFWYQYNNKREEKGYMLSILNSLAEYFHLMNDIMPTSENNEVIPQKPIYVVFDGKLPGVYISFEEIVAQKIDAKLMGGLSWKKYIDFDEALTQARKILGINYYLEPAAKEYIQKCKKAKNKKAPENPYCSNIKNEGSSQKPTYKECLTKGVDPLDGEYIDWKIIEKFEEASPQIKKELKEEILKELKKEMNDKFEEMKKAYDEKFEVSFSDVDTMDLGGHGQPDQ

SEQ ID NO: 154053 - protein, 35 aa, Oryza sativa
  Clone ID: PAT_MRT4530_5394C.1.pep
MRRAFPDLSGTPDILDDFVDLDEISGSLVPFSWPT

SEQ ID NO: 154054 - protein, 59 aa, Oryza sativa
  Clone ID: PAT_MRT4530_53950C.1.pep
MGSGHFSMFSHDQGGRTPTMVVPLASQMDLCFFLPQILVFCYVHLPCDAGCFFCCVVHK

SEQ ID NO: 154055 - protein, 1726 aa, Oryza sativa
  Clone ID: PAT_MRT4530_53951C.1.pep
MDLSRSLFRRIASRDDKSLSCIDKQKGKNEDIDELEDIAEVDKQLERYQRDTLRAIRPQQIYCMGFFENKNGLYRISREVELSVLTKPVELKIVAKEFENGLKYSGYKYIHQGMYIIGIKGMTRKKLGAKVLITLLDKRWDTIDKAALGFLEGDMNENMLITYIAPDLMMPVKEFIDKMSFGFQTKGYEEFKGTNLLVSIEFIGRLTNRSASKYKINVNDVIENMHSKGITFMSPLKISSEERAGEEWKISDLIESKTLSQPENFISYQNSKGNTSIRFINYKPRTTDDLETEASDRNIIDNRRHSVSEFMEKLDQESEIKYYENKLKEINEEYNNSMKCEWPKIRDKELYFYRELARVKKVKKNEDMAVEIFKTQETKIEQIKRKEQDKYDKEEQNLGKILSEEEQWAENERLFLESYEEEINLINEMENIENEIDNTEQYNDFINTLDEVGLHNLDNAMEAMEVDLGTGKRKRYGEGTVKNEGERERPARAAGKWPPDREEFSYNYIPGQYRHMGTKRRDFEKPVKFQNQRSDGAILNLAAHDPIDWPNIISIWKGLIVQKYIQNQHNIGSKVEDMITYLETFLGESAKILWEQWVEKNPNNYEELKRAGSNPHNFANVISNIIIAEDPELGYTTLQNERLKEIEKLTLTSWKGIKEFSQHYLYNATTAKQGYNRGIVERYFNKLPDPLGSMIFEEYKKETEGAEINISQAITFVFKQLRKICTGIQAQRSMKHSDYNFCNKIVQIPLSYGEDKPRSKRIYKHQNRNHNNIRTKKRYFLRRSDNRAPFLHKRNVRRYNPKKTYDKTCRCFICNSPDHLSRTCPNKDQKRYSSKYEEQERVLIIDSVNENILVCDDEIKDDESIYSIIETDEVETINEEYESSDEELDLIDELAGLKVEMMDQLNCEHDWIRGKGDYNIKCAFCIYYPSQENRVTCSICLKQACAECIKANKQKWRKEIELESDEKTLSSRVRVLENRLNKLEVELENLKNNCDIKALPENKDIQNTEFKEQLITLKDSNTAKIIQLREAITNFGNKYIVRLPFKEILGIRIPVKVKLTPKVSYKILALVDTGCTKNIIHDKYFTRCPEIVHTIDDNKAEVSTDMSGIKKIHNQLAYNMEVYINATKYIIDEITIRDLSMINDDMIIGLRFLQQSVQTTVIHEQGITFIPYQNNVPYISEVYINATKYIIDEITIRDLSMINDDMIIGLRFLQQSVQTTVIHEQGITFIPYQNNVPYISEVRKRGGTSPSPKPDKLDNLEVPNLESEERINEYELSENIDNYSFSSYLPKSIELPGKTSWEDRYLLKATKDFEYICREMASQKSEWLTNMSSWRLPQLPRGHGERFNHNFRITELQHGLLNLLWQTKNKKEKAHALNSLAYYFKNFVPSDQKITEKRAKMQDIPHHEERLLDYREEKSRDGQDKLLMEVEQSMATDKNTKVFSDKILISADPASSMVAFHININNLLQSFPHNKPSSSTKRHDIIPQTPYILHNHPNLFLPQYILRTQPKAPCRSCAYKDSCKKKLKSQNPMSTTYENLQPRLSFKTEQTLSCFGQDILDLVWQKFKERQMKIFLGLQDYFFDLLEGRERNPAIRVIIYMLPLLRLDNQAISDPSYRFLVLKAEINLQRFRNLPTYNHEEISLQTIIDHGLVNSIYATLDQILQSDLGNAVKDVCRRLGHGRYRIIFSSIPPKFTPPGKSIDFGRYDGKESSCKYIVFTTCSLLV

SEQ ID NO: 154056 - protein, 48 aa, Oryza sativa
  Clone ID: PAT_MRT4530_53952C.1.pep
PKPSSLTASRMVSDLWSLVTPTSDGQVTRRPSEVLVSASLGRVGTRHR

SEQ ID NO: 154057 - protein, 192 aa, Oryza sativa
  unsure (1)..(192): unsure at all Xaa locations
  Clone ID: PAT_MRT4530_53953C.1.pep
SRVSTSWGFVYSRKSNQLHFRIEYHPQSNGKTKKVNLCLELYLRCFVHAMPTKWNSWLXIIXFNISYHSVLLKSPFEDLYGYPSSQFGIGDDACSVPNLDNWLKERKLLTQLLKQHLNRAKQXMKTYAGKKRSSREFVVGDLSLXVAKRANHKLSFRYFGPFRVIAKMGKVAYRLHIPEDSTIHPVFHVSQL

SEQ ID NO: 154058 - protein, 121 aa, Oryza sativa
  Clone ID: PAT_MRT4530_53954C.1.pep
ALNDTVGNGNITIFEPRNEDMERDLDLEFRRHHPAPPLLPSTRGDTLVGIHQPIENDTSGGGGEAPTAKVPHSDLGYEVAISLDTPLTFLPDESSSEEETVATWRLLTVVIDQFQPSILPK

SEQ ID NO: 154059 - protein, 474 aa, Oryza sativa
  Clone ID: PAT_MRT4530_53955C.1.pep
MAVVRGHCALVNCILLVLLQESKQVKMKKLEKMLLLLSLLAVIAVVARCDAAALRLHATHADAGRGLSTRELLRRMAARSKARSARLLSGRAASARMDPGSYTDGVPDTEYLVHMAIGTPPQPVQLILDTGSDLTWTQCAPCVSCFRQSLPRFNPSRSMTFSVLPCDLRICRDLTWSSCGEQSWGNGICVYAYAYADHSITTGHLDSDTFSFASADHAIGGASVPDLTFGCGLFNNGIFVSNETGIAGFSRGALSMPAQLKVDNFSYCFTAITGSEPSPVFLGVPPNLYSDAAGGGHGVVQSTALIRYHSSQLKAYYISLKGVTVGTTRLPIPESVFALKEDGTGGTIVDSGTGMTMLPEAVYNLVCDAFVAQTKLTVHNSTSSLSQLCFSVPPGAKPDVPALVLHFEGATLDLPRENYMFEIEEAGGIRLTCLAINAGEDLSVIGNFQQQNMHVLYDLANDMLSFVPARCNKI

SEQ ID NO: 154060 - protein, 99 aa, Oryza sativa
  Clone ID: PAT_MRT4530_53956C.1.pep
MNIRRRQKPTTTNTGELIPSPMPFFARTAEPCRLDRSPALEIGGGGGGGHLDRHRGLMDSSNTARQSTPIQSGGIRGFEAAASIYNTGGGREEWVRYHH

SEQ ID NO: 154061 - protein, 149 aa, Oryza sativa
  unsure (1)..(149): unsure at all Xaa locations
  Clone ID: PAT_MRT4530_53957C.1.pep
PPHRTTEEDDVCRLACAGLRHPRAPXPADMRYSAPPPATRPDASCRHALQRPAAGHAPRRRATTRFDRIQPGARQIHSPSSAFTASPAPKRMRRRRRRRRRRPPRSPAGFPAVSSGGSEVRGGRXGGGGSGRFTPRVACARATQGQFIS

SEQ ID NO: 154062 - protein, 86 aa, Oryza sativa
  Clone ID: PAT_MRT4530_53958C.1.pep
FSTTLISYYETMISMLACKLNKAKYVCSYFQMQCMLLLINQNVTKHSYLSKIYQNLACFTTSTNPKVLLEYNMHGPIIPISSVILQ

SEQ ID NO: 154063 - protein, 184 aa, Oryza sativa
  Clone ID: PAT_MRT4530_53959C.1.pep
TRRTSAGRAEALRPGALPPPAPLPPARAPSPAAVPARGPWHSFARRIHHRRPRSKRKRGSGARYLQRSPPFTIYCQQGPPATISAVRSTCAAQIEPKREAQCGCFPMGPSSIRYYQAYPHPAGGGGGGGGAKCCRAGEYCGDRRRFAGITPLMHGSSPTILCICCNTKRGNFRELFCVLISLFI

SEQ ID NO: 154064 - protein, 56 aa, Oryza sativa
  Clone ID: PAT_MRT4530_5395C.1.pep
RSRGRGVFQVLELRFWDTGFAEAAFAKPVSSSLVRSLVQTLWLVPQLQGLWCARCV

SEQ ID NO: 154065 - protein, 401 aa, Oryza sativa
  unsure (1)..(401): unsure at all Xaa locations
  Clone ID: PAT_MRT4530_53960C.1.pep
MGILERIKEIEAEMARTQKNKATEYHLGQLKAKIAKLRTQLLEPPKGSTGGGDGFEVTKFGHGRVALIGFPSVGKSTLLTMLTGTHSEAASYEFTTLTCIPGIIQYNDTKIQLLDLPGIIEGASEGKGRGRQVIAVAKSSDLVLMVLDASKSEGHRQILTRELEAVGLRLNKRPPQIYFKKKKTGGISFNSMIPLTHVDEKLCYQILHEYKIHNAEVLFREDATVDDFIDVIEGNRKYIKCVYVYNKIDVVGIDDVDKLARQPNSLVISCNLQLNLDRLLARMWEEMGLVRVYTKPQGQQPDFTDPVVLSTDRGGCTVEDFCNHIHRSLVKDVKYVLVWGTSARHYPQHCGLGHVLQDEDVVQIVKKKEKEDGGRGRFKSHTNAXPARISDRXEKKAPLKT

SEQ ID NO: 154066 - protein, 276 aa, Oryza sativa
  Clone ID: PAT_MRT4530_53961C.1.pep
MTKDGSLEQAKTSYQQYEELTKQFNIDEEWWKGYNDPQLNRLVSQALANNVNLAKSAILVNKALYNANLVGASLVPTFSGSGSSSASKLLSVTKASNVVHNASFNLSYTLDLWRRLADSASASEWEYKATIEDLKATRLSIINAVVASYYQIAYLKDVINVSEQTIKNYEQINHILENKMEVGAIDHLAVEQAKQGPLNARNGLIGYRTTLKVGDQTLRNLLNLKPNEPLPIEYPAILSVELQGVDMNVLISAIANRPDVPAKLKRLQSAFKSLSA

SEQ ID NO: 154067 - protein, 69 aa, Oryza sativa
  Clone ID: PAT_MRT4530_53962C.1.pep
PCKCTNTHATQLTDPRSMPGLQFLGTGEATSRYPHITSYMQALTCRSWIFFINPTHARTNHNSHNKQQD

SEQ ID NO: 154068 - protein, 500 aa, Oryza sativa
  Clone ID: PAT_MRT4530_53963C.1.pep
MGALADGDDAMGRLRRWETTGRQRRRRRNGEAEALGDDEATAAAMRRRWVLASLAEGTGSAGRPRPREENHLAIPPLILARAAAAAAASCKPPCPTDSLSPRELTLRRASRHWRTYSCCRTRHAVLRVLLWSPVASWPEAAAAAMRAAWPQGGRRADARNLFDGMSPRKKAKESPGSTGGDRIGDLPDEVLHHVLSFLPAQEAVRTCLLARRWRHLWKSATGVRIGEGETDPGSVKDHQEFLDHLLVLRDSVPMETCVLRFSEHSKELIEDAARLNFWFKHALLRKVRFLQLENWEFYDPVPIDELPLVSRHLTRLQLYGISLNDSFLNFSSCPALEHLLFEFCFFECAKISSNSVKRLSITCCSFNATLRVRVDVPSLVSLRLDEFDNRAPVLERMPSLVDAFLHIAVYVDVAILNSSLLLALIAPMSFAMWTIFNFEEIGIFDDDEDEDEDRDGDDDEDSYEDDDDKDEDEDSYEDDDDEDEDEDSYEEGNEDDNEDA

SEQ ID NO: 154069 - protein, 77 aa, Oryza sativa
  Clone ID: PAT_MRT4530_53964C.1.pep
NFWQVRSVCYDLASAAPPPPLSPKRLKICKVATASTSSSVCNEDEQVQTMRERVEALLPDNIKAIIDQKGNPKGKDT

SEQ ID NO: 154070 - protein, 81 aa, Oryza sativa
  Clone ID: PAT_MRT4530_53965C.1.pep
DILKFTVLVVFVISAVFNFEEIGIFDDDKDEDEDRDGDDDEDSYEDDDDKDEDEDSYEDDDDEDEDEDSYEEGNEDDNEDA

SEQ ID NO: 154071 - protein, 92 aa, Oryza sativa
  Clone ID: PAT_MRT4530_53966C.1.pep
PRRSLVPASYRRALVSARAVLAPRRPRGGRRADARNLFDGMSPRKKAKESPGSTGGDRIGDLPDEVLHHVLSFLPAQEAVRTCLLARRWRHL

SEQ ID NO: 154072 - protein, 185 aa, Oryza sativa
  Clone ID: PAT_MRT4530_53967C.1.pep
DAIPFASTKRLYSATLWLLPDNDQAIVRIAPGESPSHVRLFPSPEFLTIFYHRNHIFLTPPSPSWPVRRARLFNRRCLARGRRSFDLHPIGSESSPAHPVVVFLSVHPAAAASFDLPFLYSGASSIRAIVCCHWMATLSMNWSRGGRREIEQGEANHSTARYTNGCCRVALGFCELVRRLSSMTS

SEQ ID NO: 154073 - protein, 133 aa, Oryza sativa
  unsure (1)..(133): unsure at all Xaa locations
  Clone ID: PAT_MRT4530_53968C.1.pep
QKFEVIIVALPPSVSAADPASXVVVATDPATPVVATADPAFLVPHRLDPAGPELAAAYGGGGDGNWRQWRREREESPPPDPSLTSSSSLRHAAEPAGTSTRTISLSRRREPPSQPLDLLLPPPHHRPLHEPTP

SEQ ID NO: 154074 - protein, 96 aa, Oryza sativa
  Clone ID: PAT_MRT4530_53969C.1.pep
SNRRAHSVPVRELTLIFRRKLKQQDPLLFVYSAAPNGMLVLSLVFFSLSVNLHVQLSRNRGGDIQLVSQELSHLRPCLLARGSECYGFNDLLRSQM

SEQ ID NO: 154075 - protein, 98 aa, Oryza sativa
  Clone ID: PAT_MRT4530_5396C.1.pep
GLNKAKGQITFFLPHSRFVWRFLVICTFNRANCARILLGITFFSYIRCTPSAKALFLGLVKENKKILKASSLLSLTCSSSWCSPGHSLKIWIAQGPTD

SEQ ID NO: 154076 - protein, 447 aa, Oryza sativa
  unsure (1)..(447): unsure at all Xaa locations
  Clone ID: PAT_MRT4530_53970C.1.pep
MSDETASQTTKGGDLLWFSEKKEALYPVFQLRDVIHANARDEGDYAIGSGEGSEFAVDAYAIAAAGGDVCVLDLLHLLARQGGTLTSTESIGLAVTGSSELATSNGIVGEFGALALASAVAPSLPLPSPPRYTGSKKIVDSKATQEDLQPQMQTIFSSTGEHSVSKLKSCRDSVAGTTTEEDEGALEARHAACELTARVLEYAGTLVKPLATTDEIDRAVHQMIIDAGAYPSPLGYGGFPKSVCTSVNECICHGIPDSRVLQNGDIINIDVTVYLNGYHGDTSRTYLCGEVDESTMQLVKKLIYCSVTNMLRGISACKHGASFKTIGQRISDSPASTNNFMISDFSEYVDEYGYSIDPFVGHGIGKIFHSEPIIWHTCQTFTXLVEPTLSMGGTQCTLWDDGWTAVTVDSSLTAQFEHTILVTGDGAEILTMHPRRRKPQMAGREHL

SEQ ID NO: 154077 - protein, 74 aa, Oryza sativa
  Clone ID: PAT_MRT4530_53971C.1.pep
GATTMVMGLQQTGMGKDLPGFYSGGGTFSPKGLNNLLKKSWVGKETHGPTLFWSLAPPPREKGPRNYFSGPWKI

SEQ ID NO: 154078 - protein, 52 aa, Oryza sativa
  Clone ID: PAT_MRT4530_53972C.1.pep
FVKSLTSRHPFFLPVLYSYPEVFSNYMVFLCKVKHIYALTICWHICNNFIFR

SEQ ID NO: 154079 - protein, 148 aa, Oryza sativa
  unsure (1)..(148): unsure at all Xaa locations
  Clone ID: PAT_MRT4530_53973C.1.pep
NFPFGLLPXRKLKXLXMSPFFGGFPGRKFIHXGGWGKISXFELSXIGISXXKGYSLGARAPPRXWLYXFXXLVALAXAPXLGWIRWHXXPPXWLAACYIGFFHPXPFFXALMGXNXVFGGGVXPFPXSXXDXXNXXFXLFXXXXXGXS

SEQ ID NO: 154080 - protein, 673 aa, Oryza sativa
  Clone ID: PAT_MRT4530_53974C.1.pep
MQGDQKKVGTHVSARKPVPDDVGRDRRGDVRRPSRPISVARNEIKAGGRLAIPPMHDIPACRKNDQVNLARPFLIRWSTDRFREEDGVGCVAQEREAATAQPRSPPPVTPSPQASQASQASPLLSEPLDWGTDAEEDEDDVIALELHQHSAETFNPQTAKARKAASPSPASKAFHQEINARSQEEELDITAERGEGRSAITPPPEKAQEEDAEKKAKGKATLKSIIVAPARATSKSQIEAEEQDLSSKWQAATATFIQQYGSIFGGTISIFQAAIPIIYGALKVLSTFFPPGARRVTSGITPPLPDEIAPPPRGRLPHVIVHLDEMEDWTPGPPCSPSSGVSGLPSSDLSDLGGPIPTVRTFQWYLGCADGTQPPRRRAAARRGCRAPPQRREDPEDDEDDDGRRRHAEDIPPRRRSLRDVIIGRGQSVESRAAEGARHRSRTPHPSGRQRAHDEQGDHDPMLPLLAEIVPKSSREAENKTKRTGGEEPILGEDKVESAAELGQEKMGHLGPDAQQAPKMDLLAQSTQDDEAQASTGDQPTLVQQADCEEQHQATLQPPIILQALLELAPPDAAKTKGCGRKVVQMPSRRSGRKARFSSVPVSKCAEVRLMEEMGLLTPGEPVGDAAVEAYAKSFDTPLPSHVIAGLRVLTRLDGVHDIPVPGEEGTTTTAVV

SEQ ID NO: 154081 - protein, 43 aa, Oryza sativa
  Clone ID: PAT_MRT4530_53975C.1.pep
MGKNEEIRMGGGIEAPVLALRFLRAVAVACMQVLLTPKSFTPV

SEQ ID NO: 154082 - protein, 741 aa, Oryza sativa
  Clone ID: PAT_MRT4530_53976C.1.pep
MRPGRRWGYRRVAVALAVCVHAAVLLSAVVYLSSVLSAAGPGASSSSLQETEMMRLTAKLEQIIGRPPHNRAHLPSHAFAPSKSGLATAIQALDWGTDAEEDEDDVIAPELHQRSAETFNPQTAKARKAASPSPASKAFHQEINARSQEEELDITAERGEGQSAITPPPEKAQEEDAEKKAREKATLKSIIVAPARATSKSQIEAEEQDLSSKWQAVKPKFWWRKRQNPSSSTSQVVFNRPATSFNPLNLREKFKEILHGKCFRCFASDHQAAACRDPIRCYTCRRSGHISFRCPNKSKQPIHSRLTFPKQAPSIQSRLIFPPLPSKNQQQPTTTRPGSVFHRLHKPAVTMDHIPGLPNQRPAVGYATVPMTELMQHELERLHYHGALISAEVEGQETSPREVARALTQQVGIPISDLRVTRHHPEDFFVFFDFPEGQAAAARRGFITLDGGRFTITPWSADRHVHHPNWWFRVRLCLEGLPQYAWNRAGLEGVMVLSTFFPPGAGRVTSGITPPLPDEIALPPRGRLPHVIVHLDEMEDWTPGPPRSPSFGVSGLPSSDLSDSGGPIPTVRTFQWYLGCADGTQPPRRRAAARRGCRAPPQRREDPEDDEDDDGRRRHAEDIPPRRRSLRDVIIGRGRSVESRAAEGVRHRSRTPHPSGRQRAHGDGRQGRSQTRHSSRCSCRYRSRRTRSPSSLTPRDQDGTGDAGCATTKVVAVSGQADGDQQCSARSVVAPSGKTIS

SEQ ID NO: 154083 - protein, 910 aa, Oryza sativa
  Clone ID: PAT_MRT4530_53977C.1.pep
MEFGWALRRPMRLPDSPRHERGLPAALRGVGVKPEGRSAITPPPEKAQEEDAEKKARGKATLKSIIVAPARATSKFQIEAEEQYLSSKWQAVKPKFWWRKRQNPSSSTSQAVFNRPAASFNPLNLREKFKEILHGKCFRCLASDHQAAACRDPIRCYTCRRSGHISFRCPNKSKQPIHSRLTFPKQAPSIQSQLIFPPLPSKNQQQPTTTRPGSVFHRLHKPTVTMDHIPGLPNQRPAVGYATVPMTELMQHELERLRFHGALISAEVEGQETSPREVARALTQQVGIPISDLRVTRHHPEDFFVFFDFPEGQAAATRRGFITLDGGRFTITPWSADRHVHHPNWWFRVRLCLEGLPQYAWNRAGLEGVMGPICLFDRIEHESVQRQNMAIFSCWMWMRNPDLLPRIVISTFFPPEAGRVTSGITPPLPDEIAPPPRGRLPHVIVHLDEMEDWTPGPPHPPCSPSSGVSGLPSSDSSDSGGPIPTVRTFQWYLGCADGTQPPRQRAAVRRGCRALPQRREDPEDDEDDNGRRRHAEDIPPRRRSLRDVIIGRDWSVESRAAEGARHWSRTPHPSGRQRAHGDGCQGRSRTRHSSRCSCRCRSRRTRSPSSLTPRGQDGTGDAGGATTKVVAVSGQADGDQQPVDALVSLPDPLIKILCSSPLLPFSDDQGDHDPMLPLLAEIAPKSSREAENETKRTGGEEPILGEDKVASAAELGQEKMGHLVPDAQQAPKMDLLAQSTGDDEAQASTGDQPTLVQQADCEEQHQATVQTQPIHGGEGEREKVVLSPLFSQLQPPIILQAPLELAPPGAAKTKGCGRKVVQMPSRRSGRKARFSSVPVSKRAEVRLMEEMGLLTPGEPVVDAVVEAYAKSFDTPLPLHVIAGLRALTLLDGVHDMPVPGEKGTTATAVV

SEQ ID NO: 154084 - protein, 287 aa, Oryza sativa
  Clone ID: PAT_MRT4530_53978C.1.pep
MDVKGRSASAPASPCVVLGDDAADAAAVRVSSSSSSSCLWFDWFAIRCARAPSFAFALKRVFVWVVAKVDRKYGSMLNAGSPLQILYTDQLADAKGGLKANAPCEITSVTECTCPLELQGMLKEECVDQYKLLSDRLLAKIVPKVARVKKPVSSSEVYAEFGVSAYSKYGTRTVSTSLRVCRQEKTSSSGMSNPVQKDHPVRNAHGTGNEVFKIPWIFGSVAFCVILLIFLWYLWWSKAASNACQLQSLPLNRNWRLSSDGGPWAERRRSSGRRSSAQLKERRMSYS

SEQ ID NO: 154085 - protein, 86 aa, Oryza sativa
  Clone ID: PAT_MRT4530_5397C.1.pep
MTAVAADYGYPADYGYAAGSKLGPENWGKLSPAYKLCGDGKKQSPIDIVTKQAISNPNLDSLNRTYTASDGTLVNNGKDILASHLT

SEQ ID NO: 154086 - protein, 54 aa, Oryza sativa
  Clone ID: PAT_MRT4530_53980C.1.pep
LKKKKKKKKKKKKKKKKKKKKKKKKKKKKKGHQGGRSGGSVLGYPGFPPRAWAF

SEQ ID NO: 154087 - protein, 220 aa, Oryza sativa
  Clone ID: PAT_MRT4530_53981C.1.pep
MATTASPFLSPAKLSLERRLPRATWTARRSVRFPPVRAQDQQQQVKEEEEEAAVENLPPPPQEEEQRRERKTRRQGPAQPLPVQPLAESKNMSREYGGQWLSCTTRHIRIYAAYINPETNAFDQTQMDKLTLLLDPTDEFVWTDETCQKVYDEFQDLVDHYEGAELSEYTLRLIGSDLEHFIRKLLYDGEIKYNMMSRVLNFSMGKPRIKFNSSQIPDVK

SEQ ID NO: 154088 - protein, 42 aa, Oryza sativa
  unsure (1)..(42): unsure at all Xaa locations
  Clone ID: PAT_MRT4530_53982C.1.pep
KKLYVVXSTTLYNSNXILSFNTLIFISFNPFFISSIINLTSN

SEQ ID NO: 154089 - protein, 150 aa, Oryza sativa
  Clone ID: PAT_MRT4530_53983C.1.pep
MSSVSPRKQPLVQREASTSMNDNEGGFSWLTALGFGFLTFNSGMAIYRSDGDRGSVAFVLTSYIDLVLLFACLRLFEKAPRDSARREWLKVFVWGLTTLLTVMFSYKVAAIMPPVVAVIVWAMAFATIGGGFYAFFVHQDKAAQLEQANR

SEQ ID NO: 154090 - protein, 100 aa, Oryza sativa
  Clone ID: PAT_MRT4530_53984C.1.pep
RHRRRRARVLFDNGCSLLWRRCHRRAQGLTGVDRIFSRCCRCRRRARSLLRQWLLRWRRHLLPQRPAASDNDFVLLEFNCASSHAWWRLESSLLCEERER

SEQ ID NO: 154091 - protein, 77 aa, Oryza sativa
  Clone ID: PAT_MRT4530_53985C.1.pep
GMAIDFRLFLYEVVKCLLLAQAHFIYNDDHWVLFFNDEAGQYLWLLHRHEAEMWLHILEHDISDEIVALQPWWSIFE

SEQ ID NO: 154092 - protein, 668 aa, Oryza sativa
  Clone ID: PAT_MRT4530_53986C.1.pep
MVENKTYYGAITEILELDYKHKGNIALFKCEWVDNRVQDKWIKVDKLGTTNVNLKHLFNTGSKLSDEPFILASQAVQVYYVEDPSDNGWSAVIETKPRDFYDMAKVQTESSDHERKIMARERGNENTTYLNEYERGRAERIKKNNIALQAIIQKRRELAKSSEGNLGSASTHQETRKRKRVDCAGSEPARHESGLPNLSRSTRRGTGSSTSTHDEDEELVANTNHLFMHDCERNDELAENGGKRMANGGGNENTTYVNEYERLRAERIKKNNIALQAVIEKKKELANLSEENLGSASTHQETRKRKKALEDAVEEHPEWTEKSITEGDLMSRVCGPERNGFVRSVGKGPTPRDLEMPGKEKYRSTKVQMAIEGQKQAQLEKEALIEHFERRQTQSDRKIESLSEKVERLTELLLADSRDGRQVHVNPQVLSNSATNEDEQESANGEAQPSDEENNSYGMIPPRPAAPSPQEHMVITSVIFLFSLLFHTILVHHYNETLTCCRLEKKLSYTRLLDPHDTPVAKGTLLSANRMTVVSGTQLGPDCCEVVVNHVLKRAAPFLRPYGNMNYISDAVGRSIAWPRQHIKEQQKSLAQPEGSRVRVSGGRELGGLDSEPMTDAARDPLCHRATEKLPIHRCAGCRGGEGGARSRVSRHWRAIDPPDSSEAVATA

SEQ ID NO: 154093 - protein, 656 aa, Oryza sativa
  Clone ID: PAT_MRT4530_53987C.1.pep
MASSPPGAGAGGEERPAASPAAPAVAEAVEEGPVTSRWAPEIRVYRRKYPRKNPKPPPNPSPSSSPLAQTLASIRRSIRRPEDGPAAPRPDPPAAPASSPHPPPPSAPVAPAQQGEPAAPASDDVSAGPNRDGGAVPNGHGDVRAAAEEKARKRRARSELRRQLASELDQVRGLSKRLKAAAEAIAAESAAALALPVVVPPPQLPVGYAHSQFALADPVTPIPGQVAGAIVPVRSVMQRGPLTVSVTHTESFEKEKRTPKANQLYQNSEFLLAKDKFPPSDSHGRKKPKHHKKKHRSLASHGAGYDAEQRLYSHAFKKSMSLLSRLMKHKFGWVFNKPVDAVALGLHDYFAIIKHPMDLGTIKTRLTHGQYRNPREFADDVRLTFHNAMTYNPKGQDVHFMAEQLLGIFEAQWPEIEAEVQYLASCPPLPNKFPPPPIDVRFLDRSDSVKHHMVLDSKSRPLSHTPTYSARTPSMKKPKAKDPDKRDMTIDEKRKLSNNLQNLPPEKLDVVVQIIKNKNLSVRQHDDEIEVEIDSMDTETLWELDRFVANYKKNLSKQKRKAERAMLARQDAELHAQHVAPQQPSQEPNIGVKSPKQNLIVDEKLATSVPEQADNNGQNASRSSSSSSSSSDTGSSSSDSDSDSSSSDGSDAANSS

SEQ ID NO: 154094 - protein, 157 aa, Oryza sativa
  unsure (1)..(157): unsure at all Xaa locations
  Clone ID: PAT_MRT4530_53988C.1.pep
MKIIFVFALLAIVACNASARFDPLSQSYRQYQLQSHLLLQQQVLSPCSEFVRQQYSIVATXPFWQPATFQLINNQVMQQQCCQQLRLVAQQSHYQAISIVQAIVQQLQLQQFSGVYFDQTQAQAQTLLTFNLPSICGIYPNYYSAPRSIATVGGVWY

SEQ ID NO: 154095 - protein, 155 aa, Oryza sativa
  Clone ID: PAT_MRT4530_53989C.1.pep
KIIFVFALLAIVACNASARFDALSQSYRQYQLQSHLLLQQQVLSPCSEFVRQQHSIVATPFWQPATFQLINNQVMQQQCCQQLRLVAQQSHYQAISSVQAIVQQLQLQQVGVVYFDQTQAQAQALLALNLPSICGIYPNYYIAPRSIPTVGGVWY

SEQ ID NO: 154096 - protein, 179 aa, Oryza sativa
  Clone ID: PAT_MRT4530_5398C.1.pep
RAKRQSALARRIAGRRRRRRSGRRRSARGTPARAPRRPRRRPRRSSARTRPARTAPSSSPSTTRSGSSPSTSSPSRSSSTAHAGHPRRRRNRSTPPPPPPRRGGGAPPPPPPPYSLPSEGLFLARGDRRCRRRGRRWRRRRPGRSAASAAATGAARRRRRRRRRWWWWPRRPSPSEPSY

SEQ ID NO: 154097 - protein, 157 aa, Oryza sativa
  unsure (1)..(157): unsure at all Xaa locations
  Clone ID: PAT_MRT4530_53990C.1.pep
MKIIFVFALLAIVACNASARFDPLSQSYRQYQLQSHLLLQQQVLSPCSEFVRQQYSIVATPFWQPATFQLINNQVMQQQCCQQLRLVAQQSHYQAISIVQAIVQXQLQLQQFSGVYFDQTQAQAQTLLTFNLPSICGIYPNYYSAPRSIATVGGVWY

SEQ ID NO: 154098 - protein, 544 aa, Oryza sativa
  Clone ID: PAT_MRT4530_53991C.1.pep
MGSASASSLPASAGFGENLVLILDFGSQYTHLITRRVRQLGVLSLCVSGTAPLASLAGLRPRAVVLSGGPHSVHASGAPTFPEGFLEFAAGAGAHVLGVCYGMQLLVQSLGGAVEAGEKQEYGKMEVEVTARSSALYGEGEVGKRQTVWMSHGDEVVRLPEGFEVVARSVQGAVAAVENREKRFYGLQYHPEVTHSPQGMETLRRFLFDVCGIKADWKMQDVLDEEIRTIQSMVGPDEHVICALSGGVDSTVAATLVHKAIGDRLHCVFVDNGLLRYNERERVMLTFESDLHLPVTCVDASEQFLSKLKGVKDPEMKRKIIGREFIAVFDDFAHKLEQKIGKRPGYLVQGTLYPDVIESCPPPGSGRTHSHTIKSHHNVGGLPKDMKLKLIEPLKLLFKDEVRKLGSILNVPESFLKRHPFPGPGLAVRVLGDVTEGNALEVLRQVDEIFVQAIKDAGLYDIIWQAFAVFLPVQTVGVQGDQRTHSNAVALRAITSEDGMTADWYYFEREFLVDVVNKICNNVRGVNRVVQDITQKPPATVEWE

SEQ ID NO: 154099 - protein, 132 aa, Oryza sativa
  Clone ID: PAT_MRT4530_53992C.1.pep
MEAAGLEEEEEEEEAMPWWCCRSRRRRRPSNPRESTSSAAESMIRRTYRWWQLEPTGGAQQHEHRSMHTNSQSTTNATLPNDITDWEGEGEMRKRLTCGPILVLDPDQVHEGSMWHMPTLSHGADQGLVFDQ

SEQ ID NO: 154100 - protein, 120 aa, Oryza sativa
  Clone ID: PAT_MRT4530_53993C.1.pep
HNPPYKFCTKRKVDCVTEFNFGAHIGGKKHKAKKLEILGNRNNARPATGNQCTGNRNPRPNGNAGSGSRNNEPNVFNSNIAQPSSDTFSGSQTNGTIGNPHKEISSDGDGISNSKLEQNC

SEQ ID NO: 154101 - protein, 55 aa, Oryza sativa
  Clone ID: PAT_MRT4530_53994C.1.pep
PPEDLCVGMGRDQHHQRRRQQEVPSFIPQGRQGLEAHPLLLLCHPAQGLSSGCDG

SEQ ID NO: 154102 - protein, 194 aa, Oryza sativa
  unsure (1)..(194): unsure at all Xaa locations
  Clone ID: PAT_MRT4530_53995C.1.pep
WDQTLFISGTPIQNNLKEMWALFYFCCPEVLGDKEQFKARYEHAIIQGNDKNATNRQKHIGSNVAKELRERIKPYFLRRMKNEVFLDSGTGEDKKLAKKNELIIWLKLTSCQRQLYEAFLNSELVHSSMQGSPLAAITILKKICDHPLLLTKKAAXGVLEGMDAMLNNQEMGMVEKMAMNLADMAHDDDDVEMQ

SEQ ID NO: 154103 - protein, 1209 aa, Oryza sativa
  Clone ID: PAT_MRT4530_53996C.1.pep
MKAKGAYAFDTVSRKTTTESKASKFFGDYDDEDDIDQDAENGKENHADDVGWEKTEDFKMEPTGTGVTRKPYNLPGRIFNMLYPHQREGLRWLWVLHCRGTGGILGDDMGLGKTMQVSAFLAGLFHSRLIKRVLVVAPKTLLTHWTKELSVVSLKDKIRDYSGPNANARNYELKYAFKEGGILLTTYDIVRNNFKMIKGNFTNDFDDEEETLWNYVILDEGHIIKNPKTQRAQSLFEIPCAHRIVISGTPIQNNLKVQSKELRERIKPYFLRRMKNEVFLDSGTGEDKKLAKKNELIIWLKLTSCQRQLYEAFLNSELVHSSMQGSPLAAITILKKICDHPLLLTKKAAEGVLEGMDAMLNNQEMGMVEKMAMNLADMAHDDDDVELQVGQDVSCKLSFMMSLLQNLVSEGHNVLIFSQTRKMLNIIQEAIILEGYKFLRIDGTTKISERERIVKDFQEGPGAPIFLLTTQVGGLGLTLTKAARVIVVDPAWNPSTDNQSVDRAYRIGQMKDVIVYRLMTSGTIEEKIYKLQVFKGALFRTATEHKEQTRYFSKRDIQELFSLPEQGFDVSLTQKQLQEEHGQQLVMDDSLRKHIQFLEQQGIAGVSHHSLLFSKTAILPTLNDNDGLDSSRRAMPMAKHYYKGASSDYVANGAAYAMKPKEFIARTYSPNSTSTESPEEIKAKINRLSQTLANTVLVAKLPDRGDKIRRQINELDEKLTVIESSPEPLERKGPTEARTLKDWESLKAKEEEAGGRARGEGRKGSELNSTPFRLNSTSSTLVVFKVPSTFTTGRGALAAAAANGRFVPMAPTSQPQPQQEVEVEVDEDEELVNMVVEAGVGAIKMKMKIPRRVLGSLYPHQRDGLAWLWALHCTATGGILADDMGLGKTIQEGGILLTSYHIVRNNYMLLRGNGNGNNVDNNEEEPLWDYVILDEGHIVKNTKTQRAQSLFQIPSAHRIVLTGTPIQNKLKMSWFELRYEKPILCGNDKNATDQEKQMASNAAKRRLYEAFLNKDPVRSQTGALKGSSLEASTILRKICDHPLLLTKRDTDDFLEEMGAMLNNRDMCMVERILEDNLYADKRLQIVQGASCKIAFILPLLRNLVEEGHYVLIFSQTRVMLNLIQDAVSIEGHKFLRIDGTTKISERKKILKDFQEGLDSPILLLTSHVGGLGNTLTKADRVIVVDPAWNPIVAKQKVDPRALNSPSTRV

SEQ ID NO: 154104 - protein, 520 aa, Oryza sativa
  unsure (1)..(520): unsure at all Xaa locations
  Clone ID: PAT_MRT4530_53997C.1.pep
MAADALSIIPGAVLRNLSDKLYEKRKNAALEIEGIVKQLATSGEHDKISAVIALLTNDFTMSPQANHRKGGLIGLAAVTVGLTSEAAQHLEQIVPPVLTSFLDQDSRVRYYACEALYNIAKVVRGDFIIYFNKIFDALCKLSADSDANVQSAAHLLDRLVKDIVTESDQFSIEEFIPLLRERMNVLNPYVRQFLVGWITVLDSVPDIXVLEVHVRIAEESHHFHHLVSYLIHTFHNNHVLLEKRGALIVRRLCMLLGAEKVYREFSTILETEGDLEFASTMVQALNLILLTSTELAELRSLLKKTLVDSCGKDLFQSLYASWCHSPMATISLCLLAQAYNHAISVIQSLGEEDINVKFLVQLDKLIRLLETPVFAYLRLQLLEPGKHTWLLKTLYGLLMLLPQQSAAFKILRTRLKTVPFSENLKRTSSTNPYSQILQVTEDGNRNHDTQSYNAINFPSRLHQFESMQQQHRVHLKNQLQSQKSASAIVLSQEIQRYEEAHSSSTSEIGRPPSRTSRGIS

SEQ ID NO: 154105 - protein, 44 aa, Oryza sativa
  Clone ID: PAT_MRT4530_53998C.1.pep
LPNHFSVKTYYKTPPWVDMVLGAPLYLGWIPNLDGTLKSQQSLS

SEQ ID NO: 154106 - protein, 97 aa, Oryza sativa
  unsure (1)..(97): unsure at all Xaa locations
  Clone ID: PAT_MRT4530_53999C.1.pep
FVENGGHXTTPSYQAFVTMSRYVWASLTVARSLNPRAEMFYVKGGTELRXHMECVPSKITKEGDKVSVGFTVMPGFKIGCTDIRCRVYLSMVNERNF

SEQ ID NO: 154107 - protein, 99 aa, Oryza sativa
  unsure (1)..(99): unsure at all Xaa locations
  Clone ID: PAT_MRT4530_5399C.1.pep
CLSDISENFQKRKLSSSICISPGFGGPTGNTPAVRPATSXRSDRRHKGGQTGDERSDRSIYTGQTDSIRAIAEGSLRLTSSSRAGSYELDQNSEQEKRG

SEQ ID NO: 154108 - protein, 1351 aa, Oryza sativa
  Clone ID: PAT_MRT4530_539C.1.pep
MCTFIVVLTSIVFLMVTSNGQAQAPIGCIPRERDALLEFKNSITDDPMGQLKFWRRGDDCCQWRGIRCSNRTGHVIKLQLWKPKFDDDGMSLVGNGMVGLISPSLLSLEHLQHLDLSWNNLSGSDGHIPGFIGSFRNLRYLNLSGMPFIGVVPPQLGNLSKLQFLDLSSCIGLEMQSRSGMTWLRNIPLLQYLNLNSVDLSAVDNWLHVMNQLPSLRVLNLSNCSLQRADQKLTHLHNNFTRLERLDLSGNQFNHPAASCWFWNITSLKDLILSGNRLYGQLPDALADMTSLQVLDFSINRPVPISPIGLLPSSQAPPSSGDDDAAIEGITIMAENLRNLCSLEILDLTQSLSSGNITELIDNLAKCPASKLQQLILKYNNITGILPISMGVFSSLVYLDLSQNYLTGQLPSEIGMLRNLTWMDLSYNGLVHLPPEIGMLTNLAYIDLGHNNFSHLPSEIGMLSNLGYLDLSFNNLDGVITEKHFAHLASLESIYLPYNSLEIVVDPEWLPPFRLKYAYFYCCQMGPMFPKWLQTQVDIIELDIANTSIKDTFPEWFWTTVSKATYLDISNNQIRGGLPTNMETMLLETFYLDSNLITGEIPELPINLETLDISNNYLSGPLPSNIGAPNLAHLNLYSNQISGHIPGYLCNLGALEALDLGNNRFEGELPRCFEMGVGSLKFLRLSNNRLSGNFPSFLRKCKELHFIDLSWNKLSGILPKWIGDLTELQILRLSHNSFSGDIPRSITKLTNLHHLDLASNNISGAIPNSLSKILAMIGQPYEGADQTPAASGVNYTSPVATKGQERQYNEENVEVVNIDLSSNFLTGGIPEDIVSLGGLVNLNLSRNHLSGQIPYKIGAMRMLASLDLSENKLYGEIPASLSSLTFLSYLNLSYNSLTGRIPSGSQLETIYNQHPDIYNGNSGLCGPPLQKNCSSNNVPKQGSQPVQLLTHTHINLTKLEHLGLSRNYFGHPIASSWFWKVRTIKELGLSETYLHGPFPDALGGITSLQQLDFTNNDLSRNKFYGALPVWIGDLENLRFLQLSHNMFHGNIPVNIANLGSLQYLNLAANNMSGSIPRTLVNLKAMTLHPTRIDVGWYESLTYYVLLTDILSLVMKHQELNYHAEGSFDLVGIDLSQNQLTGGIPDQVTCLDGLVNLNLSSNHLKGKIPDNVGDMKSVESLDFSRNNLSGEIPLSLSDLTYLSSLDLSHNKFVGRIPRGSQLDTLYANNPSMYDGNSGLCGPPLQRNCSSVNAPKHGKQNISVEDTEAVMFFHFGLVSGLCDWSLGGVLRHIVQKIMESCLFPPSRQLIRQSSKTEDKTGDKRKGGEVSPVCSKRTRLLQFFAVAACMQERI

SEQ ID NO: 154109 - protein, 427 aa, Oryza sativa
  unsure (1)..(427): unsure at all Xaa locations
  Clone ID: PAT_MRT4530_53C.1.pep
THPQREGGRQAARRHQIHSPLLFQTTTSLTSLKNPIKERYSWFISVYIYHGLIDDHGRSPETPEVARRPNFPLQLLEKKEEQPCSSSAAGGGTGPSSAGGNGNNGSGPGGAGGEMQQLRKAAPKRSSTKDRHTKVEGRGRRIRMPALCAARVFQLTRELGHKTDGENEWLLQQAEPAVIAATGTGNPGNFTSLNISLRSSGSXAVRPGAPRALPSPAAAASDPVRTRGTGLSASGSRPRAPPRRPLAVPASVELPLGQRRSRCATFAFRRCRRRRPLQEAALGAGNAAAATATTAAAAAAAATVPAAXMAGYTQSQMPGTVWMVPSNSTQGGGPSGGGGGGGGGSGESIWTFPQMSSAAAAAAVYRGSQGGGGGGGGSSQQQHGGGGGGGXASEHKHQXRRPPPAEMDHQRRANGGGGEAGGAASSQ

SEQ ID NO: 154110 - protein, 135 aa, Oryza sativa
  unsure (1)..(135): unsure at all Xaa locations
  Clone ID: PAT_MRT4530_54000C.1.pep
MTGGGKSGGKASSGKNAXSRSSKAGLAFPVGRVHRLLRKGNYAQRVGAGAPVYLAAVLEYLAAEILELAGNAARDNKKTRIIPRHLQLAIRNDEELNKLLGHVTIAQGGVLPNIHQNLLPKKTGGKGGKNASQEL

SEQ ID NO: 154111 - protein, 2070 aa, Oryza sativa
  Clone ID: PAT_MRT4530_54001C.1.pep
MDCSMTSSILSANYNTILFEFGVILVTSKILYALLRKLYQPRIFSDLLLGIVLAQFRVLSLTNAINLVFGKIGGFVFAPYLFALGVEMDPSALLDAPTADAAVAYAGIFSTAVLVTLFHAPIMRPTSGIVHENSLRAFLALAAALANTASPVLTRLATDLKIAKTAVGRLAVGAGIASDMLTTMLIAIGSMIWRDTGTEGAASPLAQPALTAAVLAVVLMSGLVSRAMAEWVDGRNPEGRRMRGFDLSLVALVAATLCWFTSALRLDVNMAAFLVGLAFPSEGRVSRLLVSKINLVLSSFVLPLYVAHVCLSLRQTTDDIEAAGLRKDQGFRVYVMELPFPWWKVLFVTAMGTLGKLVGCAAAGLLRGLGWLEALALGLLLNVKGYFHVYCALAAFEAGIITDKSFMAIIFMVAVNVATTPMVGMAIASWARRSVQWRLMGLQHHDPATELRLVVGLQGPQDVATLAFLMEALRWGGGNGELAVYAVDMVQLTDQTAAAIVKGGGFDGVTVVDEEVSEMRKQIGEALDAYQGDDGAVRVRRVLALSSFTDMHSDICICAEEAMAALKVLQLAPCSVGILVDRHRHVDAAASQSQSQGVVVVFIGGADDREALTLASFMSKHASVRLTALRVVQNATAQARARARTSLFESSKSSRRAGASSSSSASSVLGQEEVQAQVDDKFFAEFYRKHVAGSKAIGYMEKHVGDGAELVAVLRALQAEYRLFVVGRGRDRRSVLTEGLEEWAECLELGPVGDILASSDFSSTASVLIVQQYDAKKHYKDRSMGGGDGDEVLLLPEPRPRRGLASWALDLLERAAVRLGHDASKPLYWLSGNFAPVHHETPPAPALPVRGHLPIGDLKGFYGLFMVQMQQLRKKLKVLDFTYGHGTANTALIYHHGKLMALSEADKPYVVKVLEDGDLQTLGLLDYDKRLKHSFTAHPKVDPFTDEMFAFGYSHEPPYCTYRVITKDGAMLDPVPITIPESVMMHDFAITENYSIFMDLPLLFRPKEMVKNGEFIYKFDPTKKARFGILQRYEKDDTNIRWFELPNCFIFHNANAWEEGDEVILITCRLENPDLDKVNGYQSDNLENFGNELIAKVAGIIKFDLHAEPEISGKKQLEVGGNVRGIFDLGPGRFGSEAIFVPREPGVSGEEDDGYLIFFVHDENTGKSEVNVIDAKTMSADPVAVVELPSRVPYGFHAFFINETSEAVAIAIVPWGGGAVAVAVAREVPVEYLYPPFNLTYFHFLDTNGVFLLSRNATFSAAVYNAGVDPSSDDNQSRFFFSVLHAASRTPVWTATAGTTILQSIVLSLTAQGLALSDPDPAADYAWSTPRLRAPVAALRLLDTGELALLDAANATLWSSFDHPTDTLLPAQPLLAGVLLTSPVSDQDLNPGAYRLMLTDTDALLQWATNNGSSFLTYWALSTDPNSVQDSNAAVHSMTANSSGLYLLAANGRDTVFRLRFPSPDANGDPCLLKLDSSGRLRALRLSTTSPRATLPTVWAAPTGGCDLPLPCRSLGLCTPGTNGSSCSCPDAFSTYSTGGCAPADGSALPLLADTCAPPPNFNYMTLGEGIGYFANKFASPDTSGEELPACRNLCSANCSCLGFFYRNSSKSCFLLNYRIGSLFRGDSDAAVGFIKTLPPASRRQGGGKGSSLSFITIVFGIALPTVAAVLIGFVVYVMWVKSRQASNKKKKKKQGGSRSWFKLPMLSSQQASYASEEQQGEEDDGDGDEVLIPGLPARFTGELTDPERSAVVAVKRMNNLGSQGRREFLTEMAVIGNAHHVNLVKLRGFCAEGARQLLVYEYMNRGSLDQCLFRAAAAPLEWPERMGVCVGAARGLAYLHAGCTRKILHCDVKPENILLNDRGGVKIADFGLAKLMSPEQSGLFTTMRGTRGYLAPEWLTNAPITDKADVYSFGMVLLEIVRGRKNCRSGKGSGGEASSDSDGYFPAMALELHEQGQYEAVVDQRLEGRADVAQVERVVRVALCCLHEDAALRPAMTTVSAMLDGSMEAGVPRTELLDYLRLYGRGLVDVRSGLHAAGKGGSDFTSGGAGSSSWSPTSCVSAQQLSGPR

SEQ ID NO: 154112 - protein, 95 aa, Oryza sativa
  unsure (1)..(95): unsure at all Xaa locations
  Clone ID: PAT_MRT4530_54002C.1.pep
LLAALVLQDDLDLSPRTRRHLPESTTNDNXLILYGLYKLAIVXDVNTARSVIFTQRDRATRHAWKAGDSKSKEDATNYYMSRVSQLLNDGAAESC

SEQ ID NO: 154113 - protein, 349 aa, Oryza sativa
  unsure (1)..(349): unsure at all Xaa locations
  Clone ID: PAT_MRT4530_54003C.1.pep
RVLVCNSIQSPIPNPKFVPVAGYHWFDGDGMIHAMRIKDGKATYVSRYVKTSRLKQEEYFGGAKFMKIGDLKGFYGLFMVQMQQLRKKLKVLDFTYGHGTANTALIYHHGKLMALSEADKPYVVKVLEDGDLQTLGLLDYDKRLKHSFTAHPKVDPFTDEMFAFGYSHEPXYCTYRVITKDGAMLDPVPITIPESGMMHDCAITENYSIFMDLPLLFRPKEMVKNGEFIYKFDPTKKARFGILQRYEKDDTNIRWFELPNCFIFHNANAWEEGDEVILITCRLENPDLDKVNGYQSDNLENFGNELYEMRFNMKTGAASQKQLSVSAVDFPRINESYTGRKQXDVYCAI

SEQ ID NO: 154114 - protein, 172 aa, Oryza sativa
  Clone ID: PAT_MRT4530_54004C.1.pep
AELEEATEGFKSQIGSGGFGCVYRGELTDPERSAVVAVKRMNNLGSQGRREFLTEMAVIGNAHHVNLVKLRGFCAEGARQLLVYEYMNRGSLDQCLFRAAAAPLEWPERMGVCVGAARGLAYLHAGCTRKILHCDVKPENILLNDRGGVKIADFGLAKLMSPEQSGLFTTMR

SEQ ID NO: 154115 - protein, 92 aa, Oryza sativa
  unsure (1)..(92): unsure at all Xaa locations
  Clone ID: PAT_MRT4530_54005C.1.pep
GGLQDLRSASAGDFPAXXRRRRXSSAXRPPSRRAPXRXRGSAPAGVTXLTAQRRPTEXPAARGGRARGGGERSGRRRRRRMLQESGAWHAIS

SEQ ID NO: 154116 - protein, 540 aa, Oryza sativa
  Clone ID: PAT_MRT4530_54006C.1.pep
MGGGDGDEVLLLPEPRPRRGLASWALDLLERAAVRLGHDASKPLYWLSGNFAPVHHETPPAPALPVRGHLPECLNGEFVRVGPNPKFVPVAGYHWFDGDGMIHAMRIKDGKATYVSRYVKTSRLKQEEYFGGAKFMKIGDLKGFYGLFMVQMQQLRKKLKVLDFTYGHGTANTALIYHHGKLMALSEADKPYVVKVLEDGDLQTLGLLDYDKRLKHSFTAHPKVDPFTDEMFAFGYSHEPPYCTYRVITKDGAMLDPVPITIPESVMMHDFAITENYSIFMDLPLLFRPKEMVKNGEFIYKFDPTKKARFGILQRYEKDDTNIRWFELPNCFIFHNANAWEEGDEVILITCRLENPDLDKVNGYQSDNLENFGNELYEMRFNMKTGAASQKQLSVSAVDFPRINESYTGRKQRYVYCAILNSIAKVAGIIKFDLHAEPEISGKKQLEVGGNVRGIFDLGPGRFGSEAIFVPKEPGVSGEEDDGYLIFFVHDENTGKSEVNVIDAKTMSADPVAVVELPSRVPYGFHAFFINEEQLAKQSA

SEQ ID NO: 154117 - protein, 102 aa, Oryza sativa
  Clone ID: PAT_MRT4530_54007C.1.pep
PTRPPTRPLVRPVAVAGRVVFPHVVRGGFSTFTHDTSFFSYHLYLTDHQSLLHLSSNIQTYHTFPYHLSPLISTHLQIFISQYTAPHLKKTNNIHSLNRFQS

SEQ ID NO: 154118 - protein, 2905 aa, Oryza sativa
  Clone ID: PAT_MRT4530_54008C.1.pep
MATSRDADEIIEKLSSDRARTRDEGVKLLGTWLQGDRAFSFCRLLARNTANLKPAHLPASATWPFLIMALTKCVIADISGKKRSPKSAAARMLRLAVQCAQDFRLSGRSLLLISVAKKLFSHIWEVVKDAPSFLIEYSIILRQLLTVKEYRYQMKPRTYSSFVVLYMKKVATGFDEKISNQASSKEESFRCTLTLHVLLENPPGDYPDIMREESLFITYAKVQLELARAIPEILEKLLDVIIKELDQNFNTGAGLVWCEAPRDEKAGSLRCFQEELMDLSATALYLAYKCTPRTSHNKKKLKTEHVMTAIMDSLLRGSLVWSGSICCLIHKYGYRVDKSLLINWFKATCKGLKSVLSNANALRFQDSLLWLIRVLKEFSALLMSSARDAPPFWLTNDEMSILEGYWQDTWNSLIHALPLFSTTALVVDSVLRLLGEMIMRDQVHASFVSEDTWDLQIFKQLPSSSTLYFIACYFSKIGFQGDVSNSIFIRKNLLRSTFELVHSKGFSLLNEQSVLMIPETIFSLCAGFSSPVINSADTSQLFGECKNLSKDKCWSHEEELGYSVETLSEINLESPTKAMSEKCSRAHLPRHIQQPLLLELLEFTKGFMSSNKQFEKVDLPNLVYACSLVCNLIHCSLLSRVFEEKSSFLQVMLDYVTNAIKHIVSVVMKEHAELSHGLTNLGSVFDTTGSALSSFKSFMHSPLFSLWRVNNKTSSVLGVTELLDELLEAISELFAQFSSLMNNFDGDNPSKMLPVPFVSLSEDLHPDNRSSFVDMDLDMTGSGEVDPVTAGGSGSMGISPRPLECKLELVCIISTFFSVVPLHTWEVLYNLADKEVNIKVGQAILLELCTNISASSSSLSSVNQDVFLDLLNKATEISFTDWFFRIRLINCISNFIYLFPDVAQDMIGHLLSMLHDTDYRVRLYLARKIVVLFQIWEGHSELFHDVCSSIGVKMVQFSNENPVRAREVLAIGPQPVPIIETALITLAHLSLQSEDIEVECVFMISAVAAIEPSQRELTYALFDSVSKRLNYASRSKYLDQLIGPILFRWVACEVSLVSLVEVKEMFGFKSDEPKNFIEHCCSWLLSFLILRGETADLNWLSKILSQPLSAVIKGYFVPIFGLCIAARYGSGPEKDLAETVLCESLLQLGEISEPERDDLIKKHMVSIVGFLLSVSSSSRQPEIPHFSKEAVAHSVKTVVDGFMDAMDGNLAETVVIDKINIFRSDRVFKFLLAIHQQIADASHPRHIRHRLCAIEVLIDVLGHRVALYSTWFYIICIVGSYIQRQPLQDQCCNILSKLLAAFNSNCSTETDAALGKQLQDLEPLPSFDCLKDIQVFHASLSGSYDSRDQFLKFVSRAPHLPPELFLLSSSSVANEASSVLADFISRAGISDVHQVIFHVPNLTEKYPIQPHISKEDKLPSDYGISDDILVGLLKLLKACLSDESAEIIDVTSRTLRGVLSTARGLNALHCLDSLDRSLLMVHSRGINAQVVEQTLLGMEKVSGVLVYYAPYGMTFIILSFFLPNFGSIVSLEDSDLWRTDGRTYKQWLCTLVGSLICHCDDIILRLCRSIAFLKVEVAELLLASALVNIAGNLDSNAGICRLISSMVEEKIFCDSNHLMKSVYLFLDALNVVRSYYVAEKARGCPSNTLKDGRSVRSKSRSPTTTPSSSWKKVYWLSVDYFVAARAANRCSCDFATLMYVELWCEEKFNMLALGPPDFSHEESLYRSFATCPFMFLAFLQLPPHIDLLVASFTRINELDSIYGITLANEITSQIIRYEHEGDWSSALEYHDLLVRSTRKENHGSLAGTALTGPSDVPSKAEEKMLNWQMHKGLMRSLQKTGCSHVLDVYCQGLSNQKSCLQQDSEFIDMQYEAAWRAGNWDFSFFIPYSSQPSTHSQSYCLFNGNLHSCLRALQNGDSEEFHVKLSNSKMDLVLALSNASKESTKYIHSTVIKLQMLDHLTMAWDLRWKFCLNQTSKSYVGNKDFSPVPTVPTRMQISDLELLNKEWTFILCQTERNLDLLEPFLAFRSAVLKILGSEEHLREHLFQSASALRKGARFSLAAAALYELKELRYHMDHQAMPNSYFLFKLEEAKLLRAQGQHDMAINLGKYILKNHPDKKNVSDVYRLVGKWLAETRSSNSRTIIDDYLRHSVDFTELHKCPDKKYKSRQCRTYFHLAHYTDGLFKSYEERLSSNEWQAALRLRKYKSKELDTLMKRLKSSSKSEKTDYSVKIQELQKQLALDEEEAGKIQCTHAKFSAKIQKSSKDDRDKFLNLALQGYQRSLVVGGKYDLQVVFRLVSLWFSLFSREQVVKAMMKTTKEVQSYKFIPLVYQIASRLGSSKDAQGSTNFQNALASLLKKMAIDHPYHTIFQICYNAQLLALANGDRVKDKQRSRSSFIVDMDKKLAAENLLKDLSSSHGALIRQMKQMVEIYIKLAELETKKEVPVVTASIPVDPNCQYEEGSFPHFNGLADSIMVMNGINAPKVIECIGSDGNKYRQLAKSGNDDLRQDAVMEQFFSLVNMFLQNHRDTSERRLRIRTYKVVPFTPSAGVVEWVNGTVPLAEYLVGSTRSGGAHGRYGTGDWTYHQCRETMTNDNMGTHENMAFTYISLSCNTRPVMHHFFLERFLQPADWFQSRLAYTRSVAASSMVGYIVGLGDRHSQNILIDQETAEVVHIDLGVAFEQGLMLKTPERVPFRLTRDMIDGMGVTGVEGVFRRCCEKTLSVMRANKEALVTIIEVFVHDPLYKWALSPLKALQRQKESEDIDSCLDDSQEACEGNKDAARAILRVKQKLDGYEDGEMRSVQGQVQQLIQDAVDADRLCQMFPGWGAWLWNLSQGKNVPMKLLVDALRVLSHTYIHTVWDGMGSLIDALTQTAVELMTRQWHLVVERFKGHVYIHQTADAFRS

SEQ ID NO: 154119 - protein, 94 aa, Oryza sativa
  unsure (1)..(94): unsure at all Xaa locations
  Clone ID: PAT_MRT4530_54009C.1.pep
LRNTAVEVAADCDCFPVXWLFHHRWGKKPGKVNGQKIELITAGVTTTAYAPQLQKLTGMQSSIVVIANPKHVAEHDAANDIDTDPDAAANLDTK

SEQ ID NO: 154120 - protein, 88 aa, Oryza sativa
  Clone ID: PAT_MRT4530_5400C.1.pep
GKKTQHFKIQNVLFFSFVQADGCLCKISSGLHRTRYISTASTNNRHYKMEYHQAAFLSRPAAAALEKCSQNTKCRYKCSCLPPMFQKL

SEQ ID NO: 154121 - protein, 79 aa, Oryza sativa
  Clone ID: PAT_MRT4530_54010C.1.pep
NNRGQGGANTRLPPSYREPPLTRKGGGRTRFFPATPSLPRKPLINPPPKSFPQGVPGGGPPGPRSLKTPFKGAQVPTGL

SEQ ID NO: 154122 - protein, 649 aa, Oryza sativa
  Clone ID: PAT_MRT4530_54011C.1.pep
MERDAAEVEVRRRLRDVGARLSSLPDDGELLRLLQEAAKLLYRVNQCEVDRIHSALIPVMRALIKKELLDHTDPGVKLAVVSCLTTLIKIRAPDPPYDDDVMKDVLKLVVGVFCELDDVDCPSYGTRVSMLGTFARIRGCALLLDLDCNDLIRDMFHHFFRTVSNTHQEHVISYMETIMKFVIEDITDMEQDLIKDLASCLLQNVKKEEKETPPASFVLAERVIGLCHEKLKPVFIKLLQGAPITEYSNLVTSFLQDAIVAGDNNVGAFMHDMKEVVSPKSSTMMGKTIGQPADSGDELKPEIVQGTKEAPNSNKKALDGSIVGSRIKVRWPADEMFYNGLVKSFDASSETHEIVYDHGDVVRQSLKDEKWEFIAEEQDYNPDASPDMLEDRSDEGSLGQPFQDVHKAASSHSFVIQEKYNTVLNEIGCISTETTGSLLVRIQPRIVEALQLNQKRPAMKIQPRIARELQLSLNKHARKVQPRIVEESQLNHNRHDGMVQPGVARESQVNQNMHVTKGVQKHIARYNNNKPTKIEGANVGTTKHAKVKRAALACENVVGRDVFLKRIVRPYNRVARATIQSQDPLEMVGGTMLGRECYKVVIDSLICGDAELFRPHRNLNYIRDAIGHCIAWPSQLKIGENFLEEIAQT

SEQ ID NO: 154123 - protein, 109 aa, Oryza sativa
  unsure (1)..(109): unsure at all Xaa locations
  Clone ID: PAT_MRT4530_54012C.1.pep
LHLNSRRLASPPPPPPXPPPPPQQKPSPPRTGPPPRPPSRRRPSLSPPAXPPPLAARQEDRAPSPPPPPPPPPPSWPPPXPSSPSPPPPPXPQPSSPPPWTRWSASWKP

SEQ ID NO: 154124 - protein, 139 aa, Oryza sativa
  unsure (1)..(139): unsure at all Xaa locations
  Clone ID: PAT_MRT4530_54013C.1.pep
RSGSAPCSWRRSRRSRGPRTASGTPAAPLGTASSLPCTARTPPPGTDSSCSXGPPPCLLPRRALLXPTPPPPSPAFSLSALMPLPASPPTPPSXPLLPPPXPXPSLPXPXPXXRSSSPXSPTPLXPAPXXSVAQXHPHP

SEQ ID NO: 154125 - protein, 117 aa, Oryza sativa
  Clone ID: PAT_MRT4530_54014C.1.pep
MVVMTSKDAAIAHLKKDVVFNQRSSSRKGEGNPRQRPKEVTKPEDVAAAGLVNHRLGFRLGPYTLDCRSPSTNSEPPTQTNGSTQHPPHRTDAPPSADFIEPPPLRASLEPLRSTTR

SEQ ID NO: 154126 - protein, 125 aa, Oryza sativa
  Clone ID: PAT_MRT4530_54015C.1.pep
MEAIAETLASSVRHASGRTGGGPGGRVGDHARAWGHNAPMHLRTISSARERLRITWLDEVCASSGGYAPPSRGVTEADVTLRHRHAQWRLSSDDGGIGGALTGGHREAPADPKVAATLEGAYGFG

SEQ ID NO: 154127 - protein, 131 aa, Oryza sativa
  Clone ID: PAT_MRT4530_54016C.1.pep
MASSSLLRSAGGALRRWIPRRLFPSTSYRVWFGRRQSGYEQAFAESPRRRHLGSDCGGSTDDNQGRDSMDELLKCKRQLEKNKEGAFRPADIPDHESKKDELYRKMRSTFDKLCHCLDEQEHILREIEDQV

SEQ ID NO: 154128 - protein, 147 aa, Oryza sativa
  Clone ID: PAT_MRT4530_54017C.1.pep
RHEAPPNVYAVTNTTTMDATMDATTTAKRKRPAASDIADDAPTTVDEVSDAEVEEFYAILRRMRDATRRLGARPPPPRAPAWRPSFSWEDFADAPPKQAPPPPQQPADHERVAENATPPRRPAPGLDLNVEPPSDAPATPRSARAPA

SEQ ID NO: 154129 - protein, 138 aa, Oryza sativa
  Clone ID: PAT_MRT4530_54018C.1.pep
PGGPVGEQLRQGFFRPPSPGDPNWCRGPAPPPLVGGLSRGAGAPHVGPPPAQGFPRLPKGGFEGPGGGPPGFFHGGPPPGAGGVSPRVGFPRAPRTGPLGSKANRGVDPGGVVKNKGFPLAGGLFTHGGKNMDLHGFF

SEQ ID NO: 154130 - protein, 143 aa, Oryza sativa
  Clone ID: PAT_MRT4530_54019C.1.pep
SGTDCPVAYRFFSAVPLASGGDTRRRCGRHKEGEERGRGAARSGECFRRNGCGEIPVSAMFSAALLSKPSLPLRRLRRPPSASLSSPGAALRRTAGGDWESMPIQLSHRQDGPTGQREREGSVVLHVAPQITYQRSTLIIRLI

SEQ ID NO: 154131 - protein, 75 aa, Oryza sativa
  Clone ID: PAT_MRT4530_5401C.1.pep
MTVAARTTPAPPRGLPRRRGACVCPYQKCPLEANPSANGKEDPGLPTLLENNDFFSDNCNPHAAAAFPEPGDRSN

SEQ ID NO: 154132 - protein, 107 aa, Oryza sativa
  unsure (1)..(107): unsure at all Xaa locations
  Clone ID: PAT_MRT4530_54021C.1.pep
SEAETDGSSTRDFMSXSDSLSPAGGHDPFTDSLYHFTGSGSGSASRIGMAAFDLNSGSDGWPGMESYEGLLHSGSQGRDIGGFGSHLWAGPDGGGSQAQPTVHCVAP

SEQ ID NO: 154133 - protein, 30 aa, Oryza sativa
  Clone ID: PAT_MRT4530_54022C.1.pep
IVVPLLHSSFRHPHPSCKILLMGLSSLPVS

SEQ ID NO: 154134 - protein, 1136 aa, Oryza sativa
  Clone ID: PAT_MRT4530_54023C.1.pep
MPTAAAAATASLRVSNIPPSAVAAELLAFFDSAVAVAGGAFACEIAAAHRGWLSRGHGTVQFGSAAAAAAAAGLASSGRLPRFLGALLSVSPSPVDLLPRASDLSLRAAGAGLVVGDRVAERVFEAADAWDGVRAEVIPGKRRVDLYLEHDSQRYKLEVLFEDMKDCLGCTLDGMGAILLQLNYAPRIHTAISGPAVNSRFMDDRFHACKEDAKFSWVRALDFTPNYSFGRCSTLVLKLGKSALVSDILKSLPFSGNLGELTMNSMDGVGASSNVVPLVHCPRDYSVPYEVLFRLNSLMHMGKIVAKHVNADLFKALQELPVDVSRRIFEKMHKLESTCYGPLQFIQQEAYSMKRSHNVLLSNEGEGEGERKLMKCYRVNITPSKIFCFGPEEEVTNYVVKHHSAYASDFVRVTFVDEDWSKLSSNAISARIEQGFFSKPFKTGLYYRILSILKKGFSIGPKNFEFLAFSASQLRGNSVWMFASNASLNAGGIRRWMGHFENIRSVSKCAARMGQLFSSSRQTFEVLRWDVEVIPDIEITTDGSKYIFSDGIGKISLRFAKRVAHHVGLDPTNLPSAFQIRYGGYKGVIAIDPMSSIDLSLRPSMKKFESESRMLNITSWSKSQPCYVNREIISLLSTLGIRDEIFVAMQQDEMRETEEMLTNKEVALSVLGKLGGSETKTAVKMLLQGYEPSSEPYLSMILKAHQENRLTDIRTRCKIHVPKGRVLIGCLDETGVLEYGQVYIRITKNSKEQKDSNQSYFYNDDGKTATVVGKVAITKNPCLHPGDIRVLEAIYDPDLVGMVDCLVFPQRGERPHPNECSGGDLDGDLYFITWDDKLIPEKVDTPMDYTATRPRIMDHVVTLEEIQKHFVDYMINDSLGAISTAHLIHADRSPLKARSPECLQLATLHSMAVDFAKTGAPAEMPRTLRPREYPDFMERWEKPMYISNGVLGKLYRSAMGHMEKSGDSGALSSSSAQPSPTYDPDLEVPGSDEFLQAAEEYYELYEEKLTTLMNYYRAELEDEILTGNIRNKMLYLKRDNKRYFEMKDRIVAAVDALHREARGWLLSSRKEEDASRMASAWYRVTYHPDRRRGKRFWSFPWIACDNLLAIKASSQLRRRRQKDDDSTAVVQMDCSA

SEQ ID NO: 154135 - protein, 69 aa, Oryza sativa
  Clone ID: PAT_MRT4530_54024C.1.pep
FFLGGATQNLHSYWHFDNAPKHGGSVMGHEVVDHNREARHLRLYQYYFSDNPTYGPVLFRRRNRMSRHK

SEQ ID NO: 154136 - protein, 197 aa, Oryza sativa
  Clone ID: PAT_MRT4530_54025C.1.pep
MSTVTSCTFLSIRPTVSSAGSLLSKKPAAFVSLASERKSRPLSPCFAISSNKPGDPKIDVSPFSISPVVLVNPVPVDGERWQVAENKDEVSLWFDVPGLSPADLIVEIDEDVLVIKKKKKASPKSNYNTPTSGAIADHQEATADEFSGGGIYARLLLPAGYSREGVQAKLTSGELKLTIGKVKESVRRKINVDISVK

SEQ ID NO: 154137 - protein, 136 aa, Oryza sativa
  Clone ID: PAT_MRT4530_54026C.1.pep
PPPRRKRRPPRRNFPSPSPGSIIRIPPRAPKRIKAIQSDPSSGQNGNTKTLRGGGVLRSPSLIIMVCKNNSVSLPTGRFYFFPRPKTESAPCWAPWWGLWGNQFFVPPANDPLGPKLLFPLSTANIVKKTVWGCLF

SEQ ID NO: 154138 - protein, 95 aa, Oryza sativa
  Clone ID: PAT_MRT4530_54027C.1.pep
MTSADVERDAANSPVTKEAAEDQRTSTATRKGGADLRLDDDDDAPAVNSDGEGADKNGDAMATTMAISPSDGDDWNGGGARLERRRRRRLEVTRR

SEQ ID NO: 154139 - protein, 251 aa, Oryza sativa
  Clone ID: PAT_MRT4530_54028C.1.pep
MGNTNAISCKPDSNWKDSDWILDISGRVSKEERMGLMMLLWRIWYVRNGITHGKAAIPVEVSQRFIISYMASLLEIRQHPNANLIKGKHVVQYGSSMPLPRQCKPSAESSSWIRPQEGWMKLNVDGSYYPSDGKGGTGAVLRDSSGNLIFAACGVLHRPASALEAEMVDCREGISMALQWTLLPIIVETDCLEMVQLIHSDEKAMSDLAFLIREVKLLLKGNREIVIKKVSRGQSRDCHVLANKGVAEISE

SEQ ID NO: 154140 - protein, 539 aa, Oryza sativa
  Clone ID: PAT_MRT4530_54029C.1.pep
MRRAAAAAAVAPADPQLLAAAFESAIASRSPRLGRAAHARALRLIAPALSPFICAHLVNLYSKLDLPAAAAAALASDPHPTVVSYTAFISGAAQHGRPLPALSAFAGMLRLGLRPNDFTFPSAFKAADSAPPRSTIGPQIHSLAIRFGYLPVDPFVSCAALDMYFKTGRLKLARHLFGEMPNRNVVAWNAVMTNAVLDGRPLETIEAYFGLREAGGLPNVVSACAFFNACAGAMYLSLGEQFHGFVVKCGFEMDVSVLNSMVDFYGKCRCAGKARAVFDGMGVRNSVSWCSMVAAYAQNGAEEEAFAAYLGARRSGEEPTDFMVSSALTTCAGLLGLHLGRALHAVAVRSCIDANIFVASALVDMYGKCGCVEDAEQIFYETPQRNLVTWNAMIGGYAHIGDAQNALLVFDDMIRSGETAPNYITLVNVITSCSRGGLTKDGYELFETMRERFGIEPRTEHYACVVDLLGRAGMEEQAYEVIQGMPMRPSISVWGALLGACKMHGKTELGRIAAEKLFELDPQDSGNHVLLSNMFASAG

SEQ ID NO: 154141 - protein, 119 aa, Oryza sativa
  Clone ID: PAT_MRT4530_5402C.1.pep
MEQQTTSYEELDGGFCAYYCGTASLVPLLAVASISLVNNRGPFPDLPLAICFSEGQPDSIVQDIENMVRLFIEKVLALDKSFVDPRCLLNPTQEALINREWREYNLIMSKLWSAQPLYG

SEQ ID NO: 154142 - protein, 147 aa, Oryza sativa
  Clone ID: PAT_MRT4530_54030C.1.pep
MFFHWLARPLVPRVSQTVGGGVIALRRRLPWYLYYRTPAVRLITVVRGGGGMTVRRNGPIAGSEHGGGLALGAIRSTRREGFTVASESTARETTGAWSTVEEGVHLIHEDPHPPKLITIDPTMRRSISRARAHPARSNDRSNCLHSS

SEQ ID NO: 154143 - protein, 99 aa, Oryza sativa
  Clone ID: PAT_MRT4530_54031C.1.pep
KTPQRRSTKTPQATAAKATSKPCKTKKERFLKTSHTNGKIEAHTDRTKESSRNQAWPRTQAGTPNLFRTGHPHNPSTHSQTRSRPPRRPITSAGRPPGP

SEQ ID NO: 154144 - protein, 31 aa, Oryza sativa
  Clone ID: PAT_MRT4530_54032C.1.pep
ILSQANSTQCQQEHTVEAPRKARCGPSSPKA

SEQ ID NO: 154145 - protein, 80 aa, Oryza sativa
  Clone ID: PAT_MRT4530_54033C.1.pep
MVVRDPLSTTLYTRRYDIHFILLYLLADARPHTTSTSRIYLPFTGRRMSMTMASVYRTTQDELILNAHYMPTYLYATWRY

SEQ ID NO: 154146 - protein, 229 aa, Oryza sativa
  unsure (1)..(229): unsure at all Xaa locations
  Clone ID: PAT_MRT4530_54034C.1.pep
MEVEGIVKLRPLYASRRGVPGAALQPWVWFMPSFTTNERESREKREEKASGAAALRWLEGGDVGVHACSRARHTRGGRWLAERVKELAGTAQSRACLRRQREVAVVVAMGWGRRGKREKWNQLVEANSMARWFGLRSSGEGDRVVAAMGRRENWTAIYRGXEAVVRGGSEEEIEKTRRRXREEKNDGGRLRLLSGDGRGVGGGMRRARHAHQEEEAARLXCGLVWAGLA

SEQ ID NO: 154147 - protein, 74 aa, Oryza sativa
  Clone ID: PAT_MRT4530_54035C.1.pep
PNNWQVCSLCSIRKQSTCPLPFLSSHRLGLVPMLDQTKSPHYPFVPVALSVIIRSRSCPFLRDLWVYALHFVNV

SEQ ID NO: 154148 - protein, 93 aa, Oryza sativa
  Clone ID: PAT_MRT4530_54036C.1.pep
MERITNSTSKLSKELEEDPYTHCHFKIKKGEDKVEPAAGGSRGRQLLLGRLHRRGGSQQHPSDAGQQNGPAMFGLLSRSSCVELEPIPSLRPV

SEQ ID NO: 154149 - protein, 59 aa, Oryza sativa
  Clone ID: PAT_MRT4530_54037C.1.pep
KKAWGFFSEVIVTLWTFKFIKVSWWDCRSFRLFTCKVNFGASRNMSLLLYFGVIQTGQP

SEQ ID NO: 154150 - protein, 248 aa, Oryza sativa
  unsure (1)..(248): unsure at all Xaa locations
  Clone ID: PAT_MRT4530_54038C.1.pep
MDLDKSTSTTASLKKLXDDGALPGRGTMQRETGGIEPEPILGHMVVVEDYISCGFLPPPSEFLLLVLNFYGLSLLHLNPNSIAFLRIFSYICKAYIGVEPFLDLFRFYYDLRRMEPNSVSGCVGFRLRDCLKSRYIPFQCPSSCSKWRARWFYLQIENSDPVLVVPEEQLDKIPEWTAKPALTPSLRSFIDIIDDLXTQGLPGYEVVADFVGRRIQPLQACAHPAFDYSVPEDAIRVSPRGIFSCISN

SEQ ID NO: 154151 - protein, 72 aa, Oryza sativa
  Clone ID: PAT_MRT4530_54039C.1.pep
GNGDFYPCWKGGPGLPVVSGGSRSVTLFRILAEKKRRVFRKQIFLGFPNLNKGGGSKSKKKKKYPKSKKKQT

SEQ ID NO: 154152 - protein, 402 aa, Oryza sativa
  Clone ID: PAT_MRT4530_5403C.1.pep
MESRDSRYESSKAIPLNLLEDWSTPQAVNKTKSNRPFELRNLFLAGAVRAYGVGGWWLLCPWGILVDSYIIFFSEEGGFCGVESCAQASLPDSFLADLDELSDNEAYPEGEDEEARNMEEDGDGGMPCCEFLNHDDLNSASELHKTQRYNDIMQLLGAKKKNLSGFSTAASQFRVGYLEQTEVFQSTIPSLRTHACRIISAKSTLAARIDSIRGDPTGKAGHSLLEEICKKTEKLQELPPAKILKPLPVPDCMPKKKRGGCRLRKMKERYAQTDMMKLANRMQFGVPEESSLGDGLGKGYGLLGQAGSGKLRLLAGQSRLAAKVAKRFKARSCDRSESRSGLTSTLAFTPVQGMELSNPLVHNDHSVSGTQSTYFSDVGTFSSIRGKDAIPIQSSEIQNPGV

SEQ ID NO: 154153 - protein, 1215 aa, Oryza sativa
  Clone ID: PAT_MRT4530_54040C.1.pep
MWQGHGGAVHSHDRIDALRAVRGAGGGLGMPPPEKFRSGHLPRAAAPPLRTDDGSVASGSDMEESSDTEEVEVCSGRYSVDSSPRREDILRRTAVPQYRYATVPGMPSYYSSDYSDLSSSRDTALPRTKQQQVRRPQAQVGRYVEEEEYSDSAGSSEFSSQVETRSKGVASRGGYASEYSHNGPARREANNAVPKTRMAAAENYSRTAPLNSRTYQQDKYSAHVPAQDNVKSSQMRNPLLGLSVINLEHLLPLEKSMCAEQDGLSDVPSAPPIHAYDQEISQVSQNVDANVCDGSTVKKEEYNDDGLEPNLPEKSERSTLNPGHSSKPSSSIPLRVPTFHASLQNVLLQSEEELMAKRTSELVSDGVASKPKKTIGKMKVQVRKVRMSVDVPSGCNFSSLPMVKLNSVRYRLSNVQSTLSSGWESVRRIQTLPQLPANSSFSKHSLAYMQASAQYIKQVSGVLKVGVTTLRNSSSYETPQETYSCQLRLKSTPEDDVVPMQPGSGETHVFFPDSLGDDLIIDVSDSKGKPCGRVVAQVATMAEESTDKLRWWSIYREPEHELVGRIQLYIHYTTAADENNTKYGSVAETVAYDIVLEVAMKAQHIQQRNLILHGSWKWLLTEFALYYGVSDAYTKLRYLSYIMDVATPTADWLNLVHDLLLPVLMKTQGTAALSHQENRILGEVEEQIEQTLAMVFENYKSLNESLPSGLVEDFRPPTGLAACALEPAIKLYSLLHDVLSPEAQLRLCGYFQAAARKRSRRYMLETDEYVAGNSEGIRVDLVTFTTAYQKMKSLCCNLRNEIFTDIEIHNQHILPSFVDLPNLAASIYSVELSNRLRAFLVACPPTGPSSPVADLVIATADFQKDLASWNICPIKAGVDAKELFHLYIVLWIEDKRRTLLENCRMDKVKWSGVRTQHMTTPFVDEMYDLLKNTLTEYEVIICRWPEYIFVLENAIADIEKAVIESLEKQYGDVLAPLKDCIAPKKFGLKYVQKLTKRNSVGPYTVPEDLGILLNTMKRLLDVLRPRIESHLKSWSSCMPNGGNSAAIGERLSEVTVTLRAKFRNYMQAVVEKLSENTRMQNTTKLKKIIQDSKELVMESDIRSRMQALKDQLVEAINHVHKVTEVHVFVAICRGFWDRMGQDVLSFLENRKENRAWYKGARVAVSVLDDTFASQMQQLLGNSIQQKELEPPRSIMEVRSILCKDAPRQKNSSFYY

SEQ ID NO: 154154 - protein, 525 aa, Oryza sativa
  Clone ID: PAT_MRT4530_54041C.1.pep
MALLCFLLDMRNIPPPLLHLLKQCLLHLANLYAAIPSADLPDRLALCYVHPAASSSPPQDAAEQCITVEFVLLETGAAFVCDGVSENSNGFIDTICDLENCVVYVTYVNPDHIEQICRCHGRPIDLANTNKAKWMCPITSRQLTASDVTDTAVKIGEQTVLFLPDSEGVSSLRRASSSISFDVIERTNLASLNEGLIIGTPHIVIPSSNDVEVALDDECSDQNTQRRSNVFYGLCETLFKLDQGLVCSSKCNTETMKIGSLECYYLLQPSEKGPMLLRRLAGSEEILPLPVVSRPCNSTGTKEVQNLIETSLSKIVLKDYNPLQHERGFHSRLNCLVKDSLQFGSIAPACGAKDPHHLDSLSEPQILTFRGPEENKVLRLCREEGGDIQSFSFSEPQAASKEKASPRPSITEEWEQLIIIDDDFTSAVTCSTSRANPKLPSPVKPLGLDDKTSRILERLEAPRAKKQRATTSTRTGNSNTTPPPPASSIGAGTQIKKPLLPFEPSASQPLRPTFNKLRRKPTAAT

SEQ ID NO: 154155 - protein, 75 aa, Oryza sativa
  Clone ID: PAT_MRT4530_54042C.1.pep
VFELGIIVHSIIIGISLGASESPSTIRPLVAALTFHQFFEGIGLGGCIVQSLCASCGSVGLLTKRKCFKTKEYLP

SEQ ID NO: 154156 - protein, 474 aa, Oryza sativa
  Clone ID: PAT_MRT4530_54043C.1.pep
MASFAVSGARLGVVRAGGGGGGGGGPAARSGGVDLPSVLFRRKDSFSRGVVSCAGAPGKVLVPGGGSDDLLSSAEPDVETQEQPEESQIPDDNKVKPFEEEEEIPAVAEASIKVVAEDKLESSEVIQDIEENVTEGVIKDADEPTVEDKPRVIPPPGDGQKIYQIDPMLEGFRNHLDYRYSEYKRMRAAIDQHEGGLDAFSRGYEKLGFTRSAEGITYREWAPGAQSAALVGDFNNWNPNADTMTRNEYGVWEISLPNNADGSPAIPHGSRVKAPGEIPYNGIYYDPPEEEKYVFQHPQPKRPNSLRIYESHIGMSSPMEYNVRAENYMCHISYFIFILKQMECNVRAENYICTIEIRNDFAILSYFSIEKPLDLDTLSWLLRHGEERGKHMECKAVAKALLMACNLPIGRRERVKDRGGGSPRSIPKSMAGEDGNDGILNRSAEARAILLSGLVDLVAGASSMAIGESASIHA

SEQ ID NO: 154157 - protein, 841 aa, Oryza sativa
  Clone ID: PAT_MRT4530_54044C.1.pep
MASFAVSGARLGVVRAGGGGGGGGGPAARSGGVDLPSVLFRRKDSFSRGVVSCAGAPGKVLVPGGGSDDLLSSAEPDVETQEQPEESQIPDDNKVKPFEEEEEIPAVAEASIKVVAEDKLESSEVIQDIEENVTEGVIKDADEPTVEDKPRVIPPPGDGQKIYQIDPMLEGFRNHLDYRYSEYKRMRAAIDQHEGGLDAFSRGYEKLGFTRSAEGITYREWAPGAQSAALVGDFNNWNPNADTMTRNEYGVWEISLPNNADGSPAIPHGSRVKIRMDTPSGVKDSIPAWIKFAVQAPGEIPYNGIYYDPPEEEKYVFQHPQPKRPNSLRIYESHIGMSSPEPKINTYANFRDEVLPRIKKLGYNAVQIMAIQEHSYYASFGYHVTNFFAPSSRFGTPEDLKSLIDKAHELGLLVLMDIVHSHASNNTLDGLNGFDGTDTHYFHGGPRGHHWMWDSRLFNYGSWEVLRYLLSNARWWLEEYKFDGFRFDGVTSMMYTHHGLQVAFTGNYGEYFGFATDVDAVVYLMLVNDLIHGLYPEAVAIGEDVSGMPTFCIPVQDGGVGFDYRLHMAVPDKWIELLKQSDEYWKMGDIVHTLTNRRWSEKCVTYAESHDQALVGDKTIAFWLMDKDMYDFMALDRPSTPRIDRGIALHKMIRLVTMGLGGEGYLNFMGNEFGHPEWIDFPRGPQSLPNGSVLPGNNYSFDKCRRRFDLGDADYLRYHGMQEFDQAMQHLEEKYGFMTSEHQYISRKHEEDKVIIFERGDLVFVFNFHWSNSYFDYRVGCLKPGKYKIVLDSDDGLFGGFSRLDHDAEYFTADWPHDNRPCSFSVYTPSRTAVVYALTED

SEQ ID NO: 154158 - protein, 567 aa, Oryza sativa
  Clone ID: PAT_MRT4530_54045C.1.pep
MDSARSWLQKLQPRDKDRGKPASPTAARKDGAAAMAEDGEEAISSTTATKVAAAKQFIENHYKDQMRSLEERKERRRMLESKLADPDVSEEEQNNILKDFENREREIMRSRRHKMGVDDFELLTIIGRGAFGEVRLCREKATSNVYAMKKLKKSEMLRRGQVEHVRAERNLLAEVDSAYIVKLYCSFQDEEFLYLVMEYLPGGDMMTLLMRKDTLTDDESRFYVAETILAIESIHKHNYIHRDIKPDNLLLDRTGHLKLSDFGLCKPLDSSSFPNLSEFDYAVGKNINPSMDGDKLLSSSAAPRRTQQEQLLHWQKNRRMLAYSTVGTPDYIAPEVLLKKGYGMECDLWSLGAIMYEMLVGYPPFYSEDPMSTCRKIVNWRSHLKFPEEAKLSPEAKDLISKLLCNADLRLGTKGAHEIKAHPWFKGLEWEKLYQMEAAFIPEVNDELDTQNFEKFEEIAPMQTSSKAGPWRKMLSSKDTNFLNFTYKNLELSDDPEHPGIAQVKKKNNKPTRRTFKSILHEFADTEEEPQSSSLNSTPSQLDQLPESLEPSPHSSISSEDSQSRHR

SEQ ID NO: 154159 - protein, 59 aa, Oryza sativa
  unsure (1)..(59): unsure at all Xaa locations
  Clone ID: PAT_MRT4530_54046C.1.pep
KRGXXDHKERLYDLGEGQTPAPMETLKNQAQSRSQQENPLQHVQPPLCSQTMAFWRRVA

SEQ ID NO: 154160 - protein, 668 aa, Oryza sativa
  Clone ID: PAT_MRT4530_54047C.1.pep
PKQPGNDIDVYLRPLVEDLKQLWKKEGVPVWDEDKQEEFNLRALLFVTINDWPALSNLSGQSNKGGKTVFAMVKDLKVVFGKGPGSQHIESEDGHAVMWKKNSIFWELPYWEFLDVRHAIDVMHLTKNLCVNLLGFLGVYGKSKDTLEARNDLKHMEQRGDLHPEPKEKRSHYLSPASYTLSKAEKESMFECLESIKVPSGYSTNIKRIISTKEKKFINLKSHDCHVLMTQLLPVVIRGILPDNVRATITKLCAFMNAISQKVIDPDRLEALQNEVVQCLVSFELIFPPSFFNIMTHLLCHLVKEIRILGPMYLHNMFPFERYMGVLKKYVRNRARPEASIAKGYGTEEVIEFCVEFIEDLRPIGVPESRHEGRLRGKGTLGRKAIMTVDNNLFRKAHFTVLQHSSLVAPYIEEHLALVRARNIGKSDAWITRHHIDTFPAWLRQHLMGNESINQQLAFLARGPSGSIATFQGYEINGYTFYTRAQDMKSTNQNSAVRVDAMGNDGTTATYYGAIEDIWELDYGPLKVPLFRCQWVRLTGGGVMIDDSGMTTVDLNKVGYSDEPFVLANDVTQVFFVKDMSSKGKKGRGPDEPKRQVVLPGKRKIVGVEDKTDEDYDQLDGQPPFTVTIDPSILLSNEDTPYSRSDHKEGTIVRRKYVRSTVTADVMP

SEQ ID NO: 154161 - protein, 1234 aa, Oryza sativa
  Clone ID: PAT_MRT4530_54048C.1.pep
MKRKYIMMPIIIQGPKQPGNDIDVYLTPLVEDLKLLWKKEGVPVWDEDKQEEFNLRALLFVTINDWPALSNLSGQSNKGKVLYMGHRRFLAANHPVRKKGKHFEHKADHRTKPKHRSGKTVFAMVKDLKVVFGKGPKVESTLEARNDLKHMEQRGDLHLEPKEKGSHYLSPASYTLSKVEKESMFEYLESIKVPSGHSTNIKRIISTKEKKFTNLKSHDCHVLMTQLLPVVIRGILPDNVRATITKLCAFMNAISQKVIDPDRLEALQNDVVQCLVSFELIFPPSFFNIMTHLLCHLVKEISILGPVYLHNMFPFERYMGVLKKYVRNCARPEASIAKGYGTEEVIEFCVEFIEDLRPIRVPESRHEGRLRGKGTLGRKAIMTVDNNLFRKAHFTVLQQSSLVAPYIEEHLALVRARNIGKSDAWNTRHHIDTFPAWLRQHLMGNETINQQLAFLARGPSGLIATFQGYEINGYTFYTRAQDMKSTNQNSVVRIDAIGYDGTTGTYYGAIEDIWELDYGPLKVPLFRCQWVRLTGGGVMIDDSGMTTVDLNKVGYSDEPFVLANDVTQVFYVKDMSSKGKKGRGPDEPKRHVVLPGKRKIVGVEDKTNEDYDQLDGQPPFMVTIDPSILLSNEYTPYSRSDHKEGTIVRRKYVRSTVIADVLPRRAERNRQRNRASHQHRSGAHRPTPRRPPPTARRQKRAEPATPRTQDHRANRRPEAATPPLTNENENDRTNESENEHVNVRCRDNVNENENDRTNESENENDRTKTNENEGTNVNELGNMADRDEEQILYDTIAEGSSQYWNEEEGNEDPNQYLNEEGNVERDAEGKQQGHVERDVEGNQEEEASGSQPSVGQKRARGQRGAAKKLEGRHIITEVEEDGRPSAPAEAAKNYVRHSGWVVRDNVPVSTVYWRRTRARGDHESFVPDSEKEMLWITMLETFTLPAGQQGQAMMERNKENAAKKKYHHHLRSGGYSIAMSKWEEMEASLLERGIEPTTAKWPDRSKFWYYAHGGTINPVDGSLVFSDQIREAARQLTDAVEASSQGTFRPDREKDELSRMRSKRDTEAKIADLEYRVSSYELSMQEEVARKVDKRMAAHRSHDPQPTIPLAMVSPSGNRSSCASTGQVASGMAIPTDPSATYHCRPIPAGYSKVEVELVEGAYEDLELDYPGGDGSCTVSSSGSCTVSSSCSSTVSTSGSCTDSSTSSSSDTFQVKGPPSSTACPHKGNEEGES

SEQ ID NO: 154162 - protein, 198 aa, Oryza sativa
  Clone ID: PAT_MRT4530_54049C.1.pep
PGDRLPRDNPRLLAKAARNLKEINQARDRLKELLELELSAKTSQIPKKDQTSKAPKAKPKSKPKATSAAPYPPPGDRPPQSHHHHHQTNHNHSSSSQHHHQENHNRPYYRDLTGADLRWANLKEKDLSGRKMVSANLSNADLSDSFLHQVNLENANLFRANLFRANLLEANLRGANLQEANLVGADLSGADPQSRPAG

SEQ ID NO: 154163 - protein, 49 aa, Oryza sativa
  Clone ID: PAT_MRT4530_5404C.1.pep
FLVCFVIGISRRKCWKMQYQAIVAQIHYLFKILNCIFLLNRELEPAHLH

SEQ ID NO: 154164 - protein, 242 aa, Oryza sativa
  Clone ID: PAT_MRT4530_54050C.1.pep
MEASSWDALRKQWFQVVYANVVITLVHPIAAIGKYTFNGFLARRLEAQLDDQMIAYRKLVSMKSDGSENDIESDIERSLKQLQQEFYRLRSSLRVKQQHASLLDLRDFDRAKFDVESGDSADQALLREQAAISRSSGQMDNVISHAQATLGTLMSQRSTFGGITTKISNVSSRLPTVAGCGFQVEAVQEPSKSRKHLQIIPDLDSRSFIFIILHIRMYQIYFISSDEDSSPTLGTPKQAKSE

SEQ ID NO: 154165 - protein, 1903 aa, Oryza sativa
  unsure (1)..(1903): unsure at all Xaa locations
  Clone ID: PAT_MRT4530_54051C.1.pep
MEEGEVKDDNIPDFAQYVGFEGNQTGEKEIAADGNDVADDLGQMLQYARKDCESEKEAHKLDKMLEDHRTSLYPGCEQGHKKLDTTLELLQWKAKNGVSDKAFGDLLKLVKNILPGGNKLPETTYEAKKIVCPLGLEVHKIHACPNDCILYRGEEYENLEACPVCKALRYKIRRDDPGEVDGQLTKKRIPAKVMWYFPIIPRLRRLFRNKGNARMLRWHAEERQQDGMLRHPADGSQWRNIDRKFKEFGKDARNIRFGLSTDGMNPFGEMSSGHSTWPVTMCIYNLPPWLCMKRKHIMMPIIIQGPKQPGNDIDVYLRPLVEDLKQLWKKEANHPVRKKGKHFEHKADHRTNSKHRSGKQVFAMVKDLKAIDVMHLTKNLCVNLLGFLGVYGKSKDTLEARNDLKHMEQRGDLHPEPKEKGSHYLSPASYTLSKAEKESMFECLESIKVPSGYSTNIKRIISTKEKKFINLKSHDCHVLMTQLLPVVIRGILPDNVRATITXLCAFMNAISQKVIDPDRLEALQNEVVQCLVSFELIFPPSFFNIMTHLLCHLVKEIRILGPMYLHNMFPFERYMGVLKKYVRNRARPEASIAKGYGTEEVIEFCVEFIEDLRPIGVPESRHEGRLRGKGTLGRKAIMTVDNNLFRKAHFTVLQHSSLVAPYIEEHLALVRARNIGKSDAWITRHHIDTFPAWLRQHLMGNESINQQLAFLARGPSGSIATFQGYEINGYTFYTRAQDMKSTNQNSAVRVDAMGHDGTTATYYGAIEDIWELDYGPLKVPLFRCQWVRLTGGGVMIDDSGMTTVDLNKVGYSDEPFVLANDVTQVFFVKDMSSKGKKGRGPDEPKRQVVLPGKRKIVGVEDKTDEDYDQLDGQPPFTVTIDPSILLSNEDTPYSRSDHKEGTIVRRKYVRSTVTADMADRDEEQILYDTIAEGSSQYWNEEEGNEDPNQYLNKEGNVERDVEGNQQGHVERDVEGNQEEEASGSQPSVGQKRARAQRGAAKKLEGRHIITEVEEDGCPSAPAEAAKNYVRHSGWVVRDNVPVSTVYWRRTRARGDHESFVPDSEKEMLWTTMLETFTLPAGTKDKVKRWTLKKMAEQFQSFKGELYKKYILKGQTPNFDTFPKLRDHWDEFVAYKTGEQGQAMMERDKENAAKKKYHHHLGSGGYSVAMPKWEGMEASLIERGIEPATANWPERSKFWYYGHDGTLNPADGSLVFAYQIREAARRLTDAVEASSQGTFRPDRDRDELTLALQTPEHPGRTRGKGVIPWKIGFKEDIHTYRSRIRSKRDIEAKIADLEFRVSSYELSMQEEVARKVDERMAAHRSHDPQPTIPPAIVSPSGNRSSCASTGQIGSQSMDAMQTQDESTCPVDDITQRTPCELYIPYKNLSIKVASGMAIPTDPSGTYHCRPIPAGYSKVEVELVEGAYEDLELDYPGGDGXYIILPGRQAASRAPSPPAPPSPPQDPAPSPPHAPPALSPPQAPAPTXLRILHRLLLGLLHLLLHKFLFRHLQSQGPPQLHRLPTQGQRRRGMSASVKEAIKLSDYERTLKKASSGKSKPVPQLGEQPNQEIEPLVTGKEMTIEQFITDTGLTTDQLLGVAPIEKAEVKYMYELGKPLVKPELLQSLPTQMYKFHQLYMEMSATGRKMIGARIRDTDFLQGDEILWINFKGIYELYQLDALDVSIMSCWILMEIQRARRRRVFDTGFIDPRRVNVAMLDQYPQETEDNLVHLLKAQHYKTFILLPYNTEFHWVLLLFDLSACTVNVYDSMDKKESTFDKVFELIDRAWYRFRHLVRGKWRERLRRKFKFPCAKQKQGTNLCGYYVCEYCHCLADQIITTRELDFIRMRDNLITHKEFIAAVQEQLMGFINEEILDPKGEFYYDGNTIHRSLASELAASTTNTSKS

SEQ ID NO: 154166 - protein, 212 aa, Oryza sativa
  Clone ID: PAT_MRT4530_54052C.1.pep
ERAHSSKKSSELLPSISRPWHGGYSCRAASCSSSCSSPPRPPPPTSSSATTRSAPRAACPAPAARRARTPARRRPTCCRLRSTTRRRRPSTTPRRPRRRWPTLRRPRRRPTARRRRTEAEATTRRRATTRRPATTRRRRGGSRRRTCRPTSRRRGRSTRRTPASGPTRRRAAPRRGARWCSRRRRWPEPWPCDRRRMVINYTAFLIPFIMCS

SEQ ID NO: 154167 - protein, 284 aa, Oryza sativa
  Clone ID: PAT_MRT4530_54053C.1.pep
MEASSWDALRKQWFQVVYANVVITLVHPIAAIGKYTFNGFLARRLEAQLDDQMIAYRKLVSMKSDGSENDIESDIERSLKQLQQEFYRLRSSLRVKQQHASLLDLRDFDRAKFDVESGDSADQALLREQAAISRSSGQMDNVISHAQATLGTLMSQRSTFGGITTKISNVSSRLPTIIEIGVCTILIQCYPVLMVLQALCLSLHSRMTSSIDWTHILHVAGCGFQVEAVQEPSKSRKHLQIIPDLDSRSFIFIILHIRMYQIYFISSDEDSSPTLGTPKQAKSE

SEQ ID NO: 154168 - protein, 1012 aa, Oryza sativa
  Clone ID: PAT_MRT4530_54054C.1.pep
MGSNQGNVQAGCDRGGKTRTIHFHLFESGFMPSYNCWTSHGEQGVEIEEDEVEDDNIPDFAQYVGFEGNQTGEEEIAADGNDVADDLGQMLQDAREDCESEKEAHKLDKMLEDHRTSLYPGCEQGHKKLDTTLELLQWKAKNGEGVPVWDEDKQEEFNLRALLFVTINDWPALSNLSGQSNKGYKACTHSKHPVRKKGKHFEHKADHRTKPKHRSGKTVFAMVKDLKVVFGKGPGSQHIESEDGHAAMWKKNSIFWELPYWEFLDVRHAIDVMHLTKNLCVNLLGFLGVYGKSKDTLEARNDLKHMEQRGDLHPKPKEKGSHYLSPASYTLSKAEKESMFECLESIKVPSGYSTNIKRIISTKEKKFTNLKSHDCHVLMTQLLPVVIRGILPDNVRATITKLCAFMNAISQKVIDPDRLEALQNEVVQCLVSFELIFPPSFFNIMTHLLCHLVKEIRILGPMYLHNMFPFERYMGVLKKYVRNRARREASIAKGYGTEEVIEFCVEFIEDLRPIGVPESRHEGRLRGKGTLGRKAITTVDNNLFRKAHFTVLQHSSLVAPYIEEHLALVRARNIGKSDAWITRHHIDTFPAWLRQHLMGNESINQQLAFLARGPSGSIATFQGYEINGYTFYTRAQDMKSTNQNSAVRVDAMGHDGTTATYYGAIEDIWELDYGPLKVPLFRCQWVRLTGGGVMIDDSGMTTVDLNKVGYSDEPFVLANDVTQVFFVKDMSSKGKKGRGPDEPKRQVVLPGKRKIVGVEDKTDEDYDQLDGQPPFTVTIDPSILLSNEDTPYSRSDHKEGTIVGRKANPRADAAVSRRRLELVILAAASASSAAAASLGKNSGCRHLVGAQWFVGKCAVGLSSFLPLAFQRHASAAVATPPPHSPPRAQCRRRHASPPAATAPQRHAAAAVATPPPPPPRRRANRRPDAATPPLTNENENDRTNESENEHVNVRCRENVNENENYRTNKSENENDRTKTSENEGTNVNENKRTNVNENERTNVNEQTNEDER

SEQ ID NO: 154169 - protein, 1131 aa, Oryza sativa
  Clone ID: PAT_MRT4530_54055C.1.pep
MENQLMEELQEADVLWPESETTPPPPSRGAHLPVLVLQLQGAAAPVLPSRGSSTSTATPFGRRRRSDVASTAAWLDGDDDDDVQAEEFQEADVLWPDDDDAGGEDTARDHQLDDEVGEFWWLSGEAGSRRMDTEAAAAAAAAGERQEQHFAIEEQPEVTSDKQSTRLLPRSPAFPVDAHFNLHSMASDFLVMLALKPGMDLTGTDIPTPGDAKEDCESEKGAHKLDKMLEDHRTSLYPGCEQGHKKLDTTLEFLQWKAKNGVSDKAFGDLLKLVKNILSEGNKLPETTYEAKKIVCPLGLEVQKIHACPKQPGNDIDVYVRPLVEDLKLLWKKEGVPIWDEDKNEEFNLRALLFVTINDWPALSNLSGQSNKGYKACTHSNHPVRNKGKHFEHKADHRTKPKHRSGKTVFAMVKDLKVVFGKGPGSQPIKSEDGHATMWKKNSIFWELPYWEFLDVRHAIDVMHLTKNLCVNLLGFLGVYGKLKDTLEARNDLKHMEQRGDLHPEPKEKGSHYLSPASYTLSKADKESMFECLESIKVPFGYSTNIKRIISTKEKKFTNLKSHDCHVLMTQLLPVVIRGILPNNVRATITKLCAFMNAISQKVIDPDRLEALQNDVVQCLVSFELIFPPSFFNIMTHLLCHLVKEISILGLVYLHNMFPFERYMGVLKKYVRNRARSEASIAKGYGTEEVIEFYVGFIEDLCPIGVPESRHEGRLRGKRTLGRKAIMTVDNNLFRKAHFTVLQQSSLVAPYIEEHLALVRARNIGKSDAWITWHHIDTFPAWLRQHLMGNETINQQLAFLARGPSGSIAIFQGYEINGYTFYTIAQDMKSMNQNSVVRINAMGHDGTTGTYYGAVENIWELNYGPLKVPLFRCQWVRLTGGGVMIDDSGMTTVDLNKVGYSDEPFVLANDVTQVFYVKDMSSKGKKGRGPDEPKSHVVLPGKRKIVGVEDKTDEDYDQLDGQPPFTVTIDPSILLSNEDTPYSPLFPSQSNINLPRASLHRFRHSPPSLPVGIELAPSLSLSAVTAELRSAAVVAPDHLPPRRRHLRLHRIPGDLVHPSVSLADRRSTVDPVHPSRAAAFLRSVRRFRRRRRPGGRGRAASRRCAGVAAFGRTVRLPRGARLSAARALGCG

SEQ ID NO: 154170 - protein, 781 aa, Oryza sativa
  Clone ID: PAT_MRT4530_54056C.1.pep
MEEDELEDDNIPDFTQYVGFEGNQTGEEEIAADGNDVADDLGQMLQDAKEDCESEKEAHKLDKMLEDHRTSLYPGCEQGHKKLDTTLEFLQWKAKNGRKYIMMPIIIQGPKQPGNDIDVYLRPLVEDLKLLWKKEGVPVWDEDKQEEFNLRALLFVTINDWPALSNLSGQSNKGHKQTTRKTVFAMVKDLKVVFGKGPGSQPIESKDGHAAMWKKNFIFWELPYWEFLDVRHAIDVMHLTKNLCVNILGFLGVYGKSKDTLEARNDLKHMEQRGDLHPEPKEKGSHYLSPASYTLSKAEKESMFECLESIKVPSGYSTNIKRIISTKEKKFTNLKSHDCHVLMTQLLPVVIRGILPDNVRATITKLCAFMNAISQKVIDPDRLEALQNEVVQCLVSFELIFPPSFFNIMTHLLCHLVKKISILGPVYLHNMFSFERYMGVLKKYVRNRARPEASIAKGYGTEEVIEFCVEFIEDLRPIGVPESRHEGRLRGKGTLGRKAIMTVDNNLFRKAHFTVLQHSSLVAPYIEEHLALVRARNISKSDAWITRHHIDTFPAWLRQHLMGNESINQQLAFLARGPSGSIATFQGYEINGYTFYTRAQDMKSTNQNSAVRVDTMGHDGTTATYYGAIEDIWELDYGPLKVPLFRCQWVRLTGGGVMIDDSGMTTVDLNKVGYSDEPFVLANDVTQVFFVKDMSSKGKKGRGPDEPKRQVVLPGKRKIVGVEDKTDEDYDQLDGQPPFTVTIDPSILLSNEDTPYSRSDHKEGTIVMRKYVRSTVTADVL

SEQ ID NO: 154171 - protein, 373 aa, Oryza sativa
  Clone ID: PAT_MRT4530_54057C.1.pep
MAEALVAVLRLAASAAATARPQSRSGRHGSCAARVPCPGPSPFRRGRLCARAAVAGPPEVDDDDAMTIDNLRRFFDVNVGKWNGAFYVGFFQEEKAFALRYQTAGMLETVLRAGVLGEDDTGEESPKNLKIPSRKPSIVCENCLYSREGNGRVRAFHIMDPKGVLDMLIIFHEKQGSEVPLMYSSDDADITNSDRIAPLLGRWEGRSVTKRSGVYGATLSEADTVVLLEKDRNGQLILMIIPISVLAKIDLKHSRKPMGDGFQNLHAMGGQAGVSALDNMSTKSGSSTTTTVHWTGSANNNLLQFDGGYEMTLLPGGMYMGYPTDIGKIVNDMDSFHLEFCWMESPGKRQRLVRTYDSAGLAVSSTYFFETKV

SEQ ID NO: 154172 - protein, 1187 aa, Oryza sativa
  unsure (1)..(1187): unsure at all Xaa locations
  Clone ID: PAT_MRT4530_54058C.1.pep
MHLDLSDLDLSPSPSTPPPSTPRNAAAACQRHAAAAVATPPPPSPTRAQCRHRHATPPPPRHATPPPPRHAAAATAPQRHAAAAVATPPXNRRPDAATPPLTNENENDRTNESENEHVNVRCRDNVNENENDRTNVNELGNMADRDEEQILYDTIAEGSSQYWNEEEGNEDPNQYLNEEGNVERDAEGNQQGHVERDVEGNQEEEASGSQPSVGQKRARGQRGAAKKLEGRHIITEVEEDGRPSAPAEAAKNYVRHSGWVVRDNVPVSTVYWRRTRARGDHESFVPDSEKEMLWTTMLETFTLPAGEQGKAMMERNKENAAKKKYHHHLGSGGYSVAMPKWEQMEASLIERGIEPATANWPERSKFWYYAHGGTLNPADGSLVFGYQIQEAARQLTDAVEASSQGTFRPDRDRDELTLALQTPEHPGRTRGKGVIPWKIGFKEDIHTYRSRMRSKRDTEAKIADLEFRVSSYELNMQEEVARKVDERMAAHRSHDPQPTIPPAMVSPSGNRSSCASTGQVASGMAIPTDPSGTYHCRPIPAGYSKVEVELVEGAYEDLELDYPGGDGSYTVSSSYSASTVSTSGSSIDSSSGSCIDSSSCSYTYSSASSSSGTFKVKGPPAPPPAHTGATKKAKVDAAKNKDPGYDCTQEELDAYVASEVKRQFKPRSPEKKIPIDPSVMNFFRGMSAPVKEAIKLSDYERTLKKASSGKSKPVPQLGEQPNQEIEPLVTGKDMTIEEFIIDTGLTTDQLLGVEPIEKAELKYMYELGKPLVKPELVQSLPTQMYKFHQLYVEMSATGREMIGARIRDPDFLQGDDILWINFKEIYKVYQLDAFDVSIMSCWTLMEIQRARRRRVFDTGFIDPRRVNVAMLDQYPQETEDNLIHLLTAQHYKTFILLPYNTEFHWVLLLFDLSACTVNVYDSMDKKESMFDKSSSPSTNHHLPPAGEGRCDATQPERAEDRIYLVLRRRQDVERPYFAGRNLCIATSSTSTQPMQRRSATTAWCPCIVVKPRSSFRASTMSFSPPRQGYEMPSGRDALHLVRSESSCCPSVMLSLYYAKGTVRAESTPTNALSRSADEAFTSSKVAVVIGTLIEPFYGLIHHPKEPLVITTSPPPVGREEAPDPLPIAPSPTPLPPRAAAATALFPARLPTPHGGGSGLFPSLPRRECHQGEEKTPVPRAPLLTEEE

SEQ ID NO: 154173 - protein, 2855 aa, Oryza sativa
  unsure (1)..(2855): unsure at all Xaa locations
  Clone ID: PAT_MRT4530_54059C.1.pep
MEEDEVEDDNIPDFAQFVGFEGNQTGEEEIAADGNDVADDLGQMLQDAREDCESEKEAHKLDKMLEDHRTSLYPGCEQGHKKLDTTLELLQWKAKNGVSDKAFGDLLKLVKNILPGGNKLPETTYEAKKIVCPLGLEVHKIHACPNDCILYRGEEYENLEACPVCKALRYKIRRDDPGEVDGQLTKKRIPAKVMWYFPIIPRLRRLFRNKGNARMLRWHAEERQQDGMLRHPADGSQWRNIDRKFKEFGKDARNIRFGLSTDGMNPFGEMSSGHSTWPVTMCIYNLPPWLCMKRKYIMMPIIIQGPKQPGNDIDVYLRPLVEDFKQLWKKEGVPVWDEDKQEEFNLRALLFVTINDWPALSNLSGQSNKGYKACTHSNHPVRKKGKHFEHKADHRTKPKHRSGKTVFAMVKDLKVVFGKGPGSQHIESEDGHAAMWKKNSIFWELPYWEFLDVRHAIDVMHLTKNLCVNLLGFLGVYGKSKDTLEARNDLKHMEQRGDLHPEPKEKGSHYLSPASYTLSKAEKESMFECLESIKVPSGYSTNIKRIISTKEKKFTNLKSHDCHVLMTQLLPVVIRGILPDNVRATITKLCAFMNAISQKVIDPDRLDALQNEVVQCLVSFELIFPPSFFNIMTHLLCHLVKEIRILGPMYLHNMFPFEKYMGVLKKYVRNRARPEASIAKGYGTEEVIEFCVEFIEDLRPIGVPESRHEGRLRGKGTLGRKAIMTVDNNLFRKAHFTVLQHSSLVAPYIEEHLALVRARNIGKSDVWITRHHIDTFPAWLRQHLMGNESINQQLAFLARGPSGSIATFQGYEINGYTFYTRAQDMKSTNQNSAVRVDAMGHDGTTATYYGAIEDIWELDYGPLKVPLFRCQWVRLTGGGVMIDDSGMTTVDLNKVGYSDEPFVLANDVTQVFFVKDMSSKGKKGRGPDEPKRQVVLPGKRKIVGVEDKTDEDYDQLDGQPPFTVTIDPSILLSNEDTPYSRSDHKEGTIVRRKYVRSTVTADGKSPHRRRRISPSSRARRPRRRLRLLRCRRFSGLRAAASPFMHLDLSDLDLSPSPSTPPPSTPRNAAAACQRHAAAAVATPPPPSPPRAQCRRRHATPPPPRHATPXAATAPQRHAAAAVATPPRQPPPRCRHTAVNERERERSNERERERIRQRTLPRQRERERERSNERERERERSNEDKRERGNMADRDEEQILYDTIAEGSSQYWNEEEGNEDPNQYLNEEGNVERDAEGNQQGHVERDVEGNQEEEASGSQPSVGQKRARGQRGAAKKLEGRHIITEVEEDGRPSAPAEAAKNYVRHSGWVVRDNVPVSTVYWRRTRARGDHESFVPDSEKEMLWTTMLETFTLPAGTEDKVKRWTLKKMAEQFQSFKGDLYQKYILKGQTPNFDTFPKLRDHWDEFVAYKTGEQGKAMMERNKENAAKKKYHHHLGSGGYSVAMPKWEQMEASLIERGIEPATANWPERSKFWYYAHGGTLNPADGSLVFGYQIQEAARRLTDAVEASSQGTFRPDRDRDELTLALQTPEHPGRTRGKGVIPWKIGFKEDIHTYRSRMRSKRDTEAKIADLEFRVSSYELNMQEEVARKVASGMAIPTDPSGTYHCRPIPAGYSKVEVELVEGAYEDLELDYPGRDGSCTVSSSCSASTVSTSGSSIDSSGSCTDSSSCSHTYSPASSSSGTFKVKAPPAPPLAHIRATKKAKVDAAKNKDPGYDCTQEELDAYVASEVKRQFKPRSPEKKIPIDLSVRNFFRGMSASVKEAIKLSDYERTLKKASSGKSKPVPQLGEQPNQEIEPLVTGKEMTIEQFITDTGLTTDQLLGVAPIEKAEVKYMYELGKTLVKPELLQSLPTQMYKFHQLYMEMSATGREMIGARIRDTDFLQGDDILWINFRGIYELYQLDALDVSIMSCWILMEIQRARRRRVFDTGFIDPRKVNVAMLDQYPQETEDNLVHLLKAQHYKTFILLPYNTEFHWVLLLIDLEACTVNWAVPSCAAVNPAAGQPNTSADPTPSRPPSPPVPRKGSSYASDQAVTHSRLWRWLKGEAREALAGLGSASRPTGRPRRGGGEARPPTAVTGGAGSGGDGRKEAAHGRSSGVAGARGKMGFRWGSGDARRWSDMAHTAAELAAAAAWHGGGPSGDGTRPEMGGGGGARRARRDGGRGRGRGRSAPRLVYAYSHAATGFAACMTKHQAAHIADHPGVLAIYPDEHLQLHTTQSPSFLRLSPSVGLVQASNGGGTGAVIAILDTGIYPKGRKSFTADSSFPPPPRTFRGHCVSTRSFNATAYCNNKLVGAKFFYKGHEAKMGHLINETQESKSPLDTEGHGTHTASTAAGSAVPGANFVGYANGTAQGMAIRAHIASYKVCWRDDGNASCATSDILAGMNEAIADGVDVISLSLGGLKPQLYNEPTSLGAFNAIRRGIVVSTSAGNDGPGTYTANNLAPWVITVGASSIDRRFPAHVVLGHNRGTYIGTSLYFGQNTAGSFLPLVYGGDAGSALCEYGMLSSNMVTGKIVLCYGTKNTTNPIVQEAAVQQAGGVGAIISIAPEYGDFLQSFADILPTSTITFKDTETIHSYTQSVADPVARIDFLGTVINQSPSAPRVAAFSSRGPNRFAPEILKPDMIAPGVDILAAWTGEMSPTMANVIDNRRVEFNIISGTSMACLHMSGIAAMLKVAQPSWSPAAIKSAMMTTAYNVDNDGNAIKDMATGQAASPFELGSGHVDPNRALDPGLVNNTTADDYITFLCSLGYNSSQIALFTNDGSTTDCSTRPRRSVGDLNYPAFSVVFVRSGEQVTQRRAVTNVGANTNVMYNVTITAPPGTTLTVTPTRLAFDAQRRTLDYSITVSAGATSSSEHHTNC

SEQ ID NO: 154174 - protein, 161 aa, Oryza sativa
  Clone ID: PAT_MRT4530_5405C.1.pep
MTFGGGGAQCTLRRRRVERSSATVAAVGAAEVAHGEGIGGDGTRRLRRLHAGMSKKWSSGGLTRSGRPRWQWRMSLEMLRARSGRVAAAGISRTTSGRAALDQRGSEVGMGSGQCRGGWRSELLPPAVKAAASDETTPGRVLQEEMRPPLGRWGIGQLGKE

SEQ ID NO: 154175 - protein, 74 aa, Oryza sativa
  Clone ID: PAT_MRT4530_54060C.1.pep
VLFLVFFLAAALLFVLLLLFSVCPLASALFLFGSAPRYSFFLGMRRHTAFLVLPHLLVFVARLLHGLSSLLLFV

SEQ ID NO: 154176 - protein, 1832 aa, Oryza sativa
  unsure (1)..(1832): unsure at all Xaa locations
  Clone ID: PAT_MRT4530_54061C.1.pep
MEEDEVEDDNIPDFAQYVGFEGNQTGEEELAADGNDVADDLGQMLQDAREDCESEKEAHKLDKMLEDHRTSLYPGCEQGHKKLDTTLELLQWKAKNGRKYIMMPIIIQGPKQPGNDIDVYLRPLVEDLKQLWKKEGVPVWDEDKQEEFNLRALLFVTINDWPALSNLSGQSNKGYKACTHSNHPVRKKGKHFEHKADHRTKPKHRSGKTVFAMVKDLKVVFGKGPGSQHIESEDGHAAMWKKNSIFWELPYWEFLDVRHAIDVMHLTKNLCVNLLGFLGVYGKSKDTLEARNDLKHMEQRGDLHPEPKEKGSHYLSPASYTLSKAEKESMFECLESIKVPSGYSTNIKRIISTKEKKFTNLKSHDCHVLMTQLLPVVIRGILPDNVRATITKLCAFMNAISQKVIDPDRLEALQNEVVQCLVSFELIFPPSFFNIMTHLLCHLVKEIRILGPMYLHNMFPFERYMGVLKKYVRNRARPEASIAKGYGTEEVIEFCVEFIEDLRPIGVPESRHEGRLRGKGTLGRKAIMTVDNNLFRKAHFTVLQHSSLVAPYIEEHLALVRARNIGKSDAWITRHHIDTFPAWLRQHLMGNESINQQLAFLARGPSGSIATFQGYEINGYTFYTRAQDMKSTNQNSAVRVDAMGHDGTTATYYGAIEDIWELDYGPLKVPLFRCQWVRLTGGGVMIDDSGMTTVDLNKVGYSDEPFVLANDVTQVFFVKDMSSKGKKGRGPDEPKRQVVLPGKRKIVGVEDKTDEDYDQLDGQPPFTVTIDPSILLSNEDTPYSRSDHKEGTIVRRKYVRSTVTADGKSPRRRRRISPSSRARRPRRRLRLLRCRRISGVRAAASPFMHLDLSDLDLSPSPSTSSPSTPPPSTPRNAAAACQCHAAAAVATPPPPSPTRAQCRRRHATPPSPRHATPPSPRXPQRHAAGGVATPAGQPPPRCRHTAVYERERERSNERERERTRQRTLPRQRERERERSNERERARXMADRDEEQILYDTIVEGSSQYWNEEEGNEDPNQYLNEEGNVERDAEGNQQGHVERDVEGNQEEEASGSQPSVGQKRARGQRGAAKKLEGRHIITEVEEDGRPSAPAEAAKNYVRHSGWVVRDNVPVSTVYWRRTRARGDHESFVPDSEKEMLWTTMLETFTLPAGTEDKVKRWTLKKMAEQFQSFKGDLYQKYILKGQTPNFDTFPKLRDHWDEFVAYKTGEQGKAMMERNKENAAKKKYHHHLGSGGYSVAMPKWEQMEASLIERGIEPATANWPERSKFWYYAHGGTLNPADGSLVFGYQIQEAARRLTDAVEASSQGTFRPDRDRDELTLALQTPEHPGRTRGKGVIPWKIGFKEDIHTYRSRMRSKRDTEAKIADLEFRVSSYELNMQEEVARKVDERMAAHRSHDPQPTIPPAMVSPSGNRSSCASTGQVASGMAIPTDPSGTYHCRPIPAGYSKVEVELVEDAYEDLELDYPGGDGXYIILPGRQAASRSXSTPQDPAPTPPRAPTPTPPQAPLPAPSKSRAPPAPPLAHTRATKKAKVDAAKNKDPGYDCTQEELDAYVASEVKRQFKPRSPEKKIPIDPSVRNFFRGMSASVKEAIKLSDYERTLKKASSGKSKPVPQLGEQPNQEIEPLVTGKEMTIEQFITDTGLTTDQLLGVAPIEKAEVKYMYELGKPLVKPELLQSLPTQMYKFHQLYMEMSATGREMIGARIRDTDFLQGDDILWINFRGIYELYQLDALDVSIMSCWILMEIQRARRRRVFDTGFIDPRKVNVAMLDQYPQETEDNLVHLLKAQHYKTFILLPYNTEFHWVLLLIDLEACTVNXWYRFHHLVRGKGRERL

SEQ ID NO: 154177 - protein, 104 aa, Oryza sativa
  unsure (1)..(104): unsure at all Xaa locations
  Clone ID: PAT_MRT4530_54062C.1.pep
RFVDTRKTTPGFXVVGKTCQALGGXAMNHLLGLGDAGMVMDNHIQAVGILTNAVKALQHVLQCAWDIEVTTIDFMEVQEAITTHVAIILQDNMGTDTMATAVRL

SEQ ID NO: 154178 - protein, 48 aa, Oryza sativa
  Clone ID: PAT_MRT4530_54063C.1.pep
MAVVRGSQRHGHSLPTLKATSAPYVSGPANAHDRYCYLALAEDTHMVK

SEQ ID NO: 154179 - protein, 58 aa, Oryza sativa
  Clone ID: PAT_MRT4530_54064C.1.pep
LCTCCADGRGVGRRKLAICPRLRLRRDIVDRWLRMSWLINRTVLKQHRWQIHLDYSYF

SEQ ID NO: 154180 - protein, 90 aa, Oryza sativa
  unsure (1)..(90): unsure at all Xaa locations
  Clone ID: PAT_MRT4530_54065C.1.pep
ARHKTGIAVGPFLQAPEFLLRIPHVCGQFELMAHRSRYQDITIVQAIARWIRLXWAVDRYLDRNLAXDRALASASWPYTCGIYTRYYGAR

SEQ ID NO: 154181 - protein, 138 aa, Oryza sativa
  unsure (1)..(138): unsure at all Xaa locations
  Clone ID: PAT_MRT4530_54066C.1.pep
LHLDSSQYLLVSALGDQGRSDRAPSGGLTGVGRPVWPASEPRSDWPRGFRSCTGWVLHGWKTXSRRSRNRLPPPRQLVEVLLGNLSEEITEEVRRRFVSGLEFTTFGVKEELPLVIEAWVVLSVCRLPPCPPLTKWHA

SEQ ID NO: 154182 - protein, 1699 aa, Oryza sativa
  unsure (1)..(1699): unsure at all Xaa locations
  Clone ID: PAT_MRT4530_54067C.1.pep
MADRFLTLKNLASVFLQQGSAFYDNALRCYLQAVELDANDSVVWNHLGTLSCSMGNCMEKLLEVLIAICDEVACLSVAKLILRSWPSHHRALHVKKTIEDAEPVPFAPRGIDILEPKHAKLKFCNKRKSGDDETHHETVTKKSRQNAKLQLTEAKWMALLDGILSFLSSNNTKSNEDHGANTESQCDTKRSINGFAYNMMDVSLSTETLKTMESAGGNEHDLYHDGESVLSHDCRTAVKEKDTNSDREHPHERRSTRLERLRSRKSGKDEHESNGKDISHAITQFLDSFILKRTSIPEKIDCSGNGDASTPEALTYTPDREASDVKQFLSKISKNCGPLHIGYMLLEEIAQTNIPFQDYFVKFIELDKITRGWAQDRSAQCSLFLAELYYDQALCSGSPLASSELSNSSYHLCKVIQSVALELPFRTSDGAAKSTNLDLNMESHMEEVCSSDKTEKNASNMSRNSVNSVNSVSSNILCDETSECDSSSNTNCVFWIRFFWLSGCLSLSSDCKEKAYKEFNIALSLMRSSNEAKINREFVLLPHNKLVKLLTADRILREINLVKLESLLWHNDENINKITHTEFMELLPPLLLSTKDVYVGSAYGPPRESEKVISLELGALDVLISACENAKPMNIQVYLDSHRRKMQVLTVAAGMVGSVTTNEGKKSSDIEFMETMNRNRLESVVEAVKDVSRNASKAKAFVDQCDNPDGQDGFSSLVSIVGDFQSLLLTIMCAAVKMILSRKHSCTGTSYQADQLESSCLVDAAIAFCKLQHLDPMISIKIQALHDLLAEYGLCCAGRDGEGEEGTFLKFTIKHLMALDVKLKSQLNPNGMEEDAAENDRAEDVTTDEASVCDNKHNSEDEEESELDEIQSSIDSALDQAFFCLYGLKINPDSCSEDDLAVHKNTSRGDYQTKEQCADVFQYVLPYAKALSFGKKHQLQRIVPWSFFIHFLQKTGLVKLRRVLRAIRKHFPQPPYDLLVNNPLDNFLDGPDSCEKILSEIYETNGSKEAVLNVLFPGENGYEAFKKLSNASSEPYSEVYGNLYHYIAQVEDISASDKYTGFVLKKEGGEFVQQSANLFKYDLLYNPLRFESWQKLANLYDEEVDLLLNDGSKHISILDWRTNTTLIQRVEMGRRHSRRCLLMSLALAKTASDKAQMHEMLALVYYDSLQNVVPFYDQRATLPVKDSTWETFCRNSMKHFQKAFELKAEWLYAFYLGKLCEKLGHSPAEAFSYYNKAVVLNPTAVDPVYRMHASRMKLLYTQGKQNLDAXRRKNPNIGGSKKNLEVSLSESSRKFITCIRXFALCLGDIVPVGLGKYLQVLTSAIRNPEIRRVSGDASVENLLEKMFGVFMDHANLWADISTIPEVNSPELSESNLYSYIHQYIHLLESDVRLDVLEGLNEKIRKRFKTPKLSNSNFAKICKHASLAWCRCILIKLASITPLPESMETTDQPAPLSSGLVLYIDLQPDELLISSPDGPAQFKGLDMNWFETFNRIKNIPIRQTSEDNMETAVTVMKSTYNFYRESSCGTFPSGINLYTVTPSQPPVEGLQQAPDAIENLDLSIPRKLLLWVYTLVHGRYSNISAVVKYCDEMKSRSKRGAPTSTATASQQTTVSPQVGSKEKSTHIDPSEAQEAAAPTPAPAAAIAPSQQEAGVAVASSPHEAQKTAAAAAASQLTRSSSSRAMESTGQDGGRGNDGTA

SEQ ID NO: 154183 - protein, 88 aa, Oryza sativa
  unsure (1)..(88): unsure at all Xaa locations
  Clone ID: PAT_MRT4530_54068C.1.pep
MVFCRTGLWREPRGRGGADKRPPPVSDSRWRAHGGPGPRVEXARAHHVAATWWPGQPSREEVAPTWRHDGTDRGSTGKQRGRPRFIEV

SEQ ID NO: 154184 - protein, 1302 aa, Oryza sativa
  unsure (1)..(1302): unsure at all Xaa locations
  Clone ID: PAT_MRT4530_54069C.1.pep
YDQALCSGSPLASSELSNSSYHLCKVIQSVALELPFRTSDGAAKSTNLDLNMESHMEEVCSSDKTEKNASNFWIRFFWLSGCLSLSSDCKEKAYKEFNIALSLMRSSNEAKINREFVLLPHNKLVKLLTADRILREINLVKLESLLWHNDENINKITHTEFMELLPPLLLSTKDVYVGSAYGPPRESEKVISLELGALDVLISACENAKPMNIQVYLDSHRRKMQVLTVAAGMVGSVTTNEGKKSSDIEFMETMNRNRLESVVEAVKDVSRNASKAKAFKHSCTGTSYQADQLESSCLVDAAIAFCKLQHLDPMISIKIQVDLIVAVHDLLAEYGLCCAGRDGEGEEGTFLKFTIKHLMALDVKLKSQLSRCFLANLLWYHVSVPIXTRICLLSLSXLLDPNGMEEDAAENDRAEDVTTDEASVCDNKHNSEDEEESVPLTLKFSVFAELDEIQSXIDSALDQAFFCLYGLKINPDSCSEDDLAVHKNTSRGDYQTKEQCADVFQYVLPYAKALSKTGLVKLRRVLRAIRKHFPQPPYDLLVNNPLDNFLDGPDSCEKILSEIYETNGSKEAVLNVLFPDHYIAQVEDISASDKYTGFVLKKEGGEFVQQSANLFKYDLLYNPLRFESWQKLANLYDEVCLFGLTCCXNDGSKHISILDWRTNTTLIQRVEMGRRHSRRCLLMSLALAKTASDKAQMHEMLALVYYDSLQNVVPFYDQRATLPVKDSTWETFCRNSMKHFQKAFLHRAEWLYAFYLGKLCEKLGHSPAEAFSYYNKAVVLNPTAVDPVYRMHASRMKLLYTQGKQNLDAIQVVADYTYKQSTKEDVLSMLQSINNVKNSPSDHNDKCVLDSTAENKFVDPDLLDKVWHILYDDCLCALGTCVEGELKHFHKARYKLAQGLYRRGEAGDLERAKEELSFCFKSTRSSFTVNMWEIDGSVRKGRRKNPNIGGSKKNLEVSLSESSRKFITCIRKYMILYLNLLEKNRDLWTLERAYTYLRTDKRFALCLGDIVPVGLGKYLQVLTSAIRNPEIRRVSGDASVENLLEKMFGVFMDHANLWADISTIPEVNSPELSESNLYSYIHQYIHLLESDVRLDVLEGLNEKIRKRFKTPKLSNSNFAKICKHASLAWCRCILIKLASITPLPESMETTDQPAPLSSGLVLYIDLQPDELLISSPDGPAQFKGLDMNWFETFNRIKNIPIRQTSEDNMETAVTVMKSTYNFYRESSCGTFPSGINLYTVTPSQPPVEGLQQAPDAIENLDLSIPRKLLLWVYTLVHGRYSNISAVVKYCDERTKAAWSLPL

SEQ ID NO: 154185 - protein, 88 aa, Oryza sativa
  unsure (1)..(88): unsure at all Xaa locations
  Clone ID: PAT_MRT4530_5406C.1.pep
MNRVKQGHLTKRNEEEWCXTKGHMGGYATEETPEXMPLNHNHATKLEDHLTEGRKKETWARIKTDGKKKMTGEYNNQSGARVHVQEHT

SEQ ID NO: 154186 - protein, 1856 aa, Oryza sativa
  Clone ID: PAT_MRT4530_54070C.1.pep
FLTLKNLASVFLQQGSAFYDNALRCYLQAVELDANDSVVWNHLGTLSCSMGNCMEKLLEVLIAICDEVACLSVAKLILRSWPSHHRALHVKKTIEDAEPVPFAPRGIDILEPKHAKLKFCNKRKSGDDETHHETVTKKSRQNAKLQLTEAKWMALLDGILSFLSSNNTKSNEDHGANTESQCDTKRSINGFAYNMMDVSLSTETLKTMESAGGNEHDLYHDGESVLSHDCRTAVKEKDTNSDREHPHERRSTRLERLRSRKSGKDEHESNGKDISHAITQFLDSFILKRTSIPEKIDCSGNGDASTPEALTYTPDREASDVKQFLSKISKNCGPLHIGYMLLEEIAQTNIPFQDYFVKFIELDKITRGWAQDRSAQCSLFLAELYYDQALCSGSPLASSELSNSSYHLCKVIQSVALELPFRTSDGAAKSTNLDLNMESHMEEVCSSDKTEKNASNMSRNSVNSVNSVSSNILCDETSECDSSSNTNCVFWIRFFWLSGCLSLSSDCKEKAYKEFNIALSLMRSSNEAKINREFVLLPHNKLVKLLTADRILREINLVKLESLLWHNDENINKITHTEFMELLPPLLLSTKDVYVGSAYGPPRESEKVISLELGALDVLISACENAKPMNIQVYLDSHRRKMQVLTVAAGMVGSVTTNEGKKSSDIEFMETMNRNRLESVVEAVKDVSRNASKAKAFVDQCDNPDGQDGFSSLVSIVGDFQSLLLTIMCAAVKMILSRKHSCTGTSYQADQLESSCLVDAAIAFCKLQHLDPMISIKIQALHDLLAEYGLCCAGRDGEGEEGTFLKFTIKHLMALDVKLKSQLNPNGMEEDAAENDRAEDVTTDEASVCDNKHNSEDEEESELDEIQSSIDSALDQAFFCLYGLKINPDSCSEDDLAVHKNTSRGDYQTKEQCADVFQYVLPYAKALSFGKKHQLQRIVPWSFFIHFLQKTGLVKLRRVLRAIRKHFPQPPYDLLVNNPLDNFLDGPDSCEKILSEIYETNGSKEAVLNVLFPGENGYEAFKKLSNASSEPYSEVYGNLYHYIAQVEDISASDKYTGFVLKKEGGEFVQQSANLFKYDLLYNPLRFESWQKLANLYDEEVDLLLNDGSKHISILDWRTNTTLIQRVEMGRRHSRRCLLMSLALAKTASDKAQMHEMLALVYYDSLQNVVPFYDQRATLPVKDSTWETFCRNSMKHFQKAFELKAEWLYAFYLGKLCEKLGHSPAEAFSYYNKAVVLNPTAVDPVYRMHASRMKLLYTQGKQNLDAIQVVADYTYKQSTKEDVLSMLQSINNVKNSPSDHNDKCVLDSTAENKFVDPDLLDKVWHILYDDCLCALGTCVEGELKHFHKARYKLAQGLYRRGEAGDLERAKEELSFCFKSTRSSFTVNMWEIDGSVRKGRRKNPNIGGSKKNLEVSLSESSRKFITCIRKYMILYLNLLEKNRDLWTLERAYTYLRTDKRFALCLGDIVPVGLGKYLQVLTSAIRNPEIRRVSGDASVENLLEKMFGVFMDHANLWADISTIPEVNSPELSESNLYSYIHQYIHLLESDVRLDVLEGLNEKIRKRFKTPKLSNSNFAKICKHASLAWCRCILIKLASITPLPESMETTDQPAPLSSGLVLYIDLQPDELLISSPDGPAQFKGLDMNWFETFNRIKNIPIRQTSEDNMETAVTVMKSTYNFYRESSCGTFPSGINLYTVTPSQPPVEGLQQAPDAIENLDLSIPRKLLLWVYTLVHGRYSNISAVVKYCDEMKSRSKRGAPTSTATASQQTTVSPQVGSKEKSTHIDPSEAQEAAAPTPAPAAAIAPSQQEAGVAVASSPHEAQKTAAAAAASQLTRSSSSRAMESTGQDGGRGNDGTA

SEQ ID NO: 154187 - protein, 84 aa, Oryza sativa
  unsure (1)..(84): unsure at all Xaa locations
  Clone ID: PAT_MRT4530_54071C.1.pep
TNPPETALTSNGPSAFMPTPIXVVLDFIESLSRYLSNASGVMSXNSSRVNGNCQNKTVLLLKPNLGLGPCNRLGPSRKCLPPPP

SEQ ID NO: 154188 - protein, 36 aa, Oryza sativa
  Clone ID: PAT_MRT4530_54072C.1.pep
YSWRLPPRRDIDGVKPTKSLTAARGVTGGSGTSKAG

SEQ ID NO: 154189 - protein, 165 aa, Oryza sativa
  unsure (1)..(165): unsure at all Xaa locations
  Clone ID: PAT_MRT4530_54073C.1.pep
MILLSRRSNHNHHPPICSQFKHQIDQQEIIVFTDPTSLVIFINXGNTPPXLVHIYGHHASSSTTSTASSTTATTASPMTASITSSTTTTTASTRHHYCDDCYAMQKDQPKWWPQSQXRPLTYTRRSQWHPLISTRCKMLTIAVFVXHHGINIFFPFGYLRLHQLP

SEQ ID NO: 154190 - protein, 137 aa, Oryza sativa
  unsure (1)..(137): unsure at all Xaa locations
  Clone ID: PAT_MRT4530_54074C.1.pep
SFLIEYYGRVGGISYDNYETTWKATFDDARLWPEHRMMDDMVAYALKSEGGCDWATMNYHEDLPRDLMDSRLLIDRTNRHYFCRALIGRTIEAEADHGTDTRHYREHLPRSKSXAYSIAGVNARTAGLVHLAKVDDN

SEQ ID NO: 154191 - protein, 46 aa, Oryza sativa
  Clone ID: PAT_MRT4530_54075C.1.pep
LGLCLINYLISYPGCWILKYRYLLVGSIMFGCSFSSECDDNNPRPK

SEQ ID NO: 154192 - protein, 106 aa, Oryza sativa
  Clone ID: PAT_MRT4530_54076C.1.pep
MRRRLLNDRLLLAERSFLQADGLQGRGWFKHLMYSPPEDYESKLSFFPGVADAISRSSNRSAKEQQAAVRHEVRKISRAIQRAADVLRGEFSNRNESLYSSLSVAP

SEQ ID NO: 154193 - protein, 83 aa, Oryza sativa
  Clone ID: PAT_MRT4530_54077C.1.pep
ADSPLDIFLKSLGLEKYSITFQAEEVDMAALRHMTDSDLKALGIPMDIGGTKLIWKLKVGVLSGSPEEDHACLGIESVGRAGV

SEQ ID NO: 154194 - protein, 403 aa, Oryza sativa
  Clone ID: PAT_MRT4530_54078C.1.pep
MADDAASEQATDVAAAGAADEGQPPAMSKSARKKLLKQERQAAQKAARKAAEKERRRADIERRRREWEEALAAAPSEEARAEMVEARRQTRRERVGRRAEERGARAERLRRAAEGAGQKVVLDLEFGDLMRPNEIHSLTQQIMYCYAVNGRSTNPAHLWLTGCNGEMATHLQRIPGYDKWMIEKEAKSYLEAFEDRKENLVYLTADAETVLDDLDMSKIYIIGGLVDRNRWKGITLKKAVDQGIQCAKLPIGNYLKMSSSQVLTVNQVFEIMLKFVETRDWKTSFFHVIPQRKRGEAEAGNDGVDISMNNVDAAEGAENQGDLTKVFDEDVDDDDVVDEELQEEDTDMAKKKQCIRHENGEAEDASTRPAEDHSPGAAAETTTPTGGALPQAEQSKESNGADD

SEQ ID NO: 154195 - protein, 364 aa, Oryza sativa
  Clone ID: PAT_MRT4530_54079C.1.pep
MARYLLRPPTAAAAAAAAASSHRRNGTTSRRGPVLGLRALASRAGKARPVMAVASEQPAARGKCPKVAAPTTGPIPAAELLGVIQDAARAGAEVIMEAVNKPRNIHYKGVADLVTDTDKLSESVILEVVRKTFPDHLILGEEGGLIGDALSEYLWCIDPLDGTTNFAHGYPSFSVSIGVLFRGKPAASTVVEFCGGPMCWSTRTVSASSGGGAYCNGQKIHVSKTDKVEQSLLVTGFGYEHDDAWVTNINLFKEYTDISRGVRRLGSAAADMSHVALGITEAYWEYRLKPWDMAAGVLIVEEAGGMVSRMDGGEFTVFDRSVLVSNGVVHDQLLDRIGPATEDLKKKGIDFSLWFKPDKYPTDF

SEQ ID NO: 154196 - protein, 225 aa, Oryza sativa
  unsure (1)..(225): unsure at all Xaa locations
  Clone ID: PAT_MRT4530_5407C.1.pep
SAFDVILADPIPAKGEILTQISNFWFKKLEHIMPNHFTGDSVFDVLAKEEAEAIQHRAVVCKRLTPVKIESIVRGYLTGSGLKDYQQTGSICGLALPAGLVEASKLPQPIFTPSSKAEVGDHDVNISYEECERXYALTKGIIICDTKFEFGLDENGVLTLMDEVLTPDSSRFWSVETYQEGINPPSFDKQFVRDWLANSGWNKQALSXKTPIDVIEKTPHPLMIL

SEQ ID NO: 154197 - protein, 86 aa, Oryza sativa
  Clone ID: PAT_MRT4530_54080C.1.pep
PSLFYELLQSSQYVQFLCDSVILDAGFPSLIALISHCPFPIVVLYDNQVTCKQLVQFFHAIRAPIRPSVPGTPVVVKVVHHRPLLQ

SEQ ID NO: 154198 - protein, 99 aa, Oryza sativa
  Clone ID: PAT_MRT4530_54081C.1.pep
AGVNIRNNTPTIQALNSRLPIFFSTAYKPRVHSLNHTGILLLHKNILLAKGVAWAYSYAFAFAYTPSSYAGHHARRPPPSSLMLSYESIRQACYPSKDT

SEQ ID NO: 154199 - protein, 110 aa, Oryza sativa
  unsure (1)..(110): unsure at all Xaa locations
  Clone ID: PAT_MRT4530_54082C.1.pep
HPLPGRSSSPIAASSTVHATSELVAGGHILCCLDELARYVLVVXRADDGSEGSTFVLYFLICRRVRVGILLSYAGAGAAGERLAVVAQCVDGAGVGATAGATGEELAVAG

SEQ ID NO: 154200 - protein, 48 aa, Oryza sativa
  Clone ID: PAT_MRT4530_54083C.1.pep
PWADQLRAAVASALTCTGDMRGRMLVSERSPCRFYLAPCVLNCLPLYI

SEQ ID NO: 154201 - protein, 220 aa, Oryza sativa
  Clone ID: PAT_MRT4530_54084C.1.pep
SPWLPEYDEWPFDIVNNDVVCSGFLPTAEPTLRDGIVAGESPSTQHLSNATTEAKTPTKSPIMPPPHGSGSPFTPRSNPCYRCGEDGHWSRNCPKPASSPLNSPCYNCGKLGHWRARGGLLRCLSIICFVNHFLHECKVQTCYCYNCYFAPFFFSMMNWKAIGCRSLNLSLKFFLESFFQRWSSPLPFIRSETETWDDDRCRDLTRTYEDKKKNTNRWMD

SEQ ID NO: 154202 - protein, 129 aa, Oryza sativa
  unsure (1)..(129): unsure at all Xaa locations
  Clone ID: PAT_MRT4530_54085C.1.pep
AHAXTRGKQHKHQIEEGEHRRGGQPRGGGVGKDHPTPRAQERQKAKHACSPRGTHTEELHKWRARQRLPHRTRRSALTDNRETGQRTQRTQRGNGQKATGRNTNPDREIKAREVPTQAQGERPSTSHRN

SEQ ID NO: 154203 - protein, 170 aa, Oryza sativa
  Clone ID: PAT_MRT4530_54086C.1.pep
MGSSRQKAFHMVRKRGRRQHVDFRYPAAMSIEEVCDPDEERVVAVFHDCLAAHGLLLDNHDDYHIMLKEFCYVLMVRSSEQGYHAVDQEGQPMYIKKLGKINRNKLMQITTVDSYNLHQLACCRDLIADFLLPTVQLTCFLTANVQTTTTTSSTSLFLASFHKVTHIYMD

SEQ ID NO: 154204 - protein, 263 aa, Oryza sativa
  unsure (1)..(263): unsure at all Xaa locations
  Clone ID: PAT_MRT4530_54087C.1.pep
MAGIVDFEEGWRLLATSLAKQRSIIDGSMSKSSSEDDNMQLYMMVYNMCTQKPPHNXAQQLYERYKTDIDGYNSSMVLPSMRQINGETLLKGLVDRWRNHKKIVISETRFFFYLDRYYILRKSLVPLEQLNLCSFRDQVYSELKDKITRTVVDMINDERDGKVIDRDLLKDVLDVYVQIGLGMECYEVDFENAFRESTRNYYSNKAQTSILECNGADSPEYMLKAVECLQAELERVSHYLHSSTEPKLMQVSVEYRPNQAAAR

SEQ ID NO: 154205 - protein, 66 aa, Oryza sativa
  Clone ID: PAT_MRT4530_54088C.1.pep
MWSDLAGGLLSLQPPLSLAVERKRKSVKLEIKTIEEDRPSIIIATVKMKIKSSELKLNRKGKSFRK

SEQ ID NO: 154206 - protein, 220 aa, Oryza sativa
  Clone ID: PAT_MRT4530_54089C.1.pep
MASSAPTPPPLLPVTNPAAAGSSPAATAVGSDAPIATPAFRLFLSKLSDSARRSLSDRRPWTELVDRSAFSRPDSLSDATSRLRRNLAYFRVNYAAVVAFALGASLLAHPFSLLVLLGLLAAWCFLYLFRGSDQPVVLFGRTFSDRETLLGLVVASFVAFFFTSVASLIISGLLVGGAIVAVHGACRMPEDLFLDDADAASGNSAAQGLLSFLGAPGSRV

SEQ ID NO: 154207 - protein, 1882 aa, Oryza sativa
  unsure (1)..(1882): unsure at all Xaa locations
  Clone ID: PAT_MRT4530_5408C.1.pep
MMSGNEIMPISLDDFEGEDRKSMEEYIKEMTQEALMRACTRTRQGVIIKPEPLPKLAPDLVSNDEVIQSTQQQIASTIDSSMIVFKNKLDATFKGKSDEFLRIKFGPLMDDYTLKDKASTTANQPPIDQTGSKTDGAAHTVDLTRPDGRSNWDLAVGPTGQTAAEPSVGSDCVTSLDNDGIAEPNGGSDCVASLDDSIIEDIAELDDGSDCITRENEIALSPKTESQIGHVDVGKDNDNVLRDSSEIGSKEAMHTYQRPYPEHVDSVPYPQGFEVPNFTKFTGEDARTTMEHIGQFIDQCGKAGSNDLLKLKLFPLSLSNFASTWYSLLAPNSISTWSQMEHEFHDYFKDASLMEQRPIDTSSVTCETISVTSMPKTGIISDVLPKNRIKNAMAKDHKVAKGESSSSQKTKKPKLIFEMFMAKYKKGLAGQRFNNQTSDSKRPRSSRRKRFGQTPKQSEPSTIPTPYKPPVVMPWYPYPMSLYGYPFMYYMPWMSQFSTPFHQGWEESPRTVPNHSSNSRQDRFPQKNRSGGSKVKKFKKMWAKEIEADAMTANIGGLIETAGLSNRQSTAGLTDLTGQSDRRLVAGLTGLRGRSDRGAFEKSRKIESNIGASTSTKNMKNHCLAPGKQPQPKCIPSGLSRSQKRRLQRLRAIGQKEKEAEDVENKTCNNLEPRKAPRQVWRSKEVKVKIPVISHSRDKSNLMGEESSVIRDKSPSHDAMTVSAVSVLPSKSRNLESRFCLGGKTLICSLGNQEKMNGDGYNITSLSRRLLDAKARYLKDPTLKGDRKIQRQAFKYTLLDGDLYRQNIDGVLLKCLDKDQSKVAMGEGHRFVLVATDYFTKWAEAVPLNNMTHTEANGQAESSNKTLLKLVKKKIEEYPKWHEVLSEALWVHRISKHSATKVTPFELVYGQEAVLPEEVNLGSLRYIKQDDLSSEDYKTLMGDNLDEVIDRRLKAFEEIEKEKKRVAKVYNKRMKAKLFQVRDLVWKTILPLGTRSKEFAMSYMAEINQGISSSTMMSGNEIMPISLDDFEGEDRKSMEEYIKEMTQEALMRACTMTRQGVMTKPGPRPKFASDFTGYYPGSQTGTQAGLTAPLDVAQTGPXTGQTDAIIPIQGIDPMTNSSYLYHLRTFNPPVSTAATNPQVPPHVPNAYNDVARGYHPDTRQGQYNHIAPQTQPIRPPNPPPNQHRPDNMEEITSGIIRDKFGIETRNCAKVYQKPYPDYYDNVPFPRNYRVPEFTKFSGEDSRTTWEHESRVDDNSLNASLDDSAISCVAEPSDGSNCVNNFCNDAIAIIAEPNVGSDCLTSESEIALSPKTESQISHVDVGKDNDNVLRDSSEIESKIVMXYLEHVDSVPYPXGFEVPNFMKFTGENAMTTMEHIGQFIDQCGKVGSNDLLKLKLFPLSLSNFASTWYSLLAPNSISTWSXMEHEFHDYFKDASLMEQRPIDTSSVTCETISVTSMPKTGIVSDPLPVSFIDVGKKKGKSVIIGDPRPKNRIKNAKAEDHKVAKGESSSSQKTKKPKLTFEMLMAKYNKGLAGQXFDNQTSDSKRPRSSCRKRFGQTPKQSEPSTIPTPYKPPVSGGSKVKKVKKVWVRKEAKAPEVVTIKEESQDVQVPTGDAAKTIQAEKIEADTVTVHIGGLTEASGRSDRQTTAGLTNPPGRSNRRLAAGLTGPRGRSDRGALKVSGKIESNTGASTSPKTIKNHCLAPGKQPQPKWIPSGLSRSQKRRLQRLRAIGQKEKDAEDVENKTCNNLEPRTTPKRVWRPKEPMLDFKSLDEISKVIDQGRSDRHCTAGLTGGXRRSDQLCMTGLTGXIGRSDRYCVAVEVNLGFLQYFKQDDLLIEDYNTXLIEGNFEDVINKRLKTLXEMKILQDGVFREQSMGNT

SEQ ID NO: 154208 - protein, 46 aa, Oryza sativa
  Clone ID: PAT_MRT4530_54090C.1.pep
PPPIGGGGQGPHQPGTLPVPKGCPPPVPKNFAPPARRDDANSLYPF

SEQ ID NO: 154209 - protein, 598 aa, Oryza sativa
  unsure (1)..(598): unsure at all Xaa locations
  Clone ID: PAT_MRT4530_54091C.1.pep
LPGYFHDALISLLPKKDEAVDVKDFRPISIIHSFGKLFSKILASRLSPRLDELVAPNQSAFIKGRSLHDNFRYVQIEARALHAKRVPRLLLKVDIAKAFDMVSXPFLLEVLAQLGFSQRWRDWISLILSASSSRVLVNGVPGPWFPHRRGLCQGDPLSPMLFILVMDVLNAMLRKASDSGGFLPLNDRAIRHRASLYADDLVLFLSPVRQDLEFIQGILSVFGAASGLRTNFTKCSVTPIRCSVLDLELVQSSFPCSISEFPCTYLGIPLDLGGLGIPDLRVAGFALRVRWLWLQRSGHPYWSDLKAPIEWSVSDMFAASTFSILGDGQSTLFWTDRWIDGRSIASIAPDLLHAVPPRFRGSRTVAAGLANNSWVGDIRGALTVPVISQFLLVWDAVLPTQLSPGVEDHLVWRWTGDQCYSARSAYQAFFLGQHSFACADLLWHAKGPAKCKFFLWFAFQRRCWTADLLQKRGIDSHSACPFCAQELETANHILIDCVFARQVWLRVLSPPGWAALSPPRGSWLQDWWSSSRVCLPEHLRSGFDSLVLLVSWQLWKERNSRVFDSVLASVAVVLESIRSEGQLWSLAGVTFFGDFLGV

SEQ ID NO: 154210 - protein, 165 aa, Oryza sativa
  unsure (1)..(165): unsure at all Xaa locations
  Clone ID: PAT_MRT4530_54092C.1.pep
SSIPSTFGAGRRRPLRRSRFFLVRQELVSTHGYXNMYTRGHCNESIYRSIQLLSAHRHPLYRGFYLSSDXTWHLTRGCIGFRSPAKGTXLRSVGPGNCIVYIDVVQGCIXVHSTSWIAVVWMVYLLTYLSYVFVNLVLAYRFSSIDCFSFXGFCRYRLNRVARLD

SEQ ID NO: 154211 - protein, 87 aa, Oryza sativa
  Clone ID: PAT_MRT4530_54093C.1.pep
VRSRELINQLASLHKLMASNKAFVVFTLLMLVAASAVVDVASAGDDHYLHYIYTYAFIIQFNYNIKEYIINRSILINTSPILKYKEF

SEQ ID NO: 154212 - protein, 101 aa, Oryza sativa
  Clone ID: PAT_MRT4530_54094C.1.pep
PRRTPWRSSVPPARAYPSLHGSGALMPRPGEGLTTVGDPVLAATVHGAGQGQVQRHLDLGQGGAAPRVHQGKMGGQRGQHILPILQWRGLDHAVADHRRVQ

SEQ ID NO: 154213 - protein, 165 aa, Oryza sativa
  Clone ID: PAT_MRT4530_54095C.1.pep
MALVTVHARLAAAASSASPPLRSAASCTRLRALSTVTGTRLSIRHQQRRRWRRPRRAAAIAASLDLNEDNVRLAIDEAKAEASLSPPLLFFFPRLVPNWNLERHWQVDLAELDGPFVKLRLKGKFWHTRATVLARIGNYLKNRIPEILEVEIEDEKQLDDSPAAF

SEQ ID NO: 154214 - protein, 92 aa, Oryza sativa
  unsure (1)..(92): unsure at all Xaa locations
  Clone ID: PAT_MRT4530_54096C.1.pep
IPQAVVHCQVKQSKSNMLTRFYAHVASKEKTQLSAMLNEDPALMYKRCSLVHRLDLXLSARTEIDPVVCNEQVTEVTAGRYIDHHGTHRSSP

SEQ ID NO: 154215 - protein, 84 aa, Oryza sativa
  Clone ID: PAT_MRT4530_54097C.1.pep
GIIGDTGQNRTGVPHMPFYISGRHYMRATYAILHNRKAPTGCEHKVRADHPYRTTETHKSCPHRFLLLRGMKSSQCVRVVPIVS

SEQ ID NO: 154216 - protein, 322 aa, Oryza sativa
  Clone ID: PAT_MRT4530_54098C.1.pep
MAARPTTSDAASTMTDDDVHLSPTSICSGGGGGACVVVGGSRIKILCSFGGRIMPRPSDGALKYIGGETRVLAVPRSIPFSDLKKKVEEMFRTEVAAIKYQLVAEDLDVLVSVTCDEDLTHMLDEYDRFEAKRSPSASPRFRVYVFSSQPPVAAAVPSTSRHAGYAPPASHHHLLQHHLHHFQPDHYVATPDGSPPYAGHSHGAVSAGNSPRADAVGPDHPAVFGLKMQRVRSTPNLGSLDASPQHYHQHAADVGGGGGGMAGYMGGSSPVHAGAGHLVSQGGFHSYYHPHGQYAPAPVPVPHHAGVGRYDTRGGGGYVRGS

SEQ ID NO: 154217 - protein, 164 aa, Oryza sativa
  unsure (1)..(164): unsure at all Xaa locations
  Clone ID: PAT_MRT4530_54099C.1.pep
GGQERRRQPKQPERRRRRLGPPPLAAPPLSRSSSPPSNXRRSWSPLPSSAAPRAAAASTLLAGRRRASATAGGGRRGEVVVGTTASSTRGERAAWWQREESSGVCGASTGKRSGATPASSLSERSPASQSPSSTPALTSSQPPPATTTAVRGQEKWAAHLHQHT

SEQ ID NO: 154218 - protein, 61 aa, Oryza sativa
  Clone ID: PAT_MRT4530_5409C.1.pep
VALIGIFQVRVQRFPLKSVLTQVACIHTPVLLRRLARRALCHRARSSLYLIPLIIVTFRTL

SEQ ID NO: 154219 - protein, 115 aa, Oryza sativa
  Clone ID: PAT_MRT4530_540C.1.pep
MEMEPPLPPPALVKIQQPLIKLQMAESSGHRPPHSRCCRLQIKLSSSSKRPNPPPPILCIVLPERGREPRVEDTLSVRRRTGDGGGREDAAQRVGRRTDNGADNEGEGGTQQARG

SEQ ID NO: 154220 - protein, 82 aa, Oryza sativa
  unsure (1)..(82): unsure at all Xaa locations
  Clone ID: PAT_MRT4530_54100C.1.pep
EPRRRRVAAAAPRQRRRRCLAPRAAAETEGAADPGEGQDPQDLEQGKSSLFFDHVDPNXKLILFTNKIACNDEHPICDYAMP

SEQ ID NO: 154221 - protein, 85 aa, Oryza sativa
  unsure (1)..(85): unsure at all Xaa locations
  Clone ID: PAT_MRT4530_54101C.1.pep
APCPPENAIQKAVILIHTMMFPPCLNPKLQIILRTLIDPQNFXPRLVRVSYPSHGRAYCPDAPEHLLIYILLRRGMMLLLRLRST

SEQ ID NO: 154222 - protein, 229 aa, Oryza sativa
  unsure (1)..(229): unsure at all Xaa locations
  Clone ID: PAT_MRT4530_54102C.1.pep
GASIVRKKDRAKNRRKKQNLSNKKPGKEKRVRKKKRKTDPKKKRXKESDPKKGQKKWTKKQICLIQKKGKKEKKLKRIRLSKKLGKKTGKKKSDKKNREKKNRVEKKXSDKKKGKKGKKKCFCHPSKNRVKKTERKKVRSKKGEKNKSVRXKKQGEKGKKSKQSDSNAVKKGRKKLIKKLSDSKLYMIRXKKNRPGEKNQVKKRKKFLIKKRGEKKSVLSKKRKKIETN

SEQ ID NO: 154223 - protein, 40 aa, Oryza sativa
  Clone ID: PAT_MRT4530_54103C.1.pep
MEVRLLEPEGAGCGMKARLFPNVILLVAVPYRHKMTTLAS

SEQ ID NO: 154224 - protein, 134 aa, Oryza sativa
  unsure (1)..(134): unsure at all Xaa locations
  Clone ID: PAT_MRT4530_54104C.1.pep
GSTSWATFKIKTXXTGRAREADWGMELXXXXSXQLASPGXSXSTAYPGIFFIFFLTPTAASSVRRGGGEVPGDEAAXRQCAXGXEEPGELEVAARPWPLEADEGRVGFAAAAISPARARAEFGTSSCRIPATXG

SEQ ID NO: 154225 - protein, 74 aa, Oryza sativa
  unsure (1)..(74): unsure at all Xaa locations
  Clone ID: PAT_MRT4530_54105C.1.pep
MAHLHDVDFRLEMFQPQGTNIEAPWEGRTPRADFTLQGALPNSHQEFAAVVVDPQPXEHLIGQLIQEVAGRAGL

SEQ ID NO: 154226 - protein, 410 aa, Oryza sativa
  Clone ID: PAT_MRT4530_54106C.1.pep
MASASGLVNAALPDDLLAEVFRRVAAAGGKADLDSCALVCRRWRGVERASRRAARVPVDGPDGDAVVRCVADRFPGLADVFLDEALEAIGSSCSALENLSLDNLNKCSDRSLFSIANGCKQLKSLIIKSSVKFTDRSIERVSQNCKMLQHMEINMCHIMESAALEHIGQRCINLLGLTLNSLWIDNNAFLGFGRCCFLLKSVCLANCCKISDEAISHIAQGCKNLRELSIISCPQIGDEALLSVGENCKELRELTLHGLGRLNDTGLATVDQCRFLEKLDICGCNQITDYGLTTIIRECHDLVHLNISDTKKIGDTTLAKVGEGFRKLKHLMMLRCDAISDVGLEDIARGCLQLEACGVFRCSQVTPAGVAALAGGSSRLQRIIVEKCKVPEEATGKCRMINDPILISYY

SEQ ID NO: 154227 - protein, 628 aa, Oryza sativa
  Clone ID: PAT_MRT4530_54107C.1.pep
MASASGLVNAALPDDLLAEVFRRVAAAGGKADLDSCALVCRRWRGVERASRRAARVPVDGPDGDAVVRCVADRFPGLADVFLDHGLYIAAGASAAAAERSRAQGWDNENPKLDEQHMQCSTLSEDTQKENGSDGVNPTSFTDAGLLHLIEGCKGLEKLTLNWFLHISEKGLVGIANRCRNLQSLALSGGYVQNHGLITLAEGCNLSELKLCGVQELTDEGLVEFVKIRSKSLVSLDISFCNGCITYRSLYAIGTYCHNLEVLSVESKHVNENKGMISVAKGCQYLKSLKMVWLGVGDEALEAIGSSCSALENLSLDNLNKCSDSSHKPARSTKSKKKLDGGRQVVGNEGNLADRSIERVSQNCKMLQHMEINMCHIMESAALEHIGQRCINLLGLTLNSLWIDNNAFLGFGRCCFLLKSVCLANCCKISDEAISHIAQGCKNLRELSIISCPQIGDEALLSVGENCKELRELTLHGLGRLNDTGLATVDQCRFLERLDICGCNQITDYGLTTIIRECHDLVHLNISDTKKIGDTTLAKVGEGFRKLKHLMMLRCDAISDVGLEDIARGCLQLEACGVFRCSQVTPAGVAALAGGSSRLQRIIVEKCKVPEEATGKCRMINDPILISYY

SEQ ID NO: 154228 - protein, 149 aa, Oryza sativa
  Clone ID: PAT_MRT4530_54108C.1.pep
TRGFPSTHSAHSSISSASYGADGYYGGEGSVTDYSSASESVDLTHSRTLPRPSALLGANMPPAPQSMMGQVSSKVSSSSQKKHKCKICDKRFTRPSSLQTHMYSHTGEKPFACEVEGCGRHFSVVSNLRRHRKVHKNDGGADHPSPEDA

SEQ ID NO: 154229 - protein, 175 aa, Oryza sativa
  Clone ID: PAT_MRT4530_54109C.1.pep
MGSDGTASLRQNFLGETGDGQGLLDYLKKKQANDPRHDELLEDNSNNHKDATCQSITSRYNVLCADAIRCADKGSASKAVYKAAKDILQKAYEEIIAYERNPGRGLQRDAININEDITIDDTMNDQSLPDFWTKDAKELDFEYGLVLNCLRDSYDISRCCINISDVQNALKYQEY

SEQ ID NO: 154230 - protein, 981 aa, Oryza sativa
  Clone ID: PAT_MRT4530_5410C.1.pep
MAGFNQEMSSSTITSGNGLNNVTTQYFRTDQGVVRGNVPLPQVVISPKVTFVSPNPSFAIQNVNNHCVDAYATSSFAPIQYAYNATGESMDDYTANYTEIGYRQNLDNGMTGHGTGLTTSYAGQTVPTMADQTVYYAGQTVPTIAGQTVIYPGQIAPHVAGVTGSLEISPGFHTMTSSIDFNYYSSPVNTVSHTTPHIPNAYNDSNRRYSPDTRYGQYNNIAPQTQPIRPPSPPPDPPRPETVENWFRNIIRENLAKLRNRSRDYRKPYPDYYDIFPYPRDYKIPEFTKFSGEDSRTTCEHVDQFLAQCAELSDGSDCITSGSEIALSPKTESQIGHVDIGKDNDNVLWDSGEIESKVAMHTYQRPYPEHVDSVPYPQGFEVPNFTKFTAGSDDLLKLKLFPLSLSNFASTWYSLLAPNSISTWSQMEHEFHDYFKDASLMEQRPIDTSSVTCETISVTSMSKIGIVSNPLPISPIDVNKKKGKSVIIGDPRPKTRINNAKAEDHKVAKDESSSLQRTKKPKLTFEMLMAKYEKGLAGQRFDNQTSDSKIPRSSRRKRFGQTPKQLEPSTIPTPCKPPIVMPWYPYPMSLYGYPFMYYMPWMPQPPMLCHQGWKQSPRTVPSHSNSRQDRFPRKNRSGGSKVKKVKKVWVRKEDKAPEVVAIKEKSQDIQVPTEDAAKTIQAEKTEADAVAVDIGSLTEPAGRSNRQTTAGLTDPSSRSDRRLVAGLIGPKGRFDRAALDKSGKIESNIGASTSTKNMKNNCLAPGKQLQPKWIPSGLSRSQKRRLQRLRAIGKKEKEAEDVENKTCNNLESRTAPRQVWRPKEVHVCSPKKQGGMCLHPNLASMDEIGKNCQSLESDGFPYSGRQVAALFHMLQIITCFQCIFRLSIYTSEAKKVYAKVLSEVHHVDCVVDVQEFPIGTEERWKRGVAKDKTLNHLTTDLLCRVYGHQPHHVKLEKNTEKAAELVIRTQNLRASMESLNH

SEQ ID NO: 154231 - protein, 1286 aa, Oryza sativa
  Clone ID: PAT_MRT4530_54110C.1.pep
MATPTPTPSTSAPAAPPSSAFPLTAAARFPRARAASASTSSTRASALAERRRTRRRRLPEGSGGGGDRSAAAGAVEKGLRLAFLEQLAERARAADAAGVADAIYDMVAAGLSPGPRSFHGLVAAHVLAGDAEGAMQSLRRELSSGVRPLHETFVALVRVFAKKGLATRGMEILAAMERYKYDIRKAWLILVEELVNNNYLEDANTVFLKGTEGGLQGTDEIYDLLIEEDCKAGDHSNALTVAYKMEASGRMATTFHFNCLLSVQATCGIPEIAFATFENMEYGGEGYMKPDTESYNWVIQAFTRATSYDRAGDVAELLGMMVEDHKRRADELLEALEAMSNDGQTIAPRAMILNRKYRTLVSTWIEPLQEEADVGFEIDYVARYIEEGGLTGPKKNVVKPKAASKMVVSELKTELEAQGLPTDGTRQVLYQRVQKARRINRSRGIPLWVPPVEDEEEVDEELDELISRIKLEDGNTEFWKRRFLGETRNYLCEEVNDEEDADLDDDELDDDDDEDDDDDDTTKGEEDEIDEEDAVEQTENQAGDETKDKPSKGPKQHLQMIGVQLLKDLEKTSVSSKKSKRVPEIDDDEDWFPEDPIEAFKVIDLGGTPTIGDCAIILRAAMRVPLPSAFMTILQTTHSLGYKFGSPLYDEAILLCLDLEEIDAAIAVVAEMETNGIKVPDETLDKVLAAKQSGGNSALQPPPAEESLLGSAMYRAAASLASKARQAGSSARQVGSRLALSRNYAAKDIKFGVEARALMLRGVEELADAVKVTMGPKGRNVVIEQSYGSPKVTKDGVTVAKSIEFKDRVKNVGASLVKQVANATNDTAGDGTTCATVLTKAIFTEGCKSVAAGMNAMDLRRGISMAVDAVVTNLKGMARMISTSEEIAQVGTISANGEREIGELIAKAMEKVGKEGVITIADGNTLYNELEVVEGMKLDRGYISPYFVTNPKTQKCELDDPLILIHDKKVSNLHAVVKVLELALKKQRPLLIVAEDVESEALGTLIINKLRAGIKVCAVKAPGFGENRKANLQDLAILTGGEVITEELGMNLEKFEPQMLGTCKKVTVSKDDTVILDGAGDKKSIEERAEQIRSAIELSTSDYDKEKLQERLAKLSGGVAVLKIGGASEAEVGEKKDRVTDALNATKAAVEEGIVPGGGVALLYASKELDKLPTANFDQKIGVQIIQNALKTPVHTIASNAGVEGAVVVGKLLEQDNTDLGYDAAKGEYVDMVKAGIIDPLKVIRTALVDAASVSSLMTTTESIIVEIPKEEKEAPAMGGMGGMDY

SEQ ID NO: 154232 - protein, 1609 aa, Oryza sativa
  unsure (1)..(1609): unsure at all Xaa locations
  Clone ID: PAT_MRT4530_54111C.1.pep
MALRLAAVPESAAADLSAAANTLPCISYRDSIRSVAAVVSGGRGPLFQSEDSASTWSSSSYASDCSGHSSGVSAAAAAGFRALTAHELREVARRMVADGYAQRMVQAFDDAATVEVLEGEMLADCRLDDDIAKDYEARAAVREARAAREEAEARLQVATRAARLVAAEAEAARTAEAARQAAAAAATLRAEEEEERRDLELTDAARVRRDADRDRHIGRRDRDFSPHRRGSDLHRGEEERRDPWRDPRINRALETQRLREQAAAIEAQLDFDREQGGRDVGARSPRRQRASPSPDRRRGRRGRSGSPPVVQIVVKDVGGAWPMLTKTNYAEWAMVMKVKLQARHMWDAVRYGDVDYGEDRRALERLAQLGDTTIDEERAVEKLLCVVPEKYTQLALSIETLLDFTELTNEEVTGRLKAVDNRKQLPPSEPITIGGKLFFTKEKWLARQQERKKGEATSSSASGSSSSRKRRPRKWEKARSGALGGADGERKGSRNDTCHNCGKTGHWAKDCRQAKHGGQAHVAQAQEGDEVALFFVHGSIEPHFTPTPDATAPLHLDELWAHVFLSNGSCDDKIDGWCLDTGATHHMTGRREFFSKLDSSVQGSVKFEDASAVEIKGVGSILFTTKTGEHRLLTGVYYIPALRNSIISLGQLDENGLLVEIEDGVLRVWDRHRRLLVKVNRGANRLYVLHVQVAQPVCLAARRDDDAWRWHERFGHLNFEALKQLSNKEMVQGMPRVEHVEQFCDTCVLTKQRRLPFPRQASFCAKEKLELVHGDLCGPVTPATPGGRRFFLLLVDDVSCYMWVVLLDSKAVAADAIKHHQVAAEKECGRKLRVLHTDNGGEFTTAEFAAYCADERIQRHFSAPYTPQQNGVVERRNQTVVATARALLKQRGMPAIYWGEAVMTAVHLLNRSPTKALDGKTSYEAWHGRKPVVSHLRVFGCLAFAKELNHVGKLNDRSSPGVFIGYAEGVKAYRILDPSTQHVRISRDVVFDEGRGWASYKAVDDGSTSTLRDFVVDYVHFRAAGGASSSSSPSSSTSAPGSPSAPASPLPPTPPATPPSPATPRSPTPAPTPPVEFATPLSNDEDRVDAYHDDEPLRYRTMDNIFGDQPVPGLETRDFEAELHLAHEDGEPCSFAEANGDVAWRTAMQHEMDAVERNWTWVLADLPASHRAITLKWVYKLKKDEAGAVIKHKARLVARGFVQQEGVDFDDAFAPVARMESVRLLLALAAQEGWRVHHMDVKSAFLNGDLKEEVYVHQPPGFVIPGKENKVLRLRKALYGLRQALYAKLDSTLKQMGFQQNSHEAAVYQRGKDGNALLVGVYVDDLVITGTKEAEVEAFKEEMKATFQMSDLGLLSFYLGIEVHQDSSGISLRQTAYAKCIVELGGLTGCNPAYTPMEERLKLSRDSTAEXEVDATQYRHIVGSLRYLVHTRPDLAFAVGYVSRFMQRPTTEHQQAVXVEGTTDYGFHYPRCPXCLISWQSVKQQVVALSSCEAEYIATTTASTQALWLARLLGDLLGRNTEAVELRMDSKSALALAKNPVFHERSKHIRIKYHFIRSCLEEGSIKASYINTQDQLADLLTKSLGRVKFQEFRARIGMVQIPQKAPHMT

SEQ ID NO: 154233 - protein, 42 aa, Oryza sativa
  Clone ID: PAT_MRT4530_54112C.1.pep
MGSSARTQMFVIVSVSVWRTSNVVNTVHNAGATKVSKATRGD

SEQ ID NO: 154234 - protein, 155 aa, Oryza sativa
  Clone ID: PAT_MRT4530_54113C.1.pep
MPEDVAGGINGDINLNELQILAIGDGIRGGKLGFMVEVLNCESVTGKRACPWVVFLTCHVVMGMPAGMNYLAGTGMGSACRARLPSLGEGEGRQVLGGSAWARRPSGMDQVGREEGEARERREREGERKDFGCEPRKREEDFGPDLAQRRKEDYF

SEQ ID NO: 154235 - protein, 1455 aa, Oryza sativa
  Clone ID: PAT_MRT4530_54114C.1.pep
MSLHSIRSPSLSSHASSTSSGRGSRRSAADAEGDGDATAAARVAQEAQAAAREARAACEEAEARLQAATRAARLAAAEAEAARTAEAARQAAAAAAVLRAEEEEEWRDLERADAARVRRDADRDRHAGRRDRDFSPHRGGADLHRGEEERRDPWRDPRIDRALEAQRLREQAAAIEAQLDFDREQGGRDVGARSPRRQRASPSPDRRRGRRGPSGSPPVVQTVVKDVGGAWPMLTKTNYVEWAMVMKVKLQARHMWDAVWYGDVDYGEDWRALEALLAAVPTEMQSSIVNKRIAKDAWDAIASARIGSDRARRSTLQKLRQDWENLAFKPGEDIDDFVLRFNSLQQRLAQLVDTTIDKERAVEKLLRVVPEKYTQLALSIETLLDFTELTIEEVTGRLKAVDNRKQLPPSEPITIGGKLFFTKEQWLARQQEQKKGEATGSSASGSSSSRKRRPRKWEKARSGTLGGADGERKGSRDNTCHNCGKTGHWAKDCRQATHGGQAHVAQALEGDEVALFFVHRSIEPHFTPAQDATTPLQLDEPRAHVFLSNGSCGDKIDGWCLDTGATHHMTGRREFFSELDSSVQGSVKFRDASAVEIKGVGSILFTAKTGEHRLLTGVYYIPALRNSTISLGQLDENGSRVEIEDGVLRVWDRHRRLLVKRFGHLNFEALKQLGNKEMVQGMPRVEHVEQFCNTCILTKQRRLPFPRQASFRAKEKLELVHGDLCGPVTPATPGGRRFFLLLVDDVSCYMWVVLLDSKAAAADTIKRHQVAAEKECGRKLRVLRTDNGIQRHFSVPYTPQQNSVVERRNQTVVATARALLKQRGMPAIYWGEAVMTAVHLLNRSPTKALDGKTPYEAWHGRKPVVSHLRIFGCLAFAKELNHIGKLDDRSSPGVFIGYAEGVKAYRILDPATQRVRISRDVVFDEGRGWAWDKAVDDGSTSTLRDFVVDYVHFGGARGASSSSSPSSSTSAPGSPSAPASPPPPTPPATPPSPATPRSPTPAPTPPVEFATPLSNDEDRVDAYHDDEPLRYRTVDSIFSDQPVLGLVTRDFEAELHLAHEDGEPCSFAEANGDVAWRTAMQHEMNAVERNRTWPPGFVIPGKENKVLRLRKALYGLRQAPRAWNAKLDSTLKQLGFQQSSHEAIVYRRGKDNNALLVGVYVNDLVITGTKEAEVEAFKEEMKATFQMSDLGLLSFYLGIEVHQDSSDISLRQTAYAKRIVELGGLTGCNPAYTPMEERLKLSRDNTAEEVDATQYRRIVGSLRYLVHTRPDLAFAVGYVSRFMQRPTTEHQQAVKRILRYVEGTTDYGLHYPRCPASSRSSNKWWQSVKQQVVALSSCEAEYITTTTASTQALWLARLLGDLLGRDAEAVELRVDSKSALAMAKNPVFHERSKHIRIKYHFIRSCLEEGSIKASYINTQDQLADLLTKSLGRVKFQEFRARIGMVQIPQKAPHKT

SEQ ID NO: 154236 - protein, 1002 aa, Oryza sativa
  unsure (1)..(1002): unsure at all Xaa locations
  Clone ID: PAT_MRT4530_54115C.1.pep
FSKLDSSVQGSVKFEDASAVEIKGVGSILFTTKTGEHRLLTGVYYIPALRNSIISLGQLDENGLLVEIEDGVLRVWDRHRRLLVKVAQPVCLAARRDDDAWRWHERFGHLNFEALKQLSNKEMVQGMPRVEHVEQFCDTCVLTKQRRLPFPRQASFCAKEKLELVHGDLCGPVTPATPGGRRFFLLLVDDVSCYMWVVLLDSKAVAADAIKHHQVAAEKECGRKLRVLHTDNGGEFTTAEFAAYCADERIQRHFSAPYTPQQNGVVERRNQTVVATARALLKQRGMPAIYWGEAVMTAVHLLNRSPTKALDGKTSYEAWHGRKPVVSHLRVFGCLAFAKELNHVGKLNDRSSPGVFIGYAEGVKAYRILDPSTQHVRISRDVVFDEGRGWASYKAVDDGSTSTLRDFVVDYVHFRAAGGASSSSSPSSSTSAPGSPSAPASPLPPTPPATPPSPATPRSPTPAPTPPVEFATPLSNDEDRVDAYHDDEPLRYRTMDNIFGDQPVPGLETRDFEAELHLAHEDGEPCSFAEANGDVAWRTAMQHEMDAVERNWTWVLADLPASHRAITLKWVYKLKKDEAGAVIKHKARLVARGFVQQEGVDFDDAFAPVARMESVRLLLALAAQEGWRVHHMDVKSAFLNGDLKEEVYVHQPPGFVIPGKENKVLRLRKALYGLRQALYAKLDSTLKQMGFQQNSHEAAVYQRGKDGNALLVGVYVDDLVITGTKEAEVEAFKEEMKATFQMSDLGLLSFYLGIEVHQDSSGISLRQTAYAKCIVELGGLTGCNPAYTPMEERLKLSRDSTAEEXRFMQRPTTEHQQAVXVEGTTDYGFHYPRCPGAQHFIGYSDSDLAGDSDTSKSTSGTLFFLGKCLISWQSVKQQVVALSSCEAEYIATTTASTQALWLARLLGDLLGRNTEAVELRMDSKSALALAKNPVFHERSKHIRIKYHFIRSCLEEGSIKASYINTQDQLADLLTKSLGRVKFQEFRARIGMVQIPQKAPHMT

SEQ ID NO: 154237 - protein, 137 aa, Oryza sativa
  Clone ID: PAT_MRT4530_54116C.1.pep
MAGTEPRETSGEERGSWDAAASPSPAAGGTRESVGRGWISTSGGEAAGSCGRRLLGEGTHLTDPARGEAAGSHGQRVADRGSSSGHTLPSVPSRQIRREGRWRVSHDVGLSLLSAAGHRDGGELDRRRDDGEAGGFQ

SEQ ID NO: 154238 - protein, 1513 aa, Oryza sativa
  Clone ID: PAT_MRT4530_54117C.1.pep
NDRDMETQRLWEQAAAIEAQLDFDREQGGRDIGARSPRRQRASPSSDRHRGRRGRSGSPPVVQTIVKDVGGAWPMLTKTNYAEWAMVMKVKLQARHLQKWRQMESRYPTRPWTRCSQLNNLVETLRSNRHLQRRNLIGTRSPFVAIRIGSDRARRSTLQKLRQDWENLAFKPGEDIDDFVLRLNSLQQRLAQLGDTTIDEERAVEKLLRVVPEKYTQLALSIETLLDFTELTIEEVMGRLKAVDNRKQLPPSEPITIGGKLFFTKEQWLARQQEWKKGEATGSSASGSSSSRKRRPRKWEKARSGALGDANGEHKGSRDDTCHNCGKTGYWAKDCRQAKHGGQAHVAQAQEAAAHVFLSNGSCGDKIDGWCLDTGATHHMTGRREFFSELDSSVQGSVKFGDASTVVIKGVGSILFTAKTGEHRLLTGVYYIPALRNSIISLGQLDENGSRVEIEDGVLRVWDRHRRLLVKVAQPVCLAARRDDDAWRWHERFGHLNFGALKQLGNKEMVQGMPRVEHVEQFCDTCVLTKQRRLPFPRQASFRAEEKLELVHGDLCGPVTPATPGGRRFFLLLVDDVSRYMWVVLHDSKAAAADAIKHHQVAAEKECGRKLRVLRTNNGGEFTAAEFAAYCADEGIQRHFSAPYTPQQNGVVERRNQTVVATARALLKQRGMPAIYWEEAVMTAVHLLNRLPTKALDGKTPYEAWHGRKPVVSHLRVFGCLAFAKELNHVGKLDDRSSPGVFIGYAEGVKAYRILDPATQRVRISRDVVFDEGRGWAWDKAVDDGSTSTLRDFVVDYVHFGGAGGASSSSSPSSSTSAPGSPSAPASPPPPTPPATPPSPATPCSPTPAPTPPVEFATPLSNDEDRVDAYHDDEPLRYHTVDNIFGDQPVLGLATHDFEAELHLAHEDGEPCSFAEANGDVAWRTAMQHEMDAVERNRTWVLADLPVGHRAITLKWVYKLKKDEAGAVIKHKARLVARGFVQQEGVDFDDAFAPVARMESVRLLLALAAQEGWRVHHMDVKSAFLNGDLKKEVYAHQPPGFVIPSKENKVLRLRKALYGLWQAPRAWNAKLDSTLKQMGFQQSSHEAAVYRRGKDGNALLVGVYVDDLVITGTKEAEVEAFKEEMKATFQMSDLGLLSFYLGIEVHQDSSGISLRQTAYAKRIVELGGLTGCNLAYTPMEERLKLSRDSTAEEIWHSLLAVSRFMQRPTTEHQQAVKRILRYVEGTTNYGLHYPRCPGAQHFIGYSDSDLAGDSDTSKSTSGMLFFLSKCLISWQSVKQQVVALSSCEAEYIATTTASTQALWLVRLLGDLLGRDAEAVELRVDSKSALALAKNPVFHERSKHIRIKYHFIRSCLEERSIKASYINTQDQLVDLLTKSLGRVKFQEFRARIGMDESCGKVNDRKAELKSHGEKAVKRNDYLAASKIYSEALELDYFDATLYSNRSLCNLQIGEAQKALLDADRCVELRPKWVKGHYREGAALMVLKEHKKAFEAFLNALKLDPANAEIEKVMW

SEQ ID NO: 154239 - protein, 54 aa, Oryza sativa
  Clone ID: PAT_MRT4530_54119C.1.pep
GKKYQHLSMTILMKKEPLPMIMSQVAERKSLGMKMNRACMLAIPCLSNVVDSVS

SEQ ID NO: 154240 - protein, 688 aa, Oryza sativa
  unsure (1)..(688): unsure at all Xaa locations
  Clone ID: PAT_MRT4530_5411C.1.pep
MGRSDGLSIVGQTGSLGISPGFHTTTSSTDFNYYSSPVNTVSHATPHVPNTYNDPNGGYSHDTRYGQYNNIVPQQPLFRPPNPPRPEIMEVRNRARENQKPYSDFYDVVPYPPNYKIPEFTKFSGEYSRTTYEHVDQFLAQCAELNDGSDCITCESEIALSPKTESQIGHVDVGKDDNNVLRDSSEIESKVAIHTYQRPYPEHVDSVPYPQRFEVSNFTKFTGEDAITTIEHIGQFIEQCERPIDTSSVTCETISVTSIPKTGIVSDPLPVSSIDVDKKKGKSVIXGDPRPKNRIKNTKAEDHKVAKDESSISQKTKKPKLTFEMLIAKFKKGLAGQRFDNQISDSKRPRSSRRKRFGQTSKQSEPSTIPTPYKPPVVMPWYPYSMSLYGYPFMYYMLWMPQPPMPYYQGWKESPRTVSNHSSNPRQDRFPQKNRSGGSKVKKVXKVWVRKEAKTPEVVAIKEESQDVHVPTGDAVETTQAKEIEADAVTVKIGGLTETAGRSNRQSTAGLTDLTGRSDRRLMAGLTGPRGRSDRGALEKSGKIESNTXASTSTKNIKNHCLAPGKQPQPKWIPYGLSRSQKRRLQRLRAIGQKEKEAEDAENKTCNNLEPQTAPRQVWRPKEVKVKRPVISHSSSDKSNLMREESSVIRDKSPSHDAMDVGAVFVLPSKSCSRESRFCLGGKTLLCS

SEQ ID NO: 154241 - protein, 747 aa, Oryza sativa
  Clone ID: PAT_MRT4530_54120C.1.pep
MATPTPTPSTSAPAAPPSSAFPLTAAARFPRARAASASTSSTRASALAERRRTRRRRLPEGSGGGGDRSAAAGAVEKGLRLAFLEQLAERARAADAAGVADAIYDMVAAGLSPGPRSFHGLVAAHVLAGDAEGAMQSLRRELSSGVRPLHETFVALVRVFAKKGLATRGMEILAAMERYKYDIRKAWLILVEELVNNNYLEDANTVFLKGTEGGLQGTDEIYDLLIEEDCKAGDHSNALTVAYKMEASGRMATTFHFNCLLSVQATCGIPEIAFATFENMEYGGEGYMKPDTESYNWVIQAFTRATSYDRAGDVAELLGMMVEDHKRIQPNARTYALLVECFTKYSMVNEAIRHFRALRRIPGGTKVLYNEGNCGDPLSLYLRSLCLDGRADELLEALEAMSNDGQTIAPRAMILNRKYRTLVSTWIEPLQEEADVGFEIDYVARYIEEGGLTGERKRWVPRRGKTPLDPDEFGFAYSNPIETSFKQRCFEELKLYHRKLLITLRNEGPGILGDVSEDDVRRVIERLKKLVVGPKKNVVKPKAASKMVVSELKTELEAQGLPTDGTRQVLYQRVQKARRINRSRGIPLWVPPVEDEEEVDEELDELISRIKLEDGNTEFWKRRFLGETRNYLCEEVNDEEDADLDDDELDDDDDEDDDDDDTTKGEEDEIDEEDAVEQTENQAGDETKDKPSKGPKQHLQMIGVQLLKDLEKTSVSSKKSKRVPEIDDDEDWFPEDPIEACMPAGRL

SEQ ID NO: 154242 - protein, 350 aa, Oryza sativa
  Clone ID: PAT_MRT4530_54121C.1.pep
MEKRATTTRAVVLRLDDLSLPPRRLTVPSRLPVSHLLRALPQPLLESSSFYLTADGRPLLLSAPVASLPPSGSVQLRLRALRGGGGDGGATGAESRDCYLSMYLAKKPDKADPNEARLSRFTCCALSGEPLAAPAVADRLGNLFNKEALVEALLHKRLPKALSHIRGLKDMIPIHLHPKPDADAAGEEVRFQCPVTGLDFNGKYQFLALRKCGHVLSVKALKEVKTSACLVCHKEFDEADKMPLNGTEDEVAALRLRMEEERGKVKEKKEKKVGNGLSGSKHAAAAVMAGGAEKLENGKKGEAPSLKRFKAGDHAPAYANKEVYASIFTSSKKSDFKETYSCRSLPLGRN

SEQ ID NO: 154243 - protein, 368 aa, Oryza sativa
  Clone ID: PAT_MRT4530_54122C.1.pep
MAGSCSVASSNKSKLADEEFSPVGMRVLLIDESTTYLKIITKLLLNCGYKGLTVTNFEITYVWRVDEVTPKTAARDAVEELHENPWSYDMVLTEVHAPAGIDGFNLLQYAGTDMDLPVVVFSADDDKRTVLKCVNSGACDYLVKPLRHEELKNIWQHVYRRKLRSGGRRAAAAGNSSKGEIKKRFRWPKELHERFVSVVLQLGVDKATPNQILPLLNREDLTRDQRFRIALTKSKALPSCSTIPIGETVHGIPLALQAIGTGNNQHLIVPFNRITFVRPRGVEIGQNGVVGGLVTGNNNVVVPTATSIIARAFGREIVNGADLFDHGTLIRDSSSTSHDGAQNELGETNLAFELMAKKGSDVEPRIGG

SEQ ID NO: 154244 - protein, 41 aa, Oryza sativa
  Clone ID: PAT_MRT4530_54123C.1.pep
CLPNEMVWSLRLLFLWSWVVSLDQIMFDWILFGLNYMDFPP

SEQ ID NO: 154245 - protein, 597 aa, Oryza sativa
  Clone ID: PAT_MRT4530_54124C.1.pep
MPSPPLDPHHVARPARANNRTNSKAFSFRKWHHGTQVLGSFITKLANYLPPSVPSYASTKMLYEALSQSPLTKCCIKERSLKRLAAILYGCGALIYTMYITPNLKKSKKFHPDVACTRNQHNSGKAYQDGVNEAVKRHGKRLEWIGRRRRGGGGDGRIYHETGLADLAIAEQADLEAASLTSGALRSAAAPPSSLGSRDRTAPLAMRCGGVEETGVGVWGVGAATAARRRGIAVMGWTTKEREKAAASRGSWSVGRRRWRRGKWRRGLGGVGRRTEEAWIPLQAGQGGRRWQGAMATVVGGRAMRDGVWAEWAADAEKKEWGRRRSIRATTMCLKSSFHGFQQQAHWLHSTPVSFQGFRPPENWVYSPNQITGSASSHGSESASQCPARYEENNVVDIEESSDNSQEAGRRGTRVNWTEEENIRLLSSWLNNSVDPINGNDKKAEYYWKAVAVEFNSNTSRSNRKRTVVQCKTHWGGVKKEIGKFCGAYSRARSTFSSGYSDDMIMEKAHIMFKSENNEKPFTLEYMWRELKDQPKWRRVLEEDSKNKRTKISESGAYTSSSNQDTEEENRRKKENRRKKKRPEGQKKSQSQVKRER

SEQ ID NO: 154246 - protein, 183 aa, Oryza sativa
  unsure (1)..(183): unsure at all Xaa locations
  Clone ID: PAT_MRT4530_54125C.1.pep
KTFGKNPPFEGGPPGKKPKKEGEKKPKGPPFWGPAPQPGPLNKTKKTRGPQKKNGGAPIKGEKVPPKXETPWGGGGPLNGRKKRGNPPAPRGINKPPLAGGLKPLGAPGGPKKLLGGGGLKQXPRPRGNKITGPPRANKLAGGPRANKIIFRGRPRGNRFPGNPRGGGLTPRRGKPPCFPGGG

SEQ ID NO: 154247 - protein, 664 aa, Oryza sativa
  Clone ID: PAT_MRT4530_54126C.1.pep
SVSTCRIHLLLHASDVLWPCRLMAISDARVVRHVRCPKCFSVLQEPTGAPVYQCGGCGTTLRAKNRTGNSQEVISAPSSLGSGLPPHSKHLGSSDVASTSGSTPEAQISSGQQGADMTSRRETDDLVSARNNAPEPERVVPAEKEEEHVQSTSQQAVGNSEDLTRGDAATAADAQCSDRASEGKVQFSESREDSNTELQDVQRSDQTESDAEGKKSSEETSQSPRRDVVELPPSSVQTPDSQPAPAVLKREDDPATSPPHGHARRSPESLAPLQKRILKTVDNLKDDLSELFSKSPELNKPRTHARPPRLPRQEGYAPRDAAMAAAASIQAIRARHAAVHRPGYIARAGKPGQLAAPPPPRGLPSRRYRRCRADHPCCHDARHGPSCHHGCCPPHHGKQACTSCRGQHCCRPRTQESPAPRRPAAAAAKEVVKRRAPPRNHCRPVLKGAPFIICSSCFKLVQVPADFAVSTKTVRKLRCGSCSAVLSYSYRDPDRKKHGDQYSADGSPAAPRGHGRRGDKFAFLDDFGHVDVSYSTEDEQPLHVSRNSSFNTVDEMAAAATQQHGSSLHRLMGYGSASDLLFRQHSPDLYESFSERTTPEAAALYDRKGKGVCVDLDDDGGDDDSDEDCSGALKRSRLRGSGWPLPGILNSKGTTGMGAIRIKS

SEQ ID NO: 154248 - protein, 46 aa, Oryza sativa
  Clone ID: PAT_MRT4530_54127C.1.pep
RAVVAMRTWQKRGASHLDAAPHTTAPAWMARLSSVGRASPPQIQSI

SEQ ID NO: 154249 - protein, 90 aa, Oryza sativa
  Clone ID: PAT_MRT4530_54128C.1.pep
VSRRRLGGVEVGFSGGTFSELLNSGLSSVPRRAGWPLSLCRHRRRGRSMRRPPRDAPCCRLSLRPAAAACRVTRSTASSRANRQESDAGR

SEQ ID NO: 154250 - protein, 175 aa, Oryza sativa
  unsure (1)..(175): unsure at all Xaa locations
  Clone ID: PAT_MRT4530_54129C.1.pep
MAVASPQIVRLGPRAVMQTLVVAIGQRCEDSVQEDKVEALGPPDRAHAADQTVEASSSDGKAMRSRTVKETLGKKKKKXGEITGLDCYSAGRKRKKKGGEIAGDLTKKTEEERMGRGGMCAAAEKRLHQASSTTTYGGRRRWPIRRAXYTASGVSSAAPCGTEARKHGNRTWAEQ

SEQ ID NO: 154251 - protein, 125 aa, Oryza sativa
  Clone ID: PAT_MRT4530_5412C.1.pep
MRRARPWTMAVVSKRLLPLSLFFLSNFLSLSLSLTPLLSFLFSFTTVVQAAGAEAATRGTARRRPARRPARRRGRPCGGAGGRAEAVAAGGGRSAATGDAPMIIPSPSPARPPETALTSNGPSAF

SEQ ID NO: 154252 - protein, 112 aa, Oryza sativa
  Clone ID: PAT_MRT4530_54130C.1.pep
SDDATVASDGEMFYLGWRGLDRRRWCRVAGGGAGDGDGLAPFEGGGVISPAWSRVKEGPCTPSCAVQARDKCAEATDSFPAGRRPSFRRPPPTAEAANSSPACHRAPPAAHH

SEQ ID NO: 154253 - protein, 100 aa, Oryza sativa
  Clone ID: PAT_MRT4530_54131C.1.pep
RSRLGVGIVSSDGSISLGSGTGSGGLVRGGGGSIEELALDIGDVGRTGGCLNGLPVDVGDPVVHAGDVPVGIGLGRLIVGAGGNTLGGILICPARWEKDL

SEQ ID NO: 154254 - protein, 50 aa, Oryza sativa
  Clone ID: PAT_MRT4530_54132C.1.pep
MLRAPPPSASGAAATIWCAAAAIRSDRHRHMLQAPSSIGPQRRRQAVVIV

SEQ ID NO: 154255 - protein, 130 aa, Oryza sativa
  unsure (1)..(130): unsure at all Xaa locations
  Clone ID: PAT_MRT4530_54133C.1.pep
IDRMFKDAITAGKRVRCETNISAGAVSVSSAAVELALMKLPKSECLSARMLLIGAGKMGKLVVKHLIAKGCTKVVVVNRSVERVDAIREEMKDIEIVYRPLTEMYEAAAEADVVFSSTASESLXXTXXHA

SEQ ID NO: 154256 - protein, 209 aa, Oryza sativa
  Clone ID: PAT_MRT4530_54134C.1.pep
TAAATPDRRRSPGSPARAGECRDKGGVVEYRVKEREISPRLVVSSAPRAAAKTSRGGGAAIEQSRGGEGILGGGTGGNARPKRKVVSRPLPPSQIKAEPELLRREVPLTSGKTKKAPKITFKNEPRHSAPQSDWGTPDSVPEFGPADEYRALRKKYLLLEDENGELDKQLSQAEEEASVLEDEKFALLDQLVVLEGLVDPSQMQPPRRL

SEQ ID NO: 154257 - protein, 112 aa, Oryza sativa
  Clone ID: PAT_MRT4530_54135C.1.pep
MEAAAGAGREGEGEGEYLVDIDGICHSIGGLRSSWSWSSGAHECLQGWLPTQRLRKERKRKEKERIVAPKWKEAKVEEWRRQGADIEKSYRDRGESDVAVWGGERKRYMNAS

SEQ ID NO: 154258 - protein, 56 aa, Oryza sativa
  unsure (1)..(56): unsure at all Xaa locations
  Clone ID: PAT_MRT4530_54136C.1.pep
EQLKADTSHTTHTRLELYTDVMSPPLERPYSIGDQRSTGRARRIQAFPCDLTXXXS

SEQ ID NO: 154259 - protein, 111 aa, Oryza sativa
  Clone ID: PAT_MRT4530_54137C.1.pep
LINDQLNTINIVEVAIFWMTILMRAGLYFRGQFLSSPCFAVTPCRSCSAPLQPPVHDHVVGGSPSVPRLPLCSRLCFNWKIYKIVNPLRLFHIVLNKLIKNKFRKEKKKST

SEQ ID NO: 154260 - protein, 444 aa, Oryza sativa
  Clone ID: PAT_MRT4530_54138C.1.pep
MAVANQDFQGPVSSPPPSPPPRVAPSDTTRHISIQQPIILITFLDLMRDSPFFHTRLATWASRNILSLYQTSSEYKVQEVYMMLYIVVIFKDGGSIYLPIQQAVGGPLEYCAFLIPCGTNTNSSSSASNINILNKYMSLWAAPFSVRNSTTANFSSNATISGPKEKSKIEAEAVQVSRKKAAEERLPPGIVVRESDLHLRRLWGNPTSDVASGKQYLVTLTVGYTEKANVNATVHKLSDKFDIVLFHYDGRTSEWEEFEWSKKVVHVSARKQAKWWFAKRFLHPSIVAAYEYVFVWDEDLGVDNFSAEEYISIARKHGLGISQPGLDGTKGRRSRYPATARRPAGDMHTSGRFVENDLVHGWGLDHNFWRCVDEPEEHIGVVDAQFVVHRGVPTLVSQGNGEQEGSSAKVRSRQFEEMRTFDRRIAGADKAQADATAAAAEQHR

SEQ ID NO: 154261 - protein, 138 aa, Oryza sativa
  unsure (1)..(138): unsure at all Xaa locations
  Clone ID: PAT_MRT4530_54139C.1.pep
MDLKGNVQCTTRAATARQWPSHADGTGRRSRPSWASLPARAAHAYGIKTAPLLAFYASASLALVALSVGVCSPEKKLVVPESVCGRPTGRWGCXFHHASGDLYVADAYLGLLRAPVRGGLAEVVTTEAAGVPFNFLIM

SEQ ID NO: 154262 - protein, 304 aa, Oryza sativa
  Clone ID: PAT_MRT4530_5413C.1.pep
MLARDLPIPCSGAGGRRAPAAAADGRLAGGVLRPPWGGVAAGVRLVAAARPMSVVTAAAAGSSWDRKAGRSEAAVPAAAPVDGKDDDDVLPVLNKLMTSTVGKSTNIRWHDCPVNQLDRQKLLNQKGCVVWITGLSGSGKSTLACALSRELHSRGHLTYVLDGDNLRHGLNKDLSFKAKDRAENIRRVGEVAKLFADAGLICITSLISPYKSDRSACRKLLPNSSFIEVFLNVPLEVCEERDPKGLYKLARAGKIKGFTGIDDPYETPSDCEIVIQCKVGDCPSPKSMADQVVSYLEANGFFQN

SEQ ID NO: 154263 - protein, 74 aa, Oryza sativa
  Clone ID: PAT_MRT4530_54140C.1.pep
LASVAIRPTWRRRPRRPVKPFPAAHFFSPHDPDRRSNHAGARAGRESRATAFFPAPRQRRVGPAVSASPDPPVP

SEQ ID NO: 154264 - protein, 56 aa, Oryza sativa
  unsure (1)..(56): unsure at all Xaa locations
  Clone ID: PAT_MRT4530_54141C.1.pep
VIPSARXXXPXLDLEYLREGFALFSETPAEIDHLARSMSPLAEKIFQSMDWCWPSW

SEQ ID NO: 154265 - protein, 176 aa, Oryza sativa
  unsure (1)..(176): unsure at all Xaa locations
  Clone ID: PAT_MRT4530_54142C.1.pep
PVAGVRIRPPPLTPPPPPAPSLAAPPPAPPPPAPPPXPPPPRPPPPPPPPAPXPPDPPHPPHPCPVPAQLGVRGRRFPDGHDMVVDSSVWGQRRGCASRRSVAAAPERDGGGRRRRPARRCRGLPPPPKPNPFAEVYLRLRPPLLAPLLFNLSTISSTIPLLDFALPFFFLGSFSP

SEQ ID NO: 154266 - protein, 1008 aa, Oryza sativa
  unsure (1)..(1008): unsure at all Xaa locations
  Clone ID: PAT_MRT4530_54143C.1.pep
MRPSMAGVFTHLAWPLLVLVLCSWRIIAAAQAQPRTDPVEAAALNTILGRWGKTASPEWNISGELCSGVASDLSNWDDYPNLNPFIKCDCKYNNGTLCHINKLCSTHCLACLKESMAQSTESLCDMINLTSDGVWITICIVVCLGWVATRANNSALTVTGCILLIAAIEKVYRRRVTKLDVVGPIPSELQNLTYLEDLNLGYNYLTGAMPSFMGKFTSMKYLALPFNPLXKKLPKELGNLTNLLSLGISYCNFSGELPDELGNMTSLKQLRASDNEFTGKIPDYFGRMTNLVDVAFQGNSFEGPIPAGFSNLTKLTNLRIGDIVNGSSSLGFISNMTSLSNLILRNCKLSGNLEAIDFSKFATLTLLDLSFNSITGQVPQSILNLGMLEFLFLGNNSLTGNLPDVISPSLKTILFAXDFSYNQLTGSFPSWDSQNNLXNYYSFAVDCGSNSSTRGSDNTIYEADPMNLGAGSYFVTGEKRWGISNVGKFDQATNGIDIIYSSDHFQNTVDSKLFETARMSASSLRYYGLGLENGNYTVLLQFAEFAFPDSQGWQSLGKRIFDIYVQGALKEKDFNIKKTAGGKSFTVVNRNYTATVSKNFLEIHLFWAGKGTCCVPTQGYYGPMISALSVTPNFTPTVRNGIPKRGNRTGVIAGVLIGSLVLGLATFFGIFIVVKKRRAMAQQKEELYNLVGRPDVFSNVELKLATDNFSSKNILGEGGYGPVYKGKSQFITEVTTISSVQHKNLVKLHGFCIDNNAPLLVYEYLENGSLDQALFRDNNLNLDWAMRFEIILGIARGITYLHEESNVRIVHRDIKASNVLLDTDLTPKISDFGLAKLYDEKQTHVSTRIAGTFGYLAPEYAMRGRLTEKVDIFAFGVVMLETVAGRSNTNNSLMESEIYLFEWAWDLYEKEQPLGIVDPSLMEYDKDEALRVIRVALLCTQGSPHQRPPMSKVVAMLTGEVEVAEVVTKPSYITEWQLRDGNRSYVTTSYSGSTTHEFNSKDEIKPFT

SEQ ID NO: 154267 - protein, 173 aa, Oryza sativa
  Clone ID: PAT_MRT4530_54144C.1.pep
MGQAAAKAKQGGDQAENKTGKDEKVAKPKDAKDLTDFMEKNYDSIKDVTSFEDFYHAFYELIEKFCEERGQLQYRIPEKAELQKQYERVNKSPQKGQNLSRKQFMELAGQVIKVNSFTFGKATMDVLVVLFGAPVCALLAKRVVPGLKSFSDDVVIPVATSGAVVYLAKTNKL

SEQ ID NO: 154268 - protein, 101 aa, Oryza sativa
  Clone ID: PAT_MRT4530_54145C.1.pep
MWWSVGFEQEAEAHDGDRVRTECDGDAGGGSRVAFGSGLGVGVGWKRVGGPGLQGMVGSWSQWGVGGGVAESVGSWWVGAVAVVDGDSLFLCSRAAAGGDD

SEQ ID NO: 154269 - protein, 659 aa, Oryza sativa
  Clone ID: PAT_MRT4530_54146C.1.pep
MMPTKCSTPVPSCGITKSDAESTPTTLEHVFLATMNPSTPSAASAAAVPPVSLTATKEDEVDMGKVEDKSDKTLHDLCVEIKEMINQMLETCRNSKVEPIVGDDSTGVAVVPCSVTNSVPIALEASQEIVADESDGNNLAREEDCVEKTTEGPGFGEHLTFCLSPKVDVPILDLIANQGMSRFIHKVDLEPWPNPGPCQGNGGMVVKISRYGPPHPRANYKDVCAKQQLEPWADLWLNHGNEGVVVKLLQPWPPPIQAEAKVEVGVLLLFGESHKISLDYRFTKFMSRTIIVSAGLLQILVPGWCIGYALHLSSTFWNSYQHMQLLAYGWSFDDHVLFLPLMLVFWPIHDTWSECLLGYTNEDHDVQKVLICDKNLRGVLIPTELKIPWPPPNLTVQKYGVLAKILLPTGLIKLKVLDNILRAQQWYCSSLGESLEDSTNGFTKLQSVELVQYKVDFASSSLLDIVVLQGDDSLPFLLPGRAVLEYQEFVTHVKMTEQSVSKGETDVPKLCVLKFSLDKFSNYSVGDTMIAVLLTQTCVQLVPSYNQSLSGSKNHYKLLMTQHMSVIANYEMIWWKSELGGGKISLCASWNFWDLCFCCKQMSTEIMAVGLSGVKVWLLFAISELWLQRKQLKLALLEEHIKVLCNSTMLFFLQATIQA

SEQ ID NO: 154270 - protein, 81 aa, Oryza sativa
  Clone ID: PAT_MRT4530_54147C.1.pep
VSTYPCKTPRIVNFNICNEEPVVLHVSIFTDPGIDTLISVGSKLLVLGSDRTGIRAYVLTIGQTLRIINQFKFEFTSNLMF

SEQ ID NO: 154271 - protein, 114 aa, Oryza sativa
  Clone ID: PAT_MRT4530_54148C.1.pep
ASRRRGRRRGCGGRRRRSPGRSPTTCPIPSRPSPTWRRRRRVPRAAASRSRRRPSTGSTGRRTPPRTSWMTRGGPSPPRTRTPASPRRWRSGGGGGAPRRRSPARRRCRPCRGT

SEQ ID NO: 154272 - protein, 929 aa, Oryza sativa
  unsure (1)..(929): unsure at all Xaa locations
  Clone ID: PAT_MRT4530_54149C.1.pep
MSPSFFFVVVSAWSLALMLAAAARGAEEEGGGGCLGSQKCGHLNISSPFWITQGQADKPCGRLDFQVYCNYSTGVATLRSSTDTGFDIINISYGDRTMLVFDVHKLARLNSSTGCSIPVFNTFAKLPVTFTISPSNHNLVFYNCTKAPPAEQQQKLGLVETRCGNNTFARLGGRYDGEGDYDKYYLEGCSRNSTVFSPVLKPPDGKANASRYVELVRGGFLITWGNLPPPVTSSDNRPQEGCAASTVCGKVTISSPFAVVPEQATESKCGWLGFQVICHNDTPYLGYYKPRYRIQILDIFYGNNSLLVSDIHKLGDFIVFSGVSKEYSCHVPRTNTSSKVGLPFSISTTNLNLFLYSCNKALVPRDGDDDLVETRCGNKTFARVGGNYSDSGDYPAFYMEGCNATVVPVLGTDARSYEQLIRDGFLLTWQETPSSASFLELPAPASSSSPGCLPTPCGKLTISYPFWLEEPGRPPCGSPPFQLKCNATGAYLTHTIYEAYRVVDIFTGNHTVHVVDENLPLATGCPAPPFNISDGIWQAPFVISEANAELRFLSCNKSLPAAAAPPGFHSLPCDDQNSSVRLVSDHHLHEDGIPPGCNFTVVPIVQRHNGSMAGYIASMRSGFLLEWAVVSGDCPKCQVSGGNCTYSDDLEFACNCPDGMHPDNKDLELGGSPHIFTYEELEEATAGFSASRELGDGGFGTVYKGKLRDGRVVAVKRLYKNNYRQAQHWLNEXVIRRHLMHQILVILYGCPSQASRALLLVYEYIPNVTVEDHLHGRPAGGRGLPCPDRMRIAIESSGTLAFQRAGGFRHRDVKTKKILLGDSVHVKVAEFGLAHPFRLALNNVRAVAPGKPRYGNSPYNQCYQVKDMSNIYGFGVMVIVMKSSTSGLFANTSHRSIPLATMALNRFPNALMVHAADPSSGFDTARERL

SEQ ID NO: 154273 - protein, 67 aa, Oryza sativa
  Clone ID: PAT_MRT4530_5414C.1.pep
YFKYRLWVSLIPKFYTCYDVDSGGPFVLHNNRTQRGGEGGLHPFLVFHNCDTRGGGEYFFRNTGPVG

SEQ ID NO: 154274 - protein, 82 aa, Oryza sativa
  unsure (1)..(82): unsure at all Xaa locations
  Clone ID: PAT_MRT4530_54150C.1.pep
GDHXXCXTXGXGTTGXNLPLLLAWXEGGQVLKGSFCSTLMFXLCRPPYFWXSLWLTVDXIWXNVXVGNTXRLLVMDVEMSPF

SEQ ID NO: 154275 - protein, 51 aa, Oryza sativa
  unsure (1)..(51): unsure at all Xaa locations
  Clone ID: PAT_MRT4530_54151C.1.pep
RHYDLLRLTRGSIADRWRHGAGRAAKGGLQQXADGPGSTGFCWVSAGGGRS

SEQ ID NO: 154276 - protein, 179 aa, Oryza sativa
  Clone ID: PAT_MRT4530_54152C.1.pep
LPHSSPPNHQSQWPPSSPSLSPHHSSEPVAAVVPVALAPPLVGAGGHRRGGGGDDEELGDGCGEQEGERERWRGGRCRRRGSRCWLRTPAAEEDDDGAASARVVLKLASLAAPLWLPALVGLLIGCPASPTTGFAAASSTLRLADHRIRAPPPSPAPRGCLLLSLFRRRDVVIHGRRRR

SEQ ID NO: 154277 - protein, 457 aa, Oryza sativa
  Clone ID: PAT_MRT4530_54153C.1.pep
PPDLRLIYPAATGSTACTPPWPELHHHRCSSSSSSSPSPPRQLGATAPTARRCRSHKSAPPRAPSDRRRRLLSSPPPPPQIVAAAPSDRRRLGPPQIAAAAALHHNEWALAGQCLTPPPPPPQLAAAAPLASRRHTRRSSPPLHARSQWPPSSPSLSPHHSSEPVAAVVPVALAPPLVGAGGHRRGGGGDDEELGDGCGEQEGERERWRGGRCRRRGSRCWLRTPAAEEDDDGAASARVVLKLASLAAPLWLPALVGLLIGCPASPTTGFAAASSTLRLADHRIRAPPPSPAPRGCLLLSLFLLQAPGYQVPGTKHQGTRYQVSRVSGTRYQSGEEETAGFFCFCGGGGGATCAHRQGGGGSSGQGRRRPWRGARGRRGEAPAPAATRALVEEAAPQRVEAAPQRAEDDVVEVRRDHPRRRPYLTDAVTSSSMAAGDDDDPFLLSSFISALSFSSPV

SEQ ID NO: 154278 - protein, 96 aa, Oryza sativa
  Clone ID: PAT_MRT4530_54154C.1.pep
NRKAKLNNNSYKKKGYYPWYTEKSRKQWLKKQKRIKKIRPARKITSQNNEKAEISFTRAKIAHHSATLKFNTELACPIDRMLPMSSRGKHGGSKHK

SEQ ID NO: 154279 - protein, 82 aa, Oryza sativa
  Clone ID: PAT_MRT4530_54155C.1.pep
IHCPPLLLASWAGLLCMGELVQFTGPCRCRPANVAIIFIISSRRQFTLLRQPNLRARFEPPFVVTIQVYTRADSQRATIALV

SEQ ID NO: 154280 - protein, 611 aa, Oryza sativa
  Clone ID: PAT_MRT4530_54156C.1.pep
MAPKRERAFPVLKKRARGGKADEADLLQHVSDCSNSVLSERLEEVVGDSEKEIQIMPSPSHLAGALDAARPFLRGEEEQVDPALPKLAAVLRAAGAGECWHKHGTFLAHLLDVHRILRLWGAPDAVARCGLYHSAYSNSYVNLAIFEPDVARDHVRPIVGAAAERLVHLFCVVPRHQLIHDDLLFHYADQDLVADLAASEASLQDARRGLFHHDGEAWRLKIQRLLPPHGITVKHISDRDTEIARFFCFCSGGGGATYAHRQGGGGSSGQGRRRPWQGARGRRGEAPAPAATRAPVEEAVPQRAEAAPQRAEDDVVEVRRDHPRCRPDLADAVPSSSTAAGDDDDPFLLANFISASRFLLLCERVRGVKVKDTRTGEDVALSRRIAATFLLMTMADFSDQLFDWQDRLFDNTNGRLEFSGNTWTSLWPGTGKPGLWTASISRMGALYSLIVREEEIHIAQRKHSNNGQEDDRDEDIELVIPPVFNGCTQVLTADDQKAARDLYWDAVCSGGEDETDWRKVEEILRRCIGRNPFVGEPHLVLAQVLLNMEMYEEAEEQIEAGVKLLLEWGSSWDKRMPWEAWVSWGRAMLIKAKDKDWPHTSFGILSIGLVK

SEQ ID NO: 154281 - protein, 148 aa, Oryza sativa
  Clone ID: PAT_MRT4530_54157C.1.pep
MGEEKKDKASGKDAGEKKDAAGGGEKAAAAAPGPIVLKVELHCAGCASKVKKAIKRAPGVETVVTDTAGNKVVVTGAADAAELKERIEARTKKAVQIVSAGAGPPPKKDKEEKKDKDKKGAAAYQPYPYNVHAPQMFSDENPNACSVM

SEQ ID NO: 154282 - protein, 359 aa, Oryza sativa
  Clone ID: PAT_MRT4530_54158C.1.pep
MGEEKKDKASGKDAGEKKDAAGGGEKAAAAAPGPIVLKVELHCAGCASKVKKAIKRAPGVETVVTDTAGNKVVVTGAADAAELKERIEARTKKAVQIVSAGAGPPPKKDKEEKKDKDKKGGGDDKKAEKEKGGGGGDKKAEKEKGGGDKPKEEKKAKEPKEETVTLKIRLHCEGCIDRIKRRIYKIKGVKDVAVDAAKDLVKVTGTMDAAALPGYLKDKLSRQVEVVAPGKKDGAGGGDKKDGGGGDKKDKKEGGGGGGDKKDAGGEKTDKDKSAAASASVAPVPLADAGMFQMPPQYGFNPYHVHPGAAYYGGAPPPNPAAFYHHPNAAAAAAYQPYPYNVHAPQMFSDENPNACSVM

SEQ ID NO: 154283 - protein, 76 aa, Oryza sativa
  Clone ID: PAT_MRT4530_54159C.1.pep
MGLAGVHALPFHPRSTASQPASSSIVLPCARRRRGAVWWCGVGHATSGGAPLWMWPRLMSPKGEARKEEERGRDKG

SEQ ID NO: 154284 - protein, 1048 aa, Oryza sativa
  Clone ID: PAT_MRT4530_5415C.1.pep
MAAAIAAAADDSIVYKLSALLEEVRPSAAALRAASEAADAVAGLVKRIPTQQATHEAVAGFVRDLGLAGEKLAFTFRPPEVVRVAGSHAAGGAVARPDVSADLLVRLPKFAPYMAISQFRLLCFPLVKSLCNLPYIKIHMFYFRGILQECFHEKDFLNHRYHAKRCLYLHVIEKSLRSSPLIQKISWSTFLDEARKPILHYFTVAAKEIAELPGFYVRIIPTASFLFNVSKMNLSTRNNVRAYTKDGINLPTPKYNCSILEDMFLEENVEFISSSVADWKALQEALVLLKFLGTSEQQKFIELKPFTNVIILNHFYFLVATSKMWTKGLVIQPTKKRTITKEDMVCFLKTFDVVICDVSGHVNLASRMTKSAFIELQDEAACALNCLDKCKDGGFEELFMTKVDLGAKFDSCLRINLKGNLKITTSSFCLDDLAWRKLEKDVQSLLQQGLTDRTKMIRVLWRSTPSEWNIMDAIKFRKFWGEKAELRRFKDGTIAESTVWESESWEKHTIIKKIADHVLTKHLSLQKEDLIHVVDQLDFCLLVGGQDPVSSSGALFEAFDSLAKKLRLLGDVPLKISTVQPLDPAFRHTSVFPPEPHPLAYEKRSSQRLPNFTATCMRSLEVMIQLEGSGNWPLDPIAMEKTKSAFLLKMGESLEDQGMFVTASEDEVNVLTSGYSFLLKIFHERDGDGKAQNVPSEDKELFLRSQHSSMINGLHGRYQVYGPVVRFLRLLSSFDWTFSPMIIDINNDFNLKDEKEINVLKRMASYAKSSAELLTNLIIQGQSGQYTWECVFRTPLSNYDAVVLLHQEKLCRPHQVLFPAETPNGKLVICGKPCKDFHPYMPLNKGVVKSLHDSREKILVNFDPTTYFLRDLKSAFPKTFKLWYDSIGGDAIGLTWENSKKRGRDEADETMLDPASILKEVGNVGKGLREACAVCAINTTSNRYSYTGKSKTVVSMALIGHGKGSTSGNVLIRSRLGTEIRVGHLPDFTSMSVYASVACKASDTGPIRCEDKVVASWSLSPSLKAARSRSAAKSTTQEDPVMPLLRAD

SEQ ID NO: 154285 - protein, 150 aa, Oryza sativa
  Clone ID: PAT_MRT4530_54160C.1.pep
SAFLPSPPRPLAHNLSFTILEQLHVQKLVAVVKEKLSNRQEVSWSNDIKRHLHDVMSLGVGTELLITPDTTLLLELYNLKKGDRGKAIFRHKLPHQNITLEASWPGLFIDKNGVYWDVPLSLSADLASVGSESGLSYHVLLQQNSGDQKF

SEQ ID NO: 154286 - protein, 436 aa, Oryza sativa
  Clone ID: PAT_MRT4530_54161C.1.pep
MEGAARPVPGDPLPLGLSRGPRVTRTKQLDFLHRFMASPLVPSFSASGAGLSVHHAHLVHLAHNLSFTILEQLHVQKLVAVVKEKLSNRQEVSWSNDIKRHLHDVMSLGVGTELLITPDTTLLLELYNLKKGDRGKAIFRHKANYLDTFYAIWYLVMKLPHQNITLEASWPGLFIDKNGVYWDVPLSLSADLASVGSESGLSYHVLLQQNSGEPKCFGGGEETSDVPVALLPGLCAKAAVSIKKSIDVWRKKEDKLKNVQPYDVFLSEPHVSFTGIIGAVASGSFGDCSKRMSMQNEILKSNAFKYFDERNKFAAFADLFASVNFTAQHGNFQRLLLDLTRLAQDFFFSRRPDLETFCDVCPDVIVSLQQQIVGPFSFRVESTVTIDPKKQDHFVRVDDSVFAIDWALKVLGSAKATAWYSPKHQEAMVELRFFET

SEQ ID NO: 154287 - protein, 73 aa, Oryza sativa
  unsure (1)..(73): unsure at all Xaa locations
  Clone ID: PAT_MRT4530_54162C.1.pep
QQQLASLISYRAMAXRTEQQVRLPMSLRWRXAAAVVGAAGEQQAGSRLRISDVQREADNRREXDCRCDACXXD

SEQ ID NO: 154288 - protein, 236 aa, Oryza sativa
  Clone ID: PAT_MRT4530_54163C.1.pep
GGAGDQYRGPAHGCLRGDPAARRAERAPPPPPRLPALAQRHQLPRAGVAGPREDARLRLPSPRSSHRRVRHRRPGGGRRRVLPEAMGRRRRPESSGHLLPPEDDRQLQRPALPVRRGGHRRHRAAQPGHRRDAGRRRAAGPPAQAPGAVRPRPVRRGVQLHVPRGDGEVQDRAPRRQRRAAGGGGGAHARGRRAVAVVAEGGGARRIELLAAGRRRQRRPSHVLDQPRRRRQAHVV

SEQ ID NO: 154289 - protein, 137 aa, Oryza sativa
  Clone ID: PAT_MRT4530_54164C.1.pep
PPQPFKKVFFTRDPFFRIFKRLGQPPPSFYRNMGAVKKPFFRGAFVFASPLKGIPPNGVAKTLRPPHKGFIPPSFGRFRGKPKGGFTPSLVLPNKPKMGKVFPLSPHEAARKRLTPFYQLRGPNRAPLRRKRGDFTS

SEQ ID NO: 154290 - protein, 60 aa, Oryza sativa
  Clone ID: PAT_MRT4530_54165C.1.pep
AGVPQLVVDRIPCVGTLRRGRGSHGGRRHLGSGRWRRGHPSGDREGTGGGMRGRQAKTRV

SEQ ID NO: 154291 - protein, 114 aa, Oryza sativa
  Clone ID: PAT_MRT4530_54166C.1.pep
MDKTPVDDNATDKSEVPKVLRSHNSKSKDDQKEKWMFEKHFGQIYALDEGPWEMRKLRKWYIDASKKGLMSLTVRLPPDAFMANKGSLWLDFSDLHAIYHRKKMDVNFFGAWCL

SEQ ID NO: 154292 - protein, 119 aa, Oryza sativa
  Clone ID: PAT_MRT4530_54167C.1.pep
MRVRRRRRSWSPTIASRIAVGGVSLASIEPKLEDFLGIISFSEQQQHHGKGSTGATCYASSGSSVGYMYPPSSSSLHFADSVMVATSSQLVIHDGVSSDMVSATTANGNGGIVLAMIKN

SEQ ID NO: 154293 - protein, 59 aa, Oryza sativa
  unsure (1)..(59): unsure at all Xaa locations
  Clone ID: PAT_MRT4530_54168C.1.pep
LHNYQGGNLSYQYQPPSPQAQYQPGGLAEPRFASQYGXFEPMQQQPQGAAQQRPWADVI

SEQ ID NO: 154294 - protein, 143 aa, Oryza sativa
  unsure (1)..(143): unsure at all Xaa locations
  Clone ID: PAT_MRT4530_54169C.1.pep
MPVPVDSRRVVSGTVWKNRATGAGLVDEVRGVATTTADGAGGGAVAAGRGGGAAAVGGGGXGGDGGWSRQRPGAAAVQRPATTRTTVTTSGSATTTTTSGGGXDGDDDGSGGGATTATTRTATIASGSGGGRSGGATAWMRKY

SEQ ID NO: 154295 - protein, 149 aa, Oryza sativa
  Clone ID: PAT_MRT4530_5416C.1.pep
RTPLSNYDAVVLLHQEKLCRPHQVLFPAETPNGKLVICGKPCKDFHPYMPLNKGVVKSLHDSREKILVNFDPTTYFLRDLKSAFPKTFKLWYDSIGGDAIGLTWENSKKRGRDEADETMLDPASILKEVGNVGKGLVRGVYLLKAPKLQ

SEQ ID NO: 154296 - protein, 58 aa, Oryza sativa
  Clone ID: PAT_MRT4530_54170C.1.pep
FFFFLTWELVQVCIANWKTGNTTHMDTESTQPIRTPKKNHTDTEDTSMTKLTARDVAN

SEQ ID NO: 154297 - protein, 221 aa, Oryza sativa
  Clone ID: PAT_MRT4530_54171C.1.pep
MDQAVGPKICHVIDIQLQGDAAGAAAAAAATSSNCVVCSTEPSPEWVAIGSPATAAAGGDLLTPDALAELAAAAAAAPEADDDWADCRSRVVLYHVARARTFFAGVLRRRPAAAADRRRSAGDVLAELTAAAATTSDGRVGRFWYHACTGTFFALKKHYKAMRVECNQEGPCYPIWISWITFFFLMMLFGALIASAGADQTSNKRWIVKRLLHSRTDEVIL

SEQ ID NO: 154298 - protein, 70 aa, Oryza sativa
  unsure (1)..(70): unsure at all Xaa locations
  Clone ID: PAT_MRT4530_54172C.1.pep
CVHYXIPEDYSVLHGIMARTPDDILLMCGHILIVGVLGASLILETPHIFFFIATFIDDHIAHHSQFLKSA

SEQ ID NO: 154299 - protein, 61 aa, Oryza sativa
  Clone ID: PAT_MRT4530_54173C.1.pep
MEDWRAMMIAMVLGPCVGAGDPREARGKGKLGSQAHLPPHRRAVLTFYGPVYHKRLDAHGK

SEQ ID NO: 154300 - protein, 39 aa, Oryza sativa
  Clone ID: PAT_MRT4530_54174C.1.pep
GIQVITKSSPIRYFHEPIRPIRFPKWIKNINILHETYTK

SEQ ID NO: 154301 - protein, 770 aa, Oryza sativa
  Clone ID: PAT_MRT4530_54175C.1.pep
MAQLGDPATRPEEDFCFIPTSYAIDEELREWGNTAAVSWAIRAPPSTGALEIEEVIREEFKLHQGEVAVSLHHPEAFLIKFQHRRHCEDVVKKGFAKRRGIEVHFIKWRSLQNALGVALMFRVRLCLDGMPMHAWAADITERLIGRTCALEQIETDLVHPVESGNTRTINLWAWTVNPSTIPKRMWLGFTKRAKDKQAEILFVEEKPPKHWQKGVHHPVPFHLEEIHDYTSAGVILTDETTCQPTRRRLPPWNLGVLDGEPVPARAFETFPHHPQPPRSVHERLGRNKERDDDDRVGRDDRRSRDNRGKGGRDRSREERNGRDENDDRGGRDDRGDRDERGERSVRDGRRGRGGRRNERPWRRREYNDDHPSFFDNQRRRDHDGDDDNDGRGRRDLARGRESWKHGEAKYRRERTRSPRPRDKENSNRYRGWRNRGVEGDGEPTEPELTLPHQRENDAMVSKFQFLLAMHSPVLKDNLAAEEFNQTTTLMEKIQEPAREGDEAWSLLEPIPVSRVLARIKCDLPANVSPQETTRQEIEEALARMEVAVAAATEEPLLSPQSPCWTAVHLPAANKADTIVLQSPGQNIVAEAAATNTPRGSPKQNVVGKAAVTNTPSGATTTTTTSVTPAQLALDSLFATPPMAVIPMPPPIRKVAVGRRVKLRKQYNTGAKRRSARIAKQPALPTMERCQRVLFKRMGWLPGGDGAASMEEVLAQYVAMFEGPLLQHTIAALTAVFGIDIEDDDNPTDSLVEMVGEGVDEAAAEIKEIIA

SEQ ID NO: 154302 - protein, 54 aa, Oryza sativa
  unsure (1)..(54): unsure at all Xaa locations
  Clone ID: PAT_MRT4530_54176C.1.pep
NXVXXLXLXGPRXMXXSIXXXRQILEXXMXXCXRNCMXXRXXLSSASXAKXGHP

SEQ ID NO: 154303 - protein, 450 aa, Oryza sativa
  Clone ID: PAT_MRT4530_54177C.1.pep
MARGGRRHKPPSSAPEAEQPEALSRILRTEAAVSGVSRKAAAASRQHSTRLWPRAVLEALDSAVASCRWEPALEIFELLRKQQWYKPRSQTYARLLMMLGKCQQPGAATALFKVMLSERLKPTVDVYTALVGAYGYSGLLDQALATVEQMKGVADCKPDEYTFSVLINCCSKLRRFDRIPAILDEMSYLGLQCNAVIHNAIIDGYGKAGMLEEMENALTSMLEDGDSVPDIYTMNSIIWAYGNHGNRIHEMERWYSEFQLMGVEPDTQTFNIMIKSYGNAKMHDKMMSVLKYMKKHFFSPTVVTFNIIIESFGRAGNIEKMEYYFRLMKIQGVKPNPITYCSLVNGYSKAGFLDKVPGIIRQTENTDVVLDTPFFNCVIDAYAKSGDIKIMEEMLQLMKEKKCKPDKVTYTTMIQAYNVHGMDEAANLLKMEVGMVDGKLLESVSEVDKK

SEQ ID NO: 154304 - protein, 240 aa, Oryza sativa
  Clone ID: PAT_MRT4530_54178C.1.pep
WIPRAAGQMKDLGLTPSEFTYNSLFYGICRRKYPKAALDLLREMQTNGHPPWIKNCTEMVQQLCFSGRVTEAVQFLDGMRQIGFLPDIVTYSAAMNGMCNTGEVDDALHLFRDISCKYYLPDVVAHNILINGFRKSSKLDEAQKIMEEMLEKGLFPSVVTYNLMIDVCCKTGRIEKAISYLDKMVYEEKQPTVITYTSLIDGFCSAGRPDEAIKLWCEMREKGCAPNNIAYTAFINGLRK

SEQ ID NO: 154305 - protein, 82 aa, Oryza sativa
  unsure (1)..(82): unsure at all Xaa locations
  Clone ID: PAT_MRT4530_54179C.1.pep
DDDDHTPWRPRRRGRHPRRASAPSEASINGGLLRAAXGVCEESIPGLRVDHVSISGLPXLNTSLRXSSLPPAVEAFRRRSAA

SEQ ID NO: 154306 - protein, 134 aa, Oryza sativa
  unsure (1)..(134): unsure at all Xaa locations
  Clone ID: PAT_MRT4530_5417C.1.pep
NSSRNAVRLSDVAWATPEDGSCTGFGHTKPASSDXAGTALELHGWDPHATPARLDLPHGPGAYTTNSRPHAGSLHTQNKRSSQTIQVKGIDSSLEDSMIRESXXGHLSACEKITQAKKHGSRNSRQPRDGTHTS

SEQ ID NO: 154307 - protein, 94 aa, Oryza sativa
  Clone ID: PAT_MRT4530_54180C.1.pep
LIGALSPLNFGGPQRLGDPTQTYLPGLDWTGPLIPPRFIWPQIPNLTATHRGKTGLFPSRKKYAFDRVYKFKGRVIFFNRGGALIKTQWGGPLF

SEQ ID NO: 154308 - protein, 71 aa, Oryza sativa
  Clone ID: PAT_MRT4530_54181C.1.pep
GGNAGVNEALDTGLGVVEGVEVTKTVGAENGGHMRTRARREHWWRREHTVGLAGTTERGLERRWWLRATLD

SEQ ID NO: 154309 - protein, 143 aa, Oryza sativa
  unsure (1)..(143): unsure at all Xaa locations
  Clone ID: PAT_MRT4530_54182C.1.pep
AVVSWEQRVRIALDAARGLEYLHEKVQPAVTHKDVRSTNVLLFEGFRAKIADYNMFSQAADMARLNRSTHTLGSFGYQAPEYAMTGHMNDKSDVYSFGIVLLELLTXRKPLDRTLPQGQRSLVNWVSIFLFWVSHFLFFCLNH

SEQ ID NO: 154310 - protein, 405 aa, Oryza sativa
  Clone ID: PAT_MRT4530_54183C.1.pep
MQRNGVMECSVCHSKVVAPSPRSVSRAYDKHRSKISSKYRALNFLLVSGDCILVGLQPILVFMSKVDGKFQFSPISVNFLTEVTKVIFAIVMLIIQSRKQKVGEKPLLSLSTFVQAARNNALLAVPALLYAINNYLKFIMQLYFSPATVKMLSNLKVLVIAILLKFIMRRKFSIIQWEALALLLIGISVNQLSSIPDGTKSFGLAVTTIAYIYTLIFVTVPSLASVYNEYALKSQFDTSIYLQNLFLYGYGAIFNFLGILGTVIFQGPESFDILRGHSRATMFLICNNAAQGILSSFFFKYADTILKKYSSTVATIFTGLASAAFLGHTLTVNFLLGISIVFISMHQFFSPLAKVKDDKPAGALEPEDAQNHRSSDSSFVNMTAGAADDASHLTATDERKPLLPI

SEQ ID NO: 154311 - protein, 489 aa, Oryza sativa
  Clone ID: PAT_MRT4530_54184C.1.pep
MSYSMSTVIVVKREKVQRPVYYVSEALHDAKARYPQIQKLLYVVIMTSRKLRHYFQAYKVTVVSSFPLGEVVRNKDVVGRIAKWVVELSQFDVHFVPRIAIKSQVLADFVADWTIPENRPDSQMDKETWTMAFDGAFNSQGAGAGFILTAPTGDQFKHAIHLDFRATNNTAEYEGLLVGLRAAIALGVKRLIVKRDSELVTNQVHKDYKCSNPKLTKYLAEVRKLERKFDGLEVRHVYRKDSVEPDALARCASRREPLELGTFLDILTKPSVKESHDENTTADSDINLRAREVNNVMADIETKDDWRIKLIKFLSTDELPEDDVEAEKISRQARIYCLIDKDLYKMGPNEILKYVSSDDGKALLLDIHEGICGSHASGRTMVGKAFRQVFFWPTALKDACDMVQRYEACQFFSKHTKLPTQALQTIPLTWPLSCWGLDILGPFPRGLGGYKFLFVANNKFTKWIEAEPTREIKADNAIKFMKGVFCRYG

SEQ ID NO: 154312 - protein, 55 aa, Oryza sativa
  Clone ID: PAT_MRT4530_54185C.1.pep
LGHFPNKGLVENLKFIGSVFECFKYKRGPCKFACAILIFYFFIPQNKVKDLVFWF

SEQ ID NO: 154313 - protein, 501 aa, Oryza sativa
  Clone ID: PAT_MRT4530_54186C.1.pep
MATWILGWLLWLPVFLISLYLVDILAHSCRRLPPGPRPLPFIGSLHLLGDQPHRSLAGLAKKYGPLMSLRLGAVTTVVVSSPEVAREFVQKHDAVFADRSIPDSIGDHTKNSVIWLNPGPRWRALRRIMATELFSPHQLDALQQLRQEKVAELVDHVARLAREGAAVDVGRVAFATSLNLLSRTIFSRDLTSLDDRGASREFKQVITDIMEAAGSPNLSDFYPAIAAVDLQGWRRRCARLFTQLHRLFDDEMDHRKLHSRHGGPGENGKEKDDFLEVLLRLGARDDDIAGLDGDTLRSLFIDLFAAGSDTSSSTIEWAMVELLKNTLSMGKACDELAQVVGSRRRIEESEIGQLPYLQAVIKETLRLHPPVPLLPHRAKMAMQIMGYTIPNGTKILINVWAIGRDKNIWTEPEKFMPERFLDRTIDFRGGDLELIPFGAGRRICPGMPLAIWMVHVVLASLLIHFKWRLPVEVERNGIDMTEKFGLTLVKAIPLCALATPT

SEQ ID NO: 154314 - protein, 99 aa, Oryza sativa
  Clone ID: PAT_MRT4530_54187C.1.pep
MRIPLELGHQPRRRHARSPELKAVGEPVDLVIFFVIFPLPSCSLRAGAGAGAGAAMLLSLLAPRGAWPHPIPLTTPEDGLVAALAGGHGREAAPAAPKS

SEQ ID NO: 154315 - protein, 139 aa, Oryza sativa
  Clone ID: PAT_MRT4530_54188C.1.pep
QTMIQNISTNYMTRTKIHHNMSSGTIHQSCNQQKQHYAYKKPNFPTFNTIFVTLVPHNTNISFPNSTFLLASFKSSFIFSTLSCNSLMSANWAATKAFNSSFYSTSSTNSHQEKKATILSVSIIFAATNKLPSRLLCIS

SEQ ID NO: 154316 - protein, 215 aa, Oryza sativa
  unsure (1)..(215): unsure at all Xaa locations
  Clone ID: PAT_MRT4530_54189C.1.pep
MADRRRGWRRRTETTTTNTGGVRSKGRRGRGRPCRCDAGGGDGDVGRRTGTAVGAAEGDVDEEEGEAGAAAAVSGRRRAAVGVDGDVTVPREGTAASANALGAANGRQEAVQWRRCHWTPVGTRLRWSPRETEAMQVEGKQLRRRGRRRRGRPAHGHDSRGGWRRGEGAGHGRGXERRRKRRPAAMEGGRGYHACHHENTMLGVSFQLTTKCFRL

SEQ ID NO: 154317 - protein, 62 aa, Oryza sativa
  unsure (1)..(62): unsure at all Xaa locations
  Clone ID: PAT_MRT4530_5418C.1.pep
PXIIAGQRHDCTQLPAQAFNRHPPLASCKARRHLDRWRPAGVAPPVAAVGPTPRSRPASYXG

SEQ ID NO: 154318 - protein, 41 aa, Oryza sativa
  Clone ID: PAT_MRT4530_54190C.1.pep
LRLSSSPHHSSRHGRALRGRRARHHCRARGCRRASAQRRRS

SEQ ID NO: 154319 - protein, 186 aa, Oryza sativa
  Clone ID: PAT_MRT4530_54191C.1.pep
MATVDGPFPRRAIPVEPMRLARAADPAGGFSHGTSAGGGGKRADGGFGRGDGRPAARWLRERRGQRIQPRRLILQPPPLSRRCSSSGPPDDRGSAGGNCGSADGDNCNRGSHSDICSELPPLPSQLDDSNRRLGIGDFASAGGRHRDVEENTLVNKMQYREQSCGERAPKNLIDCLPIHVLKQTEF

SEQ ID NO: 154320 - protein, 58 aa, Oryza sativa
  Clone ID: PAT_MRT4530_54192C.1.pep
EVPVQCLTLFLCLKCNCIVRVILTTIIHIFSIAILASYPVSSGSSRVYSIFVSKEKGC

SEQ ID NO: 154321 - protein, 87 aa, Oryza sativa
  Clone ID: PAT_MRT4530_54193C.1.pep
MGRGGSRVEEGNNDVENLQQPEGEERSEKEENSIGAGGWRAWKSADRRCLMVRDQLARRDLWRGGYPTGPAPNGEIAIPTLNKIPGG

SEQ ID NO: 154322 - protein, 200 aa, Oryza sativa
  Clone ID: PAT_MRT4530_54194C.1.pep
MATVDGPFPRRAIPVEPMRLARAADPAGGFSHGTSAGGGGKRADGGFGRGDGRPAARWLRERRGQRIQPRRLILQPPPLSRRCSSSGPPDDRGSAGGNCGSADGDNCNRGSHSDICSELPPLPSQLDDSNRRLGIGDFFASSSTNVPSSSSSASAGGRHRDVEENTLVNKMQYREQSCGERAPKNLIDCLPIHVLKQTEF

SEQ ID NO: 154323 - protein, 342 aa, Oryza sativa
  unsure (1)..(342): unsure at all Xaa locations
  Clone ID: PAT_MRT4530_54195C.1.pep
MASSRPISESTITRSTCATRTARATHQFEIVGYSLKRCLAAGEFVRSSAFAACGYRWSVRVYPGGFGPAHREFVSVFVKMMTNRGKAAARFDLRLIDRATGLPRSVFRAAQPVVFDYSVKHKKCKGKRGTRAFMRRRDLESSAFVRDDRLIVECVIDVVVANGGDDDTAAAASPLAGVPAPDLSRHLGELLERADGVGADVTFDVRGQPFAAHRIVLAMRSPVFMASLYGSMREHRAPRIAVDDMEPEVFDALLRFVYSDTLALPGDLGEGEYKEMVRQLLEAADRYAMDRLRVICELILSRSLDAKTVAATLAMADQHSXYCDALKDVCVQFMAVGLDDHN

SEQ ID NO: 154324 - protein, 67 aa, Oryza sativa
  Clone ID: PAT_MRT4530_54196C.1.pep
LPPLARPSRQVGSLDTSRWMTVAFSAVRTVKKAIAVLISRLDSCWFHGQACCHGYSQGSNPICGCAR

SEQ ID NO: 154325 - protein, 128 aa, Oryza sativa
  unsure (1)..(128): unsure at all Xaa locations
  Clone ID: PAT_MRT4530_54197C.1.pep
MPMARAMYGNWAGQIVVQLSIFQAIVWLTSLVVVLEVRKAFVSDAHDESNRHEEGSFIDDDTVVGGSGTSEDMQSLEEGVSDATNQDLKGEEAVTXWQGSHLTLPPALEGSVQIMSRSGLGLAMFSMG

SEQ ID NO: 154326 - protein, 75 aa, Oryza sativa
  Clone ID: PAT_MRT4530_54198C.1.pep
MPHARLTRGTAVPHGQAMDQCNTVPFVHDTGLSQQTDICPASLTTAGSTAFVAVTYAIAIAIAAVAPLLRALRWR

SEQ ID NO: 154327 - protein, 603 aa, Oryza sativa
  Clone ID: PAT_MRT4530_54199C.1.pep
MAEIPYGLGSHMIGWVDIGKILSAIAPLYFALVLGYCSSKRWWRIFTAEDSEAIMVAWFALPFFTFEFTLHLDPYNVRYSLIAADSISKLIIVIVIGIGVGLIFRKEGLCTAVIDWCISGFSLASLTNSLVVGVPMARAMYGNWAGQVVVQLSIFQAIVWLTSLMVVLEVRKAFVSDAHDESNRHEEGSYIDDDTVVGGSGTSEDMQSLEEGVSDATNQDLKGEEAVTVAGVNGARLPLFKSVARKLACNPNLHASVIGISWACISNRSHLTLPPALEGSVQIMSRSGLGLAMFSMGCNTSVYFILHICQGIWIACRRPEYSKTGGARVPVRLICRHGTAWRGATKGHVRERDLMIGWVDIGKILSAITLLYFALALGYCSSRRWWQIFTAEDSEAINRMVVWFAFPFFTFEFTLHLDPYNVRCSLIAADSIAKLIIVAAISIGVMLKFRKEGLCAAVTDWCISGFSLASLTNSLVVGMPMARAMYGNWAGQIVVQLSIFQAIVWLTSLVVVLEVRKAFVSDAHDESNSYEEGSFIDDDTVVGSSGTSEDMQSLEEGVSDATNQDLRGEEAVSVAVVNGARLPLFKSVARRTSLCHQLWRGRC

SEQ ID NO: 154328 - protein, 51 aa, Oryza sativa
  Clone ID: PAT_MRT4530_5419C.1.pep
MAMATPWPWPGQPAHALARQSAHYVNRRRHWHSQGVGGGSEPSSFCPDPAP

SEQ ID NO: 154329 - protein, 571 aa, Oryza sativa
  Clone ID: PAT_MRT4530_541C.1.pep
MIGQPYEGADQTPAASGVNYTSPVATKGQERQYNEENVEVVNIDLSSNFLTGGIPEDIVSLGGLVNLNLSRNHLSGQIPYKIGAMRMLASLDLSENKLYGEIPASLSSLTFLSYLNLSYNSLTGRIPSGSQLETIYNQHPDIYNGNSGLCGPPLQKNCSSNNVPKQGSQPVQLLTHTHINLTKLEHLGLSRNYFGHPIASSWFWKVRTIKELGLSETYLHGPFPDALGGITSLQQLDFTNNGNAATMTINLKNLCELAALWLDGSLSSGNITEFVEKLPRCSSPLNILSLQGNNMTGMLPDVMGHINNLSILDLSNNSISGSIPRGIQNLTQLISLTLSSNQLTGHIPVLPTSLTNFDVAMNFLSGNLPSQFGAPFLRVIILSYNRITDILSLVMKHQELNYHAEGSFDLVGIDLSQNQLTGGIPDQVTCLDGLVNLNLSSNHLKGKIPDNVGDMKSVESLDFSRNNLSGEIPLSLSDLTYLSSLDLSHNKFVGRIPRGSQLDTLYANNPSMYDGNSGLCGPPLQRNCSSVNAPKHGKQNISVEDTEAVMFFYFGLVSGFVIGLWVVFCAI

SEQ ID NO: 154330 - protein, 45 aa, Oryza sativa
  Clone ID: PAT_MRT4530_54200C.1.pep
IYSIQSLLYTSLVSYLAFLKSNKLFSINSFSERDISCCRMDNYQF

SEQ ID NO: 154331 - protein, 68 aa, Oryza sativa
  unsure (1)..(68): unsure at all Xaa locations
  Clone ID: PAT_MRT4530_54201C.1.pep
XSLPVVPSPDGCCXVASNXPKAIARSPTHSKLEVSFLPFHGRXVSSRSGEPXXPRPAPXRAPPRCLLR

SEQ ID NO: 154332 - protein, 99 aa, Oryza sativa
  Clone ID: PAT_MRT4530_54202C.1.pep
MEEGQTTQTGRHSTLGRKKHCGIYACEFVKGYYYSTHGIPCNLWYSKSERRRPVALGVFDSNVVDWSLPLRLLLDFVLLYGEENIVFMLVVRSYHLSGY

SEQ ID NO: 154333 - protein, 41 aa, Oryza sativa
  Clone ID: PAT_MRT4530_54203C.1.pep
MADMGLEACSWRSDDVSGRGGKCVFCLLPLYLRKMRLHRLL

SEQ ID NO: 154334 - protein, 74 aa, Oryza sativa
  Clone ID: PAT_MRT4530_54204C.1.pep
KPQKGLRAFSCPWPPPLEITPPPQIFPLKGRRPNFFLTPAFLETIKPPPKTQKAPPLVFKCSPTLRPGLAWFYP

SEQ ID NO: 154335 - protein, 265 aa, Oryza sativa
  Clone ID: PAT_MRT4530_54205C.1.pep
MGIPAASVAARTAVGAALAAVIAARAVRRRSLDGSGGAAGFVVMAIHLACGYRYGALVLAFFFTSSKATKIGADRKRRIEDDFKEGGQRNWIQVLANSLIATILVIILATMTGGQDQCLDSHESKVITGIIGGIIGHYCCCNGDTWSSELGVLSDEQPRLITTLKPVRKGTNGGVTLQGLLAATAGGLIIGLTFVFVGLLTVECSFDVALRQLLVIPISATAGLLGSLIDSVLGATLQFSGYCSVRKKVLPLIAQRFDPQLCFYD

SEQ ID NO: 154336 - protein, 51 aa, Oryza sativa
  Clone ID: PAT_MRT4530_54206C.1.pep
GMLFYQLCIPVHAGVVSARILFTPTLVRLPLVIISIIHRVGMWNHLSPVLC

SEQ ID NO: 154337 - protein, 241 aa, Oryza sativa
  unsure (1)..(241): unsure at all Xaa locations
  Clone ID: PAT_MRT4530_54207C.1.pep
LFSASRRRRRRRPATLCRTATRPSTRRRHATTASSPPPTRQSSPPPASSSTPISPTASTSPRASCSSPATSTSGATASAPPGRRLARHPSTRRSPSSPPPLPSRSSSSSTGIHRSLTRVASVGATSHPPPMATTATPRTASSPSRSARXSPTAESPPTSASTSPSRQTALRRRAAARCGSSTTPSSTACRCTSPPPASHGHLMPSSTCRYTSPAGAPPRPRSSASLAGRSGISSSASVAGS

SEQ ID NO: 154338 - protein, 136 aa, Oryza sativa
  Clone ID: PAT_MRT4530_54208C.1.pep
MQSVPRTWSHQRSDSTINDVAITQAVIGKLVTGVGYLSLTWSTVVLLGGFVSTVPINEFWFLTAISLVLASTQNKYFLRFTMKNKARLSTNHRTQQVIPTGRGVQFYPQDTIPHMLPCAEDYRDTAKGETVTKPFI

SEQ ID NO: 154339 - protein, 123 aa, Oryza sativa
  unsure (1)..(123): unsure at all Xaa locations
  Clone ID: PAT_MRT4530_54209C.1.pep
MTSGRPFFFFFHITCLNECIVDAGFDLVGRTHISCLYHAQVLYNQPSYIRCKSFTRHTICIESXPFVKPSTLQLINNHDMYQQGCXQLMLVXDSCYCKCITLNHVIVLILRVSEVAVAYYDMT

SEQ ID NO: 154340 - protein, 88 aa, Oryza sativa
  Clone ID: PAT_MRT4530_5420C.1.pep
MDELKDWIWQRWQRLLTPEDIITTPRRMGYVEDDKGYIEEESAHAQAAAVYANKKMIYATKAQLLRLVRPNQSRYGLHGIHGWKEGHV

SEQ ID NO: 154341 - protein, 54 aa, Oryza sativa
  Clone ID: PAT_MRT4530_54210C.1.pep
TVKYIHYPLCSTLKFDLSFTPSLLSKHTTLIIILYNQQLHLLKNTICDQTTTSH

SEQ ID NO: 154342 - protein, 69 aa, Oryza sativa
  Clone ID: PAT_MRT4530_54211C.1.pep
MVDKWKGCKMEGTLDKIIGDDSPLKESSVMTRGHDEINIVGRIAGQHQLLEKGCIGLRPNAHDIITGKT

SEQ ID NO: 154343 - protein, 158 aa, Oryza sativa
  Clone ID: PAT_MRT4530_54212C.1.pep
LGPTGDRRGKSGARPARAEMGAAGSWRGRSWTRRWGLRGDDSGGGGGGGGGGGRGGGAVAAARERKAGSWVAQGGEEGKVVRRRGGGEQGEDVDGGGPGRDGLGINATLPHPRERPCSTLERAARGLDPDVGGLVFHFSGRGSVSANLHGQYSTTTTQ

SEQ ID NO: 154344 - protein, 31 aa, Oryza sativa
  Clone ID: PAT_MRT4530_54213C.1.pep
FYAKNPFVKAYQEPHFGFFLLTITSVVDCPC

SEQ ID NO: 154345 - protein, 221 aa, Oryza sativa
  unsure (1)..(221): unsure at all Xaa locations
  Clone ID: PAT_MRT4530_54214C.1.pep
MSASSSPPLSSLPLSSLSTATVMESSDLGVDDVRWXEELGPTGDRRGKSGARPVRAEMGAAGSXTGRSWRRRWGRRGDGSGGGGGGGGGRGGGAAAAARERKAGSXVPQGGEDDKVVWRRGGGEQGEDVDGGGPGRDGRGIDAALPHPRERPCSALERAARGLDPDVGGPVHGERDLGIGKEHVPPLLEGGVRERRLVFIFSGRGSVSANLHDQYTTTTTQ

SEQ ID NO: 154346 - protein, 155 aa, Oryza sativa
  unsure (1)..(155): unsure at all Xaa locations
  Clone ID: PAT_MRT4530_54215C.1.pep
YPNHPILRMVEERSDHDLMEATDPLPEQEGESSQVITLTTNDSEEISTLSSWFYQVMISSSIGISVRPCFCRCAHLAAPRRGADLRKLPLSSIASHALDSSLSGSFLGLICGXSNAAMLFKPLSKDAGQDGQMFIQCSCSNETYTILEENCFLKL

SEQ ID NO: 154347 - protein, 401 aa, Oryza sativa
  unsure (1)..(401): unsure at all Xaa locations
  Clone ID: PAT_MRT4530_54216C.1.pep
MKLLLTAFEXLSGLKINFHKSELFCFGQAKQCYEQYSNIFXLKYNXFPVRYLGIPMYYRKLSNNDWLTIEQRIXEKKLISWKGKHMSVGGSLVLINYVLSSLVLFMISFFEIPKGVLQKNDXYRSRFFWQGDKHKRKFRLTRXGHYMSAKIXGGVGVHNLEIQNRCLLSKWLFKXINEQCVWXDLLKWKYLRSKSITQVERKTRGFPLLSGLMKVKSSLISMGSWIINNGEQIRFXEDKWLGNFSLNDKXSSLSSIVRRKSSSIASVMGFVPLNVSFXRALVGHNLVNCHNLCASIVHINLTEDDDIFRWKFHQNGHFSVRSMYLALINNGYREWNKIIWKLKMPLRLXIFMWYLFKGIVLTKDNLAKKNCNGSLRCCFLXKNETIYHLFLDCHLQQFLLP

SEQ ID NO: 154348 - protein, 40 aa, Oryza sativa
  Clone ID: PAT_MRT4530_54217C.1.pep
DGSYAAWLDSPYNSILSMWDFMSSLVSSLSGELRSYCPPL

SEQ ID NO: 154349 - protein, 43 aa, Oryza sativa
  unsure (1)..(43): unsure at all Xaa locations
  Clone ID: PAT_MRT4530_54218C.1.pep
IIKNMLLCIACYTEFTSVFNVCLYEPSYWXIEKKKKKKKKXKK

SEQ ID NO: 154350 - protein, 414 aa, Oryza sativa
  Clone ID: PAT_MRT4530_54219C.1.pep
MTLPAIHMIQPVPIDWGQCTFFFHAILPNCLLIETPVLLLQHSHDCKMHTTMVALYITICSILFIVSKMLISFLLYKKWARKKRIIENSLTGGKMVMFRSAAMQSLSPKSFLTMIMGLSNKDIIGSGGYGTVYRLSVGEKAAFAVKKLSRGSAEMDRGFERELDTMGDIKHRNIVPLCGYYAAPHFNLLIYELMPNGSLDTILHGKEETRRALGWEARHKIAAGVARGLAYLHHDCIPHVIHRDIKSSNILLDHNMEARVSDFGLATLMKPNHSHVTTVVAGTFGYLAPEYFETGRATTKGDVYSYGVVLLELLTGMRPTDESFLENGTRLVTWCFVAETDHSLAVTNHHQVKETMEEKREEHAVDSALESSFPAEEVKLVFKVADKCLESEPCNRPTMAEVVKLLEQAKNTTA

SEQ ID NO: 154351 - protein, 112 aa, Oryza sativa
  unsure (1)..(112): unsure at all Xaa locations
  Clone ID: PAT_MRT4530_5421C.1.pep
FGTPXPGNEVRLGLVERTLPMDVDFSXVGRRTRRREVVGYRPIVHSDERLRRCQVEEERCSSPEVTAASSHLLAPMPPLPAKLLATRILLLDAISPQLLRCSSPIMATTWDQ

SEQ ID NO: 154352 - protein, 187 aa, Oryza sativa
  Clone ID: PAT_MRT4530_54220C.1.pep
MTLLPVKQPINHSSPSPAEHPLSGPHVLSGPERQRPLPPPQATTVAVAVVTSTSSVSELASPHLSSIRHRHNVLITSTPKHRQACLSALSFGWYCRHLLISSIPKLRLLPPLPFALRLSAAASPLPTNNGTPDLVSNKLETTGSKFPRASAATSSTLSCMVAIVCLFTASELRDTRFGLQEVGDHWI

SEQ ID NO: 154353 - protein, 72 aa, Oryza sativa
  unsure (1)..(72): unsure at all Xaa locations
  Clone ID: PAT_MRT4530_54221C.1.pep
WLMNHMKKLNNPTYLGSLLLPNMYLQKDTRQHTDFLSQYDYLCIYGACMSICNLLVVLHRSSSTAKSVKISX

SEQ ID NO: 154354 - protein, 61 aa, Oryza sativa
  unsure (1)..(61): unsure at all Xaa locations
  Clone ID: PAT_MRT4530_54222C.1.pep
VVLCLMIGLSVNSRSVTLHIPVSRVYYLYCAKLLLAPRTPRLMISXIXSSLLLLLSSPLLS

SEQ ID NO: 154355 - protein, 79 aa, Oryza sativa
  Clone ID: PAT_MRT4530_54223C.1.pep
MAMPGRTRSCIQGGSEPLRMDELYVTPSPVHASSGATRGLAAAVLHLLPFASLPPDQPMANGCLQGRWRRGFFHRWHRG

SEQ ID NO: 154356 - protein, 320 aa, Oryza sativa
  Clone ID: PAT_MRT4530_54224C.1.pep
MSAPAAVEQRLQALRQKLGRKQHFEEAVADLAAAVRDHHAAASPALRDLMYSTVCRVATVLQTRYTAPGFWRAGLNLFLGTEKLVTNPSEKEQLKTFILRAREHLDEKENEESMPNNRETDTRFLFEGHLTVGPEPPPPAWLVAQNLARELSILAEPSGDQGANNNGESRAEEMAPAAAIMNFLNTMTVDGDLEAALEESLQNVMANPKVPPASKEVVANLPVVTVTEEIIARLGKETQCAVCRESLLVDDKMQELPCKHLFHPPCLKPWLDENNSCPICRHELRTDDHVYESRKEREREEEEDRKGAANAVRGGEFMYV

SEQ ID NO: 154357 - protein, 76 aa, Oryza sativa
  unsure (1)..(76): unsure at all Xaa locations
  Clone ID: PAT_MRT4530_54225C.1.pep
MHIFLNTLTVNTITLEVVSSDPIDNVKAKIQDKEXGILQNQQCLIFAGKQLEDGRTLVDFNIQKELTFYLVLRLRG

SEQ ID NO: 154358 - protein, 266 aa, Oryza sativa
  Clone ID: PAT_MRT4530_54226C.1.pep
MAASALDSAWEGLTGSFTEFQLATVVTFLLHETVFFLSGLPSLLFERFGLFAKYKIQKKSNTPSYQNRCVLRLILYHVCVNLPVMVLSYPAFKFMGLRSSLPLPHWTVIVSQVLFYFVLEDFIFYWGHRALHTKWLYKHVHSVHHEYATPFGLTSEYAHPAEILFLGFATIVGPALTGPHLFTLWLWMVLRVLETVEAHSGYHFPWSPSNFLPLYGGSDFHDYHHRVLYTKSGNYASTFVYMDWLFGTDKDYRNAKAIEEKDGKHL

SEQ ID NO: 154359 - protein, 91 aa, Oryza sativa
  unsure (1)..(91): unsure at all Xaa locations
  Clone ID: PAT_MRT4530_54227C.1.pep
NVRSFCPCVMYPSRIVPVLGTVKPGVPAPLARPAGNSPGLKMKEGTGQAVSITRCPYQIGPPLLWCQVTKPKARECMHVCINXARDAVVRR

SEQ ID NO: 154360 - protein, 293 aa, Oryza sativa
  Clone ID: PAT_MRT4530_54228C.1.pep
MAASALDSAWEGLTGSFTEFQLATVVTFLLHETVFFLSGLPSLLFERFGLFAKYKIQKKSNTPSYQNRCVLRLILYHVCVNLPVMVLSYPAFKFMGLRSSLPLPHWTVIVSQVLFYFVLEDFIFYWGHRALHTKWLYKHVHSVHHEYVMLHLGLILLHFVIVPVLLNNNFLGRYATPFGLTSEYAHPAEILFLGFATIVGPALTGPHLFTLWLWMVLRVLETVEAHSGYHFPWSPSNFLPLYGGSDFHDYHHRVLYTKSGNYASTFVYMDWLFGTDKDYRNAKAIEEKDGKHL

SEQ ID NO: 154361 - protein, 522 aa, Oryza sativa
  Clone ID: PAT_MRT4530_54229C.1.pep
TGCSRQGTRSRDAAEDQCSSGAPPASHSQRRSSLAGSASDGRYPVASSTRRNSLPASKSPPPHASPRLQQNCIAIHQLRNKKQFTSFHIATRDDTASVPCLRDTIASDDWAARKAAAEALAALALEHKDLLVSYKSSCITMFEARRFDKVKIVRDSMNRMIEAWKEIPDVEEDECSSGSASDGRYPVASSTRRNSLPASRSPPPDASPSVNKRHSSSSARNKKQSPPSYRKAGQAKNRDYKVDIAVTPDATPIKVVTEEKLLKGGNVRSRLEARRMLFQDGDDRATKVAGLKAGSRVVPYEEGGNMEEISEIGGGSERFQTGYKDEGLSEIRSQLLQIENQQSSLLDLIQYMFINKKGAFAINTEACFFSVQFDFWPFKNMLSLVAYARQKFMGKSENGMNSLETRVHGLEMALDEISRDLAASSGRTSNSEAHVNSCCILNPKFWRRHDASRYSSSFSVSDGRNSSEGSRTSYKWGRQKFGVQGGFVTNPLAEPNISSAARTATAQEGRRKDLTLPKSRMG

SEQ ID NO: 154362 - protein, 327 aa, Oryza sativa
  Clone ID: PAT_MRT4530_5422C.1.pep
MQATDHADTERALAFVAMSVEDKHAGVVKRKRTKRPRHHAAPASSSESTTTEEEDMAHCLILLAQGAAVPPVLAAPAPAPPPPQPPVVVVKSERYTSRKYTEAATTADGVRAGFYVYECKTCNKCFPTFQALGGHRASHKKPRLPGADDDNVNNVTNTNAIVVKSKPPLTTTTTPSAPSPPPPQADAVVVPDVTTVLSLNNVAAAGSIINKLRVHECSICGAEFGSGQALGGHMRRHRPLHAPPERAATTAATTAATATAPDTKKEGSTSINLELDLNLPAPSDEESVSPPPPPPPPVLLALGGQFNDGKKPILQLTASAALVGCHY

SEQ ID NO: 154363 - protein, 584 aa, Oryza sativa
  Clone ID: PAT_MRT4530_54230C.1.pep
MERSTTTTTEQQQQQQQGRRRGAGWRRWAVLVATVWIQAVTGTNFDFSAYSSALKASLGVSQEALNYLATASDLGKALGWSSGLALIHLPLPAVLLLSAASGLAAYALQYALILDYLHLPYPLVFLICLVAGCSICWFNTVCFVLCIRSFSSSNRPLALSLSISFNGLSAAFYTLFANALSPFSPSVYLLLNAIVPLVVSLVALPAILLCHPHDGHLHVVPKHDKHIFLGLYLLAFITGIYLVIFGSFNTTNSTAWVVLTGAMVLLALPLIIPASSSCSHVDTHDPEPTVQLNHEDSRKPLLLNSDHSTESNAMMQKTVEHPMQDCCLGTILEKGHMLVLCEEHSAKKLIQCVDFWLYYIAYFCGATVGLVYSNNLGQIAQSFHRESQLTMLLAVYSSCSFFGRLLSALPDFLHRKVSFARTGWLAAALVPMPMAFFLMWKLHDVNTLVAGTALIGLSSGFIFAAAVSVTSELFGPNSIGMNHNILITNIPLGSLLYGQIAALVYDANGLKMSVIDNHNGMIDTMVVCMGPKCYSTTFFVWGCITFLGLVSSIILFLRTRTAYSAANGQQVINTTAKFRVDRTP

SEQ ID NO: 154364 - protein, 625 aa, Oryza sativa
  Clone ID: PAT_MRT4530_54231C.1.pep
MERSTTTTTEQQQQQQQGRRRGAGWRRWAVLVATVWIQAVTGTNFDFSAYSSALKASLGVSQEALNYLATASDLGKALGWSSGLALIHLPLPAVLLLSAASGLAAYALQYALILDYLHLPYPLVALCPELQLIKLAIKIPMPVFLICLVAGCSICWFNTVCFVLCIRSFSSSNRPLALSLSISFNGLSAAFYTLFANALSPFSPSVYLLLNAIVPLVVSLVALPAILLCHPHDGHLHVVPKHDKRIFLGLYLLAFITGIYLVIFGSFNTTNSTAWVVLTGAMVLLALPLIIPASSSCSHVDTHDPEPTVQLNHEDSRKPLLLNSDHSTESNAMMQKTVEHPMQDCCLGTVLEKGRMLVLCEEHSAKKLIQCVDFWLYYIAYFCGATVGLVYSNNLGQIAQSFHRESQLTMLLAVYSSCSFFGRLLSALPDFLRRKVSFARTGWLAAALVPMPMAFFLMWKLHDVNTLVAGTALIGLSSGFIFAAAVSVTSELFGPNSIGMNHNILITNIPLGSLLYGQIAALVYDANGLKMSVIDNRNGMVDTMVLGLEQGHTEAGVDHEELHAGTYGGAAYRDLEIVKGTGVEGKQKGSYILQHVRNLFPQSTTRHCEAKLSVLGGDQDLFDDE

SEQ ID NO: 154365 - protein, 120 aa, Oryza sativa
  unsure (1)..(120): unsure at all Xaa locations
  Clone ID: PAT_MRT4530_54232C.1.pep
WRPTAERARLPAQRALRRAGKKRGRGRGGGRRQRRGERRPXDRPRRRERRPAXPLPIRSHGGRMGRPSMLHRRFACLRNAPRNPPQNARLSSRRIDSGVRSFGGTVPSCPVCLRSPSSSL

SEQ ID NO: 154366 - protein, 46 aa, Oryza sativa
  Clone ID: PAT_MRT4530_54233C.1.pep
TPMWAFMAVIRNNRAPTAAFMAVPPAVTMVAPIKTALNFSPCRLNK

SEQ ID NO: 154367 - protein, 69 aa, Oryza sativa
  Clone ID: PAT_MRT4530_54234C.1.pep
SHAVWIDYPSDATEGDIKEGRCPITILDTEVDRMSQPDVGKQLEQVMVYKSGVGRHCKTLPGPEHGWTV

SEQ ID NO: 154368 - protein, 62 aa, Oryza sativa
  unsure (1)..(62): unsure at all Xaa locations
  Clone ID: PAT_MRT4530_54235C.1.pep
AITQSFYHSLTXILPRVQFIIFALSCCTDLSIELSILQQLTFLLQXLIKTRICCLAMATFFE

SEQ ID NO: 154369 - protein, 173 aa, Oryza sativa
  unsure (1)..(173): unsure at all Xaa locations
  Clone ID: PAT_MRT4530_54236C.1.pep
PSPPAPVSRRPPARARPGGGPQPPGRHPQRRQRQAAPPRPPRRHASPPRLQAPPTPAPRSATSDSAAAPXHVGLLFEGLAEAILMDRPVPAELFDHAPEPDPAPATSPPDRRAAPPSPPPPLALGSKPGSPALSPLSPLSLITSCGPDSAGHGWRAPMVVHSSDPPPSPRPSP

SEQ ID NO: 154370 - protein, 75 aa, Oryza sativa
  unsure (1)..(75): unsure at all Xaa locations
  Clone ID: PAT_MRT4530_54237C.1.pep
EGWGLLSKYYAGKGSLSDQGYYGGGSSEEGYXGEQQQHPGMTRVRLPRAGQYGGHLPSMCGVEPHQCSFFPPGQY

SEQ ID NO: 154371 - protein, 57 aa, Oryza sativa
  Clone ID: PAT_MRT4530_54238C.1.pep
GYGRGRFGELFSSHTDPVISPPPYRTDSLSVCDVRSGFDDLFPSRMDHVDSLHREEG

SEQ ID NO: 154372 - protein, 173 aa, Oryza sativa
  Clone ID: PAT_MRT4530_54239C.1.pep
MEATDDESNPAAYEQWRWGQESDRPTADAPLSTRHRRSTVVGGSASPSPIAPSAVARRAVAELRRTASAPPRAATPPGAPDEACGLRHTNPLSLNVVTLPSASAWELEMPAESRDGETKIPWLAGLLALTAMRPCRCHIAEKKVTRTRLILKANEGSLLGQANFTSNATCDCY

SEQ ID NO: 154373 - protein, 93 aa, Oryza sativa
  unsure (1)..(93): unsure at all Xaa locations
  Clone ID: PAT_MRT4530_5423C.1.pep
MSTKSSPAELKTRKRHDYRFFLEYRTRWNDNDMYDHMNNSVYNFLFDSIINAYLIDXGGLHPPSASQFGMCVHTHTDFFSSIAYPAVADLACV

SEQ ID NO: 154374 - protein, 116 aa, Oryza sativa
  unsure (1)..(116): unsure at all Xaa locations
  Clone ID: PAT_MRT4530_54240C.1.pep
KEGSSAISDLAECGFEEEDYPVIDYELMSXEQHRLQPTRVGLLPDXVRGSNLYKNPCLHLFYLNIAYTLVPMIPVLFKYRSRDLKRRRYSKVSYLFNFEGKIYKPKTPRTPRAILF

SEQ ID NO: 154375 - protein, 164 aa, Oryza sativa
  Clone ID: PAT_MRT4530_54241C.1.pep
THPLFAAIICLSPTGRHGAGAAAAARRGSVAAAGSAPAAEAFLYLASSAAAAGSATAVAFLDQPTMHRTPFLDSSGHSDDDGGHGDNNSGSGLQPHISNGDSSSCCGRASGRQWRSWLYFPPSVVDNPRSVLIFFAPAANSDGCSVIWPYTPLMTSAWCHMNVG

SEQ ID NO: 154376 - protein, 247 aa, Oryza sativa
  Clone ID: PAT_MRT4530_54242C.1.pep
MNTCSVAAGPAAAWACSSVNTCARNSYPVELEPEPVKEREKGYVDLLVDASLLLVSNDFPPEVQRHGARMLQHLLKFRREELSSFDCSSLIHQDDTDSTNMSNKFDDIIHPRMRCNNGAVPCHQVKGCLLLAEYNILCEAFDVVTSCLRSEQYKGVLHYLLKPLNKIWVQSEWRSTFLHSAFGLTCLFSDHFLEMVYKVVKFCENDLRQSTLESIEMQFCDLHSLLRLMLPFLLQNWASNSIPEGIV

SEQ ID NO: 154377 - protein, 68 aa, Oryza sativa
  Clone ID: PAT_MRT4530_54243C.1.pep
QPDRRVNVKTFRTNVLSCFTEYFNDMLAEIIPRDFRIRISRNQISWIRFDFNSVNKKHVPPKELLFFF

SEQ ID NO: 154378 - protein, 102 aa, Oryza sativa
  unsure (1)..(102): unsure at all Xaa locations
  Clone ID: PAT_MRT4530_54244C.1.pep
KKKPSPPSPQCSPRQSPQARRTPIRRRKTPXRRARPTAXPPPPTPPPPPPPRSFAQPSREAGRGESDSAATPPRARARXSTPSPPPPTPTPTPAARRGFTAQ

SEQ ID NO: 154379 - protein, 224 aa, Oryza sativa
  Clone ID: PAT_MRT4530_54245C.1.pep
MAFVQKKNFNKSVGRPANNNFNFNYNSNSVVVDAFNGKKKAAVDAPAGGGGGGRNNNKKNSSSNDNKMSSRLKKSQLPASESVPKEEAIGGYIFVCNNETMEENLKRQLFGLPSRYRDSVRAIRPGLPLFLYNYSTHQLHGIFEATSFGGSNIDPGAWEDSKCPGGESRFPAQVRVATRKICEPLEEDAFRPVLHHYDGPKFRLELTVAEALSLLDIFAEKLFA

SEQ ID NO: 154380 - protein, 80 aa, Oryza sativa
  Clone ID: PAT_MRT4530_54246C.1.pep
YLRVARPISPKSDFLGSDLEIYFSLAVIIGSSLLYQSSRFWFLWGSKREGVRSWKEFKCQDSKWHSDLDYASSCSWIISS

SEQ ID NO: 154381 - protein, 50 aa, Oryza sativa
  Clone ID: PAT_MRT4530_54247C.1.pep
FFFFLYTLQSFISYTKLITKTLPPIQGRNHQTRMQTKKNGRYSHTASSRL

SEQ ID NO: 154382 - protein, 169 aa, Oryza sativa
  Clone ID: PAT_MRT4530_54248C.1.pep
MAASRRCLGKGVLGRLYGASRTPWGKKYTKGPSTCHRVTKSSHNRKTRYMTSLNFRSFGGFDPDLSDVAVHCKEGGDEAHETAEDEKQASATMGLWQVYGDLDAVLQVYGTMLTRLGSARLGRHARRQQAPSIGIASGRGQWPTILGFPGTLDWHGKGAETTVEDEYCN

SEQ ID NO: 154383 - protein, 291 aa, Oryza sativa
  Clone ID: PAT_MRT4530_54249C.1.pep
MNISQYFKKEKEKKSAHGVGNGDHREYKAGELDFEPPHCLAGVGTPRPRDGNKPSRAWDWFMAWLAYRAKRVLPRLVLELADKFWRRSDDSFFLREGHRHLFEGRRAISERHGVRGAEEVGVVVGAQVSSCMAMPATTGEGSSLTPPAAFPGDARVSSSWRSSASGENDDEEEEKATLPPRSTSSPGPSSVAMRRQGRRCGGEGAVQHRVGQWADPSGHQTGLTRAGAVARRPRRGPPPCRTGRQINQGQEMREVLHVGEPLVARRQAAPCGGDGGGGPVTPRRCLLAGYG

SEQ ID NO: 154384 - protein, 626 aa, Oryza sativa
  unsure (1)..(626): unsure at all Xaa locations
  Clone ID: PAT_MRT4530_5424C.1.pep
VVALLRPPDHDGGRARPPLHWSLPLPLPRGPRRRRRRRAAAALREGRXIAVSARLVQRLANLQVAIQVPTEGRKWIKIWPLHPQWMYTALKEILLYRDNMINEMCTRIQSYRVTSKYDEQTIQSPKISRTHGDFHSKPPRPINRTCGQPAKNPGSSKNRFARHAMREQGVEEREEGRLTFVVEESNGDDFDCKGKEETQVANVERGGDLLKRRAPRKPKATTVGTSLAGASSSTQPEVQEEIPTMGGECREKGALISPLFVHLPARSAEHVRNPIDWSAKTKKVQMIRVEIPKNGCRSATDPRFWTLFQQDFYEAVIMNKSNMQWINWRAAASYGDPVMNEFGTKGNKKKTMHWMTQGEWHCINYSQFAALLDLTFDDDEDRDWLHDDKVLEPHEVDFMYNHKVEYDPGTTKGMLPFFAYLNKMIRKTLTPKDDDDNNVQSYTHNILARMRASPKKFDVFEFIWEEIRLTSFTPEWSLGYAPILMKMIEQVTKLRFYKEVHHTGLKVRLEKPMTTPRRPRSTTKAARTQAPSTPTLSSSLLWKILKSIYNVCKSNAIEARKGRAELKKQTTNFLAPPMAPRSMKVMKKCSMIPLPTKLVVVLFRRRKVWDMVIVVMMGMMIDSIWH

SEQ ID NO: 154385 - protein, 52 aa, Oryza sativa
  Clone ID: PAT_MRT4530_54250C.1.pep
KGEHIFVESKMSVNFGRCKNGLDNQNVMGFCTVKLKKSITCLTGILPAPLVF

SEQ ID NO: 154386 - protein, 330 aa, Oryza sativa
  Clone ID: PAT_MRT4530_54251C.1.pep
MGSFFSTMFTPPPAADDGGDSRVVAVHSTATWDEQWGAHKSNPNKLIVIDFSATWCGPCRFIEPAFKDMAGRFADAVFFKIDVDELSEVARQWKVEAMPTFVLIKGGKESKVAGSIRSARGLLLLLLDPDGHGGGVGSRRLVLLLPSSARARVVEMEASAAAASSGSCRCSSRSDKSQARSPPERCGVSSGYRRISRHRGDGAVSGGADGWGQTERDATAATAPDWGALARRLALGALGCAVLCCGGAAVAAEDSIKASGFGLRVAASLRRLGWADEAVVFTLATLPVIELRGAIPVGYWMRLDPIRLTVLSVLGFVSLAYLFPFGELCP

SEQ ID NO: 154387 - protein, 357 aa, Oryza sativa
  Clone ID: PAT_MRT4530_54252C.1.pep
MAKDQNGSAAGEGEAAAAVAARSRSKSIEADEEERSKGRRDRDRDRRGKSKRREEEEEEEEEEGDAGSESSGEDSGERRKRRRKEKERRHRRRRSRSASSGSSSESESESESSYSDCSAGSESETDSEEERRRRRRRRRRKEREEEERRRRRKDKERRKRKEKERERERKKKEKKKRRKEEKKNLGKKAAVTNSWGKYGIIREVDMWNKRPEFTAWLSEVKQVNLEALSNWEEKQMFKEFMEDHNTATFPSKKYYDLDAYHRRVMEKEKKKGLKNALGTERTVFNDEEQRRLELLRERERQKEEEVAALKRSMQTGMAQAMKEQARLREEMMYQYRLGNFEAAAAIQKRLDPDAPLQ

SEQ ID NO: 154388 - protein, 102 aa, Oryza sativa
  Clone ID: PAT_MRT4530_54253C.1.pep
MSVLSPISLLISLFSLSFLSQMARTAAGGVERGSGSGGRVRSRRSHPSPLAPCPCPLRQAWGSLDVLVGHLRAAFEEHGGHPEANPFSARAVRLYLHEVRDS

SEQ ID NO: 154389 - protein, 48 aa, Oryza sativa
  Clone ID: PAT_MRT4530_54254C.1.pep
VLTRSHHDACMTFIYLTITNYSYGYNSVTRHHQPGARLRGSTIVVRVD

SEQ ID NO: 154390 - protein, 67 aa, Oryza sativa
  Clone ID: PAT_MRT4530_54255C.1.pep
MAAPEAMLPMMKGTRSFCDEDTITRAKRLQVTIYKHEKFRNHANYSQNTPKKERWWKNWKGCKLRQQ

SEQ ID NO: 154391 - protein, 79 aa, Oryza sativa
  unsure (1)..(79): unsure at all Xaa locations
  Clone ID: PAT_MRT4530_54256C.1.pep
EQASSDHIEIQEDLTYVEKPTRILETSERRTRNKAIRFCKVQWSHHSEEEATXEREDELKATHPHLFASSSESRGRDSG

SEQ ID NO: 154392 - protein, 140 aa, Oryza sativa
  Clone ID: PAT_MRT4530_54257C.1.pep
HMNCESRSDAQIVGPVTRNCHRLIKGAKHEADDTQEADELGERGMRAVGFGMIFWLVSVDVEEMICQNHHPNNDQEPQQQPVLLPGMLIIQLTGIALHLHLQICRTLFFSSYGLNNRRSIDDVDRLSPSPPRPSPPRGGA

SEQ ID NO: 154393 - protein, 46 aa, Oryza sativa
  Clone ID: PAT_MRT4530_54258C.1.pep
VLTIIHSSKKSSIFLQLVLYITMCTFVHLNILRLLSKCTAAVILQY

SEQ ID NO: 154394 - protein, 188 aa, Oryza sativa
  unsure (1)..(188): unsure at all Xaa locations
  Clone ID: PAT_MRT4530_54259C.1.pep
SGPARAPPPRSRPRRPGPRASPPPPRTRRAAAARAAAAGRTGPAAPPAPRAGRAPRRPHPTTAARPRGAPRSPGRSTPGSRRRRXSRARDPPPRLAPSPPPPQAPDNPTPTTPIPGKPNRPRERANPREQPAQGAKIGVAGEEIVGAGIQREERVQRGAIVAAGGRLHPPRGVAQRSKHPEEVLLLLH

SEQ ID NO: 154395 - protein, 155 aa, Oryza sativa
  Clone ID: PAT_MRT4530_5425C.1.pep
MGRPDWGGFGGRRGRLGLGQVGRLEVDGGSDMWAPHVGHRQFLGRDRSYTPDGAKTTEHTSTEEHRERVDVRAAGYQQALRRYHEKRIRARTLSIGDYVLRQVQSQVGRNKLSPKWEGPYTITQVLRPGAFKIADSDGRELANSWNIDQLRKFYV

SEQ ID NO: 154396 - protein, 126 aa, Oryza sativa
  unsure (1)..(126): unsure at all Xaa locations
  Clone ID: PAT_MRT4530_54260C.1.pep
YRTLTLDPPLPAVTGGRLQAGDCVAARSVRSAAATAGXGSWRGKGGAAPGRLLLVVGGGRMRWGERRRSRLPPPPLQRQRRPPRRLHQQPRRAPPRRRMAAAPLPPPPPHRRRPPRRRPSDPRSPP

SEQ ID NO: 154397 - protein, 648 aa, Oryza sativa
  Clone ID: PAT_MRT4530_54261C.1.pep
MGDFALLPRWLWRMIHHPSSVVDLLIDSVKHKFDYNVPWNSECGFIKDTYFAPNMALHERLNKFRQQQERCQTTLSSIAANQASTPRSNITRWVQPTNGPSTPAKPPQRKFSDDTERLQRINSVRKSPAAAQIKIVIELLEKTRQALTADQINEATYVHIHGNKEVFDRLKNNPKVHFVGNLFSYKSKYGVNGKDKLLSLIRKFPDGLAVAEIKDAYLAVLEDLKALKASGVVCLVASTTKSDEGVVYPEIDPMSKIKFDDDLKELARSILLPRDMLDIEKELQKNGQPTRTNAAKRRADAQILLYPPKPNKSKKKPQIAPAAHLWGGKQTWQTGEERAVTEGGFFCRKTLAALWWGGKGPECLSECFSNDTVETVRLVRSDLLTSAEGVHFTHTTLLTWVTQPVGINHVGRPPSFHDKAFRKPTQVYHMPTRGVPDQQQVRSQTILCQEAQGSSPTPPRRIHMSLGIKAPLVAVNENHGVQRRRRQLDHAVPAALDGEEAAHVVVGEAAAEAAGAELVQDGAHGVLGRRVRLHAPLVRALLLAGERPVVRDPLVGGHHGGVRRRHRAARRGERVDGGVVVAHRVRDAGERALARVVHRLRVAHVAARRLHRHRRRAGARRRLVSGTGAGDDQGDGDEEWAEKRNGVH

SEQ ID NO: 154398 - protein, 317 aa, Oryza sativa
  Clone ID: PAT_MRT4530_54262C.1.pep
MSLASTSSTEIEMDEKKEMTKKTEQEKTLTSYVLRENPKRSYKVSAGEFSGGGGGGGGGGESSVVQDGESDTESSPPRGGAGSFFAVSRRRSKRARRRRRAPDPEPASSVSDATTEEDVAMSLLMLSRDSWTRSRSEHETHHRGASSEAEQNNNNVVNVFDEEDEDARDVAGEDHDEELSYGGGEAAAARHRTSRFQCGACRKVFRSYQALGGHRASLKRGKGGGCVPPPRPAPASSAAAPAIHECPFCFRVFDSGQALGGHKRAHMPSGGARPSPSPSPAKCGESSGSIDLNMPATMEDDFELSAVYDAEFASTRQ

SEQ ID NO: 154399 - protein, 228 aa, Oryza sativa
  Clone ID: PAT_MRT4530_54263C.1.pep
MAEHATGVYGHPYPRVDQYGNPVPPVDQYGNPVPDEPAPRDTAAGYVAPPDPAVSTGDYGLAGAEAPHPHESAVMSGAAAAAVAPGGEAYTRDGGGVVPPAGEKTFAYEGTVSAAGVTGASGQLQPTTREEGHTTLGETLRRSGKSSSSSSSSSEDDGQGGRRKKKSIKEKIKEKLPGSHKQEEQKQAGHTAPAAGTGTGTGTHAAGKHEKKGIVEKIKEKLPGHGHH

SEQ ID NO: 154400 - protein, 115 aa, Oryza sativa
  unsure (1)..(115): unsure at all Xaa locations
  Clone ID: PAT_MRT4530_54264C.1.pep
RPQPASPSPPRRAPAPRPSAPSHPSPPQRRPAPSRSPPPAXSPSPSPPPAPPLXAASPGKPGATPPRRPPWPPPPPRDQEGENPRRESGRQSRDRARPGEPREGSRRSWKPRETP

SEQ ID NO: 154401 - protein, 46 aa, Oryza sativa
  Clone ID: PAT_MRT4530_54265C.1.pep
MSSNSSPSLDAAACPRPELRPLDLPIREPPSSTVAASLGKDKDTED

SEQ ID NO: 154402 - protein, 77 aa, Oryza sativa
  Clone ID: PAT_MRT4530_54266C.1.pep
ARRGTPGVFLTFDLGYYRCLLRRRGRFQSDAALVTDAAAEANIASVVSSPPEVFFQVFARSMAKLGMVELASNVRSN

SEQ ID NO: 154403 - protein, 59 aa, Oryza sativa
  Clone ID: PAT_MRT4530_54267C.1.pep
LFYIYINLIILFLFFFFIFVFFFFFFFKKTSPRNLNPLPNWSWCPPVHKKVAKNSQLNA

SEQ ID NO: 154404 - protein, 534 aa, Oryza sativa
  Clone ID: PAT_MRT4530_54268C.1.pep
MDYRALMTMEKVLVQMEKDGVDSRMLDLGADCMCKLLVASLPDPPVYPDAVLSANDDDDLSGAGAEDRIGALPDDLLGGVVSRLPIKDAVRTAALSSRWRRIWLSAPLVLVDGHLLPPGEEAGQLALDASGAVAAAVSRVLEAHPGPFRYVELTSTAMGARARRGDLARWLHLLAVKGVRELVFVNRRRPLDVALPATVFALAPLSRLYLGTWKFPDTAALPRGAGFPHLRELGLYCVAMEDRDLDFVLANSPVLECLGIYYSQRQIVLLRLASHSLRCVQICMCIAEDIAVVDAPRLERLLIWEMFEDDNHATRLSIGHAPNLQLLGYLRPGIHVLENGNTIIKVHAPALLIQFRSTIAGTKASPRTIIPSINVLALKVRFEVRNEAKLLPSFLRCFPNVEKLHVKSEKSDEPVGRLNLKFWQEAGRIECLQSCIKYVVFHGYRGDRSELTFLKYILGSGQVLQEMVIVVANGMFSTQDEVGEKLVKPLSSVKMASGDCNITVVEGTVHDEEDSCCLRDAFDFSIDDPFDRYL

SEQ ID NO: 154405 - protein, 113 aa, Oryza sativa
  Clone ID: PAT_MRT4530_54269C.1.pep
MAEAFHQAFGVCDLRKILGDDEVRRRVHVAFLAVLVAVVALAGAIAAAASDARSRNGATAAVGGEAVVHRRMLASSIQDSVLNANKPACLQSCTGAGQPYTGRGCTNAYQCKG

SEQ ID NO: 154406 - protein, 92 aa, Oryza sativa
  Clone ID: PAT_MRT4530_5426C.1.pep
SVPLPSVSAGFPLPVGPLVLGFFVFVVLGSSLFPVVRAAARGGLAWLAFRCLCCVCPPRLCLSFVVPFVPGCSRGGPCCVRLPFSPSPVVGS

SEQ ID NO: 154407 - protein, 47 aa, Oryza sativa
  Clone ID: PAT_MRT4530_54270C.1.pep
RPDFENFHQPRVEFPGHKAPGGPRRSLVRRYKTPPGFRLPAKKKKTP

SEQ ID NO: 154408 - protein, 241 aa, Oryza sativa
  Clone ID: PAT_MRT4530_54271C.1.pep
MAGKIKGLSSRRLPRAEVAGASGQVNGGGGVSLWGLATLPSCSSSSSLLRSVLAQRPCSEATGDDEAGALTCGFAVSESRVWPCAGFRIRRASGSQANDGECVAAAGEAGASLRRCGGGERQLRSRQEAGRAAVDERGCECRRRTSRQAKRWRVEQVAGGDDGQASRRSDEERSLRRAATAAAHSCMEIDVKQGAESPASSSSIPLDPSLPILPLAAESSPDAPIDARDHPRSRSSASSAG

SEQ ID NO: 154409 - protein, 97 aa, Oryza sativa
  Clone ID: PAT_MRT4530_54272C.1.pep
SPPPPLPVKFFELVPQIPHPFCKKLEKEPQFLQTGDFGLVKIFPPPPRVVGPFFGAPPLGRFPRRALRPPGAVGVPQTVGKRGPPGAQVAQAPPQKK

SEQ ID NO: 154410 - protein, 133 aa, Oryza sativa
  Clone ID: PAT_MRT4530_54273C.1.pep
MRRRGGGHGTQMLCTAPAYFGGIATQYRVLVQKIMEREIRALYEPKRNNEIRIPESSDEMLNRHWLSIFCMHDKHADKEGGYCAIALCGGPLGRSSGKLCDAPYNKTLNWYKWTLFMDDERAVTQNHAKSSYR

SEQ ID NO: 154411 - protein, 152 aa, Oryza sativa
  Clone ID: PAT_MRT4530_54274C.1.pep
LPSSPPDLAEGGGGGRPVAGREALAACAPGGGGGGRVPPSRGRGRQQRGGSRRRVSQPLPPRSGRRGQGESGGRWLLAPPSQIWLEGGGGSTAAGCGGEEGRGGAATAARGVEAAAAARTTVRRGHAVAATDNGWAAAVIFLNVFICFLCYN

SEQ ID NO: 154412 - protein, 39 aa, Oryza sativa
  Clone ID: PAT_MRT4530_54275C.1.pep
CKACTAYMLQAVYCGRVYFCSLHRQLQQLWYIIWALITP

SEQ ID NO: 154413 - protein, 80 aa, Oryza sativa
  Clone ID: PAT_MRT4530_54276C.1.pep
ALITLSRQITPCIRCLPLGLVAVHRVVFGRRERLLSVHIDSVDALKEKQQQGWAPSALSFRVQCRRGLLDGYISSQGSPA

SEQ ID NO: 154414 - protein, 67 aa, Oryza sativa
  Clone ID: PAT_MRT4530_54277C.1.pep
MEEECESDVWVPRANGEEDVKRDVWVPRANGEEDVKRDAFEDLSRSVRTTQAHAIAFYMHGEVWCLR

SEQ ID NO: 154415 - protein, 69 aa, Oryza sativa
  Clone ID: PAT_MRT4530_54278C.1.pep
LVEKPSLVGQPDFTIVPVILKTRTKNIFSPGLKAQRYFLILPTGTKDLFIVPVGNTNREKRSTYSLLPV

SEQ ID NO: 154416 - protein, 693 aa, Oryza sativa
  Clone ID: PAT_MRT4530_54279C.1.pep
MRHVIGFDPANVPAYDSFLTTLISSGSSTALMDAMDYLAILHRQRCSPGEKFFRAALAAHLKARELRGAVVLWNDFVVRRGLIPDKEMYSTMIMLQGTLGHPEVIVEYLDEMTFDGVFPDADTYNMVFQFLLKGRKLREASAIFSEMVKNEFWPNEANCSLALRMFLDTRDWDSGIKLWKCMVENGLPPLEESGNMLVSKLKDERLPEACKYAEDMIDRCIKLSSSTMSKLKQCLMKVAKYPGVIVPKKKEKIVCWLERNCYYGRKHLKEKTRPWTGSSVGMESFRDDQRAGPQSEQHSDHVSDSAEDAISDEDVLAPTRLSLACAASKEREKENKMVVPDESTIWDEVLEEADELAYVHKVPPSISFLSAGTGKRRKGEHRLKFSIRGSSSVSLNVKTENPYIGEQEVSSVMPTNRAPETMMAEQLENIKEETEDLPSEFACSTKKANVSISELLDSLQDRSASSAGTPFLLHQHTRPKEEKPKVPTSVKRTLALLGQRNLETENPLEHVIGETSSEEEDDAQNNLALINKDVKGQTMADIFQQVFNATSMDCFTLPVRSYGSGYYGRMQQILQMEKDRHAEFLRQYNREQDYLGDPKGVTVQILSRSLEGKLTICRCLFMEKSNLATTGEVSTDLDMDNSSVKRTIIFSPKICDNVDLLAGNIIHIFPPWKEVKVKEETVILCTYFSHRGV

SEQ ID NO: 154417 - protein, 63 aa, Oryza sativa
  Clone ID: PAT_MRT4530_5427C.1.pep
SIHYNDDSPSRLVPYYSSVRGLRLGAVVSSSSNVRTCGTCLILWIIVLLSTCGVIITVISARR

SEQ ID NO: 154418 - protein, 51 aa, Oryza sativa
  Clone ID: PAT_MRT4530_54280C.1.pep
TNMMCLPYSVLFWEGLANLSFYISISRMSMLRQTPAEIKITEPNVFLTEYD

SEQ ID NO: 154419 - protein, 31 aa, Oryza sativa
  Clone ID: PAT_MRT4530_54281C.1.pep
IEFHNRVIVYQRSLHFYLYHAPVSHVTYDNT

SEQ ID NO: 154420 - protein, 114 aa, Oryza sativa
  Clone ID: PAT_MRT4530_54282C.1.pep
MSTMKFCRECNNILYPKEDRDQKILLYACRNCDHQEVADNNCVYRNVVHHSAGEFTQVLQDVAGDPTLPRTKAVRCAVCGHGEAVFFQATARGEEGMTLFFVCCNPSCGHRWRE

SEQ ID NO: 154421 - protein, 57 aa, Oryza sativa
  unsure (1)..(57): unsure at all Xaa locations
  Clone ID: PAT_MRT4530_54283C.1.pep
QSRRNRGXEVLCLSIAPNLAASRGDDDHRHLRLSQGHLHLFHVPISPHNAEHFALLT

SEQ ID NO: 154422 - protein, 179 aa, Oryza sativa
  Clone ID: PAT_MRT4530_54284C.1.pep
MGGEEEEEEEEEKEEGHRITRPDPVRKGRGVAVGGSLVELSPLPATTSQDQIRRSERRRLDRLGGGLRGGVAVAREEGRWQRLHRPWAREDGGPVDGRAAAAASGRQGGNGTRRGQVEHERPCRPVPSLALLTGWKASPVIVPAGDLVALWREEAMSGVVARGTRSGERRHGVEVRVTR

SEQ ID NO: 154423 - protein, 124 aa, Oryza sativa
  unsure (1)..(124): unsure at all Xaa locations
  Clone ID: PAT_MRT4530_54285C.1.pep
LQRGKENKTGPQTNKHHNPTQTPGRKKTPQGGGDKQGGTKGPPTNKGGKKPPKGRGTRPRTRGHGKTASQPAAPKRGKTARKKRTTSTKMVTETPKKPXENKTPEQNQPPHNKKGPGTNQKTPA

SEQ ID NO: 154424 - protein, 76 aa, Oryza sativa
  Clone ID: PAT_MRT4530_54286C.1.pep
TMFPVPSAEIIPCVRCSPEASRSDQCNCLFVGTGHSPRTSQVLRNEPDQVNRTLYTPPAEGGNSLPSSEVNPPGEK

SEQ ID NO: 154425 - protein, 77 aa, Oryza sativa
  Clone ID: PAT_MRT4530_54287C.1.pep
YKAVKHPTTKTVHLRVMFSKNWSKLQSILHIYRFLCLYALPDTSKYIKKQLSSRLGDLHVAEQIQSLQPLLAANETG

SEQ ID NO: 154426 - protein, 68 aa, Oryza sativa
  Clone ID: PAT_MRT4530_54288C.1.pep
MQMQAPSVALQLPQLPLPPGTEAINRESIRIQEHNILSCCETGEHILHSCCCVLVQQIRCCRRQPKFH

SEQ ID NO: 154427 - protein, 604 aa, Oryza sativa
  Clone ID: PAT_MRT4530_54289C.1.pep
MVGITCLDKETGRTVYHGTDKTDDKGMFNIEVPYTVGSAHLHPSACLVRLASSGDHGCAVFTNFNGGKTGERPCRPSHVYPGRVTYSAGPFYFTLSQPSHLFFALLVALFTASLLVVWQLLPIGDGGKAEEGVEGLPRPGGGGGGGVMRFSASSVALREFHGESRLEAARSERRWWPGLAPVRLALFVGTMNINAQSLMVATLAKSLKNLGYEVEVLAFADGKANDILENICHVNVVSPPSLKYIDWSKYNAVLLSSLEGKMVVSILMQEPFQFLPVVWLIHEDALGQFLRNPELHQSIPNHIEDWRTHFNACTYVVFPDSYLPLLHSALDTGNFLVISGSPVDILATKRYSSSHTQESARNQYGSKEDDVVVLVVGSYLFFDELPWDFATVLRASAPHIMDMAKTKNLGVQFIFFCGNDTDAYNSAFQITDGTHGFLFNADDPSTMVSAFAQILGEKRLSARAFSVALEGKLLSKNMLAYDCITAHVMLLESVLHYPSYAKLPSPVSKLQERTWLWDLFETKAALENSSSDDDSQLLTRIIDNLVDESHESNQTYSDSNDTSLYNYPSLSDWNDLNEVEIFEDIERREIEEASFSPLPFPVFT

SEQ ID NO: 154428 - protein, 76 aa, Oryza sativa
  unsure (1)..(76): unsure at all Xaa locations
  Clone ID: PAT_MRT4530_5428C.1.pep
YPNHFNIFITACVDTPLQAYYLNXXTNNIXHXLTHHTHTHTPYIFFNHQPKFPILFIFLHHNSHPHMIYFIFKQSF

SEQ ID NO: 154429 - protein, 163 aa, Oryza sativa
  Clone ID: PAT_MRT4530_54290C.1.pep
MVWSVRERAEIEEAERALVAAIGDLPCRSSATIPIPLPSSAQCGSSSPALCGSGTAGRSATAAGRTGRRWRHGGEVGVGGGAEHQIWRRPRRRPATEMTRRRPRDSNGRRERRAVLPASSAAAAPATASAATESHGRERVRGVEPAEVSRRRWRGASDARVFA

SEQ ID NO: 154430 - protein, 168 aa, Oryza sativa
  Clone ID: PAT_MRT4530_54291C.1.pep
MAWRRTLLALVAVAAAAAAATRADAWHNYGAAKFTVTGSVLCQDCTKSWNAYAYNAKPIPGSMVGITCLDKETGRTVYHGTDKTDDKGMFNIEVPYTVGSAHLHPSACLVRLASSGDHGCAVFTNFNGGKTGERPCRPSHVYPGRVTYSAGPFYFTLSQCDVKDGATY

SEQ ID NO: 154431 - protein, 1012 aa, Oryza sativa
  Clone ID: PAT_MRT4530_54292C.1.pep
MWRRGSHSDAAYHLPTAAAAGGGGWAASSSAGGGGAASRRRRRPGLSCRPSHLFFALLVALFTASLLVVWQLLPIGDGGKAEEGVEGLPRPGGGGGGGVMRFSASSVALREFHGESRLEAARSERRWWPGLAPVRLALFVGTMNINAQSLMVATLAKSLKNLGYEVEVLAFADGKANDILENICHVNVVSPPSLKYIDWSKYNAVLLSSLEGKMVVSILMQEPFQFLPVVWLIHEDALGQFLRNPELHQSIPNHIEDWRTHFNACTYVVFPDSYLPLLHSALDTGNFLVISGSPVDILATKRYSSSHTQESARNQYGSKEDDVVVLVVGSYLFFDELPWDFATVLRASAPHIMDMAKTKNLGVQFIFFCGNDTDAYNSAFQELASHMGFPLGSVKHFSLTHDIRNLLVFADIVLYGSSRQEPVFPPLLLRSMASEIPIIVPNLTVITKYITDGTHGFLFNADDPSTMVSAFAQILGEKRLSARAFSVALEGKLLSKNMLAYDCITAHVMLLESVLHYPSYAKLPSPVSKLQERTWLWDLFETKAALENSSSDDDSQLLTRIIDNLVDESHESNQTYSDSNDTSLYNYPSLSDWNDLNEVEIFEDIERREIEEASFSPLPFPIDERVERPLLSWDEVYKNARKSERLKPEGNERDEGELERTGQPVCIYEIYSGEGAWPFLHHGSLYRGITLSKGGRRPRSDDVDAVTHLSVLDNPYYSDRLCEFGAMFAVANRIDAVHKLPWIGFQSWQAAGRKVSLSEKAEETLEETMAGENNEDVIYYWAPMDMDQTSNFWSMCDWLNAGRCRTLFEDAFRTMYGLSDGITALPPMPNDGDYWSTLHSWVMPTPSFLKFIMFSRMFVDYLHSLNVNGTDPASCLLGASQLEKRHCYCRILEVLVNVWAYHSGKKMAYLNPVTGDIREQHPLDDRNEMWVKFFNFTLLKSMDEDLAEEADDGMHAGDDQWLWPLTGQVFWPGIADREREEKYIKKLDKKLKNKVKLLERQKSGYKQKPLGQ

SEQ ID NO: 154432 - protein, 124 aa, Oryza sativa
  Clone ID: PAT_MRT4530_54293C.1.pep
PGSFLANDVEEEEEEEEEEEEVPSYRTFRGVKCCECELQVGTKLSMLAAMASSGGRRASRRRRRQKKKEGKSYRQGKAKPFFQVSLSPSKSVFGGGGGGYLVLANLLCVLVMVSVQFQFHVCDQ

SEQ ID NO: 154433 - protein, 48 aa, Oryza sativa
  Clone ID: PAT_MRT4530_54294C.1.pep
SVGVRGGKIFAFNIFVLEEVKAAPSPQKGGGGGWQLMDDLFLAELDDG

SEQ ID NO: 154434 - protein, 51 aa, Oryza sativa
  Clone ID: PAT_MRT4530_54295C.1.pep
FFCFFFFFFFFFFFFFFFFFFFFFFKKSRYVGFYSIRVDSIGLFKQGHWPS

SEQ ID NO: 154435 - protein, 155 aa, Oryza sativa
  Clone ID: PAT_MRT4530_54296C.1.pep
MSRGRSRLSWLWRAPARALGRARDMYVRGMTGCARCVPADAAFGYPVFVPSSAAASMRSNSFGSDSRFGGGADDDLRELIRAASQRRAAEQEREARAVARSQSMASGISMARIDEDAPCEEFGDAGVMHYPRSQSCVGGVGGRIAHCHRKVAALA

SEQ ID NO: 154436 - protein, 83 aa, Oryza sativa
  unsure (1)..(83): unsure at all Xaa locations
  Clone ID: PAT_MRT4530_54297C.1.pep
VPPRRXLSAAAPRRVPRRASPPXAAAEPEGVADPSEGQDPQDFEQGKSSLFFEHVDPNCKIXILFTNKIACNDKHPTCELCHA

SEQ ID NO: 154437 - protein, 384 aa, Oryza sativa
  Clone ID: PAT_MRT4530_54298C.1.pep
ARPPAWAPAPPPPPPPPPARPRPRPPRFVRPRRGRRMEMVKNRWAGKTIVDLFTDEFKGRPREYYVHAVKCGRLQVDDQMVHADYVVQSSQKISHFLHRHEPPVLGGDITILQNEADVVTVCKPASVPVHPCGQYRKNTVVGILQAEHGLVPLFRILCLNCAIIASAFHYPVYSLPSVHRLDRLVSGLLIFAKNADKAESFRQQIEASLLQKEYVAKVVGVFPDGEQTVNANVHFNAREGRSTAEVCDGDGKAPIGKQACTKFQRICTDGIHSIVLCKPVTGRTHQLLIYISDTAFCLTNVDKDPDSCADLGNNDTNEDTEADEEFSIDPMCTNCPNLAPVGYDADEEALWLHCVRYTGPDWSYECPYPDWAFLDNVSRKKLKS

SEQ ID NO: 154438 - protein, 77 aa, Oryza sativa
  Clone ID: PAT_MRT4530_54299C.1.pep
MALTYSRPVPDALALSSQPSHPKGLLGWAMAEPAKSNLSARCLGAEVPRASAIMAGANVPARKPSRRLAGLGHGRPC

SEQ ID NO: 154439 - protein, 309 aa, Oryza sativa
  Clone ID: PAT_MRT4530_5429C.1.pep
MAEAKQQQQQPQAATAAAASGVWKTVKPFVNGGASGMLATCVIQPIDMVKVRIQLGEGSAASVTKKMLANEGISAFYKGLSAGLLRQATYTTARLGSFRVLTNKAVEANDGKPLPLVQKAGIGLTAGAIGACVGSPADLALIRMQADSTLPAAQSRNYKNAFHALYRIAADEGVLALWKGAGPTVVRAMSLNMGMLASYDQSVELFRDTLGAGEVTTVLGASAVSGLCASACSLPFDYVKTQIQKMQPDASGKYPYTGSLDCAMKTLKSGGPFKFYTGFPVYCVRIAPHAMMTWIFLNEIQKLEKRLGL

SEQ ID NO: 154440 - protein, 1500 aa, Oryza sativa
  Clone ID: PAT_MRT4530_542C.1.pep
MCTFIVVLTSIVFLMVTSNGQAQAPIGCIPRERDALLEFKNSITDDPMGQLKFWRRGDDCCQWRGIRCSNRTGHVIKLQLWKPKFDDDGMSLVGNGMVGLISPSLLSLEHLQHLDLSWNNLSGSDGHIPGFIGSFRNLRYLNLSGMPFIGVVPPQLGNLSKLQFLDLSSCIGLEMQSRSGMTWLRNIPLLQYLNLNSVDLSAVDNWLHVMNQLPSLRVLNLSNCSLQRADQKLTHLHNNFTRLERLDLSGNQFNHPAASCWFWNITSLKDLILSGNRLYGQLPDALADMTSLQVLDFSINRPVPISPIGLLPSSQAPPSSGDDDAAIEGITIMAENLRNLCSLEILDLTQSLSSGNITELIDNLAKCPASKLQQLILKYNNITGILPISMGVFSSLVYLDLSQNYLTGQLPSEIGMLRNLTWMDLSYNGLVHLPPEIGMLTNLAYIDLGHNNFSHLPSEIGMLSNLGYLDLSFNNLDGVITEKHFAHLASLESIYLPYNSLEIVVDPEWLPPFRLKYAYFYCCQMGPMFPKWLQTQVDIIELDIANTSIKDTFPEWFWTTVSKATYLDISNNQIRGGLPTNMETMLLETFYLDSNLITGEIPELPINLETLDISNNYLSGPLPSNIGAPNLAHLNLYSNQISGHIPGYLCNLGALEALDLGNNRFEGELPRCFEMGVGSLKFLRLSNNRLSGNFPSFLRKCKELHFIDLSWNKLSGILPKWIGDLTELQILRLSHNSFSGDIPRSITKLTNLHHLDLASNNISGAIPNSLSKILAMIGQPYEGADQTPPASGVTYTSPVATKGQERQYNEENVEVVNIDLSSNFLTGGIPEDIVSLGGLVNLNLSRNHLSGQIPYKIGAMRMLASLDLSENKLYGEIPASLSSLTFLSYLNLSYNSLTGRIPSGSQLETIYNQHPDIYNGNSGLCGPPLQKNCSSNNVPKQGSQPVQLLTHTHINLTKLEHLGLSRNYFGHPIASSWFWKVRTIKELGLSETYLHGPFPDALGGITSLQQLDFTNNGNAATMTINLKNLCELAALWLDGSLSSGNITEFVEKLPRCSSPLNILSLQGNNMTGMLPDVMGHINNLSILDLSNNSISGSIPRGIQNLTQLISLTLSSNQLTGHIPVLPTSLTNFDVAMNFLSGNLPSQFGAPFLRVIILSYNRITGQIPGSICMLQNIFMLDLSNNFLEGELPRCFTMPNLFFLLLSNNRFSGEFPLCIQYTWSLAFIDLSRNKFYGALPVWIGDLENLRFLQLSHNMFHGNIPVNIANLGSLQYLNLAANNMSGSIPRTLVNLKAMTLHPTRIDVGWYESLTYYVLLTDILSLVMKHQELNYHAEGSFDLVGIDLSQNQLTGGIPDQVTCLDGLVNLNLSSNHLKGKIPDNVGDMKSVESLDFSRNNLSGEIPLSLSDLTYLSSLDLSHNKFVGRIPRGSQLDTLYANNPSMYDGNSGLCGPPLQRNCSSVNAPKHGKQNISVEDTEAVMFFYFGLVSGFVIGLWVVFCAI

SEQ ID NO: 154441 - protein, 130 aa, Oryza sativa
  Clone ID: PAT_MRT4530_54300C.1.pep
FFFFLLFFFIFWCSIFFFIFFFFFFFFWSRTHKIIYSTLSPAIWFQNHFHSFIYWFVIHYLVAMPTTATVVILTSYECKPASLSHWPAGEDACHCLGLNPGPSHGSCAGTALALVKPHAGHPRRQYAGSP

SEQ ID NO: 154442 - protein, 67 aa, Oryza sativa
  Clone ID: PAT_MRT4530_54301C.1.pep
VDWKTKCNSLSQLALTEGVGPDEHRPRFILSIDKAYRYLRLGGHGIPWQAKGFYWVLAMWRIRSMTR

SEQ ID NO: 154443 - protein, 338 aa, Oryza sativa
  unsure (1)..(338): unsure at all Xaa locations
  Clone ID: PAT_MRT4530_54302C.1.pep
MGKIKIGINGFGRIGRLVARVALQSEDVELVAVNDPFITTDYMTYMFKYDTVHGQWKHSDIKIKDSKTLLLGEKPVTVFGIRNPDEIPWXAEAGAEYVVESTGVFTDKEKAAAHLKGGAKKVVISAPSKDAPMFVCGVNEDKYTSDIDIVSNASCTTNCLAPLAKVIHDNFGIIEGLMTTVHAITATQKTVDGPSSKDWRGGRAASFNIIPSSTGAAKAVGKVLPDLNGKLTGMSFRVPTVDVSVVDLTVRIEKAASYDAIKSAIKSASEGKLKGIIGYVEEDLVSTDFVGDSRSSIFDAKAGIALNDNFVKLVAWYDNEWGYSNRVIDLIRHMAKTQ

SEQ ID NO: 154444 - protein, 149 aa, Oryza sativa
  Clone ID: PAT_MRT4530_54303C.1.pep
GILANINYIKRVVGLPGDVVRYSSDKRLSINGKPVPETLVGEEPGSLGSAKLYQEKLGEAEHLIRKEMARYRVEPDREWRVPEGHYFMMGDNRDNSNDSRYWQDAAIPADLAGMVPDRNIVGKAFAVWMSWPDPKFSNLPHFSRVGLIH

SEQ ID NO: 154445 - protein, 104 aa, Oryza sativa
  Clone ID: PAT_MRT4530_54304C.1.pep
GFFFLKERKTPRVPKKKKKGPLLGGVSIQKLNFDPFFLGGNLLLNLKGNFLFFPPKGLYPFFYQPFFLVSPPWDLVKFFRPQTKHLVFKFLPSLFKWALLGFFH

SEQ ID NO: 154446 - protein, 556 aa, Oryza sativa
  Clone ID: PAT_MRT4530_54305C.1.pep
MLARPGRLAASTLPNDSAAAAASTVLSILRGEDPASLPAAGIDPCPAVFQQLRPSLPTVPDSALPALARWAGEATAVSLLTSRGLFAAAWRLLLAPSPTPPPLAAFAPLVRRYARLGRAPAALRAFQFLRRHPDRYMAGGDIPAAASLLNMAVDALCKEGHPRAAVELFERWRREEPDSPPDERAYNILLHGWSRAGRLDKVGKLWAEMRLAGVRPTVVTYGTLIEGLCVKRRPDQAIALLDEMREEGIEANLLTCNPIVYALAQAGRFQDAHKVLEKFPLYGVAPNISTFNSLVMGYCKHGDLAGASSVLKVMTERGISPTTRTYNYFFMTFAKNSDVESGMNFYSKMIGNGYSPDQLTYVLLVKMLSRANRLELVVQMIQEMRTHGFEPDLATSTMLIHLLCRRHQFEEACAEFEDMFKRGIVPQYITYQKLMRELKRLGLVHLIQKLTNLMRSVPHSTKLPGSYRDKEGDDSMEKRKLILQKAQAVSDVLKECKDPKELGKLKEDEETDVEVADSAHLQMSWIAMRPVYASCSDIALNQATQEKMMPHSKSNQ

SEQ ID NO: 154447 - protein, 117 aa, Oryza sativa
  Clone ID: PAT_MRT4530_54306C.1.pep
MAAAEEMAVVVLRCFDGTTVAAPAGVVTGRSGLVAEAVAGGAGGGGGGGGRVVVDVPGNVSGVDVAAVVAYMEARAAAADGDAFDGEFIGGLTHDARIDLIHAAHHLADKALFNLLA

SEQ ID NO: 154448 - protein, 714 aa, Oryza sativa
  Clone ID: PAT_MRT4530_54307C.1.pep
YLIMHLVCIVSLCTMFTVAPSKAQRNITKGSFLTTEGVNTSWVSPSGDFAFGFQLINGNNSYLLAVWFDKTVDKTLAWYAKTNTQVPELVVVPSGSRLQLSSNGLSLLDPGGHELWNPQVTSAAYANMLDTGNFVLAGADGSIKWGTFESPADTILPTQGPFSEVQLYSRLTHTDYSNGRFLLQVKDGDLEFDLVAVPSGNPYSTYWTTNTGGNGSQLFFNATGRVYFTLKDRTEINITSTIMSSMGDYYQRATLDPDGVFRHGACGFNSFCNFNWSLNETVDCQCPPHYSFIDQALKYKGCKADFQPQSCDLDEETMIDQFDLIPMNGVDWPLADYEHYTSVGMDECKKLCLTDCFCAVVVFNNGDCWKKKLPMSNGILDSSVDRTLYLKVPKNNNTQSQLNSNSIKWKKQTFTYEELHEATGGFSEEVGRGGSGVVYKGQLQDPLGTYVAVKKIDRIMPDIEKEFAVEVQTIGWTFHKNLVRLLGFCNEGAERLLVYEFMPNGSLTGFLFDTVRPSWYLRVQFAIGVARGLLYLHEECSTQIIHCDIKPQNILLDNNLTAKISDFGLAKLLRMDQTQTHTGIRGTRGYVAPEWFKNIAITAKVDVYSFGVILLEIICCRRNVEKDMTNDDREILTDWANDCYRSGRIDLLVEGDEEASFDIKRVQRFLAVALWCIQEDPAMRPTMHKVTQMLDGAVEIAMPPDPASYISSLQ

SEQ ID NO: 154449 - protein, 104 aa, Oryza sativa
  unsure (1)..(104): unsure at all Xaa locations
  Clone ID: PAT_MRT4530_54308C.1.pep
ERASIVASSGVRVAVGVIRSLHILXQGATVGDPNILITKSLCVAVLGPXSCTNXEQFPGIPMGQLCLNASPLITATCHWLVCLRALHXDLCPSRRRRTFRAARP

SEQ ID NO: 154450 - protein, 209 aa, Oryza sativa
  unsure (1)..(209): unsure at all Xaa locations
  Clone ID: PAT_MRT4530_54309C.1.pep
ARGSSALATLVDTRRRTRLTDSSIPPGCGRTRKYEITSTSTRLVLRRSVRSLYKLHSQSXSLAGRFSLRNFRISDEMTIEMDEFQADDLDPYTKANAEVDFYQYVKTIEERFESLPVPEDIHRWLSMIMRDPTAYQYLICYHYCLMEEHQMMHVFTSLYNKLLVLPTTDPAGYNFVLERLKIFSGWSPMDLHNVYFIETFYWKDPITGV

SEQ ID NO: 154451 - protein, 271 aa, Oryza sativa
  unsure (1)..(271): unsure at all Xaa locations
  Clone ID: PAT_MRT4530_5430C.1.pep
WFLIGLNIDTTPIDSMTNISDILGYLLATLKTDNCLQNISIILWFIWKARNDLXFFKKKYWEPIQICIAAEIMAKNYNTLLCSNEEETTIDDTLEKHNVSLIILPGIRCXTDASWKEGESGLGVFIHDPTSHKAIFVQAKSMXIPPLLQAELFXAICICSKVQISNPILFSDNQELVTLLCQQNYSRKPHHWSSKPLLSLVNQHIGGESVNIKWIDRKLNQMADFLSKKARNKAVPTSTEIVCQNISHLCHHYECPTKVALASAKHAIYKR

SEQ ID NO: 154452 - protein, 307 aa, Oryza sativa
  unsure (1)..(307): unsure at all Xaa locations
  Clone ID: PAT_MRT4530_54310C.1.pep
MDHGDRKPWPNAAVEVVLTRVRGNEGSGDEPRRRRGGRDAAHARAWSTWPGGGGDVGAAAVSARRREREIGGRRETGPTGLPLASLGKGRGERGRRGRGRRGLCLRPLEASKRSGGGRAMTTAMTAGLCGAERRHGRQARAGAAEGDGGGDQAVGHHGTRAGGLQREARRFERRGSGTRAGXCGAERMRGCRRGRAAGPGHAXGAGAAWAATTRARARTTPRGADFAGRELARDGGGEKESEGKGGRSARAAHAHARGQSGGGERERERGRRGGRGRXAEKDSAHRPRGRQNRLLRRDRFGKDWVRD

SEQ ID NO: 154453 - protein, 109 aa, Oryza sativa
  unsure (1)..(109): unsure at all Xaa locations
  Clone ID: PAT_MRT4530_54311C.1.pep
RVIALDRKGYFPPQKLANEVMGSPTYILDPLPFHKERGTIQQSHPSHIGVPXPFTVLPPPPTVHQAFTYYNRKGLFPPXKLANEMRGXPTYILDVLSFHDQCSTVQQET

SEQ ID NO: 154454 - protein, 359 aa, Oryza sativa
  Clone ID: PAT_MRT4530_54312C.1.pep
MTLTTAAPLEARQSAVGSGDRLHDIQIHGAGEGRARWPRWSVSAAGRHGARWSEELRIKGRRSIPESSRGGWGRGRLRSRRWTSSSVLADGAEVGTGRGGSGGGEEAPAPAAGMQWQSTRGRSTGSGGGEEEESEAPAAAVHAGRISSEDAAARRQNIRGGGGASEEEKRSLRDGWTPLHLAIQSRNRDITMILLVNGADETRRNKELSLAVTDVLTCAYAVLLSSLRRSWSRGICYQISKSRVGGADTRSPSVGDIAPGPLWTGTTVVVHHRSTGTGAQLGTSRPDDGERRHGKEREEEKRRASPTTTATSTGRTTTMAARGVQAPERPREEDQRGLRGHGGNHCRPEAVDMEGSPAN

SEQ ID NO: 154455 - protein, 110 aa, Oryza sativa
  Clone ID: PAT_MRT4530_54313C.1.pep
DKKSPAFLQNPVLQCEYVTCGCSTKSMRSNGGYEVIKKAIKKLGMRHREHIAAYGDGNERRLTGRHETGDINNFVWVGQDRSSHSSLVKNFSLNRYQKKKIEPHYVTLYS

SEQ ID NO: 154456 - protein, 100 aa, Oryza sativa
  Clone ID: PAT_MRT4530_54314C.1.pep
MSSSRRSRTSSRLAAAPPPTDEQMAELISKLQAVLPTRGGEANAKASSAEVLQEACRYIRRLHREADALSERLAELLLLQPSDLAINGADVPDLIRSLLM

SEQ ID NO: 154457 - protein, 870 aa, Oryza sativa
  unsure (1)..(870): unsure at all Xaa locations
  Clone ID: PAT_MRT4530_54315C.1.pep
VRGRSEQRTYNDSNDRDKSXSRSRSKSRSKKFCKYCKKKIHFIEECWKLQNKEKRKSDXKTHDGTTRTLKDVRHIPGMARNLISLSTLDAEGYKYSGSGGVVKVSKGSLVYMIGDMNSANLYVLRGSTLHGSVTAAAVSKDEPSKTNLWYMRLGHMSELGMAELMKRNLLDGCTQGNMNFCEHCVFEWKVMIERQTEKEVKVLRTDNGGEFCSDAFDDYCRKEGIVRHHTIPYTPQQNGVAERMNRTIISKARCMLSNARMNKRFWAEVANTACYLINRSPSIPLNKKTPIEVWSGMPAGYSQLRVFGCTAYAHADNGKLEPRAIKCLFLGYGSGVKGYKLWNPETNKTFMSRSVVFNESIMFNDSLPTDVIPGGSDEEQQYVNVQVEHVMIRKLKLLPQDEPIAHRRTKRSCGAPVRLIEECDMVYYAFSCAEQVENTLEPATYTEAVVSGNLVKHSSIRTFFSIVAMHDLELEQLDVKTAFFHGELKEEIYMDQPEGFIVAGKEDYVCMLKRSLYGLKQSPHQWYKRSEFDRCVYIKFVNGSSIYLLLYVDDMLIAAKSKEQITTLKKQLSSEFDMKDLDAAKKILGMEITRDRNSGLLFLSQQSYIKKVLQRFNMHDAKPVSTPIAPHFKLSALQCASTDDDVEYMSRVPYSSAIGSLMYVMVCSRPDLSHAMSLVSRYMANPGKEHWKAVQWIFRYLRGTTDACLKFGRTDKGLVGYLDSDFAADLDKRRSLTSYVFTIGSCAVSWKATLQPVVAQSTTEAEYMAIAEVCKESVWLIGLFAELCGVDSCINLFCESQSAIYLTKDQMFHERTKHIDIKYHYVRDVVVQGKLKVCKISTHDNPADMMTKPVPVAKFELCSSLVCIVV

SEQ ID NO: 154458 - protein, 1959 aa, Oryza sativa
  unsure (1)..(1959): unsure at all Xaa locations
  Clone ID: PAT_MRT4530_54316C.1.pep
MMVRNKENAAKKKYHHHLGSGGYSVAMPKWEEMEARLIERSIEPATAKWPNRSMFWYYAHGGTLNPVDGSLVFSDLICEATSQLTDAVEASSQGTFRHDREKDELSLALQTPEHPGRTRGKGVIPWKIRFKEDIHTYRSWMRSKRDIEAKIANLEYRVSSYELSMQEEVARKVDECMAAHRSQNPQPYIPPAMVSPSGNRSSCASTGQVGSQSMDAMQTQDETTCPVDDITQRTPCELHIPFKNLSIKVASEIAIPTDISGTYHCRSIPAGYSRVEVELVEAAYEDLELDYPGGDGEVKRQLKPRSPEKKITIDPSVKNFFKGMSTTNKEALKLSDYDRTLQKAYHKKSKPVPQLGEQPNQEVEPLVTGEDFGITDFISDTGLTMDQLIGNRTNPEGGSGIQLQSLPTQMYKFHEWYMEMNAKGKEMFGARIRNPDFLQGEDVLWIHFKDVFDLYHLDALDVSLLSAWILMEIHRARWRGFYDTGFIDPRKINTEMIDKYEKDTEDNLIHLLTQQDGDPLESTCRHASLLERGIEPATAKWLDRSKFWYYAHGGTLNPVDGSLVFSDQIREATSRLTDAVEASSQGTFRPDREKDELSLALQTPEHPGRTRGKGVIPWKIGFKEDIHTYRSRMRSKRDTEAKIADLKYRVSSYELSMQEEVARKVDERMSAYRSQDPQPYIPPAMVSPSGNHSSCALTGQVGSQSMEAMQTQDETTCPVDEITQRTPCELHIPFKNLSIKVASGMAIPTDPSGTYHCRPIPAGYSKVEVELVEAAYKDLELDYPGGDGETHLRDTSHAIILWRKRYIILPRRQAASHAPSPPAPPSPPQAPAPSPPQAPASTPPQAPRPAPSKSRSHQAPPPARTRATKKAKVDAAEIVKIFCWLAPVGFTMASMKYDLPLLDYKTRFPLWQVKMRAVLAQTSDLDEALESFGKKKTTEWTAEEKRKDRKALSLIQLHLSNDILQEVLQEKTVAELWLKLESICMSKDLTSKMHIKMKLFSHKLQESGSVLNHISVFKEIVADLVSMEVHFDDEDLGLLVLCSLLSSYANFRDTILLSRDELTLAEVYEALQNKEKMKVMVQSNASSSKGEALQVRGRSEQRTYNDSNDRDKSQSRGRSKSRSKKFCKYCKKKIHXIEECWKLQNKEKRKSDXKTHDGTTCTLKDVRHIPGMARNLISLSTLDTEGYKYSGSGGVVKVSKGSLVYMIGDMNSANLYVLRGSTLHGSVTAAAVSKDEPSKTNLWHMRLGHMSELGMAELMKRNLLDGCTQGNMKFCEHCVFEWNVMIERQTEKEVKVLRTDNGGEFCSDAFDDYCRKEGIVRHHTIPYTPQQNGVAERMNRTIISKARCMLSNARMNKRFWAEVANTACYLINRSPSIPLNKKTPIEVWSGMPAGYSQLRVFGCTAYAHADNGKLEPRAIKCLFLGYGSGVKGYKLWNPETNKTFMSRSVVFNESIMFNDSLPTDVIPGGSDEEQQYVNVQHSPPVLQPQDEPIAHRRTKRSCGAPVRLIEECDMVYYAFSCAEQVENTLEPATYTEAVVSGNLVKHSSIRTFFSIVAMHDLELEQLDVKTTFLHGELEEEIYMDQPEGFIVAGKEDYVCKLKRSLYGLKQSPRQWYKRSEFDRCVYIKFVNGSPIYLLLYVDDMLIAAKSKEQIATLKKQLSSEFDMKDLGAAKKILDMEITRDRNSGLLFLSQQSYIKKVLQRFNMHDAKPVSTPIAPHFKLSALQCASTDDDVEYMSRVPYSSAVGSLMYVMVCSRLDLSHAMSLVSRYMANPGKEHWKAVQWIFRYLRGTTDACLKFGRTDKGLVGYVDSDFAADLDKRRSLTSYVFTIGSCAVSWKATLQPVVAQSTTEAEYMAIAEVCKESVWLIGLFAELCGVDSCINLFCDSQSAIYLTKDQMFHERTKHIDIKYHYVRDVVVQGKLKVCKISTHDNPTDMMTKSVPVAKFELCSSLVCIVV

SEQ ID NO: 154459 - protein, 143 aa, Oryza sativa
  unsure (1)..(143): unsure at all Xaa locations
  Clone ID: PAT_MRT4530_54317C.1.pep
GGPPAPGPGGPPMMPPAGGPPPGPPAPGPGGPPMMPPGSRPGPPGPLGSRPGPPGPPGPPGPGPQQQQGRPQHPMQQQQRPQHPMQQQQGPSQGXPAAPTAAPPPAAAAAGPPRAPWQRSSTCSINRRCCHCSWPKACGCVHG

SEQ ID NO: 154460 - protein, 694 aa, Oryza sativa
  Clone ID: PAT_MRT4530_54318C.1.pep
MGHPVVAVAIVFVSAAIAMAASSQYSHHPLDPLTATEITAIRAAVLASPLVPARPLFFHYVGLDEPDKPDVLSYAYGAADAAATSSQMTLPRRAFVIARAGGQSHEFTVDIAADNASVLSHAVHRGPGFPMFTDEDQIAAMALPYTYPPFVESVRRRGLDVGEVGCGVLSRGWFGAEQPAYGGARVAKMKCVVVDYNATANIYARPVEGVVMVVDLDRMAIIGYRDRAVFTVPKAEGTDYRADKVGPPFTGPAAPPGVVMQPEGRGFHVHGHLVKWANWEFHVGFDMRAGTVISLASVNDTDAGGLKRRVLYRGFVSEIFVPYMDPEEEWYFHTFTDAGEYGLGALASQLQRGADCPANAVYMDGYYAGSDGKPVKAEDVICLFERYAGDVAWRHTNGIGLGGLFSEVRPDVTLVVRMVVTVGNYDYTLDWEFKTVGSIKIVVSLSGILEMKAINYTHVDQIREDTHGTLITENTIGVYHDHFVTYHLDLDIDGTRNSFIKNNIVPKCNTGVRATGGAPTPRRSYWTVLYEVAETEAEGQVNINSAPADLLFVNPSKKMKIGNEVGYRLIPTGATATSLLADDDYPERRASYTKKQVWVTPYNKSEKWASGLYAEQSTGDDNLAAWSKRNRSIKDEDIVLWYTVGLHHVPYQEDFPVMPTISGALEVRPSNFFERNPLIRTKPPENSPNCSCSI

SEQ ID NO: 154461 - protein, 1158 aa, Oryza sativa
  Clone ID: PAT_MRT4530_54319C.1.pep
MGKPGKYGDGDDDDSEEEQLSPSSSAGEEEEEEVEEEEGEEQQEEQGEEEEGFSGDEEEQEVEGEADGEQVEEEEEEESSVGEEEAEAEGEEEEEEVEEEQGAGEEEEEEVDEEEIEAVTTGAGGDDDDEEVGDDGGAEEESQSTEDDEVAAGKDGGGEDGDKLEDATGNAEIGKRERAKLREMQKLKKHKIQEILDAQNKAIDADMNNKGKGRLKYLLQQTEIFAHFAKGNQSTEKKSRGRGRHASKMTEEEEDEEYLKEEEDALDGAGGTRLVSQPSCIKGKMRDYQLAGLNWLIRLYENGINGILADEMGLGKTLQTISLLGYLHEFRGITGPHMVVAPKSTLGNWMKEIQRFCPVLRAIKFLGNPEERNHIRENLLVPGKFDVCVTSFEMAIKEKTALKRFSWRYIIIDEAHRIKNENSLLSKTMRIYNTNYRLLITGTPLQNNLHELWSLLNFLLPEIFSSAETFDDWFQISGENDQHEVVQQLHKVLRPFLLRRLKSDVEKGLPPKKETILKVGMSEMQKQYYRALLQKDLEVVNAGGERKRLLNIAMQLRKCCNHPYLFQGAEPGPPYTTGDHLIENAGKMVLLDKLLPKLKERDSRVLIFSQMTRLLDILEDYLMYKGYQYCRIDGNTGGEDRDASIEAFNKPGSEKFVFLLSTRAGGLGINLATADVVILYDSDWNPQVDLQAQDRAHRIGQKKEVQVFRFCTEYTIEEKVIERAYKKLALDALVIQQGRLAEQKAVNKDELLQMVRFGAEMVFSSKDSTITDEDIDRIIAKGEEATAQLDAKMKKFTEDAIKFKMDDTAELYDFDDDKDENKLDFKKLVTDNWIEPTSRRERKRNYSESDYFKQALRQGAPAKPREPRIPRMPHLHDFQFFNTQRLNELYEKEVKYLVQANQKKDTVGEGDDEDQLEPLTVEEQEEKEQLLEEGFSTWTRRDFNTFIRACEKYGRNDIKNISSEMEGKTEEEVQRYAKVFQERYKELNDYDRVIKNIEKGEARIYRKDEIMKAIGKKLDRYKNPWLELKIQYGQNKGKLYNEECDRFMLCMVHKLGYGNWDELKAAFRMSPLFRFDWFVKSRTTQELARRCETLIRLVEKENQEYDERERLARKDKKNMSPAKRSSSRSLDTPPQSSSKRRRQSYTEANAGSGRRRRG

SEQ ID NO: 154462 - protein, 478 aa, Oryza sativa
  Clone ID: PAT_MRT4530_5431C.1.pep
MELLWLLLLLLMASSTSSRSEMKAGEVIRRSQFPEDFFFGTASSAYQYEGAVREGGRGPSIWDTFTHNHPEKIANGSNGDIAIDSYHRYKEDVGIMKGLGLNAYRFSVSWPRILPSVEPFVTLFHWDSPQALEQQYGGFLSNLIVEDFRDYADICFREFGDRVKYWITFNEPWSFSIGGYSNGILAPGRCSSQGKSGCSKGDSGREPYIVAHNQLLAHAAVVQIYREKYQGGQKGKIGIAIVSNWMIPYEDSKEDKHATKRALDFMYGWFMDPLTKGDYPVSMRTLVGNRLPRFTKEQSKAINGSFDFIGLNYYTARYIQGTKQDSNSHKSYSTDSLTNERVERNGTDIGPKAGSSWLYIYPKGIEELLLYTKRTYNNPTIYITENGVDEVNNENLSLKEALIDTTRIEFYRQHLFHVQRALRQGVDVRGYFAWSLFDNFEWMDGYSVRFGINYIDYKDGLKRYPKRSSQWLQNFLHN

SEQ ID NO: 154463 - protein, 456 aa, Oryza sativa
  Clone ID: PAT_MRT4530_54320C.1.pep
MATPPPPPAPTPEVFDVVIFGASGFTGRYVIREALKFLPPSSSPLRSLALAGRSRDRVAAALRWAAGPGGAAPDLPILVADASDPASLAALAARARVVLSCAGPFRLHGRQVAAACAAAGADCLDISGEPEFMERVEAEFHEAAAKNGSLIISACGFDSIPAELGFLFHSRQWAPPSVPVTVQAYLSLESDKRIVGNFGTYESAVLGVANAGELQALRRSRPRRPRPNIPGPPPPKGSLVEHDKALGLWTIKLPSADTVVVKRTLSTVTQHPEGLPGVEESTDFAEHRKSFWSSVKPAHFGVKLTSKSLLGIAQFIFTGLCIGLLGGFSFGRSLLLKFPSFFSAGWFRKSGPTEEQVSSASFKMWFVGRGYSDAARASDRGSKPDKEIITRVSGPEIGYITTPIVLVQCALVLLSQRGNLPKGGVYTPGAVFGPTDIQQRLQENGLSFDLVSTRTL

SEQ ID NO: 154464 - protein, 106 aa, Oryza sativa
  Clone ID: PAT_MRT4530_54321C.1.pep
MPDGHKDGGGGGAFSPQGCPAAGNTGGFSTVAGHRRWWLDGRRGGLGHAGCESTFLDAGSSLATARSGLGDPDDGGRRRRDVSAMLGVVFERWQAARLAPARLFPL

SEQ ID NO: 154465 - protein, 428 aa, Oryza sativa
  Clone ID: PAT_MRT4530_54322C.1.pep
MMCEMTKLPLVPFSHVQSRGGADVCGDSFPGGNNGLRGRQRCSGGDHDALSTSAKATSDHLAASGCGDVHGHSLFFFAPPSLLPLRHRRGPSLVPGRQRCGGARGAPHRMPLLANGPTLWYQLDDDVAGLRELLAACPSLADEPAPWYSLARGTEPLTPLMVATAYGSVACLDVLLSPPYLVDPNRASASSLSTPLHLAAAGGATSTPTSVSRLLAAGTDNDNDEVEERQGEEGRARNLQKLSDNSGEFERGSVDLQMIRFEELLVFFFSFGFMGYFSLLLLKPYQILGNKPKFSTLKGGDGMRDPSLMHMGGPHCTSSISDDHEELSSISGVFSMPSSRPYNVPPLHAGASQIHLIKEKQQEQQIRRAQTPIRKTLACAETSRETPSFCLIASQGRHPTLSVHSPLRVSDDELTSDNDRPLLQATAA

SEQ ID NO: 154466 - protein, 88 aa, Oryza sativa
  Clone ID: PAT_MRT4530_54323C.1.pep
LKLHPPTLICICFAEPDRQTRLFSPHKHKLLYLLLLGGKRKSQQIDLHRMTQKVAKKIENFHPESLENASKVGLFKQEPRADSCSPGI

SEQ ID NO: 154467 - protein, 89 aa, Oryza sativa
  Clone ID: PAT_MRT4530_54324C.1.pep
MLKHCFFRAMDHCNIHSTYSGTSSEDLQISTRPMRSFLHLPPSTQSAVVLVHVAYAWQPSQHSIYINNCGTHLSYGLLFKISLSLSAMP

SEQ ID NO: 154468 - protein, 53 aa, Oryza sativa
  Clone ID: PAT_MRT4530_54325C.1.pep
FPLSWFILYFHNISVSVNNLLCWYFCLQFWCVSGDCTGHLSISLMQGFPITLL

SEQ ID NO: 154469 - protein, 432 aa, Oryza sativa
  Clone ID: PAT_MRT4530_54326C.1.pep
MERDFLGAIWRKEEAAGKPEEHSVYRGVDYRGGGGGASAAMQWQFPATKVGAASSAFMSFRSSAAAAREEDPKEAAVFDRFSLSGFRPPPRPSPGDAFDGAAAMKQRQFGFNGRQQYAAAAQHGHREQGVDSYGVAAPHHFPSPSPSPRHPVPFGHANPMLRVHSLPNVAGGSPYRNQSFSVGNSVAGSTVGVYGGPRDLQNPKVTQMTIFYDGLVNVFDNIPVEKAQELMLLASRASIPSPPSAARKSDSPISAAAKLTVPEALPARQIVVQKPEASVPLVSGVSNPITIVSQAVTLPKSFSSSNDSAGPKSGGLPLAVTPLSQASPSQPIPVATTNASAIMPRAVPQARKASLARFLEKRKERVSSVAPYPSSKSPLESSDTIGSPSTPSKSSCTDITPSTNNCEDSLCLGQPRNISFSSQEPPSTKLQI

SEQ ID NO: 154470 - protein, 80 aa, Oryza sativa
  Clone ID: PAT_MRT4530_54327C.1.pep
MATGRRGARDDGDTTHVTAANVTARSGGAEAMTTAMTMGRCGAERRHGRQARAGADDGGDQGKIDSIHTYIDRLSDTRMG

SEQ ID NO: 154471 - protein, 113 aa, Oryza sativa
  Clone ID: PAT_MRT4530_54328C.1.pep
NPSVHSLLRRESKPPPRCPPRRRRQPPARPHAAAPPRPALRAPRRRAGRPPPPATSPAAAARPLAASMPPRPALHAPRRRAGRPSAPRRCRGRPRLRWCLNLLKMKMKIKYFT

SEQ ID NO: 154472 - protein, 289 aa, Oryza sativa
  Clone ID: PAT_MRT4530_54329C.1.pep
MAHMVASQGRNHDCYHEEGTGGLVLASLQLWERERFVMMADDVVDPNSHNHTVEKKTLKPPNFLKLVVNWLEAVVDFVVGKGANPTRLSSSWLIDTPTRRHHDTSSLFRHLCSVPIASSTSPVAGKKEKTATKPAGGGARDPPKGRSSSFACRVCGKRFPSQQAMAGHEDHCRRHEDHVREAAAATAAAVVVVATATASGGCSNRATCGALLASYTCATQLLAAAAVADWSQVAAGIPLSKEQLVVAVAIVLADDGQGQAAEVFLLDLAAEELNLGPSMNNEATSIPKA

SEQ ID NO: 154473 - protein, 80 aa, Oryza sativa
  Clone ID: PAT_MRT4530_5432C.1.pep
REKRAKEEEEIKARRGPRFPLGPFLGSLLFLWLIGRSRINHLVSFVSFLWLHWFFLPSNRSKGWIEFLEYHLSGTLFMAQ

SEQ ID NO: 154474 - protein, 293 aa, Oryza sativa
  Clone ID: PAT_MRT4530_54330C.1.pep
MRKKRKKSGNIINVLEIGQAVKEFMFQRHEMGDGAWKIEVHTVGVWPRPSTSKICCHIFPACGPVKECGAQTGHVFSRSIEVVRRGGRVLAPHRLRRSPALGPKRQKRRRGKGESLAAPATSSTRCRFAVANKRRQIRARRSSSPTWGSTGWPPTPLRLAEHVTAAGAPSTATDLVEPSRRQREGERHGPVLPRWAENSRSGTRSPPCRRHLLALGSSVAMPAAEARLRVAAGQLPDPVVKEGDEQYRRLVEETKSAAGRERRRESAVADYGRRRGSCSRCWLTVVCGGVRER

SEQ ID NO: 154475 - protein, 43 aa, Oryza sativa
  Clone ID: PAT_MRT4530_54331C.1.pep
MWKWQGKTTSLGQMLTSMFNDLPSPHPKRPVARRRKRRTNRFK

SEQ ID NO: 154476 - protein, 388 aa, Oryza sativa
  unsure (1)..(388): unsure at all Xaa locations
  Clone ID: PAT_MRT4530_54332C.1.pep
MTAGQSQRTNPGAGNQTTTPWKKTPAKDRDWRWRIPLCAHGWFGFCLAVLKSRRLVGVADAWSVDDGADGISGFPDAMSAAAHKQMVTGAEEAMLGKLELDSQSNLFSNSDDFLLSGSSKLGISASEDIDLPGKQGLPESTTDRPGSNGSSRVPRLRVLGTAGMAGFGKAVDILDTIGCLVTTSLSTDGGFISRAKTKGCPISILAFEVANTILKGATIMQSLSEDTVTYFKQVVLPSEGVQNLISSDMSVLMRIVANDKREELKIFSQEIVRFGNRCKDPQWHNLDRYFVKLESENPPQKQLKETAVAEMQKLMDLVHRTTDLYHELHALDRFEQDYRGKGTVKGNXDNLPGEYQEVVRMELERQWSYVESLRKRSLWXKMLEDIVR

SEQ ID NO: 154477 - protein, 69 aa, Oryza sativa
  Clone ID: PAT_MRT4530_54333C.1.pep
MTVGPDPQWVPSDLEVVAKVEAGEEAVTDSGIVVAVRMGMVRFWIEPKPFYMTPLIHGSTGTTLNDSIK

SEQ ID NO: 154478 - protein, 141 aa, Oryza sativa
  Clone ID: PAT_MRT4530_54334C.1.pep
MGRGGCCAVRGGLGNSGGLPSPTSHARQRPPFHDGGGQCDNDSGERRVWTTGMQRAQHRQRRPLFPDLPSGAAAAGSATAATSLHRPPMRDGGAAADLDGSGASPPPLNAAVAASSGGAAPRRFEELAHAVAPTNRMKRSF

SEQ ID NO: 154479 - protein, 169 aa, Oryza sativa
  unsure (1)..(169): unsure at all Xaa locations
  Clone ID: PAT_MRT4530_54335C.1.pep
MRGSDLPSTTAVGNATTTAVSGGSGRRACSGLSTGSGGLSSPTSHPARQRRAQQRRRPPFTDXPMRDGGAAADLDGSGASPPPLNAAVAASSGGAAPRRFGAADDSGRRXGDGSGDGLGFGGFLDFIFXCRIYFCMRPVYAIAWIFACGYAKERFLQKSSPMRLHQPTA

SEQ ID NO: 154480 - protein, 77 aa, Oryza sativa
  unsure (1)..(77): unsure at all Xaa locations
  Clone ID: PAT_MRT4530_54336C.1.pep
MELGLGMGMGLGDPXADYGSIAAVGMFVALICVCIVVGHLLEESRWMNESITALIIGLGTWRSFWCRAGSTRTGVQR

SEQ ID NO: 154481 - protein, 345 aa, Oryza sativa
  unsure (1)..(345): unsure at all Xaa locations
  Clone ID: PAT_MRT4530_54337C.1.pep
MPHCLTSTFESSFYILFKLSRKKYELPPXRTIAVDRITPXNYETGHSSPQLCKPNELXPLDPIRGGFGLRGVRVAVQSAFYSLKMWDPLSSMSSLSHSLSLSSSLSHAHSGEDGGTHGAAAYMHAAGGGXWLRGRRRGXDAHGGEDSSTHARVSQYASRCPTTCKNDHASSQATSLRXITSNTRRASPVKRASDTEPSRXQLVGSTVERTSPSQXSDGGEGEREGRESXPGGRWSQRGRRSARGVPPSSPPRTCRCPRRRAVCAAVLAAVRNADWTTTRTPRRSKPPWIGXPGVIRPVCIVGGEXCPVLWFGEVIQSTAIVRGRVIRILENCCIFFKLSIKKREC

SEQ ID NO: 154482 - protein, 101 aa, Oryza sativa
  Clone ID: PAT_MRT4530_54338C.1.pep
AMEFSRFAHPPRANPPPGRLGAPPLKGGGVFFLGGPFIFEPPSFVVGPWGFLDLYPVGEAVFFFFKRRFGFFTLWGVWISVPFCVFLKIWGSHFFFSWFVP

SEQ ID NO: 154483 - protein, 98 aa, Oryza sativa
  Clone ID: PAT_MRT4530_54339C.1.pep
MAFGPCIAPEAYVRSRARTKRSDEKGRSSSPIHRPAATCSSNNPRIRPITSHQAEQAGRQAQAGRHSPDLDLNHHKVPALFTPPATETIRYACLASLV

SEQ ID NO: 154484 - protein, 69 aa, Oryza sativa
  unsure (1)..(69): unsure at all Xaa locations
  Clone ID: PAT_MRT4530_5433C.1.pep
CAAGXTGSCRRPSTRRSTMNSRRGQXWGFRRREGRCPGTPLIWCRTPRISEARTLAGTRAAEQVATLPA

SEQ ID NO: 154485 - protein, 508 aa, Oryza sativa
  Clone ID: PAT_MRT4530_54340C.1.pep
MEAVGGRRRRPRTMLFLVLVALMVIMAMAKTASGGGGDDGGAGGDHDHDHEQFLKLWNGRGGADAKEDYLNWDDDDDDDEDEDEEEEEAEQVMAWAAKCRPPAGRNVVNVDSFGAAGDGCSDDTEAFLNAWKKACSLNNAVFLVPGGRRYKVGAARFIGPCKNRMIIQIQGTIVAPDEPSEWDPASPRLWLLFSGLAGARIQGGGLIDGSGSKWWANSCKIDRSKPCKGAPTALTIDSCRGVSVRNLRLQNAQQMHLTVSRSRDVRLASVRVDSPEDSPNTDGIHVADSTAVTIQSCRIATGDDCISISNGSFAVRMRDIDCGPGHGISIGSLGQGGAFAAVDGVSLDGARVARAQNGVRIKTWQGGAGYVRNVRFAGVRVDGVDHPIVIDQFYCDATRPCRNRTSNVRVSGVVFRNITGTARRAEAIRLACSDAVPCVGIVLSDIDLRREDGGGEVQTVCNCAMGFDDGRVSPAADCLRTSPCGGMSPDDYHPDDKDDDDEVRHTEL

SEQ ID NO: 154486 - protein, 352 aa, Oryza sativa
  unsure (1)..(352): unsure at all Xaa locations
  Clone ID: PAT_MRT4530_54341C.1.pep
MAGDRRGGGGVVSADGERRRGIRRLLLPRGEGSSSSSPPQPPPLQAEEGRRKGFASAALRGLGCTSAAASQAYAPGAGAAAAAAVRSSADWHGRRRRRGKEKRKERGGGGGGGGGGHLVGGGIGADVWCAPGIPFAAEASSVDCVVARHQMVGRGRGGDAERPHRERPCLSRRVTVQEQISSSFMDSPPPPHLDARRALXGADLLPSGRLRRMRGYRHSPVGLEEEIMMFQTRVLLGGMSMYDRYQDWRLDVDNMTYEELLELGDKIGYVNTGLREDEIVRNLRKVKHPAFDSSFRYSTEMEKKCSICQEEFEANEEMGRLDCGHSYHVYCIKQWLSQKNVCPVCKTAVTKT

SEQ ID NO: 154487 - protein, 114 aa, Oryza sativa
  Clone ID: PAT_MRT4530_54342C.1.pep
RRGARSRAARAGAPRRRRRPPPPPRPRAPARRRCTGTTTTRRRLRPPPSPPATPWCHPGTAAARRPPAPPSPPSPPPTPTSRSPPPPPSPRRSCTPPSHSLNARRRRRTRRGGG

SEQ ID NO: 154488 - protein, 243 aa, Oryza sativa
  Clone ID: PAT_MRT4530_54343C.1.pep
MVVGAGGGDELKLLGVWDSPYVNRVQIVLNLKGLSYEYVEEDLMNKSDLLLGSNPVHKKVPVLIHNGKPIAESRVIVEYLDEAFAAGAGGSTGASVLPSDPYERAVARFWAAYVDDKVGSPWYTILFARERGEKVEAAARAISALETVEAGAFRDRSSEGKTTNAAAAPFFGGDSIGFVDVVLGSYLGWFRVIEKMIGVRIMDAARTPRLAAWAERFEAADAVRGVLPDDVDKVIDFLQAFLH

SEQ ID NO: 154489 - protein, 132 aa, Oryza sativa
  unsure (1)..(132): unsure at all Xaa locations
  Clone ID: PAT_MRT4530_54344C.1.pep
AAETREWRRQALNDGRQRRLGGASPPPRRRRPGVRAGGRRWEAHAASLYTWPTVQIRDKNAAPEDVESGEHERKGTVWTETAHIVTAVIGSGVLALAWSVXQLGWVAGPLALAGFACGHRHRLGPRRHERRR

SEQ ID NO: 154490 - protein, 42 aa, Oryza sativa
  Clone ID: PAT_MRT4530_54345C.1.pep
GGPMDSITNESKLMNTFIFSSIHIYFVFPIGNLGLHLFRNTI

SEQ ID NO: 154491 - protein, 51 aa, Oryza sativa
  Clone ID: PAT_MRT4530_54346C.1.pep
FIFLGACFIGSEQNYIMQYSLNGSVHNLHTGFLGGSTKYVILVHVDNPNTL

SEQ ID NO: 154492 - protein, 76 aa, Oryza sativa
  Clone ID: PAT_MRT4530_54347C.1.pep
SISRTPIPSCVFPPFSSLLYFSSSVRDTALRLWVGGVIITKPTKGARRDTISSLGKRWMRTTRLGRPTQSRTEHAP

SEQ ID NO: 154493 - protein, 184 aa, Oryza sativa
  Clone ID: PAT_MRT4530_54348C.1.pep
MAKEIVVMSVLLFVLAATTKADTQSGYGHGCSSLCNSSAPTHIHFYFHDKITGPSPSAVQVVSPPNKTSPTSFGTVYVMDDPLTEGPDPRSKPVGRAQGMYLSSDQVRIGFLQAMNIVLTAGPYNGSVITVLGSNHISDSIREMPVVGGTSAFRFARGYAQARTYFLDSNGLDAIVEYNVYVFH

SEQ ID NO: 154494 - protein, 81 aa, Oryza sativa
  unsure (1)..(81): unsure at all Xaa locations
  Clone ID: PAT_MRT4530_54349C.1.pep
RSLTRTSTQTRGGLFYPXGLIFHTHKKDTVGHQGLIHASEHLVVNKAIDKMTPEHSIRRNVSILLANGVKQALYIYCRQLW

SEQ ID NO: 154495 - protein, 152 aa, Oryza sativa
  Clone ID: PAT_MRT4530_5434C.1.pep
MPELLHRRPLPPASSFLATMAPFFDAMADLSRLRIVPLRPPSCSISLVLPPPPPSSSPASPPLISPPSPRRPPTTADASCRARGQRDARAPPPPPASPRLLLPRYDDVIRRRLISPVLQPPPPSPSPVSPPPHRRPAVRPPPHRRPACPEGD

SEQ ID NO: 154496 - protein, 90 aa, Oryza sativa
  unsure (1)..(90): unsure at all Xaa locations
  Clone ID: PAT_MRT4530_54350C.1.pep
FFLGSQGKALGKIFPGNTSTTSIWXENEXEEETYRGHHRLGLTGPSQGSKVKRTLGDREGTGEKVELLLIARIEVALLSIKRPGKRGIRL

SEQ ID NO: 154497 - protein, 179 aa, Oryza sativa
  unsure (1)..(179): unsure at all Xaa locations
  Clone ID: PAT_MRT4530_54351C.1.pep
VKLEEQRTEILSLLQNSGHELANFKEQNKDLTQKLAEQTLKAEEFKNLSIHLRELKEKAEAGRKEKEGSLFAMQESLRIAFIKEQYETKVQELKGQVFVSKKYAEEMLLKLQSALDEVETGRKNEIALAKRIEELSMRISEMELEXMQDASVDKRDLSNAYDSIVTELECTXLNFDCCM

SEQ ID NO: 154498 - protein, 342 aa, Oryza sativa
  unsure (1)..(342): unsure at all Xaa locations
  Clone ID: PAT_MRT4530_54352C.1.pep
MEELQSTLASLTSQLGHKDQALLSFDEHKTELNRLRDQVLDMERANSLMQDALSQSEQIQMDLNCKNISLQSQLSNVEDRLATVMKDTVATETEASYMRNLVEELTGQLDSLRNDHEKLQLKNKDADDLLRVHMSTEAELADRVAALEAAIHSLEIDLARVNEEKEETEXAIKSNEEQFVQVGPDKSRYIVESIDSSERVLKYQDDILQLKVLLTNLEEQVDDLRFTKDEVEILNMVLESKLEAQRTEILSLLQNSGHERVSFGPQTFLKDTRTKDLTQKLAEQTLKAEEFKNLSIHLRELKEKAEAGRKEKEGSLFAMQESLRIAFIKEQYETKVQELKGQ

SEQ ID NO: 154499 - protein, 115 aa, Oryza sativa
  Clone ID: PAT_MRT4530_54353C.1.pep
SWRAQARAITSHKNKNRLNISTSPLLPRGLTGRIQISPTQVSNSEHTVRVGVGAEAPPEARPAIHSTYGEGIPRPRPSGYTAIPSTGGDTWSSQGGGIRVASMAAKGLQRKAARL

SEQ ID NO: 154500 - protein, 806 aa, Oryza sativa
  Clone ID: PAT_MRT4530_54354C.1.pep
MVASSASLLLLLIHPLLCISAHDFLSPGASLSEDDVLYSPNGDFACGLYKISPNSCTFSIWFTNSADKTVVWSANPLHPVYTQGSKMELKSDGSMVLTDNSGQIVWTNNVSSSNGEQVQAQLLNTGNLIVKGKGDTILWQSFDSPTDTLLPTQNITVRIKLTSTNRLLVPGRYSFHFNDQFQLSLFYEENDIPFIYWPNPTRTISGRERMLYNIIPTGTLNSSGHFLESENLTFMAADWGLGIMRRLTLDYDGNLRLYSLNNSSGTWSVTWMAFPQLCNVRGVCGINGICVYTPVPACACPPGYDFIDPSDQSKGCSPRVNITCDVQQKVMFVSLPNTQFLDSDLSPLRYVSLGACENICLKDCNCMGFVYWQGIGKCYPKSVLLSGVSLPHIGSTGTMYLKLPMEEVLEELQLSEHSMTSIPQSQPFGPKYGPDCNANKNLDEHKSGQNESKYLYFYGFLSAIFLAEVTFIVFGWFILRREGKLARGISEVGYEMVTNHFRRYTYRELMIATRKFQDEIGRGASGIVYKGILKDMRAVAVKKLLDINQGEEEFKHELSVIGRIYHMNLVRVWGFCSDDPHRMLISEYVENGSLDKILFGAKGSQALLGWKQRFNIALGVAKGLAYLHHECLEWVIHCDVKPENILLDENMEPKIADFGLAKLLNRGGSKLNVSRIQGTRGYLAPEWVSSLPITAKVDVYSFGVVLLELLKGARVSDLETNEDEEVEMVLGRIIRTLAESLKSGGDGQSWIVEFIDTRLNGRFNDLQARAMMKLAVSCLEEDRGRRPTMESVVEVLVSVDEASSTI

SEQ ID NO: 154501 - protein, 137 aa, Oryza sativa
  Clone ID: PAT_MRT4530_54355C.1.pep
STLEPEHDKSAVTQGQCDDSSLEEITQNGKKWMSEEAMVAFEKYITRRDDLKEYDYQFDELLHQCFNVEHYYKIFHHFNFTVKMKAPCSTDWTSVLYFAEVKELLGHKIYFCSPLEPNEDGNCYACKNQGMENLKHQ

SEQ ID NO: 154502 - protein, 138 aa, Oryza sativa
  Clone ID: PAT_MRT4530_54356C.1.pep
AAGFSGKFRRGQMVVVPQNFSGAGGPGPKGFPWVSFPTNDGPINAPVVGKLSALRGIPADVLDNPFGVLREKAPMFKFGRGQEFPFFSPKLGAPAPPPRFSGPRGDGGLPPPALGVGKYQGGGPGACSFCSNNGPVFR

SEQ ID NO: 154503 - protein, 52 aa, Oryza sativa
  Clone ID: PAT_MRT4530_54357C.1.pep
MASLPSLAAASAYMSLLARGHCAVADFNATDADVDLRRSAVGLETTATPGVY

SEQ ID NO: 154504 - protein, 300 aa, Oryza sativa
  Clone ID: PAT_MRT4530_54358C.1.pep
MFSVDLILIPHCRMPALLPLSRASAPPLRHSPDVHACRTGQSPSRRRTRATPPPQCRDAASPPAASASCDAVSLMASASTSSDQCHSPAASASCDATSPPDPVPVIPILPPAVCHPPSPPSSGQRLYLLDSPSPATVASRRLHIKQCTRFQRGARGDFVNLKICCHHYYKKHFRRRWGGRERAAAARRGDGHGVGRQRRRTGRRQRHPAWLPSPPNPGRRGGRGRAPVVLLPPRSVPKEGEAGGGGIPHPTVGGPAEDYSLHTNASAADVADNLWDAFLSSGHAGVPRPFGDTVRIFASG

SEQ ID NO: 154505 - protein, 60 aa, Oryza sativa
  Clone ID: PAT_MRT4530_54359C.1.pep
AASVLGRQPHGSVRTKQGAHSVASKWVMALSHTGQLEHGVKYVYKHGTIVSPKEGALLRR

SEQ ID NO: 154506 - protein, 553 aa, Oryza sativa
  Clone ID: PAT_MRT4530_5435C.1.pep
MAVNHKLSALLVATALPLLLLSTADAGEIGVCYGRDASNLIDPPEVVKLLNANSITMVRIYDTDPTVLNALANTGIKVMVMLPNKDLASAGADVGSATNWVKNNVVPYLNQGTLINGVAVGNEVFKQQPELTGMLVSAMQNVQMALANLNLADGIKVSTPIAFDALDVSFPPSDGRFKDSIAQSVMKPMIDFLVRTGSYLLVNLYPMYAAADPSTHISIEYATFRPNSGVLDEKTGIMYFSLFDAELDAVYAAISKVSRGSLRASLAQGDQMLVQVAETGYSSGNTFGGPVVVEADADLNAIATIPNAKAYNNGLIRRVLSGSPGKHDVSAYIFSLFNENLKPGPATEGHFGLFYPNGQQVYEVNFQGGRSPCPTNASWCVANPNVDNAALQRALDWACNNGADCSAIQLGKACYEPNTLVAHASYAFNDYYQRKGQASGTCNFNGVAFIVYKPSPSICDPNPSWCVAKDSVGEAQLQNALDYACGSCADCSAIQRGAQCFNPDTKVAHATYAFNDYYQTAGRASGSCDFAGAATIVTQQPKIGNCLLPPNNA

SEQ ID NO: 154507 - protein, 184 aa, Oryza sativa
  unsure (1)..(184): unsure at all Xaa locations
  Clone ID: PAT_MRT4530_54360C.1.pep
MIIPKKNRNEICKYLFQEGVLYAKKDYNLAKHPQIDVPNLQVIKLMQSFKSKEYVRETFSWQYYYWYLTNDGIEHLRNYLNLPSEIVPATLKKSARPPGRPFGSGPPGDXRPRGPPRFEGDRPRFGDRDGYRGGPRGAPGDFGGEKGGAPAEFQPSFRSSGGRPGFGRGGGGGFGAGPTSSSME

SEQ ID NO: 154508 - protein, 116 aa, Oryza sativa
  Clone ID: PAT_MRT4530_54361C.1.pep
RDVPIGIASSPLESRAAASWSSRKRRPGESLEWRRRRRRNPKRHRHLRCFCCSCSRCPCELMAGFLGEINLLHLHDHRWDCRLVNDFTATWHRIIRMNRLNGTPKALARLGPKKKK

SEQ ID NO: 154509 - protein, 126 aa, Oryza sativa
  Clone ID: PAT_MRT4530_54362C.1.pep
SQLDRRNQIRSHARGRSRSRRVVVYCMSAAASRVTSAEDATASGDALPGAAPAIGDGAGEEAGALNSCADAITRSDEATAISSTATRGAIVNPTKKKKKNVARSTTRARGDSNHKASWWWWCSLLL

SEQ ID NO: 154510 - protein, 36 aa, Oryza sativa
  Clone ID: PAT_MRT4530_54363C.1.pep
ACLINTLHVSIRAPLMVIYKLSTRDPCQHIFLLPRA

SEQ ID NO: 154511 - protein, 531 aa, Oryza sativa
  Clone ID: PAT_MRT4530_54364C.1.pep
MMMMNYRALWLWLSVAIVFSVQSCRALAAGEGSKEADKIAALPGQPPDVKLQQYSGYINVNETSGKSLFYYFVEASVDAAHKPLLLWLNGGPGCSSMGIGAFQEIGPFRVDTDGKTLCRNPHSWITAANLLFLESPVGVGFSYAAVKPQEVYSTIGDNMTAHDSHTFLLRWLDRFPEYKTRDLFIVGESYAGHYVPELAVTILDNNLLPHATPIKLKGIAIGNGILEFAAEQTQLYEYLWQHAFISDSAHALITQSCKYPDDHPSALCESARKAAYSRIGNIDIYNIYSSTCHEQKVRPSASKCMDLADPCSQYFVEAYMNQPQVQKTIHANTELKYPWTRCRVYNLDHFGDSPKSMLPYIKAVITGRIRIWIFSGDLDAMVPVTATRQSMERLQLRVAADWRPWSADGKDVAGYVIAYDGLVFATPYAHTSAGRYTIRQKLGRACNTVRGSESELINSGRWSTNLWSGCNASGPIHCHPLRSGPKSVTHRPILPSVTKHIWHQHADLVHHIFTEKGNQTSRINPLLYSLN

SEQ ID NO: 154512 - protein, 75 aa, Oryza sativa
  Clone ID: PAT_MRT4530_54365C.1.pep
LDTDVKNQPLLIHASDLKHRTGCVVGCLRKLQKWCLSSVFDEYQRFAAAKARSTDQRFMELFDISSLKHLTASHC

SEQ ID NO: 154513 - protein, 835 aa, Oryza sativa
  Clone ID: PAT_MRT4530_54366C.1.pep
MPEQTLEMDIGEEAAPIDNEEATLQHHWGGGACLARVLLSCLPTGGDRLRRLNPAIHARATVAGRLDDLFLTNLLLRGYSNLGRLRDARHLFDRMPHRNLVSWGSVISMYTQHGRDDCAISLFVAFQKASCEVPNEFLLASVLRACTQSKAVSLGEQVHGIAVKLDLDANVYVGTALINLYAKLGCMDEAMLVFHALPVRTPVTWNTVITGYAQIGCGGVALELFDRMGIEGVRPDRFVLASAVSACSALGFLEGGRQIHGYAYRSATETDTSVINVLIDLYCKCSRLSAARKLFDCMEYRNLVSWTTMISGYMQNSFNAEAITMFWNMTQAGWQPDGFACTSILNSCGSLAAIWQGRQIHAHVIKADLEADEYVKNALIDMYAKCEHLTEARAVFDALAEDDAISYNAMIEGYSKNRDLAEAVNIFQRMRFFSLRPSLLTFVSLLGVSSSQLAIELSKQIHGLIIKSGTSLDLYAASALIDVYSKCSLVNDAKTVFNMLHYKDMVIWNSMIFGHAQNEQGEEAIKLFNQLLLSGMAPNEFTFVALVTVASTLASMFHGQQFHAWIIKAGVDNDPHVSNALIDMYAKCGFIKEGRMLFESTCGEDVICWNSMITTYAQHGHAEEALQVFRLMGEAEVEPNYVTFVGVLSACAHAGFVGEGLNHFNSMKSNYDIEPGIEHYASVVNLFGRSGKLHAAKEFIERMPIKPAAAVWRSLLSACHLFGNAEIGRYAAEMALLADPTDSGPYVLLSNIYASKGLWADVHNLRQQMDSSGTVKETGCSWIEVTKEVHTFIVRGREHPEAELIYSVLDELTSLIKNLGYVPDTSDHTLLCETG

SEQ ID NO: 154514 - protein, 171 aa, Oryza sativa
  Clone ID: PAT_MRT4530_54367C.1.pep
MRTEFAHHPYRGEDYTFCSVQASPCCYNPMHHAWGNEIDLLLAQLQARDVQYAQLSGQYDTRGDRIATLEAQLQSSQQQVRELEEQLESAEILGTEPAPCLVDPSGEQSTVTVAEPIQAVAAPPSQLGSSEETPIQIDSELEEDTDLGAETEPEEVEREPGITDSSEDPGP

SEQ ID NO: 154515 - protein, 79 aa, Oryza sativa
  Clone ID: PAT_MRT4530_54368C.1.pep
ICDTIVHNHIHYLPANLHLYLNSITFSVVQWRGFRRSLCGVAVEKGAQGQEVLVVGIAIMILLKRLSTPRADSSARDPL

SEQ ID NO: 154516 - protein, 49 aa, Oryza sativa
  Clone ID: PAT_MRT4530_54369C.1.pep
DISNGQLQLEETGLLVPISTAGLHRGLLRSYTEKQAAGDEGNNALLGDS

SEQ ID NO: 154517 - protein, 276 aa, Oryza sativa
  unsure (1)..(276): unsure at all Xaa locations
  Clone ID: PAT_MRT4530_5436C.1.pep
VSLFPRARGKGPERKPPWVALTRSRGPRVEXGSPWNPTSNGSQRRPGGFIPARVASDANRRTAARXIGGLAPEKRGGQGESIQRNGLAGERTTAAGGGGQSRRHADVAAREKSEGSTGSGSAIAERGCDAHAVTRDPKVTGDARAAALCGGGRGDTAREREGRPAAMGQQGGGQGDPRERGGERDXREGSRRRRISTAIVGGEQKGKXHGRATRGRFKVARASPWLKGFISGVGWGGEAPWRSGDERRPPGAGADGGKAMASGGRAWGGAYEPPEG

SEQ ID NO: 154518 - protein, 774 aa, Oryza sativa
  Clone ID: PAT_MRT4530_54370C.1.pep
MLTTALAEDKKSYLARGSSVSTEDDTKTILVSPNGDFACGFYKVATNAFTFSIWFSRSSEKTVAWTAKRDAPVNGKGSKLTFRKDGGLALVDYNGTVVWSTNTTATGASRAELQNSGNLIVMDSEGQCLWESFDSPTDTLLPLQPMTRDTKLVSGLYTFFFDSNNLLSLIYNGPETSSIYWPNPAFLSWDNGRTTYYSSRHGVLDSDGWFIATDQLNFEASDHGQKDVMRRLTLDYDGNLRLYSLNMTTGKWSVTWMAFCQVCEIHGVCGKNSLCIYKPDPRCSCLEGFEMVKPGDWSQGCSYKANATLIWNNNANSKSNHGFIFKKIPHTDFYGYDLNYSKPVTLWQCKRMCLDNADCQAFEYHKGIGKCFLKALLFNGRKSQDHYNDFYLKLPKQLLASKPSHICKVTEKDAYPSSQMFEGSNSKFKFGYFLSSALTLLVVEVILVTVGCWATYKWGRRPEIRDEGCTIISSQFRRFSYKELEKATGFFQEELGSGGSGAVYKGILDDNRKVAVKKLNDVIHGEQEFRSELSIIGRVYHMNLVRIWGFCAEKTHKLLVSEFVENGSLDRVLSNHQSVFPVLPWSQRYNIALGVAKGLAYLHHECLEWIVHCDVKPENILLDKDFEPKIADFGLVKLLNRGPSTNILSRVHGTRGYIAPEWALNLPITGKADVYSYGVVLLELVKGNRVSRWVVDGEEEVELAVKRTVDILKEKLASGDQSWLLDFVDCRLNGEFNYSQAALVLNTAVSCLDEDRRKRPSMNSVVEILLSLME

SEQ ID NO: 154519 - protein, 155 aa, Oryza sativa
  unsure (1)..(155): unsure at all Xaa locations
  Clone ID: PAT_MRT4530_54371C.1.pep
QIGLHSVAAATSTSSRPAAPHGQPPACSGSSSALPRHPGPPATQRPRLPLSSAPASPTPSGSGTPPXPASSPRTSPPASVPAAAAPTACAAPPTLTLVTSSPASSPCQGSRSASLPGSRSERRRRRDGARPRRHRPPPLPPSGSSPPRVLVVGAA

SEQ ID NO: 154520 - protein, 130 aa, Oryza sativa
  unsure (1)..(130): unsure at all Xaa locations
  Clone ID: PAT_MRT4530_54372C.1.pep
PPLFGKELEKGPQFLKTGDAGLVXIIPPQPLVGGPFFGAPPFGGFPGGALGPPGGVGVLKNVGKKGPPGAQGAQAPPQKKWAGVKGGFPLWPLGILAFLGQKKFWPRPFPVLPCPLKFAPFGPFVRPFYP

SEQ ID NO: 154521 - protein, 223 aa, Oryza sativa
  Clone ID: PAT_MRT4530_54373C.1.pep
PGCRNSDRRNNPSIFLRYNSVRVGVPSVQVQYIAEKITPHFCRLTDRTYSAPVLADIEYTVGKQYELKRKPNFIIGYLPIMLRSHACVLNGKDEAELARYGECPLDPGGYFIVKGTEKVILIQEQLSKNRIIIDTDSKGRVIASVTSSTHEIKSKTVIFMEKEKIYLQLNQFTKPIPIIVVMKAMGMESDQEVARMVGRDPRYGDLLYPSIQECAFERIYTQK

SEQ ID NO: 154522 - protein, 171 aa, Oryza sativa
  unsure (1)..(171): unsure at all Xaa locations
  Clone ID: PAT_MRT4530_54374C.1.pep
EIVYLCEIMKEXVLFFCQYLEPLSLIMDQLSTMFYWAEGKGILLMRXRCPSKKXEVVMEAFNDMKSDAKVMFPSMKECXDLVNALHVSRIVLLYVVWNPYVGRXGICRAYRIGQDKIVYTYNLIIEGRKERNKYDRQAKKDHMYQACYKEVMFNDKIEAMASHRSSKACLC

SEQ ID NO: 154523 - protein, 817 aa, Oryza sativa
  unsure (1)..(817): unsure at all Xaa locations
  Clone ID: PAT_MRT4530_54375C.1.pep
QIPISLLDPVHGVAVAAAAALHVSRAPPPFAPPGGNGPVPSSIRAPQAPPPGARPFPGSPPPPSQPPPPFARPAAPVQQQPPPXGGPPGVMPSQPLQQQQQQQRPASXGPPSGAPPAQAQRTPFGGPPSAMSQGPLPFGGPPAAVASQPPPFGGPPVAAAQPPPFGRPPSAAAAGQSAPLGGALFAAAQPPPFGGPPGAAPQPAPTGGLRTPYGGPPAPSQQVPFGGAPQWPGTQPPPFGAQAAPSSQPPPFMGVPGNAPPFRPPGWQGQARPGAMSAGMQLMPGGMLPNALGQGMPSTPSMPYSPHAGAQVSTPSKIDPNQIPRPMPETSVVIFETRQGGQAAVPPAASSEFIVKDTGNCNPRLMRCTLNQIPCTGDILTTSAMPLALMVQPFALPHPSEEPIQLVDFGGMGPIRCSRCKAYINPFMRFIDQGKHFVCNLCGFSNDTPREYLCNLGPDGRRRDADDRPELCRGTVEFIASKEFLVRDPMPAVYFFLIDVSMNAIQTGATAAACSAISQALSDLPVMKRGWQVWLITQSLIATATWDVSLLNDNAARWEGPRTMVGIATFDSAIHFYSLKRDQQQPLMLIVPDIQDVYTPLQTDLILLISECRENLEQLLESIPNMFENNRVADSAFGAAMKASFLAMKSTGGKLLVFQSEKKRQFMCILALAVLPSVGIGSLSAREAEGRSNISTGDKEAHKLLQPVDKTLKTMALEFAEYQVCVDVFLTTQSYVDISSISVVPSTTGGRVYHYYPFSALSDPAKLFNDLRWNISRPQGFEAVMRVRCSQGLQVQDYSGNFCRRVPTDIDLPAVSN

SEQ ID NO: 154524 - protein, 124 aa, Oryza sativa
  Clone ID: PAT_MRT4530_54376C.1.pep
METGPTCHQALGVASRPTASLEKGDRPGITPGATVVTDRSDHGLGGDWRGAAAGRPRAQQRARAAATDGAVEEGVGGSAEEMGIGTGKEEMVVIAGEVGEAEEGKGKGGSGGMARGGDKRGWAP

SEQ ID NO: 154525 - protein, 318 aa, Oryza sativa
  unsure (1)..(318): unsure at all Xaa locations
  Clone ID: PAT_MRT4530_54377C.1.pep
MSVKKFHGEWEELKRKFCHALFPLTRVINFRLDILSFRRNEKDSLGVAWARFSLLTQSGPDLSLPHHVLFQHFRYGLDKDSAANLDISAGGSFGHKTTAEGRELLDLILENDSFGRSEAIPEVEIIYEDPLHVESEPNSTAESLFQLLEPEEEEIHPSEIPFQFRVGLYEDYGNTLNYSSKTKAHPKHEPFEEVMFVSSFVSSEPISHLHETKQPSSPSIKPKPCPSGPQNTVLVYHHETTRFLHDVSLENENLQATDKLKTLTLEDERKHSTYEHESFFFKIPQDSCSHKEXSVTSLCEDHNHLPVFISNIFRRMVV

SEQ ID NO: 154526 - protein, 170 aa, Oryza sativa
  Clone ID: PAT_MRT4530_54378C.1.pep
MNKRTDKRNIRVHIKGEASVVAQLIAQDTHIKFDIATSAIVYEGSRPTMKFLRAGIIIEVHKHLLLLQKKASQPYRRNVLKHFGEPDESLKLSADMSLFTISELLPLRYHLQMEWTNDTPRISVESTERNEPTVETHMKKEKSRGRGGISVEEYTARPGEVVFECHEDED

SEQ ID NO: 154527 - protein, 30 aa, Oryza sativa
  Clone ID: PAT_MRT4530_54379C.1.pep
RCPDAYLFPSDNSKTHACRGNSNYQVVFCP

SEQ ID NO: 154528 - protein, 63 aa, Oryza sativa
  Clone ID: PAT_MRT4530_5437C.1.pep
LFRTNRATVSRVLVCDWEGPFRSSGGWLLFCRIGFCFFTLFRAFLVIPFFYVQEFWRVFDFLF

SEQ ID NO: 154529 - protein, 166 aa, Oryza sativa
  unsure (1)..(166): unsure at all Xaa locations
  Clone ID: PAT_MRT4530_54380C.1.pep
LIAQDTHIKFDIATSAIVYEGSRPTMKFLRAGIIIEVHKHLLLLQKKASQPXTHLRTQMNSLPYQQHILQMHFYFGEPDESLKLSADMSLFTISELLPLRYHLQRPXPQQTLPTNRPHTPRISVESTERNEPTVETHMKKEKSRGRGGISVEEYTARPAGLFRWPT

SEQ ID NO: 154530 - protein, 69 aa, Oryza sativa
  Clone ID: PAT_MRT4530_54381C.1.pep
MTENHYNSKFFSLPLHKSPMPPFENQVLVTFIDLNYLEAPKSKILKSTNLFQNFAFNTMSQIYLYFKMC

SEQ ID NO: 154531 - protein, 102 aa, Oryza sativa
  Clone ID: PAT_MRT4530_54382C.1.pep
MAARPCQAAAALGAASTNYRKASRATTEGGLGEEPTLDEAVKGLAGGWSRAQRRVGTGGCSAQVGQGGRRPRTVGHHGGSARGNERRRWRFERCRREIGVGA

SEQ ID NO: 154532 - protein, 43 aa, Oryza sativa
  Clone ID: PAT_MRT4530_54383C.1.pep
SEPGGLWGPNTHLPPGGVRTQSYVFPPVAVKSRQWFPVSLRKR

SEQ ID NO: 154533 - protein, 169 aa, Oryza sativa
  Clone ID: PAT_MRT4530_54384C.1.pep
MIIKTLKARILCALKSSLPAAASPPPSPTKPGRAAAAVVVVAGDAFSDDASFFDAHETPTKNGAEPIDDWELVDEEGRVGVAAAAAEEEEEQLREFPARCPPGGEGAVVLYTTTLRGIRKTFEDCNGVRALLENLDVAFQERDVSMDRGLRDELWSVTGEKAVPPRLFV

SEQ ID NO: 154534 - protein, 630 aa, Oryza sativa
  Clone ID: PAT_MRT4530_54385C.1.pep
MPPGARARRIAALDLIFLVFLRLASAYQRPSDAHINCIDSFCLGGYTCSETTATTSCTAYLTFRSDPPLSVAYLLNATPSAVAAANSVPLAVSPVDGTQLLLVPVPCSCNRATGYYQHNTTYAIQELDTFFLIANNTFQGLTTYQSIIANNPASEAMSPVINGPLAVPLRCACPSATTGRINNLLTYVVQEGDNVTSIARRFNSTHGDVLAANTLLVPLVHPPHSRVVLANTTITSTTPPESQKFYVSSPCSNGLLAGLGIGVGCGVSAWAAVLAVFLLWRRRRRRPVGDSSGMARETPLVAAVRGAVETLAAYSYADIETATAGFAEERRVAAGSSVYRAVINGEAFAVKRVAAGGDDVRGEVDVLGRVNHSGLVRLRGLCANGDDTYLVLEFAENGALSEWLHPGSAAACLRRVLGWKQRVLVALDVAGGLNYLHHFTNPPYVHKNLNSGNVLLDANLRAKVSSLGFARAVAVAVAAGDDSIALMTHHVVGTHGYLAPEYLEHGLISPKLDVFSFGVIQLELLSGKTAAFVTDDDGQNMLLWQAADGLVDGDGAWFKLRAFMDPQLQGHYPIGVASAVAALAVRCVAREPRARPSMEEVFVTLSAVYNLTVDWDPQNYSASASMVLGR

SEQ ID NO: 154535 - protein, 138 aa, Oryza sativa
  unsure (1)..(138): unsure at all Xaa locations
  Clone ID: PAT_MRT4530_54386C.1.pep
RPPECHRTHGRRRPPCRKKPSGRHIDGGAEMLADDPSSVPRTQMRARTEVPGDVRQYVQHTKQPAARNNHPGHPGTTXTGGEXCPXFAXXAPXQRGKCRGXPPPSCXRDRVXXTSPQRFXCCHXRHTHKLLFLALTNA

SEQ ID NO: 154536 - protein, 574 aa, Oryza sativa
  Clone ID: PAT_MRT4530_54387C.1.pep
MTARLLERVHARPLGCTDSDKLEMSLQLTSVREQCARLLEAVEAGEIAGHAAAARLFGSYHSKLRVLLAVHGGGHLDAAAARRPAARSTVMRACCYYQPLRPPCPSIPLGHKPQQHHLFLSSRSKDVKLRSILDEDRLTGARPCSKDQEHKGWMQLRNAMNNRYIRALDTNFDESFVDSIVFDKTLYKYAILGCKVNADGIMNEGIISSSERNKIIHALERIEDDIEIGKFKWRDGADVHTSIVEALADMIGDQAKGLAVESKCDSCLMILETWSKNSIDHIMTQLKQLQAALVLLAIKNDGFVLPGEKEIEGTSLLMRIVKALDSDASKLRNCLGGICSTDGVIFMRLSSPEDYTLSKLSYIAWFANSINYRIPNLLRQLLEKVLSLRNAETAIYETTLGKLSSIEQMRRHGDVAISKCLNLRFGKACGSVQTCEIEDAKHHLFSSTKSVVEILDLSIQLVKSISFDMEKAQNCLPRGYDDIMRFAHFLTTKGIDSVTAYALVHLCLDKQLQPSELTLEKRELKQIDFHCERAHYLLEYKGGIFGDSTDLDACKQMLKWCSKLRIDPAATICS

SEQ ID NO: 154537 - protein, 59 aa, Oryza sativa
  unsure (1)..(59): unsure at all Xaa locations
  Clone ID: PAT_MRT4530_54388C.1.pep
GSCPPALAGWQLAAPLVMDHRPAGDRQXPAYDDLSSQQATNSKLSTAARXXRGSNGGLC

SEQ ID NO: 154538 - protein, 205 aa, Oryza sativa
  unsure (1)..(205): unsure at all Xaa locations
  Clone ID: PAT_MRT4530_54389C.1.pep
VLSILPEQTPLPTVEDTIRWRWTNSGIYNTQSAYMAQFNWRIDSAVAKLIXKGWAPSKCKYFTXLLQNKIWMADRLQIRQWPNNYLCQLCYENLETAQHLFKDCTFAHQIWEKIFQQLGHETXTHTMAMSHCLTXWIKWTSQGEKHKMKAMKSIHMMVAWKIWCERNKXLFRNQETELPQLVTKITYEIKVWIMCGTKDIARMSQ

SEQ ID NO: 154539 - protein, 77 aa, Oryza sativa
  Clone ID: PAT_MRT4530_5438C.1.pep
SLGARARTHIYISVHSSTYTYLWTMLNRPVIYNGVRASYASASYKLNLNVSRLCVCPFAWHYGPCNHGSTSSLVRID

SEQ ID NO: 154540 - protein, 116 aa, Oryza sativa
  unsure (1)..(116): unsure at all Xaa locations
  Clone ID: PAT_MRT4530_54390C.1.pep
MRSELGEGSDTLPELIVEPMAAWSMSFMGSHEYLALEVIKREGHGSAVDWWMFSFFLHELLCGKTPFKGSGDRAXLFNMTSQQLRFPETAAGAPSTQCLQRRPSHRSPQRRDTTLR

SEQ ID NO: 154541 - protein, 72 aa, Oryza sativa
  Clone ID: PAT_MRT4530_54391C.1.pep
MARSVSQRPDPCPGGRLGGCRRWSSSSSLELSVGDPELLEAGSRGWRPRRHRPPPPRLRTLSSPPHRCHASL

SEQ ID NO: 154542 - protein, 81 aa, Oryza sativa
  Clone ID: PAT_MRT4530_54392C.1.pep
PPPGPKLNNFYRGYRNHLTQPRTNCSDGHREGREKPQGDILTRTGKTREEPPGGSAWDKSKLGRTWTLAEPTATAAKPPRI

SEQ ID NO: 154543 - protein, 345 aa, Oryza sativa
  Clone ID: PAT_MRT4530_54393C.1.pep
MRALPMAAGRAAAVAACASPAVPRRSLLLSTAAAALQPEPVRLTRGASAAPKLRASPPDAAQAAAAFGSKEEAFAWAKSDNRRLLHVVYRVGDIDRTIKFYTECLGMKLLRKRDIPEEKYTNAFLGYGAEDNHFVVELTYNYGVDKYDIGAGFGHFGIAVDDVAKTVELIRAKGGKVTREPGPVKGGKTVIAFVEDPDGYKFEILERPGTPEPLCQVMLRVGDLDRAISFYEKACGMELLRKRDNPEYKYTVAMMGYGPEDKNAVLELTYNYGVTEYDKGNAYAQIAIGTDDVYKTAEVVKLFGGQVVREPGPLPGINTKITSILDPDGWKSVFVDNIDFAKELE

SEQ ID NO: 154544 - protein, 164 aa, Oryza sativa
  Clone ID: PAT_MRT4530_54394C.1.pep
PTRPGRAADDAACASPAVPRRSLLLSTAAAGEPPCRPPADSSSPSKFSQIDRSAVRLLGWTAALQPEPVRLTRGASAAPKLRASPSDAAQAAAAFGSKEEAFAWAKSDNRRLLHVVYRVGDIDRTIKFYTECLGMKLLRKRDIPEEKYTNAFLGYGAEDNHFVV

SEQ ID NO: 154545 - protein, 574 aa, Oryza sativa
  Clone ID: PAT_MRT4530_54395C.1.pep
MDQLVNFIIRPPRAEYSPNDDLLEQEFMLKGRWFQRKDLEVVNGQGKKLQCSHYMPVVIPEGKALPCVIYCHGNSGCRADASEAAIILLPSNITVFTLDFSGSGLSEGEHVTLGWNEREDLKAVVNHLRTDGNISCIGLWGRSMGAVTSLMYGAEDPSIAGMVLDSPFSNLVDLMMELVDTYKYPLPKFTVKLAIQHMRKVVKRKASFDIMELDTIQVAKRCFVPALFGHATEDDFILPHHSDKIYESYVGDKNIIKFDGDHNSPRPQFYFDSITIFFHNVLNPPDVPDDHYFLTPHGSLGQGHWDTEHDIEYRFAQSPTARTATTEDAIAQLRSRRLMSRMEVPTGATAEDRADRNEVMDSDNGPSSSSVSTATPPNGRNGRLLTPTSDDGEYVEYSFDSLSDMPYTEEDEDRMLMQAIMESLKDLELSNTKAAQSAASDAASKENKENGCNGATVTVLEPDASSTSARPTPTDAPGKDVTTCSTKAKSPEVQSASNHTTNNAASVNTSSSLESNASTHVTNGKSTSSESQKPTQNANGEDGTRATLVVQKSRTGSLMDGLTHKWGSLFKNND

SEQ ID NO: 154546 - protein, 536 aa, Oryza sativa
  Clone ID: PAT_MRT4530_54396C.1.pep
MAPLPVVGPWREKKESNRVSGCVGFRLRDGLKSRYIPFQCPSSHSKWRTRWFYLQIENSDPVFVVPEEQPDKISSWTAKPTLTPSLQSFIDVIDDLRVRGLSGYEVAADFVGRRIQSLQARAHLAFDYSGPEDTTQVSPRGLSSEAVGRRVGQVMISGPTMASNVPVLLCEKGAAERDAAINVAVSLKEKVAKEASDAAAVAATTSGGDVPKKGRKFSSVIGHRRKAPTPSPSCRAARAKAAQDGSGGTSSASPAVASTDVVVVPGSHEATPSGPASDLVAGHGSPAAVLTWEELQVEMWRLLEAGARGIGREIMEVRAAAASSSANERADRLAHDLAEAREDLKKMRKLVAGNERQRQGLEHRMSELENNLSEIRGSLRVTYTGLHQLAGECGIKSTIPANPNEFSLTSSLAELAAAMEEIPSKHAARIGEETSNGNYTGACHVLADVDVEDVQQRGQPESPAIIPALAFEPHASPDDVDQILPARMGMAMTSLDLESALAGQDRRIQYWKMKFEVAELERTMLEVKKEQAVETL

SEQ ID NO: 154547 - protein, 446 aa, Oryza sativa
  Clone ID: PAT_MRT4530_54397C.1.pep
MDLGKSSSTSASLKKLQEDGALPGRGTMEREAGCTEPQPVLGRMVAIEDYILCGFLPPPSEILLLILNFYGLSLLHLNPNSIAFLSIFSHLCEAHIGEQPDKISSWTAKPLLTPSLQSFIDVVDDLRVRGLSSEAVGHRVGQVMISGPTTTSNVPVPLCEKGAAERDDAINVAVSLKEKVAKEASDAAAVAATTSGGDVPTKGRKFSSVTGHRRKASTPSPSRRAARAKAAQDESGGTSGASPAVASTSVVVVPGSREVTPSGPASDPVAGRGPPAAVLTWEELQVEMGRLLEAGGRGIGREIAEARDVDDENVQQRGQPESLAIIPTLAFEPHASPDDVDQSLATRTGTATTSLDLESALAGKDHRIQYWKTKFEVAELERTMLEVKKEQAVETLRGREVWFNSYLKSCCTSMAKDLTRPYRLWASPAEDPLGSSEALSRRRKGT

SEQ ID NO: 154548 - protein, 361 aa, Oryza sativa
  Clone ID: PAT_MRT4530_54398C.1.pep
MSPFPFARRGRPNATPPSIKIFPSPTTSGGDIPKKGRKFSAVIGHRRKAPTPLPFRRAVRAKAAQDGSGGTSSASPAVASTDVVVVPGSREATPSGPASDPVAGRGSPAAVLSWEELQVEMGRLLEAGARVIGREIAEARGLEHRMSELGNNLSEIRGSLRVTYTGLHQLAGKCGIKSTIPANPDEFSLTSSLAELAAAMEEIPSKHAARIGEEMSNRIYIGACHILACVRLAHPELDLREILDQGEASDARKDVMEEVGDLGKSVLPLFEEDVDVEDVQQRGQPESPAIIPALAFEPHTSPDDVDQILPARTGMATNSLDLESELASQDRRIQYWKTKCEVAELERTMLEVKKEQAVETL

SEQ ID NO: 154549 - protein, 99 aa, Oryza sativa
  unsure (1)..(99): unsure at all Xaa locations
  Clone ID: PAT_MRT4530_54399C.1.pep
MGCFQSTARRPRPGYEDPVGLASETAFSVSEVEALFELFKSISGSVIDDGLINKVNIXLALFIFLRKENLFANRIFDLFXVMIWGVIXSGDFARAVYVF

SEQ ID NO: 154550 - protein, 67 aa, Oryza sativa
  Clone ID: PAT_MRT4530_5439C.1.pep
FVHLPHRRLPLGARCHYPSPAPTVVVMLLFGKCNRQIKLSGHMAASSSLLFCDTSVLPNYLYSLPIN

SEQ ID NO: 154551 - protein, 149 aa, Oryza sativa
  Clone ID: PAT_MRT4530_543C.1.pep
TKKMGFKFIASGLQSLQTLNHVQAIHSTYYKERLHTSGKTNYFHTHRPPELNSLQKAACLHSIVLSLVVLWYFLSGLLVHFSLSNLESPAMLHPTYLTWGCQAATFTRNDSSGLLHEGGRWQSPWAIRLEAFVKRWCGSTERSGRRAGR

SEQ ID NO: 154552 - protein, 56 aa, Oryza sativa
  Clone ID: PAT_MRT4530_54400C.1.pep
STFGGITTKISNVSSRLPTINHILASIRRKKSMDTIILSLVASVCAFLILVYWLSK

SEQ ID NO: 154553 - protein, 160 aa, Oryza sativa
  Clone ID: PAT_MRT4530_54401C.1.pep
MAQESWKKEAEETGVHTPEAPILCVNNCGFFGSRMTENMCSKCYRDTVKAKTVATVVEKKPLASLSSTPLVTEVTDGGSGSVADGKQVMEEDTPKPPSNRCLSCRKKVGLTGFKCRCGGTFCSMHRYADSHKCTFDYKQVGREQIAKQNPLVKADKITKI

SEQ ID NO: 154554 - protein, 77 aa, Oryza sativa
  Clone ID: PAT_MRT4530_54402C.1.pep
NPFGPPANYHLYGSSPPNFQGFQQQASWLQSAPISFQGFRPQESWMHSPNQVVGSASSHGSESASQCPAPSPLGDQP

SEQ ID NO: 154555 - protein, 81 aa, Oryza sativa
  Clone ID: PAT_MRT4530_54403C.1.pep
LHPFFSETYFLNPQGPFQHWFYPRPPFLGAPGKWAPSSRFPQLERGGPKEKGKWIWVGNCQLYFTQFSNPKWGFQREKTPG

SEQ ID NO: 154556 - protein, 553 aa, Oryza sativa
  Clone ID: PAT_MRT4530_54404C.1.pep
MESGGFLARRPEPCAAAADPDDGDARRGGWRAAFFLVVVGFLERIGFFGVQGNLMLYLTGPMAMSTAAAATAANAWGGTVLVLTLAGGLAADSSGLGRYRAVIVASALYLLSLGMLTASSSSMAAQRATSPPSSSAGGAVVVVFYAALYLLALAQGFHTPCAEAFGADQFEREGDDDGGGGGGARRPASRSSYFNWYHFSISWGYVISTTLLSYVDENVGWTVGFAACWATMVLYLAVFLLGTGTYRRAERPAIDGAAAARRAWTARFFFFFSRNRKDAAEQLLEPQEEVVVVVDGHGDGGRGFFLVKLLPIWLSSIVFAVVVSQVSTLFTKQSSTMDRRVGSGGGGGLVLPSAGLQCLVSFTYIAVLPVYDRMVVPLARRLTGGGGGITMLQRIGAGMATGCLAMAVAALVEARRLRVARDAGLVNRPGATVPMGVWWLVPQHVLIGVAEVLAVIGLEEFFYDQVAGELHSVGLAVSQGVMGVGSYASGALVAAIDWATAARSGGGESWFADDLNRAHLDYFYWLLAALAALEVAVFVYLAQRYDYKNKSKP

SEQ ID NO: 154557 - protein, 115 aa, Oryza sativa
  Clone ID: PAT_MRT4530_54405C.1.pep
ALGFDGGLEKPPTDALRPIIPDNACILCLTAAAGTELADAYSSDTVIVSSPRKEVDDPWAFHLHAALLRQAFAHCGKFPTAASRRSLGRVSVPVWLIILSDQLLIIALVSYCLTN

SEQ ID NO: 154558 - protein, 572 aa, Oryza sativa
  unsure (1)..(572): unsure at all Xaa locations
  Clone ID: PAT_MRT4530_54406C.1.pep
MAMGGIRCPVCFAAMAAGQAIFTAECSHTFHLRCVPGGAAACPVCATPWRDAPSPLTTSSIPAAYDDDDPVEPVATAARNSSGGGGGVLVLKTHCEYPALSRGAARDGFAVLVHAKAPAAAAEAAGRAPLDLVTVLDVSTSMTGDKLALVKRAMGFVIDSLGAADXRLSVVAFATPXARRVLPRLRLTRMSEDGKATAKRAVDALVANGNTNIRDGLDVDAKVLDGRRHTDAVASVILLSDGQDNQTMGYRGRFHMTDFKAAATSYDVLVPPSFTRAGGGERCAPVHAFGFGTDHDAAAMHSISEITGGTFSFIENLAVIQDTFARCIGGLLSVAAQNARISVECLDPGVRVRAVKSGRYESRIDAEGRAATVDVGELYADEERRFLLLLDVPRADGDAAVATRLASVRCTYRDTATEQSVDVAGEEDAVVLRPAVATGVAPSMEVELERERVRLEAADDIALARAAAERGAYGEAARILDARREALSRSAPAASGDAMCAALVAELRELSERVADEREYAQTGRACVLAGMSSHGQQRASSVQLGELRVRVFVRVRDTGDAEDGEALGDFA

SEQ ID NO: 154559 - protein, 108 aa, Oryza sativa
  Clone ID: PAT_MRT4530_54407C.1.pep
MHTPLRFPCKSARNPTHRDMIGLPARAQRRTFSCTHARKHGCAIANSSRAHTNPRRRLIWTINRWAFARHRSIDRDVLGIIDHPSSWRLLSKRKKEKKKQRAPLLPER

SEQ ID NO: 154560 - protein, 44 aa, Oryza sativa
  Clone ID: PAT_MRT4530_54408C.1.pep
DKKEPVLARTLLIIANYKGVSDGSPSLCRLFYFLNPGSLPGIIN

SEQ ID NO: 154561 - protein, 75 aa, Oryza sativa
  Clone ID: PAT_MRT4530_54409C.1.pep
RRPPLGFKGETFVAICVALRFCAHPQFWKTRVKLNPRCVFPVRACGDFWACKGVVVQIVGGAPVSLFCCVKWKQS

SEQ ID NO: 154562 - protein, 49 aa, Oryza sativa
  Clone ID: PAT_MRT4530_5440C.1.pep
LPHLYIDPASTRLRTPDTTFHNLREAARCSDSSPRTAWTRLMFCGAPNK

SEQ ID NO: 154563 - protein, 106 aa, Oryza sativa
  unsure (1)..(106): unsure at all Xaa locations
  Clone ID: PAT_MRT4530_54410C.1.pep
RGSLAMIPPSLRRAGKAGCGGIRGGGGARARARRRARREEGDDRWAPPVSESGGRARLSAARARGEADGPRGRREREGGRSGPSRPKREGGGKRTSFRXFLFIKPF

SEQ ID NO: 154564 - protein, 75 aa, Oryza sativa
  Clone ID: PAT_MRT4530_54411C.1.pep
MGCVSMLGPLGARPRVGARPYGRSSPLFIPLVAAKNRRDECPRGPGDAHHKFAATIGDGVSVAKAQRLWTVVVGP

SEQ ID NO: 154565 - protein, 72 aa, Oryza sativa
  Clone ID: PAT_MRT4530_54412C.1.pep
TQSTHKDQNDPGPCRSFCSPHPRLKRAATQRLKTLRYRRSSLLTASTRAAAPHLSSAPPPKMPLRFPTPLPV

SEQ ID NO: 154566 - protein, 88 aa, Oryza sativa
  unsure (1)..(88): unsure at all Xaa locations
  Clone ID: PAT_MRT4530_54413C.1.pep
SEKKKKKKKKKKKKKKKKKKKKKKKKKKKKKKKKKKKKKKKKKRGSARGKXKKKKKKKKKKRGGRFLEKQPSLPAFFPNSNSFLKGPP

SEQ ID NO: 154567 - protein, 49 aa, Oryza sativa
  unsure (1)..(49): unsure at all Xaa locations
  Clone ID: PAT_MRT4530_54414C.1.pep
GRVKRNTWRAYTMALSYPXALAGKAAPKVFGEGRITMRKSAAKTKPGET

SEQ ID NO: 154568 - protein, 76 aa, Oryza sativa
  Clone ID: PAT_MRT4530_54415C.1.pep
LSNRKGGSSFRDLLHISPIRNASGKVAFHVWVHLDEGAKYDFNGLTPEVWQLGAVGAVRVAVRSLSASGSLLRPSQ

SEQ ID NO: 154569 - protein, 165 aa, Oryza sativa
  Clone ID: PAT_MRT4530_54416C.1.pep
MAWTAAAATVTRAAATPAAELRLPLAAGLGRASFAVTGRLRRAVSASLSTAAAAVKKEAVQTEKAPAALGPYSQAIKANNMVFVSGVLGLNPEVMKNMGEILKASGASYSSVVKTTIMLADLQDFKKVNEIYAKYFPAPAPARSTYQVAALPLNARIEIECIAAL

SEQ ID NO: 154570 - protein, 131 aa, Oryza sativa
  Clone ID: PAT_MRT4530_54417C.1.pep
GAAAGVKKEAVQTEKAPAALGPYSQAIKANNMVFVSGVLGLNPETGKFVSESVEEQTEQVMKNMGEILKASGASYSSVVKTTIMLADLQDFKKVNEIYAKYFPAPAPARSTYQVAALPLNARIEIECIAAL

SEQ ID NO: 154571 - protein, 203 aa, Oryza sativa
  Clone ID: PAT_MRT4530_54418C.1.pep
MARAAAAAAFVFVSLALLCDASQGEGAAAAAACRAADLVVRQRATGRVVEGKPEYAVEVANRCRCAQSRVVLRCYGLISVESVDPRAIRPVDDERCVLRGGRVIRRGAPPVRFTYAWMTPFDFPLASSFVNFYGKNWLRISTSWVQSLGKYCRHQAVDMCSCSIYASQIGDDYIRENAQMKKKTTVQFGNNPDLPVATRDRSD

SEQ ID NO: 154572 - protein, 107 aa, Oryza sativa
  Clone ID: PAT_MRT4530_54419C.1.pep
MSQPGLVLPLLQIQVAIMSSDAEKASSARKSGDGSDILSPSPSHGDELGAVATSSPPTSSVELFRSGQGGFVPVLLLLAASSDPATLVVDVLRAASLTVEQLRVVRD

SEQ ID NO: 154573 - protein, 171 aa, Oryza sativa
  unsure (1)..(171): unsure at all Xaa locations
  Clone ID: PAT_MRT4530_5441C.1.pep
SLSAIRDMGDKRAFNRIMGAVGVPLVPGYHGAEQDIELLKLEANKIGYSVLIKPTHGGGGMGMRIVQRPEDFVDSVLSAQREAAVSFGINTLLVEKYITQPRHIEVQIFGDQHGNVIHLYERDCSLQRRHQKIIEEAPATNVTVENXAYTSVAAVSAXKAVGYYSAGTVEF

SEQ ID NO: 154574 - protein, 87 aa, Oryza sativa
  Clone ID: PAT_MRT4530_54420C.1.pep
KKKINFKLIPNQLTIPNINPYTHFFFFLPKVPPPPQNKIPQILNFFKKKPSHKKIQDPFPPPQKNPFSYSVFPPPKKPSTKKAPTHQ

SEQ ID NO: 154575 - protein, 68 aa, Oryza sativa
  unsure (1)..(68): unsure at all Xaa locations
  Clone ID: PAT_MRT4530_54421C.1.pep
MAAATIEIPRSPAFRLLLVTAARKNLLSGGDPRARRLDCRPTPHRRQKRRRRCEKTKSSFPLXALKPG

SEQ ID NO: 154576 - protein, 169 aa, Oryza sativa
  unsure (1)..(169): unsure at all Xaa locations
  Clone ID: PAT_MRT4530_54422C.1.pep
IEIIPPQYEQDWYRWLENIRDWCVSRQHWWGHRVPAWYVTLEDDQEKTLGSDNDRWIVAKSESAASVEAQKSYPGKKFILNQDPDVLDTWFSSALFPLAVLGWPDDTADLRSFYPTSVLETGLDILFCWVARMVMMGTQLGGDVPFQKVXLHXIVCDTHVXKMCKSLGN

SEQ ID NO: 154577 - protein, 32 aa, Oryza sativa
  Clone ID: PAT_MRT4530_54423C.1.pep
SCNSPYTKYRLNISQDLGSDPSAITRTTAVSE

SEQ ID NO: 154578 - protein, 212 aa, Oryza sativa
  unsure (1)..(212): unsure at all Xaa locations
  Clone ID: PAT_MRT4530_54424C.1.pep
MGDVSVNRPIKAEPAAGGIAQGNRILDMMSSGWTDERHMHYISSMEASFVEQLYNHEQNDAGNGFKVLRGGVWEKLKFDRTSACSRIGRKYCLPASPWIQHLRPRECSSNARNDAAEAXLGDHESGIQTIQGRTPLSHGREWEACKEEKLVGESTEVSDQNFADDEAEVDAESSKACKRRKLRSALTRNYQVVPSDKLFASTKADGRKDAPE

SEQ ID NO: 154579 - protein, 100 aa, Oryza sativa
  Clone ID: PAT_MRT4530_54425C.1.pep
MAEHGGALIVGGADGNESLGRGARVVAIRGVKGGDGGHGDSCGHGFGERRRKEKAATGARGRRRGAGVCMWTWNKRYEIFNATNKNMNKSQILKIGLYLN

SEQ ID NO: 154580 - protein, 471 aa, Oryza sativa
  Clone ID: PAT_MRT4530_54426C.1.pep
MAVEAPCRAGAGRQRAAAALAGVHTQPPHRPAAIRCGGDGSGRGRLDPASDRLRRSEAKLGVTKKDAKLAAWTLFIGSSAFAGFLQQQEQEHLEDSTARQNENCNYAKGKWVADKKRPLYSGNECKQWLSKMWACRMMQRADFSYENFRWQPHGCQMPEFTGPNILKRYFTSIFLFVWISLRTGLILAFSEACRLRHKTLAFVGDSLGRQQFQSMMCIATGGKYSPEVEDVGWKYGLVKAPGALRPDGWAYWFPGTNSTILFYWSASLSELELLNTTDSVTSYALHLDRPVTFLKKYLHSFDVLVLNTGHHWNRGKFNGNHWELYADGKPVGKGRLADLNRAKNLTLYSIARWVDSELVRYPQVKAFLRTISPRHFVNGDWNTGGSCGNTVPLSNGSEVLQDHSSDLPVESAVNGTRVKILDITAVSQLRDEGHISNSTFKGRASTGINDCLHWCLPGIPDMWNELLFAQI

SEQ ID NO: 154581 - protein, 91 aa, Oryza sativa
  Clone ID: PAT_MRT4530_54427C.1.pep
MGDVSVNRPIKAEPAAGGIAQGNRILDMMSSGWTDERHMHYISSMEAFFVEQLYNHEQNDAGNGFKCLLTDREKILPARKPLDPAFQPARM

SEQ ID NO: 154582 - protein, 103 aa, Oryza sativa
  Clone ID: PAT_MRT4530_54428C.1.pep
PHASNPIFLKKHYWTTFKGGKTIYEMGVFHKGKGSLFWVEPKDELFKKKKKLFFWKILPKKRTIPPFLIPCPQFPTKRARTTTFGFPFAHSYRRPGKGPFPRC

SEQ ID NO: 154583 - protein, 71 aa, Oryza sativa
  unsure (1)..(71): unsure at all Xaa locations
  Clone ID: PAT_MRT4530_54429C.1.pep
SVRRLEAYDISYTTKVRDLRDLVDAARTSCAAKGRSIXKIFLSKCXMAMNELRKYLYHVGWNMTLMDGPPG

SEQ ID NO: 154584 - protein, 170 aa, Oryza sativa
  Clone ID: PAT_MRT4530_5442C.1.pep
HTLTPGGGLGDGGGGGGGGGGAVEAYAALPGRRAALRGHRRCAASPLGVRDRGPLHPQRAHLPPPRRVRADPRAGRRRRRRGQHRRLGPRLHGAGGHRHRHALRPLRGRDGAGNRRAERPVCTDDRGRGEGASRGGGQGAARHHRRRHDAGGGAQAPARQRCHPLPPLTT

SEQ ID NO: 154585 - protein, 368 aa, Oryza sativa
  Clone ID: PAT_MRT4530_54430C.1.pep
MGDVSVNRPIKAEPAAGGIAQGNRILDMMSSAWTDERHMHYISSMEASFVEQLYNHEQNDAGNGFKVLRGGVWEKLKFDRTSACSRIGRKYCLPASPWIQHFRPRECSSNARNDAAEALVGDHESGIQTIQGRTPLSHGREWEACKEEKAVGESTEVSDQNFADDEAEVDAESSKACKRRKLRSALTRNYQVVPSDKLFASTKADGRKDAPEHAARRSTSPLTLAAAACVALAGPALVALAAAAAACVALAGRALVTLAAAALVALATAAACIVLAGPALVACVALTGRALSRSTPPPPLALCSRCLTRSANRSVCRLRLPIGGEVGAPTEMVASTGNLLPAAAADMEAMRSEKILSAGGAGFSLVAV

SEQ ID NO: 154586 - protein, 86 aa, Oryza sativa
  Clone ID: PAT_MRT4530_54431C.1.pep
STWEAVAGTDGESRTPVVGKHGAGQLSSNSAGRSLASKEIQYNADIVSPVRLAYQHSSSEPDDVSEDLKKCRLIPTRYLQCMQPSS

SEQ ID NO: 154587 - protein, 464 aa, Oryza sativa
  Clone ID: PAT_MRT4530_54432C.1.pep
MNAAVLLLLLALAALPASCAPPRSFRLELASVDASAADAANLTEHELLRRAIQRSRYRLAGIGMARGEAASARKAVVAETPIMPAGGEYLVKLGIGTPPYKFTAAIDTASDLIWTQCQPCTGCYHQVDPMFNPRVSSTYAALPCSSDTCDELDVHRCGHDDDESCQYTYTYSGNATTEGTLAVDKLVIGEDAFRGVAFGCSTSSTGGAPPPQASGVVGLGRGPLSLVSQLSVRRFAYCLPPPASRIPGKLVLGADADAARNATNRIAVPMRRDPRYPSYYYLNLDGLLIGDRAMSLPPTTTTTATATATAPAPAPTPSPNATAVAVGDANRYGMIIDIASTITFLEASLYDELVNDLEVEIRLPRGTGSSLGLDLCFILPDGVAFDRVYVPAVALAFDGRWLRLDKARLFAEDRESGMMCLMVGRAEAGSVSILGNFQQQNMQVLYNLRRGRVTFVQSPCGALR

SEQ ID NO: 154588 - protein, 72 aa, Oryza sativa
  Clone ID: PAT_MRT4530_54433C.1.pep
TQTTKCACIYAFLAGYHLRKGTRMKHYNIKTKTWTTSALPKKIINQSKEDCPLHNLTCEFTTFLPVALPLFL

SEQ ID NO: 154589 - protein, 65 aa, Oryza sativa
  Clone ID: PAT_MRT4530_54434C.1.pep
RRAAVCAAPDPEGIADPSEDQDPQDYEQGKSSLFFEHVDPNCEIILFTNKTACNDENPTCDYAMP

SEQ ID NO: 154590 - protein, 223 aa, Oryza sativa
  Clone ID: PAT_MRT4530_54435C.1.pep
MATSLFLALQCVQCSTMQVKPQKKSSNKWVCVVCNQRQSVMRVHARGHRAADLRRFVQEANLSRGRAAHVPVPEEDWVPAVPGEQRDEFPKERKRRMDWSDYLEDPGEYDGGGHHEEARDEADTVSQVAPNRRGPPVLGAVAIATPRPRGRSGAVPREMPTAKRVARVACGWGEIIANNDTPSNGTAQSWSINWCVQGSHPMMTPPQQLGIACCGLEYLVYGL

SEQ ID NO: 154591 - protein, 98 aa, Oryza sativa
  unsure (1)..(98): unsure at all Xaa locations
  Clone ID: PAT_MRT4530_54436C.1.pep
FYAKESDACPRGALYLSGGAVVPVSAHCKGGYALPNPGAGLMRIAKYHSMGLXTIQASGEHIIVPAGXYTLENRLKDLHXDYMGCAKMNCSTPGDLCY

SEQ ID NO: 154592 - protein, 427 aa, Oryza sativa
  Clone ID: PAT_MRT4530_54437C.1.pep
MKSTKLHLFWDVGSSIILLTPREKREYGNENTCKIAHGIRKWRRPSRRRRSCHDPHGLGSLRLSAAEGSPEHGRRDDDDGCGDAVDQQQRQSRRTRRGAAAAGCGCRRRSPTAAANHASPAANGCAQRRSQGAYEVQRRPPHHIIHMHEGAPAPPSAHVVDEEGRQEVSVEDDADGHQRSKCTDGVPAAPQASAADVEEDSVHHENISKLISGFVPPALGAPILDEVTTYDGDSALHVVAACADTEDYLKCARMIYNKASRLLDAINSEMDTPLHCAGWEHWYGFLPHRVGGRRAELSSRCRVEEADVGGSRTSMRPKDGTSPLDLAIALRRWDLVFESELLVASFKKFSYFGPCGQNVFHIAALWERAKSSPHAMKAVIVMLEKYPSCATLRDQRKGRTFLHNAVTRGNRALVAFACRNPEFALRF

SEQ ID NO: 154593 - protein, 53 aa, Oryza sativa
  Clone ID: PAT_MRT4530_54438C.1.pep
KNVFLCVIYSRTRSVYAHVLKGFSLFDQCLHKQVKYQGEMYQFIPEKNNFWSY

SEQ ID NO: 154594 - protein, 175 aa, Oryza sativa
  Clone ID: PAT_MRT4530_54439C.1.pep
MSDAVVLLPPWRPTTTTPTATITATTDQIKTLTVAISHLINPADTILHTQKPKGSHRRRIDELCKARKGGVFLGGFGCLLRPTRLCPLCQATLTAPSVTAVGKSLVKRSRSVGELVRHRLMEACADIPTIVDDPSAAASFSFPDTAVYGNRDLDDIDFPSDPNHATKKEKRMEWS

SEQ ID NO: 154595 - protein, 406 aa, Oryza sativa
  Clone ID: PAT_MRT4530_5443C.1.pep
MGRIQGNAEVTFAPHEPIAVTRCTTPEHQAHWMWSLPWQSAVRLHVASPPQLPWIALSPRPPVATPTHAGENNVVNTVCVGSTDGWRALHHTATAGGGTKTKRHTFFLHNPFTTTTVPLAELEDVLDDAFLKQNEVRKVIIRSSSCCPDGDHLVAIMTDHYNFPLILCRPGKGTWTPDSCTMPFVRVIDIAFFKDKLYLITTAEDLFAVDLAADEHGKPTVTNVERIIRQPRSPDGMIDAFRWSDDEDDDDDGDAREDDGDASSTNDDGEYSSLNDEGVVDGEDHDEVLNQEGGDNNSDGDGEIEPVTDDDDIDDVGQQWCPTWEHRKFEQFYEEEYAITDHTRKLDAGTWVPVTGGLGGQAIFLSELFSKSVPAPAHGEVEKDMVYFVDTYDVWDMKSGTRRPFR

SEQ ID NO: 154596 - protein, 231 aa, Oryza sativa
  Clone ID: PAT_MRT4530_54440C.1.pep
MPYYALFGEVVMDGIVRVEPMGGFDGTATAYYLQCKDCGSLGSVSLIPGKGKALTPDSKNMVMLIHCDGHIPIAFSPAPYWIANKVNGDQHELHFSKDGFEGYGDNDELILTSAKFTVERLKKAEKMSFKWHIKAKDRANHRLSQVEYKYKTEDCKIQEKHRNGHLIRPQEKYRNSRRDKNSKDSQKIIEAVESEEEAGRVLSVGSRKGARGSGQSGLGQIGRRKAWPATA

SEQ ID NO: 154597 - protein, 45 aa, Oryza sativa
  Clone ID: PAT_MRT4530_54441C.1.pep
IHTAAAVQIHNARRRFPHLTVLRGNLGHPYQFDPTNSQFFLCNTS

SEQ ID NO: 154598 - protein, 61 aa, Oryza sativa
  unsure (1)..(61): unsure at all Xaa locations
  Clone ID: PAT_MRT4530_54442C.1.pep
QESCKSGXPRELQQQVRFFFWKCQVGNIPSLKNHREKTLFLQRTSYIQEYPSQSNLNWQYI

SEQ ID NO: 154599 - protein, 345 aa, Oryza sativa
  Clone ID: PAT_MRT4530_54443C.1.pep
RSLFGWRSQPLFLTMLYNCAVYKKLKKILKKDLSDLIVQLNGSEWMETYIVCYSRVTSRPDLTIGHATYELSRGYRMTSERKARGSQELIESNIRIDTTLLIHVAASKHYMFFQTNHIPLSKNSADAAPSRRRRSAIATPPRHPRRRLAPHANRRRPAPPPASPILHRALSWPASPIYPDRCRRPHHPSTPCLHVNLHRLPGLETVAIIGKTNGANLFAWDDRRGLLAVGCWKRLTIFRLDNENSAPHCLFFLGCDLSVYGYGLTVTSFGFRWKLRWPVGSAQFGEWEPLSHDEARSLFAFVAPYVNEAKETKSSSSLPQKTTEMQRSGIGSRVIRQGIGRQGGR

SEQ ID NO: 154600 - protein, 139 aa, Oryza sativa
  Clone ID: PAT_MRT4530_54444C.1.pep
SLMVSILQLQTRTEASPASSASAAATRIFAVRRQQQEQEGGEEEEEFEFQERMDLSGAQGELPIPMHASTAASPFAGMGAHGGAGGGHVVELHRHEHVGNNGQAMAMASPPPTNVAVAAEQEGSAGGGEEAGRHGGGGW

SEQ ID NO: 154601 - protein, 68 aa, Oryza sativa
  Clone ID: PAT_MRT4530_54445C.1.pep
ICFCLEMNWMRIYNTPPIFWSSETIQNIIFLYLATLVSADLIKLFVEICLLSQLSQQLITFMVVMLCC

SEQ ID NO: 154602 - protein, 66 aa, Oryza sativa
  unsure (1)..(66): unsure at all Xaa locations
  Clone ID: PAT_MRT4530_54446C.1.pep
ASAAAAAVVVTVSAVIRGMVASDGLPRAWEMAASGXRDIIWWRGQRPAWRREAQSMAAEVGSAREA

SEQ ID NO: 154603 - protein, 363 aa, Oryza sativa
  Clone ID: PAT_MRT4530_54447C.1.pep
MAAVESSKKLVAILSKSGDPFRLMAAVAETDEAVSRFGKVVTILSNRVGHARARLGKRRSSPPVDPGCLMDHPLAAAASSPAPSNGRLHFSSSAATASPSPATAAAASSAANVTPAVVDRSLFLETTLLDLNSRGAPAPAASMAAAAKNSSKLAPAPMVNSSSSANHIQFQQPMKSFQFEQTPISDKFHIEMPRGVGGGGGKEVISFSFDNSVCTSSAATSFFTSISSQLISMSDAATNSAAAAAAPTTKKPSSCARKATADDDAGGKCHCPKKKSVSISPPFLGHFCHDLDRVLASDFFAGNPGRRRGYYRCSSKKDCPARKHVERCRSDPAMLLVTYENEHNHAQPLDLSVVQQATANPQT

SEQ ID NO: 154604 - protein, 323 aa, Oryza sativa
  unsure (1)..(323): unsure at all Xaa locations
  Clone ID: PAT_MRT4530_54448C.1.pep
WIPGLQARRRLAGGVNAVALLSLSAGQIWVLAPGXMAADGRTVELHKCAVVELEPSRPVYAMEVAMGRLLLGEAGGLRVFPLQGLMKSGKERQVRKEGAGAAVRKSLHKKNGIRNGFIVPIGHGGSEGGGKPGAAPARGLATWRVKQTSGSYFSFFSSCSSEDHHNSQGAVEVKNVVKVVSIRPLSKDKFLVLDSAGLLHVFSLQNKELVSEATSKRYSGNHTHCLDNAMKVQLFAVFPSSSTKTEIFWISDGGHSIHIMSALDVEPPNSDNGGGDGERESTTIKLTAIEAIFTSEKVQDIVPISKDSVLILGQGNMFLYGTS

SEQ ID NO: 154605 - protein, 599 aa, Oryza sativa
  Clone ID: PAT_MRT4530_54449C.1.pep
MASSSSSRLLFLLSCSVLALLAGAEVHHHEFIVQETPVKRLCKTHNVITVNGQLPGPTLEVREGDTVVINVVNHAQYNVTIHWHGIRQFRTGWADGPEFVTQCPIKPGGSYKYRFTIEGQEGTLWWHAHSSWLRATVYGALIIRPRENKTYPFEKPAREVPLILGEWWDADPIQVIREAQRTGAAPNISDAYTINGQPGDLYNCSKEGRKSLTLVCVFYQPVCVRQCVANLQRHDNMHAETTAVPVKPGETALLRFINAALNQELFVSIAQHKMTVVGVDASYTKPFTTSVLMIAPGQTTDVLVTMDQAPTRYYLAARAYDSAQGVAFDNTTTTAVIEYDCGCATDFGPSIPPAFPVLPAFNDTNTATAFAAGIRSPHEVKIPGPVDENLFFTVGVGLFNCEPGQQCGGPNNTRFTASMNNISFVFPQTTSLLHAHYYGIPGVFTTDFPAYPPVQFDYTAQNVPRYLWQPVPATKLYKLKFGSVVQIVLQDTSIVSPENHPIHIHGYDFYILAEGFGNFDPKKDAKKFNYVDPPQRNTVAVPTNGWAVIRFVADNPGVWLMHCHLDVHITWGLAMAFLVEDGYGKLETLEAPPVDLPMC

SEQ ID NO: 154606 - protein, 422 aa, Oryza sativa
  Clone ID: PAT_MRT4530_5444C.1.pep
MSITSASRRAGAAALPILRRIGGAFRRPFSSEPDPASSPGYHVAGGPSFMRGAVFWEPGRPLTLEDFRMPRPKAGELLIKTKACGVCHSDLHVLKGELPFSSPCVVGHEITGEVVDHGTHTPAEIINRFPVGSHVVGAFIMPCGNCFYCVKGQEDLCESFFAYNRAKGTLYDGQTRLFLRSNGKPVYMYSMGGLAEYCVVPANALAVLPNSLPYTESAILGCAVFTAYGALRHAAEMRAGDSVAVIGVGGVGSSCLQIAKAFGASEVIAVDVLDEKLQNARTLGATHTVNAAKEDAVEKIKEITDGRGVDVAVEALGKALTFSQCAKSVRDGGKAVMIGLAATNVMGEVDITRLVRRQVKIIGSYGARARQDLPQIVKLAESGAFNLKNTISRKCKFEEANSAYEDLDRGKIVGRAVVEIMS

SEQ ID NO: 154607 - protein, 133 aa, Oryza sativa
  unsure (1)..(133): unsure at all Xaa locations
  Clone ID: PAT_MRT4530_54450C.1.pep
MTGLGSPCGACKFLRRKCVKGCVFAPYFCHEQGAAHFAAIHKVFGASNASKILMHLPVSDRCEAAVTMSYXEAQARLRDPIYGCVAHIFSLQQQVSKFFISIQYITMRVLVQNYFFLLKEVVLFFMEWEKLTW

SEQ ID NO: 154608 - protein, 68 aa, Oryza sativa
  Clone ID: PAT_MRT4530_54451C.1.pep
VTKDGCEVYDTVASASAPRDQEGTRNNIVCKKLAYSDQARIASLLLHLPLCRCRCKCSSITHHFAIYM

SEQ ID NO: 154609 - protein, 101 aa, Oryza sativa
  unsure (1)..(101): unsure at all Xaa locations
  Clone ID: PAT_MRT4530_54452C.1.pep
TLNEEVASMDKRWKKDLXYSIFHLTCCCQMRDNRMRTNRTMSRKAYFVTVKRLERDTGGLYNALKISTLSRGDDGHKXLDAVSKYAAKDAFQWGLKPGVYS

SEQ ID NO: 154610 - protein, 44 aa, Oryza sativa
  Clone ID: PAT_MRT4530_54453C.1.pep
MCRCGAKAAQWISWSMDNPGRWAPVAIFLGGMTPNKQLFEGVVE

SEQ ID NO: 154611 - protein, 66 aa, Oryza sativa
  unsure (1)..(66): unsure at all Xaa locations
  Clone ID: PAT_MRT4530_54454C.1.pep
LXPTLLVPLIHILSLYQETHKVNISALVLATAITIASHLSYASSIPFLCSEELKNIFLEVLQFFLQ

SEQ ID NO: 154612 - protein, 72 aa, Oryza sativa
  Clone ID: PAT_MRT4530_54455C.1.pep
GPELPPRPRVRTTFTRTHPVSSDAFSSPADSDTELDSDRVCGLLGDCRHQATHRRFADNGSEGEVGEKRMPG

SEQ ID NO: 154613 - protein, 166 aa, Oryza sativa
  unsure (1)..(166): unsure at all Xaa locations
  Clone ID: PAT_MRT4530_54456C.1.pep
PPTAPPARNPPPWPPPPRNPPPPPPPKPPPPPRPPPAPPPAPDPPPKPPPCPPPSPPPRPPPKPPPPPTPPLAPPPKPPPPPNPPPCPPPSPPPPPPSPPPPPPPNPPPPPKPSPSPKPPPWQRPNLQPWPNGPRPNPARATEPPPPXPTNSQPRHPPPRITNPTR

SEQ ID NO: 154614 - protein, 498 aa, Oryza sativa
  unsure (1)..(498): unsure at all Xaa locations
  Clone ID: PAT_MRT4530_54457C.1.pep
DPYAHYSPISTPVPAAVSGDGQLYSPQQFSFSAPYYQQSVPPGMPYLSSPTPISQGEAMTLSPNSFLFGPRPGYYXLMPCSADTPNSGFTXLGMILTFYLMMIISEWFRSSEGNGSFPSPAASPQPAGGVSGPFGQSNFPMRSGMQSPQHRPFYGFGTPSDSYGRVFSHGGYFPQATNYGGPFPSFGLNGTSSIPMEKGRRRGRGNALLCSCNGSLDFLNEQSRGPRATRPKKQPEDGGKDEKPSAGVDCELYNRPDFVTEYKNARFFIIKSYSEDNVHKSIKYGVWASTTNGNKKLDSAYREAKEKEEHCPIFLLFSVNASAQFCGVAEMIGPVDFEKSVDYWQQDKWTGQFPVKWHIVKDVPNNLFRHIILENNDNKPVTNSRDTQEVKLEQGMEMLKIFKDHEEDASILDDFDFYEERERALLDNKARLHQQHQLPSSTVVEPKKPLTVATDLVGHITKSFAQAVRLGEAKNEIISARSTTTTTTTAAAGDVNLD

SEQ ID NO: 154615 - protein, 87 aa, Oryza sativa
  Clone ID: PAT_MRT4530_54458C.1.pep
MEGKAVVVKGKIRSLLTQASPIPPTATPCRLSLLSSSDGVATVDANDLATNISTASLGGTLLVARRIKWREKKGGWRKMKLTCGSHV

SEQ ID NO: 154616 - protein, 103 aa, Oryza sativa
  unsure (1)..(103): unsure at all Xaa locations
  Clone ID: PAT_MRT4530_54459C.1.pep
LLNHEEFGALLQEFKTDYNHTHFFRNXEFKAAGDKMWGPLKQILVEFLERSCTVESSGFLLYKELGHMLMITNPVVVDIFLAYVLGMKPRTLGSLTISFFDLY

SEQ ID NO: 154617 - protein, 272 aa, Oryza sativa
  unsure (1)..(272): unsure at all Xaa locations
  Clone ID: PAT_MRT4530_5445C.1.pep
MCFFSNSGNLLFFSGAGELGSRGGVGWRWEGKKGEVAGLRGMAMRGGSPATAECGTHLDNLKSSPTREGGDGGLDVASRMAEEMAGFIWHSLTKLELVGMDRAQAPRFEWSWSIVPSPMSTPSTQIQQHAAVSSLSASPYGGSKGRRKAAWLGSASRRPAGYGEGGCASASSATTIGGERRRRAVRKAAATGAKGGDARRSPALGGRGREKKXGEGGLTGDSAGVGEDDGGRRRQAADGGGQPSGGRDSSHDGEASSGDGVAQRRRRMAGGV

SEQ ID NO: 154618 - protein, 583 aa, Oryza sativa
  Clone ID: PAT_MRT4530_54460C.1.pep
MAFPDDDEKMKGCRPKLFGTKDKKVVKRADYQSCSAAHLVESGELLKSVGQSANYIHKLSPGQVPQSHNLLPPSEHLQEVFAEVRSIRLSHLLGHSSSTTKTEPFRIFVSTWNVGGNTPTAELNLDDFLPADDNSDIYVLGFQEIVPLNAGNVLVVEDNEPAARWLALINRTLNKPVDSNADIFQHKPSSSLDSTSSLSSSNLDASFSSRTRTASGSSAIFQKSSLKSIRKPYMPTQRKLLKLCNCSVEMTRKSYKDACFGCPQAYANETDSSEDDTDDRSNDPCGYIVDGMNSAASASRDQLKYNLVSCKRMVGIFITVWAKKELVHHIGHVRTSCIGRGIMGYLGNKGCISVSMTVHQTSFCFICSHLASGEKEGDELRRNLDVLEILRLTQFQRICRAGPRIPERVLDHDRVIWLGDLNYRISLSYEDTKKLLTENNWDALFEKDQLNIERKSGRVFKGWSEEKIYFAPTYKYSSNSDSYAGETATSKKKRRTPAWLQLYWCDRILWHGDGIVQLSYFRGESKFSDHRPVCGTFIVDVEIQESRSKRRSSNTNIRIGAEELLPTSKSKANKNKGNKGSGT

SEQ ID NO: 154619 - protein, 107 aa, Oryza sativa
  Clone ID: PAT_MRT4530_54461C.1.pep
MASSPANVGNGAPESIGGNQTAVEVRAGSVSATAAIAWRDDDSSGGGARPEMGGDSGARVWRGESAAARGQRAAAAEELCERDVVGGTGGENVAGNPPDLAGDVGRW

SEQ ID NO: 154620 - protein, 377 aa, Oryza sativa
  unsure (1)..(377): unsure at all Xaa locations
  Clone ID: PAT_MRT4530_54462C.1.pep
MGRLIVTLLVLCAAATTCPAALRGHDPRRAMRGRLLADGGGAVVPFHWSPELYNVANFTIGTPPQAASAFIDLTGELVWTQCSQCIHCFKQDLPVFVPNASSTFKPEPCGTDVCKSIPTPKCASDVCAYDGVTGLGGXTVGIVATDTFAIGTAAPASLGFGXTPWSLVAQMKLTRFSYCLAPHDTGKNSRLFLGASAKLAGGGAWTPFVKTSPNDGMSQYYPIELEEIKAGDATITMPRGRNTVLVQTAVVRVSLLVDSVYQEFKKAVMASVGAAPTATPVGAPFEVCFPKAGVSGAPDLVFTFQAGAALTVPPANYLFDVGNDTVCLSVMSIALLNITALDGLNILGSFQQENVHLLFDLDKDMLSFEPADCSSLS

SEQ ID NO: 154621 - protein, 344 aa, Oryza sativa
  Clone ID: PAT_MRT4530_54463C.1.pep
MASRQDRREARAEADARRAAEEIARARDERVMQAEVDARSAADEIARARADRGAATMGADTAHHAAGGGGILESVQEGAKSFVSAVGRTFGGARDTAAEKTSQTADATRDKLGEYKDYTADKARETNDSVARKTNETADASRDKLGEYKDYTADKTRETKDAVAQKASDASEATKNKLGEYKDALARKTRDAKDTTAQKATEFKDGVKATAQETRDATADTARKAKDATKDTTQTAADKARETAATHDDATDKGQGQGLLGALGNVTGAIKEKLTVSPAATQEHLGGGEERAVKERAAEKAASVYFEEKDRLTRERAAERVDKCVEKCVEGCPDATCAHRHGKM

SEQ ID NO: 154622 - protein, 52 aa, Oryza sativa
  Clone ID: PAT_MRT4530_54464C.1.pep
TLLLSAATVSITLLLLPAYVPFEGTCRPRVSSTSYPRFEIPIGHKLKLYCIN

SEQ ID NO: 154623 - protein, 133 aa, Oryza sativa
  unsure (1)..(133): unsure at all Xaa locations
  Clone ID: PAT_MRT4530_54465C.1.pep
EGEKLVVAGARAANTSSPSRGLSPPGLMPLGCRSVNXNWRTLSKGGWIRCMQVRPIEGMTKFATVYYLPAFTWEDLLKHIEYLLRIKWVPCLEFSKVGFVYRENHISPVYYDCRYWTIGKLPTFGCTDSNQVL

SEQ ID NO: 154624 - protein, 397 aa, Oryza sativa
  Clone ID: PAT_MRT4530_54466C.1.pep
MGRLIVTLLVLCAAATTCAAALRGHDPRRAMRGRLLADGGGAVVPFHWSPELYNVANFTIGTPPQAASAFIDLTGELVWTQCSQCIHCFKQDLPVFVPNASSTFKPEPCGTDVCKSIPTPKCASDVCAYDGVTGLGGHTVGIVATDTFAIGTAAPASLGFGCVVASDIDTMGGPSGFIGLGRTPWSLVAQMKLTRFSYCLAPHDTGKNSRLFLGASAKLAGGGAWTPFVKTSPNDGMSQYYPIELEEIKAGDATITMPRGRNTVLVQTAVVRVSLLVDSVYQEFKKAVMASVGAAPTATPVGAPFEVCFPKAGVSGAPDLVFTFQAGAALTVPPANYLFDVGNDTVCLSVMSIALLNITALDGLNILGSFQQENVHLLFDLDKDMLSFEPADCSSLS

SEQ ID NO: 154625 - protein, 191 aa, Oryza sativa
  Clone ID: PAT_MRT4530_54467C.1.pep
MASQSRLTISGAHAFFPYLSFPEYSLIHRNLPAVSSPLPPVDGEASRPPGHRLHCLRPRPLPSRIVPTEAMEGRSKRRHRLGKPPPDLQAGAVGGCADGRGNKGPAPPTSTSRGRATSHSSAPPRSCWTLTASHPPPRSAAGFALTTPFRVGVGTNRTVFSEHHPHKALPITSAPSRTDAAASMDAPVGEN

SEQ ID NO: 154626 - protein, 925 aa, Oryza sativa
  Clone ID: PAT_MRT4530_54468C.1.pep
MRRHHHLLGLLRRATASPTPASRRAGPPLPGLLQDPLRNGAAAAGPRFFSSRAGPGAGAAAKSLIEDEAELSDWISDLKTDSFHLGLSSGDEGEASTRGPAASRGGRRGRDSRGPPPRSRFGGGDFGGDRRGFERRGRMVSNNELGDDDDDEDEVGFGSARGRRDRGGRQSEFSHRGRRGNDRGGRQSEFSYGGRRANDFDDDGGGFRSTRGQRGRGGRLANVSRRGYDFDDEPGFQSPKGQRGQGGRYSDLDDDEGGFGSLRGRRGRGGRMSGVSRRGGRGSDLDDSEDDEYSRGSSPRGRRGRGGRMSGVSRKGGRGSDLDDSEDDENDSIDSRGRRRDHGTRGRNVGSLGPQRGGRGGDADFSDRRSRGGKMFDFGLSEDDSELGEVDEDDGPSGFEDDLFDDEGGEKNLVESPAKNSAPFESIKGEPIDQEGVVHTRESGGGDSYLSQTSIKLWTYGEISKDAIVLILSLNCNFSSPYHVLTSLIYIGKDVLAKAKTGTGKTVAFLLPAIEVVSKLPPIDCDKKRPPISVVVVCPTRELADQAAAEANKLLKFHPSIGVQLVIGGTRMALEQKRMHTNPCQILVATPGRLKDHMENTPGFATRLMGVKVLILDEADRLLDMGFRTDIERIVAALPKQRQTLLFSATVPDEVRQVCHIAMKRDLEFVNTVEEGSEETHSQVKQMHVVAPLDKQFSILYGLLTDHISENVDYKLNVREIHSRKPQSYRTRISKEFKESKGLILVSSDVSARGVDYPNVTLVVQMGVPTDREQYIHRLGRTGRRGNEGSGILLLAPWEEYFLRSIKDLPITEATLPLIDLDTKRKVEKALAHVEVKDKELAYQAWLGYYNSNKFIGRDKYQLVSLANEFSRSLGLNNPPAVPKLVLRKMGLNNIPVYATTLGTLYKVKDMSVLALKNIGNLSIR

SEQ ID NO: 154627 - protein, 44 aa, Oryza sativa
  Clone ID: PAT_MRT4530_54469C.1.pep
SAQRLASSDMTGFRPTMSTHREPAIRHQLGSESSPGSALVSVRL

SEQ ID NO: 154628 - protein, 158 aa, Oryza sativa
  unsure (1)..(158): unsure at all Xaa locations
  Clone ID: PAT_MRT4530_5446C.1.pep
MRRRRCATPSPLLASPSWELSRPPLGCPXPPSHRSPHAKPRAAAHCCLHPSLAAARAIVEPLRHRRRPRDVESRLVHPAHPAIRRLPPPSAVVFTHAGRIPGEASLPLFFSLPLPPSAGLRRASPPFAPVAAAFRTARRRLSPPIVVADDALAQPPSP

SEQ ID NO: 154629 - protein, 94 aa, Oryza sativa
  Clone ID: PAT_MRT4530_54470C.1.pep
MTQKAPEKEAAAMACYRRTVGEEATFKERSKDLFRQFKDAPAGDHWVCLKNKVRAAGEYATLRTRQGITMFGEPNVGDLLGRTKDDDSKKTPSA

SEQ ID NO: 154630 - protein, 136 aa, Oryza sativa
  Clone ID: PAT_MRT4530_54471C.1.pep
MADQVPRERERELTEREVSTQRQAASVVFFVATGNSDAVCPLCAHSLLSASRGHRHRFSSPPHPSIHPRHTIPSSTTAIQSRINTVTKHQRERERERGKDDHPVKQVRLWRKEPRRGQIWGGLVFFFLKPFRWSRP

SEQ ID NO: 154631 - protein, 609 aa, Oryza sativa
  Clone ID: PAT_MRT4530_54472C.1.pep
MTWDNRIKEESSLLIALLIRLRHPDIDLDASGEVALGFKTVPHFSCTKRDKGTQDYQKEARSMSSKKKRAAIDLSLEAERRRPEERGGGSDREASDGAAAAAEEDGDVKQREGPKEETGGEEEKVVEVVVDQGEDGSNEEIKYRTQQAEMIEEDKQPAAAANVDDDGGDSDGVGASAEEKHMVTEATGGEGDDGGDSRTPMAQDELSEMQEEMERMKEENRMLRRVVDKTVRDYYELQMKLAAYQQQPAAADEPKETEVFLSLGATAAASAGCGGGFPEAKSKEQAAWRRRSVGSDDSDCGKEDLGLSLSLGASSSYDDDQKAVEARPHDVDGAAAAAMIGGDGSRPAPRGQSVNPANRKTRVSVRVRCQGPTMNDGCQWRKYGQKVAKGNPCPRAYYRCTVAPGCPVRKQVQRCLEDMSILVTTYEGTHNHPLPVGATAMASTTSAAATFMLLSSTTSSSSVSDASAAPSSSYLSPYLLNSASPLLMPGATGGGGGMQHLNLFGNSPSSSSLLAPQAPGSSKYPWSPNHPPLAGAGGNKRPFWSAGGDGDKPAPAALAENVGAVMSDPNKFSAAIAAAINNFMGKDGESSSGKSSSKWGVVESLPPHE

SEQ ID NO: 154632 - protein, 151 aa, Oryza sativa
  Clone ID: PAT_MRT4530_54473C.1.pep
QRLGFAVDRAHSDGSRERRAEIDPSKTDGRDRSVHDQLTGDGDDDASDDVTTGGGGSAARTARTAHACRRTAALRHERRAPTGRGRRGKLTGDQRSGGGATDGDGDEEETAAVFGLMTATMLRRSPAVAKWRTRTAVTWRPRRRPSRATAT

SEQ ID NO: 154633 - protein, 67 aa, Oryza sativa
  Clone ID: PAT_MRT4530_54474C.1.pep
FLIPALFLTLSFLCQFICALDSSFAHLLFFDIYLSCCIFFSHDERFGFLRLSIYATLDTCQERAHTG

SEQ ID NO: 154634 - protein, 84 aa, Oryza sativa
  unsure (1)..(84): unsure at all Xaa locations
  Clone ID: PAT_MRT4530_54475C.1.pep
MEKADVVLVSKEIAKGTIHFVQEGDGCTTETGSAYGLKPGVHGLHIHALDDTTNGWVXTGPHYNGAGKEHGAPDDETRHAGEPG

SEQ ID NO: 154635 - protein, 150 aa, Oryza sativa
  Clone ID: PAT_MRT4530_54476C.1.pep
MGNFSSEEEPPPSPSPPPADEDVLPFEEYPPPSSDEEEEEEINHPTPQTSNEAADRRPGLLPASRKAIQGLREVTAAGAGEDECAVCLQDFEAGDKLRMMPCCHTFHQRCIFDWLRLSCICPLCRHTLPTQNVEDDRLGRAAHTVAGSTG

SEQ ID NO: 154636 - protein, 119 aa, Oryza sativa
  unsure (1)..(119): unsure at all Xaa locations
  Clone ID: PAT_MRT4530_54477C.1.pep
XAKEHRALYPLDLFRKSLLSGQXHRXPRGDXGGQGGXAAARRDDRRXDDDEEEANGXIIRSXXELYEAXIRFRRPHHFTVQASSSSGRRWSSTRREKREEREEDGKMSMTCGTHIFFNK

SEQ ID NO: 154637 - protein, 129 aa, Oryza sativa
  Clone ID: PAT_MRT4530_54478C.1.pep
IINQTSQHIYYLNRSTNLVQVWEHWTRGNVVELIDPSMGDHPPIEQMLKCIHIGLLCVQKKPASRPTISSVNIMLSSNTVRLPSLSRPAFCIQEVSASDSSNPYSERYPRPRHSGYSDNSTVVSSNDLS

SEQ ID NO: 154638 - protein, 27 aa, Oryza sativa
  Clone ID: PAT_MRT4530_54479C.1.pep
FLVITHNSSLTKGASYAYCICTASISS

SEQ ID NO: 154639 - protein, 107 aa, Oryza sativa
  Clone ID: PAT_MRT4530_5447C.1.pep
KGFNLSHWYPIFHFPVFPHSPCKKGQKVYLQVRALQNPPKEGKGLTRGLPRESMSLALMGFFPIKVIPKPLTRTQRDDLRVNFLKFCKELGAHRNWIHTRPVGGTPP

SEQ ID NO: 154640 - protein, 231 aa, Oryza sativa
  Clone ID: PAT_MRT4530_54480C.1.pep
MANLVKLIGAFGSPFVHRAEVALRLKGVAYEFIHEDLNNKSDLLLAKNPIHKKVPVLLHGDRAVCESLVIVEYIDEAFNGPPLLPADPYHRAMARFWAHFIDHKSTRPSWLALWLEGEEQKGFLKETKENLALLEAQLGGKRFFAGDSIGYLDIAAGGLAHWVGVLEEVTGVSLVAGDDGDDEYPALRRWTNEYTANDAVKLCLPNRERIAAFFTPKDKYKIMARAMLRQQ

SEQ ID NO: 154641 - protein, 143 aa, Oryza sativa
  unsure (1)..(143): unsure at all Xaa locations
  Clone ID: PAT_MRT4530_54481C.1.pep
PLVQDSAARAEFGTFELRRAPXDXDXVAKAFVXHYYXTXDTNRPALVSLXQDXSMLTFXGXQFLXAAAIAXKLXSLPFXQCHXXIXXVHCXPSGPXXXMLXFLSGSLRXGXQEHPLXFSXIFXLLPAGSNFYVXNDXFXLNYX

SEQ ID NO: 154642 - protein, 627 aa, Oryza sativa
  Clone ID: PAT_MRT4530_54482C.1.pep
MMKHLVESEKAAENAGPTYRNVLAKDAGLLRPPPGVESCWDVFRNSVEKYPDSPMLGRRRVVDDGKAGEYVWMTYKEVYDVVMKLAASISKSGISKGESCGIYGANCPEWIISMEACNALGVSCVPLYDSLGAGAVEFIVCHAEIQIAFVEERKIAELLKTCHATSKYLKTIISFGGVTNDQKEEAKNHGMSIFSWEEFLIMGGDHHFDLPEKKKSDICTIMYTSGTTGDPKGVMISNESLLVNITGADCVTRSIGEPDVKLLVDDIAALKPTVFCAVPRVLDRIYSGLTGKISSGGILKKALFNIAYKLKLDSMRKGIKHEKAAPFFDKLVFSKVKERLGGKLRFIVSGGAPLSVAVEEFLRVVTCASVVQGYGLTETGAASFVAIPNDFSMVGTVGPPVEHLDARLESVPEMGYDALSSIPRGEVCVKGSVLFSGYYKREDLTQEVMIDGWFHTDDDYMPNTMYNTGDVGEWQPNGSLKIIDRKKNIFKLSQGEYVAVENLENVYGVLQEIDSIWIYGNSFESFLVAVINPNQQVLEHWAEQNGISGSLSELCENSRAKEYILSELTKIAKEKKLKGYEFIRAVHLDPLPFDMERDLITPTYKKKRPQLLKHYQGTIDALYKMAK

SEQ ID NO: 154643 - protein, 242 aa, Oryza sativa
  Clone ID: PAT_MRT4530_54483C.1.pep
MANLVKLIGAFGSPFVHRAEVALRLKGVAYEFIHEDLNNKSDLLLAKNPIHKKVPVLLHGDRAVCESLVIVEYIDEAFNGPPLLPADPYHRAMARFWAHFIDHKAIFSCHSFKSYSTRPSWLALWLEGEEQKGFLKETKENLALLEAQLGGKRFFAGDSIGYLDIAAGGLAHWVGVLEEVTGVSLVAGDDGDDEYPALRRWTNEYTANDAVKLCLPNRERIAAFFTPKDKYKIMARAMLRQQ

SEQ ID NO: 154644 - protein, 191 aa, Oryza sativa
  Clone ID: PAT_MRT4530_54484C.1.pep
MEYYFGQIKLVPATDLGGGRVLCDRQRGATGQVWLATSLLADGLAVAGQLAIVLGAGLTAFLAAGMVADIEILQSALNGVAMGMSQEQRVRLSVGLLVASSSRSSSITTTRAPVRPTSPSCLRKVIRSTKPRGLDEETVVAPFVERLVSELASRATPASSSSAPPARPLATAPVPVATPPIAASTGGETIF

SEQ ID NO: 154645 - protein, 218 aa, Oryza sativa
  unsure (1)..(218): unsure at all Xaa locations
  Clone ID: PAT_MRT4530_54485C.1.pep
MSLNWSQQPGAAVRIASNEHEDWCVNANQEIYYRRNGGXWERKEGAAVYVDVARDGTCWVINSADQIYRWNGHGWDHMPGAARTVGVGSRNDVWVTNANHEIYHCNGDGNWARIDGAATQISXGDDGTVMCVNAQQQIYYRQGCAWRVAAARWRPPSQVDCFDHNTYLAVNAADEIYLRQHGAWVRQPGACKHASIGGNDYRRVCCTNGAHGIYTHGH

SEQ ID NO: 154646 - protein, 748 aa, Oryza sativa
  Clone ID: PAT_MRT4530_54486C.1.pep
MSCSKVLLSKKGVLGTVWVAAVSGVAALSRDQVVRTNVVACVGGRQWNSVGGGVRKRGLSGALGYRNEANHVMRIWIYSKKVEYLCHECNELLGSYGSAHCNELSIPTGGATNRVSKQAKKPVRARRLVVRQEGAYKVKIPMQAVRTTRAETRATSQITEVRDTHATPDLPTFTIPKRFELDSFDLGIPEDRDDDDVDHHQLPHQGTMLEDENHHTSCLFESYKMMTCSYADLDSACIMPVRVTIPTEMMSVISEVNSLLCLSSIGGEPENHNAESACFTPVKDILPPEMVDMMAEVNDPSDKSTRGKKPQRELNRDENGNSACHIPLSGSKEVQIPENIVENVTFPSRDANCPTIEESENGSLHGTNTNPSCDGFEEPGSLEQPTLRCKTKLINELSPSTPEPMTEGGTGLPCSPKFMVTTPAKKEKHRVTRKRRRGLYNKDYIPTDRGDKRKIFKAQGKVLTLRNTIEDASDLVQQRRKAPHTCLYTWKEGKIRSLPVTFMDPLILYPTSVYVRHTITADTPENSCRESVKSRRRLSLELSESNNICDDAKNVEGESIPDEPRKRKLDELTDSVQATVGCYTESAQYHNDEDYRFNDDTVKEKDFSIGGHESHSTELQERLNALKSKNPQLDEALDADIDSMEEDTHMDEQHARDEGLLRSTRTRTVARYFHQLLVDQKCQQRNNSVCLGQALEGTKRKTSARFFYETLILKSGSLIEVNQEQTYGDIIVSATPRLEAALRSSEKQ

SEQ ID NO: 154647 - protein, 96 aa, Oryza sativa
  unsure (1)..(96): unsure at all Xaa locations
  Clone ID: PAT_MRT4530_54487C.1.pep
SSEKSPPPPAPVILSSPPXKSPPPPAPVILPPSSVKFPPPPVPVFLPPPPVKXPPPPRSGHPCPPPPCEVLHLSSSPRFFCLPSPCVGLPLHPAPG

SEQ ID NO: 154648 - protein, 1112 aa, Oryza sativa
  Clone ID: PAT_MRT4530_54488C.1.pep
MRLVVWHWFFFFFFTSVSSSWSLTSDGLALLSLSRDLILPHSISSTWKASDTTPCNWDGVSCNKKNSVVSLDLSSSGVSGSLGPQIGLMKSLQVLSLSNNSISGSIPQELGNCSMLDQLDLSSNSFSGEIPASLGDIKKLSSLSLYSNSLTGEIPEGLFKNQFLEQVYLHYNKLSGSIPLTVGEMTSLRYLWLHGNKLSGVLPDSIGNCTKLEELYLLDNQLSGSLPKTLSYIKGLKIFDITANSFTGEITFSFEDCKLEVFILSFNQISNEIPSWLGNCSSLTQLAFVNNNISGQIPSSLGLLRNLSQLLLSENSLSGPIPPEIGNCQLLVWLELDANQLNGTVPKELANLRKLEKLFLFENRLIGEFPEDIWSIKSLQSVLIYENSFTGRLPPVLAELKFLKNITLFNNFFTGVIPPDLGVNSRLTQIDFTNNSFVGGIPPNICSGKRLRILDLGLNLLNGSIPSNVMDCPSLERFILQNNNLSGPIPQFRNCANLSYIDLSHNSLSGNIPASLGRCVNITMIKWSENKLVGPIPSEIRDLVNLRVLNLSQNSLQGVLPVQISSCSKLYLLDLSFNSLNGSALTTVSNLKFLSQLRLQENKFSGGIPDSLSQLDMLIELQLGGNVLGGSIPSSLGRLVKLGIALNICSNGLVGGIPPLLSNLVELQSLDLSLNGLTGDLDMLGNLQLLHVLNVSYNRFSGPVPENLLNFLVSSPSSFNGNPDLCISCHTNGSYCKGSNVLKPCGETKKLHKHVKIAVIVIGSLFVGAVSILILSCILLKFYHPKTKNLESVSTLFEGSSSKLNEVIEATENFDDKYIIGTGAHGTVYKATLRSGEVYAVKKLAISAQKGSYKSMIRELKTLGKIKHRNLIKLKEFWLRSEYGFMLYVYMEQGSLQDVLHGIQPPPSLDWSVRYTIALGTAHGLAYLHDDCQPAIIHRDIKPSNILLNGDMVPHIADFGIAKLMDQSSSAPQTTGVIGTFGYMAPELAFSTRSSIESDVYSYGVILLELLTKKQVVDPSFPDNMDIVGWVTATLNGTDQIELVCDSTLMEEVYGTVEIEEVSKVLSLALRCAAKEASRRPPMADVVKELTDVRKSAGKLSKPEKTASRSSS

SEQ ID NO: 154649 - protein, 104 aa, Oryza sativa
  Clone ID: PAT_MRT4530_54489C.1.pep
MASTSPAAGGRRRLRGRLAPLLASSGNNTTPPPPRSLSDAITAPNAINAAFRSTAQLLTPPRCLFDSHSDGNFKDGMRHELATPPPPLPPRPSGLLPNRQPACP

SEQ ID NO: 154650 - protein, 232 aa, Oryza sativa
  Clone ID: PAT_MRT4530_5448C.1.pep
PRICSGEGYSPKIRSGRLPPPCAFFQAHRRRLSSPRQPLFEPHAVGLSSPVGPPPPTLHVLPGSTPYCPAEREADADTDELRTRAGGLGRRTRRRARRLRRCNRLRARAKRLRRCNRAHAARGHATRGCAGLVRLANAHLRADAAALSRRPASPSAAALVAEAAAPASASPAPFSPKFQPSPSPPPPASTSSNQIGHPCLPPLQEVLKPAPIGFFPPPRVDSVDGVSGARRK

SEQ ID NO: 154651 - protein, 153 aa, Oryza sativa
  Clone ID: PAT_MRT4530_54490C.1.pep
MAIDNIAIGIAKAIVYTRTKTKTKFEIFKINSVSRTRTEEVSAIIMKTVGEAVHDLQLQGEIKSMTYDIEIAHLTIAIHLHRLGEVRDDLAVTDPHSYPAADAGYLDPLFEKSTGPQNSIPYHWTNTEEALILRNFYASTLLSYTPPAQTTMH

SEQ ID NO: 154652 - protein, 683 aa, Oryza sativa
  unsure (1)..(683): unsure at all Xaa locations
  Clone ID: PAT_MRT4530_54491C.1.pep
MVINMEWGNFKSERFSRSDGDNAGGFESVNPGEWFRRDLSVEVNPALAAAARAGGDVVPAYVWAPEEDGPYYPGRVSRWWLSQSLKHLDASLRRLGAGKLVTRRSADAVVALLQLVRDTGATRLFFNHLYDPISLVRDHRLKEMMAAEGIIVQSFNADLLCHXWMVVSMSINKKFRTCLEATLADLLGEEAASSVVVKLANDGSGIGAALLAASHSQYASLVFLPFSPFLSNGSSFPSCDSHLLLLFCSHINECLCSGIYHMNKHLQLQGSENGGLNDAVLFLQIIXPFPVSLYCDAMSQTNHSGFACSLLSFRFQNKEGDIISLKEXKNGYPLVDAGMRELWATGWLHDRIRVVVSSFFVKVLQLPWRWGMKYFWDTLLDADLESDALGWQYISGSLPDGRELDRIDNPQLEGYKFDPHGEYVRRWLPELARLPTEWIHHLWDAPASVLQAAGVELGSNYPLPIVGLDAANARLQEALSEMWQLEAASRAAMDNGMEEGLGDSSEVPPIEFPRELQMEVDREPARVTANVLTTARRREDQMVPTMTSSLNRAETEISADFMNSVDSRAEVPTRVNFEPRTEREENFRTTAGNVARTNGIHEHNNFQQPQHRMRNVLAPSVSEASSGWTGREGGVVPVWSPPAASDHSETFASDEADISSRSYLDRHPQSHRLMNWSQLSQSL

SEQ ID NO: 154653 - protein, 693 aa, Oryza sativa
  Clone ID: PAT_MRT4530_54492C.1.pep
MGGGGGGDAGGRTVVWFRRDLRVEDNPALAAAARAGGEVVPAYVWAPEEDGPYYPGRVSRWWLSQSLKHLDASLRRLGAGKLVTRRSADAVVALLQLVRDTGATRLFFNHLYDPISLVRDHRLKEMMAAEGIIVQSFNADLLYEPWEVVDDEGQSFTMFAPFWNRCLSMPYDPAAPLLPPKRINSGDLSMCPSDDLIFEDDSERGSNALLARAWSPGWQNADKALTAFLNGPLIHYSVNRKKADSATTAFLSPYLHFGELSVRKVFHLVRMKQLVWSNEGNRAAEESCTLFLRSIGLREYSRYLSFNHPCSHEKPLLAHLRFFPWVINECYFKIWRQGRTGYPLVDAGMRELWATGWLHDRIRVVVSSFFVKVLQLPWRWGMKYFWDTLLDADLESDALGWQYISGSLPDGRELDRIDNPQLEGYKFDPHGEYVRRWLPELARLPTEWIHHPWDAPASVLQAAGVELGSNYPLPIVGLDAANARLQEALSEMWQLEAASRAAMDNGMEEGLGDSSEVPPIEFPRELQMEVDREPARVTANVLTTARRREDQMVPTMTSSLNRAETEISADFMNSVDSRAEVPTRVNFEPRTEREENFRTTAGNVARTNGIHEHNNFQQPQHRMRNVLAPSVSEASSGWTGREGGVVPVWSPPAASDHSETFASDEADISSRSYLDRHPQSHRLMNWSQLSQSL

SEQ ID NO: 154654 - protein, 180 aa, Oryza sativa
  Clone ID: PAT_MRT4530_54493C.1.pep
DYTLEAQNKEFERRAVATETALKRVRWNYSAAVERLQKDLELLSFQVLSMYESNETLAKQSIVEDFESSPEEQSAVADLGANKERSLYMSDHESQAFSAENGRPDNLTYKMDGQKSLLRALKMEEIRNRSEFQVRSNTNLQVDYSKLDKLEQTPSTTESEVLETYMANIEWQVFSDVLRE

SEQ ID NO: 154655 - protein, 241 aa, Oryza sativa
  unsure (1)..(241): unsure at all Xaa locations
  Clone ID: PAT_MRT4530_54494C.1.pep
QEDIELMASLGFRAYRFSISWPRIFPDGLGKNVNEQGVAFYNDLINFMIEKGIEPYATLCSWDLPHNLQQTVGGWLSDKIVXNGYGIGHFAPGGCEGETARCYLAAHYQILAHAAAVDVYRRKFKAVQGGEVGLVVDCEWAEPFSEKTEDQVAAERKLDFQLGWYLDPIYFGDYPESMRQRLGDDLPTFSEKDKEFIRNKIDFAGINHYTSRFIAHHQDPEDIYFYRVQQVERIEXWHTGE

SEQ ID NO: 154656 - protein, 69 aa, Oryza sativa
  unsure (1)..(69): unsure at all Xaa locations
  Clone ID: PAT_MRT4530_54495C.1.pep
VPTLXXAGNXSGNWXPGKAXPXLGALXVVVGXVIXGGGHRRREXYVVELEWGSGCGCVLCPASHSETRE

SEQ ID NO: 154657 - protein, 510 aa, Oryza sativa
  unsure (1)..(510): unsure at all Xaa locations
  Clone ID: PAT_MRT4530_54496C.1.pep
RGARLTCRATRRARCGDRLLLAAAAGGNGEHGARRGGDPRRLPRRLRLRRRHLRLPDXGARREGGKGDNIWDVFTENKERILDGSSGEVAVDHYHRYKEDIELMASLGFRAYRFSISWPRIFPDGLGKNVNEQGVAFYNDLINFMIEKGIEPYATLYHWDLPHNLQQTVGGWLSDKIVEYFALYAEACFANFGDRVKHWITINEPLQTAVNGYGIGHFAPGGCEGETARCYLAAHYQILAHAAAVDVYRRKFKAVQGGEVGLVVDCEWAEPFSEKTEDQVAAERRLDFQLGWYLDPIYFGDYPESMRQRLGDDLPTFSEKDKEFIRNKIDFVGINHYTSRFIAHHQDPEDIYFYRVQQVERIEKWNTGEKIGERAASEWLFIVPWGLRKLLNYAAKRYGNPVIYVTENGMDEEDDQSATLDQVLNDTTRVGYFKGYLASVAQAIKDGADVRGYFAWSFLDNFEWAMGYTKRFGIVYVDYKNGLSRHPKASARWFSRFLKGDDAENKADMN

SEQ ID NO: 154658 - protein, 76 aa, Oryza sativa
  Clone ID: PAT_MRT4530_54497C.1.pep
PRAELKQGRGGESSSTCFLHCLLLNSTTSISAACSLCYHVLFFSVAILPSNKQLPEANDHFDLQKKRTCIRPLLNC

SEQ ID NO: 154659 - protein, 143 aa, Oryza sativa
  Clone ID: PAT_MRT4530_54498C.1.pep
MDPTCSLWSGGTHARGIGAGAVEAPTHPLPHPHTPRARGGHRRGGRKNRTDVYSFGMVLLELVHGRKNRSEHVSDGVGAATGDDSNSSNRTMGSSSRGARSDYSVMASISARDDDEAEDGEHLSEPHHVEQRRRPDLLPPPPH

SEQ ID NO: 154660 - protein, 65 aa, Oryza sativa
  Clone ID: PAT_MRT4530_54499C.1.pep
NKKNSTPRGGPDTTGGELTYAIFDEIGHKGAFQSNTLGQMISWGKIDQIQHWKSTANIGDHSGRE

SEQ ID NO: 154661 - protein, 142 aa, Oryza sativa
  Clone ID: PAT_MRT4530_5449C.1.pep
LVMISNLPVLQVLVVVDCSMLQDLRGVAGLRHVRLVDRVTKELPDWLTGHEAPLLQTFTIVGTTELLRKLVPNSKGWSAIRNMDRVYANLPDGAPFLAYNKGRPDFQMIKTAVGPQLEDRPSAYIILRKLVRMASQTGLLDS

SEQ ID NO: 154662 - protein, 76 aa, Oryza sativa
  Clone ID: PAT_MRT4530_544C.1.pep
LTRGRTRGPPSRAKLPFSSSAAAAPRLASIETATTTTTTDRGEGMIMPHECESETHAMPRNCNEVQYITDQLFVYI

SEQ ID NO: 154663 - protein, 196 aa, Oryza sativa
  unsure (1)..(196): unsure at all Xaa locations
  Clone ID: PAT_MRT4530_54500C.1.pep
FRLLGTDGATKWESFGDXSDTILPTQVLPLGTALHSRLLATDYSNGRFQLNVQDDGNLVLYLVAVPSAYYHDPYWASNTVGNGSQLVFNETGRIYFTLTNGSQINITSAGVDSMGDFFHRATLDTDGVFRQYIYPKSKQARSLWQEQWRAVDALPENICQTIQTKVGSGACGFNSYCTFDGTKNTTNCLCPQRYKP

SEQ ID NO: 154664 - protein, 120 aa, Oryza sativa
  Clone ID: PAT_MRT4530_54501C.1.pep
MAAPRSEDGGWRERRGRMERKKRKIEHVATPSNRKYPLFLHLAPRSGRRGGGREGGRRHGGRWGGGLTFVRHASGEESASRHRPPLVAVRLSLPGAGSAPPRLGAVRARCAEDRGGREIV

SEQ ID NO: 154665 - protein, 88 aa, Oryza sativa
  Clone ID: PAT_MRT4530_54502C.1.pep
SGGCQISNSNFAARQRLRWTDDLHDRFVDAVTQLGGPDRATPKGILRIMGVQGLTIYHVKSHLQKYRLAKYIPDPTADGAKSDKERSR

SEQ ID NO: 154666 - protein, 85 aa, Oryza sativa
  unsure (1)..(85): unsure at all Xaa locations
  Clone ID: PAT_MRT4530_54503C.1.pep
EMPAMMCKAKVQHRXITNMGDXFAKVQREYHLPVGDFPDDEHLKKVLGGYSTGKLYKMKPDMVKPLDDKLAFIIPELVKTFGTPV

SEQ ID NO: 154667 - protein, 116 aa, Oryza sativa
  unsure (1)..(116): unsure at all Xaa locations
  Clone ID: PAT_MRT4530_54504C.1.pep
RGRGDGGRVERASSDGDRKPASAGSPPPSAAAAAXAGHKIQIKSANMKEEMRQEAFDIDRVAFEKHTMEKDIVEYIKEFDKNHGPTWHCIVGHNFGTPLSCWKLLWSVSWQKICKK

SEQ ID NO: 154668 - protein, 260 aa, Oryza sativa
  unsure (1)..(260): unsure at all Xaa locations
  Clone ID: PAT_MRT4530_54505C.1.pep
MADGAVAVVVVTGVGVGGRSGGGGDRGRRRRPERWRPHDGSGLGGGLGGDGGQSSGGGVSGRGRCRRVERWRPHDGSGLDGGWGGDGGQSHIRRQLSAGGAVCLPIAAPSAAAIPLIDLAKADVDRGRVVAEVRVATETVGFFQVVNHDVAKELTDAMLAAVRYFHEEPLEAKAPYYTRDVGSKVRFSSNYDLFRPPAANWRDTLFMEMAPEGPSPEEIPPPCRGVAEEYXRRLGEWLFELLSEALGLPAGAAHQLSHLG

SEQ ID NO: 154669 - protein, 319 aa, Oryza sativa
  Clone ID: PAT_MRT4530_54506C.1.pep
MYEPKPFSSIVLAHNDPVSHNQQIERINNNVVSNSGGNSSNSNFAARQRLRWTDDLHDRFVDAVTQLGGPDRATPKGILRIMGVQGLTIYHVKSHLQKYRLAKYIPDPTADGAKSDKKDLGDLLADIESSSGMEIGEALKLQMEVQRQLQLRIEAQGRYLQKIIEEQQRLSGVLGESGKLGALGPAPGEPYQDSNKTDPSTPVPTSESPIRDKAGSGLFKTISSHDDCREPLTPDSSCRAGSPLESPPRASKRIRVSSDIDHRGNNEFPPPLKVPEPSSGSDFRQESSVLLSSSAVHFDSLESLDADENVFTNGSGSDD

SEQ ID NO: 154670 - protein, 156 aa, Oryza sativa
  Clone ID: PAT_MRT4530_54507C.1.pep
MCCKAIKLAPVDVSAQVTAAVAAENSRIMGILNCDEAKGRESQARALAETPGMTVESAQRILAAAPQSAQMRTDTALDRLMETAPEAIMAITEVFTHNQPLGNSDPAHTAYGPGELTASTPAMTPLMLDATSGKLTVWDGAHAGAAMSGNLSCQLH

SEQ ID NO: 154671 - protein, 96 aa, Oryza sativa
  Clone ID: PAT_MRT4530_54508C.1.pep
MEQRWCDNSPSSSRVSLSPSLSPFCSDPSISSQPSYHKATGAVAANHLQGALRGGADLDSEQLAPGWVATTQAFVNNSSSYEDMGPCTIPDYVFNL

SEQ ID NO: 154672 - protein, 90 aa, Oryza sativa
  Clone ID: PAT_MRT4530_54509C.1.pep
LANNVLDYYTRLNQPKTFTNCRSIPSKCNADFAVTFGKYAMFHALVTLDSAFIVFRLKPTVLHARRTHADDQLANGFVAIICGRSRTSKC

SEQ ID NO: 154673 - protein, 73 aa, Oryza sativa
  Clone ID: PAT_MRT4530_5450C.1.pep
MGLQLHLRAEPKRGRPLGQAQDYSSWAYSSTYGLSQREIGQAKDCSSWAYSSTCGLSQREIGRANRDSGLHWD

SEQ ID NO: 154674 - protein, 113 aa, Oryza sativa
  unsure (1)..(113): unsure at all Xaa locations
  Clone ID: PAT_MRT4530_54510C.1.pep
MTMITPSSSSQFRMPMMRLFSAATAAVTCALTSTGAATEAXXXXXXXXXXXXXXXNSPYSESYYNSLAVVXQRRDWENPXVTQLNRLAAHPPFASWRNSEEARTDRPFHKCAA

SEQ ID NO: 154675 - protein, 89 aa, Oryza sativa
  unsure (1)..(89): unsure at all Xaa locations
  Clone ID: PAT_MRT4530_54511C.1.pep
MSAEGCVFCTVRSANSRHIPTGEGPAIGVDLXTNYSRDRAREHDGVDNIAFDQRNHTTPWYAACTDFDQVIGDSLENQVLLDRINTGFN

SEQ ID NO: 154676 - protein, 158 aa, Oryza sativa
  unsure (1)..(158): unsure at all Xaa locations
  Clone ID: PAT_MRT4530_54512C.1.pep
WGERERESRGMIPPTLLHAGAAGXGGICGGGGARARARRRERREVGDDGWAPPVSEGGGRARPSAARARGKAGWAAGKRGEREGAGPSRPKRGRGRERELFRDVTNPPPLQESHGIFSSPDLSLVEPLADFDWVAALEDGASVPELRIVYIFGVNLIE

SEQ ID NO: 154677 - protein, 91 aa, Oryza sativa
  Clone ID: PAT_MRT4530_54513C.1.pep
KNKTQALPWFPRHKTGPNRDKGVPATKGELPCLKLKKITPTLRIWGGNKNGLGPSFTFLFSKLQNLGEGERIPWLPWREKGARPQKRGPPA

SEQ ID NO: 154678 - protein, 298 aa, Oryza sativa
  unsure (1)..(298): unsure at all Xaa locations
  Clone ID: PAT_MRT4530_54514C.1.pep
ARPKVATPAQPTGSRAPAPRWSRRRPPARRNGAPKKGRKGETNRRSTAHPGVAANNGTATGTEESRRPLPVNGDGGGSAVGRPNRRVDQVGQVSAKPKEAAPKPEKVRGDDGGQPEVGGYRRKKKPPPRVVFGEKKKTASAKPLKEATGGVYIGLELKKAARIRGKRARKIRPPLMAPARLGERFPNESEGERERKMGGKREGITGNISPHFIARXTAGGGGIRGGGGARARARRRERREEGDDGWAPPVSEGGGRARPSAARARGXGRMGRGERRGRGRELGRTGPRGRGGGKGNFF

SEQ ID NO: 154679 - protein, 142 aa, Oryza sativa
  unsure (1)..(142): unsure at all Xaa locations
  Clone ID: PAT_MRT4530_54515C.1.pep
NYFLRKTTFYPRIKHGKNLYKKWLVFGRQKRPAAGRPLPGWEHLLDNLFPKGGNLGFKRLDGLLLLRLQGWQTPPQTRPRTRGGPSVHFPPLLVVPSSTFEPAEIXXLPLSQGGAVLQLPXPRXXFNPXXGXFGSXSXTXHX

SEQ ID NO: 154680 - protein, 71 aa, Oryza sativa
  Clone ID: PAT_MRT4530_54516C.1.pep
MADRQCDGNATSDREGRLQQCSITGAGPEPPGDEHRNFLVVMSSPELPEFLSQELPDNRDKRNMRRKTGPS

SEQ ID NO: 154681 - protein, 53 aa, Oryza sativa
  Clone ID: PAT_MRT4530_54517C.1.pep
GSSLESILIPRCVDLLIVIDSEFLVIPWVAGRSAFLLWFPKQKLWSPDTSKHK

SEQ ID NO: 154682 - protein, 153 aa, Oryza sativa
  Clone ID: PAT_MRT4530_54518C.1.pep
EASTYVLHGTYDNVFPSRSSLVVSHLVQPSVEGTIRASVGVAMPYDPCVDSQPGDRPPLSRGALPSYFFDMPAERVRPGAELREVCPYPAHASGPSAIISKSGASSGCSNSCQDVRCSWHGASFTRESVDIEVSGPFDSPLLCGRPVSSKSQT

SEQ ID NO: 154683 - protein, 116 aa, Oryza sativa
  unsure (1)..(116): unsure at all Xaa locations
  Clone ID: PAT_MRT4530_54519C.1.pep
MPGRSLIKLMRRVLVVYLLTTIKRVFGILLPKFAKQFNXAKLVPLCPGERIKDGKLFPVSLKQGRAVIVPEYGGPQVKLCXKEYLLFRELDRLGVLEEYLGRLYSRSKWGLFSMSS

SEQ ID NO: 154684 - protein, 133 aa, Oryza sativa
  unsure (1)..(133): unsure at all Xaa locations
  Clone ID: PAT_MRT4530_5451C.1.pep
PLKSSICLSGYSDVDFAGCRIDIKNTSGTYYFLGTSLVAWSSRKXSSVAQSTTKSEYIAAASCCXIDFFWLISTLKYYGLTFEKVPLFYNNTSXFNIAKNSVQHSRTKHKDQLYHILSSRIRKGQAQSARTRL

SEQ ID NO: 154685 - protein, 55 aa, Oryza sativa
  Clone ID: PAT_MRT4530_54520C.1.pep
MGRKRREGEGPSDKWKGKKFEALDKLPRTALDFEHVFGVCVGLVYGGSWLLWAFV

SEQ ID NO: 154686 - protein, 50 aa, Oryza sativa
  unsure (1)..(50): unsure at all Xaa locations
  Clone ID: PAT_MRT4530_54521C.1.pep
LQYRPXSRSTPRPSXFLASHXTHIILLCKKCVGNYNNIKHYSFGLLPIII

SEQ ID NO: 154687 - protein, 619 aa, Oryza sativa
  Clone ID: PAT_MRT4530_54522C.1.pep
MAEDGRGEEKAVDVVAVKKPKQGGFRTMPFILGTGIRRYKLLDRKNAISQKGNANDFCDRLANVGFSSNLITYLTLQLHLPLVDASNTLTNFHGTANLTPLVGGLIADSFAGRFWTITFGSVIYQLGMVFLTLSAALPSLRPPPCAKHAADCQRASSSQIAVLYASLLFTSIGTGGTRPCIMAFGADQLELDAGARGRRGRKGPKWSFFNLYFFGIELAKLTAVTVIVYIQENVGWGWGLGVPTIAMFAAVVAFVSGYSMYVKMPPAGSPLVRLAQVAAAAFKKRKAVMPEPSRLYEDKVLDAGISTTGRLLHTDQLKFFDKAAIITDGDVLPSGEPKLWRLSTVHRVEELKSILRMLPIWAAGILLVTSASHNSSFAIQQARTMDRDITPHFKIPPASMLIFTNLAMLLTLAFYDRVLVRVLRRFTGHPNGITHLQRAGVGMTIAMLANAVAAVVESRRKSVAAASGMLDAPKGSSLPISVFWLVPQYAIHGVADAFMDVGRMEFLYDQAPESMRSTAAALYWLTMSIGSYLGTLLVTIIHAKTQRSGQWLQDNLNRAKLDSYYWLVFGLQGLNLIYYFVCVRYYTFKPLETVKPEEELELYRGNGNEGDGKKGGTLK

SEQ ID NO: 154688 - protein, 101 aa, Oryza sativa
  unsure (1)..(101): unsure at all Xaa locations
  Clone ID: PAT_MRT4530_54523C.1.pep
AAQPQXXKXQPLGEAXTXXXDNXTXXEXRGXPRHXAHKXARQGNPDPXGTGAXERAXXEQGXQTEAQSXDAPSAXQAHRPAGPPPGXPGPGAAGPGRPGPR

SEQ ID NO: 154689 - protein, 62 aa, Oryza sativa
  Clone ID: PAT_MRT4530_54524C.1.pep
LTRGRTRGRTRVGSTVRLTPLKPEPLPLPGAAAEDCLIPSPSCLADARHLAVESKAISRLRF

SEQ ID NO: 154690 - protein, 210 aa, Oryza sativa
  Clone ID: PAT_MRT4530_54525C.1.pep
MWRCQHPKLGVCLLTIATGANGHADWAKKLRCLLASRLGGVGLSLLELDGGICRPGQAVVQCWVGFRQEQASAVWSSVLVARVYSSGWRSSKDFIITLPHLTLIHLENPFHYLLAFLTPPHPHDEDPAAAGLIANLSTGRVAWNNVGPGRAKLTDGPQLGLRRYTRPSSRSPGPIRESASYQVAACLCVIVVFALGRAESVSFRRLLVWG

SEQ ID NO: 154691 - protein, 908 aa, Oryza sativa
  Clone ID: PAT_MRT4530_54526C.1.pep
MATAAADELALRRLDDATRDARRLQLETLRAILAENAGAAYLRRYIPSDGGAHHLLRSTDLAAAADEFRLLVPVTSYDDYAESIRRVADGDAAPDELSPRPLLCFFLSSGTSSLRPKLIPYLDSPGARAATAAVMQANSALVRRLFPPRPAVSKALWFLYAGEVRKTKGGYEAMAATAWGIRSSGIRGASPVMSACVSPAEVILGADHQQQMYCHLLCGLRRWDAVDCIRAPYAAALARALRLLQSKWRQLCDDLECGTVCADVVTDAAMRGAVQDGVLAGPCPELAGRVRRICERDDWRGVLRQLWPDARYISCVTTGTMEQYFPAIKHFAGEALPVLGTDYLASECAIGINLERTSPPEETTYVLLPRAAYFEFIPFDMDAAGRGAAAAEPVDIAGVEAGKTYELVATTFRGLYRYKVGDVVKIAGFHHSSPRLQFVTRAPPPQEHGEVLTERDVMAAMDTFQLMLKDGGEVIEFAAFIIDGDGGQRRRRCATIAVEVSNGSKLLDHERSAAFLRRCTAPLEGCLGGAYRLSRATGDVAPLEVAVVRPGTFDRLAEAAIRGGAPANQYKPPKIVRHRHLVDVLQSSVKRNSDLCSSEAEEMEAASSSGALPLPLPLLVHDLGTRSDDSQTQFSICNQALSTAAIELLRDFRCFETPQGWVLTLNPASLQTFLWRPQDSKKIDLPTAKQNFPRSGKCLLSGNPISSSSDCAVLVLDLDTPAMLVCKIGGSEWDSFSYELSMVSKNNKTLEVHMAKLQGIDAVAGKVYYTFSGDALGVIEFSLESCGELFLVVVFFLGHNLHRIAEVAVYKMDFSGPSEWCKVDGIGDSVFLLGGDFIGASNFGASCSASDHGLSGNCINFVNNIAAEENFVHVIDLEKGTEEVLRPFRHKGYPLPLRPPFWLLTTHD

SEQ ID NO: 154692 - protein, 87 aa, Oryza sativa
  Clone ID: PAT_MRT4530_54527C.1.pep
EVVDPAMEAKPTKRQLRRALVAALKCVDPKADKRPTMGSVVRMLEADDVALSSRQDRRSPMGRCGDGDGSGRREPSGTSARYDTAFV

SEQ ID NO: 154693 - protein, 83 aa, Oryza sativa
  Clone ID: PAT_MRT4530_54528C.1.pep
MATCEYNALAICCRTDDKSRARTMHNDSTAINHFDREPKSNRKGTDTLDGTEETAIERHTPATRAMSPTRDVATTTKHMLRPQ

SEQ ID NO: 154694 - protein, 116 aa, Oryza sativa
  unsure (1)..(116): unsure at all Xaa locations
  Clone ID: PAT_MRT4530_54529C.1.pep
RMMPRQPPTAQYSAQXWYVVNQTVDTYSRRHTDKVRGVVASSRINGVNVGISQALSALQPXYAHATVLGSGGSYGSVSHQVSAAWSPQVVPRPNPTPNIAVELPALTLPRLMGGPG

SEQ ID NO: 154695 - protein, 63 aa, Oryza sativa
  Clone ID: PAT_MRT4530_5452C.1.pep
PPPPMKEAAVLIRPLMRSVVVSGGARQVCIEVPPRRCGKRIDAAGGAVGESRGSPRDLGERRG

SEQ ID NO: 154696 - protein, 63 aa, Oryza sativa
  Clone ID: PAT_MRT4530_54530C.1.pep
SIRALHLMLLALAATVCVYSHSPYQPRQSLVPRVRSCFMSIPSNRGYSSTSIVCASDLDRATV

SEQ ID NO: 154697 - protein, 59 aa, Oryza sativa
  Clone ID: PAT_MRT4530_54531C.1.pep
MPTLLQVGCSSTVAFCTSNVTAFAAAGNSPSKLLRLWLRTVCEALFVPAQPQRGQPNRP

SEQ ID NO: 154698 - protein, 73 aa, Oryza sativa
  Clone ID: PAT_MRT4530_54532C.1.pep
MYVVGEDSIWHTMEVLRVYGMWGQIWKDSKFGMIDYVKFVFCTRMFPMGIRTSSMSLVRGFILPTSCINREGA

SEQ ID NO: 154699 - protein, 148 aa, Oryza sativa
  unsure (1)..(148): unsure at all Xaa locations
  Clone ID: PAT_MRT4530_54533C.1.pep
FIENSLYPQDTIPHMLPCPEVPPRHPSKTRGMDSPATATDFSPLLSLALRNESCYTKGKAVAHAGXGWHEDDEANPTVLTLVPNDKRRRPATKGRXATARLDRRRRATAADDEGGGAAEVPHLRRDNHGNGDEDLGSRRNPHSRTGWE

SEQ ID NO: 154700 - protein, 134 aa, Oryza sativa
  Clone ID: PAT_MRT4530_54534C.1.pep
MGLPVLGRNAAAVLCFVGARGCTAGRAGMCSCLPQGPVSRVKTVKVWNLVRNFRYDTVFPGLKVVAPVGSVLEQAATSGIMVGRFGTRNNFYGLHVVSWWGVLEPGIISMGYMWYHGGEVWNPEQFLWVTWWGG

SEQ ID NO: 154701 - protein, 150 aa, Oryza sativa
  Clone ID: PAT_MRT4530_54535C.1.pep
RFSSKKKKKKKELYTYQTLDFWEQIKTPGMSLRCSGLYLSQFRHTSPHLLASGDGKRSATIIGDVYIHPSAKIGPNVSISANARIGAGARLIHCIILDDVEIMGEGDHNAKLGITILGEAVDVEDEVVVVNSIVLPNKTLNVSVQEEIIL

SEQ ID NO: 154702 - protein, 128 aa, Oryza sativa
  Clone ID: PAT_MRT4530_54536C.1.pep
MRSSSALFLAFVLLAVFLAALPFAESSGRHHHHHHSHLHGRGEGERGGGEARSLAAKGAAAAWPCCDNCGGCTKSIPPQCQCMDARPAGCHPACKSCVKSSLSVSPPVYQCMDRIPNLCQRRCTAAAR

SEQ ID NO: 154703 - protein, 148 aa, Oryza sativa
  unsure (1)..(148): unsure at all Xaa locations
  Clone ID: PAT_MRT4530_54537C.1.pep
LRCSGLYLSQFRHTSPHLLASGDGKRSATIIGDVYIHPSAKVHPTAKIGPNVSISANARIGAGARLIHCIILDDVEIMENAVVIHSIVGXKSTVGKWSRVQGEGDHNAKLGITILGEAVDVEXEVVVVNSIVLPNKTLNVSVQEEIIL

SEQ ID NO: 154704 - protein, 96 aa, Oryza sativa
  unsure (1)..(96): unsure at all Xaa locations
  Clone ID: PAT_MRT4530_54538C.1.pep
MKYIALGPCRPPLEQFPQRNCGDDLNTALQRRAQDIVNAVELIVLTKMQLEMLRQDDGWENFLKKVTSFXMKNEVKVPQMDARYKPVGRSPSFFGS

SEQ ID NO: 154705 - protein, 129 aa, Oryza sativa
  unsure (1)..(129): unsure at all Xaa locations
  Clone ID: PAT_MRT4530_54539C.1.pep
MNANFTVXSCYTDYTASLFGRYIGTSIMFTYAITLCHDDDIRLVSGSLCVVSRLRDIIIWGYMLWMRGGPLMVTAXYRYSFLHVYSPKLIFWGGYSSVFSPGCMVMTGCRKKLGRQGWLLEVLGGHQKE

SEQ ID NO: 154706 - protein, 106 aa, Oryza sativa
  Clone ID: PAT_MRT4530_5453C.1.pep
GRGPRAKRPSGRGADWAGPTYGGGEERAPAGARVGPTWRPRRPAGRNGEGDGRDRQRRRRGTRRRGTSPAEGSTPVWRDGEEEEDHRLGFAREGPTAAGDGAGQRR

SEQ ID NO: 154707 - protein, 157 aa, Oryza sativa
  Clone ID: PAT_MRT4530_54540C.1.pep
MMSRERKKAAALHEKLQILRSITHSHALSNTSIITDASEYIKELKQKVVRLNKEIACAEAAALRQNSIPTVTVETLGHGFLINVFSDKSCPGLLVSILEAFDELGLNVLEATASCDDTFRLEAVGGENQVDEHVIKQTVLQAISNSNCSESSGDQEG

SEQ ID NO: 154708 - protein, 119 aa, Oryza sativa
  Clone ID: PAT_MRT4530_54541C.1.pep
MDGRGATSWAWMGCAVAAAWTGCGTAIDAACPLVLCLLGLNQGRRRGTDVVGHANVAIVSCQKCLAVGRRRPTALRAQQPAAVEQSVNTIRFLAVDAVDASSALAAQPISLAAAPRPPV

SEQ ID NO: 154709 - protein, 184 aa, Oryza sativa
  unsure (1)..(184): unsure at all Xaa locations
  Clone ID: PAT_MRT4530_54542C.1.pep
MRPSRRRHPLPPLAPGLLLLLLLHALAPPPAAAAVGVNWGFSSSHPLPAAQVVCGLLLPNSVPRVXLAAASPDALAALSGTGVAVTVGVPNELLRPLATSRKAAAAWVHDNVTRYASGVRFEYVAVGDESFLLNHGQQNQSFLVSAAANIQRALVDAKLSNKMKVVVPCSSDVYLNTSALPSKA

SEQ ID NO: 154710 - protein, 83 aa, Oryza sativa
  Clone ID: PAT_MRT4530_54543C.1.pep
PYRSMQRTPPAAIREARRPGPLSPLVKLLLVRHQRSGTPTGPKRLSVLCRMDRLRAQIKALVWMMQKSGTYILQRHIVRFTND

SEQ ID NO: 154711 - protein, 191 aa, Oryza sativa
  unsure (1)..(191): unsure at all Xaa locations
  Clone ID: PAT_MRT4530_54544C.1.pep
RSYSETXSTLKFAXRVSGVELGAARSNREGKDIKELLEQVASLKDTIARKDMEIEQLQLLKSKSPNSMTDRNGSNLLRQSTSSTGLSSLPVASQQNQQLSGSVEAEAEDNASDDGCSVGETEYSPAGASETSAERAHKAPSRITRFFLTKNGQPSTSRPKPREVVPKTQGSMRPGTAQATGGSLAKPSKRR

SEQ ID NO: 154712 - protein, 455 aa, Oryza sativa
  unsure (1)..(455): unsure at all Xaa locations
  Clone ID: PAT_MRT4530_54545C.1.pep
MAGFPLITSAITCAVGIIFFSVCYLHPAPVAALYFNYSTFSQDDGNTIRLEGDASFGDGWIDISANRYGHRGHSKGRASYSARPMLLWSRDTGEVASFTTRFSFNITPPKEDGGIDNKGTGMAFFLAAYPSMLPSGVDELGYNIGLTDQGPDAVATGDSRFVAVEFDTFNNTMVHDPDATYDHLGIDLHPRREHDAVVEYDNVSSILAMRLHLGYGLSGPRHRPDYNLSYKVDLKSVLPELVSVGFSASTTTSXEXHQLHSWYFSSSLEPKAAVRGRVVAGATVGTVMFVILLFAMVAVLVRQRQSKKRETEEAKNGGMDGSDDDDDDDGETIVEIEMGTGPRRFPYYELVEATKSFAAEEKLGQGGFGTVYRGYLREQGLAVAIKRFTKDSSKQGRKEYKSEIKVISRLRHRNLVQLIGWCHGHDELLLVYELVPNRSLDIHLHGNGTFLTWPM

SEQ ID NO: 154713 - protein, 903 aa, Oryza sativa
  Clone ID: PAT_MRT4530_54546C.1.pep
MGTVNGEYEDFDAANRRAEVIDWLGGLLPEFDLPLDSSDEELRDYLINGEALCYVADKLMPGVLEGTWGGYASDQRSNVKKFLSVVAEMGLPGFGVKDLEEGSMSSIVECLLALKDNVATQLGGHISNSTAKTPIRRKLELRETDGPVLSVATPGKRYPKSQQRSPLLSGQKINEVVQFKHGTYTDLPAAKISEMLHSNSLDNAPTQSLLRVVNGILDESIERKRGEIPHRVVHLLRNVIQEIEHRIGIQADHIRNQNSIIKTREDKYRSKIKALETLVNGTNEENEMAINRLEVVKVEKSKIDEKRKLGEQDMIRLIREKENAENIIASLHQEMQVMNRMHEQFREQMETKARQMEEHLTLRAKEAEFCLMQSKKKVEEVEATSQLKSQLWSKKANIFQSFMNNQKLSIKDIKISSQSIKQEMYALQMTWRDEISNIGHDLKGLVDAAENYHKVLAENQKLFNEVQELKGNIRVYCRVRPFLPGQDGKLTAIDYIGENGEILIANPSKQGKEGYRMFKFNKVFGTHSSQAEVFSDIQPLIRSVLDGFNVCIFAYGQTGSGKTYTMSGPGTSREDWGVNYRALNDLFDISLSRKNAFSYESNRAVGSTALNERSSRSHSILTVHVRGLDVKNGSTSRGCLHLIDLAGSERVERSEATGDRLKEAQHINKSLSALGDVIFSLAQKNAHVPYRNSKLTQVLQSSLGGQAKTLMFVQINPDIESYSETISTLKFAERVSGVELGAARSNREGKDIKELLEQVASLKDTIARKDMEIEQLQLLKSKSPNSMTDRNGSNLLRQSTSSTGLSSLPVASQQNQQLSVVTLTPLADTGLAGSVEAEAEDNASDDGCSVGETEYSPAGASETSAERAYVLILFSFISCAKPSCACDTSGELMIVPVRLRTGT

SEQ ID NO: 154714 - protein, 60 aa, Oryza sativa
  Clone ID: PAT_MRT4530_54547C.1.pep
FFFFFNTKVIPLYSYFNGKKNIFYKGKNIPKVQIYIIIRKRNLKFNLEKLPGFQTGLFQF

SEQ ID NO: 154715 - protein, 97 aa, Oryza sativa
  Clone ID: PAT_MRT4530_54548C.1.pep
TPTGQNGLFCHALKLGNCKGFPIKAGQKQRPTKRDFVTPKKRNGVQGTGLKFGSFKRTPPQARDRKIGPPFFVRPFFFFFFLFFFFFFFKIYIGRVG

SEQ ID NO: 154716 - protein, 285 aa, Oryza sativa
  Clone ID: PAT_MRT4530_54549C.1.pep
MSVTPTNDVVMTGPVAGAGDVQAAETFRVFVGYDSREDIAYRVCRRSLLQRSSVPVAVIPIVQQELRSAGLYWRERGPTESTEFSFTRFLTPHLAGYRGWALFVDCDFLFVADVAELARMADPRYAVLCVHHDYAPKEATKMDGAVQTVYPRKNWSSMVLFNCAHPKNRAALTPEAVSTQSGAYLHRFMWLDDADIGEVPFVWNFLVGHNRVDPADTAGTAPRAIHYTSGGPWFEQYKNCEFAELWVQERDAYEAEAEEDEEKEEHEPKAILHAPAAPSAVPVDA

SEQ ID NO: 154717 - protein, 54 aa, Oryza sativa
  Clone ID: PAT_MRT4530_5454C.1.pep
LRKAEHLIPAPRPPLSFHNILLFIFKLFFSFFRSIHINFLFFFMLHFSPFFFFF

SEQ ID NO: 154718 - protein, 296 aa, Oryza sativa
  Clone ID: PAT_MRT4530_54550C.1.pep
MAHEAVTLRCVAVTLCRRCLIFSAQETHETVSSPSAEEPFRVFVGYDPREDEAYEVCRRSLLRHASIPVDVRPIRQPDLRAAGLYWRERGPTESTEFSFTRFLTPYLAGYRGWALFVDCDFLYLADIAGLLACLPSSDPDHRLAVACVKHEYAPAEATKMDGAIQTVYPRKNWSSMVLYNCGHPKNVAALTPDAVSTQTGAFLHRFAWLDDDEIGEIPFAWNFLVGHNKVDPADPSTQPKAIHYTSGGPWFERYRNCDFAELWIKEADELKADKEKQKQQQIVMANGEKEKDEEGN

SEQ ID NO: 154719 - protein, 26 aa, Oryza sativa
  Clone ID: PAT_MRT4530_54551C.1.pep
QPVRSSTTDGGSTGSFNSIILTPVHS

SEQ ID NO: 154720 - protein, 334 aa, Oryza sativa
  Clone ID: PAT_MRT4530_54552C.1.pep
MVQMGAKRSHGYSLRIALAAMGARFDVALSHRAVNTALWCNFLVFSLKFGVWLSTSSHVMLAELVHSVADFANQVLPLCMEFKTYGIRKYDANPPENIHYAALVIGGSFLIEGASLLVAIKAVRKGAAAEGMSIRDYIWRGHDPTSVAVMTEDGAAVTGLAIAGASLVAVQTTGNAMYDPIGSIIVGNLLGMVAIFLIQRNRHALIGRAIDDHDMQRVLEFLKADPVVDALYDCKSEVIGPGFFRFKAEIDFNGVVLVQNYLERTGRGEWAKQFREASLSKDDTELIRVMSNYGEDVVEALGYEVDRLESEIQKIVPGIKHVDIEAHNPEGLSL

SEQ ID NO: 154721 - protein, 341 aa, Oryza sativa
  Clone ID: PAT_MRT4530_54553C.1.pep
MANVVFFLPAPSPQPCRATVLLGLIERGLETGKWALSSDAGRNSDSAFYLVQRGKSRAGLTMLTGFVNRFSSVSRPERLAGKVAVITGGASGIGEATAKEFIRNGAKVIIADVQDDLGHAVAAELGPGAAYTRCDVTDEAQIAAAVDLAVACHGRLDVLHNNAGVTCSYVGPLASLDLADFDRVMAVNARAVLAGIKHAARVMAPRRAGSILCTASVAGVIGGEVPHAYSVSKAAAIGVVRSAAGELARHGVRLNAISPHGIATPLAMRGFGDVLAWADAERLKRVIEEDMNELEGAKLEAEDIARAAVYLASDEAKYITGHNLVVDGGFTVGKRLNFAHA

SEQ ID NO: 154722 - protein, 148 aa, Oryza sativa
  unsure (1)..(148): unsure at all Xaa locations
  Clone ID: PAT_MRT4530_54554C.1.pep
MFAEENGLKGDPRLQAISQAIRVVPHFPIHGIMFQDITTLLLDHKAFKDTVDIFVDRYRDTHISVVAGIEARGFMFGPSIALGIGAKFVPLRKPXGSLPGEEIQKKKALKNGPDGWKWKVGAANPGNRPLTMENWVATGGTMSAGVKL

SEQ ID NO: 154723 - protein, 76 aa, Oryza sativa
  Clone ID: PAT_MRT4530_54555C.1.pep
SQVPFHPNLPITLLQPVFLVMAIRIWVGHPSERAPGGQAESRFISSTSVKRASRVHPGGTGSWREPGEVEARGARG

SEQ ID NO: 154724 - protein, 115 aa, Oryza sativa
  Clone ID: PAT_MRT4530_54556C.1.pep
MVLEPWDMREGGRWDNIEGESIKCKVVITQKRRWRLGRGIREDGCTSPLLGYRKRRVGMKEASLVGLASTVEAEEGYAQGVIGGGGLVGDREGDGDCVSGGIGVKERRKEAVELG

SEQ ID NO: 154725 - protein, 43 aa, Oryza sativa
  Clone ID: PAT_MRT4530_54557C.1.pep
RLRAVMILSRARAHHMEMDATRVFNRDSSWRRKKEKRRGFLST

SEQ ID NO: 154726 - protein, 35 aa, Oryza sativa
  Clone ID: PAT_MRT4530_54558C.1.pep
MEKEDPNFGSKHNLTTVVTEQIPTFCKRLNTEYYK

SEQ ID NO: 154727 - protein, 228 aa, Oryza sativa
  unsure (1)..(228): unsure at all Xaa locations
  Clone ID: PAT_MRT4530_54559C.1.pep
GNNSKAEYNHRTQQATPTMQTCKGXQGRQWAVPSCAAVNPAAGQPDTPADPTPSRPPSPPVPRKGSSYTSDQAVTHSRLWKWTSLTSSRGRGGAGKRXPPVSGTRAPVHRGSEPPRRSTAGPREPTARIGPKPIGRPRGXRGWGTGTAQPAWSSDSARRRAARRPPATAARRGSGAAERMAATGTRGGGNGVPATPDHGGDAAEGRRGPRDDEAEGGGGTSRRRPERR

SEQ ID NO: 154728 - protein, 107 aa, Oryza sativa
  unsure (1)..(107): unsure at all Xaa locations
  Clone ID: PAT_MRT4530_5455C.1.pep
AELTSPSRVAPKQSIEGEERAVRRPIEGAAGSKLQKAMVAVDESEFSHHXXXWAVFNLWPTIXPPVLVLTVQPFLPLGYVSAASFGSPLGTPVVAPELIKAMQEQQQ

SEQ ID NO: 154729 - protein, 129 aa, Oryza sativa
  unsure (1)..(129): unsure at all Xaa locations
  Clone ID: PAT_MRT4530_54560C.1.pep
IWSIAHNRGHGYSNSFTLARGAQLNPQDTINRHVTVXARHVTMSSDCDKTLHITPSDQAHHTSGFTPTPXQAAGSPFSCLGEPERRIGCCRAHLNSITLTLAWMRQPEKSYTSSQAVIHSRLWQSLYVF

SEQ ID NO: 154730 - protein, 269 aa, Oryza sativa
  unsure (1)..(269): unsure at all Xaa locations
  Clone ID: PAT_MRT4530_54561C.1.pep
SGRQVGPVGPTCHLQPPARAGNCHGRRKPPTSPPFPGSSSPLSRGTGSHPSSSPPPPFFPIFGAESSPTFATMSPTSPAVAASNPPRPATISPPRAYKNGPRAILPLFPKNSEPAALPTALPLLLLRSVAFRRAPDGRRRTXSRRRAAPLAPAAPVLFATPRPPLRCHKTPPKHHIHRAPEPQLPLVTSRRAPPPLPSLPRCATTAIXHRRSSPHPGPYSVCGPAGPRPRLRHGRVSPERRSRRLSCQSPPSFPPPAASLWSSRRRRPR

SEQ ID NO: 154731 - protein, 304 aa, Oryza sativa
  unsure (1)..(304): unsure at all Xaa locations
  Clone ID: PAT_MRT4530_54562C.1.pep
SSDGEEVAPASGPTGQRHKGAGPPWTRTTEAVHRRSTGTDGPDWPKAXRTATRRRGWGTGTAQPAWSSDSARRRAARRPPATAARRGSGHGERRRREKKGEGTVGILTEDGDGETTTGRRPTMAETRPRAGGALEMTKPEEVAAQVGVDRRGGATRLYSAVAAERDGERGGGVPGAGRGNGVGAGVRRGTAMPMAVVAQRGSDGSGGGARLEVTRGSCGSGARWRWCFGGVLWKRSGGRCAAKSGGADGASGAARRRHAGRWPCPTATANLPTCCAMPRWFASAASRLRCTECQDALCEDAEEA

SEQ ID NO: 154732 - protein, 377 aa, Oryza sativa
  unsure (1)..(377): unsure at all Xaa locations
  Clone ID: PAT_MRT4530_54563C.1.pep
RHQGGGAAPASGPHRSAAQGRRSTVDRDHRGGPPPVHGNRRPGSAQSRSDGHEAARLGHGHGTAGRGRRRRDDHREAAGGGKDGGDWHERRRERRSGDTRPWRRRGRXAGGALEMTKPEEVAAQVGVDRRGGATRLDSAVAAERDGERGGGVPGAGRGNGVGAGVRRGTAMPMAVVAQRGSDGSGGGARLEVTSGGCGSGAWWMWCFGGVLWKRSGGRLGEEKSWPDVADLKRQRPATWVTSWAKWGSIRHRFWRGKVGEESGGGGATRSRGRGERAGGGGGGICGDVGRPWRRFRLREPEVRDGPDRSLFRRIASRDDNCSDKQKGKYDDIDELEDVAQVDKQLERYQRDTLRAIRPQQVYCMGFFENKNGLYRIS

SEQ ID NO: 154733 - protein, 1007 aa, Oryza sativa
  unsure (1)..(1007): unsure at all Xaa locations
  Clone ID: PAT_MRT4530_54564C.1.pep
MAAAAVATVSSASGILAMLQEPAEELKLHALASLKSVVHLFYPEISTSIPTIESMYEDEDFEQRQLAALVVSKVFYYLGELNDALSYALGAGPLFDISEDSDYAHARTGKALDEYASFRTKASKGAEEEECGGRRLXAIVERILEKCILEGEDQRAVCMAAECTALDKLSGLVTWNCXTVYGREEEADTLIEQMTRDQXSHTPLWWLCKIYQTLPHPDYLSICQCLMFLGEPETVANILDKLLSGSLVLSCTMSLSRFDLVENENQAFLLNVRNRLASQTPESNPDSGSALPDDQAANAGTGSTEPAGDVQMRDDTATPNGSSHTVDPNEVARADRLAKIKGILSGETSIQLTLQFLYSHNRSDLLILKTIKQAVEMRNSVCHSATICTNAIMHAGTTVDTFLRENLEWLSRATNWAKFSATAGLGVIHRGHLQQGRALMAPYLPQSGAVGGGSPYSEGGALYALGLIHANHGEGIKQFLRESLRNTSAEVIQHGACLGLGLAALGTADEEIYEDIKNVLYTDSAVAGEAAGIGMGLLMVGTASEKASEMLAYAHDTQHEKIIRGLSLGIALTVYGREEEADTLIEQMTRDQDPILRYGGMYALALAYRGTANNKAIHQLLHFAVSDVSDDVRRTAVMALGFVLYNEPEQTPRIVSLLSESYNPHVRYGAALAVGISCAGSGLSDAISLLEPLTSDVVDFVRQGALIAMAMVMIQTNESFDSRVGTFRRQLEKIILDKHEDTMSKMGAILASGILDAGGRNVTIKLLSRNKHDKLTAVVGLAVFSQFWYWYPLLYFISLAFSPTAFIGLNSDLKVPKFEFLSHAKPSLFEYPKPTTQQTTTSAVKLPTAILSTYAKAKSRAKKDAESKANQEKATEDASGSSSSKATKTQEKDADAMQVDNAAEKKAPEPEPTFQILTNPARVIPTQEKFIKFIEGSRYVPVKPAPSGFILLQDMQPTEAEVLALTDAPSTVAATTGSAAAATGQQASSAMAVDDEPQPPQPFEYTS

SEQ ID NO: 154734 - protein, 265 aa, Oryza sativa
  unsure (1)..(265): unsure at all Xaa locations
  Clone ID: PAT_MRT4530_54565C.1.pep
YLFLQRKWTSLTSSRGRGGAGKRXPPVSGTRAPVHRGSEPPRRSTAGPREPTARIGPKPIGRPRGGAAGARARHSRPGRAIARGGVRPDDRRRQRRVAAAGTGSGGGGKKKGEGTVGILTEDGDGETTTGRRLAAERMAATGTRGGGNGVPATPDHGGDAAEGRRGPRDDEAEGGGGTSRRRPERRRDAAGLDGGGGERWXTRRRRSRGREGKRSRGRGAARNGDADGGGSAARQRRERWWRATGGDERQLWLGCTVDVVFRRSF

SEQ ID NO: 154735 - protein, 502 aa, Oryza sativa
  unsure (1)..(502): unsure at all Xaa locations
  Clone ID: PAT_MRT4530_54566C.1.pep
KNFYFSSMRKNLRSTTLLKRGNNSKAEYNHRTQQATPMMQTCKGIQGWVSPPPLKRQWAVPSCAAVNPAAGQPDTPADPTPSRPPSPPVPRKGSSYTSDQAVTHSRLWXALKRTSLTSAKGRXAPASGPHTSASQRGRAHGGPSPHVASGARPPRGRPRSARADRAAEGSGGQGHSTAQGRPGRAXSARRRAARRPPATAARRGSGHGERRRREKGEGTVGILTEDGDGETTTGRRLAAERMAATGTRGGGNGVPATPDHGGDAAEGRRGPRXTKPEEVAAQVGVDRRGGATRLDSAVAAERDGERGGGVPGAGRGNGVGXRGAARNGDADGGGSAARQRRERWWRATGGDERQLWLGCTVDVVFRRSFVETERWPVCGKERRSRRCKRRGAAATNAAGNGDRSLPKCGSAWVRRGESEGAREGGIEAGRGGXAGEVGRRRGVVEGLTGADFRGESGGERWTRWRGSISRACGAGWSAGATASWGETGGHGGSWGDGDWGRR

SEQ ID NO: 154736 - protein, 435 aa, Oryza sativa
  unsure (1)..(435): unsure at all Xaa locations
  Clone ID: PAT_MRT4530_54567C.1.pep
KNFRPISLCNVVYKLCSKVLANRLRVFLDEIISAEQSAFVPGRLITDNVLVAYECTHYLKRKKGKTGACAVKLDMAKAXDRVEWDYLQGTMLKLGFAESFVRIIMRCVTSVSFSVRVNGQLSNPFKPSRGIRQGDPISPYLFLLCAEGLSCLLRVVGPVHLARGVQVGIHAPWISHLFADDCIVFLEASXEGLDXLQDILDLYNRGSGQLVNRDKSAIFFSANCDNACKREVREVLHIDMEALAEKYLSLPTALGRATKDTFEFMPTKIRNLVGTWSGREASCAGRDVLFKSVAQVVPTYPMSCFLIPKDTCRKMKSMIANYWWGSSADSRRIHXQRWELLTKPKADGGMEFRDLRLFNLAMLGKQGWRLIKNPNSLCARVLKGRYYHESEFLQATRKKHSSHTWRAILARRDILFKGLVRRIGDGNSTRIWQDR

SEQ ID NO: 154737 - protein, 70 aa, Oryza sativa
  Clone ID: PAT_MRT4530_54568C.1.pep
RRAGVDWSFRKFSDLFCLGNYKILPPVSHSQFHNFRSVRGQSQDFVVSHSQLHDFGVSCSKFSQIIRTKY

SEQ ID NO: 154738 - protein, 133 aa, Oryza sativa
  unsure (1)..(133): unsure at all Xaa locations
  Clone ID: PAT_MRT4530_54569C.1.pep
MELDLSYNRLDGQVPVHGVFAITTGLRIAGNXAAHCGGTAQLRLPPCPAPGNSTRRAHLFLKIALPVVVVALCIAVMFAAVRWRRKIRNLRTRIPAARSVLNGNLAAARAPRRRHRRPGARPPPARAPRRRRR

SEQ ID NO: 154739 - protein, 98 aa, Oryza sativa
  Clone ID: PAT_MRT4530_5456C.1.pep
EKHFHGGFIGPKREQGEKKIHNFPPSLGDVSQGKGAHATKLWITTQLGRAPRLGGVSDEKTYYNPQGPNIPGFSKKTPGGFFKKRGTGNTRGFNFWPP

SEQ ID NO: 154740 - protein, 71 aa, Oryza sativa
  Clone ID: PAT_MRT4530_54570C.1.pep
MGFVLVISLPFIFFSILLGFGCYFLGKHKGREEMRTGVGAQVYGTPLPPPGVGAPPPEPFTAKKDGPENLV

SEQ ID NO: 154741 - protein, 195 aa, Oryza sativa
  unsure (1)..(195): unsure at all Xaa locations
  Clone ID: PAT_MRT4530_54571C.1.pep
AQSLKPVIFPKKKISFHTQSGSCYKLETTGCLDHCKVVPSCPMAWIGPASVLTVEFGKPRSHHRLRVSIGFKTXESADENYQVVNSRILSIFACLLIANKGFIRVSADEMTSDFQPMYVLTFRSVLIXYHIVSQWVSTGLYCCFVTLSSADCLYLXSSVRLYINHIADSXNPIAIDWYRHRXWNYSIGLSADRVI

SEQ ID NO: 154742 - protein, 207 aa, Oryza sativa
  unsure (1)..(207): unsure at all Xaa locations
  Clone ID: PAT_MRT4530_54572C.1.pep
YDSARRGGTKAAVRRCVGGAMTAHGAVARRRRCSGARVAARRHQGGGSVEREEGRKREMEWGKWRGGERGKKERGRGGRPDTTAARGLRAVMRRXGDATGADVMAARGSARXWDGDGDCGTGSRRRWNAHGDGTSGDGARGRAGRRDGGAAARGVRRARQRRWXTGARRGRGAGHQAMTRRRRRWRAARGDGDAARQRRGATARGGR

SEQ ID NO: 154743 - protein, 92 aa, Oryza sativa
  Clone ID: PAT_MRT4530_54573C.1.pep
LEIESAEEVRAVPPHESPEALLENEVPDFIKEEAERYAFLHNDREAPIIISDKLSEDETQRLLESTPSREPQQRLNNAIREVVKKEVLKLLH

SEQ ID NO: 154744 - protein, 877 aa, Oryza sativa
  unsure (1)..(877): unsure at all Xaa locations
  Clone ID: PAT_MRT4530_54574C.1.pep
IESAEEVRAVPPHESPEALLENEVPDFIKEEAEPSETLELPIMELPPRPPFELKPLPEGLRYAFLHNDREAPIIISDKLSEDETQRLLSMLEKHRVVLGYSLQDLRGINPALCTHRIPIDLESTPSREPQXRLNNAIREVVKKEVLKLLHAGIIYPIPYSEWVSPVQVVPKKGGMMVVANAQNELILQRTITGWRMCIXNKATKKDHFPLPFFDEMLERLANHSFFCFLDGYCRYHQIPIHTEDQSKTTFICPYDTYAYRRMSFGLCNALASFQTCMMSIFSNMIEDIMEVFMDDFSIYGRTFGHCLQTLDQLLAIVFAIDKFRSYLMGRKXIIYTDHAALKYLLTKKDAKPRLLRWILLLQEFDLEIKDKKGVENSVADHFSRLHITDMQEXLINDFLRDDMLMTVRDSNPWXGNIVNYMVSKYIPPGENQRKLKYDSRRNIWDEPYLYRVCSVGLLRRCVPTEQGLKIIERCHASPYGGHYGAFRTQAKIWQCGFFWPTMYEDSKEFVRRCPSCQRQGGITARDAMPLTYNLQVEIFDVWGIDLFLSHVTASCKFILVAVDYVSMVISDGGSHFIDKTFXDLLRDMGVKHNVATPYHPQTSSQAETSNKQITNIVQKTVNKMGTGXKEKLPDSLWAYRTAYKTPIGISPYQIVYGKSCQLPVELEDRAYXAIRNWNMDFEGVGEWRMMQIAELEEWREKAYHNTKIYKERMKRWHDKRIKIKKFKQXDKLLMFNSRVKLFGHGKLRSKWEGPFDVIDTSSHGAITLCDDSNNIFKARRLFQDDDKATPPPAERYVGTLYTKAGDEELHNYITPTATPSTPKEDWFCIRRVRTPGGRYGKGLLRPLTASEKXGAAESRCPPPMTVKRHLTPPTCYK

SEQ ID NO: 154745 - protein, 149 aa, Oryza sativa
  Clone ID: PAT_MRT4530_54575C.1.pep
QYMGVKFGPEKATTLNTFSAMKTGFKNIDNDGNIGPIPSQKAQKRVTDYLTGLRAKYPNDWQQRDLDENVLYSTNGGLPHGRVQIANGPVRKANILAVAKSTNVRPANSIAFQNMAQQTQNMARQNGPLLRGIIHAQKQGPTYSCFWTF

SEQ ID NO: 154746 - protein, 94 aa, Oryza sativa
  unsure (1)..(94): unsure at all Xaa locations
  Clone ID: PAT_MRT4530_54576C.1.pep
MHXIXRMVRSYEESXPMPLEQGCXSSSSEYYXGEGXXRXRVLRRGSSEEXYYGEQQXQPGMTRVRLTRVRQXAAQXPXMXRVEPQQCSIFAAGQ

SEQ ID NO: 154747 - protein, 74 aa, Oryza sativa
  Clone ID: PAT_MRT4530_54577C.1.pep
MALNNRAMDILDVELVTELENAPTATSMDGPSERVNSLISLLKLGLLCSGEMPLSRMSTKDIIKELLVIKRALA

SEQ ID NO: 154748 - protein, 84 aa, Oryza sativa
  Clone ID: PAT_MRT4530_54578C.1.pep
MDRAGAKHGGGGRRRGRGDSEEDEVSAAAGGAVLGSEAEIREANSSEGDKGFIRSCNSRGDGNKVSRSELKQQRSGQLWLRLHR

SEQ ID NO: 154749 - protein, 369 aa, Oryza sativa
  Clone ID: PAT_MRT4530_54579C.1.pep
MESNGVGGGAARPLTASRRLLARSASTTASRAGGAGAFVYDGMRPAPLFSSTNFARSLRKAASFGGGGKKQYSADDDGAVAVKAAAPPRRALSSKENTVHELGTAAARGPWEPARRPRRSSSGGSSSPENAGSTRGSAVLRDMMTRRKEEPEKEEAAHRARMLAARLLQWRFANARMEKAMARATAAAENKLFYTWLRVAELRNIQAAKRIVAQRRRQKLKLARLLRPQLSLLASWDSLAKPHADAVDDLGAVLAAACTALPLADGAQGDMESLHEAMFACVGTVNDIEANADMFFATAGVTSSTLEELSTTIKQEVEGLQEAMKLARIVTSLQVQEVSLRANLIQIQAKQKVDMGASVPAIATSGWCF

SEQ ID NO: 154750 - protein, 487 aa, Oryza sativa
  Clone ID: PAT_MRT4530_5457C.1.pep
MKASSSSQGQSPRTPSPRATSATAEHTRSSSEPWLVAAAVASTCDDSCVNDVENFARTVAAAKSRQLVGSSAASRPDMLASVLSHYAAKWLPDVVAASSSSSSPATSASGRFLPPESPTATWLKKRLLLESLVAALPPDPPAPAGGGGAADDGITCDFLLKLLRAGSMVGADAALLQELESRAARRLDQATLGAVMIPAFGHGYACGTLLDVPLVLRLVRGFLKDAGAGGGGAAKAGGGGGAAAARVARLVDAYLAEAALEAGLRPAEFEELARAVPAHARPADDALYRAVDTYLKAHASTSKEERKSLCRLIDARKLTAEAAAHAVQNDRLPVRSVLQVLFSEHGKLNRLAELSGGASSFGAPSPAFDLPGARCPSKREVLAQHHELRRLREDFARLQVQCSALQAQVDRLSTERRRRGGGGSGGGGGFFKWSTFWFGGMSADVARVEDSESGIERRTPASGKKGRGGAAGAAAATPTPKWRKSMS

SEQ ID NO: 154751 - protein, 141 aa, Oryza sativa
  Clone ID: PAT_MRT4530_54580C.1.pep
TYEALPTTCPETQKYDNIGHESCVKTTRSIKCVFTASANSNLGLMIPITEGGHLDRASARVHQYNRRRSCGPFNFNHKQIEGMKVANPPPPLPPRSECAREWCASMGIYWMDMVLSAPAGGGGGGQQQQRGENYWREKKSA

SEQ ID NO: 154752 - protein, 138 aa, Oryza sativa
  Clone ID: PAT_MRT4530_54581C.1.pep
IYPYRGQGSSKESPRRCDIKLFASERPPPPYIVKPLGYSFFPKELFPVPGSWAGCLANLVRYKRPDGGGHFAAMEKPKELLEDVEAWIPKAWAVGGGSQALILRQCGASGSNILERGCGRKVPMTAEVDSNRTHRLYS

SEQ ID NO: 154753 - protein, 67 aa, Oryza sativa
  Clone ID: PAT_MRT4530_54582C.1.pep
LNKFLFSTLSRIFHKYPFLLYSIYMENCSPLKYRLVFSKLSPPLARSLNRIFHFKRKKLLILFFLFH

SEQ ID NO: 154754 - protein, 121 aa, Oryza sativa
  Clone ID: PAT_MRT4530_54583C.1.pep
MVELKQCFNFNFGDGSGGGTRDLSSRMRSRTATAAAAPEPSRADGIEYSGGSGDCRQQRRRRPPSLPPQIGPTIVAMTVAPEAFAEVVDDGGNDGGGRRQWWRERKGKEKRGEGGEDETDS

SEQ ID NO: 154755 - protein, 73 aa, Oryza sativa
  Clone ID: PAT_MRT4530_54584C.1.pep
MGNTASGATEASDSTDKTEQAPPADTKPKKKICCACPDTKKLRDECIVQHGEDACGKWIEAHRQCLRAEGFNV

SEQ ID NO: 154756 - protein, 76 aa, Oryza sativa
  Clone ID: PAT_MRT4530_54585C.1.pep
CAVGQIPLFFSVVQIYSFVVGGCPIACLTFCQNISSFGKQNMIFPCAKKNHQKKKKTKKKKGARNYRGPALARARM

SEQ ID NO: 154757 - protein, 228 aa, Oryza sativa
  Clone ID: PAT_MRT4530_54586C.1.pep
MRHLPLPPAAAAAAAAPREASPPPPPPPAARALSPTAVAFAQIPSVAMAARAQAWLFAAALVIFHGSEYVLAAAFHGRRNVTATSLLISKQYVLAMSFAMLEHLTEALLFPELKEYWFVSYVGLVMVIIGEVIRKLAVVTAGRSFTHVIRIHYEDQHKLITHGVYRLMRHPGYSGFLIWAVGTQVMLCNPLSTVAFTLVLWRFFSKRIPYEEFFLRQFFGRDTKIRTE

SEQ ID NO: 154758 - protein, 155 aa, Oryza sativa
  Clone ID: PAT_MRT4530_54587C.1.pep
MPYCVVSHGDPSAAAAAAGEEGDVRIFYQRYGHGGTKVLLIIGFAGTHESWGPQVKGLTGAVEPVDEESPAGDDGAAGEGAEVCCFDNRGIGRSSVPPHKSQYTTVIMAKDALALMDHLGWRKAHVFGHSMGSMIAFKLAAIAPERVASLALLNT

SEQ ID NO: 154759 - protein, 618 aa, Oryza sativa
  Clone ID: PAT_MRT4530_54588C.1.pep
MERPSALVYGSSGGAFGGNWAIGPNWSAQVAWEKGEKAMERGRRLGRREEEEDGPFGTAIAPNSNLNGDGVVPNSPDPPFFGVEPAALRCGGAEARAAASRQRGGGPGGGLAAAGGGPGGLLAARRQAALRHGGTPAAGATVAGSLEFYSYLDMLSRLKKQYNPPNSLIFMSKPYPEKNGSYAFVNGIEIVPTPDIFTTLSPIPPTNGNPDPSDIDSMISFQTMYRLNVGGMTISPQGDSMFYRSWENDSPYIYGSAFGVTFSKDSNVTITYPSTMPNYIAPADVYGTARSMGPIAQINLHYSLTWILPVDAGFYYLLRFHFCEIEYPITKVNQRSFFIYINNQTVQEQMDVIVWSGGIGITTYTDYVIVTVGSGQMDLWVALHPDLSSGPEYYDAILNGLEVFKLQDIGKKSLAGLNPPLPPQPKSDVNPKGANPDIDSTHVSTVVKGTFGYLDPEYYRRKQLTQKSDVYSFGVVLFEILCARPAVNIELPEEQASLRDWALSCQKKGMLGKIIDPHLHGEISPPCLRMFADCAKQCVADRSIDRPLMSDVLWSLEAALKLQENAENNKKFSEATTSSKRTPDLITIMGTDKPSTYSTMSITGQKIIFSDMMHPQGR

SEQ ID NO: 154760 - protein, 75 aa, Oryza sativa
  Clone ID: PAT_MRT4530_54589C.1.pep
PAMPPTPLPIPHRSSTSSAPCSRPRPWDRVAPRPHSPPTLPPRKSAPQLPYPHDAASTPPAVAASTRAPHRFPSL

SEQ ID NO: 154761 - protein, 534 aa, Oryza sativa
  Clone ID: PAT_MRT4530_5458C.1.pep
MAAAAGSVGGDDHHHHQQARYPLDAGSYRLLCKIGSGVSAVVYKAACVPLGSAVVAIKAIDLERSRANLDEVWREAKAMALLSHRNVLRAHCSFTVGSHLWVVMPFMAAGSLHSILSHGFPDGLPEQCIAVVLRDTLRALCYLHEQGRIHRDIKAGNILVDSDGSVKLADFGVSASIYETAPSTSSAFSGPINHAPPPSGAALSSSCFNDMAGTPYWMAPEVIHSHVGYGIKADIWSFGITALELAHGRPPLSHLPPSKSMLMRITSRVRLEVDASSSSSEGSSSAARKKKKFSKAFKDMVSSCLCQEPAKRPSAEKLLRHPFFKGCRSRDYDYLVRNVLDAVPTVEERCRDSTQLCGCARGARCVSPCRHASSGSNVVAAKNRRISGWNFNEESFELDPTDKPPEQQQQQPCFPFHHDNDDDMVEHEQEQRRRQDGNDGSSDVAVPHLVTILGSLEMQRDMVMQVLEGDGGGGGETAGREEMLVGYVRELEKRVQELSTEVEEEMARNAHLQELLHERACENHTDSSHTSGSR

SEQ ID NO: 154762 - protein, 803 aa, Oryza sativa
  Clone ID: PAT_MRT4530_54590C.1.pep
MQLDSNNRSWDGDTSSTFAPSVKGLAARASYQDPSLPSLVPYMTSRIFISNYTYSFPVIPGRMFVRLHFYPVAYGNYASRDAYFGVTTNNLTLLDNFNASQTALAAKYAYILREFSLNVTSGSLDLTFFPSTQNGSYAFVNGIEIVPTPDIFTTLSPIPPTNGNPDPSDIDSMISFQTMYRLNVGGMTISPQGDSMFYRSWENDSPYIYGSAFGVTFSKDSNVTITYPSTMPNYIAPADVYGTARSMGPIAQINLHYSLTWILPVDAGFYYLLRFHFCEIEYPITKVNQRSFFIYINNQTVQEQMDVIVWSGGIGITTYTDYVIVTVGSGQMDLWVALHPDLSSGPEYYDAILNGLEVFKLQDIGKKSLAGLNPPLPPQPKSDVNPKGVSGGGKSKGAVPASIRGAMGSTATMLIACFSVCIICRLKKVAKHSFMTDKKCMTYRTEFYHSPSNLCRNFTFDEIQVATRNFDESLLLGRGGFGDVYRGEIDNNGENVAIKRSNPLSVQGVHEFQTEIELLSKLRYCHLVSLIGYCKEKNEMILVYEYMAQGTLREHLYNSNKPSLPWKQRLKICIGAARGLHYLHMGANQTIIHRDVKTANILLDDKWVAKVSDFGLSKANPDIDSTHVSTVVKGTFGYLDPEYYRRKQLTQKSDVYSFGVVLFEILCARPAVNIELPEEQASLRDWALSCQKKGMLGKIIDPHLHGEISPPCLRMFADCAKQCVADRSIDRPLMSDVLWSLEAALKLQENAENNKKFSEATTSSKRTPDLITIMGTDKPSTYSTMSITGQKIIFSDMMHPQGR

SEQ ID NO: 154763 - protein, 467 aa, Oryza sativa
  Clone ID: PAT_MRT4530_54591C.1.pep
MVRIGTMFREEHRSSAVRIPCEKVTRVRILGGQLRSTVGTGTKLREKLRSKWSRIPGDEVEYKMAHGGWTPCVRDLRNGFYEVRGLDWEEQQWLGWMAGRVGPGGQETECELAKDRRQGGDLTGGVRAVRPAATGLRRDFHRFEARNILLSGISRSDFDRASHFQTAHEIWNALKNFHQETSNIKELRRDLFKKEYIKFEMKPGEALDDYLSRFNKILSDLRSVDSAYDKNYSQSEVSRHFLNGLDMSIWEMKFTSIQESVDMSTLILDSLYTKLKTHEMNILSRKIDSNSSALVSSSTSLDVGASSSNSTVLALINAMSDEYRKRGGPNRCFECGSTDHFRSRCPKLGRGKKEDDGRVLENEVDKKKITKEKKKNCMQWLIQELIRTFDESEDEDESKGKQVVDLAFIARNASSDVDESDSNSEEKLSYDQLEYAAFKFAKKLQTCSNMLDEKDHTIEILNAELID

SEQ ID NO: 154764 - protein, 496 aa, Oryza sativa
  Clone ID: PAT_MRT4530_54592C.1.pep
MAMAFWRRAAATEGWTGFNLVLRCHQKKRRGSATTGEAAKLCQRSKHGDGSAFTVTEYIKFEMKPGEVLDDYLSRFNKILSDLKSVDSADDRNYAQSEVSRHFLNGLDMCIWEMKVSSIQESVDMYTLTLDSLYTKLKTHEMNILSRKVDSKSSALVSSSTSLDVGASSSKSSILALINSMSDEQLEQFEEEVLVLVTNKFYRAMNNVMYRKRGGPNHCFECGVVGHIRSHCPKLGRGKKDDNGRVKEDDVDKKKVTKEKKKNCMQRLIQEFIRAFDKSVDEDESKGKQVVDLAFIARNASSNVDESDSDSEEKLSYDQLEHVAFKFAVKLQTCSNMLHEKDHAIEILNAEIDRLKYLIPNDDELSQNKGVLVDCENCENLTKEVSYLKSSLEKFSDGQKNLNMILDQSKQKSAFGSRNTVILTLISRSDRPALDCRNSLDDKDVFDVSKNNGCQILGNSLDDEDVPGIIERKKSDLRSALVNGEDRDYAQGGAEV

SEQ ID NO: 154765 - protein, 101 aa, Oryza sativa
  Clone ID: PAT_MRT4530_54593C.1.pep
PGARGGGRPPGGCAAARLHHRAVRPSSRPPPRGPGCGGRAGRPSASPVAATRLPAGSRRRPDKGEVKRRHTQTLGQWQSQDLEMGGCHLRDVVTHLRFGEQ

SEQ ID NO: 154766 - protein, 90 aa, Oryza sativa
  unsure (1)..(90): unsure at all Xaa locations
  Clone ID: PAT_MRT4530_54594C.1.pep
MDDAALHRRSPEERALLSPALCDRLVTTKPYSXTTAPPPPTSKAYANTKTFLIYKWEPDSHTTKPHLKDYKEEPPDCGPGGLDLQLKIKN

SEQ ID NO: 154767 - protein, 33 aa, Oryza sativa
  Clone ID: PAT_MRT4530_54595C.1.pep
MEVQSGRTDFCEGLNRKAIRDRQCGPRSIDPSG

SEQ ID NO: 154768 - protein, 59 aa, Oryza sativa
  unsure (1)..(59): unsure at all Xaa locations
  Clone ID: PAT_MRT4530_54596C.1.pep
RXXSLGSRVRAATHXAEYHPPSTMVVLHPRVPALSVLGLGLTRCYPAPCVCRGVLVNAS

SEQ ID NO: 154769 - protein, 117 aa, Oryza sativa
  Clone ID: PAT_MRT4530_54597C.1.pep
MPASVPAATTQRSAGGGRSPGREGAGQIQPSSTTATPGSAAAPAPALASPLQRPAALEEERARPGRPSPSPCQPRPRRPAFSTAAPATPVPASPLHRRAGRPSPPLHRHELIVGLID

SEQ ID NO: 154770 - protein, 83 aa, Oryza sativa
  unsure (1)..(83): unsure at all Xaa locations
  Clone ID: PAT_MRT4530_54598C.1.pep
FFFFFFRVIXLLGQGLWAISYCPPTFTPTGVAHERTGAAPSFHHTFPHTHTPXGNTTSSSLLPXLSIWAAQTKANSQEGMHTQ

SEQ ID NO: 154771 - protein, 496 aa, Oryza sativa
  Clone ID: PAT_MRT4530_54599C.1.pep
MAVGEGEQQPLHILFFPFIAHGHLIPVADMAALFAARGVRCTILTTPVNAAVIRSAVDRANDASRGTGSPEISITLFPFPDVGLPPGVESVPGISSKAEQEKIAEAFLRFREPFDRFLAEHHTDAVVVDSFFHWSSDAAADHGVPRLAFLGSSLFARACSDSMLRHNPVEASPDDPDAVVSLPDLPHRVELRRSQMMDPREREGEWAFLQLVNAADQRSFGELFNSFREMEPDYVEHYHTKLGRRAWLLGPVALAAGKGMAERQDTDTDSGRLSPDEERCLRWLDGKAAGSVVYISFGTIARLLAAELTEIARALQLSGKNFLWIITREDTDASEWMPEGFADLMARGERGLVVRGWAPQVLVLNHPAVGGFVTHCGWNSVLEAVSAGVPMVAWPRYTDQFYNEKLIVEMLKVGVGVGAREFASFIDHRSQVIAGEVIAEAIGRVMGEGEEGEAMRKKVKELREKARSAVKEGGSSYDDAGRLLDELMARRSSGTS

SEQ ID NO: 154772 - protein, 78 aa, Oryza sativa
  Clone ID: PAT_MRT4530_5459C.1.pep
IFRACRLAFFLYHKPNVCNPPRLLHRRWGGGGVVGAAEGGWWRDGSGGLRWGMGCWGFGRANPRFLPLRFRTRIHKRE

SEQ ID NO: 154773 - protein, 269 aa, Oryza sativa
  Clone ID: PAT_MRT4530_545C.1.pep
MALPLVRLPPLPAARHPPLLRLPKHSVPPHGGRVSFACSSGSRAAFAACCASASVAPAAEAEAVVEEPEGPRTRLIAQNIPWDCTADDMRALFGKHGSVVDVELSMYNSTRNRGLAFVTMGSEEEALSALNHLNSTTLNDRTIKVDFTRSRKKQYVVPSAPMPKHSVFVGNLTWRVRSRHLRELFASTPGVQSVEVVFHTTSPRRSAGYGFVSFSSKEAAEAAISTFNGTKLMGRSINVMFKDDNAKKNKSAAPTEEDLKAESSKQIVS

SEQ ID NO: 154774 - protein, 105 aa, Oryza sativa
  Clone ID: PAT_MRT4530_54600C.1.pep
MTLRAAGLMADGVAMRAPDPREWRPPLGGVSSGGEGGPGDKGLAGITHPKLTSISIARGQVCSYYGGVGLSAKVKTGMCSKRPFGFYQRSTYDYYNALCTIILTC

SEQ ID NO: 154775 - protein, 606 aa, Oryza sativa
  Clone ID: PAT_MRT4530_54601C.1.pep
MVMPAPPRGWDFSPGDAVREKVRLRFRSPVHFSLKFSPMHYRLAVDLLRANFRLTNSSVALALRAAIGGSPADLNVQHLLDRSFSFDVFSKQVGLWIYRLRSFSCDDFSLRFYLWRNGGPNWQWEFESWSRDCAEEWALVPSKKRPTKAHQPVGKFPKLSSEDNLVWRSKSSPAKKTAVSPHIPSSPRNTVQSNPQNFPSLAMADLNPTPQCFLRQAQVVHQGGNLRVPRVDLTIPQHPPRRHEDVCITIVEPAIPEHEWDHHRALISDYIFEVHMYEVRTAYRHPSTVGMFQLRSVMHRDALVNSPPAAYDGMHTVELVKHDQGQNWRACHFNREGWFLLLDFPLDFVDRHHINLALDRDQMLGRVFVRAKYRDLDSVPRKIVLQEPLGNGGGDGDFANIPPEDDLPPAGPQPGPNDDNADDPDDGNIWQLGHPGNQGGGGVWDDLVQQQQAAEAEIEDAWGQDHPMGQVEENSGQLIILPNQEEQELNLIDQEQQVQLFLARLKDIADREGPKHPSFYPMAGLLEKIDHLCKAKEIMQAAQIPSPTSLPFSSPFMTLVLLKRKAMFDHAPPVVKRAHSSWALLSSPSDDGHSDQEILDVAPLQA

SEQ ID NO: 154776 - protein, 726 aa, Oryza sativa
  Clone ID: PAT_MRT4530_54602C.1.pep
MVMPAPPRGWDFSPGDAVREEVRLRFRSPVHFSLKFSPMHYRLAVDLLRANFRLTNSSVALALRAAIGGSPADLNVQHLLDRSFSFDVFSKQVGLWIYRLRSFSCDDFSLRFYLWRNGGPNWQWEFESWSRDCAEEWALVPSKKRSVHKSSKVQKDKSYAQAVQQRDVSVKFVFQCLKALLQERRSVFTRLQGLKVPIAGETLATKTVEPITKDDPISLRYLNSNFLPSCVRCLDKGHIASNCSGPVRCHSCLEAGHMSCFCATRPTKAHQPVGKFPKLSSEDNLVWRSKSSPAKKTAVSPHIPSSPRNTVQSNPQNFPSLAMADLNPTPQCFLRQAQVVHQGGNLRVPRVDLTIPQHPPRRHEDVCITIVEPAIPEHEWDHHRALISDYIFEVHMYEVRTAYRHPSTVGMFQLRSVMHRDALVNSPPAAYDGMHTVELVKHDQGQNWRACHFNREGWFLLLDFPLDFVDRHHINLALDRDQMLGRVFVRAKYRDLDSVPRKIVLQEPLGNGGGDGDFANIPPEDDLPPAGPQPGPNDDNADDPDDGNIWQLGHPGNQGGGGVWDDLVQQQQAAEAEIEDAWGQDHPMGQVEENSGQLIILPNQEEQELNLIDQEQQVQLFLARLKDIADREGPKHPSFYPMAGLLEKIDHLCKAKEIMQAAQIPSPTSLPFSSPFMTLVLLKRKAMFDHAPPVVKRAHSSWALLSSPSDDGHSDQEILDVAPLQA

SEQ ID NO: 154777 - protein, 105 aa, Oryza sativa
  Clone ID: PAT_MRT4530_54603C.1.pep
MPSARPRTRSAPLPRAPSLAPPPPGLQLRPSPPSRAAGRTPGPVQLQPRPRRSPESSAAAARRSAASACAAWRDAGPPPSTSPAAKEEAPHPLQRHRTRSPAASA

SEQ ID NO: 154778 - protein, 635 aa, Oryza sativa
  Clone ID: PAT_MRT4530_54604C.1.pep
MVTPAPPGGWDFSPGDAIREEVRLRFRSPVHFSSKFCPTHFRLVDLPRANFRLTNSSVALALRAAIGGSPADLNDQHLLDRSFSFDVCSKQVGLWIYRLRSFSCDDFALRFYLWRNGGPNWQWEFESWSRDCAEEWTLVSSKKRLVHNSSKVQKGKSYAQAVQQRDVLVKSVFQHLKAPLQERRSVFTRLQGLKVPIAGETPATKTVEPIMEEDPISARNLNSNFMLSCTRCLDKGHIASDCSEPVWCHSCLEAGHMARFCATRPAKAHQPVGKFPKLSSRNNLVWRAKSSPAKKMAVYPRIPSSPRNTVQSNPQNFPSLAMANLNPNPQRFLRQGQVVHQGGNLRVPRVDLTIPQRLPRRHEDACIAIVEPAIPEHEWDHHRALISDHLFEVHMYEVRTAYRHPSAVGMFQLRSVMHRDALVNSPPAAYDGMHTVEFVKHDQGPNWRACHFNQEGWFLLLDFPLDFVDHHHINLAVASFGQLSFWLDRDQMLGRVFVRAKYRDLDSVPRKIVLQDPLGNGGGGESWTISIFVLDGDFADIPPEEDLPPAGLQPGPNEDNADDPDDGNIWQLGHPGNQGGGGAWDDLVQQQQAAEAEIEDAWGQDHPMGQVEENPGQLIILPNQKEQELNLFEQE

SEQ ID NO: 154779 - protein, 381 aa, Oryza sativa
  Clone ID: PAT_MRT4530_54605C.1.pep
MGAQQSVNAGKAKVDVHVDLTHMLCEALLLPPMRNSGATFSQIVGRISLKHPSLFGRSEKLDVILDKGINESNAVIAFRRPRPEWLSQQSFVIQETYLILLFTLVLTCSGLSNQHTMTPEIAVHGFPADNFTRSGSRGINLSRLSLGVELNEPSTSNWTSGTSVKFEHIRPVNNEGRSIARDHDGFPLTCSGNLHDNMIILKQESGYADVNDNSFLKVNLQMEQGLPLVPKSLTFNRVKCAVSKGMKLGPTFLVTSLTGGSIVGDMAPYQAFAIGGLGSVRGYGEGAVGAGRLCLIANCEYTVPLAKHLEGSIFMDCGSDLGSACHVPGNPALRQGKPGFGVGFGYGIHFNTDLGQIRVDYAMNAFSRKTIYFGINSGGGS

SEQ ID NO: 154780 - protein, 138 aa, Oryza sativa
  unsure (1)..(138): unsure at all Xaa locations
  Clone ID: PAT_MRT4530_54606C.1.pep
HPVHLACVAVVVVFSLSLSLSLYLVRRRRRVVVSPSELNNTSARSPCFLALVSEPSPLKTPPTPSPPPRLLLATLCVCVWVCLFLSLGLARRDRSISGVICCFFVELCDLGDGWSGGCGYRCXXRRRWGRGGGGESGS

SEQ ID NO: 154781 - protein, 70 aa, Oryza sativa
  Clone ID: PAT_MRT4530_54607C.1.pep
MSALFNFNSFLTVVLLVICTCTYIKIQFPAILNDRTGFRGFFWKAARIGERLSPWVALGCFAMGISTIFF

SEQ ID NO: 154782 - protein, 2022 aa, Oryza sativa
  unsure (1)..(2022): unsure at all Xaa locations
  Clone ID: PAT_MRT4530_54609C.1.pep
MAGEDEALYEIRRLASGSHEILREGEITGTSGAAGGVLSYLSLQGVSKLKERWTRNSALGWSKKRSRINAALLFVSRNADYVGVAVGNRITVLRKGDGYASPCGVYTNNDRMAFFTNGAWLEAQGILGVVDDLNTLHLIKENGEALTRRTSNQLKLSYPIVNIVVHDGSSSERPGFYIFTSDGMVHKFDYMQDHEANLQKVAILIQDAVSAKTPQLPHSVSCVDYHQDHSLVVLIGNPNAFLSSNGSSGACFLYVLHFNGNLEFSLSFPSLQLEGTFFPPKDQATFASSAKVRISPQSKHIATLDLNGSVNIFVLANDKRSASLHPPRNGTQLSDVKDISWWTDNILMVVKEKGSINMYSISGNRVVSEDGHVLSTPQLEKARAVEGYTFILQSSRYEGNTTFEEVDSNSMPNLQNVSRNNQRSEMDKIIWSLISFSKITVPEKYSILIRGNRYKEALDFACKHNLDKDEVLKAQWLSSDGDVHDIDTYLANIKDQVFVLSECLNKVGPTEIALKALLSFGLRITDRFKFSKLDNSIDTSAWDSRIIRLRLLRYNDLLETFLGINMGRFSAVEYRKFRLMPLVETAVALAESGKIGALNLLFKRHPYTISFDILHILSAIPETVSVQSYSQLLPGKSPPSVVILRDGDWVECEQMASFINTCSDQLEKNGEFKTELLLKHSAGFSWPSIAKLCEWYKSRARDIDCLSGQLENCLAMIELGCQKGIVELEPFFDDIKCLYEVVYSDELSEFIMNLAMWEDLPNYEKFKIILKGAKEGTVVQRLEEKAIPFMKKRSHLIFLSNEEKHRESYLIRWLKEVASQNELSICLAVFENGCGDSPIHGLFKDIAEMIETAVHCIYLCSATNQWNTMSSILSKLHHKMKREKSMLASEEDYNFKDAKQALGTCVVSFDDMQYVCTRILSGLSSPGDSYSHDSINYQLDNIKSLDMLEKKLKVAEGHVEVGRLFAYYQVPKPIHFFLSTHLDEKNAKQIIRLLLSKFGRQFMLVEFIRGLLKAGKFSLARNYLGGTSAVSLSIEKAENLVVQAAREYFFSASTLSCNEIWKARECLNLLPNSISVQAETDIIDALTVRLPYLGVTILPVQFRQIKDPMEIIRMVITSQTGAYLHFEEITDVAKLLGLKNEEEIAAVEEAIAREAVVNGDLQLAFDICLTLTKKGHGAVWDLCAAIARGPQLDNLDTSTRGKLLGFSLSHCDEESVGELLNAWKELDVHDKFEQLMISTGTNPPNFSTDGSSITPLPVQSVQDILDLREDISDDRGIDHVGIVKQMLSKVCTDLSNEDAYRRESSLAESRKLFSFSALELPWLLKLSNDEEHDGKKQSLKTDHPIRRYQFSTKVKAINCIIHWLAVSGFSPNDDLVMSLAKSVIEPPVDEEDYVLGCSILLNLMDPFNGVKIIEEELKKRECFQEISSIMNLGMTYSSLNSLKKECSTPEQRRNLLLEKFHEKFTSVESDELDQIDEANATFWREWKAKLEEERRLADQAMMLKQVLPDVDTSRFLSGDVNYIKNVLFSFIDSVKLEKKHILKEAVKIAETYGLRRTEVLLRFLGCALLSESWDNNDILSEISEFRDDIVNSAKGVIDMIHSDVYPEINGYNKQRLSYIYDILSACHSYLVRSSEIELTYPEHVHTHKFEPFQYYKVLAEECKKVSFIDGLNYKNIAGLDNLNFEHFNEEVCKNIHASTVRALADMVQALVSMYVDVLAKGLISRQGVYKHYVLGLLASLEGRTEARSDNIDSEKLQAVLSEIELNYDSCKEYIQVLPATDISCIIIRYCMLCFPCDLTRNHPQEPSWKKPLDVLVMLWIKLIDDIPVESMDACPYGRAEYLDSNRLSHCMRVFRQLLVDDKITVCQGWDAISMYVKIGLGDEIPMEISYFCRSMILSGCAFESVAQVYHGGQEQLENESXRPSNPLDLLELYSATLDDCLSDLIKSPSESQILLHKLLSSLSRSTEKHAGTLEMIRSGVWGKLISFSENMQLDSQLRVYALQLMQCITGRNLKSLQMSWFP

SEQ ID NO: 154783 - protein, 166 aa, Oryza sativa
  Clone ID: PAT_MRT4530_5460C.1.pep
RPGHRPLVLSPSSRRSLPGSKPHRHGCHSPSSCARVGVEATRPLKDRGALAARGIGVHRSPRRPISLPLVYPVAQSQRQKPRVCSSKSPTPHPPPQTSISISPPPTLCSADDTSSSPSPVKKTRSACPPGDGRALHQPGQAANIQAWDICLQFFEPLFAGLHTLGL

SEQ ID NO: 154784 - protein, 51 aa, Oryza sativa
  Clone ID: PAT_MRT4530_54610C.1.pep
SRTHQQVSSRVLPKALIQLHTCSRNTFTKYISDLSESSDELECIKMKPSKM

SEQ ID NO: 154785 - protein, 131 aa, Oryza sativa
  Clone ID: PAT_MRT4530_54611C.1.pep
MEDNVVLVAPDFSSHVLLMAATAPFTPLGSSLLLAASTRPWSLSVVEEKCSAVLVAESDLLHWVQPMSRETITLITLALVSKRFYPFEGVLGESLIWSSRIGNIEACGRCFLLRGVALWTLSPFGLFVSSV

SEQ ID NO: 154786 - protein, 542 aa, Oryza sativa
  Clone ID: PAT_MRT4530_54612C.1.pep
MDSARSWFQKFQPRDKSKSPAVAASHGKDPGKPPIDDAPSSATKQRVAAAKQYIENHYKTQMKSLQDRKERRWMLERKLQDAEVPVEEQNNILKHLEKKETEYMRLQRHKMGVEDFELLTIIGRGAFGEVRLCREKASKNVYAMKKLKKSEMLRRGQVEHVKAERNLLAEVDSAFIVKLYYSFQDEEYLYLIMEYLPGGDMMTLLMRKDTLTEDEARFYIAETVLAIESIHKHSYIHRYQISVPKFWDIKPDNLLLDRSGHLKLSDFGLCKPLDSSNFPNLNEPDYTSTKGTKPLPDSSSRLSSSALKRTQQEQLSHWQKNRRMLAYSTVGTPDYIAPEVLLKKGYGMECDWLVSYLIVNWRSHLKFPEEAKLSPEAKDLISKLLCNVEQRLGTKGAHEIKAHPWFRGLPWERLYQMKAAFIPEVNSELDTQNFEKFEETGAQIQSSSKSGPWRKMLPSKDANFVGYTYKNFEIVNDDEVAGIAELKKKSSKSKRPTIKTLFESMDEDEPVQGSFLNMLPHKEGQPSSHSTIPPEQYQPRHK

SEQ ID NO: 154787 - protein, 45 aa, Oryza sativa
  Clone ID: PAT_MRT4530_54613C.1.pep
LAFLRSMRYRRRRQPKLSKRLSQTRCRRRRRVPASRSPDRQPQPH

SEQ ID NO: 154788 - protein, 907 aa, Oryza sativa
  Clone ID: PAT_MRT4530_54614C.1.pep
MPLRLMPLRLEIKVRHWLGLGEPDSARSRILSSLYSGSVCIWDYQSQTMVKSFEVSELPVRSAKFISRKQWVVAGADDMFIRVYNYNTMDKVKVFEAHTDYIRCVAVHPTLPYVLSSSDDMLIKLWDWDKGWMCTQIFEGHSHYVMQVTFNPKDTNTFASASLDRTTKIWSLGSPDPNFTLDGHQKGVNCVDYFTGGDRPYLITGSDDSTAKVWDYQTKSCVQTLEGHTHNISAVCFHPELPIIITGSEDGTVRIWHSTTYRLENTLNYGLERVWAVGYMKGSRRMVIGYDEGTIMIKMGREVPVASMDTSGKIIWAKHNEIQTVNIKTVGAGFEVTDGERLPLAVKELGSCDLYPQSLKHNPNGRFVVVCGDGEFIIYTALAWRNRSFGSALEFVWSSEGEYAIRESTSRIKIFSKSFQEKKTIRPTFSAERIFGGILLAMCSSDFICFYDWADCRLIRRIDVNVKNLYWADSGDLVAIASDTSFYILKYNRDVVASYLESGKPVDEEGVEDAFELLHEVNERVRTGIWVGDCFIYNNSSWRLNYCVGGEVTTMYHLDRPMYLLGYLANQSRVYLIDKEFNVMGYTLLLSLIEYKTLVMRGDIERANDILPSIPKAQYNNVAHFLESRGMLEEALEIATDADYRFDLAVQLGKLEVAKAIAMEAQSESKWKQLGELAMSTGKLDMAEECLVQAKDLSGLLLLYSSLGDAEGIEKLASQAKEHGKNNVAFLCLFMLGKLEDCIQLLIDSNRIPEAALMARSYLPSKVSEIVAIWRNDLSKVNPKAAESLADPSEYPNLFEDWQVALTVEKNVASRRVHYPPADEYLNHAEKSDMTLVEAFKRMQVIEDEETEDALDENGEPDEEVLEENKVEESTDEAVEVDADEPEETVLVNGKEGEEQWVLTEHE

SEQ ID NO: 154789 - protein, 36 aa, Oryza sativa
  Clone ID: PAT_MRT4530_54615C.1.pep
MMSLPRGLLPVLQKSSMIPCKPTVSDRSGEMNTAIR

SEQ ID NO: 154790 - protein, 201 aa, Oryza sativa
  unsure (1)..(201): unsure at all Xaa locations
  Clone ID: PAT_MRT4530_54616C.1.pep
GAARDDRAAQRGTRCRRLATRQRAVGDAMAHSSRSSGQREGGAAAGAACGDRAAXCRRPARDAGTHSCRSGGRRDGGATTGVAARHRAAGDASGRALGALVQERRLARRWSSGRRGSRQLCGAMRAAGDASQGSXRDAVAHSCRSGGWRDGGATAGVAMRHQVQQKKAAAAAVHDQRVALPPSPAYDSNQLASLFGFLLVG

SEQ ID NO: 154791 - protein, 76 aa, Oryza sativa
  Clone ID: PAT_MRT4530_54617C.1.pep
CFFFFFFFFFFFFFFFFFFFWAPRGGNRVFQKFFKLTNRLKLTGWAGPPGDNLTFEQSDRPTGLKQSNQSIAREKL

SEQ ID NO: 154792 - protein, 167 aa, Oryza sativa
  unsure (1)..(167): unsure at all Xaa locations
  Clone ID: PAT_MRT4530_54618C.1.pep
EASSFPEDKNKICSKAHCPRGGRPPLRRPRAGPQGRRAGXPRPRSASAPAPVPKAASTPAPTRCSPRPPPXGAHAPAPKAAAAPPAPXPPPTTSTPGGSPPPLCPPAAAPAAVATTSSDDLDSRGLSAAASPASRAAARATVAPPTSRATAPALSCRLQSRGEKRED

SEQ ID NO: 154793 - protein, 47 aa, Oryza sativa
  Clone ID: PAT_MRT4530_54619C.1.pep
WKAPVKNWKLQGVLSVAVTSEHWFLVNTLTLVKNYMYFNSFSYRLVS

SEQ ID NO: 154794 - protein, 118 aa, Oryza sativa
  unsure (1)..(118): unsure at all Xaa locations
  Clone ID: PAT_MRT4530_5461C.1.pep
MGPTKRAKSVLMKNSSAGPKLAFGYASVPLDLILQSTTNEDKETAVKPIKDSQSARTLAMCGNHLEAYQLNPMSYTKSYCPNRLYHLTQSDSNLADPXIVADPNSSRFLLCFRDDPHF

SEQ ID NO: 154795 - protein, 614 aa, Oryza sativa
  Clone ID: PAT_MRT4530_54620C.1.pep
FSAATHHRRLRPRPVHRHRPPRRLHPRHPPPPAARGAADAGADGRALRLPLPHRPRHRRPQVQRLRLRHRPVRRPRRPGARRHGPLLQPLLLLHQPRHAARRHRARLRPGPRRPELGLRHLLRRHAMSSLILSLLSPALQSARQGRSGGARSRRGDGGPSGSARSRRGGSGEPAGVEVVRGSSGDGGRSGGGWAKRRRRAPGSRGRGWGEGAGVEAALGTGAGAEADLGRGHRRGDLGGLRVGAGVAASAHSSSSSSSAERCFSPARPSPSSTPRAIGGSAKIRDGDDLAAAGDGREREGGREASGRGRERPPCAPLVVVHPTHPSPWWRSRRPPRAPSAAPQRSTMATTLRPPTTGERERGREASGRGRERPPRAARAPRRGGGAVSHPARRRQPRHAPGLLTRRRRRPPPLLRSSPVAAAVAVPRRRRARPPSTPPPPPRPSPTAAIAVPRRRRARPPLPPLHPSPTHGPHLPIFFFLLPPTRPPPLHLLNCTSISPHLLSISPSPQPPPPLSSSIQWARRVASPPSSPGWPSPPPTRPSMTPPTPPTPSPTAVPSPVRMTTTMTDSPRRRRPTRSGRRRSSAASAAGPPPTDSSSTPARAGRPPPTPSSPR

SEQ ID NO: 154796 - protein, 225 aa, Oryza sativa
  Clone ID: PAT_MRT4530_54621C.1.pep
MEHVAGGDWLSWFKSVSLSLLHHAGRRVPLTFLLGEEKAALVQARFERTIRHAQVEVCTALEVVKEASSGRHVEQGAIPGGRLDTAGQRQGHQPRAEGWVVFKKATVNISVVGRQRFKAAGGQQRRGSRTGEGTPIPAVACVRVQVEPEPEERPKVGGAAAAHGEAAEEEVVFPMAWTNDDESCPEGTVPVRQTTKRDVLRSMGVGCAGSRTTGCGIKSEEGHHI

SEQ ID NO: 154797 - protein, 82 aa, Oryza sativa
  Clone ID: PAT_MRT4530_54622C.1.pep
MMVAREERAVVGSAWSGEALEYLPPSLRVKEKSPDSSPPLLARLRHLVAEQGGELISIWRAEEGILPFVDSDHFAHKYFLPQ

SEQ ID NO: 154798 - protein, 80 aa, Oryza sativa
  Clone ID: PAT_MRT4530_54623C.1.pep
RAKTGAGTLTPPTRKYPPTFPYLTLTTAHPEELPRMAKNKTPRVHSTSTESDRGAASHHPAPPPNSRPYVTRNNLGKPPH

SEQ ID NO: 154799 - protein, 57 aa, Oryza sativa
  Clone ID: PAT_MRT4530_54624C.1.pep
LLFLVGTPSFMGSGGGVPTPAKKYFLSKGVPVSKRSKSLAFGFRGMYLGSGTGLAFS

SEQ ID NO: 154800 - protein, 239 aa, Oryza sativa
  Clone ID: PAT_MRT4530_54625C.1.pep
MPAHGNMSWGCVLWAGKDDKDEVEMLNHGGGLETVKEQLQRVLERITLQSQAQHGDGELLVQSKTAPRILLLPFLNLPTVREPSPVPVLTTYAVAHRAVAGAGQPLTAASRSPTTSSPSALSPVREDLLGQNKKAADDMSRVAGLDNQGIVGLQRQIMKEQDEGLEKLEETVLSTKHIALADDLEDHVDVTNSRLQRVQKRLAILNKRTKGGCSCMCLLLSVVAIVILAVIVWLLIKYM

SEQ ID NO: 154801 - protein, 75 aa, Oryza sativa
  Clone ID: PAT_MRT4530_54626C.1.pep
RSGILHTTYRSTPTSAATSPQLDGDDLYTLHDYPTNIKTRRKNTKRKKNDLTMPPQYYPALHQALEVHAELPLGR

SEQ ID NO: 154802 - protein, 232 aa, Oryza sativa
  Clone ID: PAT_MRT4530_54627C.1.pep
MASSSDPWMKEYNEASRLADDINSMIADRGSLPQSGPEIIRHTSAIRRKITILCTRLDSLEALLSKIPPKSLSDKELHKRQDTLSNLKSKTKQMATSFNMSNFANREDLLGQNKKAADDMSRVAGLDNQGIVGLQRQIMKEQDEGLEKLEETVLSTKHIALAVNEELTLHTRLIDDLEDHVDVTNSRLQRVQKRLAILNKRTKGGCSCMCLLLSVVAIVILAVIVWLLIKYM

SEQ ID NO: 154803 - protein, 146 aa, Oryza sativa
  Clone ID: PAT_MRT4530_54628C.1.pep
SYQLRRIPSDPNNSIIFMSLGERIWHALKRLEGRISSAAIHGMAAANMEANYCSVADMEGNKPDTPEARAKKQQLIRRRRQLYTHTPQARSPPASVLADPCLNQESYYYYHFRRTVRQEKEKLVVVASMREEAKRGEELRRRKDGR

SEQ ID NO: 154804 - protein, 63 aa, Oryza sativa
  Clone ID: PAT_MRT4530_54629C.1.pep
TGTAILNSTQRIGIMTETIADAGYHLVLEGNCPDDQLAGKWQQGRCQRRGQPKKTNGHPRIGP

SEQ ID NO: 154805 - protein, 143 aa, Oryza sativa
  unsure (1)..(143): unsure at all Xaa locations
  Clone ID: PAT_MRT4530_5462C.1.pep
CDLLYVATSKLFARYCDVCFFQSFYFIHILFLLFFFLFSFYFHFYLFFFFFFYYYFFFLFYSFFKYXFFHIFFFLFFFIYLFYFYIYFLFFLFIFIFDLFFILFFFLSLFLTLYYFLLFIFIYFFSLYLFFFTFFFLFVLTIS

SEQ ID NO: 154806 - protein, 283 aa, Oryza sativa
  Clone ID: PAT_MRT4530_54630C.1.pep
MSWHRAGVLLLGAQSCLPVPGFRPLAQFFPNSEEEFLEDEGFGMAGSVTRRGLDMTGFVLELRGMCVVLGYPHGVDYQARPLPEQEGDDAEPHAGWESAALLAIGTLYQRYPDELQHFAYRYPPRRGGAHDYATFRDASSEDDATLVHLACMVEAYDAARIDFHQMVRRGMVENNMKILELCQENLQLKKDLDAVEAQLHQLKIAQGEVCRPKRRRVCRSQKITARKSTSRPELVRQSLAWTCFVETPRAEPAPVVPQEGEASSVGSTEDALLLTFRPGPSQR

SEQ ID NO: 154807 - protein, 46 aa, Oryza sativa
  unsure (1)..(46): unsure at all Xaa locations
  Clone ID: PAT_MRT4530_54631C.1.pep
FERVIFRSPKKKKKKKKKKKKKKKKKKKKKTKKKKKKKKKKKNXXK

SEQ ID NO: 154808 - protein, 350 aa, Oryza sativa
  Clone ID: PAT_MRT4530_54632C.1.pep
MAHTILLLVVLLLSSTTTISTSKRTQPKFSAIFYFGDSVLDTGNNNYIPTLAVGNHAPYGRNFPGRKPTGRFSNGRLVPDLLNEKLQLKEFSPPFLEKDLSNNDIMTGVNFASAGSGFEDQTSRLSNTLPMSKQVNLFKEYLLRLRNIVGEEEASRIIENSLIFISSGTNDFTRYYRSLKRKKMNIGEYQDSVLRIAQASVKELFSLGGRQFCLAGLPPFGCTPFQITLSGDPDRACVDEQNRDAQAYNSKLEKLLPALQGSLHGSKIVYLDAYQAFKEILDNPAKYGFIEITRGCCGTGLREVGLLCNALSPICRNESSFVFYDAVHPTERVYRITTDYILKNAIPQFS

SEQ ID NO: 154809 - protein, 781 aa, Oryza sativa
  unsure (1)..(781): unsure at all Xaa locations
  Clone ID: PAT_MRT4530_54633C.1.pep
MVRCGGLCYARGIVTAPFRVCVPRLIPGRGFYAQISSEITSEFPGVTTHKRSSWKMKALVSSSCLPLSTCGRRPSLPLFPVCLCVCWAFAAHMAGSINRRGLDLTGFVLELRGMCVVLGYPHGVDYQGKQLPEQEGDDAEPHAAWEVTAVILTGSPERTSLAVTAGGDSFSAACQNAALLAIGTLHQRYPDELQHSPYRYHPRRGGARDYATFRDASSEDDATIMHLARMVEAYDAARMDFHQMVRRGLVENNMKILELRQENLQLKKDLDVVEAQLCQLKIAQGEVCRPKRRRVCRSLKITARKSTSRPELVRQSLAWTCFVETPRAEPAPVVPQEDGVSGVGSTEDALLLTFRPGPLQKRSAATGDGNQPVGSNHNNHGSPPPPPPPPPPPPLDTNTILTQIIAQRANMMAAFLHHIQNPPQHNAPPPPPQHSKLAEFLRIRPPTFSSSNNPVDALDWLHAVGKKLDTVQCNDEEKVIFAAHXLQGPASLWWDHFQATXPEGQPITWARFTASFQRTHVPVGVMALKKREFXELKQGNRSMMEYLHEFNNLARYAPEDVREDEEKQEKFLAGMDPELSVRLVSGDYPDFQRLVDKSIRLEAKHKELESHKRRLANFRNQQGANQRVRYTNPYPGGSSSQQQQQQQPRSTSRPQFVVHVPQPQQQQSQQGTRAPRPPTPAVQPVQGRRDAQGQQRLCFNCFEPGHFADKCPKPRCQQGQAPPRSNNGGKDVIRGRVNHVTAENVLTTPDVIVGTFLIHSIPATIFVTSQNDSKIHPLNYA

SEQ ID NO: 154810 - protein, 289 aa, Oryza sativa
  unsure (1)..(289): unsure at all Xaa locations
  Clone ID: PAT_MRT4530_54634C.1.pep
KVEKSGGKEKKRRGKGKKEKGGKKEKRGTRNGGQRVEGGGKKKVKESTNINEKRQGNRKGKGEAPKNRQRRTETPTRLRRLRRGGRGRRRLGDDDGGLPERRRRLERRAAHGLERRRPTAKLGXTALELFRRREAKAKGGGGKXEHGDPFKGARRRPSKAPRRRQTAKETSRXKRGTPYPESNXFQRFPKRFSRXFQREKGRGDPGRXFPSTNSAVEGKRRPDXWKGNGGGANXGFGSGGGSGKTNLTGGPHLSAAAGARAAADWAGWAEEREKRGFGPTFGPKPKEDF

SEQ ID NO: 154811 - protein, 379 aa, Oryza sativa
  Clone ID: PAT_MRT4530_54635C.1.pep
MLRRRRSSVGHAVLFFAAVALLESLAAQPWPKCGNGGTFTAGSTYETNLKNLALILRTNASSGSSPTLFASGALGSAPDTVYGLLLCRGDLSSSDCAGCGTNVSRDAVAGPTCNRTKDAILVYNECYAQFSDKGDFLAATDNSGEYSALQSGTNISSTDVAGYDRAVTELLNATVQYAVENSTRLFATGQRVGTDPGFRNIYSMAQCSPDLSPGQCRSCLDGLVDQWWKGFLFPRNGEGARVSGPRCSLRSELGPGPFYTGRPMVLLPVKADGLTPAPDVVPAITGVLHVLELIIFHCKNAVTVAIVAAISLCIWNVRKKRRLAKADSRPDRTEDFESVKSALLSLTSLQVATDNFHKSKKIGEGGFGEVYKVDVMEKD

SEQ ID NO: 154812 - protein, 34 aa, Oryza sativa
  Clone ID: PAT_MRT4530_54636C.1.pep
DEDQAATVMLCSHFTSFKLSVQIRSAQLQPGDQL

SEQ ID NO: 154813 - protein, 85 aa, Oryza sativa
  Clone ID: PAT_MRT4530_54637C.1.pep
KLLFVQPMDDKQFSKIHLSCFAASSLVNPGRASVCATLGTFRANLMRGFFSETTVLDLAVELITFASTKKAQDNFADTLLINYIC

SEQ ID NO: 154814 - protein, 107 aa, Oryza sativa
  Clone ID: PAT_MRT4530_54638C.1.pep
MANGHRPDRRRYRGRDGRMIRVGPAGREFAVAVLWLSCCAGGGDRRMREAVASAPEAVGKLLVVMQGDCSPSTSRMAGELLRAVRMEQERKGLAAAYDSRTIHVMPY

SEQ ID NO: 154815 - protein, 186 aa, Oryza sativa
  Clone ID: PAT_MRT4530_54639C.1.pep
IRSPRLPNRDNDEKSINIKQPWNTNIPYNFSINPIVKNAVSCHTEHDLHGNRKNQALIGFNFESVTNPCEAYCGRSTSSLDEFEVRSAMAVQSNAQASKQFDCSSKLLQSKTTSHAYLTSPGDISAQTNLLENPSGGAFWEKSLEYTAKSMEIAGDTTSSSDMPLDIAIDKCIIQEVLLQYKYVSS

SEQ ID NO: 154816 - protein, 105 aa, Oryza sativa
  Clone ID: PAT_MRT4530_5463C.1.pep
WYRFSFLKARRRKGTKRTVGLWGSDPSLVLVGGLRARMGCGEAFVLGLVLLSWSNTSSSCSPGGRSPVGVDDPRGGVTVAVPCPGMAQRGREDFWRAVARSRRRE

SEQ ID NO: 154817 - protein, 545 aa, Oryza sativa
  Clone ID: PAT_MRT4530_54640C.1.pep
MAGGGGRERRGGGRLLVGVLLLTLVVSGHCLESTHHRGLKRRRRKHEIHSPIKTVVVVVMENRSFDHILGWLSRTRPDIDGLNGTQSNRLNASDPSSPEIFVTDEAGYVDSDPGHGFEDIREQIFGSADTSAVPAPMSGFAQNARGMGLGMPQNVMSGFKPESVPVYAALADEFAVFDRWFASVPTSTQPNRLYVHSATSHGLTFNARKDLIHGFPQKTIFDSLEENGLSFGIYYQNIPATLFYQSLRRLKHLVKFHQYSLKFKLHAKWGKLPNYAVIEQRYFDCEMFPANDDHPSHDVARGQRFVKEVYETLRASPQWNETALIITYDEHGGFYDHVPTPVVGVPQPDGIVGPDPYYFKFDRLGVRVPSFLISPWIEKRTVIHEPNGPQDSSQYEHSSIPATVKKLFNLHSNFLTKRDAWAGTFENYFKIRKTPRTDCPEKLPEVTKSLQPFGPKEDSSLSEFQVELIQLASQLNGDHVLNTYPDIGRTMTVGEANRYAEDAVARFLEAGRIALRAGANESALVTMRPALTSRASPSSDLSSEL

SEQ ID NO: 154818 - protein, 641 aa, Oryza sativa
  Clone ID: PAT_MRT4530_54641C.1.pep
MDASIGDPRLTSVEAAFEKNPLPGFSWLVTPRAMAVAVLLGIVFCFVGMRIQMMTGFVPALNMPVTVLSFFLLKVLARQLQKWRLTVVPFTRQENMFLITCVITCLNLAITGGFATALTGMGTIVAKTLADDLDPRDIIDYIPTGKLIIYFFLIGMAGVLSNIPLNQIMIIDYQLLFPTGSVIGHLINSFHTPEGAYIAKFYIDFSATYIGVGMMCPHIVNFGLLFGAIISWGFLYPYLETKHGEWYQTDSPSNLDGLNGYKVFISVTLIVTDGLINFLILVTSAAINFYHIRQQQQQTSGLASYISKNPSMNYDERKRIEMFLSSKIPMFVPVAAYVAWTAISMVAMPAMFDQIKYYHVGVLYLAIPVVGFCNTYATGLTDWSVSNTYAKFSPFIFAAWIARPGAIVASLLVSGITMASLHVSSQAMQDLKSAHMTLTSPRAMIAGQVFGVALSSVVSPCIFRAFEKAAKPGAPLGSKDSVYPCPYAGLYRAICIIGMGGVKGLPKYCVELCVIAVLVTIAIDALVLVSQLKGWRLHLYIPSMTVIALPFFAGSYFTLDMCLGGLLLLLWKKIDTMSAEILSAAVAAGLICGEGLFTLPSALLNMFKVLPPMCMKFLPSGQEVEVVDSFLNSSGGTVPKT

SEQ ID NO: 154819 - protein, 146 aa, Oryza sativa
  Clone ID: PAT_MRT4530_54642C.1.pep
MGNWHNKQHMGISKIIRRQFIGVRMGKNNVYFFRGCGSPCARSPTLESPGDIYAMWALRPERSWGPRGLTQRVLGGGFAAAWVAVGGPRGGECWGPLVLVVLLCGAHSSMTRRTQLGGPVLVELDGSGCLLASNRGCYPRILSRGC

SEQ ID NO: 154820 - protein, 681 aa, Oryza sativa
  unsure (1)..(681): unsure at all Xaa locations
  Clone ID: PAT_MRT4530_54643C.1.pep
MDASIGDPRLTSVEAAFEKNPLPGFSWLVTPRAMAVAVLLGIVFCFVGMRIQMMTGFVPALNMPVTVLSFFLLKVLARQLQKWRLTVVPFTRQENMFLITCVITCLNLAITGGFATALTGMGTIVAKTLADDLDPRDIIDYIPTGKLIIYFFLIGMAGVLSNIPLNQIMIIDYQLLFPTGSVIGHLINSFHTPXRMQVMTIFKVFFGSFSWSIFQWFYSSGSGCGFSSFPTFGLELYKRRFYIDFSATYIGVGMMCPHIVNFGLLFGAIISWGFLYPYLETKHGEWYQTDSPSNLDGLNGYKVFISVTLIVTDGLINFLILVTSAAINFYHIRQQQQQTSGLASYISKNPSMNYDERKRIEMFLSSKIPMFVPVAAYVAWTAISMVAMPAMFDQIKYYHVGVLYLAIPVVGFCNTYATGLTDWSVSNTYAKFSPFIFAAWIARPGAIVASLLVSGITMASLHVSSQAMQDLKSAHMTLTSPRAMIAGQVFGVALSSVVSPCIFRAFEKAAKPGAPLGSKDSVYPCPYAGLYRAICIIGMGGVKGLPKYCVELCVIAVLVTIAIDALVLVSQLKGWRLHLYIPSMTVIALPFFAGSYFTLDMCLGGLLLLLWKKIDTMSAEILSAAVAAGLICGEGLFTLPSALLNMFKVLPPMCMKFLPSGQEVEVVDSFLNSSGGTVPKT

SEQ ID NO: 154821 - protein, 235 aa, Oryza sativa
  Clone ID: PAT_MRT4530_54644C.1.pep
MAEPEVVVAAGGEAMEAEAAEPAAANPSQKREREEGDDSAAGAAGEEAAEGAAAKKQKVEGEGEAKGAEDEAKGEEEEGAKEEEAKPVKLGPKEFATGVEMFDYFFALLHSWAPQLEINKVLMYEHMVLEDLLKKGHAESDRKIGAGIEAFEIRNHPVFQSRCFFVRRVDGSSDDFSFRKCVDSILPLPEDMKIGNKSNGKKGGGHFKGGGGRGGGRGGGRGGGRGFRGRGRRGN

SEQ ID NO: 154822 - protein, 208 aa, Oryza sativa
  Clone ID: PAT_MRT4530_54645C.1.pep
MAAALPRLCALALPFLAVAACLDVPSHGTPKLTNKCGHCKNKLDFGKEFVCCSDCSDPTILIKHRKMGYCKSGAELSMQLKPHEIYHWVAGPWMKCSSPCDGGVRYRDVACYGNLSDATIKHYPVDDASCSADEMPARQEACNEQSCGVDMAEQTNSRKNGMSGWLVALILLLGLGAIGGIVFTSYTYYLRRTSGRNGFVYVMMEAYS

SEQ ID NO: 154823 - protein, 175 aa, Oryza sativa
  Clone ID: PAT_MRT4530_54646C.1.pep
LCYGFKIIDILTSSAIARHTASLATYARNKMLELKHSNEKNVCIIYGQDFKANYLKMGPSITFNLKREDGTWFGYREVEKLASLSGIHLRTGCFCNPGACAKYVGLSHSDLVSNFEAGHVLWDDNDVINGKPTGAVRISFGYMSTNEDAEEFLKFLQSSFGATPAELNNGYMVNM

SEQ ID NO: 154824 - protein, 180 aa, Oryza sativa
  Clone ID: PAT_MRT4530_54647C.1.pep
TILTMPKASVISRRINGKLFYQIDCSIATTNHKRYNLAFFFFKYNGSVKARALLPRPHAARRPCLRAAPPATTPNCCAAAAHPRRAASNHAKPTLASNIRSKGGASLVRSSNEVGEGRRDGRRHRMVCGRGHRRRGEASQVEGKTGRGCEPPPRLREEEDEGGCGGGGCGPCRIPAARDP

SEQ ID NO: 154825 - protein, 88 aa, Oryza sativa
  Clone ID: PAT_MRT4530_54648C.1.pep
IWLEGLFAGGFSTGASSNQRWPGRGAVLTGAAGGFGKATAGELIRTGAKGILTDVNNNLGHAGGANFGPNATTARCNVANKAKVAAAA

SEQ ID NO: 154826 - protein, 58 aa, Oryza sativa
  unsure (1)..(58): unsure at all Xaa locations
  Clone ID: PAT_MRT4530_54649C.1.pep
FATGGGRAQLLRGLPLVGQEHRLQPXAERRLQHMVPVTVPRRRVQTPRRPPLLPLLLL

SEQ ID NO: 154827 - protein, 101 aa, Oryza sativa
  unsure (1)..(101): unsure at all Xaa locations
  Clone ID: PAT_MRT4530_5464C.1.pep
FXFFFXFKTSFPLXRTKXCLYIFSXXLACFXYNLXLXXIYNXXYYXXEKKXXAXHXXVXXXXXXNFTXIAXXVKXKXENXXRIHEAXHXNRLRXXQXXAFP

SEQ ID NO: 154828 - protein, 147 aa, Oryza sativa
  Clone ID: PAT_MRT4530_54650C.1.pep
HEDCAVRRASAVSLAADVLLVRLCSLSILGLLFRHLHISVPVDPLEWQISQEMANSIVASLANTIGAAESVWRVAATGHDKKLFFKVVFTLYFLAALGRVVSGAAVAYAALCIFCLYMFAQSTDLFDQLPSWVPVGRDSLGGSQDTT

SEQ ID NO: 154829 - protein, 131 aa, Oryza sativa
  Clone ID: PAT_MRT4530_54651C.1.pep
MKIHALLWKLKLEDLIIDVEGKFLLLANDPTEEKSKSHEMQIARVYRGVLVGALHTSTPIRIRPPPHSQRQGPWRRKREGERKGKGERKKIELAGAVAVDLGTVAWIGVATVPRPLAAGAGGASKAASSRL

SEQ ID NO: 154830 - protein, 118 aa, Oryza sativa
  unsure (1)..(118): unsure at all Xaa locations
  Clone ID: PAT_MRT4530_54652C.1.pep
WPRYCGXMVDFRRDWSLLSSXRCDXXDHVAWLPCXSIHVRXRRLXSXLASSLASLRSXTXAVTCPSRSXRFLXVXXLAIXSSTLSXIFCFALSFXSSSYRIEXLXCLXSFFRIRVVSF

SEQ ID NO: 154831 - protein, 177 aa, Oryza sativa
  Clone ID: PAT_MRT4530_54653C.1.pep
MAMRKPGDWSCRSCQYVNFCKREACQRCGEAKLGVERTDYAAMGGGWEVKPGDWCCRCCAVNNYASRGSCFKCGAAKNDSAAAVAQGWGFSVASQAGWKNGDWICPRMECNVQNYANRTECFRCNFPRYYGSDMINLGLSIGAFAYPEEQREEGPIGVALSPVLPFFLSLVPAWEKG

SEQ ID NO: 154832 - protein, 90 aa, Oryza sativa
  Clone ID: PAT_MRT4530_54654C.1.pep
CIPTTGACCRRRRLLRLARRRFSRPPSSSAGLRGRSQQEQDGRQASINRVRIRPREAEAVYGCVGRGAGWGVEPRLRRSHRGQHLRPRRG

SEQ ID NO: 154833 - protein, 236 aa, Oryza sativa
  Clone ID: PAT_MRT4530_54655C.1.pep
MGGDLYALDFDGVLCDSCGESSLSAVKAAKVRWPWVFEQVDAAMEEWIVEQMYTLRPVVETGYENLLLVRLLIEIRIPSARRSSVADGLSIQEILENWLKLKPTIMSEWNEDRDSLVDLFGSIRDDWIENDLSGWIGANRFYPGTADALKFSSSEVYIVTTKQGRFAEALLKELAGIEFPSERIYGLGTGLVQYFFYFLFSPVNHFIESVSLCSSPKVKVLQQLQQMPQHQGLTLQ

SEQ ID NO: 154834 - protein, 283 aa, Oryza sativa
  unsure (1)..(283): unsure at all Xaa locations
  Clone ID: PAT_MRT4530_54656C.1.pep
MGGDLYALDFDGVLCDSCGESSLSAVKAAKVRWPWVFEQVDAAMEEWIVEQMYTLRPVVETGYENLLLVRLLIEIRIPSARRSSLYQMFMPRLYCKVADGLSIQEILENWLKLKPTIMSEWNEDRDSLVDLFGSIRDDWIENDLSGWIGANRFYPGTADALKFSSSEVYIVTTKQGRFAEALLKELAGIEFPSERIYGLGTGLXPKVKVLQQLQQMPQHQGLTLQMKADRLATLKNVIKEPALDQWNLYLVNWGYNTPKEREDAEGISRIQVIDLPGFSQKLK

SEQ ID NO: 154835 - protein, 55 aa, Oryza sativa
  Clone ID: PAT_MRT4530_54657C.1.pep
PPLATRKRPLRTAPLGQKVLKMLQLRCVIYMHPPVFLGPVILSALVGVVPIIEAP

SEQ ID NO: 154836 - protein, 98 aa, Oryza sativa
  Clone ID: PAT_MRT4530_54658C.1.pep
NFPSFAPLFGGRRKRVFLPWKRCGFRIRPPPPSLIIKGGGKKLCGFFSPPKKKKKKKKKKKKNKKKKKKKKKNKKKKKKKKKKKKKKKKKKKKKKKKK

SEQ ID NO: 154837 - protein, 40 aa, Oryza sativa
  Clone ID: PAT_MRT4530_54659C.1.pep
MAKTMEQRQRRAKNRVGIPQGNFTMTSRASGRPKGISRSL

SEQ ID NO: 154838 - protein, 711 aa, Oryza sativa
  Clone ID: PAT_MRT4530_5465C.1.pep
MRLTAGPTPIIQLENEQWPVEMWSKTMLVVFINIVFIHCLSVNIGAAVANPAASDGRFVHHGFTAEDLTMDGLAAVTPTGLLALTNATYQTKAHAFHPAPLRFLNTSSSAAATVRSFSTSFVFAIVSDDPRFRNNVDHGLAFVVSPTKNLSTANAGQYLGLLSMADDGKPSNHVFAVELDIITNPEFGDIDSNHVGVDVNSLRSLQAKTAGYYVDGDGAFRSLQLNSQKPMQVWVDYDGQAKQLNVTLSPVQVPKPKKPLLSQAIDLSTVMAEEMYVGFSSATGVVFTHHYVLGWSFSFDGGAAPSLDFSMLPKVPRVGPTRRSVMLYVVLPIASALLFLVAFVLGVFFVRRWHRQFAEVREDWEVEFGPHRFTYKDLFHATQGFTDKNLLGAGGFGSVYKGVLPVSNTEIAVKRVSHNSRQGMREFIAEVVSIGRIRHRNIVRLLGYCRRKGELLLVYDYKTNGSLDKCLHDNATSTTLCWPKRIHIIKGVASALSYLHKDWEQVVIHRDVKASNVLLDSEMNGLLGDFGLSRLRDHGADAKTTYVVGTMGYIAPELMHTGKATPLTDVFAFGVFLLEVTCGRRPIGESDSNEILLIDWVLKHFLSGSILNVVDPRLAGRFSFEEVNLVLKLGLMCSHPLPKARPSMDKVVKYLDGMLPAPELSPTHMSYNMMELMLQNGVGSHSLPVWSSLLDNSVGTMSSASVLSDGR

SEQ ID NO: 154839 - protein, 142 aa, Oryza sativa
  unsure (1)..(142): unsure at all Xaa locations
  Clone ID: PAT_MRT4530_54660C.1.pep
SLLSRTRTPPPPPXAAPKNRTPPRQPLRCLTPIAISSPSRRSPLSPRVISSSVISQFPLTPISLRDRSPLSHRASAVLPPPPPPIVQRLFLSRSPSTAAAPSHPRSTPTPPSLQPSSAPHVLLRWSGSPSPSPYPTHESPRS

SEQ ID NO: 154840 - protein, 81 aa, Oryza sativa
  Clone ID: PAT_MRT4530_54661C.1.pep
MAVSIRVGGGGMEDGGVGEGVWRVYIPEVRWVRRGVWRLPVAMVAMVVGSGRSSARGVGASRVCASTALLLRYTLHYSLPL

SEQ ID NO: 154841 - protein, 73 aa, Oryza sativa
  unsure (1)..(73): unsure at all Xaa locations
  Clone ID: PAT_MRT4530_54662C.1.pep
MAEFPPXDDALVLQAKGGEVXKKIVEEEKPSAPVAEVNNTEVVEGPIKVKNPGVAKGAPKVKNSGGGKPIQSL

SEQ ID NO: 154842 - protein, 131 aa, Oryza sativa
  Clone ID: PAT_MRT4530_54663C.1.pep
MAAARAAVPIAVFLLLVLAEADPAAATRSPSAFVQNAIYSNRITIFSKTYCPYSMRAKRIFRDLKENPYIVELDLREDGREIQSVLLDLVGRHTVPQVFVNGQHVGGSDDTANAHSNGQLQKLLGNSQSQR

SEQ ID NO: 154843 - protein, 84 aa, Oryza sativa
  Clone ID: PAT_MRT4530_54664C.1.pep
EPHISYFFSFLFFRLFSSPFLSNLLDAQPAADGLVAAALLRQPRARLQAPAAARSPASRLSPLLRSTGCTLAAALLWPPAPEPD

SEQ ID NO: 154844 - protein, 56 aa, Oryza sativa
  unsure (1)..(56): unsure at all Xaa locations
  Clone ID: PAT_MRT4530_54665C.1.pep
AGPDDQTDVATTFPIKHTKYNSKSLNLSLATIIIQKGSHFLELHSLLSSSSSXKSS

SEQ ID NO: 154845 - protein, 192 aa, Oryza sativa
  Clone ID: PAT_MRT4530_54666C.1.pep
MVGPREPFMIAVIRTSHRKPHGRIFTLGEGSPLPIVREIAPSTSMKKEFGKACLGKKYLTKKQFCKSKKDQGTRIFWASLMLDKESFQRIGSFLIQDGSRVRFWEDCWIGVQSFEKEYPNLYSLVRNKNEMVAKVIFMGTLWARTWPLLLKGVDEEMVKSYCKLLEKRALEFFSMYGGNIRRILEACLEEQF

SEQ ID NO: 154846 - protein, 62 aa, Oryza sativa
  unsure (1)..(62): unsure at all Xaa locations
  Clone ID: PAT_MRT4530_54667C.1.pep
HLQLRSTTLLKRGNKSKTEYNHRTQXATPTMXMCKGIQGWFVAICIKAVVKHFIEQTSKTVE

SEQ ID NO: 154847 - protein, 299 aa, Oryza sativa
  Clone ID: PAT_MRT4530_54668C.1.pep
MGQQGGDQGDSRERGGERDLTRGEPTAADFDGDRRRRAKGENFTGATGVRFVGAGASTRGRELILPVERARATPREAGDGERRPGQSKGARRDVTNGGGRGAARDKGKGVQWGAHRRENGVGGADGVAARRTRRRGGAAPRGRGRGRRDGEVRGWGGAELLVDSSCSLALRHARRQRRARTTTNGEAAVVWRCRFERTDIGAVKEMRQVARAVKRHRGGDAGGGRGKGKRRGKGAWSLAIMRRGRVRRRRRGRAAASPTLGRVRRGAAGAMDDVGDDGGGRFVMERGQGGSAWRRRCKG

SEQ ID NO: 154848 - protein, 110 aa, Oryza sativa
  unsure (1)..(110): unsure at all Xaa locations
  Clone ID: PAT_MRT4530_54669C.1.pep
GVGGADGVAARRTRRRGGAAPRGRGRGRTDGEARGWGXGAELLVDSSWRCQFERTDLGAVKEMRRVARAVKRRRGGDAGGAMDDVGDDGGGRFVMERGQGGSSWRRRRKG

SEQ ID NO: 154849 - protein, 136 aa, Oryza sativa
  unsure (1)..(136): unsure at all Xaa locations
  Clone ID: PAT_MRT4530_5466C.1.pep
LSIESAAASAFWEAIMGKLFMVLENQYNKHKVLEQEISSLQQEFRMIAAVMDDQLLSMGRSEDCTSVAWLHNEEMLDLEHDIEDCVDRFMHLLTCKHHRGGVRQMAHEVIVIDSVSCCDSLVGIRQPMEEXLSLLR

SEQ ID NO: 154850 - protein, 520 aa, Oryza sativa
  Clone ID: PAT_MRT4530_54670C.1.pep
MAAGVLDAGGAVPAAAYSGELTLSVLVTCLVAASGGLIFGYDIGISGGVSQMKPFLATFFPKVLMRMADAKRDQYCVFDSHALTAFTSSLYVAGLVASLAAGRVTRWLGRRGVMLMGGALFFAGGAMTGGAVNVAMLIVGRMLLGFGVGFTNQAAPLYLAEMAPPRFRGSLTVGFQFFLSLGILIANLTNYGTARVPWGWRLSLGLAGAPAVFIVVGAFFLTDTPSSFVMRGKVDRARAALLRVRGHRADVDAELKAIVHAVEAARGSEDVGAFRRLVTWREYRPHLTFALALPLCHQLSGMMVLTFFSPLVFRVAGFGSNAALMGAVILAGVKFASLILSTLVIDRYGRKVLVIAGAALMIVCQNYCCFVIKVANAWIMGAKSGKHGEVAMPRAYSVALLVLTCVQGAGFGMSWAPLIWVIPGEIFPVEVRSAGQAVSVSVTLGLTFVQTQTFLALLCRLKYATFAYYAGWVAAMTAFVLVFMPETKGVPLESMGAVWAGHWYWRRFVGGGDGKPEQRR

SEQ ID NO: 154851 - protein, 375 aa, Oryza sativa
  Clone ID: PAT_MRT4530_54671C.1.pep
MESRRGGRDGGAAQRREGVAGEEEMERREDGGGAELLIDSSWRCRFERTNLGAVKEMRRVVRAVKRRRGGDAGAASPILGRCGVEWRGPWMTSAMTAAVSLSWSGGKAAARGVGGARADGGGVRPVGHLASERARDAGPEINQRMAGEGDDQLKLLGLWVSPYTHRVKLALSFKGLSYEYVEEDLSNKSELLLSTNPVHKKVPVLIHNGKPICESQVIVQYLDEEFPNSGVSLLPSDSYDRAIARFWAAYINDKLMPSWLQSSMGKTEEERAEALKQTLEAVANLETAFKECSKGKPFFGGDTVGYLDVSLGAMIGWMRAGEALHGRRTFDATRSPLLNAWMERFAALDAAKAAMPDNNKLVEFVRVRRAAAANN

SEQ ID NO: 154852 - protein, 70 aa, Oryza sativa
  Clone ID: PAT_MRT4530_54672C.1.pep
TLYPNNPSIPLRTLVILVSWEIWCERNARIFRNIASTPMSIIAKIKEEARAWVKAGASKLQEFGILGDIT

SEQ ID NO: 154853 - protein, 221 aa, Oryza sativa
  unsure (1)..(221): unsure at all Xaa locations
  Clone ID: PAT_MRT4530_54673C.1.pep
RTTFSTTKSKEMGKRRHQKPDRNASPSRSPPAARSACTPCARSGGGGGASLPFTPGGWGCRSAATVVPRSAMAGRIWGSGSRRRGMKVAAVDDAMWEIWGSGSRRRGRKVAVVDDVAVPELAAAAGGDCSXMASASVTAAADGGXAAGEEAAGGEAAAAMMTAEAVTVVAATDALAGDEAAAGELWWQPDGCCGGSCGGRSRLAAASPVLTFSRFCVLTLS

SEQ ID NO: 154854 - protein, 167 aa, Oryza sativa
  unsure (1)..(167): unsure at all Xaa locations
  Clone ID: PAT_MRT4530_54674C.1.pep
GGGRGAACDRGKGVQWGAHRREXNGVGGADGVVARRTRRRGGXGRGRRDGEARGWGXGAELLVDSSWRCRFGRTDLGAVKEMRRMARAVKRRRGGDAGGGRGKGKRRGKGGWSFAILRRGGAAASPILGRXRRGVAGAMDDVGNDGGGRFGMERGQGGSAWRQRRKG

SEQ ID NO: 154855 - protein, 133 aa, Oryza sativa
  unsure (1)..(133): unsure at all Xaa locations
  Clone ID: PAT_MRT4530_54675C.1.pep
GGAELLVDSSCSQAPQHARRQRRARTTTNGEAAVVXWRRGSERYGRGCGFYRWRCRFERTDLGAVKEMRRVARAVKRGRGGDAGGGRGKGKKEGGGKKGVGPWAMDDVGDDGGGRFVMERGQGGSSWRRRRKG

SEQ ID NO: 154856 - protein, 123 aa, Oryza sativa
  unsure (1)..(123): unsure at all Xaa locations
  Clone ID: PAT_MRT4530_54676C.1.pep
MGTTSKTMHPQPTMADVIKEGAAPTCPTHGSAAQGGGPRWTGSTDREGDGAPRGAHVAPTCRTRGGTGSHAGGGIGRPRSTYGPGSSRPDAHGARRRGSTXGGDRPTAEGGSVAATRTALAAA

SEQ ID NO: 154857 - protein, 583 aa, Oryza sativa
  unsure (1)..(583): unsure at all Xaa locations
  Clone ID: PAT_MRT4530_54677C.1.pep
MPPKKAKPSRGGGAAEDRLSALPDAVLHHVMSFLRAWEVARTCVLSRRWRHLWASAPCVDLXVWGGGGHLPPPERLARFAYRLLFEREVSAPVDILRVMSSPDGEGEEDYTTSDVQTWIRAAIKRRARVIQLTDHPMDEAFFNLGFVPIISCHLKHLKLSGSLLWNTTLMQLSSQCPALEILELKKCSLHGHEISSTSIVTWYQSKSKGSNPNVDPESTPARRWQLATGEPIQSVHILVSFVVHHRRAVNRGSQSFRRSSTSSKQIQSAQATSSIKQSNPQASSGCMNKHSDPVLRHHVSRSQAVLVADLVVASRRGSSLSPHSHWPVAALSSSPPAPSSSHVSRPAFRPPPARVTICIVAAQYKDFDEDAIDGINSDDGEGCTSDSDYDDSDANTCEYSEIADDYDDEKQRQEHCEGHNPIDDYDDENQHEEHGEEHNQIGLDEVLGGHNVLHILSNAEILELLADGGEVILNRALKTCPTFRNLKTLSLGEWCMGADFDPLVTFLQHSPNLERLFLELKLGFPPDHSNVKLEGGCREEAAPVSSEVQSICADHAGSTACDASFEYIGTKYIWLPECENDLI

SEQ ID NO: 154858 - protein, 165 aa, Oryza sativa
  Clone ID: PAT_MRT4530_54678C.1.pep
STGKCISSTVELENMLLQILEDHFDEGNSLDSTIDIEAIYPSPEKRFIQVVQLTKQIQRQRHHHLRRSLHCAAGAMSLLSNSLLLQGRLRHAAASAVAAAAMGRRGVATSTEEYNRRNYANNISEYNTVFGSLTAQRRHTLEVLLDMLIKDGFTYDAFIAMQAMR

SEQ ID NO: 154859 - protein, 46 aa, Oryza sativa
  Clone ID: PAT_MRT4530_5467C.1.pep
GILPVSACVSRHDLMGPAREPMPRWLPRLCPSLYTRDSETFKRAAG

SEQ ID NO: 154860 - protein, 119 aa, Oryza sativa
  Clone ID: PAT_MRT4530_54680C.1.pep
MDEKTLREFAAPSADNVHVRPRVSVGDVDFDLKTSLITMALASPFCGKPNEDSSAHLQPFLEICSTLAIDKLELAVGYTIELALTRGSKAHTGDVLCFCPYGHTPIYPLCIVLTYTFVI

SEQ ID NO: 154861 - protein, 33 aa, Oryza sativa
  Clone ID: PAT_MRT4530_54681C.1.pep
MTGFRCSQPCADVPVPVQRVSSRIRAAPSNPLV

SEQ ID NO: 154862 - protein, 54 aa, Oryza sativa
  Clone ID: PAT_MRT4530_54682C.1.pep
TEVAVFIGGYFRVALITEFFLEFIYANIEVFSSLHYSFWLNHHNPVTILNPIFY

SEQ ID NO: 154863 - protein, 79 aa, Oryza sativa
  Clone ID: PAT_MRT4530_54683C.1.pep
MGSTEHPIPAQSPACPTVSEGGSAAPAPATDSKPKKKICCACPDTKRLRDECIVEHGESACTKWIEAHKRCLRAEGFNV

SEQ ID NO: 154864 - protein, 88 aa, Oryza sativa
  unsure (1)..(88): unsure at all Xaa locations
  Clone ID: PAT_MRT4530_54684C.1.pep
MKPIQAGSGCGAPAEAREQRPACEVERRRWHLIFVPEAQTGYDPSPNLRKPDKQGPLAVLAGVAPTWLXLARSSSDVALMWQSDLGIL

SEQ ID NO: 154865 - protein, 65 aa, Oryza sativa
  Clone ID: PAT_MRT4530_54685C.1.pep
MKPIQAGSGCGAAAGGREQRPACEVERRRWHAKPDMTHPPTCENRTNKVPWRFWLAWRPRGYFGS

SEQ ID NO: 154866 - protein, 184 aa, Oryza sativa
  Clone ID: PAT_MRT4530_54686C.1.pep
DPTSLPDWLWNFSSSITTLDISSNSITGHLPTSLVHMKMLSTFNMRSNVLEGGIPGLPASVKVLDLSKNFLSGSLPQSLGAKYAYYIKLSDNQLNGTIPAYLCEMDSMELVDLSNNLFSGVLPDCWKNSSRLHTIDFSNNNLHGEIPSTMGFITSLAILSLRENSLSGTLPSSLQSCNGLIILD

SEQ ID NO: 154867 - protein, 82 aa, Oryza sativa
  Clone ID: PAT_MRT4530_54687C.1.pep
LLLHVSHTQPENPGAAPGRASPAWPGLGTWLWLGQQPPAPVWAGGERRCVGGATGLRLAPSLSVCFGVSLVQALTVCLRSEI

SEQ ID NO: 154868 - protein, 51 aa, Oryza sativa
  Clone ID: PAT_MRT4530_54688C.1.pep
HKYMAVQSSTEPPTLGRLAVRDTRHTVSEVVTLVLTNKIPIVCRCVHLNSL

SEQ ID NO: 154869 - protein, 648 aa, Oryza sativa
  Clone ID: PAT_MRT4530_54689C.1.pep
MGLLRRGSSGGGAVLVVVVCVGCIAATAMAAAAGGGGGGGECPKYKDSKQPLNKRIDDLLRRMTLAEKIGQMSQIERENATFDVMRNYFIGSVLSGGGSVPAAQASPAAWVSMVNEMQRGAMATRLGIPMIYGIDAVHGHGNVYKATIFPHNVGLGCTRDPDLAKRIGAAVAAEVRATGIPYVFAPCVAVCRDPRWGRCYESFSEDPRVVQRMSSIISGFQGEIPPGGRRGVPFVSGGRPSVAACSKHYVGDGGTTRGMNENNTVATLRELMTVHMPPYYSAVAQGVSTVMVSFSSWNGVKMHANHFLITDFLKSKLRFRGFVISDWQGLDRITTPAHADYMLSIKLGIMAGIDMVMIPFTYTEFIDDLAALVKNGTIPMSRIDDAVRRILRVKFTMGLFERPYADLSLAGELGKQEHRDLARDAVRKSLVLLKNGKPGDAPLLPLPKRARSILVAGAHADDLGSQCGGWTITWQGLAGNDLTAGGTTILDGIRRAVDAATEVVFAEAPDAGFMRRNAGRFDAAVVVVGEPPYAETLGDNLNLTIPAPGPSVIQNVCGGGVRCVVVVVSGRPLVIEPYMDAIDALVAAWLPGTEGQGVSDVLFGDYEFTGKLARTWFRSVEQLPMNVGDEHYDPLFPFGFGLETRKAN

SEQ ID NO: 154870 - protein, 252 aa, Oryza sativa
  unsure (1)..(252): unsure at all Xaa locations
  Clone ID: PAT_MRT4530_5468C.1.pep
RHCSASGCLCRVSSCAPADVATTSGIAAASRRRRPRHRLPSIRTPPRSVVVVTVRPRRRRPVGRXLVVSLRRHRRRHRSGVFRAVLASVQLLPAALVASPPAPVVVVLSSFPVVVAFVAPSSRSRPSSAFRQVSRCSPVVVFVLGSASSSVAPAASRLRARITAEVVPSSFVSAAPVRCHHSHASSRDGKDLSFAAPVLVLSVSPHPYCAVVDPGTRVPVSVVVHLFPKRGSRSSPKVRKAVLFEQGKSHHP

SEQ ID NO: 154871 - protein, 83 aa, Oryza sativa
  Clone ID: PAT_MRT4530_54690C.1.pep
MPTTAPCAKTGVAKVQPSKAPPAVSSHTAHMTTQRTRTCVTSHRPKTLKTFRGPSFLRARSLGRPKLVQPQCLKSPPTTVCAL

SEQ ID NO: 154872 - protein, 88 aa, Oryza sativa
  Clone ID: PAT_MRT4530_54691C.1.pep
MGPTTPPSLPISIPLKPLPPPHECTLSLVVAPPPPPPSLGSGHPNLKTGCAGARGRAPALEHYDKHLAGDAVGTDGARHRAEASEMGG

SEQ ID NO: 154873 - protein, 56 aa, Oryza sativa
  Clone ID: PAT_MRT4530_54692C.1.pep
LYIGIVQSKNMVIRSHHILYIYTPCRSQALQGAARSPWGAGDLVASIPGRCGTPRP

SEQ ID NO: 154874 - protein, 538 aa, Oryza sativa
  Clone ID: PAT_MRT4530_54693C.1.pep
MAGMEDTLQALNDLISQFLCLNRPLWSSSDDADAFLEAVDELTSTIHSLESMSADHILLESFDHLLERCSLRLGEELQHLIDASGFDTNCSYPNTRKSHDDDDDRHTLVAQPVSNFDIIVDALPEGVIFEANRIAKRMVAAGFGDSCAETYASSRLNFIDESIARLGVHAHMAEMFKSASWEELEIQIMCWIPAIRVVFHILIPSERHLCDSIFEGFTSYSDVAFVTACHPFLQLLSFGNFIAAAGKNPECLFRIVDMYDAVRDILPVLDDAFNPEVAALRECLGLSIKAILMALENLVRRDPSESCPLDGGVHPMTRYVMNYLVTACVSRHTLEEVRLLEFGSSDPSGNCPIEPDRPTSSLAIHLAWIVDVLTGNLVSKSKVYSHAPLSCVFLVNNGIYIIKKVNGCELKVLLGEDWIKVIHSKVNQWILEYRRATWGKAIMILEMDKRFCSNVNVITEKLSRFNNFVEAICQVQSRWVLVDKQQGVDFSILVEELVIPAYRDMAEMLKATGSAGESYMRLEDVRSRIQQLFKAMTR

SEQ ID NO: 154875 - protein, 118 aa, Oryza sativa
  unsure (1)..(118): unsure at all Xaa locations
  Clone ID: PAT_MRT4530_54694C.1.pep
GGXGGXXAXPFXGCDSLMRCXRFXDWKXQXRKQLXGVXXSLGTXGLTLXASXSXCXGELXADNNFTQEXXXTXXTPSWKLTXIXGNKXXSSXAVAPVXELVXPPXCRIXXEKCCCFKL

SEQ ID NO: 154876 - protein, 355 aa, Oryza sativa
  Clone ID: PAT_MRT4530_54695C.1.pep
MDDGAAAAAAAGRETTKNKKKTVCVTGAGGFVASWLVHRLLSSGDYVVHGTVRDPSDAKNGHLREMDYGAGERRLRLFKPDVLDRASVAPPVAGCAGVFHVASPVPASKPHNPEITLETKPGRNVAEVLAPAVAGTRNVVEASHEAGVPRVVVVSSPAPVILNPAFPRDAVLDEDAWSDEHYCRSIENWYCLSKTLAEREAWRFAADNAAAMDVVTVCPPLILGPLLQSTVNTSSSILINLIKGGGGDDEEKAATTDKRRNVVDVRDVAAALILTYENPAASGRYICSAYDIKVSEMVDIVRRFFPDINYPKFVGGEDERILSSKKLQKLGWKFRTVEECLRDSVQSYKAAGILK

SEQ ID NO: 154877 - protein, 52 aa, Oryza sativa
  Clone ID: PAT_MRT4530_54696C.1.pep
GKNLGHLILPRVTQSLQLETRKTLSVTSSRTGKHYSLLPTSLQAIWETHWVV

SEQ ID NO: 154878 - protein, 47 aa, Oryza sativa
  Clone ID: PAT_MRT4530_54697C.1.pep
KYPDVDMWSSHSSLYTLITRPSSIVCLIIKHMIRFMCASLHFSHPVF

SEQ ID NO: 154879 - protein, 65 aa, Oryza sativa
  Clone ID: PAT_MRT4530_54698C.1.pep
GVAPLTRRRDGLVRIGCAGGAERAAVRSREAADACGRGVHKRKDPIKGRHSVKHRTGVAKEIRYD

SEQ ID NO: 154880 - protein, 98 aa, Oryza sativa
  unsure (1)..(98): unsure at all Xaa locations
  Clone ID: PAT_MRT4530_54699C.1.pep
PASAMFXHGSGFFRPGAIGHRGKGPPRGTLAETTLADXPVQTTXXPGRYXXPTXRSPXXVKSGGNRSLAVGVNCGWNGXCGQRVRCLWVGEDGFSATR

SEQ ID NO: 154881 - protein, 381 aa, Oryza sativa
  Clone ID: PAT_MRT4530_5469C.1.pep
MARHRHRLAAAAALLLLLLSSAAALSSSAAEGEEDPLIEQVVGGGEEEDAQLDAEAHFASFERRFGRTYRDAGERAYRMSVFAANLRRARRHQRLDPTATHGVTKFSDLTPGEFRDRFLGLRRPSLEGLVGGEPHEAPILPTDGLPDDFDWREHGAVGPVKDQGSCGSCWSFSTSGALEGAHFLATGKLEVLSEQQMVDCDHECDASESRACDSGCNGGLMTTAFSYLMKSGGLQSEKDYPYAGRENTCKFDKSKIVAQVKNFSVISVNEDQIAANLVKHGPLAIAINAAYMQTYIGGVSCPFICGRHLDHGVLLVGYGSAGYAPIRFKEKPYWIIKNSWGENWGEKGYYKICRGPHDKNKCGVDSMVSSVTAIHTSKKEE

SEQ ID NO: 154882 - protein, 131 aa, Oryza sativa
  unsure (1)..(131): unsure at all Xaa locations
  Clone ID: PAT_MRT4530_546C.1.pep
INASGAGCASSGMSCAYNLSRDRSARVSAIXHLRTSSAGPGIGCQLFSAREAHKPAHWSLDKIRLSCRAWAACSIMXHAWILSATAMRLLLRRCNVKLSNARADRTSHERRTCRGKRINQPLVRLKQQTAR

SEQ ID NO: 154883 - protein, 49 aa, Oryza sativa
  Clone ID: PAT_MRT4530_54700C.1.pep
VLNGRLDYPGVGPEHSFLKDIGRAEYDSVTDQEALDGMCFSVTIYGSLL

SEQ ID NO: 154884 - protein, 513 aa, Oryza sativa
  Clone ID: PAT_MRT4530_54701C.1.pep
MDAAAGKTFFSNMVRGATNLIEKMISNIGWSKERLLTHQRGMHTIMETEMLAAKLDLLKKRLDNSEKYAKQGTVKALGSHMTWNITYEPKPTEHEEGQSKTLTDSLIDFMVNFLEREETRIRRYLKLAFKKPGIQAGQPAFPVSKRSPTAPKTKKVWRVKEKAPVPVSLEPAMKKQFSGIFKRGSSTQLRRHDEPSTPSSADTSMEEADVPPRLYDNSDLDLMGDRELQAYYMLKYRMLAHTQAYDLDLLKRIADVQIVRKDELILLYAMVKRIKVSPVQCMISQWLENIRLTGPVECTSLVTRLACRVGALINMQVSYITTPRSYVDEAYLVQGHILKHGPNDTLVFFFLGYTNEIPLPNPGFYLYNCQELTISLQEELYRDVPRRVTRRMAIEAPQEASSSSPPVRMYRDSWDPTADAPGWTKVLQYDAGVSTWQSASDNRCSSGLPPASRMRRSVSSRGDLGELTQRMGILELQTGSMQHTLEGHVVQTREWQQSVDAQLANLNTTMQQQ

SEQ ID NO: 154885 - protein, 648 aa, Oryza sativa
  Clone ID: PAT_MRT4530_54702C.1.pep
MDAAAGKTFFSNMVRGATNLIEKMISNIGWSKERLLTHQRGMHTIMETEMLAAKLDLLKKRLDNSEKYAKQGTVKALGSHMTCKVCGNDGHSGTDRPETHKDVMFMNNNNGIVHKEMKDEHEEGQSKTLTDSLIDFMVNFLEREETRIRRYLKLAFKKPGIQAGQPAFPVSKRSPTAPKTKKVWRVKEKAPVPVSLEPAMKKQFSGIFKRGSSTQLRRHDEPSTPSSADTSMEEADVPPRLYDNSDLDLMGDRELQAYYMLKYRMLAHTQAYDLDLLKRIGMDAEFHTVWRALGWDKFACVDEPVGDGVNFRLFCKEYHLSWKDLSLHLGFDKTCKVNFSNAFPNFNKRMFWQSILGLPFCKKPRTNDTHNPTLRLMHKWLGFTLFPRADVQIVRKDELILLYAMVKRIKVSPVQCMISQWLENIRLTGPVECTSLVTRLACRVGALINMQVSYITTPRSYVDEAYLVQGHILKHGPNDTLVFFFLGYTNEIPLPNPGFYLYNCQELTISLQEELYRDVPRRVTRRMAIEAPQEASSSSPPVRMYRDSWDPTADAPGWTKVLQYDAGVSTWQSASDNRCSSGLPPASRMRRSVSSRGDLGELTQRMGILELQTGSMQHTLEGHVVQTREWQQSVDAQLANLNTTMQQQ

SEQ ID NO: 154886 - protein, 190 aa, Oryza sativa
  Clone ID: PAT_MRT4530_54703C.1.pep
MCQDQCECWQNRTEQCDRDKANIYNVGGVGDGDQSKYVFQVTDGSISSSRARASWNPCLMGDATRRDVWRCELRDSATHAHTVGDASDQTCALSQSRVYLSLPRHHRSTRTHAPNERRISQRQCAQKPDRSIAVVLVAVVVTDVSPATAPGVTATGDTPVLRSRCTPTTLNFSATTVLCYNYSLLHAMQE

SEQ ID NO: 154887 - protein, 137 aa, Oryza sativa
  Clone ID: PAT_MRT4530_54704C.1.pep
MGAASEERTFPIRRSAQFIHRGDEHHQTPPEHEQVPNTNGALRVTNGRRRRRGGTAEVRSSFPPLVEASGVEALTGGAGGAVPSPSPEKGTEAVRGGGLGRGQEGSAEESETMEWSFRKLGWLLLAQDKVVEFRLGP

SEQ ID NO: 154888 - protein, 128 aa, Oryza sativa
  unsure (1)..(128): unsure at all Xaa locations
  Clone ID: PAT_MRT4530_54705C.1.pep
LIGHRLPSQTNTCSRXRISRSVTHPKLLGKNFPVDHPSQIALGQARLTLSFFGDRLPEKKLXLVNMSILLILLSPRPGCYTLTPLREIDAPVDQPQARNVPSWPCPCVQCQRMCHAVTTPGPQQPCAP

SEQ ID NO: 154889 - protein, 172 aa, Oryza sativa
  Clone ID: PAT_MRT4530_54706C.1.pep
TRVAYYCAKPSDECQMSALAGALDFVKDNREWICWLCPQCEMTFLTAKTFQSHVEDDEFSRSQEFKEALLFVPERISDEQTEFIKCWTLPSDVNPTEEAEGEKILTKIKSTFQYLKDQKALSVDLFDNLIKFTKNRIEEAVTQNYSCITSLDPGGLLLLGTYLDLLRLRVGD

SEQ ID NO: 154890 - protein, 463 aa, Oryza sativa
  Clone ID: PAT_MRT4530_54707C.1.pep
MGGRSAKETTFLTYCQQVRQSRERKMWSESSGMKALAGELGDEGELGARRARRGEEVQRRFRLLWKFRCVKWNFSHMEVQLMDWMVNTKGMSMTYARYALHLELLYSVYGIEAAEEYFSGIPSFTRDQNHRTYGALLNCYCSAKMEEKATNIYRRMDELGIPSSTKLMNNLMGLYLELGQHSKVANLFDEMKERNVQPDELTCCILMRSHAAHNKIDTVKETFYNMSLLDVPKQWSIFRTLGSIYMNAGMVEEAELAFMRAQEFLGFDHGRHPFYFLMRQFASIGNLRGVNRVWKDIKMTFSYNRTNFSYLLMLQCLYKLGDTDRMKEIYKEWEYRYENYDPRLTNMLTRAHLRNGMTNEAELLWEKVKERGGDFDFETCELFREHYLGKGDTTSALKWAEKMTKLPKKQGKQDQETCKFLKWFEEDKVVEGAKSTCNCSNCLRNADSKTCEPLLAPADLLPD

SEQ ID NO: 154891 - protein, 384 aa, Oryza sativa
  Clone ID: PAT_MRT4530_54708C.1.pep
MGRIGREKMSKGGCGVRVVILGGGSVQVIVPDGGGVDVQEEGKYQKENKEQEYLEAMIMAAHVAAAAPRLLACRWNRVAPLPTSPSRRPLQAQAAARMDRPRHAVVVRCKKKKKGAADEPAGEPGLEEGGDPHQSPSYQQYRKFQDVIDQLQQCAAELRARRSLKKDNMDDTPFNYEINKIRGYWTEIHSAKISYLDGQGRMLTMTLLLRAKDAIELASRIMTEAHLRAQTPSEISLHTVDQTVRMYVSTFVKTAEDTYHRKVDRATILSFLCALQGLAAVSHILFEDALAFVRSSQPDYSPNHDVEVINRYYQQEIKRLINNFREASTTEALEILHSTVNDLTQKVASYVTKMTTLRKSTLAHVPGRSIAYCDAAPPDDRQNE

SEQ ID NO: 154892 - protein, 166 aa, Oryza sativa
  Clone ID: PAT_MRT4530_54709C.1.pep
MTNSDRKERRVLEQQLSFMIMEEKLKWYQRSKVKEILERDCNTKYYHAKANGRRKNQIHSLSQEEENTMNFDMGGASTVSEEDKARLIQPFSLEEIKTVVFDLKHNKAPGEFYAKFWDLIKLDLLDLLNDFHKGILDVERLNFGIITLVPKTKDAVQIQKFRPICL

SEQ ID NO: 154893 - protein, 124 aa, Oryza sativa
  Clone ID: PAT_MRT4530_5470C.1.pep
TRVEPINDVDSEKNKVSSLQACESVSAANLLKFHLRPYAQLGLDRSSIPSLTTYGDIVDELLSEIPEIKEVPEQISKFWQSNSVGKHMLMVEEPWITENSSVCNFVDENSNSEQVAGESTQRTL

SEQ ID NO: 154894 - protein, 141 aa, Oryza sativa
  Clone ID: PAT_MRT4530_54710C.1.pep
MKASRSPDVAVPHGLVAEEDEVDPADEEFFQEQVGYDDCELGIYPQPNMTVNLERHGQVPFGASSGRDKNLSRDAPCKIDIGCSILSHGEATGTRDREEGCGGGASLAVCSSCAHTEARGGGERGYRPWGKVRKEMRKEAS

SEQ ID NO: 154895 - protein, 770 aa, Oryza sativa
  Clone ID: PAT_MRT4530_54711C.1.pep
MSNVPLLLLLVVASAGAGDGAAPASNARPCASPAASAYPFCNATLPFPARARALVSLLTLDEKIAQLSNTAAGAPRLGVPPFEWWSESLHGVCDNGPGVNFSSGPVRSATIFPQVILSAAAFNRSLWRAAARAIAVEARAMHNAGQAGLTFWAPNINVFRDPRWGRGQETPGEDPAVVSAYSVEYVKGFQRDYGEEGRMMLSACCKHYIAYDLEKWRGFTRYTFNAKVNAQDMEDTYQPPFKSCIQEGRASCLMCSYNQVNGVPACARKDILQRARDEWGFQGYITSDCDAVAIIHENQTYTASDEDSIAVVLKAGMDINCGSFLIRHTKSAIEKGKVQEEDINHALFNLFSVQLRLGFFDKTNENQWFTQLGPNNVCTTEHRELAAEAVRQGTVLLKNDNGFLPLKRSEVGHIALIGPAANDPYILGGDYTGVPCHSTTFVKGMQAYVPKTTFAAGCKDVPCNSTDGFGEAIEAAKRADVVVLIAGLNLTEETEDHDRVSLLLPGRQMDLIHTVASVTKKPVVLVLMGGGPVDVSFAKHDPRIASILWIGYPGEVGGNVLPEILFGKYNPGGKLPITWYPESFTAVPMDDMNMRADASRGYPGRTYRFYTGDVVYGFGYGLSYSKYSYSILQAPKKISLSRSSVPDLISRKPAYTRRDGVDYVQVEDIASCEALQFPVHISVSNDGAMDGSHAVLLFASSKPSFPGSPIKQLVGFERVHTAAGRSTDVEITVDPCKLMSFANTEGTRVLFLGTHVLMVGDEEHELLIEA

SEQ ID NO: 154896 - protein, 124 aa, Oryza sativa
  unsure (1)..(124): unsure at all Xaa locations
  Clone ID: PAT_MRT4530_54712C.1.pep
MGTTRTTQIVSILIFLVLLGQGDTYGYKYKTPXEERGHGQHRRHKATSQYKPTYAKTSCQISTSELSLVKPHMVPTGTKERNLALSLISPGMDSRRKITLLSTTRXYFSPLCRXQLDRLPQILY

SEQ ID NO: 154897 - protein, 35 aa, Oryza sativa
  Clone ID: PAT_MRT4530_54713C.1.pep
YVMIGNYLVSNKQNFKDMGNLREARHMIHNLQDRA

SEQ ID NO: 154898 - protein, 310 aa, Oryza sativa
  unsure (1)..(310): unsure at all Xaa locations
  Clone ID: PAT_MRT4530_54714C.1.pep
RRQISLHLDLSPSRRPPRDAAPRRRRATPTPRQAAXRHATPPPSPARAQCRRRHATPPPXRRATPPPHANATPPPXRHAAAAVDTPPLPSPPRQPAARCRHTAVNERERERSNERERERTRQRTLPRERVRERERSNEQKTCCRSRLSSRSGRASPRRNWSRQMADRDEEQILYDTIAEGSSQYWNEEEGNEDPNQYLNEEGNVERDAEGNQQGHVERDVEGNQEEEASGSQPSVEQKRARGQRGAAKKLEGRHIITEVEEDGRPSAPAEAAKNYVRHSDWVVRDNGPFIPGYWXKTRARRKHERLAPIL

SEQ ID NO: 154899 - protein, 70 aa, Oryza sativa
  Clone ID: PAT_MRT4530_54715C.1.pep
MGAKTELHLKDLEQLGNFMIKATHWLRCPPIELLHRHDPRAKKEKTELHQKDLEQLGNYMIKGGGHGSKE

SEQ ID NO: 154900 - protein, 86 aa, Oryza sativa
  Clone ID: PAT_MRT4530_54716C.1.pep
IIQRGELHHLHLAESPSEDSPDWLILGEVKSKEEICLQFYYISATRQSSIQNVPEPLEEEWQLVAKTVYNLTRSCLASSRSNSLTH

SEQ ID NO: 154901 - protein, 71 aa, Oryza sativa
  Clone ID: PAT_MRT4530_54717C.1.pep
PLEVFRFDEPCSPPVVPSQDFYLFSVGGFPGFPLKPSLGKVLGGGFPGKRGASVFIFNENRLSLPSFEVFP

SEQ ID NO: 154902 - protein, 157 aa, Oryza sativa
  Clone ID: PAT_MRT4530_54718C.1.pep
MIMALVNSKFCTIKHFWFRNGGKPIARLRAYVHAANHNRTARRGAQDGEEPDAAGADRDTARTRTSHAARRTTSLRSITSCRSTSAAAAGSGVDDVTRVRGWRPPKYPPPFGARQSRERGDVGEEVIKIEERVQLHFVFFVNHSEFEVAKVLCCLRV

SEQ ID NO: 154903 - protein, 148 aa, Oryza sativa
  Clone ID: PAT_MRT4530_54719C.1.pep
MVGMAVVEVDAPVEGGDERSMICGGTTQGRTILPCKDGCKAVVEIGVVVTVIRELSRMSTFGLSLLVGPSFRVLACDSPEIIEDDDRSETDHLLHVNHFMQIKHVDHRHSLLVRNHSNQVILHDFLADVHSKQDSRATIYRVENMACP

SEQ ID NO: 154904 - protein, 233 aa, Oryza sativa
  Clone ID: PAT_MRT4530_5471C.1.pep
MEMTSYNDVDAGDMFAAADYYSAGAGGDLFDMVWPGRRRREEDNTSGCLPLSPPPPPELAVDDQLLAGGDGGGGKPVAVAVAEDDDSGERWTEDQVPTDEGICVMEKRRCKINENLKTLQQLVPVCDKSNNQASTLDKTIRYMKSLQQHAQAMSVGCSMKTAEAAGVTCPFLPPPPSSALLVIVEEGPTRPWDATARSTSAAATSFDHHHHGALIEKLLQVVQCSFAALHAVA

SEQ ID NO: 154905 - protein, 87 aa, Oryza sativa
  Clone ID: PAT_MRT4530_54720C.1.pep
METGIFIQVWALELSVDNRIAFLLKSVPGEIKDSTFISPDSIRRHRRVLAVLIPKVNIRRRVLVYVGFYVVASISIVLGCFRIRHDM

SEQ ID NO: 154906 - protein, 510 aa, Oryza sativa
  Clone ID: PAT_MRT4530_54721C.1.pep
MSRLALSLARCSHVTEVGAVGAGHAGGSTAADATRDASSGDCSPAGLTPSGDATTGDSPAGVTSSGESPTCDTSPGEPPTCYTSPGDSSYTGGSSTSATVTASTDADPNAGDAVPTSAAEFYDPHRPPSQQQSHALSPSPSSTPPLLLQPHSFVSSGGASEAASAVPGIAMMGGAFGYDELAAAADGFSESNLLGQGGFGQVYKGTVRGQEVAIKKLRSGSGQGEREFQAEVEIISRVHHKNLVSLVGYCIYGEQRLLVYEYVPNKTLEFHLHGSGRPALDWPRRWKIAVGSAKGLAYLHEDCHPKIIHRDIKAANILLDYTFEPKVADFGLAKYQATEQTAVSTRVMGTFGYLAPEYAATGKVNDRSDVFSFGVMLLELITGKKPIMVSHGDQPDTLVSWARPLLVRAVEEENFEELVDPRLENNYDAYDMGRLIACAAAAVRHTARSRPRMSQIVRPERWRDARAERDAADERRHDGPDEAAQEDGVRLGHRYGHRQRVHEQRVQRAN

SEQ ID NO: 154907 - protein, 265 aa, Oryza sativa
  Clone ID: PAT_MRT4530_54722C.1.pep
MSHMKTFALGIVVLATLVLASESQISRKDLSIDLGGGGGIGIGTGISIGIGGGAGGSGSGSGSGSGSFSGSGSSSGSGSASGSGSRSSAGSSVGSSAGSSAGSGAGSYAGSGAGSGSGYNQGQGTGEGEGEGQGQGYGSGHGAGTGSGYGEGHGEGNGFGSGYGEGHGEGYGEGNGSGSGYGEGHGEGHGQRNASGSGYGDGHGEGHGYGQGSGYGEGHGSGHGQGSGSGYGEGYGKGSGNGYGNGSGSGYGEGHGYGSGSGHGK

SEQ ID NO: 154908 - protein, 140 aa, Oryza sativa
  unsure (1)..(140): unsure at all Xaa locations
  Clone ID: PAT_MRT4530_54723C.1.pep
SAHAPFQPAPTPVPPLAGWMXKPSSMXQPAVSGEAIVSGTPTDHAAILKHTTAPTTANHSIDYPSGNTDHDYKRTIPDGMPEDVNRPMNMLPVTYXQSHRYPQHEVDHNVARTLSRGSTPKSGNSHPSQQTLLLDGNQCC

SEQ ID NO: 154909 - protein, 647 aa, Oryza sativa
  Clone ID: PAT_MRT4530_54724C.1.pep
ALINLSPPPSPPQPASSSAPSSSSNGTVAVAAGVVGAVVLLGLAAVLIYCFVAKGRRRRRSHHQPSPYPVFPSAVGAGHAGGSTAADATRDASSGDCSPAGLTPSGDATTGDSPAGVTSSGESPTCDTSPGEPPTCYTSPGDSSYTGGSSTSATVTASTDADPNAGDAVPTSAASPPPPRISLSPPPPPLTPTQSGASSGSKSSNNGTVVAVGVAVAAVVVLGLAAGLIYFFVSKRRRRRQHPPPPHHPGYPPFPAEFYDPHRPPSQQQSHALSPSPSSTPPLLLQPHSFVSSGGASEAASAVPGIAMMGGAFGYDELAAAADGFSESNLLGQGGFGQVYKGTVRGQEVAIKKLRSGSGQGEREFQAEVEIISRVHHKNLVSLVGYCIYGEQRLLVYEYVPNKTLEFHLHGGGRPALDWPRRWKIAVGSAKGLAYLHEDCHPKIIHRDIKAANILLDYTFEPKVADFGLAKYQATEQTAVSTRVMGTFGYLAPEYAATGKVNDRSDVFSFGVMLLELITGKKPIMVSHGDQPDTLVSWARPLLVRAVEEENFEELVDPRLENNYDAYDMGRLIACAAAAVRHTARSRPRMSQIVPPERWRDARAERDAADERRHDGPDEAAQEDGVRLGHRYGHRQRVHEQRVQRAN

SEQ ID NO: 154910 - protein, 42 aa, Oryza sativa
  Clone ID: PAT_MRT4530_54725C.1.pep
MENPWGCRACKPHYAASRRYLGRTVPRLSSSHCDTFCYNLAA

SEQ ID NO: 154911 - protein, 59 aa, Oryza sativa
  Clone ID: PAT_MRT4530_54726C.1.pep
SPKQQKLLHHLVQIKSIPNYFHHVVLCLSIAILICAFLSHKLRVLNLDQVSSSEVVFYT

SEQ ID NO: 154912 - protein, 277 aa, Oryza sativa
  unsure (1)..(277): unsure at all Xaa locations
  Clone ID: PAT_MRT4530_54727C.1.pep
TSQGTQTTIVDIQIHVLQKYIRLQMXAEKXKRGDSTPQPILDSSNETNLNETAPTRKIFSSADQPNTXTDPTPSRPPLAXVRHLEESYTTSPAVAHAGLWPTGRPWQGSSGARPPXGAGDGGDWREDDGGGFSPRLAGARGXQRRTTPASSGRRVERVDDIRSDXESKKKKDLEGERWFAASGNAGRRRGKWRGSPAAGEDXFPVGFQQREAAAEVASAAAKLSAAVVRRGEGASGDVVRPEMGGGGRAQGERHGGGREHGRTRRERKKREGARPFI

SEQ ID NO: 154913 - protein, 102 aa, Oryza sativa
  Clone ID: PAT_MRT4530_54728C.1.pep
NILLTLIELGSAILPVTVIIVYLTWFKSISFKTYYTCICLPVYHTIWKHGENRTLYYNISDTLVQFSFWTLVPFKRCPQSFITVQKTSLAETTRFFMSRLFF

SEQ ID NO: 154914 - protein, 54 aa, Oryza sativa
  Clone ID: PAT_MRT4530_54729C.1.pep
FQQHLWRKLPAIISPHYASKLSVPFQCRSEYSSIVCNRLDLIFTQTRKFLSTIQ

SEQ ID NO: 154915 - protein, 361 aa, Oryza sativa
  Clone ID: PAT_MRT4530_5472C.1.pep
MEAPGSPYASSPESAPKRAPRSSPPPPQQQASSEVTSKYKKYKVLLIHLEWKDDKEKPTHLRFLVSNTAAGCIIGKGGSTINEFQSQSGARIQLSRSHEFFPGTNDRIIMVSGLFDEVIKAMELILEKLLAEGEESNEAEARPKVRLVVPNSSCGGIIGKGGSTIKSFIEDSHAGIKISPQDNNFVGLHDRLVTVTGPLDHQMRAIYLILSKLSEDVHYPPNLSSPFPYAGLGFPSYPGVPVGYMIPQVPYNNAVNYGPNGYGGRYQNNKPSTPMRSPANNDAQDSLTIGIADEHIGAVVGRAGRNITEIIQASGARIKISDRGDFIAGTSERKVTITGTSEAIQAAESMIMQRVTASSER

SEQ ID NO: 154916 - protein, 124 aa, Oryza sativa
  unsure (1)..(124): unsure at all Xaa locations
  Clone ID: PAT_MRT4530_54730C.1.pep
SSDRPSLASKGRYFAAALMAGMVAMSGAQLSEWEMRFRDRQRQREVQDRQVDACRKVLDRQLTERERFQSMDRRQSALRLRMQXCQQMQDGSREXRCDVIRRMVRNYQESMHEDLEQGLGEGRG

SEQ ID NO: 154917 - protein, 78 aa, Oryza sativa
  Clone ID: PAT_MRT4530_54731C.1.pep
MEYSSKAFYSVVSWSVISHTTSDPRICGDEACSVCIDAPSDGEEGEMVRRRKSGVGPESSLAAPLDLSRLELVGRAAP

SEQ ID NO: 154918 - protein, 79 aa, Oryza sativa
  unsure (1)..(79): unsure at all Xaa locations
  Clone ID: PAT_MRT4530_54732C.1.pep
TSFATLGVNVGLFVCFFAIFMLCSVEDCQTYIIFCXNELLGSNIWMICLYRMSTFLLYYCCIDIPKDVTPSFHRSSSKY

SEQ ID NO: 154919 - protein, 118 aa, Oryza sativa
  Clone ID: PAT_MRT4530_54733C.1.pep
FVFLNFLCSKPFIFFFFFGTILLVNVFLTTHYTKNHQMEYLWSPTPHPTEKKKKIYLKKKKTRQTLLGWLKKKPHIFHPKLTTKIAEKPSSLDHTQQWGYPPDPPHQKKPYVSPPYFS

SEQ ID NO: 154920 - protein, 197 aa, Oryza sativa
  unsure (1)..(197): unsure at all Xaa locations
  Clone ID: PAT_MRT4530_54734C.1.pep
SWRERRPEEGDIEDEFPAVSRRNREEAGEEDVAAKQIVATPGSEEVPTAEEGRPELHDGGGARRKRRGSQGERRGRAALCGERGGGRDSFYXAGRRRGSAGERRGTAGELAGLPSMAAVHQRFNSMIKGRIKREERGGIDEEEDRNRFLHSIWRRNHWGGRSRGVAALLFFGWEKNRRRSAGGGRRPAAGPAGPQGD

SEQ ID NO: 154921 - protein, 68 aa, Oryza sativa
  Clone ID: PAT_MRT4530_54735C.1.pep
TIRTGKITFRGLLQCNNQTIWLPQVWFFQFQEIKVLSSLFRHFSTDEKTKNSKTFFKNDTLGVNIFIP

SEQ ID NO: 154922 - protein, 113 aa, Oryza sativa
  Clone ID: PAT_MRT4530_54736C.1.pep
MCRLANGTPRHNSASASTFLAVACTASPTRSPSTSPYPCRHRRRWTRQEGEVGGAAHRPSDDGGCPRRGPRGGAVAVTREGRRRHRQVAAVLVRPFAAVGDRRSIVAVVKPKV

SEQ ID NO: 154923 - protein, 72 aa, Oryza sativa
  Clone ID: PAT_MRT4530_54737C.1.pep
MEGKGWVGIIERGPELGTSDNNGDCGKDRVVVANNGLSSGSVIWMVAITSLDAAASGQIQAIMLHVCCGGWR

SEQ ID NO: 154924 - protein, 87 aa, Oryza sativa
  Clone ID: PAT_MRT4530_54738C.1.pep
GSPLITPGGGFWAKPPRPRAVCKNPKGLPPGSPKGLLCFLRINPPFFLAPTPNFFSFQFLFSGALIVFFRQGPDWIVLNQGAYPRPL

SEQ ID NO: 154925 - protein, 101 aa, Oryza sativa
  unsure (1)..(101): unsure at all Xaa locations
  Clone ID: PAT_MRT4530_54739C.1.pep
TSVCTRFERIGLRNHALLRRLHGRVGDQVFGXSARCDYXLFVNVYFVFTNISNTKDNDNAGDKEKDAPVNTNRGNTALNSSGGPFLGSQGKHERYRILICF

SEQ ID NO: 154926 - protein, 376 aa, Oryza sativa
  Clone ID: PAT_MRT4530_5473C.1.pep
MEAPGSPYASSPECRPQARPPLLAPAPAAAGLLRRVFYFSQWNRHVDIIITSKYKKYKVLLIHLEWKDDKEKPTHLRFLVSNTAAGCIIGKGGSTINEFQSQSGARIQLSRSHEFFPGTNDRIIMVSGLFDEVIKAMELILEKLLAEGEESNEAEARPKVRLVVPNSSCGGIIGKGGSTIKSFIEDSHAGIKISPQDNNFVGLHDRLVTVTGPLDHQMRAIYLILSKLSEDVHYPPNLSSPFPYAGLGFPSYPGVPVGYMIPQVPYNNAVNYGPNGYGGRYQNNKPSTPMRSPANNDAQDSLTIGIADEHIGAVVGRAGRNITEIIQASGARIKISDRGDFIAGTSERKVTITGTSEAIQAAESMIMQRVTASSER

SEQ ID NO: 154927 - protein, 114 aa, Oryza sativa
  unsure (1)..(114): unsure at all Xaa locations
  Clone ID: PAT_MRT4530_54740C.1.pep
DAGGREKGKRGRERGLAPCHFGKRRTXEGDAGEGGGAQPPSLGGTRGERRGRVDDNGDDGGPVWSGAATRAVDAGQARQALTAAATGRGKLTSMLATRQRGPVSPGTSASVNPY

SEQ ID NO: 154928 - protein, 276 aa, Oryza sativa
  unsure (1)..(276): unsure at all Xaa locations
  Clone ID: PAT_MRT4530_54741C.1.pep
RLYPCTPPPPPPLPXTPPYTSCSASPPPLHQEPPPPSPSLPSAGSRRGGEPPMSPPPLPSSPGLPPAGSGRGGEPPMSPPPLPPSPGLPPAGSRXEAGQPPPPHRERATAGGEPPMSPPPPSPGLPPAGSGRGGRGTTSSPPPSLGLPPARSGKGGRXPPPPHRERAAAKGELPTSPLPPSPGLPPAGSGRGGRGTTSSPLPPPSPGLPPAGSGRGGXEPPPPHWERAAAGGEPPTSPPPPPPXPGPPSGWEGRPGSRRPRTGSPLRPRAPPPPPP

SEQ ID NO: 154929 - protein, 73 aa, Oryza sativa
  unsure (1)..(73): unsure at all Xaa locations
  Clone ID: PAT_MRT4530_54742C.1.pep
GVFKNWYKHKGSFESIHVKDELGQALKIGLGNVFTIGKGNKTWVSLLKGKGIKLSIIXEKRKRDAGVQAAANA

SEQ ID NO: 154930 - protein, 56 aa, Oryza sativa
  Clone ID: PAT_MRT4530_54743C.1.pep
MRQGADGGGKGDAGWWEDNGCSTNRLTIDSHELTAIRSGGLEFVPSDLATAMAASG

SEQ ID NO: 154931 - protein, 328 aa, Oryza sativa
  Clone ID: PAT_MRT4530_54744C.1.pep
VAFFFLSRFRFPLDAASFAVLLPNAAAALALAALSPASVPIALHQAALVAIAVLTAFWFTLLPEWTTWALLVAMAVYDLAAVLLPGGPLRLLLELAIERNEEIPALVYEARPVDPRHGHNWRLWRERTQSGAELDANSTVEVLGEVLGTNLGASSAGNLGVSAIRSDERVGLAGDARNLRLGTSMPNLSSDSASAQVEVLPASPEISVSVPEMRVPLIQPRPERTRDEEDDEDGIGLSSSGAIKLGLGDFIFYSVLVGRAAMYDYMTVYACYLAIIAGLGITLLLLAFYRKALPALPVSIALGVVFYVLTRTLLETFVMQCSTNLVMF

SEQ ID NO: 154932 - protein, 112 aa, Oryza sativa
  unsure (1)..(112): unsure at all Xaa locations
  Clone ID: PAT_MRT4530_54745C.1.pep
MIKIRLSFPLTDLDQVREEELVXMAQGKEGKTSKAKTKLGNYXIDSIALIDRKLDATPTWRANCRNMNSAIIKRGSSPDLKVDGCGDKXFRHVQALSMRGTRARRVEEGTSW

SEQ ID NO: 154933 - protein, 387 aa, Oryza sativa
  Clone ID: PAT_MRT4530_54746C.1.pep
MLGAARRQLGSGPMLGQVLRRLRPATAAAADAARAYSAAAKEMTVREALNSALDEEMSADPSVFLMGEEVGEYQGAYKISKGLLDKYGPERVLDTPITEAGFTGIAVGAAYQGLRPVVEFMTFNFSMQAIDHIINSAAKSNYMSAGQISVPIVFRGPNGAAAGVGAQHSQCYAAWYAHVPGLKVLVPYSAEDARGLLKAAIRDPDPVVFLENELLYGESFPISAEVLDSSFALPIGKAKIEREGKDVTITAYSKMVGYALQAADILSKEGISAEVINLRSIRPLDRATINASVRKTNRLVTIEESFPQHGIGAEICMSVVEESFEYLDAPVERIAGADVPMPYAANLERMAVPQLSLEVLTIKKLVDDIVRAAKRACYRAVPMAATA

SEQ ID NO: 154934 - protein, 51 aa, Oryza sativa
  Clone ID: PAT_MRT4530_54747C.1.pep
LSPSLITWGVLYKSTGGYQRIQLQLPPVINKGPIENQITCHQHLISSLTLL

SEQ ID NO: 154935 - protein, 99 aa, Oryza sativa
  Clone ID: PAT_MRT4530_54748C.1.pep
MRHASVAIQGRGKPLYGGNGDKCPLECRYGNGHAAVPNRWHGEEACQLRLTPLDVGRFLLRRSGIVVSPLPPHQCFEGTCLDNRPGEGRHSLLHSGRRL

SEQ ID NO: 154936 - protein, 464 aa, Oryza sativa
  Clone ID: PAT_MRT4530_54749C.1.pep
MAAARSVGMEPEVAALRGRFPPGGTRGAEWRAAQLRGILRMAAEAEPEIALVKSSCKFALKNLKKWMKPQKVTAPLMTFPSTARVAAEPLGVVLVISAWNYPFLLSIDPIIGAIAAGNAVVLKPSEVAPATSSLLAELLPRYVDGSCIKVVEGGVAETTTLLEQKWDKIFYTGNGKVGRIVMASAAKHLTPVVLELGGKCPVVVDSNVNLHVTAKRIAAGKWGCNNGQACISPDFIITTKSFAPKLLEALEKVLEKFYGRDPLRSSDLSRIVNSNHFNRLKKLMDDENVSDKIVFGGQRDEHQLKIAPTIFMDVPLDSGIMKEEIFGPLLPIITVDKIHESFALINSMTKALAAYLFTKDSKLQEQYEAAISAGGMLVNDTAVHLTNQYLPFGGVGESGMGAYHGRFSFEAFSHKKAVLVRRFAGEAAARYPPYSPAKLKILRGVLKGNLGAMIKAILGFPRGK

SEQ ID NO: 154937 - protein, 131 aa, Oryza sativa
  Clone ID: PAT_MRT4530_5474C.1.pep
MAAGRSRAAAAATCSGGGGRSATALPSSRSGQRLPFPPLYSQIRLHHEEGSDGGCMKRRRREVSGGAPLPSQIQLRRGEGGGRMQRLRQLGGRRRRTHLPDLADGDPSLLSRIQLCHVEGGGSDRQRQRRR

SEQ ID NO: 154938 - protein, 134 aa, Oryza sativa
  Clone ID: PAT_MRT4530_54750C.1.pep
SRRVGRGGPRKAAGGGAAQPAVGPRRQCGALRAGEPSSQAAGEPPPQVPLQPTPAASSRPRPQDARRHPRLHHGPRQAPPCLAPIQSHHISTCTIAYMPWILQALDRSSLLSFSPLLFSSSSSFFIFWIFTPLK

SEQ ID NO: 154939 - protein, 103 aa, Oryza sativa
  unsure (1)..(103): unsure at all Xaa locations
  Clone ID: PAT_MRT4530_54751C.1.pep
LTILFGSTRYIQDMRVGMXGDIWKSASLKEKSKCYGGNFFGXFKATVIFSKLGRNSISVGKTTELIGEKVEHCCRWXQEKEITGIAESLEGGWSGADSSGSLR

SEQ ID NO: 154940 - protein, 805 aa, Oryza sativa
  Clone ID: PAT_MRT4530_54752C.1.pep
MVAHGVLPVKEIIGWRPAFGEAFPTPDTHEVVVFAHFFYGGFSLPTSRFFRGILSFYGISLHHLNPNSIVHIANFIHACEAFLGIRPHFALFRRIFFLKPQPNKSKPCVVGGVGFQLRGTLSQKYFSMPFKTSNKGWHANWFYVQNPELALPEYSCIPPVYRDTWNSLPMGDEAVQAVELMERMIKLKEQGLQGEQITRHFIKCRLAPIKERSRTAFEFDGKHDPNREDPDSLDFKVMKERMYKIFSNAIVVSYSHLLPVVPFNAFNPPPPEFALMKSDPPIAQHQSPRRQTGQGSGGPRIRSETQPSASDPAGQSDSRKRKLVLSDDEGDDTGKLRNKGAAGRPPKPTNPKKKTSSRPVLKIRKSSSAHATAAISLSADLTGEVVQAALSPSPPRQEQCEWYCGLGMSVKLKDIINIWDGKWTYFVKWAKRNELLTMVKKHSHLIGWTVVDAEDDASDVGMDDRFWHEMLDLFFVRGRVSKRREEDDLVFFVNNNMKMHGHGFNDNMEDPPPFFVRRWAPMLEKISNINSAGVDWERSFYLNLIAHTSYTVTVAICSVRDLRSRVEKSKPLSPVYKVTKTVYASPSRVNFHLDRRKAVETVPAYPNICFSVDDFDDTFDAVVLSDPEHCYCVILNAHDGAAFPEDTESKNASSNLLNTGSNQEKPPKRTLFSGYVSYQNVREAYNAGRSQFGSLLSLGHDQTKLDKLYMRGPEGRGEVEVAVSGIADQSHERSKKDPGDSFRVFVHRAASAASKLAKHAYEAASTNKRFDHELLPLKCCLMSVSLPWDYIAHDLLHKETPPLDL

SEQ ID NO: 154941 - protein, 189 aa, Oryza sativa
  Clone ID: PAT_MRT4530_54753C.1.pep
MASLKKGEVDPENVIPITMDKLTPEQKAEFEKMKDDLQNRFLHSFAPTRSGTMVQKYKVVLSNKDDVETSSGKDDKAKGDNQEEDLEAFKCMQDQADYSVTVSPTAVTHPLGASPSEGFGGGEFELELWCLPRKRNTIPEISDAFVIHAFKSGVRDRYTTQELVTRRITSARKLFEIIDRCAHADDALR

SEQ ID NO: 154942 - protein, 83 aa, Oryza sativa
  Clone ID: PAT_MRT4530_54754C.1.pep
MRQLGDYRRSGRATATSIGRSAPKVGSGASSTSPTNVNLIAATLDNTCSIVWFRKLASDQIKNTLLPLLQSWPPATAVLPISR

SEQ ID NO: 154943 - protein, 329 aa, Oryza sativa
  Clone ID: PAT_MRT4530_54755C.1.pep
MAHPVAEADEKSPFGRLTAEEFYARHGVLHTSSTFVNPRGLRIFTQRWVPAGGDAPLLGAIAVVHGFTGESSWTVQLTAVHFAKAGFAVAAVDHQGHGFSEGLQGHIPDIVPVLEDCEAAFAPFRADYPPPLPCFLYGESLGGAIALLLHLRDKERWRDGAVLNGAMCGVSPRFMPPWPLEHLLWAAAAVAPTWRLAFTRGNIPDRSFKVPWKRALAVASPRRTTAPPRAATALELLRVCRELQSRFEEVELPLLVVHGGEDTVCDPGCAEELHRRAGSKDKTLRVYPGMWHQLVGEPEENVDKVFGDVLDWLKSHAAAAAAARGEGQQ

SEQ ID NO: 154944 - protein, 51 aa, Oryza sativa
  Clone ID: PAT_MRT4530_54756C.1.pep
GIFLGGIVMPLGGEPFTKLVFMPGHSLPCCSFFLSKEVCQFPFFVPSLFFP

SEQ ID NO: 154945 - protein, 146 aa, Oryza sativa
  unsure (1)..(146): unsure at all Xaa locations
  Clone ID: PAT_MRT4530_54757C.1.pep
WDPAGMAAATMREEGISDWMRNNSCCGLCSITKAXISCRNPYNAIDNMQAGAPELSPTGDSXLRDHDGILYLYLTTAERTQFTNKLWESVXLPRYYEKAVEGIXMPIECGTKFLDLLMKRRMTQMTNTRVLMMKLLLIWKNKVVTL

SEQ ID NO: 154946 - protein, 65 aa, Oryza sativa
  unsure (1)..(65): unsure at all Xaa locations
  Clone ID: PAT_MRT4530_54758C.1.pep
RFPGSTHAVRKYADGNFSVKXQSYLYITIIYTVSYSMALXYALAVFYAACRDLLXPYNPXPXFIM

SEQ ID NO: 154947 - protein, 75 aa, Oryza sativa
  Clone ID: PAT_MRT4530_54759C.1.pep
PRLRVLIEGVYYYHPKRVGQGLFGDAPVGFQPMWQLGKPLVKQYALLGRFWDGQTGRKEFLTKETGPSDFRNLGP

SEQ ID NO: 154948 - protein, 130 aa, Oryza sativa
  unsure (1)..(130): unsure at all Xaa locations
  Clone ID: PAT_MRT4530_5475C.1.pep
STNPSGAFDLIIRXKLCVVLALVGEIHAADHVARVVVARAPLAVSGAMTSEAALSSPCRCQSYLIGAAPPQGCSASRPSPHALECRRRRGAGGRGRGCALRRGELPVEPSTIAVTAWAPSCGPALPAFTR

SEQ ID NO: 154949 - protein, 444 aa, Oryza sativa
  Clone ID: PAT_MRT4530_54760C.1.pep
AKQRLNDAVNGFPDDGWSLMSSDGAEDVTIAFNSSPNKLVGSHVNSSQLFSAIGGGILCAKASMLLQNVPPALLVRFLREHRSEWADPGVDAYSAAALRASPYAVPGLRAGGFMGSQVILPLAHTLEHEEFLEVIRLEGHSLCHDEVVLSRDMYLLQLCSGVDENAAGACAQLVFAPIDESFADDAPLLPSGFRVIPLDGKTDAPSATRTLDLASTLEVGSGGTTRASSDTSSTCNTRSVLTIAFQFSYENHLRESVAAMARQYVRTVVASVQRVAMAIAPSRLGGQIETKNPPGSPEAHTLARWIGRSYRFHTGADLLRTDSQSTDSSLKAMWQHSDSIMCCSLKAAPVFTFANQAGLDMLETTLIALQDISLEKILDDDGRKALCTEFPKIMQQGFAYLPGGVCVSSMGRPVSYEQAVAWKVLSDDDTPHCLAFMFVNWSFV

SEQ ID NO: 154950 - protein, 159 aa, Oryza sativa
  Clone ID: PAT_MRT4530_54761C.1.pep
MHGAAARTRQSNNEEFAPTTKQSNQTAGEAAVEEVLGDVVPVALDGLRADVGLRRGLVIDELILEHRLELLAACLADVVDDASGAKHDGEVLELHLRAILEARPPRLKPRERVYGDVPEVAHPLVEGVDGAARRGGQERAGQREGIIRTTATVKEVTAE

SEQ ID NO: 154951 - protein, 67 aa, Oryza sativa
  Clone ID: PAT_MRT4530_54762C.1.pep
MRTRDRCVRVGNFEKSSESESGRDPAAKGTRTHGVSSHHLMSWVSSSWSPTGHWCDAWTGSLSDFPH

SEQ ID NO: 154952 - protein, 89 aa, Oryza sativa
  Clone ID: PAT_MRT4530_54763C.1.pep
MSRVVEEGRGADDDSTETMGMGVGGEPVAKAGLPRRYLEQGGVRGVRREILVGWVGLASNVGDFLAPASQGGGRPTDGREMMARGDREL

SEQ ID NO: 154953 - protein, 117 aa, Oryza sativa
  Clone ID: PAT_MRT4530_54764C.1.pep
LRLPHMCSIFRFEFPVFWFLPYDSELVVHGCVPRMGGHHGASCAYHASSYKGTKAMICIYHFALYCIKKIPKRGASTCCTETSHVHLNFLSCAFHRTPSYSSSPTEPSLVDFGPIAC

SEQ ID NO: 154954 - protein, 77 aa, Oryza sativa
  unsure (1)..(77): unsure at all Xaa locations
  Clone ID: PAT_MRT4530_54765C.1.pep
VGAEMALLCCITGGLXDFLXGLPPAMAVNGHRVMVISPRYDQYKDAWDTSVVAEIKVADRYERVSVFHCYMRGVYRV

SEQ ID NO: 154955 - protein, 391 aa, Oryza sativa
  Clone ID: PAT_MRT4530_54766C.1.pep
MDGKSSKLLPHLVVASATRVDAIESALRRPGRFDSEIEVTVPTAEERFEILKLYTKNLHLGECVDLQSVAASCNGYLGADLQALCREAARRAYGRLSSSSESENVLTLIMEDWESAKSVAKNSVTRGVIKEIPAVSWDDIGGLKAVKKKLQQAVEWPIKHAASFDRLGISPIRGVLLHGPPGCSKTTLAKAAAHAAQASFFSLSGAELYSKYVGEGEALLRRTFQMARLASPSIIFFDEADAIAPKRTGPSGNSSGNATVGERLLSTLLTEMDGLELATGIIVLAATNRPNAIDAALLRPGRFDMVLYVPPPDAEGRYEILRIHTRKMPLGDDVDLWKVAERTELFTGADLEGLEGKSEAALRSLRPSLTQSVVDEYSNAAIHGPLTRRKH

SEQ ID NO: 154956 - protein, 500 aa, Oryza sativa
  Clone ID: PAT_MRT4530_54767C.1.pep
MASGAAGDIDDGVEADGEEGGAGEWVDGKESTMAQIMMGGGRRRWRVAGGVGVDGGEDFPEDCCSTAPLALERREQGSRIVGQLLTLMDGKSSKLLPHLVVVASATRVDAIESALRRPGRFDSEIEVTVPTAEERFEILKLYTKNLHLGECVDLQSVAASCNGYVGADLQALCREAARRAYGRLSSSSESENVLTLIMEDWESAKSVAKNSVTRGVTKEIPAVSWDDIGGLKAVKKKLQQAVEWPIKHAASFDRLGISPIRGVLLHGPPGCSKTTLAKAAAHAAQASFFSLSGAELYSKYVGEGEALLRRTFQMARLASPSIIFFDEADAIAPKRTGPSGNSSGNATVGERLLSTLLTEMDGLELATGIIVLAATNRPNAIDAALLRPGRFDMVLYVPPPDAEGRYEILRIHTRKMPLGDDVDLWKVAERTELFTGADLEGLCREAGMAALRESLRSERFVCDDIHFQAALRSLRPSLTQSVVDEYSNAAIHGPLTRRKH

SEQ ID NO: 154957 - protein, 945 aa, Oryza sativa
  Clone ID: PAT_MRT4530_54768C.1.pep
MSSSSSHHPEFASCTANDDEHHLDEFELELVVQDVQRQQNNGSANTDQHERENLLLLDDSSKSGALKRRLFFDNLLKNVQDDHIRFLHRQKERIDRHVFSSFFSTPFMSIEVRYNNLSVEAECRTANGDHLPSLWNSTKGAFSGLVKLLGLETERAKINVLEDVSGIIKPCRLTLLLGPPGCGKSTLLRALSGKLDKSLKVTGDISYNGYQLDEFVPEKTAAYISQYDLHIPEMTVRETLDFSSRCQGVGRRPKILKEVSARESAAGIIPDADIDIYMKIMGLEICADTMVGDAMIRGLSGGQKKRLTTAEMIVGPARAYFMDEISNGLDSSTTFQIISCFQQLTNISEYTMVISLLQPTPEVFDLFDDLILMAEGKIIYHGPRNEALNFFEECGFICPERKEVADFLQEILSCKDQQQYWSGPNESYRYISPHELSSMFKENHRGRKLEEPIVSPKSELGKEALAFNKYSLQKLEMFKACGAREALLMKRSMFVYVFKTGQLAIIALVTMSVFLRTRMTTDFTHATYYMGALFFSILMIMLNGTPEISMQIRRLPSFYKQKSYYFYSSWAYAIPASVLKVPVSILDSLVWICITYYGIGYTASVSRFFCQFLMLCFVHQSVTSLYRFIASYFQTPTASFFYLFLALTFFLMFGGFTLPKPSMPGWLNWGFWISPMTYAEIGTVINEFQAPRWQKETIQNITIGNRILINHGLYYSWHFYWISIGALFGSIILFYIAFGLALDYITSIEEYHGSRPIKRLCQEQEKDSNIRKESDGHSNISRAKMTIPVMELPITFHNLNYYIDTPPEMLKQGYPTKRLQLLNNITGALRPGVLSALMGVSGAGKTTLLDVLAGRKTGGYIEGDIRIGGYPKEFVAEVLETVELDQIKDVLVGTPQKNGLSMEQRKRLTIAVELVSNPSVILMDEPTTGLDTRKDSSVYNPSAEH

SEQ ID NO: 154958 - protein, 180 aa, Oryza sativa
  unsure (1)..(180): unsure at all Xaa locations
  Clone ID: PAT_MRT4530_54769C.1.pep
MFSFGGGSSLTSVVPDATPAPAAPPGTGTGANAQVLYVFNRGGVCLLYREWHRPLRTLDPTQDQKLMFGLLFSLRSFTAKIDPTTAEKGNLGVPLLPGQGCSFYSFKTNTYKLNFLESPSGIKLILITHPRTGDQRDTLKHIYNLYVEYVVKNPLYAPGTPIKCELFNKHXLDPYVQTLI

SEQ ID NO: 154959 - protein, 149 aa, Oryza sativa
  Clone ID: PAT_MRT4530_5476C.1.pep
IRTCSRSCKRVALDGTAVRNCYCLLGGMTHLFFFYLCTRPMYTKVRSTTWISWKVQIIWCAPLSEEKQAEHREHDKEEPYLVQGPLHLHVLPSQPGAHVVRARVVRARRRRRRRLPARHPREHRQGHPSEHPSGRCRRRVEHAHAAHGS

SEQ ID NO: 154960 - protein, 207 aa, Oryza sativa
  Clone ID: PAT_MRT4530_54770C.1.pep
MDFSTRRLRVLLLVLAVVVASAVQYSGAGAHAARVPAVLREDETTTTATDGLACRHRRRASAVVVTAAAAPPLVPVHAAAGHGVPSTKSFNEGPAPSTTGGGDDGHAIFAAAAAAGRVSSRLGGGGVGGRGGGGYGRAGGGAGYAAGMYTGGGTGSAKADIIIDVLLVLTLVGGIITIVWSFCFICTNQQADSGSTDQDPNPPLPKQ

SEQ ID NO: 154961 - protein, 117 aa, Oryza sativa
  unsure (1)..(117): unsure at all Xaa locations
  Clone ID: PAT_MRT4530_54771C.1.pep
RPPFFXVFFFFWGFFFFFFVFFFFLTIFQNKNFLTKKTFPFKIPFLGFHLLFRGPTAVGGTQKRKGAQEKKRKQATTKFIHPQLTPTPLPDPISPAQTNLLSNDRNRGFQTKPGLSN

SEQ ID NO: 154962 - protein, 438 aa, Oryza sativa
  Clone ID: PAT_MRT4530_54772C.1.pep
MASAMNGCGGGGGGGGGGVMKRMGLLRVQYYCVMGFVAAAVVLATLRYMPAPATAPPTVDGGGATVRSSAATVDSAAAAAAAAPGGGGVAAEKKAAAGVVVFNFGDSNSDTGGVAAVMGIHIAAPEGRAYFHHPTGRLSDGRVILDFICESLNTHHLSPFMRPLGADYNNGVNFAIAGSTATPGETTFSLDVQLDQFIFFKERCLESIERGEDAPIDSKGFENALYTMDIGHNDLMGVLHLSYDEILRKLPPIVAEIRKAIETLHKNGAKKFWIHGTGALGCLPQKLATRGEIDRDLDEHGCITRINNVAKRFNKLLSETCDDLRLQFASSTIVFVDMFAIKYDLVANHTKHGIEKPLMTCCGHGGPPYNYDPKKSCTANDKDLCKLGEKFISWDGVHFTDAANEIVASKVISGEFSIPRIKLTASVVRPKKAKNSRL

SEQ ID NO: 154963 - protein, 97 aa, Oryza sativa
  Clone ID: PAT_MRT4530_54773C.1.pep
GTEMTTYTAKGEEQRQIGRSLNHKYSRLWPPTAKILLSTDNNGKRPPEFSSVHCSPVIFSSLFSPFYSLVLDCNEQVETICSFAQCIALLCVGILKL

SEQ ID NO: 154964 - protein, 94 aa, Oryza sativa
  Clone ID: PAT_MRT4530_54774C.1.pep
MASTAGGCKHSRSASAIVAGAASGYHLLKIDGYSRIKGLPTGEALKSCAFTVGGYRWRIHCYPNGSKSDYSDFISLFLHLDDGQVTKQVKAQYL

SEQ ID NO: 154965 - protein, 84 aa, Oryza sativa
  Clone ID: PAT_MRT4530_54775C.1.pep
SHWNLCCSSISEHGVSSTPLVNAHAGVGPSPSTNSNVGASASTARHLHVVEHQHRHGHPVHLQGRSYARILRNQPHRIPHVHAS

SEQ ID NO: 154966 - protein, 126 aa, Oryza sativa
  Clone ID: PAT_MRT4530_54776C.1.pep
KGRSVIHHTASVGDVEGLKKALEEGVDKDEEDSGGRRGLHFACGYGELKCAQVLLEAGAAVDAVDKNKNTALHYAAGYGRKDCVALLLDHGAAVTVQNLDGKTAIDVAKLNNQEEVLKLLEKHAFV

SEQ ID NO: 154967 - protein, 73 aa, Oryza sativa
  Clone ID: PAT_MRT4530_54777C.1.pep
MAIRRAAAGHVPFKQQVHAQGSLTAITSVIPATSGQWALGVPAQATRARQSVEGVGGPGQPDPWHGRQSPLQP

SEQ ID NO: 154968 - protein, 86 aa, Oryza sativa
  Clone ID: PAT_MRT4530_54778C.1.pep
MQQLSRARCSRTSSARKLNGLFSRRCNSSGEVTSSRGAAAQLAREVRRGDQQSWCRSAACQRSPLPFSRVRVGCSRTSSARKQCFG

SEQ ID NO: 154969 - protein, 139 aa, Oryza sativa
  Clone ID: PAT_MRT4530_54779C.1.pep
MPGVGLPRAPDPLHALSRACGLGGHSQRPPTAFIEAALARHVAFNAMCRRTNWPLVAGMTDVMAVREPCACTCCLKGTWPAAARLIAINEGIFALHLSSDRFFLHRRLPVTLGVMGWAHAAVRRAWLHTSEDKTSINCL

SEQ ID NO: 154970 - protein, 376 aa, Oryza sativa
  unsure (1)..(376): unsure at all Xaa locations
  Clone ID: PAT_MRT4530_5477C.1.pep
PLSKEPGNGPPPPGPPPRTAAPSSSPSGTAHRTPPPVAPPAPPPPPPLPPEAPALPPPPPPAAAPAPPWPLTLPPPPPTRSPPPEPTPGTTAPPPPAPPPPCPRPPPHLLPPLLPPPPPPPPLPPPPPPPRPPSPPPPTPLLPPPPPSXAPAPPPSIAPRTPPAXPPPPPPPPSPSFRPATVATPATPRXTPPPPAAPSPKPXRRRRPPPPSPPCPRRPSPPPRRSHPSGPLSPPASPPSPAPPRSRPPPPPPAAXPPPPPPPPSPAPPAPKPPPRGSRQRPRPRPPRRRPRWPRTPAPRAPGGSSPHAPASPPPPPPPPPPPXSPSPSSAPPPSPPSAAASSIDRLIPSPPPPPPPLPPPTPLPTSPPQSRGRCH

SEQ ID NO: 154971 - protein, 80 aa, Oryza sativa
  Clone ID: PAT_MRT4530_54780C.1.pep
VTLLQDVTYLRTTNLDMSLSKIVVLGYATSRTKLTYYETEGVSTCSLTVINIHGGPYLFCHILISFLSAFSGLNFGVQNN

SEQ ID NO: 154972 - protein, 141 aa, Oryza sativa
  Clone ID: PAT_MRT4530_54781C.1.pep
RTKTSSLLNSTAAIPMLRRLRLPEWHHTFQKIPHRPCSSGRLTVESSPARPIGDVGPLGVGVGGTEDVDPSSSSTPDSSAIATHPPNSSPSSTPKWICMLLLVRIVPLPLPMQTTSCLEPTADADEDARRCHRGGGGWRVT

SEQ ID NO: 154973 - protein, 32 aa, Oryza sativa
  Clone ID: PAT_MRT4530_54782C.1.pep
RYTRDLSDLDELCYLLILWLTTDDAMLGHPDL

SEQ ID NO: 154974 - protein, 176 aa, Oryza sativa
  unsure (1)..(176): unsure at all Xaa locations
  Clone ID: PAT_MRT4530_54783C.1.pep
IDYLILTRPVPCCTDSKDGCCYPKNHNPPEDYYGRSWTTWDLPKNTCADTSHFLNALEVDKMDSPDENLRHILCNIKCPRTSXLTSCTSHRNSYSVWSTLTESDYIDAGNQLSMNSXGLSALAEQGTDGDYQLDNTALTMRAVNQNLSATPLEQSRDCPYYYEQLYEIYLCENYDT

SEQ ID NO: 154975 - protein, 73 aa, Oryza sativa
  Clone ID: PAT_MRT4530_54784C.1.pep
MSVIEKAISSIDRKTNPYLLNPLTGACVALLPAMTLEFVTRFVFSPSDGGCQGVTCIIDFHRSGTPDDKQVMA

SEQ ID NO: 154976 - protein, 38 aa, Oryza sativa
  unsure (1)..(38): unsure at all Xaa locations
  Clone ID: PAT_MRT4530_54785C.1.pep
LSIIHGKKKKKKKKXXKXKKXKXKKKKKKKKXKKKTKK

SEQ ID NO: 154977 - protein, 60 aa, Oryza sativa
  unsure (1)..(60): unsure at all Xaa locations
  Clone ID: PAT_MRT4530_54786C.1.pep
LGLXEXSRPXVVLLRXKFXRSVLLRLMVXXCVCGIXXSSXVNLPFEXTVXVSLSGNYSHX

SEQ ID NO: 154978 - protein, 70 aa, Oryza sativa
  unsure (1)..(70): unsure at all Xaa locations
  Clone ID: PAT_MRT4530_54787C.1.pep
VYFRSYFSLTSAHTCTXFXXXVILLSLFFSWILLYVHVHFTGIYGAGCLITEGSRGEGGIXFILVFYCVC

SEQ ID NO: 154979 - protein, 54 aa, Oryza sativa
  Clone ID: PAT_MRT4530_54788C.1.pep
METSRKFFPTIVVLLLLVVTTDGTSCTGKGVRDAKQRVQGDLHDGGQLRQRVPD

SEQ ID NO: 154980 - protein, 296 aa, Oryza sativa
  unsure (1)..(296): unsure at all Xaa locations
  Clone ID: PAT_MRT4530_54789C.1.pep
GXXXXXXKXXXPLFXXKRKKRXXFXFFXKXXGGXFXXGXXGPPQXXKKXXFXXXXGGPXKFFXKIXGGGKXXETXKFXXKIXEXXKKTXVFXKGKGXFXLNXGNQRIKNFFXPXXXQXGXKTXXKIFXXXGGRFPFWGXFGEXGKTXPXPKNPFXXEPQLKGLLEKPRGGGGKKTPIGKPRPAKAQKVGGKPGXAKGXIPXPQPPGRSFXANWPTQNGXGRQLXTIPFLXEGPXGPPRWEKKPXFXWGKWPISXKXFQKGGKGXSPTXPLGXNKNFXFPGKTRQKEKGGTNXPKXF

SEQ ID NO: 154981 - protein, 170 aa, Oryza sativa
  Clone ID: PAT_MRT4530_5478C.1.pep
MSLPGVSASTFKSPVFIGLLAVMCVAVVLLLHHCVLVTFCDTRRRRRRRRRRGTSTQQQHVQQGEDDDDDDDEDDMMSSSSQAKLVVCPYKKAEEWGEAMCPVCLSEFGDGEAVRVLPECMHYFHVDCIGTWLRANTSCPLCRADTTPSSGDLHHHLSISVSLEEILVRT

SEQ ID NO: 154982 - protein, 273 aa, Oryza sativa
  Clone ID: PAT_MRT4530_54790C.1.pep
RKRETLIGENFPAGADDNYFTIPRARIFMFPRKMTKGAKQWAAAGAKVLHLVPCKVQNLCLVMKCIENIVERYEHSQAAQKGVHGRCILQKRKSKDFQVLKETIDKGPINDDMRPIDEKDISTLNMDQISQIEILLEDELRWTRARKVVADRIARLQKKTDGLTGSNIQQALFCITEKFRDAQAVQKKPATAETESNSTEMPSDHEKKQVAGGSQQSAEEEEEEMEVVLRHRLSLGTGDRDDGGGGAAEQRHRTTPPPAVDLNMPCRDAGQLQ

SEQ ID NO: 154983 - protein, 56 aa, Oryza sativa
  Clone ID: PAT_MRT4530_54791C.1.pep
MKRGRLDLNPITKCAWEEFGAALAAAMQWLSQEDGRGEVQDTVAQPTGSWLRCCLN

SEQ ID NO: 154984 - protein, 53 aa, Oryza sativa
  Clone ID: PAT_MRT4530_54792C.1.pep
ARAMRGVLLKCPAFRTDPPLSALKSAVTPSVVRLNRTRGCGPNLRIGTGTRRG

SEQ ID NO: 154985 - protein, 76 aa, Oryza sativa
  unsure (1)..(76): unsure at all Xaa locations
  Clone ID: PAT_MRT4530_54793C.1.pep
MRECIWXXIGQAGIQVGNXCWELYCXEHGIQADGQMPSXRTXGGGXDAFNTFFSXTGAGKNVXRAGIFXDLKPTVI

SEQ ID NO: 154986 - protein, 74 aa, Oryza sativa
  Clone ID: PAT_MRT4530_54794C.1.pep
FPWGVAGFFNCPPWALRVLETRGPLLPAGGKGLGPSRGLPFKMVKTFTLVDLGSYNVKRVFGGHLALGLPFGGG

SEQ ID NO: 154987 - protein, 103 aa, Oryza sativa
  Clone ID: PAT_MRT4530_54795C.1.pep
MDQADEVHKEKVCYYLDHIVQAKYGVFTVHRGALVRMVQAPGHGMDGLLKKKSGLTDTGIGGAYPILVPCKNLGVVVVTDITLTDRLSPAPRAATGAERCKSV

SEQ ID NO: 154988 - protein, 356 aa, Oryza sativa
  unsure (1)..(356): unsure at all Xaa locations
  Clone ID: PAT_MRT4530_54796C.1.pep
MSFLLDAFTSMGADVNDSLNHGGGPYVFKINGQVHHRIDALLPNENTPTKYTQLYIYDTQNEIQNRMCAILSEGGDPSALDPVIAAELMQMLDECIPLVKQFRLARDHLAEXGDEEIAIRIVGSDEDGPVQYELPTADELACLIVGDFSLENLKRDIIILNIPGPLHHVSSLHPAYMALQHPLLXNFPYGEHSFQVGINLRGVDLTRTAIRTKASMQEFHCYYCHYRRDQFNTYLYCGRLSSQGQVDCFPCVEEGRLTYIRDHQGDFRCENIXGIADAVGRGCLDGGVGKQRILPTSFTGERRYMYXNYQDAVAICRVYGAPDVFTTFTCNPKWSEIEEARLGEGLEVPTDPHEMR

SEQ ID NO: 154989 - protein, 321 aa, Oryza sativa
  Clone ID: PAT_MRT4530_54797C.1.pep
MGDEEDLELVLGVRATRRDEQDDQTTCTQSSEEAMEGEEDETRPHGEAPVESLSFPLFVSSAETGSANSEMCTRGFDVNTRPADGGAEAGRPSSPSSMQEASTRQQVADQEAADDEDNGGGGARKKLRLSKEQSSFLEDSFKEHSTLTPKQKSDLANRLNLRPRQVEVWFQNRRARTKLKQTEVDCEHLKRCCERLTRENRRLQREVAELRGTLRTTTSSYPPLYGLHHLPAAAGTVFRVCPSCEHSKVVAAAASESFSPRVFAGGGAPAAITAAAAVPSPGAGSPPSSSAALFGARRPHFGPFAAAVIPPVLRRQPSATS

SEQ ID NO: 154990 - protein, 89 aa, Oryza sativa
  Clone ID: PAT_MRT4530_54798C.1.pep
EAGSPLVSLRGVAFSPVPGKAHQVFRILRTNPFFFKSFFSPISLRVQKMRGGAPFGFVCKIELTRFQIRGQKAKTGMVFPRDLVGVKNF

SEQ ID NO: 154991 - protein, 506 aa, Oryza sativa
  Clone ID: PAT_MRT4530_54799C.1.pep
MAAAAAAGRRRFFPPVTAYDAAAGARRTVAADLDGTLLVSSSAFPYYFLVALEAGSYLRALALLLAAPWLLALYVGVSEAAAIALLVFITFAGLRVRDVEAVARAVLPRHYAAGVRADTWAVFHGCAERRVVVTASPAVMVGEFVREFLGAEVAGTELETFASGKRFTGRIKAVLVGEKKREVVERLFAGGDMPDVGLGDRESDHDFMAICKEAYMVPKNKRAPRAAADELLSRAIFHDGRLVRRPEPASALFALAYLPVGFAVALLRVFLNLPVPARLVRHTYRLTGIRLAVRGAPPPPPRPGTPGSLLVCNHRTALDPIIVSIALGRPVTCVTYSVSRLSTAISPIRAAALTRDRAADAARIAALLEEGDVVVCPEGTTCREPYLLRFSALFAELTARIVPVAVEARQGTYYGSTARGWKFLDPYFFYMNPRPGYEVTFLPALRPEETCVAGGRSAVEVANHVQRVIAKELGFQCTTLTRKDKYMKLAGNDGRVAAAADKPKAN

SEQ ID NO: 154992 - protein, 76 aa, Oryza sativa
  Clone ID: PAT_MRT4530_5479C.1.pep
QEPPHAAAARGAVEVSLRRVDVADVDAMMVWASDPQVAAVCRWERDESTVPLLVYLRNTVLGHPWFRAICVDPTAQ

SEQ ID NO: 154993 - protein, 118 aa, Oryza sativa
  unsure (1)..(118): unsure at all Xaa locations
  Clone ID: PAT_MRT4530_547C.1.pep
LDGIRLSPLEGRGEEPLRLRGDAASVGVARPHAALLRQLRGEDGFGSAGLPRVGAKREWDKRNGGATAEGMVPGVYVGRNARDAPVAQCPRAGRDDGLVGGCRDAAASLDGPGLXGXK

SEQ ID NO: 154994 - protein, 148 aa, Oryza sativa
  unsure (1)..(148): unsure at all Xaa locations
  Clone ID: PAT_MRT4530_54800C.1.pep
MSSGGAKAYAAVVLIRIMYSGMHVMSKIALDQGMNPLVFLFYRHTTAALVLIPITFVLERRKAKPVTLKIAGKMFVHALYGVTACGDLFNLGLNYTSAASSSALYNVQPVVTFVLAVVFGMESMNLRRXHGNGKAASILVCIRGVQIL

SEQ ID NO: 154995 - protein, 219 aa, Oryza sativa
  Clone ID: PAT_MRT4530_54801C.1.pep
MAPTTLTRSPCHLSADPPWWQDDGASHSSTLGGEQARTVSCCGYQIEADENLELEKAGRLGRPGQARKARVEPGRQVPRRPSNSTRRTPTEPEAYKAWASMAPCIRPPPRECGPGRCLPKTEAAAAAVAQCSAACDLTVDLMLRLDTAVDMDSEPGPPTKQAGPEEEEYCTQVQTPRRAVEPYVESRRPCPKFRRAQALRHLFEFDVPTSPPRTSIHPS

SEQ ID NO: 154996 - protein, 90 aa, Oryza sativa
  Clone ID: PAT_MRT4530_54802C.1.pep
STTHSIRNDRVIKLRLMHRKQESRARSRGAGAASEETTTINVWILLFYSAIVFFFPNNSLSSFNFFFSSIFTPPIQVEVVTSRVLQRERR

SEQ ID NO: 154997 - protein, 303 aa, Oryza sativa
  Clone ID: PAT_MRT4530_54803C.1.pep
MTKSFAHTLGKGGYGTVYKGSLSDGSEIAVKMLEDTKDDAEDFINEVVSIGRTSHINVVTLLGLCLHRSKRALVYEYMPNGSLDKYAVGVVDTVQGEKSLSWEKLYEILVGIAQGLDYLHRWCNHRVVHLDIKPQNILLDQDFRPKISDFGLAKLCKPKESKISIGGARGTIGYMAPEVFWRHHGAVTTKSDVYSYGMLILQMVGARENTNASMQTVSKYFPEWLYDNLNQFCGAATEGIDSRNTCISEVARKLVTIGFWCIQCTPEDRPSMSEVIDMFDRSMHELQLPPRMSCCGIDNPSIV

SEQ ID NO: 154998 - protein, 203 aa, Oryza sativa
  unsure (1)..(203): unsure at all Xaa locations
  Clone ID: PAT_MRT4530_54804C.1.pep
KLLNELTKLLVVNSVFSSLPTYYMCTLKLPKLVIDNINSARKQCLWRGFEVNSNRKYLEAWDKVCKPKLKGGLGVLNPSIQNQALLLKYLEKFYNRRELPWIKLIWNSYYRNGVPPMSIFKGSFWWRDIYNLMXFFRGVTRCLVGDGVSXFFWNDVWSDDPPLSVSIPRQYLFAVNTMISVHNFLNLELEDNFHLPLSQQAFE

SEQ ID NO: 154999 - protein, 972 aa, Oryza sativa
  Clone ID: PAT_MRT4530_54805C.1.pep
MSAAGGGGGVGKVEKMASIDAQLRMLAPAKLSEDDKLVEYDALLLDRFLDILQDLHGDDLRELVQECYEIAAEYEGKHDSQKLDELGNMLTSLDPGDSIVMAKAFSHMLNLANLAEEVQIAYRRRIKLKKGDFADENSALTESDIEETFKRLVVDLKKSPAEVFDALKSQTVDLVLTAHPTQSVRRSLLQKHSRIRNCLVQLYSKDITPDDKQELDEALQREIQAAFRTDEIRRTQPTPQDEMRAGMSYFHETIWKGVPKFLRRLDTALKNIGIDERVPYNAPLIQFSSWMGGDRDGNPRVTPEVTRDVCLLARMMASNLYCSQIEDLMFELSMWRCNDELRARADELHLSSKKDAKHYIEFWKKVPPSEPYRVVLGDVRDKLYNTRERARQLLSSGYSDIPEETTLTSVEQFLEPLELCYRSLCDCGDRVIADGTLLDFLRQVSTFGLCLVRLDIRQESDRHTDVLDAITTYLGIGSYREWSEERRQDWLLSELNGKRPLFGPDLPKTDEIADVLDTFRVIAELPADNFGAYIISMATAPSDVLAVELLQRECHVKTPLRVVPLFEKLADLESAPAAVARLFSIDWYRERINGKQEVMIGYSDSGKDAGRLSAAWQLYKSQEELINVAKEFGVKLTMFHGRGGTVGRGGGPTHLAILSQPPDTIHGSLRVTVQGEVIEQSFGEEHLCFRTLQRFTAATLEHGMHPPIAPKPEWRALLDEMAVVATKEYRSIVFQEPRFVEYFRLATPEMEYGRMNIGSRPSKRKPSGGIESLRAIPWIFAWTQTRFHLPVWLGFGSAFKHILEKDIRNLHMLQEMYNEWPFFRVTIDLVEMVFAKGDPGIAALYDKLLVSEELWPLGEKLRANCEETKQLLLQVAGHKDLLEGDLYLKQRLRLRNAYITTLNVCQAYTMKRIRDPDYHVTLRPHMSKEIMDWSKPAAELVKLNPTSEYAPGLEDTLILTMKGIAAGMQNTG

SEQ ID NO: 155000 - protein, 499 aa, Oryza sativa
  unsure (1)..(499): unsure at all Xaa locations
  Clone ID: PAT_MRT4530_54806C.1.pep
MAKSGRRAWWGRAWQERGVAAEGVALDAEGVLAGAEGGAKKAATAVRAKKAAASAVVRAAVCDEDAAVEALGAGAADPGEVEPNYEDKVAALVEVNTGGAVVGVPVVQVPLGQSLPPPPDSQATEASSASAASHAGDLRLRNRTSGRAPPPPPVDTNWSAAEHDHIAIDIGDSTAGSDSDDVPSCVVCTEPIEWVAVGPCGHRVVCSPCAARLRSGPNPDHRCCVCRTLCSTVVITKAATAAHSVFTFSDQSSMPVAAAQDDGRPVGAYWCSAAMSAYFDDKKHYDQVTKQVVVAAADRCFLRTPPRRPDVDASPLRRLCVRMSWRGHVLALLVVVLVTALVGGWVGYLTSGDEMMSDRIGIVXRNCRSMGCTCSRRLRLHRYANLDWPSYYRERERHSYDFEKRHPADNSSHASGERLPLPHIQQPRVQSQCVAKERDGATTSDRIXARTPTQQLQALDTISRESPFVPPLGRGHAAAARARGGGTIGAPARGGEAWH

SEQ ID NO: 155001 - protein, 70 aa, Oryza sativa
  Clone ID: PAT_MRT4530_54807C.1.pep
VLHHLVGLVHAKVHYHAWSWSIIVLCEDHEFSQSCRRDGPWQRHPHRALGLVQRQGAEGPCHIMITLART

SEQ ID NO: 155002 - protein, 99 aa, Oryza sativa
  Clone ID: PAT_MRT4530_54808C.1.pep
LVDPRAAGSPPRFLAAAGAGGGRRWQGSLRPWVAAGWPTAKGAAGMAGPTSSSSEPGSPDLRWHTRSESTPYWPWPVTTSHLDAAEKGQKVTTKRRVNT

SEQ ID NO: 155003 - protein, 41 aa, Oryza sativa
  unsure (1)..(41): unsure at all Xaa locations
  Clone ID: PAT_MRT4530_54809C.1.pep
TSRNERLTLTNNAIKPQAYIKKKKKKKSKTMLXEKGGAFKG

SEQ ID NO: 155004 - protein, 63 aa, Oryza sativa
  Clone ID: PAT_MRT4530_5480C.1.pep
IVILDIALCSCYVVHCSVIHPHDDSCLHHVQTCSACSHLYLYMSFVTLNVPKCLEDDIHTLHE

SEQ ID NO: 155005 - protein, 577 aa, Oryza sativa
  Clone ID: PAT_MRT4530_54810C.1.pep
MEARVLVLVTMAIAAACWATGGVAAAATAATTTTTSRLKGLRVHLTHVDAHGNYSRHQLLRRAARRSHHRMSRLVARATGVPMTSSKAAGGGDLQVPVHAGNGEFLMDVSIGTPALAYSAIVDTGSDLVWTQCKPCVDCFKQSTPVFDPSSSSTYATVPCSSASCSDLPTSKCTSASKCGYTYTYGDSSSTQGVLATETFTLAKSKLPGVVFGCGDTNEGDGFSQGAGLVGLGRGPLSLVSQLGLDKFSYCLTSLDDTNNSPLLLGSLAGISEASAAASSVQTTPLIKNPSQPSFYYVSLKAITVGSTRISLPSSAFAVQDDGTGGVIVDSGTSITYLEVQGYRALKKAFAAQMALPAADGSGVGLDLCFRAPAKGVDQVEVPRLVFHFDGGADLDLPAENYMVLDGGSGALCLTVMGSRGLSIIGNFQQQNFQFVYDVGHDTLSFAPVQCNKFGCGEWLAREHATGEAGEPRLVGVRLVGLIREVDGELAVAGLGPFRATIAKPAAERMEGDVEAENVESAHEEMRTISYKAWARFLPPKLVDLGNGVTEQRRLVHLEHVGHHNTTTSLVRELEEG

SEQ ID NO: 155006 - protein, 35 aa, Oryza sativa
  Clone ID: PAT_MRT4530_54811C.1.pep
TLINPPPFFFFFLTYKKQSKFLKPPFLKLRLKLTN

SEQ ID NO: 155007 - protein, 61 aa, Oryza sativa
  Clone ID: PAT_MRT4530_54812C.1.pep
HANSPRVDTNRLDVQLGALSGRSNCASPLLSGLCGGCKVDMSNINAHSSAPLLIYAMNLCH

SEQ ID NO: 155008 - protein, 67 aa, Oryza sativa
  unsure (1)..(67): unsure at all Xaa locations
  Clone ID: PAT_MRT4530_54813C.1.pep
LFYSFVPIFKTETAVPFGRPTPLLKSPIGVYNSPILDPYFFWMGFFTLXISKDXPFDANXSISSXPQ

SEQ ID NO: 155009 - protein, 130 aa, Oryza sativa
  Clone ID: PAT_MRT4530_54814C.1.pep
MSQAGSESAAAKEPSFKEGERVLAYHGPLLYEAKVQKSENKEDEWRYHVHYLGWNKSWDEWVTNDRLLKLTDENIRKQQELEKSQVVDKSVKSGRSAQHKPKGSNDAKTDKEDTKIIIKGKKRKSQPGGT

SEQ ID NO: 155010 - protein, 76 aa, Oryza sativa
  Clone ID: PAT_MRT4530_54815C.1.pep
SIHMMHIILWSLKRSAPVFCPADLTTPTSSQLCCFYVSMSCLKPTSLFGTATLSPPIKNAMLVAVVTVQQPAVARR

SEQ ID NO: 155011 - protein, 609 aa, Oryza sativa
  Clone ID: PAT_MRT4530_54816C.1.pep
MAAVVVAHVPVFPAPGWCRHSPVISEVPPATPCAATIVSVAPCLAHVAVVAPPARPAPVPSEARCAAFLRGVSPSGDGGEGCFCHLLRDSLLLGFPVNTARLGALLPTCAAANANASAAAIVEASTLFVDTCRGHYRGGGASGLGQEGGEEQIWKKKELFSEFQNPKPQYKQQFVCSPKVPPPMSQAGSESAAAKEPSFKEGERVLAYHGPLLYEAKVQKSENKEDEWRYHVHYLCHIVVYHHVWVVSHLCPYGAIFFLNSIFMNPVEGLVSIIALMLFSCLSALLIQVNSLLNMFIFNEYSWDEWVTNDRLLKLTDENIRKQQELEKSQVVDKSVKSGRSAQHKPKGSNADAKTDKEDTKIIIKGKKRKSQPGGTEEKERKSSESLFMSHFPSTLKKQLVDDWEFVTQLGKLVKLPRSPTVDDILKKYLEHRTKKDNKINDSYAEILKGLRCYFDKALPAMLLYKKERQQYSEEVKGDVSPSTIYGAEHLLRLFGKWRARLASVNMEEDALNKLQQKLLDILKFLQKNQSSFFLSAYDGGSKAEGFLKYGTRCIRGCVRPCGHPTFGTVVITNHVNFISKKLNSKFSNLKGKVVVTVQLRTFKPWSLA

SEQ ID NO: 155012 - protein, 69 aa, Oryza sativa
  Clone ID: PAT_MRT4530_54817C.1.pep
MVAYSCRSCWPPCCLQCSPLVAPAVLASRPLPVPSLAASGYHHAGLQIRCGGARYGCEDSRSSHGDTDH

SEQ ID NO: 155013 - protein, 393 aa, Oryza sativa
  Clone ID: PAT_MRT4530_54818C.1.pep
MGGSSNTNTNTRSGGGKDKHDETSPSFKEGERVLAYHGPLLYEAKILSSGFLKVQKSENKEDEWRYHVHYLGLVSIIALMLFSCLSALLIQVNGLLIMFIFNEYSVNPIEGLVSIIALRLFSCLSALLIQVNSLLIVFIFNEYSWDEWVTNDRLLKLTDENIRKQQELEKSQAVDKSVKSGRSAQHKPKGSNADAKTDKEDTKIIVKGKKRKSQPGGTEEKERKSSESLFMSHFPSTLKKQLVDDWEFVTQLGKLVKLPRSPTVDDILKKYLEHRTKKDNKINDSYAEILKGLRCYFDKALPAMLLYKKERQQYSEEVKGDVSPSTIYGAEHLLRLFVKLPELLASVNMEEDALNKLQQKLLDILKFLQKNQSSFFLSAYDGGSKGTDGIKTK

SEQ ID NO: 155014 - protein, 55 aa, Oryza sativa
  Clone ID: PAT_MRT4530_54819C.1.pep
EYSRSSGSTGIPDQNIENHVASSKKYFLLLRSMVIGQLSLRTTNIFSSAVRFCKY

SEQ ID NO: 155015 - protein, 174 aa, Oryza sativa
  Clone ID: PAT_MRT4530_5481C.1.pep
LEAGQQPQHASSRQAVTANMNGLLAPRRLAFSINRSARVLHLGQRYGCFNQHWQSRFQPKQQNMNLTRSYGTLPDASKINKVIDAELARRGDFRRADELSDPEFNELYLQKFSHFETARPTKAKAKAKAKTKAKAKAKAKAKAKETKGAPIPAEPEKESSWTRFFIQYASRLLR

SEQ ID NO: 155016 - protein, 106 aa, Oryza sativa
  Clone ID: PAT_MRT4530_54820C.1.pep
GKSTNYPPELSRLSELPPEPQNRTFFTPNYINRTNYPPRPNLRWFWSTWRTRGSPGGGSGGGWGRRARSRSRGWRARDPGRRPPVDGGRRVKAAARPSHFLRLRAL

SEQ ID NO: 155017 - protein, 77 aa, Oryza sativa
  Clone ID: PAT_MRT4530_54821C.1.pep
SLDVELGVVCVCHRELTGENYYFVGKGVKHYGGHYGTGKIGQTRTREGRTLGLWFFLREANSRGKGTTPKGPKIRQQ

SEQ ID NO: 155018 - protein, 201 aa, Oryza sativa
  Clone ID: PAT_MRT4530_54822C.1.pep
MGKVRAFFSRKGRGNSSGRSRSMREAAMNVDWSPRPSDLAAAAAAKPRPPAAEDETERVFRKFDANGDGRISRAELAALFRSVGHAVTDDEVARMMQEADSDGDGYISLGEFAAISAPPPGDAAAAEEDLRHAFGVFDADGNGVITPAELARVLRGIGEAATVAQCRRMIDGVDRNGDGLINFEEFKLMMAAGAGFGRIAS

SEQ ID NO: 155019 - protein, 81 aa, Oryza sativa
  unsure (1)..(81): unsure at all Xaa locations
  Clone ID: PAT_MRT4530_54823C.1.pep
FFFXFFFFXFFFFFFFFFFFFFFXFFLKNTXTAPHETIXLQFRQPSQXQXXPHYSLHDXXXLHESXXRIEMAXKLSNXXTT

SEQ ID NO: 155020 - protein, 292 aa, Oryza sativa
  unsure (1)..(292): unsure at all Xaa locations
  Clone ID: PAT_MRT4530_54824C.1.pep
IGGDFNIFCSPDEKNNANYDDRLPFLFNAVIDGLSLRELVMLGRNFTWANNLANPIYEKLDRVLMSTEXKHKFPLSSVFALNRDISDHTPLLLNTNSSSPGNAQHSFKFEPGWLLRDGFVDMVKEIWSNVDEGNTPMERXEAKIHRLRQHLRGWAKHTSGIYXKEKKELLDKLDLLDKKTETILLTQEEIDIRVYYTNRLSTLLREEEIRWYQRAKTKDILEGDSNTKYFHLVANGNEALTQEFTENEIKEAIFQMEHNKAPGPDGFPAEFYQVFWNVIKAEKPMIRLNGLL

SEQ ID NO: 155021 - protein, 156 aa, Oryza sativa
  Clone ID: PAT_MRT4530_54825C.1.pep
MAREAPQEASSSSPPVQKYGDCWDPTVHAPGWTQFLQHDAGGSSWQSASDSRWYEPQELHWGYSRSFSSSGLPPSSWMHCSISSRGDLGKFIRGMDTLELQAGNMQHMLEDHVVQSREWQQTVDAQLANFNTMIQQQQVDWQAFHRYQGFDPRHEP

SEQ ID NO: 155022 - protein, 113 aa, Oryza sativa
  Clone ID: PAT_MRT4530_54826C.1.pep
DVYSFGVVLLELVTGRSPIDPAFGEGKDIVFWLSTKLAAESIDDVLDPRVAAPDREDMIKVLKVAVLCTAKLPAGRPTMRDVVKMLTDAGAGPCSPRGQPPAARACARSKSCC

SEQ ID NO: 155023 - protein, 1052 aa, Oryza sativa
  Clone ID: PAT_MRT4530_54827C.1.pep
MECNREEAFRAREIALRKMENKDFNGAQKIVLKAQKLFPELENISQLLNICHVHCAAEATVNGQTDWYGILQVEATADEATIRKQYRKLAFSLHPDKNSFAGAEAAFKLVAEAHSLLCDPTKRPIYDIKRNNIPRKAPKQATRPTKKTQANKYSVPVYLHAFWTMCPHCQMRYQYYNNAINTTVCCMNCRRNFFAYNLQEQPVPTPNVPYSSQFPANMFPNQRRDPISRQGHPVKLSCTGGNTDVRPGTYSWPGSDERTIQSEMTRGKDQFPARNQDKYSVPTANGNSGGCSIPVPDCPDTIDRQKLGREDASVAPAMNVPGHSKLHSTGGGTNAKPRVNVAQWKETTKEDSSASVEKKANQSMMNQRKSSAQTANENASGRFKPDHADPNVFDRKNFGTEDSFPVPNSAVPSSLRRSARRKQDAGDNGSMNSKVRKKQKKNNVLSDVDLNCQQIFNNNGTSGDKQSAPPHVSSTVDIQDKTKVTDADSKTKAESTDTAGWNVPSCFEKLSFPDPDFYDFEKLRDINMFAVGQIWALYDDLDGMPRFYARIKHFDASNFKAHLTWLEYNAASEEEKKWTDEELPVACGKFCLGSTEVSHDRLMFSHIVSWTKGKKRNAYEVYPNKGEVWALYKDWSMQWNSDADSHRSYEYEVVEILSDFSVNDGITVVPLVRIKGFVSLFAAAKDKSTNVIVSSELLRFSHSIPSYRTNGNEKVGSPAGFIELDTACLPNDMDIIFPSVPLESYISLGKKEDSTIIDLTNDSTSSRMDPGNEKKENLPEAHICRPVSTENHESLSYEKNTSLPKNGHDANGFGNSSEPSCPSPSIYSYPDSEFHNFEEGRTCEKFEPGQIWALYSDADKFPKFYGWISKVELQPFRVHLIWLEACPEQEQEKQWLDQDIPVCCGKFKIRTWKAQYETTDTFSHLVHTGQRDSTWQIDILPQVGEIWCIYMNWTSDWTPSSIDMCEFAIGEIIECTEALIKVSLLTQVNGYRAVFKPDRQSGVLEIPKRDRLKFSHQIPSFRLTEERGGKLRGFYELDPASVPDVFLYRDTP

SEQ ID NO: 155024 - protein, 203 aa, Oryza sativa
  Clone ID: PAT_MRT4530_54828C.1.pep
GKDDELADLVRRLVDALARYSDRLPFDLDRQVSNHVKALKKLLKSNLGGHVDALLHHLATPAVDHGQLTLEQLVRHKLSEGRRVTCRLLGVILEETTPEELQNHVTVRPSVLEVLLEIAKFCDVYLMERILDDESGEKVLSALSEAGLFTNSGLIKDKVLFCSTENGRTSFVRQLEPDWHIDTSPEIVHQLAVSSSKQWHSEN

SEQ ID NO: 155025 - protein, 170 aa, Oryza sativa
  Clone ID: PAT_MRT4530_54829C.1.pep
MSSGAAASAAGVEAGAAGGGKDDELADLVRRLVDALARYSDRLPFDLDRQVTCRLLGVILEETTPEELQNHVTVRPSVLEVLLEIAKFCDVYLMERILDDESGEKVLSALSEAGLFTNSGLIKDKVLFCSTENGRTSFVRQLEPDWHIDTSPEIVHQLAVSSSKQWHSEN

SEQ ID NO: 155026 - protein, 68 aa, Oryza sativa
  unsure (1)..(68): unsure at all Xaa locations
  Clone ID: PAT_MRT4530_5482C.1.pep
FFFFFFFFFFFFFFFXQKELHVXXIIQTSTXYKXLVARTXMXMGINSIXSSXWYXHXKKGQIKRDGHT

SEQ ID NO: 155027 - protein, 310 aa, Oryza sativa
  Clone ID: PAT_MRT4530_54830C.1.pep
TKEYSHQRKFIQMFFLAPQEKGYFVLNDYFHFVDEEQVQPAPVIAQDNFETNMASNSVVEPVPEYIHEEENQSAVPITSEESDAVENYTYSEPPQQVVSQSDNWGDEPLPEEPISSFTNGMAMAPEEPVQSPPVPPPHVEEPVGEPVKKTYASISKSVYVGNVPSSVSEADLENEFKKFGRLIPDGVAIRSRKETGGYYAFVEFEELSGVHNALKASPIEINGRQIYVEERKPNSGIRGGNYTQLHGVVDGGIYLRRGGRGRFGGGGRGYARGGGDNEYAGNRGSGRPSNGYQRVPHHERGILGSHNARN

SEQ ID NO: 155028 - protein, 544 aa, Oryza sativa
  unsure (1)..(544): unsure at all Xaa locations
  Clone ID: PAT_MRT4530_54831C.1.pep
MAMDAAAAAGGEMSRQKATASAPPPPELDMVARAVQRLVARNDAVEALSGGGEAAAGLGAGMAAFEAARGAPAPRIGVAQYLERVHRYAGLEPECYVVAYAYVDMAAHRRPAAAVASRNVHRLLLACLLVASKVLDDFPGCEKPPVTARLPRLPPVPRGYGYPYRAAGDRERRRRWRRAAGDEAASGGRVRRRRRGEAAAAEEEEASAAAAGCGGGGERGGNGGRVWRRRRAAAGHHNNAFFARVGGVSNAEMNRLELELLAVLDFEVMLSHRVYELYREHLEKEARRDGGGGDMLAGASAAAAAKAGRMAAVSPSKLLERAAVNGAAQHDDWRSLGTAAAAEAANGVRRHRSSSSSRGGARPMSSGAAASAAGVEAGAAGGGKDDELADLVRRLVDALARYSDRLPFDLDRQLTLEQLVRHKLSEGRRVTCRLLGVILEETTPEELQNHVTVRPSVLEVLLEIAKFCDVYLMERILDDESGEKVLSALSEAGLFTNSGLIKDKKXGRTSFVRQLEPDWHIDTSPEIRFIKYQLHISPQRAERV

SEQ ID NO: 155029 - protein, 553 aa, Oryza sativa
  Clone ID: PAT_MRT4530_54832C.1.pep
MSFIRRADPSTTYADNLYIHKFGTPNSNFAARRYASDTQLFRYGPEPYNPENSFYNQQASPMPYMVTADGHSPSSADNSCSDVAKDSPLVSNVSQQNSQSISDNQSSELEVEFDEDDIRMKLQELEHALLDDSDDILYEISQAGSINDEWADPMKNVILPNSPKESESSISCAGSNNGEPRTPKQLLFDCAMALSDYNVDEAQAIITDLRQMVSIQGDPSQRIAAYLVEGLAARIVASGKGIYKALSCKEPPTLYQLSAMQILFEICPCFRFGFMAANYAILEACKGEDRVHIIDFDINQGSQYITLIQFLKNNANKPRHLRITGVDDPETVQRTVGGLKVIGQRLEKLAEDCGISFEFRAVGANIGDVTPAMLDCCPGEALVVNFAFQLHHLPDESVSIMNERDQLLRMVKGLQPKLVTLVEQDANTNTAPFQTRFREVYDYYAALFDSLDATLPRESPDRMNVERQCLAREIVNILACEGPDRVERYEVAGKWRARMTMAGFTPCPFSSNVISGIRSLLKSYCDRYKFEEDHGGLHFGWGEKTLIVSSAWQ

SEQ ID NO: 155030 - protein, 125 aa, Oryza sativa
  Clone ID: PAT_MRT4530_54833C.1.pep
DLENEFKKFGRFIPDGVAIKSRKETVGYYAFVEFEELSGVHNALKASPIEINGRQIYVEERKPNSGIRGGRRGGRGRFGGGGRGYARGGGDNEYAGNRGSGRPSNGYQRVPHHERGILGSHNARN

SEQ ID NO: 155031 - protein, 206 aa, Oryza sativa
  Clone ID: PAT_MRT4530_54834C.1.pep
TRCSRPINTSSRSRPGALTSTDACSSSADSRAQEAINQLFQPVNLTLEQLVRHKVSEGRRVTCRLLGVILEETTPEELQNHVTVRPSVLEVLLEIAKFCDVYLMERILDDESGEKVLSALSEAGLFTNSGLIKDKVLFCSTENGRTSFVRQLEPDWHIDTSPEIVHQLARFIKYQLHISPQRAERVASNVFSSTSLEQFFGGLDQR

SEQ ID NO: 155032 - protein, 462 aa, Oryza sativa
  unsure (1)..(462): unsure at all Xaa locations
  Clone ID: PAT_MRT4530_54835C.1.pep
AGPGSQFRARRTYFLRNYYNLLQQSPDVVHQFYNDASTMVRVDDLAGTNTTASTMMDIHSLIMSLNFTQIEIKTANFLNSWGDGVLVMVSGLVQTKEYSHQRKFIQMFFLAPQEKGYFVLNDYFHFVDEEQVQPAPVIAQDNFETNMASNSVVEPVPEYIHEEENQSAVPITSEESDAVENYTYSEPPQQVVSQSDNWGDEPLPEEPISSFTNGMAMAPEEPVQSPPVPPPHVEEPVGEPVKKTYASILRTAKAPLVFPVAQPAPTRPHQATETNQAAQHSVMTSSVATEKPKTDVYGEFAVQDDEESKSVYVGNVPSSVSEADLENEFKKFGRLIPDGVAIRSRKETGGYYAFVEFEELSGVHNALKASPIEINGRQIYVEERKPNSGIRGGNYTQXGVVDGGIYLRRGGRGRFGGGGRGYARGGGDNEYAGNRGSGRPSNGYQRVPHHERGILGSHNARN

SEQ ID NO: 155033 - protein, 121 aa, Oryza sativa
  unsure (1)..(121): unsure at all Xaa locations
  Clone ID: PAT_MRT4530_54836C.1.pep
MCHVRVLVSLGYLPRQAITHTYLSRERVQLQRIGRIQTLKERGEVGEMGGYHRKLMKSWKGAAHKYLGMDFALGLLLVFQTYFTVSKQXVIAAPNAIRITLPGHAYLTIHTSVEEKRPQLP

SEQ ID NO: 155034 - protein, 253 aa, Oryza sativa
  Clone ID: PAT_MRT4530_54837C.1.pep
MSSGKGKRKMEEKGVPLQGDLDPDNDPMKYALSAPRVQIIPGLWRRIVRRRRSKNDAKPWACPCGYVNKPIQHLFFDLPRFKCGSRECKEMIPDDYEFKFSLVEKRTLKKQLPRSLDMNTHDDLGIKDLWKIISILEKDGVETVDGSHKARISGITHVPLDFPVICKEIAEGHPLLAIIRTGKGFDDLQYNQIYKPPKVSRIVDGKSAGLHCITLVGGAMRKGRKMHYKFVNTYGEDFCKLRSLNRDDGIKGG

SEQ ID NO: 155035 - protein, 609 aa, Oryza sativa
  Clone ID: PAT_MRT4530_54838C.1.pep
MASPRRRSLPLPLLLLVFPVSLFVVLLLHHRSSIPAAELLSGPGPDPRRFSLLIKVLAYDRPGPLRRCLRSLAAADYAGDRVALHVLVDHPRPNASLDASREILAEADALRWPHGEKRVHYRAANAGLQAQWIEAWWPGSDDEFAFVVEDDLEVSPLYYRFLKRLVMAYYYDRENYSPYVFGASLQRPRFVAGKHGNKIQLDSETHLFLYQMVGTWGQLLFPKPWKEFRLWYDEHKSKGIKPILEGMKTTGWYKKMGERIWTPWFIKFVHSCGYFNFYTNFLKERALSVSHRDAGVNYGRSVGPDSTLLDGKNLDFNLWELQPLNKLKWYDFCFAEVLPGRVIRKFSELGSVLKSVQLENNVVLISLYSLEQRIARNLICYLEKSGMRNYIFLVDNTEFLDDLAHRGHPVIDAISLLQSIKMSSSIYSDDFVKEIVVKAYVIKNCLDLGYNLWVLNGNTISLGSKLNEPSDQSVDFFAAESVDLMFLRGSQSSKKTWNELDILRMADGMMSSKSGFSSSLEHKNFVRVLTGVLGNNGAVRLGKLDEEIMAVELGPNTSNRSLSEGHCKVLFWSHSMTSDSVQSQLENRGLWLIDSDSSCSAVVCGQKQK

SEQ ID NO: 155036 - protein, 81 aa, Oryza sativa
  Clone ID: PAT_MRT4530_54839C.1.pep
CGFFFFSFFFFFFFFFFFFFFFFFYFWGPKQTKVWEKPKGAQTFQGGFPKRVFLGVYTTKPLVSQKKTFGLTRGLPGRGHL

SEQ ID NO: 155037 - protein, 97 aa, Oryza sativa
  Clone ID: PAT_MRT4530_5483C.1.pep
MVLDSLSSPHRRSQNTFFLSSPKKLQSSKDDVGSWSALVERHRFLLTTLVVLVFLCTIYLYFAVTLGAPDACSGLAGTEKAVCRAKSALRHGKLKFF

SEQ ID NO: 155038 - protein, 73 aa, Oryza sativa
  Clone ID: PAT_MRT4530_54840C.1.pep
SFPLQRGDAQDMGWGLFFKGVGRWIPGPYLGQRCGLARASSQLAPPCAEPVFPVLSLSQDGVVFTILNVILQA

SEQ ID NO: 155039 - protein, 57 aa, Oryza sativa
  Clone ID: PAT_MRT4530_54841C.1.pep
MDRVNQGQVPHVSSTKGSCRAQEATSDERRWCGRGHLGQKEDGTLTVPARQRESGWW

SEQ ID NO: 155040 - protein, 400 aa, Oryza sativa
  Clone ID: PAT_MRT4530_54842C.1.pep
MARCSVSRVVLLLLCCMHLSAAAAGAAVYNVESYDARPDGRTDASRALASAWSAACRSPEPATVYVPDGEFFVSHSAFAGPCSGGRMTVQIDGTLVAPSGYTGSASSGGEWIVFDHVDGLTVSGGTLDGRGESLWACKAAGHGGCPDGATSMKVLNSRDVVISGVKSVNSELYHVVIDGCEGVAVQDARIVAPGSSPNTDGIHVQSSSAVTITGASIQTGDDCISVGPGTSNLRVEHVSCGPGHGISIGSLGKESEEGGVENVTVSGAAFVGTENGLRIKTWGRAARSGAYVRGVVFEHALMRDVSNPIIIDQSYCPNDGGQGCPHQSSDVQISGVTYTDIQGSSASQVAVKFDCSASKPCSGLGLQDIKLTFDGGKPAEATCQHADGTASGVLMPPSCL

SEQ ID NO: 155041 - protein, 126 aa, Oryza sativa
  Clone ID: PAT_MRT4530_54843C.1.pep
YSSTSDTCTRGSGDRGSAGRFRACRRTAQSATPGLGKGEATVQGHALAEPKPRELPRPVTRSTATEVFLMGDLPKNRMGTVRAPQASALSALRWLAKPLSPKWARGSRNLSPIAVSLRRPLPEYCA

SEQ ID NO: 155042 - protein, 131 aa, Oryza sativa
  unsure (1)..(131): unsure at all Xaa locations
  Clone ID: PAT_MRT4530_54844C.1.pep
YMAPEYASEAIFSXKSDVFSFGVSAGDRHGKRNTPTSNYGEFVKPPRIRLPLWREERGCELIDPTLGESTQRARHNPVLKWLLCVRTXDDRPTMTDVXAMLAATASTLPDPLPPPHYQLRVSGDDYDDAPL

SEQ ID NO: 155043 - protein, 229 aa, Oryza sativa
  Clone ID: PAT_MRT4530_54845C.1.pep
MTMGGLFNPFDDYEAAAAAAAAEGDKVVHGGAGHGGFFSPLGAGAGDDKYTKLIEIWEKNDLHCETEEIDRIEILQDWNHAHPVTFFIPSIFFLLLPIEGPVKRARLATPKPREWERSTTKRDSVMRALFGTAEQQPMRLAFVATDALEGHEGGAASDAGGDHHHLSIRFPLHLERCGVDAEQQAMRAVEEVKMAAAPWIQSPQSSREEEVKMVVALWIQPPRSLHKEE

SEQ ID NO: 155044 - protein, 158 aa, Oryza sativa
  Clone ID: PAT_MRT4530_54846C.1.pep
MVLRILNSITRTKAEELFARERMGDGTAAATGAQEPERRQWRWQSGGQEPRWLGANVLLGDAAAMSSRHPVHSTELLRVDYRLGLGQRRPRRQHHGRPWQAIHPPQPPFAAAAHQRLPARKPHIRPLRHQRRGGKSRGVRRAPSPPIIIIPALLVMTG

SEQ ID NO: 155045 - protein, 116 aa, Oryza sativa
  Clone ID: PAT_MRT4530_54847C.1.pep
MAAAGPQPRRQPISGARRRYGVLGGPAAARRVAADLAPLPLDLAPPRLVPARHRRIWPVPTTERATAAGSARRQRRQVLTNAAGVLGGGGIVRGAEAALRRRRPMLMVEVVGCARQ

SEQ ID NO: 155046 - protein, 198 aa, Oryza sativa
  unsure (1)..(198): unsure at all Xaa locations
  Clone ID: PAT_MRT4530_54848C.1.pep
MYPAMSLWLRSSGNPTALARGEEGADAIIIGNGECDEESDGAIVDVATTCTVTVSSSMRRGRRRSIRRRARSGHGSAGSVAFGVAAAAARSRRRAEGAWRSRWREMEGESVGRRESAXDVHPHAVRYGFRRLDVVVPGLXFGTARVASAQSPQTRAAKSKQVMAAAAASAGVERRWGCVWPGGTRGREQRPEGMGGGS

SEQ ID NO: 155047 - protein, 884 aa, Oryza sativa
  Clone ID: PAT_MRT4530_54849C.1.pep
MSLWLRSSGNPTALARGEEGADAIIIGNGECDEESDGAIVDVATTCTVTVSSSMRRGRRRSIRRRARSGHGSAGSVAFGVAAAAARSRRRAEGAWRSRWREMEGESVGRRESAGEREEGRSRAPGGEREREMEEMGRIGKRGRGERGVFFGLGHSLGSCIIEVSTPKVPSVSEGTLGVALIIDALMDVHPHAVRYGFRRLDVVVPGLLETEQQRTERQGVGPERVASRTFGTARVASAQSPQTRAAKSKQVMAAAAASAGVERSILPSPSHSLTHLTPLLLLSSHLMASPVSSCPAAAAASHPSSYHCRGVRPAAGQYCFSTSPCITLVRWTPPRHGWAKLNFDWCDRSRLQLVRAMQISSNELLDDARVSRQRDDVVLVKWKVATVCSEVSHGRSSHMEQREAEEEEDPCWSWPAAAAYLSLHQSGFNDAGARRVPEQPRPLPDLAVADDLLHLAPHLVPRHDAVLLAGRHGEPGAPHGGDVAPVEELVAEVRPAQERHAVAHPFQRRVPPTVRHEARHGGVRQHALLRAPLDDHAPAGDAAPEGVQPRRAQARGEVRPDNPQERPAGELQPHGELLELPRVEDGHAAEGHVHDGAVGLRVEPVQAAGVLRQEVADGAAELAVGDERADGEEVREELEDGGLGLVEGVADGHLGEVVVELVVPADEVEDDVLPFRRAGVVPRQQRRVQRRHPRRQLQRLLPLRPPLLVEDAVLDQLGDLAHEGDARRGRRREVDDADAEPPGDGERPPHVDVSDEPPHLGPPAAGAGLDLPDEPLQVSRHVARVGVDELVEVLAVLVAGEAVGDGGEVDPPLPELRGAARRQRGHHQRVVHLRVDEGDLEALVGEAVGELHERDDVALAWHRQHEDVTLSHICRSPFSSSSTL

SEQ ID NO: 155048 - protein, 104 aa, Oryza sativa
  Clone ID: PAT_MRT4530_5484C.1.pep
MAIPFLMAGRLHGLRHRADAAGPTLPPFRPSHRGVAGLHFRWAVTKIVKIMHGTYGQGEAGEDDSDDADELKQGTAVDHLGRPRAGQHHGPRRSRLPFPSSDAG

SEQ ID NO: 155049 - protein, 59 aa, Oryza sativa
  Clone ID: PAT_MRT4530_54850C.1.pep
MDGDVKSFFHRSSYRVGNSSTTLTKASPLLRGWDGAARGGIFPQMLDGGIRPICPDPAA

SEQ ID NO: 155050 - protein, 105 aa, Oryza sativa
  Clone ID: PAT_MRT4530_54851C.1.pep
ALGGGGRRRQAAVVGGGGRRWSAVGSGGTARSEPPPADTALQPVARLQAVELGDGDGALPRRAVLGTGRGTTGWNQLIDVEVFNEGDVCIFHFNNDDDVLDLKIH

SEQ ID NO: 155051 - protein, 36 aa, Oryza sativa
  Clone ID: PAT_MRT4530_54852C.1.pep
IEILAAPEIEREERRRGRPRSLLLAADGVVGVTSNN

SEQ ID NO: 155052 - protein, 120 aa, Oryza sativa
  Clone ID: PAT_MRT4530_54853C.1.pep
AMVVSSNKGAGQRGGRAVTRPTPAGTPTNPVATDSARPARLHATNQSASPRRASPHLTCPVALAACFPALLESLIKPRLSACLNGAVVVVTRQEAEAYRVANWPPIPRAREGLCSCLPGR

SEQ ID NO: 155053 - protein, 105 aa, Oryza sativa
  unsure (1)..(105): unsure at all Xaa locations
  Clone ID: PAT_MRT4530_54854C.1.pep
KSLWYPKTQKXGXLAPVTCSCRERREPPPTPSCGPXGPRRXAPRELGCGGGGEGGKHALLDAGGDGHGRSDLCLTHPRKHKPKQEMLXLGGRRDSEEXXEFLVPN

SEQ ID NO: 155054 - protein, 44 aa, Oryza sativa
  Clone ID: PAT_MRT4530_54855C.1.pep
ANHTNTQLIRGPDNTSGTSHHTNSYVDTRIIPETTSCLNNRWPS

SEQ ID NO: 155055 - protein, 525 aa, Oryza sativa
  unsure (1)..(525): unsure at all Xaa locations
  Clone ID: PAT_MRT4530_54856C.1.pep
MGPTRQSHSLLLTFLLVGAAAAAAAASPEDGSPFLRLPTASDLPVPAGQLPRSAAVGLIRALNLHPRDASPSPSSRGDGDVPAGTLVERPIHLASMATGKSGGSSAEDLGHHAGYYRLPNTHDARLFYFFFESRGSKGEDDPVVIWLTGGPGCSSELALFYENGPFHIADNMSLVWNDFGWDQESNLIYVDQPTGTGFSYSSNPRDTRHDEAGVSNDLYAFLQAFFTEHPNFAKNDFYITGESYAGHYIPAFASRVYKGNKNSEGIHINLKGFXAIGNGLTDPAIQYKAYTDYSLDMGLITKSQFNRINKIVPTCELAIKLCGTSGTISCLGAYVVCNLIFSSIETIIGKKNYYDIRKPCVGSLCYDLSNMEKFLQLKSVRESLGVGDIQFVSCSPTVYQAMLLDWMRNLEVGIPELLENDIKVLIYAGEYDLICNWLGNSRWVNSMEWSGKEAFVSSSEEPFTVDGKEAGILKSYGPLSFLKVHDAGHMVPMDQPKVALEMLMRWTSGNLSNASSSFQRLDFTM

SEQ ID NO: 155056 - protein, 152 aa, Oryza sativa
  Clone ID: PAT_MRT4530_54857C.1.pep
EETNNIVLQKYVLSKMMSEKELLGYNDGEGRAFEVVTLPCGLVAGDTVLGRAPETLENAVSPVSRNEPSFAFLRLLQRLVGSVPLVHADDVCNALVFCMDQPSLAGRFLCSAAYPTIHDIVEHFAAKYPHLDVLKEYADLSFSDREQIGRLA

SEQ ID NO: 155057 - protein, 1546 aa, Oryza sativa
  Clone ID: PAT_MRT4530_54858C.1.pep
MERHGCSRHRHCSFVLLIVVVVVAYLLVGVVPALQASVIAEDDGRALMQFQSLITEDPYGALATWGGSSGSNHSASPATPCGWCDLRGLGLGGAIVAQSSLSSLTYLRWLDLSQNRLCGGVPTPLPLSLEYLNLSCNALQGTVSSELGSLRRLRVLVLDTNNLTGGIPASLGNLTSLTDLALTGNHLSSHIPSALGNLRALTSLYLNDNMLEGSIPLSVFNLLSVALSRQSIHHQTRARKEEIKSSGPSTTARPRRERRDNLRVKGKDWILSLILLAEISLQVDAMEKQAGGFEKMLEGIQNAIGAVAVKQDETQAVVLQMDKAMASWRPQVDAAVKGLQSEMGELKKQVEILEKLRGELGNSSNMLQAGAISTRKQGDDNDQRPPLLPTPESFVASTLAGDSGSNGHRVAINNRGKATGVIIPPVPPQVTGTTNSPFSHRFACDSLHRDEVGGSEDRGYNHRVPKLDFPQFDGVDPQNWRMRCEHYFGVYGTHPILWVRVATIYFTGRAASWLRSSKAHLRFSEWSNFCLAVDRKFDRDRHQMLIRQIEQIKQTGTLTIVHRFTEGLRFDIRHAVMMQRPRDLETALAIACLQEEWTETQKPKEFRKLGDHVLRIKGAYPLPLPPSKVSESSAGAGKSSSEPVKTTAIADRMRALKAHRRAQGLCYLCAEKWSLSHKCSSSVQLNAVQEVFALLQQNDSDSGDSPGEDTEPHSLFSLSVHAIQVQGHHFCSALKVLPLQSYDMILGMDWLERYSPMDIDWQQKTIRFTLDGQLITLCGVLHQLYQSGSIEGLVQLYTLDSESSSDLPIPDNIQQLLQSFADVFQEPQGLPPVREYDHTIPLIPGAQPVNVRPYRYTPLQKDEIERQVADILDRGIIKPSSSPFSSPVLLVKKKDGSWWFCVDYRHLNAITVKNKYPLPIIDELLDELAGACWFSKLDLRSGYHRLPLRRIMGILSFITLLLHPIAFLSKALGPRTQGLSTYEKESLAIILAVEHWRSYLQHDEFVIRTDHRSLAFLDNQRLSTTWQQKALTKLLGLRYRIVYKKGLENGAADALSRQSPVDMVEILALSVSIPAWLQEKRIWIGNNKSLQQQILANLHTAAVGGHSGLRQSVHNFVQACDVCQRAKSEHIKLPGLLQPLEVPDHAWQWKHWLGMAQFWYNSSYHSAIAMTPFEALFGHKPSYFGLTITAIDAPMSLASWLTDRNNMSALIHHHLLRAQQRMKHQADLHRSERIFTVGDWVFLKLQPYVQQSVMTRANRKLSFKFYGPFQVLQRVGSVAYKLDLPSTSMIHPVVHVSQLKKALAPAEKVQASLPTLDSEFGPLAVPHRILERRLRQRGAKLIEQVQVEWKGTSSPAITWENLEELRHKFPAAPAWGQAGSQGGRNVTPEHSSSDSGAEGRIKSSGPSTTARPRRERRDNPRVKGKDWILSLILLAEISVRNKHLVMQFNNLTGTLPPCAGNRLPRLKVLSVDRNQLHGAIPVSLCNSSKLEVIQMMKNSFSGVIPDCLGAHLQNLWELTLDDNQLEANSDSDWRFLDSLTNCSNLK

SEQ ID NO: 155058 - protein, 115 aa, Oryza sativa
  Clone ID: PAT_MRT4530_54859C.1.pep
MADDGDWRRRRRQQLAAAVAGDGDCRWRRRQQLRCLLASGQLLAACWWRATAVCGGGGSGDGCRECGGGGDVDGGEEVGCEARMATARWLGVSAAAAAVVVTVSAVTGDMTASDG

SEQ ID NO: 155059 - protein, 101 aa, Oryza sativa
  Clone ID: PAT_MRT4530_5485C.1.pep
MSSSWTTKQNKVFERALAIYDRDTPDRWQNVARAVGGGKSVDDVKRHYEKLIKDVDRIDSTGGHQGSHYNSSNASSSSSSSSSNSRGSANEDQRRRYHNFQ

SEQ ID NO: 155060 - protein, 360 aa, Oryza sativa
  unsure (1)..(360): unsure at all Xaa locations
  Clone ID: PAT_MRT4530_54860C.1.pep
CSCATTTTPTAAPPPPAAAAAAAAAVREEGTHHHRHRHARHATKRGGGVRRRRSERRRNRKKGGGGEGEELEDLEEEEISFLFPLDGAGGGEEGRLLRAXVRKKRTRRKSDGPDSIAETIKWWKEQNQKLQEENSSRKAPAKGSKKGCMAGKGGPENSNCAYRGVRQRTWGKWVAEIREPNRGRRLWLGSFPTALEAAHAYDEAARAMYGPTARVNFADNSTDANSGCTSAPSLMMSNGPATIPSDEKDELESPPFIVANGPAVLYQPDKKDVLERVVPEVQDVKTEGSNGLKRVCQERKNMEVCESEGIVLHKEVNISYDYFNVHEIVEMIIVELSADQKTEVHEEYQEGDDGFSLFSY

SEQ ID NO: 155061 - protein, 90 aa, Oryza sativa
  unsure (1)..(90): unsure at all Xaa locations
  Clone ID: PAT_MRT4530_54861C.1.pep
IQYELNSDRDPNRSPLGLGGPSHGSYIFVRGVTGGVIASLXEHGEENARGGERRAAAIDYFLYTDARYIPDVPSATXHLLPLHNTSSGND

SEQ ID NO: 155062 - protein, 37 aa, Oryza sativa
  Clone ID: PAT_MRT4530_54862C.1.pep
MIEKACAPCSNGSREISIRSVIFHTTSPEEHTSSVPR

SEQ ID NO: 155063 - protein, 64 aa, Oryza sativa
  unsure (1)..(64): unsure at all Xaa locations
  Clone ID: PAT_MRT4530_54863C.1.pep
QKKKTSKPRTECPGIPGRPTESSETFKGGQAEQKKPKKKINQFQPRKGLQKPEKIPVKNAQDTX

SEQ ID NO: 155064 - protein, 580 aa, Oryza sativa
  Clone ID: PAT_MRT4530_54864C.1.pep
MHPSRSLHAKPPRSHGHHARSRSQLPTAISAPNQDFQFQFQLLPKVFQFHMDVGGGGGGGGEGKSSEKKVLAQLEQVRLSIASSEDEEDGDAPPRSSFSGASHPPEPVDEMDTVFVAVDGRDKAAKPVIMWDASPPQSGAASPHSSIDSSGAAATVTSIAPSCTVTSLSAKTSVSSSAASDGSGWSNSTAGAGSAAGGGFGGKPHKGGDPRWKAILAARARDGPLAMGNFRLLRRLGCGDIGTVYLSELSNVAVGGGGGAARAWFAMKVMDKASLESRHKLSRAQTEREILRLLDHPFLPTLYAHFETDKFSCLVMEFCPGGDLHSLRQSQLDKHFPEQAARFYAAEVLLALEYLHMLGVVYGDLTPENNVLVRDDGHIMLSDFDLSLRCAVSPTLIRASAFDSDPRRAGGSFCVQPVCMEPTSVWTFGVFLHELMYGRTPFKGQTNRATLFNVVGQQLRFPDHPPTSTAGSDLIRGLLAKEPQRRIGVNRGAAEIKQHPFFDGVNWALVRSRTPPGVPRAVEPVAVAAAVPATVMSKPPPVDTVEMAIHSNCNSTNSSKRMAGPPEVESGGKYLDFEFF

SEQ ID NO: 155065 - protein, 580 aa, Oryza sativa
  Clone ID: PAT_MRT4530_54865C.1.pep
PGCRNSARGRHETSAVTATWCLMLLAAHPEWQDRARAEVLEVCGGDGAAAPAAPDFDMVSRMRTVGMVVQETLRLFPPSSFVVRETFRDMQLGRLLAPKGTYLFVPVSTMHHDVAAWGPTARLFDPSRFRDGVAAACKHPQASFMPFGLGARTCLGQNLALVEVKTLVAVVLARFEFTLSPEYRHSPAFRLIIEPEFGLRLRIRRAGGQDATSQVDTSTAPSRAKGKIKFQKHMEKYDFFGKIVVPFSYAIGLWLSERPFDWDADEQKNLNREAISVVTYDATLGDSVSQRVHHQLASSARQERPAAMSGSGDAAPARHNAGHGRRRRRVLVWASFAALVLLLVAAAAAIAALAVLRPRDPTTELLSVNATGATPRVAALPAVSVQLNVTFLLVVRVRNPNRAEFRHGAATTALLYRGAEVGAAGVPAGTVPSRGAATLRLNMTVRADRVVAAAGVGGLLADVLAGEMEFEARTEVRGRVKLLGLVRRSAVARSLCRLVIGVADVKVRRQECHNESKLNNSVVSDVVVGMQPLSIEVQDIEGKGSGDLLSGSSAHAGDRSESTWEKLMSRDHEIMRDTKG

SEQ ID NO: 155066 - protein, 741 aa, Oryza sativa
  Clone ID: PAT_MRT4530_54866C.1.pep
MPHLYSAPERETGRIAHATRERFASAAVKQACMVLRWRNQMESMLLPPESRDWSELPMDAFSVIFAKLGAIELLMGAGLVCHSWLHAAKLPHLWQCVEMVHHEALSLKEPIVMSEMARAAVDRSDGRLEAFEGQWFVNDGLLNYIRDRSPKLKRLCLVSCYSVYKEAFIEFIAKCPLIEDIALINCGSVVFHALNVITGKSFPQLKRFELRTAFERPCYGCDVPLGIPTVRHLQHLILGGIIDIDNEEPPALTLILLASGSAMSSRGGSQRALKEGSSGGGGDGGVELGEEVEVKARSIHRWKEFYSDKAESLPYREGFQVLQWNPWTPCRCRCRRSCRRRRGTGRSCRWTRSPSSSASCRAIEVLMGAGLVCHSWLQAAKLPHLWRCVDMSHSHPRDVSRRNCAMAKVAVDRSGGKLEVFKGKRFVTNNLLTYVADRSPCLKCLYLESCTSVSNKGLTELITKCPMLEDLTLYSCRNIDGDVFVVAGKACRRMKRLHVRWCGALPAYFDGDEPVGIATMRELRHLTLEGIGVSQEKLMAIVDGCPQLDLLHVSGCPGLAAVDDALQAKCAGIKSLTLRPYQELEVWKKNEKIYHHPYTDSANPQALEKASTGPTAVKRDRPPSVVVQLDPAVVESDLAHRCSTGHHRRRRHQQTPPPVASPPDPGVDLAALPPPPLPLPCANATPSALPVMPPPPNAASCRLGLRPLLKTASPTSALESARVGTGGAGAVSPATAVLGDG

SEQ ID NO: 155067 - protein, 91 aa, Oryza sativa
  Clone ID: PAT_MRT4530_54867C.1.pep
IVSLNRNIKNFDSPNLQNRGNLTPWAVLGGGFADLGPRGAYVAILTEFLFHVGMTGPLRGGRNKKFAGDPFFIHTKRNGGPLKNLPPPFFP

SEQ ID NO: 155068 - protein, 61 aa, Oryza sativa
  unsure (1)..(61): unsure at all Xaa locations
  Clone ID: PAT_MRT4530_54868C.1.pep
AHGKKWRLIKDKIRRSQAGPPTRNQFPREREKGVQGTEQPRTDGASXAVAMGXPTCASXRR

SEQ ID NO: 155069 - protein, 97 aa, Oryza sativa
  unsure (1)..(97): unsure at all Xaa locations
  Clone ID: PAT_MRT4530_54869C.1.pep
CFFFFFCFFFFFFFFFFFFFFFFFFFLVLKKESWPNLGVEIVLAPPPMVFIYPTGDKAHLKIGGGNGGFNFFIGXXPFGEWGGHSGPQFEVIFGNEK

SEQ ID NO: 155070 - protein, 66 aa, Oryza sativa
  Clone ID: PAT_MRT4530_5486C.1.pep
NHIILLAFVKQRNSYSGQFMHVDNNKSNKDTDKSKDIYEDNQHNLCNCWVMKNIQGHLSQYQYVVV

SEQ ID NO: 155071 - protein, 296 aa, Oryza sativa
  Clone ID: PAT_MRT4530_54870C.1.pep
TESGSTRFSSSATSCAPPPPPSWAASGSAAAASASSPVVSCSDATGEGSTAVICSTAAAVSSASSPAACCSGDTGEGSTTVTCSSSASAAAAVSSSSSSSSSSSPTAAPCSGAAGEVSTAMTCSSSAAAAAVSFSSSSSPAATCSDVAGEGSTTSAFSSSAAAAAIPDSAAAAGDSVSTALVASALGAGAASDPSLSASSLSKSLRDLRRPASAGSPSTAATTTAAAAAAGASSTFFSFSSAAGGDGATAASSLTSGASPPFTLRSPGFVAHAPIAPKNQPPHHQLAHRRRGRRLD

SEQ ID NO: 155072 - protein, 87 aa, Oryza sativa
  unsure (1)..(87): unsure at all Xaa locations
  Clone ID: PAT_MRT4530_54871C.1.pep
MAAPDVEYRXFVGRLAWATDHRSLEGSFSTYGEILDSKVRPRSPTPRLEMGFFWLDYHVDSLCVEYQWVSLLGCLDLRTRGVLLRLF

SEQ ID NO: 155073 - protein, 61 aa, Oryza sativa
  Clone ID: PAT_MRT4530_54872C.1.pep
MRIVVYLFTRPEDRQSRLLINLLRSSPPQQAHQRLPLLIPHRIVIVIRSSGGTELDRRPIE

SEQ ID NO: 155074 - protein, 78 aa, Oryza sativa
  Clone ID: PAT_MRT4530_54873C.1.pep
ATAASSTSHGIRKSFSTSDAACSKVACNEPEKKCRRLCLSFSIDHCLKHSYCLIRNFIDLFHYRLFITWRVLGFSFNF

SEQ ID NO: 155075 - protein, 149 aa, Oryza sativa
  Clone ID: PAT_MRT4530_54874C.1.pep
MTAEADDPTAAETLEKFRLYETRARFYLIGTSREKRWFQVLKIDRSERSELNISEDPVWYSQQEVKNLLQRISEGNRSTGGLTFVTKAYGIAGCIKFLESYYLILVTKRCQIGCICGHPIYCIDESQMITIPHSSVQTDVATSKNELRY

SEQ ID NO: 155076 - protein, 166 aa, Oryza sativa
  Clone ID: PAT_MRT4530_54875C.1.pep
MYFRIVLGRDIDLGFKFYDLTDKVHRVLGQTHRFDYVNNLSVSANLPVMGGTLWYTISDIFSTNCAIDRFGRHAGISMQEHTKYMDRNFLVAVLLVLYTLDQQENWCRRLGAGSMPANEDGMEMTNEQTIEKVADCHGVEDLTASKVDTKGVAIDGRRNSYTHAWQ

SEQ ID NO: 155077 - protein, 97 aa, Oryza sativa
  unsure (1)..(97): unsure at all Xaa locations
  Clone ID: PAT_MRT4530_54876C.1.pep
QYGIGASPFLQXMGFXLKNNQVWEQVGLGGEQFPYRDINIVQAKGEQLQLQQVGDLDFGGNLGQGQGLLGFNGPFKNGIAPREYGAPGTISPLGGVL

SEQ ID NO: 155078 - protein, 605 aa, Oryza sativa
  Clone ID: PAT_MRT4530_54877C.1.pep
MASSILSDCSSSATSRLLPLRRALLAPPCRFRPATVAAPPRRPLAIAAPQLPLLPRARGTASASAAAAAAASSTDSDACAKIIDGKLVAKQIREEIAVEIAKMKDAIGVVPGLAVILVGSRKDSQTYVRNKKKACEAVGIKSYEVNLPEDSSEDEVLKHIATFNSDPSVHGILVQLPLPHHMNDENILNAVSIEKDVDGFHPLNIGRLAMQAVGVANLVRGSWIKPGAAIIDVGINPVDDPESPRGYRLVGDVCYEEASKIAGLITPVPAYQIRVLLNLFVCLLLDSSELSPSLSRVSALHLHWGALLLLRLRLATHHFGAERRPLHPPICEKPSPPRLLHLPILTQPPPFLSRRPLALLLLQPSSFLEFLEREREREREREREREGGERSQEEEDGGVCCDRRGAARMSASRFIKCVTVGDGAVGKTCMLISYTSNTFPTDYVPTVFDNFSANVVVDGNTVNLGLWDTAGQEDYNRLRPLSYRGADVFLLAFSLISKASYENVSKKWIPELKHYAPGVPIILVGTKLDLRDDKQFFVDHPGAVPITTAQGEELRKQIGAPYYIECSSKTQLNVKGVFDAAIKVVLQPPKAKKKKKAQRGACSIL

SEQ ID NO: 155079 - protein, 373 aa, Oryza sativa
  unsure (1)..(373): unsure at all Xaa locations
  Clone ID: PAT_MRT4530_54878C.1.pep
MASNGMASSPSSFFPPNFLLHMAQQQAAPPHDPQEHHHHHHHGHHGHHHEQQQQQQHHHHLGPPPPPPPHPHNPFLPSSAQCPSLQEFRGMAPMLGKRPMSYGDGGGGGDEVNGGGEDELSDDGSQAGEKKRRLNVEQLCLFKLYVLEMTFEHGNKLEQERKMKLARKLGLQPRQVAVWFQNRRARWKTKQLERDFDRLKRPLDAVRADNDALLEDNENLHAEVMSXALKGREAASELINLNKETEASCSNRSENSSEINLDISRTPPPDAAALDTAPTAHHHHHGGGGGGGGGGGMIPFYTSIARPASGGGVDIDQLLHSSSGGAGGPKMEHHGGGGNVQAASVDTASFGNLLCGVDEPPPFWPWPDHQHFH

SEQ ID NO: 155080 - protein, 83 aa, Oryza sativa
  Clone ID: PAT_MRT4530_54879C.1.pep
PGQNPFLFKRFGPLNQNVGPVNPSFNYFPQGELENLGKTCGLVNYTTKGPRGFLMFFGQKPEPKISSKPLEPKESWPFSKRLW

SEQ ID NO: 155081 - protein, 86 aa, Oryza sativa
  Clone ID: PAT_MRT4530_5487C.1.pep
GPTSTSGQGAMNMDPGLPLFKASKCPPIGSRRVIHQEWWVSPCWLAAFLLYRRGIDLGLLHPANLVIGLFLAGKMKKPVKHKNNQP

SEQ ID NO: 155082 - protein, 1006 aa, Oryza sativa
  Clone ID: PAT_MRT4530_54880C.1.pep
RHHRGSDPLAAAAGSGEEAAVTCPIYVKPFPSELAVSDHLVGCLVVAGGACPYAATYLAGDPLASSMGVVKELVASLQRHAEKKLHTEPNKNAVRICTQRRGSRQAAHQGDMYAINAARRHGPSGRQKVQYADRYPKRSSNPGHGPFRRRRKGAWVAEPHEEMPAQKRPLQPADSDDSDGHVPVGRAASSRGGGGGVSHESDGEDAARRAREPPRDQRDGDPDEGDGGGGDGSGGGSDSESSLNGAGDKDDSYALQAYKKYRDRFVSLRRRLLQDRLDRSPQRPSRWMKFSRRVTRHLPLLHTPTYMRRAATAAGRTKSATQHDPPSEPDPALRRLASVFHLTQLTFFDQSRTQTSGMEAHPLPWPVAATATQLVRDSEYSRGSSFQQRKEKYGRRPACMPRWIAATAARSYGQRARMPAQKRRLSSSPSSRPRDHVETNGMTGASKAAAGSGGGGGGGSGGGVPLPPRGGSAAAAAAKRAADPQPQREGGEFFVASTSRPPISPAAGRDMHVAFGVSVRIWLRGLCVSMGLADSDAEFGGGVDGDSESSQSDGDMDDPPRGATTRILAPVRRIVLRWFCEMPPCRPELVHNSEISRNTKGGPMPYLFRNNECPACRTHCASRRSLRDDPNYDALIAALYPDIDKYEEEELAFSEEERSRNKKIQATIEETIRRQSEAVGKKRSTAKATATVFARKYRRNMRTRGRGKTIAPDIAPTGSDNEDREEGNAIDTTKESSSADDRSSDLMPKRGRKRPASRASPARTIGSSDHVFEENDELIGGKESFTTSPLRGEMLAWGKNGTRSQTRHGSVGGSNGRMAKGGRVAKLVDHLRTTDDMDKEFIALQLSRQVEELDIFMRIDHCNGSVTTQDCTTGVAKMRLSDGLERIREDKLLSELHPSFTSHHGDLRLPVRHGDARVGGQHGVQRVHCPHGVHRLHHPHDTGKRKAPSLVPPPERAEYLEKDSNEEDEDLQGSTCTSRPSVLRRISPNAVKKLTPDNGWFFVTGI

SEQ ID NO: 155083 - protein, 145 aa, Oryza sativa
  Clone ID: PAT_MRT4530_54881C.1.pep
LGNERITINERVFLLQSAPSRLPLFSVFSHAFSSSFRAHFSDLFSFPWRRGLTNAMRCSIGRQEGGHAAEATACSCPSPHNAHRLRNCTRYGHGTLDPCNLYSTTVWRWTVLAVRCQARPPNFERTYSPLVVFVPSHKAIYNAHR

SEQ ID NO: 155084 - protein, 48 aa, Oryza sativa
  Clone ID: PAT_MRT4530_54882C.1.pep
AIRMRRVILLLLTAYLGLMDSGEKLHLSTELLLLLFSWSTKHYGRVHN

SEQ ID NO: 155085 - protein, 114 aa, Oryza sativa
  Clone ID: PAT_MRT4530_54883C.1.pep
KTRRELYAVPLSGGNTYQLSFNRSSASTLSPPGSFMVAKSSNAVAFLGFTSVTNVYWNDVSWFTPTTTTTAPTTTTVITTTLSPSNTTRSPTTAPALASFVGVLSSIILFVLIP

SEQ ID NO: 155086 - protein, 767 aa, Oryza sativa
  Clone ID: PAT_MRT4530_54884C.1.pep
MNVLDTLAVQFYFKGNFVVQGKEKSYCGGREAMSYIDRDKVSLPELVGHLRDHYEVMDGTLLHWLVPGGELDDGLRALVDDKVCNFMSDCICEGGVAEIYAEEPILVDVSDCEPDLQSIHEQEEHGAIQGLEDNVESEKRLVVYKQQEEMFNFEAEDDSDTDSDYIPGDESESDEGEEAESIKKQYKQLKKKIKAGQANILDDVAFEGYKTNPVMQDGAEEGGNEEGDSDESIEEIGSDGEVTTRASNYARFKEDSTVPHFELGMKFNSKAQFRAAITRYALSERKVINFIKSDPKRVRAKYDWSSCPWVCLLSKTSRSDSWQIATLDNCHACPPRRDNKLVTSRRIAEKYGKFIFANPSWNLAHMKATVQEEMFADASIGKLKRAKQLVMKAALDATKGQYQKLYSYQLELLRSNPGSTIVVNREVGMDPPVFKRIYICLGALKKGFLAGCRKVIGLDGCFFKGATNGELICALGRDANNQMYPIAWAVVHKENNEEWDWFMDLLSSDLQVGDGEGGFSMLFKNGLQWLNIEIVLGTSMPTGRSTSMTKNNKRSFGGAQAIMNTHPQHLSRAWFKWILEARFFPIITMLETIRRKVMVRIKDQIANSNRWNTVICPGILKKLNVYIAEFAFCHAISNGAEAYEVKHHEHRFTVQLDKKECSCRYWQLSGLPCPHAIACIFYKTSQLDGYIADCYSVETFKKIYAHCLQPLEGMSSWPEDDRQPLNAPGYIKMPGTPKTERRREAHEPAKATRASKIGTIIRCRKCK

SEQ ID NO: 155087 - protein, 45 aa, Oryza sativa
  unsure (1)..(45): unsure at all Xaa locations
  Clone ID: PAT_MRT4530_54885C.1.pep
MSSIQLSFSLRVSSGVKTVHLLRSWDGYIGQLPLSXDKSSSKSGS

SEQ ID NO: 155088 - protein, 157 aa, Oryza sativa
  unsure (1)..(157): unsure at all Xaa locations
  Clone ID: PAT_MRT4530_54886C.1.pep
DKEAERTECSHXLLYEINLINEELFDTVISITGHKHGGTVIKFSYNAVSLAQDMELPFAAYGTSPLKPAKLFVPADYPRSSPVYEDGDEQHQGMYSVISGMVDKVFQRALRKLPVPMSIRDMARQWGISVRTVTNGGGTFSSGYGQWESCTDEFASP

SEQ ID NO: 155089 - protein, 497 aa, Oryza sativa
  Clone ID: PAT_MRT4530_54887C.1.pep
MTFSGMDIALKASTHSSTSQQHWLHSTRYRCQYGLGSTHLNGRKRSPMVLSVRAVSGKSDLDFSDPSWKDEKNRTDGGSLSADKWNGYVNKDDRALLKVIKYASPTSAGAECVDPDCSWVEHWIHRAGPRKEIYYEPAEVKAAIVTCGGLCPGLNDVIRQIVFTLEIYGVKNIVGIQFGYRGFFEKGLKEMPLSRKVVENINLSGGSFLGVSRGGAKTSEIVDSIQARRIDMLFVIGGNGSHAGANAIHEECRKRKLKVSVVAVPKTIDNDILFMDKTFGFDTAVEEAQRAINSAYIEARSAYHGIGLVKLMGRSSGFIAMQASLSSGQIDVCLIPEVSFTLDGEHGVMRHLEHLLEKKGFCVVCVAEGAGQDLLQKSNATDASGNVILSDFGVHMQQKIKSHFKDIGVPADVKYIDPTYMVRACRANASDAILCTVLGQNAVHGAFAGFSGITSGICNTHYAFLPITEVITKPKRVNPNSRMWHPCLTSTGQPDFH

SEQ ID NO: 155090 - protein, 160 aa, Oryza sativa
  unsure (1)..(160): unsure at all Xaa locations
  Clone ID: PAT_MRT4530_54888C.1.pep
GKRKTGRRRRAKGNTGGRGSHGGGRLQVAVSHSAGGAHGPGSNAALRAAGKARASSAPDASPAPGPAYAVGRIRRAXRPAPFWGGGGGSIKVQVWLVGFCVFDRGGLRTRRRLGAAFPTPAGVVPFPVPVPSLAGVVPVHSHAIEPCCVYAPERKKREMR

SEQ ID NO: 155091 - protein, 83 aa, Oryza sativa
  unsure (1)..(83): unsure at all Xaa locations
  Clone ID: PAT_MRT4530_54889C.1.pep
SIKCNTQEHCCPIAANVVARAHCIPPPKLLHWLLHKRMVVLVGDEHHPMLPPSLSSVHXTMPGEKVKNNGVRPLPXDAARCLH

SEQ ID NO: 155092 - protein, 932 aa, Oryza sativa
  Clone ID: PAT_MRT4530_5488C.1.pep
MPLDPDSSPAPPHRDWFFPPAPPFLPSSRARTPRAPFPSTSRSSNPYSFPDRRPPPTPRSRSRSPLPPPEQQKQQQPPPTTPPPAPRRRDPRYAGVRRGDVRTLTAEKAAAAAAVPTAAQVHGSKSAASATTLRWSGMVSVAAIVLCFSSLVRSNSSLHDQVHHLKAQLAEATTKLQSCITESSMDMSSILSYQSNNSTSQNRGLKNFSLLLSLSTLYAPLLILKYMDLFLKLRSSQDSEEEVPINKRLAYRVDIFLSLQPYAKPLVLLVATLLLIGLGGLALYGVNDDSLLDCLWLSWTFVADSGNHANAEGFGPKLVSVSISIGGMLVFAMMLGLVTDSISEKFDSLRKGRSEVIEQSHTLVLGWSDKLGSLLNQIAIANESLGGGTIVVMAEKDKEEMEADIAKMEFDLKGTAIICRSGSPLILADLKKVSVSKARAIVVLAEEGNADQSDARALRTVLSLTGVKEGLRGHIVVELSDLDNEVLVKLVGGDLVETVVAHDVIGRLMIQCARQPGLAQIWEDILGFENCEFYIKRWPQLDGMQFEDVLISFPDAIPCGIKVASYGGKIILNPDDFYVLQEGDEVLVIAEDDDTYAPAPLPKVKEAVYIDIVHPERNPQKILLCGWRRDIDDMIVVMRGYLPKDFVVPKSPERILFCGWRRDMEDMIMACPFENVLDAFLAPGSELWMFNDVPEMDRERKLIDGGLDFSRLENITLVHREGNAVIRRHLESLPLESFDSILILADESVEDSAIQADSRSLATLLLIRDIQAKRLPFREAMVSHVTRGSFCEGSWIGEMQQASDKSVIISEILDPRTKNLLSVSKISDYVLSNELVSMALAMVAEDRQINDVLEELFAEQGNEMQIRPADLYLREDEELNFFEVMLRGRQRKEIVIGYRLVDAERAIINPPDKVSRRRWSAKDVFVVITEKE

SEQ ID NO: 155093 - protein, 922 aa, Oryza sativa
  Clone ID: PAT_MRT4530_54890C.1.pep
MEFTTGTMGTLLPKLGKLLKEEYNLRKSVKEGIIFLKAELESIQAVLEKVSMVPLDQLDTQIKFWARDVRDISYDIEDTIDTFMLHVNGLEPTNTTSHVKIHHKIANDIKYLKRQIKEVMDRRDRYKIDDIVAKPRTVIDPHLLALYEKATNLIGVDKPADDLIKMLSIGDEISRNLKMVSIVGFGGLGKTTLAKVVFDMLKGQFDCAGFVPVGQRPDIKRVFKDILIEVNKHKYMVFDALALNERHLIDELREYLDNRSPFHSHADRYLIIIDDIWETSTWKIIKCAFLDSNSGSRVIATARISQVAKEIAKEFGYVYIMKPLSINNSKKLFYSRIFGADYNGPSNNQPAEVTEKILKKCGGVPLSIITMASLLVHKPLEDWSDVYESIGFGSTDQNEVVHNTRKILSFSYYDLPLYLKTCMLHLSIYPEDHLIEKDCLIWKWVAEGFIREEQGKGLFETRERYFIELINKSMIQPTEQTLFGCKVDGCRVHDMMLDLIRILATEENFLKVLHRGHEQQSPSLHSKTIRRLALHKSRNQDNFAIGMEQLRLFNAIECPINMTSPLVNSHVLRVLALENCVVMGGCLKHLRKLLQLRYLGLRYTRIDELPSEIGDLMHLQTLDIMNTGLEALPATIGKLTKLMRLRVDNGTRVHAGVANLTSLQELLLGKISDDTCPNFAVELCTLTDLRVLNIWIKMEDEGTLNTLVESLQSLRRIQNLNIRLDIKDTGMETKYSMMCIWEDWEPPRQLREFYLSGWTGFLPRLPAWMNSKRIPNLSKLDMKVLAMEPWDLDTLGRMPMLHYLRRRICTKISSWTVGCGLFPNLRYCMMNIELKFLQGVMPMLMEIEFYVSASSLGVPNDVGLGNLPLLNCAHISLECKGATGRQVEEAEIELRRYHPNRPAIYVFRLDEVRLVLLVIMII

SEQ ID NO: 155094 - protein, 222 aa, Oryza sativa
  unsure (1)..(222): unsure at all Xaa locations
  Clone ID: PAT_MRT4530_54891C.1.pep
SPPPPPLRLALVTVARLAGPPMPWHGFSPPLGAXPLLSQQSRSRSAVVTARAHXLTGAVFTVVPLAHRWREMGSGERDLGARVLPLSSGWHFNRRGDDRSHPLDRMAQICPALGRCRCXLRCAQWATEVHRTVLIYVGRAQLLGLRAVKLTQLAEDEPAQVWVGLGRSGPKAFSWCHYQMVFFPLQRTGTIASKKKRKGDHHININMNIGNVRMTYIVKRME

SEQ ID NO: 155095 - protein, 78 aa, Oryza sativa
  unsure (1)..(78): unsure at all Xaa locations
  Clone ID: PAT_MRT4530_54892C.1.pep
GQGPPAVMCSFNSQLQGPQAILATFFSAAPPVPSXVLAKAFRVNVPQVGPSKAKFKCWYPPPADLPTFLAFFFSNKAM

SEQ ID NO: 155096 - protein, 76 aa, Oryza sativa
  Clone ID: PAT_MRT4530_54893C.1.pep
MQGCRERSVPDELYQIGTLRLQGYKLIEMQGWHESSVPDELYQIGTSRIQGYKLIEMRGWRERSVPDELYQIDDKT

SEQ ID NO: 155097 - protein, 127 aa, Oryza sativa
  Clone ID: PAT_MRT4530_54894C.1.pep
MGGEQGWASVDLAASVASHDGSSGDHDRSSFLWRILGRLWCQWRPTTVVVEKEAHPSSPPFHLATAVMVEKAGEEGEVMAGIEDKTLVLDVHVFMVFLMFLFVRSVHVFLDTGTFESSQRCRLLGVS

SEQ ID NO: 155098 - protein, 44 aa, Oryza sativa
  Clone ID: PAT_MRT4530_54895C.1.pep
FFFFFYTRKGQLYFHNIIARTFRYISTTNLFTPYDLSLNSNKHE

SEQ ID NO: 155099 - protein, 582 aa, Oryza sativa
  Clone ID: PAT_MRT4530_54896C.1.pep
MDTRVPPVPMGRAMAAEFRRRGDDPDDVQGTVARVLSYIHYALPDPPVSAAARLYALAPHDAVDRISALPDALLRRVVSRLPVKDAARTAALSRRWRPLWRSTPLVLVDAHLLSSSSAAPGAPDDSSKKAREAARGVTHAVSRVMGAHPGPFRCVHLTSSCMEEFQGMLANWLQVLAMKGIQELVLVNRPWPLDLGLPATFFGMATLTRLYLGLWKFPATADLPRGVSFPNLRELGLCSVVMDTQDMDFVLARSPVLETLCIKGNLFRMRIRLASRSLRCAQIIGSSYEEIAVVDTPCLERLIVSGTWRHDGASSGSVKIGNAPALRVFGYLDPAANVLVVGKTAIKSATKVSPSNMVPNVKILALEVRFGVRNDAKMIPNVLRCFPNIERLHIKSGKTDETTGKLNFKFWQESGPIECIRSSIQMIVFHDFHGTRSEVNFLKFFFETTRVLKIVVILFDTGSFSSMDESPAGAELKKKQEPVAGGFRIARAQPCMRISGGCFKPSASENVIFAEPLPLAGVEESICCQPSFSLPSRHHRGRSSSSPLLVKRRLPPAILFVAAFGPPPCRTIAALCSWACTR

SEQ ID NO: 155100 - protein, 47 aa, Oryza sativa
  Clone ID: PAT_MRT4530_54897C.1.pep
YLSADVYLYPGTHVSSIVASSSTNRATLHVSVNHDTPNSPCRECHRQ

SEQ ID NO: 155101 - protein, 42 aa, Oryza sativa
  Clone ID: PAT_MRT4530_54898C.1.pep
MPAFSTYGEILDSKIINDSGDGECHVGFGFVTFSSEQSMRDA

SEQ ID NO: 155102 - protein, 668 aa, Oryza sativa
  unsure (1)..(668): unsure at all Xaa locations
  Clone ID: PAT_MRT4530_54899C.1.pep
MQEEERTSSRCCKPIQVLQTTSGIASSNLEKVEEXEHFFHQRVGHNHNLNQLDDLNYAHICFIPKKEDATSPNHYRPIXLVHSFAKIVSKILANGLTPTMHEMININQRAFIRKRSIHDNFMYVQNLVKRLHRKKFKTLILKLDISKAFDSVSXQYHIEVLTQLGFGTRRRNGISTLFQKSSSKVLVIGIPGQPIKHARGLRRGDPLSPFLFIIAMEPLNNIMKLAEQSRVISPLGIGNLRFRISLFADDVAFFVKPDSTEIENLKVLLELFGEVSGLRNNIAKIEILPIACANINMQQIFXNFHGKLSSFPTTYLGLPLHTRKLNKIYFLPLLEKISSRLLGWKXETLVKYILSAIPTYQMTTLKIPKLVIKKIDKLRRSFLWKGTEPENLRWKDDQRPWAQMKLPCNEKDRHLFLFWHDNWLQDQCPKDILPDLFSLVQRKSRTVATXLSKNSWLTSFRQITNVESIHELVQLGTMLSLITLEENTEDDISSSLNSSRCFSTRSAYQVHFLGSVMNPSFKIIWSAHAXPKQHFHGWLILHQKALTXHNLLIRHXPCNCICSLCXRALEDTVHLFRDCTFTRQVWESISTMLGLPTTPRGSVPEWIAPLTSSANATQSKAKFNALISTXWHIWNQRNTTIFKQTSNSFVDVATLIKEDIDLRNFVFK

SEQ ID NO: 155103 - protein, 76 aa, Oryza sativa
  Clone ID: PAT_MRT4530_5489C.1.pep
MVGGGAAPGGGQRRRSRWQPPRAAGVAVCGGGRRGRARWRLCPHDCRTIEGLPTGSKKAFSTSDCLWKYTYMDPVW

SEQ ID NO: 155104 - protein, 142 aa, Oryza sativa
  unsure (1)..(142): unsure at all Xaa locations
  Clone ID: PAT_MRT4530_548C.1.pep
GKYMAACLMYRGDVVPKDVNAAVATIKTKRTIXFVDWSPTGFKCGINYQPPTVVPGGDLAKVQRAVCMIANSTAIAEVFARIDHKFDLMYSKRAFVHWYVGEGMEEGEFSEAREDLAALEKDYEEVGAESADVEGEEDVEEY

SEQ ID NO: 155105 - protein, 60 aa, Oryza sativa
  Clone ID: PAT_MRT4530_54900C.1.pep
MCQPHRHMLQRGKRSTKPTVATRDRSPPGLQHHHEAETLKNDALTKVVVPKDAVVIRPKN

SEQ ID NO: 155106 - protein, 63 aa, Oryza sativa
  unsure (1)..(63): unsure at all Xaa locations
  Clone ID: PAT_MRT4530_54901C.1.pep
QKKKKKKKKKKKKKKKNDGQIKKIQTYNTHTCNFFSMRGVGLNXFYCPIKNNFXILKTLSLPN

SEQ ID NO: 155107 - protein, 101 aa, Oryza sativa
  Clone ID: PAT_MRT4530_54902C.1.pep
RTPPVHKGKRASNNKDSRPVTQIGIKDKDKRARKRHRSKSAREPLPPTPDAKQARKSSVQDKRSRSSWRLGYSPRPPRRRRRPSHQPEGRRGQGAGGGRRA

SEQ ID NO: 155108 - protein, 429 aa, Oryza sativa
  unsure (1)..(429): unsure at all Xaa locations
  Clone ID: PAT_MRT4530_54903C.1.pep
MSVSCGLEWVVCLGCTRWAWKRLTYIGAYDSEAWPAAAPGEFEPVPRICRVILAIYEDDLSNPTKFAPPGRGYAGVDLAGVVKRATYEHVGNTCPPYIVYVDHRHKEVVLAIRGLNLTRNADYKVLMDNKLGMQMFDGGYVHHGLLKAAQFILERETKTLQELLQQNGPDYKLIFAXGHSLGSGIAALMTVLVVNNRKMFGNIPRSQIRTEGIMXAGACALKLIGDLYYALDSLPCLLFIMCLRDTFKQDKRKFKDPRRLYAPGRMYHIVERKFCRCGRFPPEVRTAIPVEGRFEHIVLSCSTTSDHAIVWIERESEKALELMKGNEKPTTPPAQQKMERLQSFEEEHKNALERAKTLDVPHAVDLSEVEIQEGSSPTPPSDTHSEATSEAKSAGRTSWDELMHKLFTRDEGGKLVVKEDIKARNIVIE

SEQ ID NO: 155109 - protein, 83 aa, Oryza sativa
  Clone ID: PAT_MRT4530_54904C.1.pep
GIHTRIRVVCSTACSTAHAVLWGISVASTLVCLLRLSIYNSNSSEDPLGQMYELGKETCMTMLEGLHFLPKFGWRFSNRVQFF

SEQ ID NO: 155110 - protein, 45 aa, Oryza sativa
  Clone ID: PAT_MRT4530_54905C.1.pep
FIERVSQVMSLLIIRKGENFIHVKAACPPHPQNLGTGNYMFTAYL

SEQ ID NO: 155111 - protein, 171 aa, Oryza sativa
  unsure (1)..(171): unsure at all Xaa locations
  Clone ID: PAT_MRT4530_54906C.1.pep
LPPPPPPPPPLLPPRPPPPPPPRRQXERSRSXNKARHLPTPEEKNPRRILEGEALPRRMNRYGLPAEGQNKPDYVLALTCENFPARRLQTLDFKAGMAKSIHQARVLIRQRHTRDGRQXCNIPPLQERAESEKHTDFSPTSPSGGGPPGRXKRKNQKKASGGGGDGEEEDE

SEQ ID NO: 155112 - protein, 837 aa, Oryza sativa
  Clone ID: PAT_MRT4530_54907C.1.pep
MFASSSSSRPRSSAAAPSAMGSSTVAAAAAMAVTSSSTAAAAAVAAAASSSAAAPATRSRVIDREFGMALLARRARKAVMAKAPAPLLQKRGGGAAAELAIPAHFRCPISLDLMRDPVTAPTGITYDREGIEAWLDTGRAVCPVTHAPLRHEDLVPNHAIRRVIQDWCVANRSRGVERIPTPKIPATPVQASELLFDVAESAARRGAAGRAAGAVARVRALARDSERNRRCFVSVGTGRVLAAAFESLAAAGEAGVLEDVLAALVCMMPLDEEAARVLASSSSMGSLVAIAKHGSLAGRLNAVLAIKEAVSRDGAFVDLADDKVDKVVDALVVIIKAPICPQATKAAMVATYHLASSDERVAARVASTGLVPTLIEALVDADKSVSEKALAVLDAMLASKEGRASARGHALAMPALVKKMFRVSDVATELAVSAMWRLGCKASSEKYNSSSPYPFPSPKPPRHRAPPPRPRRKSSAAPPPLGHNRPPLAGIRISRGREGKGREGRKVRADMSAAPIPREWVGLQQFPAATQTKLHELLGKLKEENVSTLTILVMGKGGVGKSSTVNSIVGERVATVSAFQSEGLRPMMCSRTRAGFTLNIIDTPGLIEGGYINEQAVEIIKRFLLGKTIDVLLYVDRLDAYRMDTLDDQVIRAVTNSFGKAIWRRTLVVLTHAQLSPPDGLDYNDFFTKRSESLLRYIRAGAGVSKRELGDFPLPIALVENSGRCKTNENGEKVLPDGTPWIPNLMKEITTVVSNGSKSIHVDQKLIDGPNPNNRWKMFIPLILMVEYFLVVKGIRRAIHADISNGKLDDWEQRYRDLVGSKDPVDQKGSSSGNRKA

SEQ ID NO: 155113 - protein, 78 aa, Oryza sativa
  Clone ID: PAT_MRT4530_54908C.1.pep
MANEVDVVGTSDFDWVEHSSWFYDNEAVTKTTATSIFGFVARSNSYRGRSGQTWCCLGSSLHLRRFVFLLSLAGQKLQ

SEQ ID NO: 155114 - protein, 162 aa, Oryza sativa
  unsure (1)..(162): unsure at all Xaa locations
  Clone ID: PAT_MRT4530_54909C.1.pep
RAAGIRHEGRISLXCTVTPASSNSEETHNTLKFAHRSKHIEIKASQNKIIDEKSLIKKYQKEITCLKEELQQLRRGMMGNGYIPPTDQEDLVSLKLQLEAGQVKLQSRLEEEEEAKAALMGRIQRLTKLILVSTKSSISSNVSGKASLRRRHSFGEDELAYL

SEQ ID NO: 155115 - protein, 77 aa, Oryza sativa
  Clone ID: PAT_MRT4530_5490C.1.pep
QKYFFSLLICRCFIGVVLLLATNMKWRREGYTHMHILYIDIWPIVETIGFKHTCPKKHMVSIVRVDNSILICSLRNT

SEQ ID NO: 155116 - protein, 109 aa, Oryza sativa
  unsure (1)..(109): unsure at all Xaa locations
  Clone ID: PAT_MRT4530_54910C.1.pep
ERKKKKKKKKKKEGKKVKKKTKKAKKTPLRIPPWATIWFNQGANGGVXQSHGAGFKCLQEAPLFVPKIPPWGRVFKIRPPPSQEVGQPRGQQIKKPLGPLLTPLKKPPK

SEQ ID NO: 155117 - protein, 169 aa, Oryza sativa
  unsure (1)..(169): unsure at all Xaa locations
  Clone ID: PAT_MRT4530_54911C.1.pep
TRAEARSGLKFRELYGKFRDVRVPEMYLEQTRRRVLIMEWVEGEKLSEVRDQYLVEVGVYCSLSQLLEYGWXHADPHPGNLLRTVDGKLAYLDFGMMGEFRQELRDGFIEACLHLVNRDFDGLAKDFVTLGLLPPTAQKDEVTKALTGVFQNAVDRGVQNISFGDLSGN

SEQ ID NO: 155118 - protein, 158 aa, Oryza sativa
  unsure (1)..(158): unsure at all Xaa locations
  Clone ID: PAT_MRT4530_54912C.1.pep
TPRKTYPKNGPFWGARVAGAVVQQDGASLFGAVPLPTWLGDVEELTGTNHVKNKLKRTKYVACGIFQSSTEKLLSLKTQSCKRNLEVLISLNPAERGEXGCNFFCRCPCIYYLPDSESMDRNGGGGASHAVALLLPRRFACATVAGGRRQRGWRRPIG

SEQ ID NO: 155119 - protein, 117 aa, Oryza sativa
  Clone ID: PAT_MRT4530_54913C.1.pep
NKPPKTIPNFITGPPQRGGTLFLPHHKKRGGPPPKNPKGQKQLWGGGGGPQGKPPPGGGKGKPPGPGPELGAPQKNQKKTGLGGRKTAPGGKNPGKEMGGPKTQLGEKIGAQKPGKG

SEQ ID NO: 155120 - protein, 102 aa, Oryza sativa
  unsure (1)..(102): unsure at all Xaa locations
  Clone ID: PAT_MRT4530_54914C.1.pep
ELTGTNHVKNKLKRTKYVACGIFQSSTEKLLSSKTQSCKRNXGRIRCNFFCRCPCIYYLPDSESRNRNRGGGASHAGALLLPRRFACATVAATTNPTAIECY

SEQ ID NO: 155121 - protein, 117 aa, Oryza sativa
  unsure (1)..(117): unsure at all Xaa locations
  Clone ID: PAT_MRT4530_54915C.1.pep
ELTGTNHVKNKLKRTKYEXVACGIFQSSTEKLLSSKTQSCKRNLEVLISPNPAKRGRIGCNIFCRCPCIYYLPDSESRNRNGGGGASMAGALLLPRRFACATVIGGRRQPLWRPKKD

SEQ ID NO: 155122 - protein, 82 aa, Oryza sativa
  Clone ID: PAT_MRT4530_54916C.1.pep
MQNEEGQMVDLYVPRKCSTTNRIITAKDHASVQINIGHVDENGLYDGRFTTFALSGFIRAQGDADSALDRLWQKRKAEVKQQ

SEQ ID NO: 155123 - protein, 208 aa, Oryza sativa
  unsure (1)..(208): unsure at all Xaa locations
  Clone ID: PAT_MRT4530_54917C.1.pep
MCLDYTVPGVLPVTCSFGFHASPPIIIFKXLTDLIQYNSDNFYITFKNPXTPRKTYPXNGPFWGARVAGAVIQRDGASLSGAVPLPTWRGDAEELTETNHVKNKLKRTKYVACGIFQSSTEKLLSSKTQSCKRNLEVLISPNPAKRGXIGCNFFCRCPCIYYLPDSESKNRNGGGGASHAGALLLPRRFACATVAGGQRQRGWRRPVG

SEQ ID NO: 155124 - protein, 82 aa, Oryza sativa
  Clone ID: PAT_MRT4530_54918C.1.pep
MQNEEGQMVDLYVPRKCSATNRIITAKDHASVQINIGHVDENGLYDGRFTTFALSGFIRAQGDADSALDRLWQKRKAEVKQQ

SEQ ID NO: 155125 - protein, 104 aa, Oryza sativa
  unsure (1)..(104): unsure at all Xaa locations
  Clone ID: PAT_MRT4530_54919C.1.pep
GPFWGARVAGAVIQRDGASLSGAVLLPPWRTRTDVAGGGRQHGWRRRLHSYFSXGVATPLWRTPPSHLSIAPPRRQGDGAREAGAVPLDDGASHSGAPKRTIFG

SEQ ID NO: 155126 - protein, 508 aa, Oryza sativa
  Clone ID: PAT_MRT4530_5491C.1.pep
MARSRRRCIVQSHEEYLSEEHIAEENAPKQLATPSEQETICSDVQEGNEDTNDDVGEANEDTDDDASMNAGEGNEESDDDVEINVRDENGTIETRGKTKLKDIWNLPKRLRIVVQCNDLNQAVGDEAGILSKFLGMMRFLYAPRMEEFILKTIRERWRGHKAKLKEKYFDVNKSKEANCNNVPADVLPDQWIALINHWMSEKSKRQKDPAKNPHRAIVYIQTHKRKTGKNLNGHVDNLKKLVVEQPALADTSEGRTAWKGDALNQILGDDKPGHNINVTRLDDNWSEDVVAARLQLEKIENHVQNHDAELLELKAKTNKLEKEQMNQGGLDRVSTNKEASVDGPISKRRRVYSDHPLQEICIAEEENDMVQEENNMMNIQSHVPNEDLQPKTKQCVEDKNKQNWEQHDYGKQRKVISAQKRQCSTTNFIADNSMEDTNIHVQNKVLQLPTKQSTIYKNKGNMNQNDHMQQGKNNSNAYKIGTNVFLKSWKNRNKNVAVASIVDKINGS

SEQ ID NO: 155127 - protein, 162 aa, Oryza sativa
  unsure (1)..(162): unsure at all Xaa locations
  Clone ID: PAT_MRT4530_54920C.1.pep
GARPPRRPATPRKTYPKNGPFWGARVAGAVVQQDGASLSGAVPPPTWWGDAEELTGTNHVKNKLKRTKYVTFGIFQSSTEKLLSSKTQSCKQNLEVLIXQNFFCRCPFIYYLPDSESRNRNGGGGASMDGALLLPRRFACATVVGGLPLDXRRQPLWRPKKD

SEQ ID NO: 155128 - protein, 155 aa, Oryza sativa
  unsure (1)..(155): unsure at all Xaa locations
  Clone ID: PAT_MRT4530_54921C.1.pep
IPGKTYPRNDPFWGARVAGAVVQLDGASXVPLPTWRGDAEKLTRTNHIKNKLKRTKYVACGIFESFTEKLLSSKTQSCKRNSEVLISPNPAKPWRIGCNFFCRCPXIYYLPDSESIXERGGGGASMAGALFLPRRFASATVAGGRRQPLWRPKKD

SEQ ID NO: 155129 - protein, 101 aa, Oryza sativa
  unsure (1)..(101): unsure at all Xaa locations
  Clone ID: PAT_MRT4530_54922C.1.pep
EFTGTNHVKNKLKRTKYVACGIFQSSTEKLLSSKTQSCKRNLEVLISPNPAKRGXIGCNIFCRCPCIYYLSDSESRNRNRGGGASMAGALLPGAAPAWLAP

SEQ ID NO: 155130 - protein, 35 aa, Oryza sativa
  Clone ID: PAT_MRT4530_54923C.1.pep
MESKLMEPAVRYSHVGLRTDPKLTTALQKESGSQD

SEQ ID NO: 155131 - protein, 158 aa, Oryza sativa
  unsure (1)..(158): unsure at all Xaa locations
  Clone ID: PAT_MRT4530_54924C.1.pep
TPRKTSSKNGPFWXARVAGAVVQQDGASLFDAVPLPTWRGDAEELTGTNHIKNKLKRTKYITCGIFQSSTEKLLSSKIQSCKRNLEVLISPNPAKXGRIGCNFFCRCPCIYYLPDSESRNRNGGGGASHAGALLLPRRFACATVAGGRRQRGWRRPAL

SEQ ID NO: 155132 - protein, 498 aa, Oryza sativa
  Clone ID: PAT_MRT4530_54925C.1.pep
MAPRPRKRVSRPKPRATSRGRGGGDEDPFFESEPKRRRGGGRDEDIESEDSDLEGVAAAAAGGVGDDGEEEEEEEEEQETAGEKKMRIAKELLKKVTDAARRRREDDEDEDEGEEAGRRRVADILLKRQFEESGRKRMELADRILQPDPEDGFKMLVKHRQPVTAVVLSKDSDKGFSASKDGVIVHWDVETGKSEKYLWPSENVLVSHHAKPPLSAKRSKQVLALAVSADGRYLASGGLDRHIHLWDVRSREHIQAFSGHRGAISCLSFGPDSSELFSGSFDRKIMQWNAEDRTYMNCLFGHQNEVLTMDALSKDRLLTVARDRTMHLWKIPEESQLLFRAPATASLECCCFIDDKEFLTGSDDGSVELWSIMRKKPTHIIRNAHPVFRNNLNSLENNVEENGIHKPESVSSAQSWVSAIAARRGSDLAASGAANGSVRLWAIEPDSKGIRPLFSLRLDGFVNSLAIPKSGRFIVAGVGQSMETLSIFIDYNGKYRLD

SEQ ID NO: 155133 - protein, 77 aa, Oryza sativa
  Clone ID: PAT_MRT4530_54926C.1.pep
LRVEGIETNPMVLTTTTNDARRRPATRKSGAAARVDGGEGAPVVGGERGGAAELPLTTAHLLAATASGGNGGDGGAT

SEQ ID NO: 155134 - protein, 40 aa, Oryza sativa
  Clone ID: PAT_MRT4530_54927C.1.pep
FLTELKPCTCTLHAGHARTRRQLSNRWAEPTRVLPPASLN

SEQ ID NO: 155135 - protein, 81 aa, Oryza sativa
  Clone ID: PAT_MRT4530_54928C.1.pep
TKLLLLTFFGFVTVNCRLAERLVCFFRAPSQILPRSFHRDLYRKGKSISDRIQMCPSDPDTRILAHVKNSSQRAMFTSFPT

SEQ ID NO: 155136 - protein, 408 aa, Oryza sativa
  unsure (1)..(408): unsure at all Xaa locations
  Clone ID: PAT_MRT4530_54929C.1.pep
MGGAIVLPPPXSLSLSLSLSLSLSLSRALGGGARKGARVAAHKQRCKGGRKQAEGQRATTRQCKGENMRPRKRGSRYREHEWRRIGSGMPVHGKASPPTPSSDQQVSEEMSTPGTSSSPAGGAVAVTSPTPSPSPSLAPVTTPNTNSKDTNVIEIDDDVAVGNKRKLKYAIWQEFGQVKVGNVWKAKCSWCQKLLSGNSGGCPHHSVMLETHVFDQNLARKKLALMICLHEYPLSIVDHAGFHKFCDVLQPLFKLMSRNTIRKDILEPNLPPRQELDIINWWKFAWIKYPTMQKIARDIMTILVTTVASTSTFSTSGRTISPHRSRLTPKMAEALTCMQGWSRADMLEVLTWVKEKRPSVTNTWMIKEVDWGPNQDLLQVYFYLTTSLLVHRRQEMKFYTFWIRIRTS

SEQ ID NO: 155137 - protein, 234 aa, Oryza sativa
  unsure (1)..(234): unsure at all Xaa locations
  Clone ID: PAT_MRT4530_5492C.1.pep
KIENHVXNHDAELLELKAKTNKLEKERMNQGGLDRVSTNKEASVDGPISKRRRVYSDHPLQEICIAEEENDMVQEENNMMNIQSHVPNEDLQPKTKQCVEDKNKQNWEQHDYGKQRKVISAQKKKTNKENHVMNARKVVEASKNKEREKKCSEXVRLGQNQPTAAPKKRQCSTTNFIADNSMEDTNIHVQNKVLQLPTKQSTIYKSKGTMNQNDHMQQGKNNSNAYKVDKINGS

SEQ ID NO: 155138 - protein, 370 aa, Oryza sativa
  Clone ID: PAT_MRT4530_54930C.1.pep
MWTLRSKISLDGGAVCGSRRRGQNKYCQRFINNVEKVLQNYQGKMVEAFGIKFEFDSILVDNLNKWVSFAVSARTKHLSFDLVPIRFARCDDRFIFPFELLDSGSICRLQHLQFSFISLQPPSWFGGFPNLRKLELNLVHVTRKELENMLCNCCCLEWLSMVRCHLKDDLRVDRPMSHLAYLLISCCVITKIELHATKLSTFIYEGEFVPIVLNHTSKLNLWSLDNSLKFSCLKHIQLFAHILSHGSDKILYLAYVMRAAPFVEKVEVHFASGHSLWFAQEGPLRHELGHDEYKYLKNLCVTGFKGARGQLEFLLHVVENATALDVITVDTTERMLESDIKNDYLCSIARQTIELHIREALPPKAKLFVL

SEQ ID NO: 155139 - protein, 53 aa, Oryza sativa
  Clone ID: PAT_MRT4530_54931C.1.pep
MEEEERCRIEGRRPRWEERKWKQLGPASVKLYLRCCILVGPLMHRAFTSHRVC

SEQ ID NO: 155140 - protein, 55 aa, Oryza sativa
  Clone ID: PAT_MRT4530_54932C.1.pep
STIAFIVGANILAGGAFDGASMNPAVSFGPVVVTGCWLNHWFYWLGPLIGVEAKS

SEQ ID NO: 155141 - protein, 52 aa, Oryza sativa
  Clone ID: PAT_MRT4530_54933C.1.pep
MAGGARWRRRPGSVESGAGRRRHRSGRSAPGGRRHAQWGSATWVGPSRMTHL

SEQ ID NO: 155142 - protein, 318 aa, Oryza sativa
  Clone ID: PAT_MRT4530_54934C.1.pep
MFIFHLLLPSSSRWLQLLLLFLLDGIRKDASKQQVVAPAAPFPVGVGELLPNGLGDPRRGGPCPVTLAEMKQRRSTAAMGTEGCAGESSKCVRRSASTSGQTLRMKGFSPKWCEWIASFIQGGHVGIKVNDQTGNNFQTYKGLRQGDPLSPILFNIVADMLTLLIKRAKDVDDTIIFLEHDLQQEKNLKLILSVFEKLSGLKINFHKSELFCFGHAKEFYDQYSNIFGCLMKVKDTVLHMGSWIVNDGNQTRFWEDKWLGNLAFKDKYPSLYSIVRRKSSTIANVMSSVPLNVSFRRSLVGNIQGNILAPVLGKAAKV

SEQ ID NO: 155143 - protein, 118 aa, Oryza sativa
  Clone ID: PAT_MRT4530_54935C.1.pep
MEDEDGTDRRELSTAAPLLLEEEDEERQELMEDDEGDEQEEHHHHGAKLRTTAEAPPYGHGVAEDYWWRDVPVRLPGVSCGAVLALVDYEATPAWWSSRAVLASLRAADSGWLRDDVG

SEQ ID NO: 155144 - protein, 97 aa, Oryza sativa
  Clone ID: PAT_MRT4530_54936C.1.pep
RGTRPRGRAAAARCAPRAPSSLARPWTPRRCSSRRRPRGERAWAPPPPSPPRRAARCSPSPRTTTPAATRSCTPRSSSAPPNLPHPTKNKKKHDSIK

SEQ ID NO: 155145 - protein, 70 aa, Oryza sativa
  Clone ID: PAT_MRT4530_54937C.1.pep
GAPAPAPSARSGSSPATNKKPPLEPTFSNQTPQINNNNNNNNNNNNNHNNNNNNHHHKKKKKKKKMMMMI

SEQ ID NO: 155146 - protein, 73 aa, Oryza sativa
  Clone ID: PAT_MRT4530_54938C.1.pep
TNLSAYTVEALNLLNHVSRLPRFDMEKSVFQYFSCFICTLISKTLVLYSFLCTLDLLLFVDKEELSCVVALEK

SEQ ID NO: 155147 - protein, 32 aa, Oryza sativa
  Clone ID: PAT_MRT4530_54939C.1.pep
GRCNTIYRESMKLNFPQAGVATEWVHSYIQKC

SEQ ID NO: 155148 - protein, 84 aa, Oryza sativa
  Clone ID: PAT_MRT4530_5493C.1.pep
KAGEMFDWVHFYGRLLTSNKATSKGPWVERPSRQVGPSFKIYVGHLPWQGDYFRLVPVVNEPWKIIHPRIGYYKKTWPLPGFCF

SEQ ID NO: 155149 - protein, 116 aa, Oryza sativa
  unsure (1)..(116): unsure at all Xaa locations
  Clone ID: PAT_MRT4530_54940C.1.pep
TLFNSCTLVHYYTSTNISYIWLWQKSFVGSVARPPLNYFADGHTMDACASVLFCSPVAHSHCSCFLFLGWVGEGCADHANAIYTDSIAQKASKKETLNIDGNXPQKQWRLTCKKTK

SEQ ID NO: 155150 - protein, 59 aa, Oryza sativa
  Clone ID: PAT_MRT4530_54941C.1.pep
RRTGAERHQLVRSSDPIALALSTSAAAGAAAVARALAARVTTTRGYAASAASTAMRRAA

SEQ ID NO: 155151 - protein, 204 aa, Oryza sativa
  unsure (1)..(204): unsure at all Xaa locations
  Clone ID: PAT_MRT4530_54942C.1.pep
MRASRPVVHPVEAPPPAALAVAAAAVAVEAGVGAGGGAAAHGGENAQPRGVRMKDPPGAPGTPGGLGLRXVQAYIAAAALAVMASTDDFPXSVSAFCYLVAAAILQCLWSLSLAVVDIYALLVKRSLRNPQAVCIFTIGDGITGTLTLGAACASAGITVLIGNDLNICANNHCASFETATAMAFISWFALAPSCVLNFWSMASR

SEQ ID NO: 155152 - protein, 256 aa, Oryza sativa
  unsure (1)..(256): unsure at all Xaa locations
  Clone ID: PAT_MRT4530_54943C.1.pep
MSRTGQGTQTTKLTYRSTGEHLSTGTLDGTDEAYSSEKPPSEAYSNSGARGEGGTGKRAPHVVGSGCTSPRWTKSTGPGRGAPRGAHVAATWAATRAAANGPDLPEGRSDGCERSRLARTGGLSQPGGHGARWRKTATGGDWPTTESGGDAAVRAALAAAKRLGSGNVARRRDRERGRGRGSSPTMXTTASGGRRRRRRDVLRDDLWSKMRERWRTGSRLSSRTRXAAMARLGGGSNGGECRPEVAKAAAAGGARR

SEQ ID NO: 155153 - protein, 66 aa, Oryza sativa
  Clone ID: PAT_MRT4530_54944C.1.pep
MGGERVADEAATPCTATCLSHSWEAATPCTATCFLAFYRLYFEGLYTPPRPAGHPRVKYVPRPLPA

SEQ ID NO: 155154 - protein, 75 aa, Oryza sativa
  Clone ID: PAT_MRT4530_54945C.1.pep
MEVAPPKLSSIIRRTRLPRRLDTIMEDDREAMESPRAPPRSTSYAKEVVDTSMHCTKKGVFLASMMKAGCLKIKA

SEQ ID NO: 155155 - protein, 240 aa, Oryza sativa
  Clone ID: PAT_MRT4530_54946C.1.pep
MGTRGQDSSKFDGKHTAKHVLEHTSAVQVASTDYKVQIKEHLVNNCGIRSKAVDKWFQAVTVATGFTAVEVENFYYILTCAHLFEYFYSAEIKVDCDKLNSWFNILIICQHYESDMIANHPNLYADPSNDPRFYSPARIVKLDQSKDLMLLKVSKRKDSVITGQLVARDRVYGQLTQYLWKGYSMHLVELNVVGGAGCSGAPVLSHQAAVIGLYHGRIESLGYAVSAADIYEFCLGAHQL

SEQ ID NO: 155156 - protein, 234 aa, Oryza sativa
  unsure (1)..(234): unsure at all Xaa locations
  Clone ID: PAT_MRT4530_54947C.1.pep
KGKKKRTGKRERVTNKTRIRSAKTIQRKKQKXNKKEVEKGKNWNRENKRRNRKEGEKCKEGNGRNVKRKQKKKERKISQTIQKIKKAEESKHREERKRGERPQKPTAAKQTTXKKEENKEDQAEQRVEGEDEXKNSKEKGATRKRDRRSKGRRERKRTRRSGRKRKRRGERREQIKKPSARESKSREREVERSREGGEKRKGKERREKKRKRKEKERKEKEKESEEKKREINRN

SEQ ID NO: 155157 - protein, 123 aa, Oryza sativa
  unsure (1)..(123): unsure at all Xaa locations
  Clone ID: PAT_MRT4530_54948C.1.pep
SKKKDDSLLWSCSVGMKMERIVFIPCGEKXIQISFGSDNSPIVRIQIRIRIANTNYICXYLFPLEVELVFVLREKNCFRIRIQSYSIIIRIRYNPYLFPHSNYPYSFLYPXKNMKTNMHYLSV

SEQ ID NO: 155158 - protein, 407 aa, Oryza sativa
  Clone ID: PAT_MRT4530_54949C.1.pep
MAAAAAPLADDGDGIVDRDMWLACAAPNSGRLPAVGSVVFYFVDGHAAQFCQFPAPLLEQLAVPGPRVFLCTVAAVRLRADALTNEAYAEITLDPVADHDVPRLAPAPAPAPAAAAGGQQLRYFVKTLMISDFDFRIRFSAPMADAKGVFPPLVDAKAVQPLLVKDLHGSPMTFDYGRKGKRVTLAKVWKKFRDDMDFVDGDSVIFMRRRDDDDDDGELYVGVRRQRTLERPLRNTMRRYRPPTPPQAAVQEAVLAAAGHAAAGERFTVAYRSRKDGDEFVVPREAVEEGLRARLTSLAEVEFVWAVEDGAPPIVGPRGKVTAIATGQLWRNLEIVWDGNSEMDMSANFWQVRPVEEVDISPSTPPPKRLKNCEIDDTASTSVSVDNGDEQVPTMRQRLEALIPDNI

SEQ ID NO: 155159 - protein, 158 aa, Oryza sativa
  unsure (1)..(158): unsure at all Xaa locations
  Clone ID: PAT_MRT4530_5494C.1.pep
SSFSFLSIILIFSHSFQSPLFSPHFLFFSFFSLPDFSSNKYKKLPLFRCICGKFVTFDLDLRPPPPPXPPPPSRTPTATTSPPPPPPPPPPTATSPPRAPEECDVFSGRWVRDEAARPLYREADCPYIPAQLACEAHGRPETAYQRWRWQPRGCALPA

SEQ ID NO: 155160 - protein, 47 aa, Oryza sativa
  unsure (1)..(47): unsure at all Xaa locations
  Clone ID: PAT_MRT4530_54950C.1.pep
INXQGYKPSVCXAPVETSKCKCNLGEKRXXAXSREKKDSASXILKXY

SEQ ID NO: 155161 - protein, 762 aa, Oryza sativa
  Clone ID: PAT_MRT4530_54951C.1.pep
MAAAAAALADDGDGIVDRAMWLACAAPNSGRLPAVGSMVFYFVDGHAEQFCQFPAPLLEQLAVPGPRVFLCTVAAVRLRADALTNEAYADITLDPVADHDVPRLLPAPAPAAAAGGQQQQLRYFVKTLMSSDAEYRDRFAVPMDVAKDVFPPLVDAKAVQPLIVKDLQGSPMTFDYGRNGNRVTLAKVWKKFRDDMDFVDGDSVIFMRRRDDDELYVGVRRQRTLDKPLRTRRSRPPTPLPVAVQEVIAAAGRAAAGEQFTATYRSRQDGDEFVVPREVVEEGLRLRSRFTPEMEVEFVWALEDGAPPSVGPHGKITAIHDTTWMWRSVEIGWTGGSEMNKYANFWQVRLVGSDDFASAAPPPPLSPKRLKSSEQCPSRPPEPLPGRVFLCKVTAVRLDATRNELFATMSLIPVARDQAIQPQAPADPGPSSPQVQTTLVSFVKPLTCTDAVKNRYRFIVPKRETAMGVLPQLQLNEHVPLYIKDMHGKEWVINYTWKEYTHMLSSGWIKFANANRLVTGDNVVFMRSMDSGERYMGLRRTLKPEPVSVDEVIEAVWRAARLEPFEVTYLSRQDGDEFVVPCGIVHNALRAKFTPGMVVNFVWAVEEDRLPNVGPQGKVIAIENYATSIWRMIQVEWPSCAGMNRYVNFWQIREVLGESSFEASTCIVRSQDYSPAPQRNLVNALQLPDGTKQLQQNKKSVSSSSTFRLFGKKMTPGVPPRRDTSGLSGQVSLFSHYLPHDEDDGQVPTMRQRLETLFPDNI

SEQ ID NO: 155162 - protein, 103 aa, Oryza sativa
  unsure (1)..(103): unsure at all Xaa locations
  Clone ID: PAT_MRT4530_54952C.1.pep
MGDSSGSGSGSGSVSVDVERISFGGKEHQVRTRCGSLSVAIYGDEDKPALITYPDIALNHMSCFQGXLLFCPEVASLLLHNFLHIPHKSSRGTELGAAPIPSD

SEQ ID NO: 155163 - protein, 285 aa, Oryza sativa
  unsure (1)..(285): unsure at all Xaa locations
  Clone ID: PAT_MRT4530_54953C.1.pep
TAQTASYETAISAEREARPNGLKEARPSHWAGAGARRRPIRGARKGEGAVRVDRTHHARSRVGPTCRRHGSRRDGXARGRRLGFRVDAAHDWCAGWTEARRAHVQPHGAPWSVRTEGLARLAGLXLGLAELAPTWRLRGSHAGRREEEDEXTGRWMAGGGARRRSGREARREEGRPPEGGKRRRRLHSSTRMWPGLDGGGGFRRRPPAVSKRGKTRRERMXQFVVAGASLGLWELVPRVGWGGETLREAGDGEARCGEGRNAAGEGEGSGDQSDGSGVFYSDPGG

SEQ ID NO: 155164 - protein, 90 aa, Oryza sativa
  unsure (1)..(90): unsure at all Xaa locations
  Clone ID: PAT_MRT4530_54954C.1.pep
AEREARPNGLKEARPSHWAGAGARWRPIRGARKGEGAVRVDRTHHARSRVGPACRRHGSQRDGSTRAAXGFRVDAAHXGAPGGPRPTRAG

SEQ ID NO: 155165 - protein, 104 aa, Oryza sativa
  Clone ID: PAT_MRT4530_54955C.1.pep
MNTRNYIGSGHPETWGFFHKHVSFMAENVASQLAVEYIHHPYKPSEIDASHKGIRRVLVPLQAGTLLTGDPISLLAKGEARRWGLGFGRTITVSSDPGLPRIRC

SEQ ID NO: 155166 - protein, 214 aa, Oryza sativa
  Clone ID: PAT_MRT4530_54956C.1.pep
MATATLPLRLLASKTLAFPSAPSLPASRCSLPVAASAPRRCWRLLASAEEPAPAPVEAEAEAEVVEEEEVEEEEAAVPEPVEAQIAAAGAGKDADIFAVVMIGSRQYIVMPGRYIYTQRLKGANVNDQIILNKVLLVSTRDKAYIGMPVVTNAAVHAVVEEQGRDDKVIVFKYKKKKKYQRKLGHRQPNTRLRITGISGYEDFPADPILEYVPA

SEQ ID NO: 155167 - protein, 83 aa, Oryza sativa
  Clone ID: PAT_MRT4530_54957C.1.pep
LPSLVPSPRSPISTVSQAKNARPTPRPPPSLVFPSSPPCVAARPTRCYPPRTPSSRPGAALPEARPFSFAGFPFACHRRRSSP

SEQ ID NO: 155168 - protein, 633 aa, Oryza sativa
  unsure (1)..(633): unsure at all Xaa locations
  Clone ID: PAT_MRT4530_54958C.1.pep
MVWWGLFYFICHSVHCLGFEFSPQEFLHAXCQLIEQLSLGILKLLNXIGSAGPEATGVRSTVLHPDGKTLFCGLDQSLKVYSXEPVRCHDVVDMGWSNLADLSIYEGKLLGCSYHECRVGVWVADISLIGPYALGVLPKANFFAEVVHSLXNDNPSKPIDNAAKSIPALRGKNXNCGSPVESGRNSRILTREPAFQTYSAELKXKREGFGFGFGLGVYWVMRVVXCARFCNLFVLLPLFFHVAVVACPKLVRADXVRTMKKKYGLSFVGSXDHMIRNFSIXFLYTTPQTVSVPVVMPRDILEDKTAGSISGGIRGRAAVADDFHAPVHSRKLSVNSFVGDSVNSTKSMLTDPDVCSEGFSGLKFSFGLTPYYKKEEYDNVDKVDSMDKGDNTQMTEKLDRTVSLEHQLQSNDTSEPPCSTTETTKVKYVRGVAVPLGKTKSLVERWEKREATNVECSPPTGSCGDRAAEPSQAYEKDLSTIDEAMIPINLMQNHDEFINAVKSRLTKLEMMRHVFDQNGIKGAIAAVAKLPDNAVLADVVSTLKGKLDLFNLDIFLSFLPVLAGLLTSKAERHAIVSLELLLDLIKIFGPVIRSTLSAHSAVGVDIQAEQRRGGQSAQLAQELNLSLQDLVVI

SEQ ID NO: 155169 - protein, 554 aa, Oryza sativa
  unsure (1)..(554): unsure at all Xaa locations
  Clone ID: PAT_MRT4530_54959C.1.pep
AEREARPNGXKEARPSHWAGAGARRRPIRGARKGKGAVRVDRTHHARSRVGPACRRHGSRRDGSTRAAXGFRVDAAHDWCAGWTEARRAHVQPHGAPWSVRTEGASQAGRFDSVXAELAPTWRLRGSHAGRREEEDEXTGRWTAGGGARRRSGREARREEGRPPEGGKRRRRLHSSARMWPELDGGGGFRRLPPAASKRGKTRRERMXQFVVAGASLGLWELVLGVGWGGETLREAGDSEARCGEGRNAAGEGEGSSDQSGGSGVFYGDPGGWQRGGLGEELTDGDERRRWRANGKPAKENGRASGRAAPGLEDGXSRRAAPRWPSGDARRRGREHQRRRRPRRWGEPTLAVKRSAGGSGGFMGDAKVATAWMLWAAKAVDQTAEFRXRERGLAVAPVVQAVAGGDADGGWCGGDPRASACARTRGRGRADGGNDRPVGHARARERAKAVAGFGRRRREAAMAAAXRGRERKEAERESEERERKKRGDASLSRRVQRTWRWRELSRNGPSKGETAHNQEGRSPRTPAPSVAAATSSTPPPPPPRRPTTRRSTPN

SEQ ID NO: 155170 - protein, 196 aa, Oryza sativa
  Clone ID: PAT_MRT4530_5495C.1.pep
MGPCPLRRCSPLPGSVGRWKRAGFGAVLTALIWYLTAVNNGISPRYSFDSIYLSYDGVIWLEQRRDGGHSGAAAAAHRRGSPPTVTTHGGIPRRDDGGTAAAAHRQSASSTAPSSPSSSSGRPAPVPLPLAMAMAAMVVASSALPPPPWTAATSGGDRVGDIDDGEKGEDRYPFAAAATSCCASAMEQSAVLMNRP

SEQ ID NO: 155171 - protein, 166 aa, Oryza sativa
  unsure (1)..(166): unsure at all Xaa locations
  Clone ID: PAT_MRT4530_54960C.1.pep
FYSMDKGDNTQVTXKLDRTVSMEHQLQSNDTSEPPCSTTETTKVKYVRGVAVPLGKTKSLVERWEKREATNVECSPPTGSCGDRAVRSDGPSSFSAEPSQAYEKDLSTIDEAMIPINLMQNHDEFINAGKSWVTKLEMMRHVFXPNGIKGAIAAVAKLTDNAVLAD

SEQ ID NO: 155172 - protein, 152 aa, Oryza sativa
  unsure (1)..(152): unsure at all Xaa locations
  Clone ID: PAT_MRT4530_54961C.1.pep
MEMSRHLNFILLFFQVAAILADPVALTELSQKNSRSHKPQPLDFPSERLYRAYLVIQRFKSSITSDPKNITATWTGHDICGEKTYLGFYCEXXRGKELTVXAVILNGFDLXCPKXKXFIDQLPDVALFHATSNXFGXTFPRLVNLPYLLQSK

SEQ ID NO: 155173 - protein, 286 aa, Oryza sativa
  Clone ID: PAT_MRT4530_54962C.1.pep
MAGRYDRNPFDEDDVNPFAGGSVPPASNSRMPPLPHEPGFYNDRGATVDIPLDSTKDMKKKEKELQAKEAELNKRESVWACCGDAASRAGIVIEEKNWPPFFPIIHHDISNEIPIHLQRMQYLAFSSLLGLAACLFWNIIATTAAWIKGAGVMIWLLAIIYFISGVPGAYVLWYRPLYNAMRTESALKFGWFFLFYLIHILFCIWSAVAPPFPFKGKSLAGILPAIDVIGNNAIVGIFYFIGFGLFCLESLLSVVVIQQVYMYFRGSGKAAEMKREAARGAMRSAF

SEQ ID NO: 155174 - protein, 475 aa, Oryza sativa
  Clone ID: PAT_MRT4530_54963C.1.pep
MAAMGRTVLPSYVLLDRIVRSEEEAVEEESEWAAMECADWKSYGCHPGDKRYPRNAARVKGMLLLARLAEPPGLSELSIRLSAAAAVPRPPPASFPPGAAVPPIPNLPDASPYDDPPLTYVEAAGDGLIALTSCFRDGCSCYLVYDVVGKSLSMIPGLPESCLTYCSMRPLPLRTAAAGGYALRSSYSLAIVAKDRRFDMEAGGDVYRDVLCLCPPRPSSSSSSRGGITPWQFKDAIFPSQMPGSFHGDKVFSFGGHAFWADLAKGVLFCRCDDALSGRNDDAVQFRYIPLPVECHLKISFAMRGDLQLCRTMSCVDGGGDSIKFVCISDGGSSSAHTGDRAITMWTLTLATGEWLKDAQLMVADLWELEGFDKARLPKAIPISPVLNPQEDGVLSFMLNDADAELYMVSLNMHSKKLLSSLTLSSCPDDIVPPLGLDLSKDLQNLSLRPIAAESVPAKTQGRPIATKRRRSSLP

SEQ ID NO: 155175 - protein, 530 aa, Oryza sativa
  Clone ID: PAT_MRT4530_54964C.1.pep
MAIDCCCGYDNTSWWLRVVGRIRMYHYVFLAAVALLAVVGYGVKNRRRRSAKLPPSPPSVPFLGHLHLLGPLLHRSLHELHLRYGTDGGLLLLQLGRRRTLVVSTAAAAADLYRNHDLAFASRPLVAAAHKLSYGSKNITFAPFGEQWRRAKKTAVVHALSPRRVEAFAPVRAAEAAALVAATRRAADAAADGGAVELRDLLYSYTNAVVTRAATGAAGTTAEKLKQLLGNATSLVAGVQADDLLPGMAAKAVRWATGLEKQYDASMEEWDKFLSPIMAEHAEKKKKKREDIGAGEEDFIDVLLRLKEEDTELTDTHVKSRVVDLIAAATETTSVTLEWTMAELAANPRVMAKLQEEIARATGGKPAITEAEVGGMEYMKAVVKEVLRLHPPAPILVPHESTAAAAVQGYEIPARTSLFVNAWAIGRDPAAWGSPEEFRPERFLAGGPAVDFRGNDYQLVPFGAGRRICPGISFAVPVLEMALVALLHHFDWELPAGMRAAELDMSEAPGLTTPLRVPLRLVPKRKAPLA

SEQ ID NO: 155176 - protein, 144 aa, Oryza sativa
  unsure (1)..(144): unsure at all Xaa locations
  Clone ID: PAT_MRT4530_54965C.1.pep
KAARFPXGRLDLKKNPHXGKNSIAALKSRAPXPVKTGSDAKPSRCVHLACHLCRPSXRLSPCQPXXYRRAASLXTPACAPXLVXXCVVLRATVGRWEGKGRLERXGGXRXGKRATDDARPQETEREXXDLEGKSEARGVCXLYV

SEQ ID NO: 155177 - protein, 70 aa, Oryza sativa
  Clone ID: PAT_MRT4530_54966C.1.pep
LGRDKKEENGGEKTNDNKPKSTFKGKKIKETLKKAFDSNGESGDEDKGKNISGVCFMAPGESDSECEDNE

SEQ ID NO: 155178 - protein, 85 aa, Oryza sativa
  Clone ID: PAT_MRT4530_54967C.1.pep
IASCPPFFSLLCSSLVHMLISPVGIPPSNLYLWVKAMLGQMGHNDSQLLVHREQFLQSHDIAMPLLLCGNWSLKMFSLSQKEHEP

SEQ ID NO: 155179 - protein, 59 aa, Oryza sativa
  unsure (1)..(59): unsure at all Xaa locations
  Clone ID: PAT_MRT4530_54968C.1.pep
XSELRXLYFFFLQNRDLVLXSXAQHQXRVYXKKPSKQKITLFLKSAITVAPHRLXWXLW

SEQ ID NO: 155180 - protein, 167 aa, Oryza sativa
  Clone ID: PAT_MRT4530_54969C.1.pep
TTSSSLRARPPLALPAAVDAAASSPGAPAPAFPSSPGAPRAPAPRTRAALPAQLPQHLSAQYYDHLQRCQCCCLLLLYASSLRMERTTRLRTPRRANGAGARARRPPPWTGTAAISRSHRRAPRTQSPPNHPQYPPYPSSSPPHPSPSSPLRPPPPTPTPPRRQLLP

SEQ ID NO: 155181 - protein, 73 aa, Oryza sativa
  Clone ID: PAT_MRT4530_5496C.1.pep
MEPGVGSKDYIGAVRQADCESCSCAQPKISRPFAPSARPQPKAITGLGLTFTIRDAVLRLNCPWTERGDIENV

SEQ ID NO: 155182 - protein, 109 aa, Oryza sativa
  Clone ID: PAT_MRT4530_54970C.1.pep
PAPGSSLPGVCWAGHLHAHFSYVRSGQGSYSGAYVPRVLPMSSQLKCILPPLAFPFGRRKCWRSLRLSLLLGSSFRCGWLAPLTLGPPPVLHGWFIGVHGPARVKCQYQ

SEQ ID NO: 155183 - protein, 282 aa, Oryza sativa
  unsure (1)..(282): unsure at all Xaa locations
  Clone ID: PAT_MRT4530_54971C.1.pep
MALSAAAPANSSCFHPRAAAASAPSSLSVGTKVFVGLKAQTKLGSSESSCPNVTAGFYTAVNRRISLGLSNKRATRARISMMPVGTPRVPYRTPGEGTWQWLDIWNALVRLHNAXGYRERIIFIGDSIDEEFSNQVLASMLYLDSVDNTKKILLYINGPGGDLTPCMALYDTMLSLKSPIGTHCLGFAFNLAGFILAAGEKADDIENEANELIRIKNYLYSKLSEHTGHPVDKIHEDLSRVKRFDAEGALEYGIIDRIIRPSRIKKEGSTAQKKDLRNLGLG

SEQ ID NO: 155184 - protein, 108 aa, Oryza sativa
  Clone ID: PAT_MRT4530_54972C.1.pep
RAGSGRRWPSPHGSVGRAPSPTGSRSPPLTFLSSLDPAEGRGVSGGAAEGKRGGRRREQRPRPPRGGRIRRWPLWGGQIRHRQLQGRRQRVSGKVATTIVVTATTVAV

SEQ ID NO: 155185 - protein, 84 aa, Oryza sativa
  Clone ID: PAT_MRT4530_54973C.1.pep
KRQIPPYFSLGIRSLAVLEGIAISLNTNYKVLSSSYPWIARKVLTDRSPKLRSTMQTLLYKDGTIQIDRVESMLTESLRARTEQ

SEQ ID NO: 155186 - protein, 359 aa, Oryza sativa
  Clone ID: PAT_MRT4530_54974C.1.pep
MSGELPSALGNCTNLKIINLKYNSFRGELLKLSPRIGNLKSLLFLSLSNNAFVNIANVIHALKNSRKINTLIIGTNFKGETMPEDIPITDGFQSLQVLSIPSCSLSGKIPLWLSKLAKLEVLDLSNNQLTGPIPDWIHDLNFLYFIDISNNKLTGDLPTAIMLMPMLQPDKVATQLDPRAFEQPVYAGPSLTYGKNNALPAMLNLANNELTGAIPSEVGQLKSLTLLNLSFNSLSGQIPQQLFDLTNLQVVDLSNNHLSGSIPPGLNNLHFLTTFDASNNDLEGWIPAGVQSSYPYDFSGNPKLCDPTLTRTCDSAEAPPVSTLTGEETTPKIVFAIAFGAFFCLGVVYDQAVLSRFFG

SEQ ID NO: 155187 - protein, 632 aa, Oryza sativa
  Clone ID: PAT_MRT4530_54975C.1.pep
MRRHGWQLPYHPLQVVAIAVFLALGFAFYVFFVPFVGRSELQYVLMGLYTPLIDLHLLSVWGDFFCTTPFCVLVGIICGECLGEILHYITCVVTLYIWCAATNPGDPGIFKAKKHPKLGKDGKQIQEISEHESCQGGKSFSDGCSIVNNSERLSNMFEGNDSSSRPGLHGVLCLICNPFFCLWKRFFHSDDQSSEQHMSEEGMFFCSLCEVEVLQHSKHCRVCDKCVDGFDHHCRWLNNCIGKRNYKRFFILMASAVLLLIMQWLVGILVLILCLLKRGEFSGQIISKLGSSFSTAAFVIVVMTCTLLAMLATIPLAQLFCFHVLLIKKGISTYDYIVALREQEEQQEVTEHQSPQMSIISSVTGFSTTSSFAPLQRGSWCTPPRLFLEDQHVIPPEMPQNSSSKKAKHADVTKRKPSGPVKISPWTLARLNAEEVSKAAAEAKKKSKVLQPIARHEDPKHDKRRPDKRGQFLPELSVDHTTRTSDSCTDSNCSDMDMETCGSLAPLQHEARSVFQPSIASSIRNLTSSPQSSLDSPDLHPFRVSMSGADELRSFMSLAASESTAPKSIALSRSTSGGYEASGGEESDRIPSKIVHRSSNWANAILNSGRREMAADLNLPTSERFLTNTRFS

SEQ ID NO: 155188 - protein, 306 aa, Oryza sativa
  Clone ID: PAT_MRT4530_54976C.1.pep
MATGEKTTRAGSESSGHHWAGYSCSAGEASSPRLPLRHRPPPRDFRRYIIFGCPYRHPKKPKAPAKDKVQEKVPQQTMIASWGMANYVEYNQVKNIFQEIGEIVGIYFSSTRHLAVVDFSTEQAAESALYHFMGYHLMGRPLKLAWFDPKDFAVLRDIPTRGERMPNYLMQTVCVTGFDSSLEIGTIRHALEEIFANDHMKKLVTPVNLDGTSTGKAYIRYDVASSYNGALHCDGVSEIGGRILRVTKWPDFSWCKKRRIGRAGCDKDDAGLAVPDQDDTPKWHTPSTGKRTLFDDGSGDEAGVTM

SEQ ID NO: 155189 - protein, 229 aa, Oryza sativa
  Clone ID: PAT_MRT4530_54977C.1.pep
MAPTSRSPAALFLLLALACAAPPLLRAADTHLHFFMHDVVSGSGQTAVQVIKGPTSANGGVSTGFGDTTVVDDALTETSSATSPEVGRAQGFYMMSSLSSPTLMMCVNLYFTAGENNGSTIAVIGHDDTTATVRELSVVGGTGKFRMATGYVVWKTASMSASTGVFELDVYVTTPNATTIDASAPVSPLDGGGSSGSTSTAKSGAAGRQVGWVSACVVGLVVALVGRGW

SEQ ID NO: 155190 - protein, 654 aa, Oryza sativa
  Clone ID: PAT_MRT4530_54978C.1.pep
MASSSLSRRALLLFFLEVAVAMALLLPGGHARVCPPCGSTEVPYPLSTADGCGDPEYKVRCAAAAAGGTAPTLLFDALNGTSYPITSISPASQRLVVSPAPFVSPGACVSVGAAASPGVQLDPSRPFNVSSSNTVMLLNCTELLLRSPLNCSSNSLCHAYAGAAGSTASACAPLPLCCTFVAGGSSTSYRIRLGPQSCSAYRSFVGLDPSQPPATWGSRLGLELQWATPREPLCRTQADCEDGAAATCADDPSATGGAGTVRRCLCVSGLVWNPIAGACQQQNLTDSGSNHAPLIAGIVCGLGGALLVATAGLFAYRRQQRIRLAKEKLAKEREEILNANNSSGRTAKNFSGRELRRATANFSRDNLLGAGGYGEVYRGVLADGTVVAVKCAKLGNTKSTEQVLNEVRVLSQVNHRSLVRLLGCCVDLEQPLMVYEFIPNGTLADHLYGPLSHPPLPWRRRLAIAHHTAQGIAYLHFSAVPPIYHRDIKSSNILLDERMDGKVSDFGLSRLAEQGLSHVSTCAQGTLGYLDPEYYRNYQLTDKSDVYSFGVVLLELLTCKRAIDFGRGADDVNLAVHVQRAAEEERLMDVVDPVLKDNATQLQCDTIKALGFLALGCLEERRQNRPSMKEVAEEIEYIMNIEAGNAHLKELHSL

SEQ ID NO: 155191 - protein, 420 aa, Oryza sativa
  unsure (1)..(420): unsure at all Xaa locations
  Clone ID: PAT_MRT4530_54979C.1.pep
PPKSRRSLLPPRPPPAGWRPRAAPLSPAASGRPPLXGGLDVPNLKKRGGGTRSWIRVEAATASVQTLEVDKATMMRRCELPARDLRLLDPLFVYPSTILGRERAIVVNLEQIRCVITADEVLLLNSLDSYVLQYAAELQRRLLQRAEGDELPFEFRALELALEAACSFLDAQAAELEIEAYPLLDELTSKISTLNLERVRRLKSRLVALTRRVQKVRDEIEQLMDDDGDMAEMYLSEKKLRTEASFYGDQSMLGYNSVGDGTSFSAPVSPVSSPTESRKLEKAFSLCRSRHDSVKSSDNTATEHIQELEMLLEAYFVVIDSTLNKLTSLKEYIDDTEDFINIQLDNVRNQLIQFELLLTTATFVVAIFGVVAGIFGMNFETSVFSIQNAFQWVLIITGVIGAFIFCGFLWFFKYKRLMPL

SEQ ID NO: 155192 - protein, 499 aa, Oryza sativa
  Clone ID: PAT_MRT4530_5497C.1.pep
MDGLHGTDGCFSPGRAMSPQVRPPVPPDAASGGQYLAELLQEHQKLGPFMQVLPICSRLLNQEIMRVSGMFRQPGVGDFERSQPASPNQMHPSHIVPNFCGNAFGPWNGMRPERVSFSQGPGWQGAPQSPSSYIVKKILRLEIPTDAYPNFNFIGRLLGPRGNSLKRIEASTGCRVFIRGKGSIKDPNKEEQLKGRAGYEHLDDPLHILIEAELPANVIDARLAKAQEILEELLKPVLCRGHEAAAAAAGYGLFIRTADCSMAEAQQEVAAAAKGYRSSPSSPSSMSPTPSPPPAAAVHGGGGRAEEATIAATATPAARSLAAGDNGMQVSGHGEHAGLSSGRRRGRPKGSGRRQILANLGQYIAVHPRALAMASGSGAGAGLPLEELGLDGAVLDALWRCAAAAAPPPSRLCSAARKKGKRKEERERKPCAGMPPCVVTVGGEPWRCAAAAAPLWPPSRLCSAPLTSNLLKYTMGNGMRYQLEGASRPMSSFVATGED

SEQ ID NO: 155193 - protein, 367 aa, Oryza sativa
  Clone ID: PAT_MRT4530_54980C.1.pep
MDGNKDEALRSVKLAETALASGDRQRAEKFLRIAQRLDPSLPIDDMLGTPKKYDTLDGAVRQYRARSGEVGESQNLRKESVGPSNVDKGYTEENVRVVRNITKNKDYYAILGVERSCSVEEIRKAYRKLSLKVHPDKNKAPGAEDAFKLVSKAFKCLSNDQSRRTYDQTGAIEDHEFNYQYSNVMRQRTTRRQRQARSSFYGYEEDLDPDEIFRSFFYGTHDNMFQSHNAYRARGTVRQQQQQRREHPVQGGSGINLTMLVHLAGVLFFILFAFIPARHPEYSLKRTSYFSISKVTEKHGVEYFVSKQEFDQQFPRGSSSRDNLEQYVFKDYKSMLGRFCHVELQRRQWAKDYPTPHCDKLRSLSVA

SEQ ID NO: 155194 - protein, 56 aa, Oryza sativa
  unsure (1)..(56): unsure at all Xaa locations
  Clone ID: PAT_MRT4530_54981C.1.pep
RWYNSLGSAPVPKRQRAAPVKCHGESVTRSKGHTGRRGRGKHRGDPLESXRGLAAV

SEQ ID NO: 155195 - protein, 105 aa, Oryza sativa
  Clone ID: PAT_MRT4530_54982C.1.pep
MVAAKTTTVSTRLRRCMRAHDEYVVRVGSHRRRRRRLLATVTAHPGVARRWVHTTLWRHARRLRSGDGITVGMGVQWTPPFRAPAAAARRPCTLQLCVGHRCLVF

SEQ ID NO: 155196 - protein, 119 aa, Oryza sativa
  Clone ID: PAT_MRT4530_54983C.1.pep
MAVRGGVWTTTCRPTAGGRATPCGRRTREGGSRRSLRMMGDRGTGFKVPAGDALSQVYIQKNTEWRFLREVDGEGEVGYLLASPPSSLLTGRWAKGRRPLLTMFYAERRGTIDLTGPPS

SEQ ID NO: 155197 - protein, 169 aa, Oryza sativa
  Clone ID: PAT_MRT4530_54984C.1.pep
MANTLRLYLTCIRNTLEAAMCLQNFPCQEVERHNKPEVELKTSPELLLNPVLICRNEAEKCLIETSINSIRISMKVKQADELENILAKKFLRFLSMRAEAFQVLRRKPVQGYDISFLITNYHCEDMHKHKLIDFIVQFMEDIDKEISELKLSVNTRGRLVATEFLKQFI

SEQ ID NO: 155198 - protein, 228 aa, Oryza sativa
  Clone ID: PAT_MRT4530_54985C.1.pep
MDSVRAKARRADPTLALEAGAYPVPGLHGGSAARAPSIWLELKPHAVRPQPSPMPRRTTHRHDQDPPGASADGCSPPDVGQQRHRRRCAEHVMNAVGKFAVMCRKEGIKQLGVVLHMQPKPVHQPECNNVASVDTGMSNPAARADSSHCIPGRKAMSSISLSFSGLTGESSAGDFKIVGSSAGGSRDNALTRYKEKKKRRKDNSVHAMNNIGIPHKYRRTSPRKLGPV

SEQ ID NO: 155199 - protein, 52 aa, Oryza sativa
  Clone ID: PAT_MRT4530_54986C.1.pep
MGVVKSSAVVFLMESDQLKEIYPEESEFKEDAAWIKLTGTPAPHQDLDLHWS

SEQ ID NO: 155200 - protein, 333 aa, Oryza sativa
  Clone ID: PAT_MRT4530_54987C.1.pep
MPSGRSRHRCRGELHTGTIKILLEHPQMAARLRTSGSSAIGGGSASLHPHPIVPHSHLLPTTPRAAASLGLPPGRRPRRGKASPVAAFVVRLPSPLPRPDVVCALSPSPPSSTAFLRPRHLPKHHHHCPPLESASVVGPSAPALALPHLLLSSDASCRHSHTVQIGGGGPWPGGGPHCAPLRRPPSSPWCAEHVMNAVGKFAVMCRKEGIKQLGVVLHMRLTKGAPGSVVGVSLSDDIPKPVHQPECNNVASVDTGMSNPAARADSSHCIPDCGVLSMILMGEPPWHPPGPESSSAGGSRDNALTRYKEKKKRRKYLHENKLTGVIPPELGNM

SEQ ID NO: 155201 - protein, 331 aa, Oryza sativa
  Clone ID: PAT_MRT4530_54988C.1.pep
MELSRTTNQIVIFNLLLYDDEKKTSHLKDLQSLGPLKIFRVDLNEEGSFDEAITGCVFVFLVAAPVVVDSENLEEDITETNVRGTLNVMGSCVRARATVKRVVLTSSVAAVLHDGRTTMQGGDDGHVVVDESSWSDLDYLATLPNHPSANWAKAYGAGKVRSEKEASRVARENGISLVTVLPVIVVGAAPATRGFNSSSLVLSLLAGHEATTEMLKATQDLAGGTTPLVHLRDVCRAQVFLAEKGEAAAAAGGRYLCCGANTTVARLAGFLAGKFPQYNVKTDGFGDVAEEPRMLISSEKLVGEGFEYEGKNLDDMFDDAVEYGKALGMLP

SEQ ID NO: 155202 - protein, 605 aa, Oryza sativa
  Clone ID: PAT_MRT4530_54989C.1.pep
MDPDFSRASRGPSFAFAFNSVNFSDRVLRIEIVAGDDAAGAKGAAGEGCSSLADWAHQRKRRREELRREKAVGKYFGRDPNFDSKKKWATNRDSCFPLRGIALGRPHCRLGASAVRYFRRARSRECESGKYTDLETCKVEAEECDTYEENNEEPVAMIEESPPDIGQDGEDGDSCDSSWSMECTQVLRVKSIYISSAILAAESPFFYKLFSNGMKESDQRHATLRITASDSFYLIIVCLSETEENALMELLSFMYSGKLTTNQPTLLLDILMIADKFEVVSCMRHCSQLLRSLPMTTESALLYLDLPSSISMAAAVQPLTDTAKAFLANKYKDLTKLQDEAMNIPLAGIEAILWSNDLQVASEDAIYDFVIKWARSQYPKLEERREILGTRLLPLVRFCHMTCRKLRKVLACNDLDHEQATKCVTEALLYKADAPHRQRTLAADVLTCRKYAERAYKYRPLKVVEFDRPYPQCIAYLDLKREECSRLFPSGRIYSQAFHLAGQGFFLSAHCNMDQQSAFHCFGLFLGMQEKGSTSVTVDYEFAARTRPSGEFVSKYKGYYTFTGGKAVGYRNLFAIPWSSFMADDSLFFIEGVLHLRAELTIKQP

SEQ ID NO: 155203 - protein, 53 aa, Oryza sativa
  Clone ID: PAT_MRT4530_5498C.1.pep
MDMALVACGHGWDGASDAACSVQRRMWVGVHVGNMLFRIHLGPLPNLCAFWAG

SEQ ID NO: 155204 - protein, 145 aa, Oryza sativa
  Clone ID: PAT_MRT4530_54990C.1.pep
MRATGHQETQPRETPTAPNSVRCAPVTKKRNITNQGRAPPRPPPGSQRRPARRPTPSPARSRRRPARSPGSPRQAPPRTPRRALPRRRRRRRRTAATWRTRRPPRPRPQRKHPAPRRTARRSRKQTRRQQTRLAPAQPTRRAARA

SEQ ID NO: 155205 - protein, 59 aa, Oryza sativa
  Clone ID: PAT_MRT4530_54991C.1.pep
MAPAKLNKYSSTVGPSGAQRRRDQQVGVDACAAICACVLQLSGVAVGKSDAFNGIASDL

SEQ ID NO: 155206 - protein, 421 aa, Oryza sativa
  Clone ID: PAT_MRT4530_54992C.1.pep
MLPTNRNRPQQRPARSWYFISDMDFSDPKRKPRYLSKILMVALLTAMCVVMLTQPPCHRRTPSVFSIHEPGVTHVLVTGGAGYIGSHAALRLLKDSFRVTIVDNLSRGNMGAIKVLQNLFSEPGRLQFIYADLGDPKAVNRIFAENAFDAVMHFAAVAYVGESTLEPLRYYHNITSNTLVVLEAMAAHNVRTLIYSSTCATYGEPEKMPITEGTPQFPINPYGKAKKMAEDIILDFSKSKKADMAVMILRYFNVIGSDPEGRLGEAPKPELREHGRISGACFDAALGIIPGLKVKGTDYETPDGTCVRDYIDVTDLVDAHVKALNKAERGKVGIYNVGTGKGRSVKEFVEACKKATGVDIKVDYFPRRPGDYAEVYSDPAKINSELNWTAQHTDLLESLRVAWTWQKKHRSGYGPPQAMVL

SEQ ID NO: 155207 - protein, 144 aa, Oryza sativa
  Clone ID: PAT_MRT4530_54993C.1.pep
MATEQPSEKKPPASGGEKKAPLPKVVTLNKALKLAQTWVDKMSASDQDEPKAKDFEGRPPGLGLGAKVAPNVKRAAPTDPVERRLLGKVNAQKRKATEEEKTIAQEVNDDSDDDSGETESRTSAFSKKRTAPSVTAMPLGKKAR

SEQ ID NO: 155208 - protein, 217 aa, Oryza sativa
  Clone ID: PAT_MRT4530_54994C.1.pep
MSKRSRSMWDMQEFVGSVDTARVLMLLAQQSQHGLLGGGGFAAGAQPVVVRGGAHDRVFECKTCNRQFPTFQALGGHRASHKRPRQQQQHALGGGAGADDAGLCLGRQPTPPRPQPAKPRVHECPVCGLEFPIGQALGGHMRRHRAEAEAAATTTTTTTKNGDVGKAAAVKACDGGGVCLDLNLTPSENRAKCRNVVGLGAGGQGVHKALAMLDCFL

SEQ ID NO: 155209 - protein, 81 aa, Oryza sativa
  Clone ID: PAT_MRT4530_54996C.1.pep
MGYPCLRVSPAWPDPYWVMPRPQVEHVGRHSMARSGICDVRLWVAVREPTGGGDGRVRSGAMAPFGSIVEASSTSLMELSR

SEQ ID NO: 155210 - protein, 60 aa, Oryza sativa
  unsure (1)..(60): unsure at all Xaa locations
  Clone ID: PAT_MRT4530_54997C.1.pep
MLMVLRLGFRHAGHYRNKFIGXYIXXXXXXAXXXXXKXGTHRXRPEGSGKXSSXEPNXEG

SEQ ID NO: 155211 - protein, 217 aa, Oryza sativa
  Clone ID: PAT_MRT4530_54998C.1.pep
MGVGWQRPAGGGGMEAAGRGLAAARCGLGLAAAGWRRRDCGRARASGMEDGRRRPGVGRRDGGRSPAASPSPPPDPARGEAAGWRTAGGGPARAGGMEAGDGTLAAIATAKAEAEKAEGSKWGWRWRRGRPLGLHQRRWLLPCRLLRLPHHAIASAWAADADADTDLATLERRREQDAEEEERQTREETATEEEAVLVSAVPAIAPSRVPTALTLRT

SEQ ID NO: 155212 - protein, 127 aa, Oryza sativa
  Clone ID: PAT_MRT4530_54999C.1.pep
EEDKVSAAKLRAGAHAKSSSPVVDVSTDRSRWRRRRGDRPRRRRRRSSAAFGRRSRRSGSCSPSARRGGSFPPSSARAPGRGAASASARRRGRLACSTTRAAPSCRRRPGRGRRPGRRAWGRRRRGP

SEQ ID NO: 155213 - protein, 473 aa, Oryza sativa
  Clone ID: PAT_MRT4530_5499C.1.pep
MAVLGSLLLLILAATLSVAVAYDPLDPNGNITIKWDVMSWTPDGYVAMVTINNYQTYRQIMAPGWTVGWTWARQEVIWSMVGAQATDQGDCSRFKANLPHCCRRTPAVVDLLPGVPYNQQIANCCRGGVLPAYGQAPSAAAAAFQVSVGQAGTTNRTVRLPRNFTLLGPGPGYTCGRARVVPSTVFLTADRRRKTQALSKLTTPSSSSPAPPLMMSCLCAVTWNVTCTYSQHLASKYPSCCVSFSSFYNDTIVPCAKCACGCDAHKPCVRSERDGKRLAVTGKKHDANANAHGRGNGVAAAAMAAPLLQCTTHMCPVRVHWHVKLNYREYWRAKITIVNFNYRMNYTGWTLVAQHPNLDNITEVFSFDYKPVVSYGSINDTAMFYGLKYFNDQLMEAGPHGNVQSEVLMRKDARTFTFRQGWAFPRKVYFNGDECQMPPPDSYPYLPNAAPPAAASLVGSAVAMAALVFFLMA

SEQ ID NO: 155214 - protein, 331 aa, Oryza sativa
  Clone ID: PAT_MRT4530_549C.1.pep
MSWCTIESDPGVFTELIQEMQVKGVQVEELYSLDVDSISELRPVYGLIFLFKWMAGEKDERPVVKDPNPNLFFASQVIPNACATQAILSILMNRPEIDIGPELSNLKEFTGAFAPDMKGLAINNSDSIRTAHNSFARPEPFVSDEQRAAGKDDEVYHFISYLPFEGVLYELDGLKEGPISLGQCSGGPDDLDWLRMVQPVIQKRIERYSQSEIRFNLMAIIKNRKDVYTAELKELEKRRDQLLQEMNESSAAESLNSELAEVTSAIETVSEKIIMEEEKFKKWRTENIRRKHNYIPFLFNFLKMLAEKKQLKPLVEKAKQQKASSTSTSAR

SEQ ID NO: 155215 - protein, 102 aa, Oryza sativa
  Clone ID: PAT_MRT4530_54C.1.pep
MPGTGHGSEVAASMADHGLGRRSRYLLALRRSPPETAPDRRCRRRLSSLPLVTVDGDSELEMEMLLKASAYILSATGSSIMYKAVLTVRRIGRSGGVDHLDA

SEQ ID NO: 155216 - protein, 824 aa, Oryza sativa
  Clone ID: PAT_MRT4530_55000C.1.pep
MVASSASLLLFTLIHPLLCISAQDFLKPGSSLSVQDVLHSPDGTFTCGFYKISPNASTFSIWFSNLTENPVVWSANPLHPVYTWGSKVELKFDGGMFLKDYAGQIVWANNVSSSDTQYAQAQLLDTGNLVVKGESGNTLWQSFDSPTDTLLPTQSITAATKLVSTNRLLVPGHYSFRFDDQYLLSLFDDEKNISFIYWPNPSMTIWAKLRSPFNSTTNGVLDSWGHFLGSDNATFIAADWGPGTVRRLTLDYDGNLRLYSLDKVDRTWSVTWMAFPQLCKVRGLCGQNGICVYTPVPACACAPGYEIIDPSDRSKGCSPKVNLSCDGQKVKFVALRNTDFLGYDLSVYRFVPLGFCKNICLKDCRCKGFAYWEGTGDCYPKSVLLGGVTLSNFGSTGTMYLKLPEGVNVSRSSFPHSQPLGPKYGPNCNTTNNISIADFLDTLNSGQSISKFLYFYGFLSAIFLAEVLFVLLGWFILRREAKQLRGVWPAEAGYEMIANHFRRYTYRELVLATRKFKDELGRGASGVVYKGVLKDNRVVAVKKLVDVNEGEEEFQHELSVISRIYHTNLVRVWGFCSDGPHRILVSEFVENGSLDKILFGSGGSQNLLGWTQRFNIALGVAKGLAYLHHECSEWVIHCDMKPENILLGENMEPKIADFGLAKLLNRDGSNIDISRIRGTRGYLAPEWVYSLPITAKVDVYSFGVVLLELLKGARVSELEKNDDEDVKMALGRVIRLCSEQLKSDGDDQFWIADFIDTRLNGQFNSAQARMMMELAVSCLEEDRVRRPTMECVVQKLVSVDEVSSTPTGGSEEPHSTRTSSLISY

SEQ ID NO: 155217 - protein, 120 aa, Oryza sativa
  unsure (1)..(120): unsure at all Xaa locations
  Clone ID: PAT_MRT4530_55001C.1.pep
XXXXXXXXXFXXXGMXXXXXXPXXXXXXXXXFXXXXXXXXXXRXXXXXXXATXXXRXXXXXWSXXSXXVXFXXXXAXXSXXXPAPPPWRAXXPGGVGGRTPLVXGWVWWRGIGRTVVEAA

SEQ ID NO: 155218 - protein, 59 aa, Oryza sativa
  Clone ID: PAT_MRT4530_55002C.1.pep
PMGCCIPCSSKTASVKFQAHHLKCVRKKKAKIQSEVEPCVLMILLPPLLMLDILKWQAV

SEQ ID NO: 155219 - protein, 521 aa, Oryza sativa
  Clone ID: PAT_MRT4530_55003C.1.pep
MAARPCQAAARPGTASTRIREASRATTRAKEVRGRAVANGGGHGAACDKGKWFGGELTNEINGVGGADGVAARWTRRRGGAAPRVHGRGRREGEVAMGSLELLVTRPRTHWLLRCSVADGEGESGASNNNGAAVMEVKREKDSMGGARVFIAKARSGHRSMGSSSGSDRLRDLQAFDDTKAGVKGLVDAGVTTIPAIFHHHPLLLDDAEEDADVIPVIDLQADVDRGHLVGQVRAAAQCVGFFQVVNHGIPGELLEEMLAAVRRFNEQPAEGKKAWYSRDSGRRVKFNSNFDLFQSPAANWRDTLLLELTPRPGPAAEEIPPACRGVVGEYVEAVQRLGGALLELLSEALGLPPEYLGGLGGGLATMAAHYYPPCPEPHLTLGTTRHSDPSFLTVLLQESKGLQVLMRQRQRWVDVPPVAGALVVNIGDLLQLVSNDLFRSVEHRVLATTAAAEPRLSVACFFRPDYACTRVYAPVTTTPPPPLYRSTTMPEFLSHYRAKGLDGRSALHHFRIPPPSSPPH

SEQ ID NO: 155220 - protein, 95 aa, Oryza sativa
  Clone ID: PAT_MRT4530_55004C.1.pep
QSHYKSEATDYKITTRSALHQLRSFFSLARLITGIKISDTNLHTPNTQRSRPLFSFFFGGGCCCLDHPASLIIVVIGIQFTGSRNGSGGGGGGGG

SEQ ID NO: 155221 - protein, 156 aa, Oryza sativa
  Clone ID: PAT_MRT4530_55005C.1.pep
MARCRCLALLACFAIVPLETLRHHLALLPRTAMARRRRFALSACFAIVPLESGEGRRCFSCRRAPSPHQGRAPPSPRTQVTAALVARRRSSARRQSWETSLSLSCLKAVIAFPATELLRYRIEAKHRSSFAAASRPSTEVGKLTRSGWKTNGVTRF

SEQ ID NO: 155222 - protein, 81 aa, Oryza sativa
  Clone ID: PAT_MRT4530_55006C.1.pep
MGEEAKYLETARAERSVWLMKCPPVVSHAWQGAVSSSDAAGSNPNPVVAKVVLSLDLLRSEEPSLQASLPRPLPLPCGFEW

SEQ ID NO: 155223 - protein, 73 aa, Oryza sativa
  unsure (1)..(73): unsure at all Xaa locations
  Clone ID: PAT_MRT4530_55007C.1.pep
MKIIFVFALLAIVACNASXRRFDPLSQSXRIQYQLQSHLLLQQQVLSPCSEFXKVQQYSLVATPLRLHLPPRQ

SEQ ID NO: 155224 - protein, 73 aa, Oryza sativa
  Clone ID: PAT_MRT4530_55008C.1.pep
MEGGGRQEWSWAAAAAGGRGRPPWPAAEVARHPRMKPSRGSSGWRRLALSRKVVFEFHEDKDKVFHVDVMEND

SEQ ID NO: 155225 - protein, 1202 aa, Oryza sativa
  Clone ID: PAT_MRT4530_55009C.1.pep
MASWENLGDVATVVQLTGLDAVRLISMIVKAASTARLHKRNCRRFAQHLKLIGGLLEQLRVSELKKYPETREPLEQLEDALRRAYLLVHSCQDRSYLYLLAMGWNIVYQFRKAQNEIDNYLRLVPLITLVDNARVRERMEYIERDQCEYSFDDEDKEVQDALLNPDPSTNPTVVLKKTLSCSYPNLPFNEALRKESEKLQVELQRSQSNMDMGQCEVIQHLLGVTKTVASSIPEKCATPKVSEKADSNHTKVSEDSAKTYHDDSPKKQKDACTAPRFENILFPLWNILKDCFNCEEQAHGGCIDDFLSHLMCCCCALVQEWREVEIRGAYDCHLLLSQAAAEALDNESMLDEYKVQHIIGRDRNAKSPRSEAAFSVAVRLHWAKSEIQQLQRLMLSALSNSKTGKSIDGLTEPRLRLPPDHAAETPNTRPATNVPYRKEVPAILLHCRCPGDQRIKLRTPCRQQENLLSTGHRFPPLEKIKGQFGSWPMLGLPIYGSSKHSSCTDSGVLSCCEKHHRLLQEKMENTRQQYTHHFLLRKKAVVVLCLLIIIWLRNKYRRRSSRKGVKYGPLVHRDVWRTSELIRLINISDRTCTQQLRMSRAVFYKLCARLRNKGLLVDTFHVSVEEQVAMFLKKVGQHHSVSCVGFSFWRSGETVSRYFRIVLRAMCEIARELIYIRSTNTHSKITSKKNKFYPYFKDCIGALDGTHIRASVPAKKVDRFRGRKPYPTQNVLAAVDFDLRFIYILAGWEGSAHDSLVLQDALSRPNGLKIPEGKFFLADAGYAARPGILPPYRRVRYHLKEFRGPQGPHGPQGPKCPKELFNYRHSSLRTTIERAFGALKNRFKILMNKPFIPLKAQSMVVIACCALHNWILENGSDEFVNDEKTCMGKRTEGTSEEGGSREKYISWSDDATQFMLEWYIELRKDKPSTFKWKKQHHQQCAIALKDKFGIRVTKSQVHRHLRLCKEKWSWICAALGKSGYGFDAASCKFNIDPSEKDSNKLGTTKYNYLTKPIKFFHPFEELFVGCSKADGSLAIDRFNANGSSDSDGSGSIKELEEYIFALEDGGHDSDTIARNSPTTDGTYSGHKRRSVKSPTKKTLKHKTSHKEEEQDELAGSILKLANKLASVEQSIVGGPNASIWRRIEDLTIPASDKIELATFLAKPEQEIFRSYLRVASDASFQAWVIDYLERKCACNGGNGCTM

SEQ ID NO: 155226 - protein, 30 aa, Oryza sativa
  Clone ID: PAT_MRT4530_5500C.1.pep
LAFTFPSTYGIYPWSHRAPESITTLGGVLY

SEQ ID NO: 155227 - protein, 73 aa, Oryza sativa
  Clone ID: PAT_MRT4530_55010C.1.pep
MAASGSATTAAGAKRRDDGGSRRRVDTTTQEKKERRGEEKREINKKEAAPDGRQDGGCARVWTAAARLVAGAR

SEQ ID NO: 155228 - protein, 99 aa, Oryza sativa
  Clone ID: PAT_MRT4530_55011C.1.pep
MAELLRQSDGVCFAATKAPRPLLSHGQGTACEDDLAMDYERGKNLANPMSMGRGELFPPSRTTDTLLLCRHNRGGRKGNEARGRRRCSHAVDALLLRRR

SEQ ID NO: 155229 - protein, 105 aa, Oryza sativa
  Clone ID: PAT_MRT4530_55012C.1.pep
MAGDEVAGGWAVPSDMVVHERGRRLGGPRARTAAQAAASNAAARAVTGDAAAHERRPAARRSMAGKPSGYPSGMPVPDGHGHGRSGDGSSVARLEVVFNLPTERK

SEQ ID NO: 155230 - protein, 324 aa, Oryza sativa
  Clone ID: PAT_MRT4530_55013C.1.pep
VSLVLLASKYVDLIVPGYTHLQRAQPVLLPHLLLSYVEQLERDAGRLVNCRERLNFCPLGACALAGTGLPIDRFKTAKDLKFTAPMKNSIDAVSDRDFVLEFLAANSIAAVHLSRIGEEWVLWASEEFGFLTPSDSVSTGSSIMPQKKNPDPMELVRGKSARVFGDLMTVLTLCKGLPQAYNRDLQEDKEPLFDSVKAVLGMLEVCTEFAQNISFNSKRIQSSLPAGYLDATTLADYLVKKGVPFRTSHEIVGRSVALCVSKNCQLAELGLDDLKSVHPVFEGDVYEYLGVENAVNKFISYGSTGSEQVKKQLEDWRTQLGISS

SEQ ID NO: 155231 - protein, 175 aa, Oryza sativa
  unsure (1)..(175): unsure at all Xaa locations
  Clone ID: PAT_MRT4530_55014C.1.pep
MATGRVRHGQRETRPGPRPTCPCPTHARKAYRAKSHTHAHARRARACPTDTHWACLPCSAVPPAAARAPPRRRSPLGPPRCXPPPAPPSALVGRCGASRAPAASRPRAPPHRQPLPRHPPHPSRRPRSCTTMSLGTAQPPATSSPAIAAPPRRAASRLLVISPAPPPRRTDRRLR

SEQ ID NO: 155232 - protein, 90 aa, Oryza sativa
  Clone ID: PAT_MRT4530_55015C.1.pep
MAAKGQPVNVQKEQVNMQKEQMFGLAEKEMEYRVDLFNRLTQTCFSKCIEKRHKEAELNMGENSCIDRCASKYWQVTNLVGQLLGNQPQM

SEQ ID NO: 155233 - protein, 726 aa, Oryza sativa
  Clone ID: PAT_MRT4530_55016C.1.pep
MAAAMAESDNNGSEVSPGGGGRDSASAAAAVASPVKAKARALLELETASAAAAASESSEARVDDGNIQEAESSLREGLSLNYEEARALLGRLEYQRGNVEAALRVFDGIDLQAAIQRFQPSLSEKPPSKRSNKLRSDSSNSGSQHAASLVLEAIYLKSMSLQKLGKAVEAAQQCRSVLDAVESIFQRGIPDVMVEQKLQETVSKSVELLPELWKQAGAYQEALASYRRALLSQWNLDDDCCTRIQKRFAVFLLYGGVEASPPSLASQTEGSYVPKNNLEEAILLLMIILKKWYLGKTHWDPSVMEHLTFALSLCGQTSVLAKHLEEVLPGIYPRTGRWYSLALCNYAASHNEAALNLLRKLLNKNESPGDIMALLLAAKLCSSDYSLASEGVEYARRAVTNVDSSDGHLKSAALHFLGSCLAKKSRIATSDHQRSLLQTESLKSLSEAISLDRHNPDLIYDMGIEYAEQRNMQAALKCAKEFIDATGGSVSKGWRLLSLVLSAQQRYSEAEVVTDAALDETTKWEQGPLLRIKAKLKVAQSLPMEAVEAYRALLALVQAQRKAYGTVKNGTEEVDNKVSEFEVWQGLANLYASLSYWRDAEICLQKAKALKSFSAITLHAEGYTREVREQTQDALAAYFNAVSTEVEHVPSKVSIGALLSKQGPKYLPVARSFLSDALRHEPTNRMAWFYLGKVHKHDGRLADAADCFQAASMLEESDPIESFRSL

SEQ ID NO: 155234 - protein, 102 aa, Oryza sativa
  Clone ID: PAT_MRT4530_55017C.1.pep
TTTRPNHAKNLPKEDPPNPPPRSRRRNHGDLRLFELFRRVGIHQLLPILLLHRHLPHTLLLVSIRPQLPQRLLPFPRLRPKLVLLPILLLLLRRRSHFWILP

SEQ ID NO: 155235 - protein, 224 aa, Oryza sativa
  unsure (1)..(224): unsure at all Xaa locations
  Clone ID: PAT_MRT4530_55018C.1.pep
ARGGEVSATRAPPPPAAAAGRRHRPSATHRTAERSIISADLRRSPPPSPVHRGSSATRSPPPPPPSATHRTGERSIIAAXSPPPSRVHRGFCGIGSXEDGGGPPPPTSPTPEGGVCSATAAPGNPQLRPRHRIAPPPPPLIPRPASSLLVLHHGHRAWRLQFGCLVFSVAAPGPQFACCCRDITSSTVASPEGSMADHPPTVFLNELENWVSVKSRESILSVRF

SEQ ID NO: 155236 - protein, 47 aa, Oryza sativa
  Clone ID: PAT_MRT4530_55019C.1.pep
MGESRVAGSKRRTRGKTPAPNSVLAIEPAVTSNLSASYMRNAFTKSM

SEQ ID NO: 155237 - protein, 121 aa, Oryza sativa
  Clone ID: PAT_MRT4530_5501C.1.pep
VRGLSSARMESASTTVPSIVVYVTVPNREAGKKLSQSIISEKLAACVNIVPGIESVYWWEGKVQTDAEELLIIKTRESLLDALTEHVKANHEYDVPEVIALPITGGNTKYLEWIKNSTKAN

SEQ ID NO: 155238 - protein, 206 aa, Oryza sativa
  Clone ID: PAT_MRT4530_55020C.1.pep
MDLYLDLKVMVNTLPESKRSHLANKEVQNLVATIDKGTGSGCGGHGDGGSCIVWLMGHSLGASLALDVGRAMMAEKDYNLPTFLFNPPQVSLAPAIDVLLPTKKARRSIHAASSFLKARMDKVLKPHKERMEKLFEQLSPWAPELYVHERDLICKGYISYFEQREQVKERFRGVGKSAMALSYRDMLFAAFGKEKERPHLLPTARL

SEQ ID NO: 155239 - protein, 97 aa, Oryza sativa
  Clone ID: PAT_MRT4530_55021C.1.pep
MSPTLLLTVSRAGHLLPRSLLDAAIGLLLPAAIPIDASVGTKCVRQETRKVNALMVRRTQCACKVVMVRRDPPVAATSLCRHHPDVTHPATRGEPRR

SEQ ID NO: 155240 - protein, 672 aa, Oryza sativa
  Clone ID: PAT_MRT4530_55022C.1.pep
MADQNGAAAVSEAEAAPVQVETGAESGDAESEQYQPFFSMCQPIRSVSYSNSWDMSNLDSMDDKYMLSAPWPENEQPQSENDMDLLDGDTNMQSEPLSTEQPSSNACDPVICLMVHTISLELKYLIQLFYINCDNQDEIDIWDGKTKQDSSSLLDSKLCNSGSGAEPCNMEGQQFSLSFSRNTQSQLVMIKMVSVHSVLLKNILMNQSEDYPELSSDFRPGQQEDAHEFLRCLLDNLDKCTTDPKPKDKPSSFDEESIVKQVFGGRLKSKLTCCECGHCSETYEPFLDLSLEIDQADNLIDALESFTKLERIGDAEDKLNCEHCNAKVCKNKQLMLDRSPDVVAIHLKRFTSLDRSVEKIDKHVVYPLELDLKPFHCDPDINKELKYDLYGVVEHSGSPSYGHYVCSVRSSPSTWHLMNDSHVDLISEASALNQEGYILFYIRQGKFQWFSSLLEQKDDLHPENTSGASPVSVLENIDVDCPTSSGEATNSSGDKLEKDETSQCKTSFLEEPAKGCPIDGINKADLKDEIVPCISSHHDCVANRCPGSAADITNLDRPSTPSPKRKRFFSDDNEFNVFEFEDFGDEDETPLLGNLKFTSKAKKAKVESASKSTKGPCIDKNVTRLVRSMPSTRRKGIVDCLSQLNAEQDSGSCPRSHPLGKKKLGIPVPIKW

SEQ ID NO: 155241 - protein, 71 aa, Oryza sativa
  Clone ID: PAT_MRT4530_55023C.1.pep
GWASLQGANHNGTDQVSIVTSSGERMSRRSSGPKTTSLRGDQTHTYSCSNDIWSLFASKIYGHYDFLPWTL

SEQ ID NO: 155242 - protein, 147 aa, Oryza sativa
  Clone ID: PAT_MRT4530_55024C.1.pep
MRSSHCESYCAPPLCNLPCLPKSKDDSTTDDAAAASSPTPATVVAAAFAEDKPPPLQKIEAAVTANKDHDDDGDGGGDEGSKEVVVTVVPKSSLKKTNCEDSKNVVKGNVKWMDLLGKDLTQVKEFEPSESGDSDDEDGNTCICVIQ

SEQ ID NO: 155243 - protein, 1217 aa, Oryza sativa
  Clone ID: PAT_MRT4530_55025C.1.pep
MALVPVTADPAMGSSGSAFLYPQLMSTNYTSWVIRVQAMMEDQGIWEAIEPAAGAAVDPRKDKKAKSHLLQSLPEDLLMQVAKKRSAKEVWDCLKTRFVGVDRVRDARLQTLKGEFTSMVMEAGETLDQYAGRITTMGWLNDAAMVKKLFDTVPEKFVSLVAGIEQFYDVDTMPFEEAVGRLKAYEEWMWKKKATAGGVTADGQVLLTQGEWEARFKKGGGETSSPQKNKPSGEGANHGQAERGRGRGRGRGGTQRSGGGSSGGGRDKSHIKCFNCEEFGHYSTQCPHPKKKKAEAHLVQTEDAGPALLLAVTEAVQNAPRQDAHCGLVVHEERVWPRLMLAEKGAAAGDLWYLDNGASNHMSGDRRKFRELDETMTGQVRFGDASSVQIMGMGSILFSCKNGDQWLLDDVYYIPSLCCNMVSLGQLTETGHRVMMDGDDLKVFDKNPWRLVMKVRRTSNRLYRIELQLASQVCLLASLDNPAWLWHARIGHVNFHALKLLVDKEMASGVPTVHHPNQLCQACLVAKQVRQPFPGMANYRAEAPLELLHMDLCGPITPSTFAGNRYFMLIVDDFSNWMWVFVIKLKDQALAVFEKFKPLAKNTVGRTIKTLRTDRGGEFLSGKFARVCDAASIERHLTAPYSPQQNDVVERRNRTVMAMARSLLKGMSVPGRMWGEAVRHAIFLLNWLPTKAMGNRTPFEAWTGKKPHLGHLRVFGCVEEGSKAHRLFDPRRRQIIVSRDVVFDENTPWQWSAAAGEVTSTEFEVEEPVGAEQPALAEQAGLVPWYRAPPAGRRAGKEPEVAEHDVGPVRYRSLAEIMLEAPRVDLVEDDDDARALLAEMEEPLSYREATGEPAWVNAMNKELEAIEKNKTWSLCMLPAGHKAIGLKWVFKLKKNTAGEVIKHKARLVANGYVQQQGVDFDEVFAPVARLDTVRAILAVAADRRWQVHHLDVKSAFLNGDLEEEVYVSQLEGFVEKGKEHLVYELSKALYGLRQAPRAWNTRLDRSMKELGFSRCAQEQAVYTRGVVSKFMEQLTVMHFKAVKQILRYLKGTINCGLMFSGGNDAVEITGFTDSDLAGDSDDRRSTSGMAFYFNSSLVSWSSQKQKTVALSSCEAEFMAATAAACQALWLRGLLIEMIGAEARPVKLYVDNKSAIALMKNPVFHGRKSGDGGDGDGAGGGGGVAVGVTSTGRRRWGWEGLGGWEDAGGGWLDKVVGG

SEQ ID NO: 155244 - protein, 162 aa, Oryza sativa
  Clone ID: PAT_MRT4530_55026C.1.pep
MDRATLLSCLEPVFALYHRLRQIVLPTAPGVEGDVLRVCPAPARSIAHVVHSAAPAEGAGGAGGAPLHLHPIHEPHKPAMVATSSSTGSQSESAAAQVGSSNSDFRTLACRGPEERSHKFTTRYGRKCLPPVPSRTCFFDDVMFLRAYYATGYRMFFQWFLI

SEQ ID NO: 155245 - protein, 1350 aa, Oryza sativa
  unsure (1)..(1350): unsure at all Xaa locations
  Clone ID: PAT_MRT4530_55027C.1.pep
MAGECNGGPPPLLPLPPLAAHRVTAPTRLAAAGGRWTARFLVDGDAPELHAMMEDQGVWEAIEPAAGAAVDPRKDKKAKSHLLQSLPEDLLMQVAKKCSAKEVWDCLKTRFVGADRVRDARLQTLKGEFTNMVMEAGETLDQYAGRITTMGVRYSALGATLNDAAMVKKLFDTVPEKFISLVAGIEQFYDVDTMPFEEVVGRLKAYEERMRKKKATTGGVTADRQKNKPSGEGANRGQAGRGRGRGRGRGGTQSSGGGSGGGGGGRDKSHIKCFNCEEFGHYSTQCPHPKKKKVEAHLAQTEDAGPALLLAVTEAVQNAPRQDALCGLVVHEERVWPRLMLAEKGAAAGDLWYLDNGASNHMSGDRRKFRELDKTVTGQVRFGDASSVQIMGKGSILFSCKNGDQWLLDDVYYIPSLRCNMVSLGQLTETGHRVVMDGDDLEVFDKNPWRLVMKVRRSSNRLYRIELQLASPLLVDKEMAAGVPAVHHPNQLCQACLVAKQVRQPFPGMANYRAEAPLELLHMDLCGPITPSTFAGNRYFMFIVDDFSRWMWVFVIKSKDQALAAFEKFKPLAENTAGRTIKTLRTDRGGEFLSGEFARVCDAAGIERHLTAPYSPQQNGVVERRNRMVMAMARSLLKGMSVPGRMWGEAVRHAVFLLNRLPTKAMGNRTPFEAWTGKKPHLGXLRVFGCTAHAKXRDVVFDENTPWQWSVAAGEVTSTEFEVEEPVGAEQPAPAEQAGSVPWYRAPPAGRRAGKEPEVAEQRGTPPASPARFSPTLPSTPTLGSSSTHSAEVQASPRTADSDDGPVWYRSLAEIMIEAPRVDLVEDDDDTEALLAEMEEPTSYREAAGEPAWVNAMNKELEAIEKNKTWSLCMLPAGHKAIGLKWVFKLKKNTAGEVIKHKARLVAKGYFQRQGVDFDEVFAPVARLDMVRAILAVAADRRWQVHHLDVKSAFLNGDLEEEVYVSQPEGFVEKGKEHLVYKLSKALYGLRQAPWAWNTQLDRSMKELGFSRCAQEQAVYTRGTGSAGIIVGVYVDDLIVTGESPSEITAFKQQMMGEFEMSDLGLLTYYLGIEVLQGTDGIAIKQVAYARKILTQFRMLDCNSTSIPIEHRSQLHKDAQGSTVDPTEYRRVIGCLRYLLHTRPDLSYTVGVVSRFMERPTVMHFKAVKQILRYLKGTINCGLMFSGGNGAVEITGFTDCDLAGDSDDRRSTSGMAFYFNGSLVSWSSQKQKTVALSSCEAEFMAATAAACHALWLRGLLIEMIGAEARPVKLYVDNKSAIALMKNPVFHGRSKHIDTRYHFIRECVESGKIQIEFVRTEEQRADALTKGLPAARLATARHLLGVRDFGP

SEQ ID NO: 155246 - protein, 1339 aa, Oryza sativa
  Clone ID: PAT_MRT4530_55028C.1.pep
MALVPATADPARGSSGSAFLYPQLTSTNYTSWVAKKRSAKEVWDCLKTRFIGADRVRDARLQTLKEEFTNMVMEAGETLDQYAGRITTMGVRYSALGATLNDAAMVKRLFDTVPEKFISLVAGIEQFYDVDTMPFEEAVGRLKAYEERMRKKKATTGGVTADGQVLLTQAEWEARFKKGGGETSSPQKNKPSGEGANRGQAGRGRGRGRGRGGTQSSGGGSGGGSGGRDKSHIKCFNCEEFGHYSTQCPHPKKKKAEAHLAQTEDAGPTLLLAVTEAVQNASRQDALCGLVVHEERVWPRLMLAEKGAAAGDLWYLDNGASNHMSGDHRKFRELDETVTGQVRFGDASSVQIMGKGSILFSCKNGDQWLLDDVYYIPSLYCNMVSLGQLTETGHRVVMDGDDLEVFDKNPWRLVMKVRRSSNRLYRIELQLASPVCLLASLDDPAWLWHARLGHVNFHALKLLVDKEMAAGVPAVHHPNQLCQACLVAKQVRQPFPGMANYLAEAPLELLHMDLCGPITPSTFTGNRYFMLIVDDFSHWMWVFVIKSKDQALAAFEKFKPLAENTAGRTIKTLRTDRGGEFLSGEFARVCDAAGIERHLTVPYSPQQNGVVERRNRTVMAMARSLLKGMSVPGRMWGEAVRHAVFLLNRLPTKAMGNRTPFEAWTGKKPHLGHLRVFGCTAHAKVTAPHLKKLDDRSNPVVYLGVEEGSKAHRLFDPRRRQIIVSRDVVFDENTPWQWSAAAGEVTSTEFEVEEPVGAEQPAPAEQAGSVPWYRAPPAGRRAGKEPEVAEQRGTPPASPARFSPTLPSTPTLGSSSTHSAEVQASPRTAGSDDEPVRYRSLAEIMIEAPRVDLVEDDDDTEALLVEMEEPTSYREAAGEPAWVNAMNKELEAIEKNKTWSLCMLPASHKAIGLKWVFKLKKNTAGEVIKHKARLVAKGYVQRQGVDFDEVFAPVARLDTVRAILPVAVDRRWQVHHLDVKSAFLNGDLEEEVYVSQPEGFVEKGKEHLVYKLSKALYGLRQAPRAWNTRLDRSMKELGFSRCAQEQAVYTRGTGSTGIIVGVYVDDLIVTGESPSDITAFKQQMMGEFEMSDLGLLTYYLGIELHKDAQGSTVDPTEYRRVIGCLRYLLHTRPDLSYAVGVASRFMERPTVMHFKAVKQILRYLKGTINCGLMFSGGNGAVEITGFTDSDLAGDSDDRRSTSGMAFYFNGSLVSWSSQKQKTVALSSCEAEFMAATAAACHALWLRGLLIEMIGAEARPVKLYVDNKSAIALMKNPVFHGRSKHIDTRYHFIRECVESGKIQIEFVRIEEQRADALTKGLPAARLATARHLLGVRDFGL

SEQ ID NO: 155247 - protein, 914 aa, Oryza sativa
  Clone ID: PAT_MRT4530_55029C.1.pep
MAAAAAAASRFAAALFHRRTRRVTSALAYAVLEWTLIALLLINGLFSYAIARFAAYFGLRPPCLLCSRVDRLFEKATEEEDGARWLRSVLCGAHAAEISGLGYCLHHGRLADAGDMCEACLSSSKEESIKDAGEESATVCSCCYAVVKTSSRELPDKGQGQSEEKTTEEDRNQGYVPLAQEEHGEEEDQGYVILAQEEHDEENEEEHGEFQEEERQEEVYDKDEQEEKMAAVQDESLEVMAVGEEIELDGERLLSVAAIDEMTIADESGLHQACCEKEKEMDHIDGEHELRDLDIGVVLEEKRMLDSSAATADVAIEDDFVVPVPCAEPVTSPPDPHENIIPHDDELVIEDVAQIGDATAEEETVEEEEVETAEEEEIVVPEVIEEVSEDDNQLSSLVIWYASLIVFLSVTEAVPEDDNRSAEVDTNCEVSIGSEICEREQDDHVVPFHESAEFEEPTDPLAYPDEQPLPLESLHETDPTAQEASETEQEEEATASQRLDQPPNEQNERCHTNLRQKVLLERKRSLSLSLDGSVASEMELSEPSTVDQLKSALQAERKALSALYSELEEERSAAAIATNQTMAMINRLQEEKAAMQMEALQYQRMMEEQSEYDQEALQLLNELVTKREREKQELERELDMCRQKVLHYEDKERRRMASFKANGHSPNGNGTSVSSSGEDSDGHSDEYCELGESPDGSNLQSPSHAAFSPRTDQENKKHLVALDDSLTYFEMERLSILEELKTLEERLFTLEDDDINDTSAAVGRSSDEYELSADGLHSPGNGDITSDKAKFEGRNSICRGKSLLPLFDAAGDESSDQTPSARVGDVQVDNSTKPVSVLVKEQERLAIIEEVDHVYERLQALEADKEFLRHCIKSLKKGDRGMDLLQEILQHLRELRSVELHVKHAGDALAANSA

SEQ ID NO: 155248 - protein, 57 aa, Oryza sativa
  Clone ID: PAT_MRT4530_5502C.1.pep
SDQSASSSCVLFLPNKRRLHSDSGGCFATHPRLFIFTVKWSNTMTSCDSIHMANARI

SEQ ID NO: 155249 - protein, 706 aa, Oryza sativa
  Clone ID: PAT_MRT4530_55030C.1.pep
MARQHFLVVAYPGQGHINPARALAARLARATGAHVTLSVAVSAHRRMFPSLAAPDEEVHDADAGGGGISYVPYSDGYDEGFRLFASDGEAAWRHSETFGRVGREAFAGVVDRLAARGRPATCVVYAFLMWWAADVARERGIPRVLYWIQPATMLAVYYHYLHGLEELVTEHAGEPEFTVDMPSLPPMAIRDLPSFFTDLADTRLAAAFHGVRTTIEQLDIDRRSSSKPPMVLVNTVEELELDVLAASFPDLDILPIGPAATSLDGGGAAAAARASHDLYRHDEKGYMEWLDAKPAGSVVYVSFGSMSVVSRRQKEELRRGLAATARPYLWVVRSDDRDDGDGDGDGGGMVVEWCDQVRVLSHGAVGCFVTHCGWNSTLEAVACGAPMVAVPQWSDQDTNARLVAGWGVGVRAATGADRVVEAGELARCVETVMADTEAAAAVRRSSVAWKAKVREAVAEGGSSDHLGVCAVTGADRVLETGKLARCVETVMVETEAAGHRRSPELGSVEDEAPCGGAPRALRATGGKLEHGPLAVDLERGPRGRGLRAADSSPGQRRQWPLSQLLPDLAGGKLDETNSRVGEWGSVLVARWVLWRRPDNTVEMGRRLAAARSRSGSNRACLWQWRRDAAVGLGGLADGNGAGRGWLPCPDSRGGTSAVVGGGQRHLDLMGLVVFGSSDPATSAEQQCRQRRCSNGDDGLGLIPLTS

SEQ ID NO: 155250 - protein, 1331 aa, Oryza sativa
  Clone ID: PAT_MRT4530_55031C.1.pep
MAGECNGGPPPLLPLPPLAAHRVTAPTRLAAAGGRWTARFLVDGDAPELHAMMEDQGVWEAIEPAAGAAVDPRKDKKAKSHLLQSLPEDLLMQVAKKCSAKEVWDCLKTRFVGADRVRDARLQTLKGEFTNMVMEAGETLDQYAGRITTMGVRYSALGATLNDAAMVKKLFDTVPEKFISLVAGIEQFYDVDTMPFEEVVGRLKAYEERMRKKKATTGGVTADRQKNKPSGEGANRGQAGRGRGRGRGRGGTQSSGGGSGGGGGGRDKSHIKCFNCEEFGHYSTQCPHPKKKKVEAHLAQTEDAGPALLLAVTEAVQNAPRQDALCGLVVHEERVWPRLMLAEKGAAAGDLWYLDNGASNHMSGDRRKFRELDKTVTGQVRFGDASSVQIMGKGSILFSCKNGDQWLLDDVYYIPSLRCNMVSLGQLTETGHRVVMDGDDLEVFDKNPWRLVMKVRRSSNRLYRIELQLASPLLVDKEMAAGVPAVHHPNQLCQACLVAKQVRQPFPGMANYRAEAPLELLHMDLCGPITPSTFAGNRYFMFIVDDFSRWMWVFVIKSKDQALAAFEKFKPLAENTAGRTIKTLRTDRGGEFLSGEFARVCDAAGIERHLTAPYSPQQNGVVERRNRMVMAMARSLLKGMSVPGRMWGEAVRHAVFLLNRLPTKAMGNRTPFEAWTGKKPHLGPCGCSGWSVAAGEVTSTEFEVEEPVGAEQPAPAEQAGSVPWYRAPPAGRRAGKEPEVAEQRGTPPASPARFSPTLPSTPTLGSSSTHSAEVQASPRTADSDDGPVWYRSLAEIMIEAPRVDLVEDDDDTEALLAEMEEPTSYREAAGEPAWVNAMNKELEAIEKNKTWSLCMLPAGHKAIGLKWVFKLKKNTAGEVIKHKARLVAKGYFQRQGVDFDEVFAPVARLDMVRAILAVAADRRWQVHHLDVKSAFLNGDLEEEVYVSQPEGFVEKGKEHLVYKLSKALYGLRQAPWAWNTQLDRSMKELGFSRCAQEQAVYTRGTGSAGIIVGVYVDDLIVTGESPSEITAFKQQMMGEFEMSDLGLLTYYLGIEVLQGTDGIAIKQVAYARKILTQFRMLDCNSTSIPIEHRSQLHKDAQGSTVDPTEYRRVIGCLRYLLHTRPDLSYTVGVVSRFMERPTVMHFKAVKQILRYLKGTINCGLMFSGGNGAVEITGFTDCDLAGDSDDRRSTSGMAFYFNGSLVSWSSQKQKTVALSSCEAEFMAATAAACHALWLRGLLIEMIGAEARPVKLYVDNKSAIALMKNPVFHGRSKHIDTRYHFIRECVESGKIQIEFVRTEEQRADALTKGLPAARLATARHLLGVRDFGP

SEQ ID NO: 155251 - protein, 637 aa, Oryza sativa
  Clone ID: PAT_MRT4530_55032C.1.pep
IITKTFFLFLALSHKFFAAAGEEERFLYSGFSGTDILVNGMAMVTPNGLLQLTNGMAQSKGHAIHPTPLRFHEHGSNGTRVRSFSASFVFAIRSIAPGVSAQGLTFFVSPTKNFSRAFSNQFLGLLNKKNNGNTSNHIFAVELDTVLNNDMQDINDNHVGIDINDLRSVDSYNAGYYDDKNGTFCNLTLASFDAMQVWVDYNGERKLISVTLAPLHMAKPARALLTTTYDLSQVLKNQSYVGFSSSTGILDTHHYVLGCSFGMNQPAPVIDVKKLPKLPRLGPKPQSKLLIIILPVATATLVLAIVSGIVVLRRRQMRYAELREDWEVEFGPHRFSYKDLFHATEGFKDKHLLGIGGFGRVYKGVLTKSKSEVAVKRVSHESRQGMREFIAEIVSIGRLRHRNIVQLLGYCRRKGELLLVYDYMPNGSLDKYLHCNSTRPSLDWNQRFRIIKGVASGLWYLHGEWEQVVIHRDVKASNVLLDEEMNARLGDFGLARLYDHGTDMQTTHLVGTIGYLAPELANTGKASPATDVFSFGIFVLEVACGRRPIEHGMNSEYKFTLVDWVIDRWHEGSLLEVMDPKLQNGYDDDEACLALKLGLLCSHPSPIARPTMWHVMQYLNHDLPFPELMAMDMVRNQ

SEQ ID NO: 155252 - protein, 156 aa, Oryza sativa
  Clone ID: PAT_MRT4530_55033C.1.pep
MQLRISPSMCSINIPSSNGVIDSMKVAAVVVVDGGRGGTGALWGSATSFPLSSSSPPSRRSRLTQQVLLEHLAVGKDADGPWGTLEHLAVQLAGHLALRSLWYGTSSRAGGDVLHATICAPGFEPIDVLAFGRYRTGLGPGWWLMRGASSPGARGG

SEQ ID NO: 155253 - protein, 156 aa, Oryza sativa
  Clone ID: PAT_MRT4530_55034C.1.pep
MPLPPSAPPDLGGGREDAAASALLAVAATHPAAVQPEPPVTGLPPPPSGQIWEEGREGSCRPASTYCAPPLSAPRRRPPASPLPPPARSGREGGEPSPASEHTLRPDTGPPRAAGHRPPPSSLRPDLGGREGGEPPLAVPRPLLPLPSLGCATTAL

SEQ ID NO: 155254 - protein, 481 aa, Oryza sativa
  Clone ID: PAT_MRT4530_55035C.1.pep
MAGPTIVLLPAWGSGHFMSALEAGKRLLVAGGGAVSLTVLVMQAPTEIEASVVEAHVRREAASGLDVTFRRLPAVEHPTGCEATEEFMSRYVERHAHHVKAAIAGLASPVAAVVVDLFFTPLLDAAHELSLPAYVYFASTAAFLALMLRLPELRDDLTVGFDGMEGTVDVPGLPPVPPSYMPVCLVSKTVKNYDWFEYHGRRFTEAKGIIVNSSVELEGAVLAAIADGRRPAPAIHAIGPVIWFDATLPPEQPHECVRWLDAQPAASVVFLCFGSIGFLDAAQVRELAAGLERSGHRFLWVLRGAPAGGVRYPTDADPGELLPEGFLEATAGRGMVWPRWAPQKDILGHAAVGGFVTHCGWNSVLESLWFGVPMATWPLYGEQHLNAFEAVASMGVAVELRRTTAKDGDAARSLVEAAEVERAVRRLMAPQGGGSSEAREKAAEVSAACRKAVEEGGSSHAALQRLVREIVRVVAGHTRPE

SEQ ID NO: 155255 - protein, 104 aa, Oryza sativa
  Clone ID: PAT_MRT4530_55036C.1.pep
TRFYPTKSMSSRALLCNVSLLYQSGFPYPSLNGFAVVISFDISCPFLPPQISRTPHQINLLAYCNFSHCPPINSFTPANCHQSHPTMLPFIFYPVFRKKKPIKR

SEQ ID NO: 155256 - protein, 43 aa, Oryza sativa
  Clone ID: PAT_MRT4530_55037C.1.pep
LERTKQLWGLQPNKQSVNTPVLISGNICLIKTNHVLRLNVLNM

SEQ ID NO: 155257 - protein, 53 aa, Oryza sativa
  Clone ID: PAT_MRT4530_55038C.1.pep
TIREADRILCAIKLGSWIPLYARSFGCGERCTVAQRRGCCSPPMPVIRPDTTC

SEQ ID NO: 155258 - protein, 74 aa, Oryza sativa
  Clone ID: PAT_MRT4530_55039C.1.pep
MRLFPTHALAPLLSPACRRGVSGAMAASGGVPASATLLLLAIHAAAGSPLAFAVRPVWSPETPGGHQPLMCATD

SEQ ID NO: 155259 - protein, 151 aa, Oryza sativa
  unsure (1)..(151): unsure at all Xaa locations
  Clone ID: PAT_MRT4530_5503C.1.pep
NSDCFYLVLACFFDLLAGIRLICTGKINNPWRGVSIAKAQYNNIXYGCSRVVNVSPKSXLSSTHQKIGPTTILIVXKWSSGFIRWYQSFRCSHLVRLEFRVLVTFYTTVVVAPVSLLSSGPTKMKSACCHGSIFVVFRSFRRLVLELLSCK

SEQ ID NO: 155260 - protein, 1564 aa, Oryza sativa
  Clone ID: PAT_MRT4530_55040C.1.pep
MAAAAAAAAAAPAPATEEDEEALLTRVQTIILRVVELEDNPNPRLLHTLATICEAHEARYAQECANSPSYNNTNARNSHTIGKLANLLRENDDFYELVFCKFLSDNSYSAAVRSAAARLLLSCYSAWTPQYPHAFEDAIVENIKKWVTEDGGASNECESKHLGKNNKPTDADMLRTYAIGLLAMALCGGGQLVEDVLTMGVSAKLMHFLRVRVHGDVACAQKDSNIPLDTKHPRSRDENRSKSRLVQDSSRLDGMRSGDGISIDPTSENCDNVMGMRHAHGERWIDDAASLQPERADSSLDLFDAMEAVKSWERLSALRLGRDEEMNENTRDDLLKRKLSRTGSRLRGKSKAGESLPESERTPLSPTSGLKIGTRTSREKNMVRIEDANKAIDVNNSSPGIEPFNAISKEEYEDRFKDCIIGLKDISDIVLKAVRAAEAEARSANAPDEAVKAAGDAAAELVKSAASEVWKTGNNGDAVVLAAEKAAATVVDAAMSTSVSRSNQVGEEHVVEEPVQISEDHELEDFVITDHGQLLQLREKYSIQCLQILGEYVEALGPVLHEKGVDVCLALLQRSIKDQGGHGHFTLLPDVLRLICALAAHRKFAALFVDRGGIQKILSVPRIAQTYTALSGCLFTFGSLQSTMERICALSSDTLNNVVELALQLLECPQDSARKNAAIFFAAAFVFKAILDSFDAKDGMQKVLGILHGAASVRSGGNSGALGSSNVNQGNDRSPAEVLTASEKQVAYHSCVALRQYFRAHLLQLVDSIRPSKSIRSIARNTSSARAGYKPFDIGNEAMDAVFRQIQRDRKLGPALVRARWPVLDKFLASNGHITMLELCQAPPTDRYLHDLTQYAFGVLHITTLVPYCRKLIVHATLSNNRVGMSVLLDAANSFGYVDPEVICPALNVLVNLVCPPPSISNKSSSTGNQQPAATQAVGGAFSENRDRNAEKCTTDRNLTANQGESRERCGDGNTSQQGNTVQISTPVVPSGVVGDRRISLGVGAGGPGLAAQLEQGYRQAREVVRANNGIKILLQLLSSRMVTPPVAIDPIRALACRVLLGLARDDAIAHILTKLQVGKKLSELIRDTSGQSIGGDNSRWQNELTQVAIELIAVLTNSGKETTLAATDAAAPALRRIERAGIAAATPVSYHSRELMQLIHEHLLGSGFTATAAMLQKEADLAPLPSTAAVTPVHQVAALETSSAQQQWPSGRVQGFVPDTTKVTTDQTGQRSDSVLPSSKKKSLSFSSSFSKRTQPSHLFSGNRASNSLKSPVPIGNVDNMICAASTVNTGDAETSHKTPLSLPQKRKLVDMKDLSSASAAKRSAMVDQACQSPVFQTPAPTRRGLSVAVDSPTASFHSGRPNFNNIYTENLDDFQGTPGATITTPHHAGNHTGELRVFDCNTANILETQTCHQQLVTIVESASSGGNELILTSSLTRVICFWCACLLISAVHTLQTVIKFNGRGDVIYAILRRNLDDVTSSIHTRRVRHPLFPAFRTIDAVTYSDIATVQIDRGVLDLATEPNDSLLGVVAMDDPDEMFSSARLFEVGRKRPTDDDSDPEDA

SEQ ID NO: 155261 - protein, 1920 aa, Oryza sativa
  Clone ID: PAT_MRT4530_55041C.1.pep
MAAAAAAAAAPAPATEEDEEALLTRVQTIILRVVELEDNPNPRLLHTLATICEAHEARYAQECANSPSYNNTNARNSHTIGKLANLLRENDDFYELVFCKFLSDNSYSAAVRSAAARLLLSCYSAWTPQYPHAFEDAIVENIKKWVTEDGGASNECESKHLGKNNKPTDADMLQTYAIGLLAMALCGGGQLVEDVLTMGVSAKLMHFLRVQVHGDVACAQKDSNIPLDTKHPRSRDENRSKSRLVQDSSRLDGMRSGDGISIDPTSENCDNVMGMRHAHGERWIDDAASLQPERADSSLDLFDAMEAGATNDRTYSASICDTKSRVGERLSALRPGRDEEMNENTRDDLLKRKLSRTGSRLRGKSKAGESLPESERTPLSPTSGLKIGTRTSREKNMVRIEDANKAIDVNNSSPGIEPFNAISKEEYEDRFKDCIIGLKDISDIVLKAVRAAEAEARSANAPDEAVKAAGDAAAELVKSAASEVWKTGNNGDAVVLAAEKAAATVVDAALSTSVSRSNQVGEEHVVEEPVQISEDHELEDFVITDHGQLLQLREKYSIQCLQILGEYVEALGPVLHEKGVDVCLALLQRSIKDQGGHGHFTLLPDVLRLICALAAHRKFAALFVDRGGIQKILSVPRIAQTYTALSACLFTFGSLQSTMERICALSSDTLNNVVELALQLLECPQDSARKNAAIFFAAAFVFKAILDSFDAKDGMQKVLGILHGAASVRSGGNSGALGSSNVNQGNDRSPAEVLTASEKQVAYHSCVALRQYFRAHLLQLVDSIRPSKSIRSIARNTSSARAGYKPFDIGNEAMDAVFRQIQRDRKLGPALVRARWPVLDKFLASNGHITMLELCQAPPTDRYLHDLTQYAFGVLHITTLVPYCRKLIVHATLSNNRVGMSVLLDAANSFGYVDPEVICPALNVLVNLVCPPPSISNKSSSTGNQQPAATQAVGGAFSENRDRNAEKCTTDRNLTANQGESRERCGDGNTSQQGNTVQISTPVVPSGVVGDRRISLGVGAGGPGLAAQLGRGYRLARALLTANNGIKILLQLLSSRMVTPPVAIDPIRALACRVLLGLARDDAIAHILTKLQVGKKLSELIRDTSGQSIGGDNSRWQNELTQVAIELIAVLTNSGKETTLAATDAAAPALRRIERAGIAAATPVSYHSRELMQLIHEHLLGSGFTATAAMLQKEADLAPLPSTAAVTPVHQVAALETSSAQQQWPSGRVQGFVPDTTKVTTDQTGQRSDSVLPSSKKKSLSFSSSFSKRTQPSYLFSGNRASNSLKSPVPIGNVDNMICAASTVNTGDAETSHKTPLSLPQKRKLVDMKDLSSASAAKRPAMVDQACQSPVFQTPAPTRRGLSVAVDSPTASFHSGRPNFNNIYTENLDDSQGTPGATITTPHHGASDQQPVNLECMTLDSLVVQYLKHQHRQCPAPITTLPPLSLLHPHVCPEPSRSLSAPANIAARMGSREIRRQFSGIQIPRRDRQFIYSRFKLCRVCRDESSLLTCMTFLGDASRVAAGNHTGELRVFDCNTANILETQTCHQQLVTIVESASSGGNELILTSSLNEVKVWDAFSVSGGPLHTFEGCKAARFSHSGTSFAALSTDSTRREVLLYDVQTYNLDLRLPDNSGYSGGRGYVQPIIHFSPSDTMLLWNGVLWDRRSPNPVHQFDQFTDYGGGGFHPAGNEVIINSEVWDLRKFKLLRSVPSLDQTVIKFNGRGDVIYAILRRNLDDVTSSIHTRRVRHPLFPAFRTIDAVTYSDIATVQIDRGVLDLATEPNDSLLGVVAMDDPDEMFSSARLFEVGRKRPTDDDSDPEDAGDTDDEDDDDNDDSEDGIIPLTDIGDSDSDISNSSDDGGDDEDIDSGDENDDDDDDAEFIDEGDFEGGGGLLEIMGEEDGDESDIMGSFSSGDEEGWIM

SEQ ID NO: 155262 - protein, 439 aa, Oryza sativa
  Clone ID: PAT_MRT4530_55042C.1.pep
YAQECANSPSYNNTNARNSHTIGKLANLLRENDDFYELVFCKFLSDNSYSAAVRSAAARLLLSCYSAWTPQYPHAFEDAIVENIKKWVTEDGGASNECESKHLGKNNKPTDADMLRTYAIGLLAMALCGGGQLVEDVLTMGVSAKLMHFLRVRVHGDVACAQKDSNIPLDTKHPRSRDENRSKSRLVQDSSRLDGMRSGDGISIDPTSENCDNVMGMRHAHGERSPGIEPFNAISKEEYEDRFKDCIIGLKDISDIVLKAVRAAEAEARSANAPDEGVKAAGDAAAELVKSAASEVWKTGNNGDAVVLAAEKAAATVVDAAMSTSVSRSNQVGEEHVVEEPVQISEDHELEDFVITDHGQLLQLREKYSIQCLQILGEYVEALGPVLHEKGVDVCLALLQRSIKDQGGHGHFTLLPDVLRLICALAAHRKFAALFVDRG

SEQ ID NO: 155263 - protein, 1202 aa, Oryza sativa
  Clone ID: PAT_MRT4530_55043C.1.pep
IAQTYTALSACLFTFGSLQSTMERICALSSDTLNNVVELALQLLECPQDSARKNAAIFFAAAFVFKAILDSFDAKDGMQKVLGILHGAASVRSGGNSGALGSSNVNQGNDRSPAEVLTASEKQVAYHSCVALRQYFRAHLLQLVDSIRPSKSIRSIARNTSSARAGYKPFDIGNEAMDAVFRQIQRDRKLGPALVRARWPVLDKFLASNGHITMLELCQAPPTDRYLHDLTQYAFGVLHITTLVPYCRKLIVHATLSNNRVGMSVLLDAANSFGYVDPEVICPALNVLVNLVCPPPSISNKSSSTGNQQPAATQAVGGAFSENRDRNAEKCTTDRNLTANQGESRERCGDGNTSQQGNTVQISTPVVPSGVVGDRRISLGVGAGGPGLAAQLEQGYRQAREVVRANNGIKILLQLLSSRMVTPPVAIDPIRALACRVLLGLARDDAIAHILTKLQVGKKLSELIRDTSGQSIGGDNSRWQNELTQVAIELIAVLTNSGKETTLAATDAAAPALRRIERAGIAAATPVSYHSRELMQLIHEHLLGSGFTATAAMLQKEADLAPLPSTAAVTPVHQVAALETSSAQQQWPSGRVQGFVPDTTKVTTDQTGQRSDSVLPSSKKKSLSFSSSFSKRTQPSHLFSGNRASNSLKSPVPIGNVDNMICAASTVNTGDAETSHKTPLSLPQKRKLVDMKDLSSASAAKRSAMVDQACQSPVFQTPAPTRRGLSVAVDSPTASFHSGRPNFNNIYTENLDDFQGTPGATITTPHHGASDQQPVNLECMTLDSLVVQYLKHQHRQCPAPITTLPPLSLLHPHVCPEPSRSLSAPANIAARMGSREIRRQFSGIQIPRRDRQFIYSRFKLCRVCRDESSLLTCMTFLGDASRVAAGNHTGELRVFDCNTANILETQTCHQQLVTIVESASSGGNELILTSSLNEVKVWDAFSVSGGPLHTFEGCKAARFSHSGTSFAALSTDTTRREVLLYDVQTYNLDLRLPDNSGYSGGRGYVQPIIHFSPSDTMLLWNGVLWDRRSPNPVHQFDQFTDYGGGGFHPAGNESNLFLVCLSSHLCRPYFAGIINSEVWDLRKFKLLRSVPSLDQTVIKFNGRGDVIYAILRRNLDDVTSSIHTRRVRHPLFPAFRTIDAVTYSDIATVQIDRGVLDLATEPNDSLLGVVAMDDPDEMFSSARLFEVGRKRPTDDDSDPADA

SEQ ID NO: 155264 - protein, 129 aa, Oryza sativa
  Clone ID: PAT_MRT4530_55044C.1.pep
MEVEAARCECCGFTEECTPRYIAAVREEYMGRWVCGLCAEAVGDEIRRAGAGKATITTAEALDRHVAFARSAAPRAGGAAAEDDLVAAVSRLLRRCLDSPPASPAAPPPPPQGRKVVVVSGCPGGGDDD

SEQ ID NO: 155265 - protein, 66 aa, Oryza sativa
  Clone ID: PAT_MRT4530_55045C.1.pep
QLRPYKLLRVRDYCFSCLVILHSIPQNGATCLLLLGIQANCMENVFCLLKEHDPSTITYLIFADGV

SEQ ID NO: 155266 - protein, 227 aa, Oryza sativa
  Clone ID: PAT_MRT4530_55046C.1.pep
MEAGRPASAAGQGESSSSSGAMAVDAAGGVEKPRFEALMPSEMSGGRPQFRKVPVPQHRFAPLKKAWMDIYTPVYEHMKIDIRMNLKARRVELKTRQDTPDVSNLQKCADFVHAFMLGFDIADAVALLRLDDLYVDSFEIKDVKTLRGEHLSRAIGRLSGKGGKTKYAIENSTRTRIVIADTKIHILGSFVNIKVARDSLCSLILGSPAGKVYSKLRAVSARLAERY

SEQ ID NO: 155267 - protein, 242 aa, Oryza sativa
  unsure (1)..(242): unsure at all Xaa locations
  Clone ID: PAT_MRT4530_55047C.1.pep
RPNRRASAPCSAAAPPRSALPSTTPAPLSFPPLPSPATPATPAAPAVPSETPAGTGGSKATPTTXPPPPGRVLPAGASAAPAPPPHPSLRRPPPCQPPRRPPPHPPPRRTPPCQPPQCPPPHSPPQRPAPPLPLRPPPQCPPRRPSTPTAASPSHTSADSSPPAAAPXRRPPPHRPALPPPPLSPPVAAPXRRPLLRRPAPPRRPPQRRPSXPPPRRLAPPPPPLSPPAAAPVDAHRCVVRA

SEQ ID NO: 155268 - protein, 115 aa, Oryza sativa
  Clone ID: PAT_MRT4530_55048C.1.pep
MAGGHIWVRQAIFGFAGGERWPISPRGPAVPPRTGRGQGQPGGGGVVPRQRDSAHAGPPGESHRRSAARTTMKMSAVLGHFVDVLHDLHGEEKMSDSDMIAVLWEMIFRRTDTVA

SEQ ID NO: 155269 - protein, 97 aa, Oryza sativa
  Clone ID: PAT_MRT4530_55049C.1.pep
MAATMGKGEEKKTLTLALEEKVAAGGERAVPSPSPLGRAARRLRRHVIAPPPPLERGVDLFPDLEKRETPWWARLKSTLGLNRTHNFAWAGISFSPG

SEQ ID NO: 155270 - protein, 58 aa, Oryza sativa
  Clone ID: PAT_MRT4530_5504C.1.pep
LGTGTAPPSIRSTNLFLEHMFKHRDIDVDDRTKCFGTVTTLLHVSDAELCREPYMGDL

SEQ ID NO: 155271 - protein, 247 aa, Oryza sativa
  Clone ID: PAT_MRT4530_55050C.1.pep
MKRLDDHDKRPQGTVKALDSHVTCEVCGNMGHSGNDCPETREEAMYISNNNNGYRPQGGQGWNQPRPYYQGETNGVAKEAPSSDSADKEIQPEKVVPQEPRKSVRTGEGEEGHGNGGVEKKSTAPALSADWPVMANCGRRQRLRVRACAKRVHGTRRWRPRDREEDRLCGWASLGLGLLGGASNIFLFLFVFVFLFIFFFVRVSKRVFIFVFVRVLIFIFLHFVLIDIVFANAQPGGRLPEVEPSPG

SEQ ID NO: 155272 - protein, 410 aa, Oryza sativa
  Clone ID: PAT_MRT4530_55051C.1.pep
MKKGDGFYRYAIFCSGGFLIKEAVRTCLLARRWLHLWKSATGLRIGEDDIYLRCVKDNKEFLDRLLLLRDGAPLDTCVLRFRWLDWYRDEGLDDTVRVNHWFRHALLHKVRFLLLDVDIWYRFPFLIDEMPLVSRHLTRLQLKNIGLNDSFLNFSSCPALEHLVFESCKFDCAKISSSSAKRLSITNSYFSETSRIRIAIPSLVSLKLDDFHGRTPVLEWMPSLVDAFVRVLYCYKESCSHYDFGDCCCEGFEPCYDIKDHKCMRLEGLSEAKTLVLINERRLFIFKRDLEWCPTFTKLKTLLLNEYWCVPDDFSALSCILEHALVLENLILQIYSKLYICESRYCHLIARMPFSMYAIFSCKEIEILEGYDNDQDEVEEDEDENSHEDEDEDSFGDPYEEEDEEEDEDE

SEQ ID NO: 155273 - protein, 88 aa, Oryza sativa
  Clone ID: PAT_MRT4530_55052C.1.pep
GRVGSWLTTRTVHQFCFCWVLVFHFLLGRRACIERCSQDCKNICIQTHFLLLCLRCNKKQESNFVKKKKRDKKKKKQNITRSRPLDKE

SEQ ID NO: 155274 - protein, 405 aa, Oryza sativa
  Clone ID: PAT_MRT4530_55053C.1.pep
MAASISGARTCYPSAAVARRGGGGGRCCSVVRSSLATSSPATCKPSGMMRIGRQWTELQGARDWDGLLNPLDGALRGELVRYGEFVRAAYASFDFDGGAPSSYGSCRFPTSSLLRRSGLPETGYRVTGILHAASTSAPGWLSCRSSYIGYVAVCDDEDEIERLGRRDVVIAFRGTATCGEWVDNFKSTLTHLPPRSGDGEAAPPMVESGFWRLFTTPGEAHGSLQQQVRGEVQRIVSEYGGEGMPPLSITVTGHSLGAALAVLTAYDITTNSPMQRHGGGDDDDGEAPMVTAVSFGGPRVGNAAFRRRLEESGGKVLRVVNSNDVVTKVPGFPVDGDDCGGGAREGDAPARRKPRLPRWLVSKMGWEYSDVGRELRLCSQGDTARNVVASHDLDLYLKLVAACTY

SEQ ID NO: 155275 - protein, 388 aa, Oryza sativa
  Clone ID: PAT_MRT4530_55054C.1.pep
MGLQQSKEELVYQQWIDKEGKTPLMVASMRPDLINVVQVLIELGANVNAYRPGSYCGTALHHAAKKGLEQTVHLLLSHGANPFITNDDCHTALDLAREKGHVNVVRAIEGRISLFCGWMRENYGPGFLEAFAPQFLTRKIWAVILPREARNQTRPLKLELTIYPELQASKPQAVIKLWKCQLEEPKFNQANPSVVNYGNADGIRALRAQGAGLEWIDKEGKTPLMVASMRPDLINVVQVLIELGANVNAYRPLPSVISTPSQEDKKGPEPTIHSLLSHGANPFITNDDCHTALDLAREKGHVNVVRAIEGRISLFCGWMRENYGPGFLEAFAPQFLTRKIWAVILPREARNQTRPLKLELTIYPELQASKPQAVIKLWKCQLEEPTIN

SEQ ID NO: 155276 - protein, 642 aa, Oryza sativa
  Clone ID: PAT_MRT4530_55055C.1.pep
MPFSINGLTSLSTGSRTSYGTTLTSGAEWKLWIPICHGIAFINAIEVVSVPDDLIGDSAPMVNPMQQYSGLSTQPLETVYRVNMGGPKVTADNDTLSRTWVTDKKYLVNPSVTREVNGGKVNYMKGGGSTPLIAPDIVYSTATELAASNTTNALFNMTWQFDVDSGFSYLIRFHFCDIVSKALNQLYFNAYVGSFYAQHDIDLSIQSMNQLATAIYLDVVLSSNDASNKLSISIGPSTLNNALPDGILNGLEVMKMSSGSGSAFTVGSSGSNKNLGVIIGSVLGAVGLNGSYGYRFAFSVLQEATNNFDENWVIGVGGFGKVYKGVLRDDTKVAVKRGNPKSQQGLNEFRTEIELLSRLRHRHLVSLIGYCDERNEMILVYEYMEKGTLKSHLYGSDNPSLNWKQRLEICIGAARGLHYLHTGSAKAIIHRDVKSANILLDENLLAKVADFGLSKTGPELDQTHVSTAVKGSFGYLDPEYFRRQQLTEKSDVYSFGVVLLEVLCARPVIDPTLPREMVNLAEWGMKWQKRGELHQIVDQRVSGSIRPDSLRKFGETVEKCLADYGVERPSMGDVLWNLEYVLQLQDADSSTVSDVNSMNRIVELPSQVQNIGALESISVTMAEAGASHEPDHDLSDVSMSRK

SEQ ID NO: 155277 - protein, 54 aa, Oryza sativa
  unsure (1)..(54): unsure at all Xaa locations
  Clone ID: PAT_MRT4530_55056C.1.pep
MAGVXSWYGPLIDLSAAAGHLXGFVQLLTSVRRVLXNQXQNAVDGRAXFKKTML

SEQ ID NO: 155278 - protein, 451 aa, Oryza sativa
  Clone ID: PAT_MRT4530_55057C.1.pep
MSSPDEDPPTEPERWRDLDMLLSRPGNLVHADFNPSPGLRDSLGSLVEVLVVGAGGLGCELLKDLALSGFKNIHVIDMDTIDVSNLNRQFLFRVQDVGKSKAEVAAKRVMERVSGVNIVPHFCRIEDKEIEFYSQFSIIVLGLDSIEARSYINSVACGFLEYDSDDKPIPETLKPMVDGGTEGFKGHARVIIPGTTPCFECNIWLFPPQVKFPLCTLAETPRTAAHCIEYAHLIKWNEVHPGKPFDADDAEHMQWIYSEALKRAELFGISGVTYSFTQGVVKNIIPAIASTNAIVSAACALEALKLISGCSKTVSNYLTYNGLDGTHINVSEFAREKDCLVCGPGTLIELGTSTTLSEFIKMLEEHPKLLMSRASVTHEGDNLYMQAPEVLEQMTRPNLGVPMFELLKGAARTTVHVTGMAENNGKKVSSLRKLRVTFKGVEESSKMDESS

SEQ ID NO: 155279 - protein, 51 aa, Oryza sativa
  Clone ID: PAT_MRT4530_55058C.1.pep
MVGTEGSICSDSQQDACFYADELALLIGTEGPMILSGQSRNSMSLARTYLL

SEQ ID NO: 155280 - protein, 82 aa, Oryza sativa
  Clone ID: PAT_MRT4530_55059C.1.pep
MAKPVQATAGVECRKPVSKLGRKAAEGLLISVQQRYTPHRKKWRMESRRLQSAYGGGQHLATARWHSVWIGEYTYFFATFIA

SEQ ID NO: 155281 - protein, 56 aa, Oryza sativa
  Clone ID: PAT_MRT4530_5505C.1.pep
RGRCPPQAHLTPLPWINCTVRASRPRWSLTFYSTKVCLGRLLPPPPFQKSQRLFGS

SEQ ID NO: 155282 - protein, 725 aa, Oryza sativa
  Clone ID: PAT_MRT4530_55060C.1.pep
METLMVDRVHGSLRLFMHRNAVFLCERLCAQFPAETNVQLLATCYLHNNQPYAAYHILKGKKLPESRYLFAMSCFRMNLLREAEEALCPVNEPNIEVPSGATGHYLLGVIYRYTGRVEAAAEQFVQALTLDPLLWAAYEELCILGVAEDANECFSEATALRLQQELTSTSNVEKSNFVNENRFLSSNVSASFGDSPKQIKQLHANTTAEVSGYPHVKSTALHMQNGAPSNLSQFDTPSPTSTQASGIAPPPLFRNMHAYQNTAGGNAPSKPKVNAPNLTLRRKYIDEAGLKKVSGRLFNQSSDSVPRRSARLSRDTTINSNSNISQFGGNGTDHSSGNRYHVVDEMWTDNVTSTSSSTSIVDGRYPEQEKSERVLSQDSKLAIGIRELMALLRTLGEGYRLSCLFKCQEALEVYRKLPEAQFNTGWVLCQVGKTYFELVNYLEADHFFELAHRLSPCTLEGMDIYSTVLYHLNEEMRLSYLAQDLVSIDRLSPQAWCAVGNCFALRKDHETALKNFQRAVQLDSRVAYAHTLCGHEYSALEDYENSIKLYRSALQVDERHYNAWYGLGVVYLRQEKFEFAEHHFRRAFQINPCSSVLMCYLGMALHALKRNEEALEMMENAIFADKKNPLPKYQKALILLGLQKYPDALDELERLKEIAPHESSMYALMGKIYKQLNILDKAVFCFGIALDLKPPAADVAIIKSAMEKVHLPDELMDDDDDDDEI

SEQ ID NO: 155283 - protein, 154 aa, Oryza sativa
  unsure (1)..(154): unsure at all Xaa locations
  Clone ID: PAT_MRT4530_55061C.1.pep
KNWKEKGGKRGKKGKQLGYKGGKGKMKERREGKEKNGEKGEKRGTRDGEGKNKAGNRRRNRKGKRKRKGKAGGKRKKKKMGRNEKGKNRKRXKGSKEKKGERRGGQKNQRKNEKGKGKRKMEKRIRGIKKIRKVKKPPPPSTAHPPPVARPVVM

SEQ ID NO: 155284 - protein, 50 aa, Oryza sativa
  Clone ID: PAT_MRT4530_55062C.1.pep
VKAIFAQLNNQKIHGGQQASGLSRAQMNPLKRWFFDFFCGCFGTKEEARN

SEQ ID NO: 155285 - protein, 174 aa, Oryza sativa
  Clone ID: PAT_MRT4530_55063C.1.pep
MLAPSYEGRRQGGWRLLLPSQHHHDSPSATVARARRHVAGPLPPLILPACPSRLLAQAEPRLPRPSRTLTTPDRWDPPTRSSPSSRPAHRWLPSPSSKLAAIVVLSSFLAVVLIVVAFIPPSSRSCPSSVFRLVCRYPVVIFVLGSVSSSVAPVSSRLHPTVAAKVVSSSSRHS

SEQ ID NO: 155286 - protein, 123 aa, Oryza sativa
  Clone ID: PAT_MRT4530_55064C.1.pep
VPYKSHERGNSTPFQHIFIPSPKFALKFIYALIVFRKFKSLVAYIQVALVKLTCGMRRRLSCLFKGSGSPSSCYDESSTRSSADVSMEDADAPQQLLSDDDLRRQLGLALHLDLDVPNDPPWL

SEQ ID NO: 155287 - protein, 118 aa, Oryza sativa
  unsure (1)..(118): unsure at all Xaa locations
  Clone ID: PAT_MRT4530_55065C.1.pep
HXXPPSWNLXMGHAXSIPXXFRVLRRXSPSAPXXTAPXXXFYFLIIPXEIHMXRNIXKIHFSLXTLFXSXLXFVXFHIXFXCFPMFTPXFXVXQPXXXXQCXLXLXXXXXFLNXXLTX

SEQ ID NO: 155288 - protein, 300 aa, Oryza sativa
  Clone ID: PAT_MRT4530_55066C.1.pep
MEAAASSHEALVKMWVFVLVQALVYLILAQSSDVFSRAQSLQGGGAPRRPARSVSAVRRHARRALRHARRRGAVARGGRRRWPEEGLREESAAVAPPLPPPLVVPMTTPKPSPTIRRLDVASPVPADIDIANAVSPLPIADIAAELGLRPEHFDLYGKYKAKVLLSVLDELKGQQDGYYVVVGGITPTPLGEGKSTTTVGLCQALGAFLDKKVVTCLRQPSQGPTFGIKGGAAGGGYSQVIPMDEFNLHLTGDIHAITAANNLLAAAIDTRIFHEASQSDKALFNRLCPPNKEGKRRFAD

SEQ ID NO: 155289 - protein, 86 aa, Oryza sativa
  Clone ID: PAT_MRT4530_55067C.1.pep
MEAAASSHEALVKMWVFVLVQALVYLILAQSSDVFSRAQSLQGGGAPRRPARSVSAVRRMLAALSDMPAGGEPSPVVAVVDGRKKD

SEQ ID NO: 155290 - protein, 715 aa, Oryza sativa
  Clone ID: PAT_MRT4530_55068C.1.pep
MDVSVPPTNYPKSLSSIIKCHRRRAAINNCHSVVSHPPLSHSNHHHRSLRVRSSAAVAPPLPPPLVVPMTTPKPSPTIRRLDVASPVPADIDIANAVSPLPIADIAAELGLRPEHFDLYGKYKAKVLLSVLDELKGQQDGYYVVVGGITPTPLGEGKSTTTVGLCQALGAFLDKKIKFVIGVEVVTCLRQPSQGPTFGIKGGAAGGGYSQVIPMDEFNLHLTGDIHAITAANNLLAAAIDTRIFHEASQSDKALFNRLCPPNKEGKRRFADVMLRRLIKLGISKTDPNELTPDEVRRFARLDIDPESITWRRVMDVNDRFLRKITIGQGPDEKGMVRETGFDIAVASEIMAVLALTTSLADMRERLGRMVIGNSKAGEPITADDLGVGGALTVLMKDAIHPTLMQTLEGTPVLVHAGPFANIAHGNSSIVADKIALKLVGKGGYVVTEAGFGSDIGTEKFMDIKCRYSGLMPQCAIIVATIRALKMHGGGPDVVAGKPLDHAYVSENVALVEAGCVNLAKHIANTKSYGVNVVVAINKFASDTEAEMDVVRNASLAAGAFDAVVCTHHAHGGKGAVDLGLAVQRACESQADPLKFLYPLESGIKEKIESIAKFYGASGVEYSEQAEKQIEMYTKQGFSNLPICMAKTQYSFSHVPSMKGAPSGFVLPIRDVRASIGAGFIYPLVGTMSTMPGLPTRPCFYEIDVDTATGKVMGLS

SEQ ID NO: 155291 - protein, 65 aa, Oryza sativa
  Clone ID: PAT_MRT4530_55069C.1.pep
ITQLYNNGQWLGAYNTNFRHTSASTPPPLRQKKKKPILATNIDICVFKFVARVCLFLRRSSTSQH

SEQ ID NO: 155292 - protein, 227 aa, Oryza sativa
  unsure (1)..(227): unsure at all Xaa locations
  Clone ID: PAT_MRT4530_5506C.1.pep
MASKRSVGTLTESDLKGKKVFLRADLNVPLDDSQKITDDTRIRASVPTIKFLMGKGAKVILASHLGRPKGVTPKYSLKPLVPRLSELLGVDVVMANDCIGEEVQKLAATLPDGGVLLLENVRFYKEEEKNDPEFANKLASVADLYVNDAFGTAHRAHASTEGVTKYLRPSVAGFLMQKELDYLVGXAVANPKKPFAAIVGGSKVSTKIGXVIESLLAKGDILIWGGG

SEQ ID NO: 155293 - protein, 411 aa, Oryza sativa
  Clone ID: PAT_MRT4530_55070C.1.pep
MLAHLMTDVMEDNSSWTALSIDHIRISAFNFGIVSEDNDEGKEFLLSLDTVVPDDILERIFTFLPIVSMIRSTAVCKRWHDIIYSSRFLWTHMLPQRPWYFMFTSNESAAGYAYDPILRKWYDLELPCIDKSSCFVSSSCGLVCFMDNDSRNAISVSNPITKDCKRILEPPGAKFPDYSTIAIKVDRSSHNYTITLAKCKQVPEDYVRWDFSLYKYDSQSSSWVTAVEEVFIGWRGGDDSVICDGVLYCLIHSTGILGNIEPRHSIIMYDLIAGPSKASLMQSSIPAPCSLTCGRLLNLREKLVLVGGIAKQNRPDIIKGIGIWELHKKQWQEVGRMPHKLFQGFGEFDDVFASSGTDDLVYIQSYGATALLAFDTKQKQWKWSAKCPVSKRFPLQLFTGFCFEPRLDITT

SEQ ID NO: 155294 - protein, 86 aa, Oryza sativa
  Clone ID: PAT_MRT4530_55071C.1.pep
MVNTMPLPPAPPEILLVPIDEQDRKAGAMRRVLKLLVRCTPGGEGAWDECNPVVKGCSITKYASRSGGQCGLGGIGDQNGELNGLQ

SEQ ID NO: 155295 - protein, 89 aa, Oryza sativa
  Clone ID: PAT_MRT4530_55072C.1.pep
FFFFFFFFFFTGKNHIITTEPMSHSTKSYVITAFIRSAQRKTRQVKKLNIARSDSRRNYGKVTTSFMRATLIPASPVGSRHSWEMAGST

SEQ ID NO: 155296 - protein, 113 aa, Oryza sativa
  unsure (1)..(113): unsure at all Xaa locations
  Clone ID: PAT_MRT4530_55073C.1.pep
SPEKAIDQINWHAHTFEGELWTCTGVKXISQASCFLSTQLQPAWPPPRCVLLQLLPPRDVPPSWLPAAVPPLPHASCALPAQPLAPPAQQQSHRRRPQRRPPTACCLVRWKCL

SEQ ID NO: 155297 - protein, 91 aa, Oryza sativa
  Clone ID: PAT_MRT4530_55074C.1.pep
MVAGSGRDFRENEEEDANKIDRAANELNRLEPLPVQFQPPPAALLPLLGAQRSPLQLIFEPPTPAKPSFAGCTITDLANHHNQFRRTLLEE

SEQ ID NO: 155298 - protein, 100 aa, Oryza sativa
  Clone ID: PAT_MRT4530_55075C.1.pep
MTVTAVGNVAKNTAAIIGKQSWMSTWKETRWSWGFGRTPNRPKSLQREREREREEKEEAGPNDASLHRLSSLFRLCRHGSDEAGRSLLTKPSSTLLLSPP

SEQ ID NO: 155299 - protein, 79 aa, Oryza sativa
  unsure (1)..(79): unsure at all Xaa locations
  Clone ID: PAT_MRT4530_55076C.1.pep
NNQVWQQLALVAQQSHYQDINIVQAIAQQLQLQQFGDLYFDRNLAQAQALVAFNVPSKYGIXPRSYGAPSTITTLGGVW

SEQ ID NO: 155300 - protein, 96 aa, Oryza sativa
  Clone ID: PAT_MRT4530_55077C.1.pep
MVAARGVPRFDSSACGVVLAQKVMEMVGMRVARIEKKRQEPGRVSWRDGNDVRLQIDSRPRRWHEGIEKERREPVNGLSLYTNTSKEMTEEEIRRG

SEQ ID NO: 155301 - protein, 165 aa, Oryza sativa
  unsure (1)..(165): unsure at all Xaa locations
  Clone ID: PAT_MRT4530_55078C.1.pep
SDSNYTPAFGFLDAATIYSKIGRCISLRYAHARIKETTRALISSQXFDGLLSLTSSLASLLHRPXTSPLLLMADYVFXRLIISPSRVTYYANADXVFVIIIGCYTAIDWIAGIVIFINILSSLFNIAYTAAVDGQLRHHSRLSLLPLIIITVGCVCRRRLFSSSS

SEQ ID NO: 155302 - protein, 131 aa, Oryza sativa
  unsure (1)..(131): unsure at all Xaa locations
  Clone ID: PAT_MRT4530_55079C.1.pep
PPARGVPPAGGQFQPARKEPKTGGILXRSGSSSSSLLFXXXGIGGGRKKGIKEKFQGKLPGGNKGGQQQPTAPSATGGYGSGPGPPPPPGSTPHPGGAGYSPPTQPPPQKKGFFEKIQEKPPGGGPPLAPF

SEQ ID NO: 155303 - protein, 77 aa, Oryza sativa
  Clone ID: PAT_MRT4530_5507C.1.pep
PAGGAHRHSPAGRSPCSPPALGGCGCTLRRDRRRARSAWESSEAAVPWTGGVSLGSTGRVARRVYAGSRELYAAHRP

SEQ ID NO: 155304 - protein, 100 aa, Oryza sativa
  Clone ID: PAT_MRT4530_55080C.1.pep
YKGGPELSRRVICSSPTSRSYIVDVYPLRLKLFDGRDSLERIIRISRKAKVSELYSLVCSLLSVEQSKIDIWDFYQKTKGKKLINLNETVEEAQLMMDQE

SEQ ID NO: 155305 - protein, 77 aa, Oryza sativa
  Clone ID: PAT_MRT4530_55081C.1.pep
LKHKPTQPNPRGFINTLGGQPKTRLKIPNKSPKTTIRQLYMENDNCNLHCTTKLNYPTPAVHHSTIHITPRQAHLIP

SEQ ID NO: 155306 - protein, 92 aa, Oryza sativa
  Clone ID: PAT_MRT4530_55082C.1.pep
HAAHASAPIVQELAAGVHEPPSQYMVGEKDRPAIAGSDMPEPIPVVDLSRLSASNGEDSAGELAKLRSALEDWGLFLVNKSTTAFVSYYKLF

SEQ ID NO: 155307 - protein, 219 aa, Oryza sativa
  Clone ID: PAT_MRT4530_55083C.1.pep
MANTKNIIGAPRQHMAYFNYMGMLAAEGTYDKIEALLNQDIHPAAGGRGCGAASCSRRRFASCARRRVAGCVASCSRCRVAGRPGDLLPTRPGLPERREGNTLALSEQAEDANIWNHIWIPRRGLLQVRRKALHDEATEIIEAKVRLQSEKIKTTVPKWLPPEEGKQKGEAQTIGQCPMDVYTLGLFATCHCETYSLDERKTHRVVECVCNVGTRVTVR

SEQ ID NO: 155308 - protein, 95 aa, Oryza sativa
  unsure (1)..(95): unsure at all Xaa locations
  Clone ID: PAT_MRT4530_55084C.1.pep
GRRRQSPPRGPPKPRAAXPQRRDGENPGXTQXXRXAAHPPXAGGRXSDEARXDRXPQQXRSPKGEGDAPGSGAKSAAGGGXTRSGPXXRASAQPP

SEQ ID NO: 155309 - protein, 75 aa, Oryza sativa
  Clone ID: PAT_MRT4530_55085C.1.pep
KEDTYNRYYFYGYRSWPEVQTICAIYITAYNLGYVLSSHELPRTLIIGDMVCCPIAHSAMTELDIVVLWLSPTLI

SEQ ID NO: 155310 - protein, 123 aa, Oryza sativa
  unsure (1)..(123): unsure at all Xaa locations
  Clone ID: PAT_MRT4530_55086C.1.pep
MAMRAITLSHSQSASFGHHHHQTMPSSFRPSTASTRSXKVYAKEDEEKGSKQSLFGSITEALDFSQAVDGEYVEEGWVDKTCKVCKKDTRGEPRQVDKLGRYAHVACLENPKPTNIFAKLFAR

SEQ ID NO: 155311 - protein, 466 aa, Oryza sativa
  Clone ID: PAT_MRT4530_55087C.1.pep
MACLAPQLKWPLSTRAAAFREHGGAGIGGFRTVRLHCAVSTTALVEAESSDSLAPGARRLVVYDGAVAPPPLPGGFGEAILNQEAVVAAAAAEAVALARAAAEVAGEVVRMSQTEQRHRPDFVTTHDTEDNYLAREILRAEAGLGARYADACLSEDAGFSSIFSDESEVDDDEQCVQGVAVKSVRQSERRARRVRAAMKAAKSFSGRNPVAASSSARKKRLKGCRSPLGCFYKMTGRRLLTAKQEVEFSQGIQDLLKLEAIQKELAHYNGGEPTFSQWAEAAGTDENTLRKRLNYGISCKNTMAHMAEASSRVKECRRRLRRQLKRLPTNEEIASDTGMPLRRVEAAMSLPKYTVSLTSKVGCTDMTYQEITPDTSTETAEEMLHRWLMKEDVDRALDGLSPRERQVIRYRFGMDDGRLRTLHDIGRLMGVSRERIRQIELVAFRKLRGRKKVQSLQHYLQPVESW

SEQ ID NO: 155312 - protein, 170 aa, Oryza sativa
  Clone ID: PAT_MRT4530_55088C.1.pep
MAMRAITLSHSQSASFGHHHHQTMPSSFRPSTASTRSVKVYAKEDEEKGSKQSLFGSITEALDFSQVRSEKDAELLYEAREATKDGGRMTKEQYGALRRKIGGTYKDFFKSYVDVDGEYVEEGWVDKTCKVCKKDTRGEPRQVDKLGRYAHVACLENPKPTNIFAKLFAR

SEQ ID NO: 155313 - protein, 171 aa, Oryza sativa
  Clone ID: PAT_MRT4530_55089C.1.pep
MADLSLRRGLSSGCHSAASSCWCGFVFSRLLSNPGAPPELERAAPPPRPLLYAPVSHSATLLPNRSDSQGRRLRQGRAPVIRETGGEWDVRRQKDASTGRAGGIRVASPARRVTLLRQRDILVARVLIDRAARRGYLKETGKMDASHPSRGSGSAPLQPLQLEEPGNVGDR

SEQ ID NO: 155314 - protein, 42 aa, Oryza sativa
  Clone ID: PAT_MRT4530_5508C.1.pep
QHDILDRWMCCLFIITCIDELTPMVDCHAYYVDWRIGQPVCR

SEQ ID NO: 155315 - protein, 379 aa, Oryza sativa
  Clone ID: PAT_MRT4530_55090C.1.pep
MCRGSAVSGSAIMSAAADDVAAVRREEDEEMRSYLSPEKLEVLTQMEPWVEEHVLPLLKPVEAAWQPSDLLPDPAVLGGEGFHAACAELRERAAGVPDLLLVCLVANMVTEEALPTYQSSLNRVRAVGDLTGADATAWARWIRGWSAEENRHGDVLNRYMYLSGRFDMAEVERAVHRLIRSGMAVDPPCSPYHAFVYTAFQERATAVAHGNTARLVGARGHGDAALARVCGTVAADEKRHEAAYTRIVSRLLEADPDAGVRAVARMLRRGVAMPTSPISDGRRDDLYACVVSLAEQAGTYTVSDYCSIVEHLVREWRVEELAAGLSGEGRRARDYVCELPQKIRRMKEKAHERAVKAQKKPISIPINWIFDRHVSVMLP

SEQ ID NO: 155316 - protein, 59 aa, Oryza sativa
  Clone ID: PAT_MRT4530_55091C.1.pep
PEAPPEEGGARIRGVRRKLPPRKSKPILPVLTHPPFRQKFPPPRPLYAILEEGKIFCSP

SEQ ID NO: 155317 - protein, 63 aa, Oryza sativa
  Clone ID: PAT_MRT4530_55092C.1.pep
TGRCLLPRTATNAHARIYRRVDEDRICLQKHPLQCPYSLNQAANQSQIQEIYECQLNPQLRRG

SEQ ID NO: 155318 - protein, 99 aa, Oryza sativa
  Clone ID: PAT_MRT4530_55093C.1.pep
MEGPVSASMGVMVPLLSKLIESMEQPRFKDLKNDLKSLRAELASMEAVMLKFATQDDTDLLVKEWMRQVREVGYDTDDWIDSHPLVACGDEGFTHLQPE

SEQ ID NO: 155319 - protein, 133 aa, Oryza sativa
  unsure (1)..(133): unsure at all Xaa locations
  Clone ID: PAT_MRT4530_55094C.1.pep
ESYSERVGFILCRAWFIVSEFYLKTKATHGIKGTPLKGIISSNHSANTPTIVYEAGGREAYSPXISSNHLDXDLADXYYYLIRGLNQYNNICVLSLFVLMLYRVDPRTNIPNTLFIRSSDTETYGCNYNGTVG

SEQ ID NO: 155320 - protein, 96 aa, Oryza sativa
  Clone ID: PAT_MRT4530_55095C.1.pep
IECLTCIYEFGRRSVYARECMQYLTICIHDVPVDIKLALPHDHDASHVPLHAHVIVLPIDAAHLVDLDLPLPLRRNKRREEKKRKRVFFFFFRTRG

SEQ ID NO: 155321 - protein, 270 aa, Oryza sativa
  Clone ID: PAT_MRT4530_55096C.1.pep
MAAGSPAPVSFPSGRPLSLPTLYYPPRAPHHRFRYSPPLLPAGIELASSLSLSAVAAELRSAAVVAPDHLPPRRCLLRFRRDLADIVHPSISVADRRNAADPVNPSRATASLRSGRLLRRRRRLGVSRGVPPPFPLPSPLSATAPPRQWLPAATIGARTPPPAGRDDVAASGRAMWPGHQPPVDRGAAAWGPPLSWTRSARTPPLDWRHLGHYKDWSSGLGCKALPYFHMSSGANEGYMSCGPVVEMSWHRAGVLLLGAQPWLPVSGFRP

SEQ ID NO: 155322 - protein, 71 aa, Oryza sativa
  Clone ID: PAT_MRT4530_55097C.1.pep
GRHHHIKIYRYEFTEDLICRSMLNVHTELFSFFMICYLLRRGDPLCRPETDCVYITNICNTTLPISIYHSR

SEQ ID NO: 155323 - protein, 121 aa, Oryza sativa
  unsure (1)..(121): unsure at all Xaa locations
  Clone ID: PAT_MRT4530_55098C.1.pep
FYNTRGSIGYRLGTFREPVAVIKAGFDPYPVIVARRANCNLAYLGVQRSNAADEDLHTYAEHMRAFKNIIQTGDGGARXCMVHHRIQQGMPTYNVYGXSRYMSNHGYAMSFYKTHRGLGAQ

SEQ ID NO: 155324 - protein, 70 aa, Oryza sativa
  Clone ID: PAT_MRT4530_55099C.1.pep
HEGALLAVPLLPPRPPRHPGERASKPRHFFLLGIGLAGAADCTLSLEETAAELLLLCSVPIGTLKKLSEA

SEQ ID NO: 155325 - protein, 49 aa, Oryza sativa
  Clone ID: PAT_MRT4530_5509C.1.pep
MKRGRRATQGLTGMRTELDEGEGAGAHRGQVSRKAQESTLSPWLPAHIQ

SEQ ID NO: 155326 - protein, 189 aa, Oryza sativa
  Clone ID: PAT_MRT4530_550C.1.pep
MQQQQQQGHCSSTSNNPSSSSHMASVTAAISKNQTAATVASRRSRQQQQQTIRSATIEEGAAAGTHRKEGKRNKTPVVLDDDGCGLQIWPWWQRKDSGGKSAGAARARAGCGNLRRRTTTSASIPSSPHHRPTRPPETARPQARCQLGLSHEVMGSESTTRLDPGQRWPWRRWAGAERDNKVRWCRPGR

SEQ ID NO: 155327 - protein, 46 aa, Oryza sativa
  Clone ID: PAT_MRT4530_55100C.1.pep
MSPDEIGIIVVNNLTIKIDQVSRRHHRGGYQYNVVYREALLRIDYL

SEQ ID NO: 155328 - protein, 135 aa, Oryza sativa
  Clone ID: PAT_MRT4530_55101C.1.pep
MSSSRSDGSSSSSRRCSASPVSYRVGPLNYQPAVMCRCCCPAKATWWISWSIDNPGRRYYKCQNARGLVLQEGGCDFWVWCDGPTTSFIKELLNDLRDAVTGLRRENEHLRRENKDLQRDAEENRAKRVEQRKVI

SEQ ID NO: 155329 - protein, 201 aa, Oryza sativa
  Clone ID: PAT_MRT4530_55102C.1.pep
MAGSQSSCHGENHDEPDAPATWAEVLQMGNNILQVMERLLNARLPAASGGVVQPPLVDPEDELWMHIRLMMMPMTDSMVRPMVEVLEHEKEVLTGEDLAPVRTLAVVLSPMIITMRRNMRRHVHPRRGAVLGNGGHHRGRHDHDDLDNVARVKLSVPKFTGKDVLDAYLYWEEQCDQIFRVHNLSHQRRVNLGSVEFFGWN

SEQ ID NO: 155330 - protein, 123 aa, Oryza sativa
  unsure (1)..(123): unsure at all Xaa locations
  Clone ID: PAT_MRT4530_55103C.1.pep
RPGPPPRAPPQPPRPRATLARRRGARASPRPHRRRRRASPQGPPGAPRVPRRRPRRRPPPARRCPRRARQRAPAPRRTPXEKPXSSPSPSPPPPRPSPATTTPASPPPPRPLPLRRRLPPPND

SEQ ID NO: 155331 - protein, 119 aa, Oryza sativa
  Clone ID: PAT_MRT4530_55104C.1.pep
MHAAAVEASNWAGEGRGWPEMRQPPTDVREAEDAYGGRVHRDSAAEEQRHGWSPDGGGTDGGASSSANSNGILGMSILSIPHGERGRRLVLVIPFVWTVHDMRAADERAKPLDHLPLAA

SEQ ID NO: 155332 - protein, 75 aa, Oryza sativa
  unsure (1)..(75): unsure at all Xaa locations
  Clone ID: PAT_MRT4530_55105C.1.pep
NRSPSPAPPGPRHPTGDPPPXPGPRPRPPAGRNLHPSPPPXGRVPAGKITIPKPPQPATDLPPAPVAGAGSVVAH

SEQ ID NO: 155333 - protein, 235 aa, Oryza sativa
  Clone ID: PAT_MRT4530_55106C.1.pep
MAISAELRPKARSEGWSGDSGRRGGLNKGLRYERGKRKRCEVEEAADSMDLDTDADASQPSSSACCLPCSTPPRRPPSSSPPTTVPSSGASHGGTGRRSATHHASPLAMSRKPTPLEQRVHDKSLKLQAHRPIIALRHLDLDVSNGCINGSHGTSLMRASGDGFTQGEGLGLRLALRPKYFKGIESKGTCVIMASSGSSKDTKLICRSTTYPDREDLSALEGYHHLYTHLKRIVG

SEQ ID NO: 155334 - protein, 1685 aa, Oryza sativa
  unsure (1)..(1685): unsure at all Xaa locations
  Clone ID: PAT_MRT4530_55107C.1.pep
GRRAAHATEDASSSGAPLRSGHGGXPPVSPVGGAGCRAFVASLRNVRWPPRFRPTITEKYDGSVNPAEFLQIYTTGIEAAGGDDRIMANFFPMALKGQARGWLMNLPPASVHSWEDLCQQFTMNFQGTYPRPGGGVRHNRMLEKIASKEPQTTAELFQLADRVARKEEAWTWNSSGTGVAAPAAPGSAARSGRWDRRRKKRSAHSDDEGHVLAVEGASRATRKGRPASDKKKEAGAPSRERPTGKWCSVHNTSLHDLADCRVVKSLAKRTRKWEEERRQERRVGKAPATPAGNRRGEAKQKATAEDVDDGDDDLGFQEPEATVATVDGGACAHASRRSLKAMKRELLAAAPTHEATRWARWSEVTLTFDQTDHPPCIARGGQIAMVVSPTVCNVKLGRVLIDGGAALNILSPAAFDAIKAPGMVLRPSQPIIGVTPGHTWPLGHIDLPVTFGGSANFRTERVNFDVADLSLPYNAVLGRPALVKFMAAVHYAYLQMTMPGPGGPITIHGDLKVALACMEQRADHLAAASKPAGGDERLSTSVPAAPRQRMITCDEVPEDALVSFLRANADVFAWRPADMPGVPREVIEHRLAVRPGARPVQQKVRRQAPERQAFIREEVARLLEAGFIREDIHPEWLANPVIVPKANGKLQMCIDYTDLNKACPKDPYPLPRIDQIVDSTAGCDLLCFLDAYSGYHQIRMAREDEEKTAFITPIGTYCYTTMPFGLKNAGPTFQRTTRISLGSQIGRNVEAYVDDLVVKTRNQETLLSDLAETFESLRSARIKLNPDKCVFGVPAGKLLGFLVSARGIEANPEKIRAIERMRPPSKLRDAQCVTGCMAALSRFISRLGEKALPLFKLLKRSGPFTWTEEAERAFTQLKAYLSSPPVLVAPEPDEPLLLYLAATPQVVSAALVVERDEDNPHSAHPHPVSTRPGREQGGEAPEPNGGPRPPTVRAGPLPACPTVPGAPDPQDGPGATAGRPRLSPSDPEVVGAEVEGAPRGLSDEERPGDAAPGEEDRPRRKVQRPVYFVSEALRDAKTRYPQAQKMLYAILMASRKLRHYFLAHRVSVVTSYPLGQILHNREGTGQVVKWAIKLSEFDLHFEPRHAIKSQALADFVAEWTPAPEPVSVLEASSGPSQLPHTAYWVMQFDGSLSLQGAGAGVTLTSLNGDVLRYLVRLDFRATNNMAEYEGLLAGLRVAAGLGIRRLLVCKEYRCSDPQMDAYVRQVRRMERHFDGIELRHVPRRDNTVADELSRLASSRAQIPPGAFEERLAQPSARPDPLGETDAPERPPRPVGVQASGPEGSAPSSPRLIAWITEIQAYLADKTLPEDREGSERVQRISKRYVLVEGTLYRRAANGVLLKCIPREQGVELLADIHEGECGAHSASRTLVGKAFRQCFYWPTALNDAVDLVRRRAPGGFEYLYVAVDKFTKWPEAYPVIKIDKHSALKFIRGITARFGVPNRIITDNGTQFTSELFGDYCEDMGIKLCFASPAHPRSNGQVERANAEILKGLKTKTFNILKKHGDSWIEELPAVLWANRTTPSRATGETPFFLVYGAEAVLPSELTLRSPRATMYCEADQDQLRRDDLDYLEERRRRAALRAARYQQSLRRYHQRHVRARSLCVDDLVLRRVQTRAGLSKLSPMWEGPYRVIGVPRPGSVRLATGDGTELPNPWNIEHLRRFYP

SEQ ID NO: 155335 - protein, 1717 aa, Oryza sativa
  unsure (1)..(1717): unsure at all Xaa locations
  Clone ID: PAT_MRT4530_55108C.1.pep
MAERAVAHNLSLSVSGDDREQNPRRRARTPPSPSRXNLGREKALEGVERSTTSPPASDGKGRRDGERRLLVYGDGSTPQGALQAAGALLRHPPVVPDPETPAGRWXGSVSSRRRARRAAAVSRRSSAIPSSTPPTQEDVRGGPDARLNIERRRNGRRAAHATEDASSSGAPLRSGHGGQPPVSPVGGAGCRAFVASLRNVRWPPRFRPTITEKYDGSVNPAEFLQIYTTGIEAAGGDDRVMANFFPMALRGGGVRHNRMLEKIASKEPQTTAELFQLADRVVRKEEAWTWNSSGSGVAALAAPGSAARSGRWDRRRKKRSAHSDDEGHVLAVEGGSRATRKGRPASDKKKEAGAPSRERPTGKWCSVHNTSLHDLADCRAVKSLAERTRKWEEERRQERREGKAPAAPAGNRRSEAKQKAPADDIDDGDDDLGFQEPEATIATVALTIDQTDHPPCIARGGQIAMVVSPTVCNVKLGRVLIDGGAALNILSPAAFDAIKAPGMVLRPSQPIIGVTPGHTWPLGHIDLPVTFGGSANFRTERVNFDVADLSLPYNAVLGRPALVKFMAAVHYAYLQMKMSGPGGPITVHGDLKVALACMEQRADHLAAASKSAGGDERLSTSVPAAPRQRMITCDEVPEDALVSFLRANADVFAWRPADMPGVPREVIEHRLAVRPGARPVRQKVRRQAPERQAFIREEVARLLEAGFIREVIHPEWLANPVVVPKANGKLQMCIDYTDLNKACPKDPYPLPRIDQIVDSTAGQIGRNVEAYVDDLVVKTRNQETLLSDLAETFESLRSARIKLNPDKCVFGVPAGKLLGFLVSARGIEANPEKIRAIERMRPPSKLRDVQCVTGCMAALSRFISRLGEKALPLFKLLKRSGPFTWTEEAERAFIQLKAYLSSPPVLVAPEPDEPLLLYLAATPQVVSSALVVERDEDNPHSAHPHPVSTRPGREQGGEAPEPNGGPRPPTAGAGPPPACPTVPGAPDPQDGPGATAGRPRLSPSDPEVVGAEAEGAPRGLSDEERPGDAAPGGEDRPRRKVQRPIYFVSEALRDAKTRNPQAQKMLYAILMASRKLRHYFQAHRVTVVTSYPLGQSCITERSQALADFVAEWTPAPEPVSVPEASSGPSQLPHTAYWVMQFDGSLSLQGAGAGVTLTSPSGDVLRYLVRLDFRATNNMAEYEGLLAGLRVAAGLGIRRLLVCKEYRCSDPQMDAYVRQVRRMERHFDGIELRHVPRRDNAVADELSRLASSRAQIPPGAFEERLAQPSARPDPLGETDAPERPPRPVGVQASGPEGSAPSSPRLIAWITEIQAYLADKTLPEDREGSERVQRISKRYVLVEGTLYRRAANGVLLKCIPREQGVELLADVHEGECGAHSASRTLVGKAFRQGFYWPTALNDAVDLVWRCRACQFHARQTHQPAQALQTIPLSWPFAVWGLDILGPFRRAPGGFEYLYVAVDKFTKWPEAYPVIKIDKHSALKFIRGITARFGVPNRIITDNGTQFTSELFGDYCEDMGIKLCFASPAHPRSNGQVERANAEILKGLKTKTFNILKKHGDSWIEELPAVLWANRTMLSRATGETPFFLVYGAEAVLPSELTLRSPRATMYCEADQDQLRRDDLDYLEERRRRVALRAVRYQQSLRRYHQRHVRARSLCVDDLVLRRVQTRAGLSKLSPMWEGPYRVIGVPRPGSVRLATGDGTELPNPWNIEHLRRFYP

SEQ ID NO: 155336 - protein, 1314 aa, Oryza sativa
  Clone ID: PAT_MRT4530_55109C.1.pep
MNFQGTYPRQAPAAPGSAARSGRRDRRRKKRSAYFDDEGHVLAVEGASRATRKGRPASDRKKEAGAPSRERPTGKWCSVHNTSLHDLADCRAEEERRQKRREGKVPAAPAGNQRGEAKQKAPAEDVDDGDDNLGFQEPQATVATVDGGACAHASRRSLKAVKRELLAAAPTHEATRRARWSEVALTFDQTDHPPCVARGGQIAMVVSPTICNVKLRRVLIDGSAALNILSPAAFDAIKAPGMVLRPSQPIIGVTPGHTWPLGHIDLPVTFGGSANFRTERVNFDVADLSLPYNAVLGRPALVKFMAAVHYAYLQMKMPGPGGPITVHGDLQVALACMEQRADQLAAASKPEGGDERLSASVPAAPRQRMITCDEVPEDALVSFLRANADVFAWRPADMPGVPREVIEHRLAVRPGARPVRQKVRRQAPERQAFIREEVARLLEAGFIREVIHPEWLANPVVVPKANGKLRMCIDYTDLNKACPKDPYPLPRIDQIVDSTAGCDLLCFLDAYSGYHQIRMAREDEEKTAFITPIGTYCYTTMPFGLKNARPTFQRTTRISLGSQLGRNVEAYVDDMVVKTRNQETLLSDLAETFESLRSARIKLNPDKCVFGVPTGKLLGFLVTARGIEANPEKIRAIERMRPPSKLRDVQCVTGCMAALSRFISRLGEKALPLFKLLKCSGPFTWTEEAERALTQLKAYLSSPPVLVAPKPDEPLLLYLAATPQVVSAALVVERDEDNPRSAHPHPVSTRPGREQGGEAPEPNGGPMPPTAGAGPLPACPTVPGAPDPQDGPGATAGRPRLSPSDPEVVDTEAECASRGLSDEKHPGDAAGEEDRPRRKVQRPVYFVSEALRDAKTRYPQAQKMLYAILMASRKLRHYFQAHRVTVVTSYPLGQILHNREGTGRVVKWAIELSEFDLHFEPRHAIKSQALADFVAEWTPAPEPVSVPEASSGPSQLPHTAYWVMQFDGSLSLQGAGAGVTLTSPSGDVLRYLVRLDFRATNNMAEYEGLLAGLRVATGLGIRRLLVLGDSQLVVNQGFYWPTALNDAVDLVRRCRACQFHARQPHQPAQALQTIPLSWPFAVWGLDILGPFRRAPDGFEYLYVAIDKFTKWPEAYPVIKIDKHSALKFIRGITARFWVPNRIITDNGTQFTSELFGDYCEDMGIKLCFASPAHPRSNGQVERANAEILKGLKTKTFNILKKHGDLWIEELPALRRDDLDYLEERRRRAALRAARYQQSLRRYHQRHVRARSLCVDDLVLRRVQTRAGLSKLSPMWEGPYRVIGVPRLGSVRLATGDGTELPNSWNIEHLRRFYP

SEQ ID NO: 155337 - protein, 238 aa, Oryza sativa
  Clone ID: PAT_MRT4530_5510C.1.pep
MARQASIAIATPSSFLPCSRPQQATIPTEARSSPVSAARHLFRHCALSPLDREGRKEVGRSPTTFGGGAIDQRQRDAACLVEDMEGHQIGGSNLAKEDLNGQRHLVIVEEEDFPPHGKSVVLGPNTDMFLICTALLTFGMGMCIMFYGSRSIQKPGMQVDNLHLGSFNLKKLKEGARIQSITQAKTRIGHAILLPRRRRLLLSRLATSPRQPPPQPPAGLPREENRSKETERRKGEEG

SEQ ID NO: 155338 - protein, 1425 aa, Oryza sativa
  Clone ID: PAT_MRT4530_55110C.1.pep
MPPFGGVGCRAFVASLRNVRWPLRFRPTITEKYDGSVNPAEFLQVYTTGIEAAGGDDRVMANFFPMALKGQARGWLMNLPPASVHSWEDLCQQFTMNFQGTYPRPGEEADLHAVQRRDDESLRSYIQRFCQVRNTIPCIPAHAVIYAFRGGVRHNRMLEKIASKEPQTTAELFQLADHVARKEEAWTWNSTGSGVAASAAPGSAARSGRRDRRRKKRSAHSDDEGHVLAVEGASRATRKGRPASDKKKEAGAPSREHPTGKWCTVHNTSLHDLADCRAVKSLAERTRKWEEERRQERPFDAIKAPGMVLRPSQPIIGVTPGHTWPLGGSANFRTERVDFDVADLSLPYNAVLGRPALVKFMAAVHYAYLQMKMPGPGGPISVHGDLKGALACMEQRADHLAAASKPEGGNERLSTSVPAAPRQRMITCDEVPEDALVSFLRANADVFAWRPADMPGVPREVIEHRLAVRPGARPVRQKVRRQAPERQAFIREEVTRLLEAGFIREVIHPEWLANPVVIPKANGKLRMCIDYTDLNKACPKDPYPLPRIDQIVDSTAGCDLLCFLDAYSGYHQIRMAREDEEKTAFITPIGTYCYTTMPFGLKNAGPTFQRTTRISLGSQIGRNVEAYVDDLIVKTRNQETLLSDLAETFESLRSARIKLNPDKCVFGVPAGKLLGFLVSARGIEANPEKIRAIERMHPPSKLRDVQCVNRLHGRPKSVVSAALVVERDEDNPHSAHPHPASTRPGREQAGEAPEPNGGPRPPMAGAGPPPACPTVLGAPDPQDGPGATAGRPRLSPSDPEVQRPVYFVSEALRDAKTRYPQAQKMLYAILMASRKLRHYFQAHRVTVVTSYPLGQILHNREGTGRVVKWAIELSEFDLCFEPRHAIKSQALADFVAEWTPAPEPISVPEASSGPSQLPHTAYWVMQFDGSLSLQGAGAGVTLTSPSGDVLRYLVRLNFRATNNMAEYEGLLAGLRVAAGLRIRRLLMLGDSQLVVNQVRRMERHFDGIELRHVPRRDNAVADELSRLAYSRAQTPSDAFEERLAQPSARPDPLGETDAPERPPRPVGVQASGPKGSAPSSPRLIAWITEIQAYLADKTLPEDREGSERVQRISKRYVLVEGTLYRRAANGVLLKCIPREQGVELLADIHEGECGAHFASRTLVGKAFRQGFYWPTALNDAVDLVRRCRACQFHAKQTHQPAQALQTIPLSWPFAIWGLDILGPFRRAPGGFEYLYVAVDKFTKWPEAYPVIKIDKHSALKFIRGITARFGVPNRIITDNGTQFTSELFGDYCEDMGIKLCFASPAHPRSNGQVERANAEILKGLKTKTFNILKRHGDSWIEELPAVLWANRTTPSRATGEMPFFLVYGAEAVLPSELTLRSPRVTMYCEADQDQLHRDDLDYLEERRRRVALRAARYQQSLRRYH

SEQ ID NO: 155339 - protein, 108 aa, Oryza sativa
  Clone ID: PAT_MRT4530_55111C.1.pep
MASGSTTTGEEMRRAERGCMDGVADEEGGCGGVGARRRMESVHGDEAADGMGDGRDGGGTLLEFNGFPRVFWIFPRVFGYMDLAVDHTSGPCRVTAGSFESPSLLTSG

SEQ ID NO: 155340 - protein, 1304 aa, Oryza sativa
  Clone ID: PAT_MRT4530_55112C.1.pep
MAEQAVAHNLSPSASGDDGEQNPRRRARTPPSPSRRSLGREEAFEEVERSATSPPTGDGEGRRDGERRLLVYGDGSTPQGALQAAGALLRPPPVVPDPETPARRWLDDVANLVMTAQQRLGAGGRSSATKASGAATAGSVSSRRRARRAAAVTRRSSAIPSSTPPTQEDVRGGPDAHLNIERRRNGRRAAHATEGASSSGAPLRSGHGGQAPVSPVGGAGCRAFVASLRNVRWPLRFRPTITEKYDGSVNPAEFLQIYTTGIEAAGGDDRVMANFFPMALKGRRDRRRKKRSAHSDDEGHVLAVEGASRATRKGRPASDKKKEAGAPSRERPTGKWCTVHNTSLHDLADCRAVKSLAERMRKWEEERRQERREGKAPAAPAGNRRGEAKQKATAGDVDDGDDDLGFQEPEATVATVDGGACAHASRRSLKAKKRELLAAAPTHEATRRAWWSEVALTFDQTDHPPCVARGVQIAMVVFPTVCNVKLGRVLIHGGAALNILSPAAFDAIKALGMVLRPSQPIIDVTPGHTWPLGHIDLPVTFGGSANFRTERVNFDVADLSLPYNAVLGRPALVKFMAAVHYAYLQMKMPGPGGPISVHGDHKVALACMEQRADHLAAASKPEGGDERLSTSVPAAPRQRMITCDEVPVVSAALVVECDEDNPHSAHPHPVSTRPGREQGGEAPEPNSGPRPPTAGAGPPPACPTVPGAPDPQDGLGATAGRPRLSPSDPEVVGPKVECAPGGLSDEERPGDVAPGEEDRPRRKVQRPVYFISEALRDAKTRYPQAQKMLYAILMASRKLRHYFQAHRVTVVTSYPLGQILHNREGTGRVVKWAIELSEFDLHFEPHHAIKSQALADFVAEWTPAPEPVSVPEASSDPSQLPHTAYWVMQSDGSLSLQGAGAGVTLTSPSGDVLRYMVRLDFRATNNMAEYEGLLAGLRVAAGLGIRRLLVLGDSQLVVNQVCKEYRCSDPQMDAYVRQVRRMKRHFDGIELRHVPRRDNAVADELSRLASSRAQTPPGAFEERLAQPSARPDPLGETDAPERPPWPVGVQASGPEGSAPSSLRLIAWIAEIQAYLADKTLPEDREGSERVQRISKRYVLVEGTLYRRAANGVLLKRAPGGFEYLYVAVDKFTKWPEAYPVVKIDKHSALKFIRGITARFGVPNHIITDNGTQFTSELFGDYCEDMGIKLCFASPAHPRSNGQLRRDDLDYLEERRRRAALRAARYQQSLRRYHQRHVRARSLCVDDLVLRRVQTRAGLSKLSPMREGPYRVIGVPRPGSVRLATGDGTELPNPWNIEHLRRFYP

SEQ ID NO: 155341 - protein, 1867 aa, Oryza sativa
  Clone ID: PAT_MRT4530_55113C.1.pep
MAERAVAHNLSPSASGDDSEQNPRRRARTPPPPSRRSLRREEALEGVERSTTSPPTSDGEGRRDGERRLLVYGDGSTPQGALQAAGALLRHPPVVPDPETPTRRWLDDVANLIMTAQQRLGAGGRSSATKATGAATAGSVSSRRRARRAAAVTRRSSAIPSSTPPTQEDVREEPDARLNIERRRNDRRAAHASEGASSSGAPLRSGHGGQPPVSPVGGAGCRAFVASLRNVRWPPRVMANFFPMALKGQARGWLMNLPPASVHSWEDLCQQFTMNFQGTYPRPGEEADLHAVQRGDDESLRSYIQRFCQVRNTIPCIPAHAVIYAFRGGVRHNRMLEKIASKEPQTTSELFQLADRVARKEEAWTWNSSGSGVTAPAAPGPAARSGRRDRRRKKRSAHSDDEGHVLAVEGASRVTQKGRPASDKKKEAGAPSRERPTGKWCTVHNTSLHDLADCRAVKSLAERTRKWEEERRQERREGKAPAAPSGNRRSEAKQKAPAEDIDDGDDDLGFQEPGATIATVDGGACAHASRRSLKAMKRELLAAAPTHEATRRARWSEVALTFDQTDHPPCVARGGQIAMVVSPTVCNVKLGRVLIDGGAALNILSPAAFDAIKAPGMVLRPSQPIIGVTPRHTWPLGHIDLPVTFGGSANFRTERVNFDVADLSLPYNAVLGRPALVKFMVAVHYAYLQMKMPGPGGPITVHGDLKVALACMEQRAEHLAAASKPAGGDERLSTSVPAAPRQRMITCDEVPIKQEDALVSFLRANADVFAWRPADMPGVPREVIEHRLAIRPGARPVRQKVRRQAPERQAFIREEVARLLEAGFIREVIHPEWLANPVVVPKANGKLRMCIDYTDLNKACPKDPYPLPRIDQIVDSTAGCDLLCFLDAYSGYHQIRMAREDEEKTAFITPIGTYCYTTMPFGLKNAGPTFQRTTRISLGSQIGRNVEAYVDDLVVKTRNQETLLSDLAETFESLRTARIKLNPDKCVFGVPAGKLLGFLVSARGIEANPEKIRAIERMRPPSKLRDVQCVTGCMAALSRFISRLGEKALPLFKLLKRSGPFIWTEEAERALTQLKAYLSSPPVLVAPEPDEPLLLYLAATPQVVSAALVGERDEDDPRSAHPHLVSTRPGREQGGEAPEPNGGPRPPTAGAGPPPACPTVPGAPDRQDGPGATAGRTRLSPSDLEVVGTEAECAPRGLSDEERPGDAAPSEEDRPRRKVQRPVYFVSEALRDAKTRYPQAQKMLYAILMASRKLRHYFQAHRVTVVTSYPLGQILHNREGTGRVVKWAIELSEFDLHFESRHAIKSQALADFVAEWTPAPEPVSIPEASSGPSQLPHTAYWVMQFDGSLSLQGAGAGVTLTSPSGDVLKYLVRLDFRATNNMAEYEGLLAGLRVAAGLGIHRLLVLGDSQLVVNQVSKEYQCSDPQIKAYVCQVRRMERHFDGIELRHVPRRDKAVADELSRLASSRAQTPPGAFEERLAQPSARPDPLGETDAPERPPRPVGVQASGPEGSAPSSLRLIAWIAEIQAYLADKTLPEDREGSERVQRISKRYVLVEGTLYRHAANGVLLKCIHREQGVELLADIHEGECGAHSASRTLVGKAFRQGFYWPTALNDAVNLVRRCRACQFHAKQTHQPAQALQTIPLSWPFAVWGLDILGPFRRAPGGFEYLYVAIDKFTKWPEAYPVIKIDKHSALKFIRGITARFGVPNRIITDNGTQFTSELFGDYCEDMGIKLCFASPAHPRSNGQVERANAEILKGLKTKTFNILKKHGDSWIEELPAVLWANRTTPSRATGETPFFLVYGVEAVLPSELTLRSPRATMYCEADQDQLRRDDLDYLEERRRRAALRAARYQQSLRHYHQRHVRA

SEQ ID NO: 155342 - protein, 86 aa, Oryza sativa
  Clone ID: PAT_MRT4530_55114C.1.pep
MGACRGCGGSSKTNVDDAVVVGTETTSGVTKEKSRKASDDLTAALSGYDTLGEKLMRRRVRPPRDEAHAAGQEKCQNRERRRSLCR

SEQ ID NO: 155343 - protein, 1827 aa, Oryza sativa
  Clone ID: PAT_MRT4530_55115C.1.pep
MAERAVAHSLSPNASGDDGEQNPRRRARTPPSPSRRNLGWGKALGEAGGSATSPPAGDGGGRRDGARRRLVYGDGGTLQGALQAAGALLRHPPVVPDPETPARRWLDDVADLVMTAQQRLGAGGRSSATETSGAAAAGSMSSRRRARRAAAVTRRSSAIPSSTPPTQGDVRGGPDARLDIERRRDTRRAAHATEGFSSSGAPLRSGHGGRPPVSPVGGAGCRAFVASLRNVRWPPRFRPTITEKYDGSVNPAEFLQIYTTGIEAAGGDDRVMANFFPMALKGQARGWLMNLPPASVHSWEDLCQQFTTNFQGIYPRPGEEADLHVVQRRDDESLRSYIQRFCQVRNTIPCIPAHAVICAFRGGVRHNRVLEKIASKEPQTTAQFFELADRVARKEEAWTWNSSGSGVAAPAAPGSAARSGRRDRRRKKGPARSDDEGHVLTVEGASRAPRKGRPASDKKKEAGAPSRERPTGKWCTVHNTSLHDLADCRAVKSLAERTRKWEEEKRQERREGKTPAAPAGNRRGEAKQKATAEDIDDGDDDLGFQEPEATVATVDGGACAHASRRSLKAMKRELLAAAPTHEATRRARWSEVALTFDQTDHPPCVARGGQIAMVVSPTVCNVKLGRVLIDGGAALNILSPAAFDAIKAPGMVLRPSQPIIGVTPGHTWPLGHIDLPVTFGGSANFRTERVDFNVADLNLPYNAVLGRPALVKFMAAVHYAYLQMKMPGPGGPITVHGDLKVALACMEQRADHLAAASKPAGGDERLATSVPAAPRQRMVTCDEVPEDALVSFLRANADVFAWRPVDMPGVPREVIEHRLAVRPGARPVRQKVRRQAPERQAFIREEVARLLEAGFIREVIHPEWLANPVVVPKANGKLRMCIDYTDLNKACPKDPYPLPRIDQIVDSTAGCDLLCFLDAYSGYHQIRMAREDEEKTAFITPIGTYCYTTMPFGLKNAGPTFQRTTRISLGSQIGRNVEAYVDDLVVKTRNQETLLSDLAETFESLRSAHIKLNPDKCVFGVPAGKLLGFLVSARGIEANPEKIRAIERMRPPSKLRDVQCVTGCMAALSRFISRLGEKALPLFKLLKRSGPFTWTEEAERAFTQLKAYLSSPPVLVAPEPDEPLLLYPVATPQVVSAALVVERDEDNPHSAHPHPASTRPGREQGGEAPEPNGGPRPPTAGAGPPPACPTVPGAPDPQDGPGATARRPRLSPSDPEVVGTEAECAPRGLSDEERPGDTAPGEEDRPRRKVQRPVYFVSEALRDARTRYPQAQKMLYAILMASRKLRHYFQAHRVTVVTSYPLGQILHNREGTGRVVKWAIELSEFDLRFEPRHAIKSQALADFVAEWTPAPEPVSALEASSGPSQLPHTAYWVMQFDGSLSLQGAGAGVTLTSPSGDVLRYLVCLDFRATNNMAEYKGLLAGLRVAAGLGIRRLLVCKEYRCSDPQMNAYVRQVRRMERHFDGIELRHVPRRDNAVADELSRLASSRAQTPPGAFEERLAQPSARPDPLGETDAPERPPRPVGVQASGPEGSAPSSPRLIAWITEIQAYLADKTLPEDREGSERVRRISKRYVLVEGTLYRRAANGVVLKCIPREQGVELLADVHEGERAPGGFEYLYVAVDKFTKWPEAYPVIKIDKHSALKFIRGITARFGVPNRIITDNGTQFTSELFGDYCEDMGIKLCFASPAHPRSNGQVEPANAEILKGLKTKTFNILKKDGDSWIEELPAVLWANRTTPSRATGETPFFLVYGAEAVLPSELTLRSPRVTMYCEADQDQLRRDDLDYLEERRRRAALRAARYQQSLRRYHQRHVRARSLCVDDLVLRRV

SEQ ID NO: 155344 - protein, 873 aa, Oryza sativa
  Clone ID: PAT_MRT4530_55116C.1.pep
MAPKPQGGGAPQPLGPKRERTDPSGRQREGWPRHPRARPPRGGQATWVTAATQASSHDTPGPMSPTRGMYYHWYSQILGFPGHTWPLGHIDLPFTFGGSANFRTERVDFDVTSDMPGVPREVIEHRLAVRPGARPVRQKVRRQAPERQAFIREEVARLLEAGFIREVIHPEWLANPVVVPKANGKLRMCIDYTDLNKACPKDPYPLPRIDQIVDSTAGCDLLYFLDAYSGPTFQRTTRISLGSQIGRNVEAYVDDLVVKTRNQETLLSDLAETFESLRSARIKLNPDKCVFGMPAGKLLGFLVSARGIEANPEKIRAIERMRPPSKLRDVQCVTGCMAALSRFISRLGEKALPLFKLLKCSGPFTWTEEAERAFTQLKAYLSSPPVLVAPEPDEPLLLRVAAGLGIRRLLVLGDSQLVVNQVCQEYQCSDPQMDAYVRQVRRMERHFDGIELRHVPRRDNAVANELSRLASSRAQTPPGAFEERLAQPSARPDPVGETDAPERPPRPVGAQASGPEGSAPSSPRLIAWITEIQAYLADKTLLEDREGSERVRRISKRYVLVEGTLYRRAANGVLLKCIPREQSVELLADVHEGECGAHSASRTLVGKAFRQGFYWPTALNDAVDLVRRCRACQFHARQTHQPAQALQTIPLSWPFAVWGLDILGPFRRAPGGFEYLYVAVDKFTKWPEAYPVIKIDKHSALKFIRGITARFGVPNRIITDNGTQFTSELFGDYCEDMGIKLCFASPAHPRSNGQMERANAEILKGLKTKTFNILKKHGDSWIEELPAVLWANRTTPSRATGEMPFFLVYGAEVVLPSELTLRSPRVTMYCEADQDQLRRDDLDYLEERRRRAALRAARYQQSLRRYHQRHVRA

SEQ ID NO: 155345 - protein, 1566 aa, Oryza sativa
  Clone ID: PAT_MRT4530_55117C.1.pep
MAGRAVAHSLSPNASGDDGEQNPRRRARTPPSPSRRNLGRGEALGEVGGSVTSPPAGDGGGRRDGARRCLVYGDGGTPQGALQAAGALLRHPPVVPDPETPARRWLDDVADLVMTAQQRLGAGGRSSATEASGAAAAGSMSSRRRARRAAAVTRRSSAIPSSTPPTQEDEEAWAWNSSGSGVAAPAAPGSAARSGRRDRRRKKGSARSDDEGHVLAVEGASRAPRKGRPASDKKKEAGAPSRERPTGKWCTVHNTSLHDLADCRAVKSLAERTRKWEEEKRQERREGKTPAAPAGNRRGEAKQKATAEDIDDGDDDLGFQEPEATVATVDGGACAHASRRSLKAMKRELLAAAPTHEATRRLGRVLIDGGAALNILSPAAFDAIKAPGMVLRPSQPIIGVTPGHTWPLGHIDLPVTFGGSANFRTERVDFDVADLSLPYNAMKMSGPGGPITVHGDLKVALACMEQRADHLAAASKPAGGDERLSTSVPAAPRQRMVTCDEVPEDALVSFLRANADVFAWRPADMPGVPREVIEHRLAVRPGARPVRQKVRRQAPERQAFIREEVIHPEWLANPVVVPKANGKLRMCIDYTDLNKACPKDPYPLPRIDQIVDSTAGCDLLCFLDAYSGYHQSRMAREDEEKTAFITPIGTYCYTTMPFGLKNAGPTFQRTTRISLSSQIGRNVEAYVDDLVVKSRNQDTLLSDLAETFESLRSARIKLNPDKCVFGVPAGKLLGFLVSARGIEANPEKIRAIERMRPTSKLRDVQCITGCMAALSRFISRLGEKALPLFKLLKRSGPFTWTEEAERAFTQLKAYISSPPVLVAPKPDEPLLLYLAATPQVVSAALVVERDEDNPHSAHPHPVSARPGREQGGEAPEPNGGPRPPTAGAGPPPACPTVPGTPDPQDGPRATAGRPRLSPSDPEVVGTEAECAPRGLSDEERPGDAAPGEEDRPRRKVQRPIYFVSEALRDAKTRYPQAQKMLYAILMASRKLRHYFQAHRVTVVTSYPLGQILHNREGTGRVVRWAIELSEFDLRFEPRHAIKSQALADFVAEWTPAPEPVSAPEASSGPSQLPHTAYWVMQFDGSLSLQGACAGVTLTSPSGDVLRYLVRLDFRATNNMAEYEGLLAGLRVAAGLGIRRLLVLGDSQLVVNQVCKEYQCSDPQMDAYVRQVRRMERHFDGIELWHMPRRDNAVADELSRLASSRAQTPPGAFEERLAQPSARPDPLGETDAPERPPRPVGVQASGPEGSAPSSPRLIAWITEIQAYLADETLPEDRERSERVRRISKRYVLVEGTLYRRAANGVLLKCIPREQGVELLADVHEGECGAHSASRTLVGKAFRQGFYWPTALSDAVDLVRRCRACQFHARQTHQPAQALQTIPLSWPFAVWGLDILGPFRRAPGGFEYLYVAVDKFTKWPEAYPVIKIDKHSALKFIRGITARFGVPNRIITDNGTQFTSELFGDYCEHMGIKLCFASPAHPRSNGQVERANAEILKGLKTKTFNILKKHGDSWIEELPAVLWANRTTPSRATGETPFFLVYGAEAVLPSELTLRSPRVTMYCEADQD

SEQ ID NO: 155346 - protein, 112 aa, Oryza sativa
  Clone ID: PAT_MRT4530_55118C.1.pep
MALEDVAVPDQRWTDDVARQRQIAPDGDTLHLRGRRGRIRPMRRACGPYATAARPATRPGGPTRALCAAGRESQARPRRARLSAASPLWLCRRGEGQVRSFSRLLQSCCYCG

SEQ ID NO: 155347 - protein, 208 aa, Oryza sativa
  Clone ID: PAT_MRT4530_55119C.1.pep
MAAPREKSAAATSSAAAADAAGAGGGGDRWGAAVGNLTELGANVAALQRLLAKKAVFVDEDIFSKASLAADQARTIKVILLCFALLVAGAPDSPPIPSPVSSAMLFCQLVDLILDQRVQSLERELDAAISAAARARTEKRQAEAAQRAAELRAQEVTKELENTAKVFKLHMEELRAKQEEIAKKESDIKVLEAIIRTLSNKDDGGSSE

SEQ ID NO: 155348 - protein, 84 aa, Oryza sativa
  Clone ID: PAT_MRT4530_5511C.1.pep
PAPPSRDNLVAARTLFYSVPEKRSKPQEIRKKCTKGPSTCHRDTKTFSNHKTRYVGSFKYTKPVTRGPSVVLSPVLVYVAAESA

SEQ ID NO: 155349 - protein, 89 aa, Oryza sativa
  Clone ID: PAT_MRT4530_55120C.1.pep
QPPATLLTSNGRQICIRPPFLAHEYLMETSRSPLSIGFGLTTKFHPSHPQMKKQGTTSPVMGLWACNFVWNPGPSGAHVGCAPTRWRTT

SEQ ID NO: 155350 - protein, 85 aa, Oryza sativa
  Clone ID: PAT_MRT4530_55121C.1.pep
MDLDRVVLATRARARSTDREQRKPAASANADADAGAAAARDMPIDVAHVGGSGRTSGAAGGMAAWGDVGVEGGRVYPRHGWDGAD

SEQ ID NO: 155351 - protein, 582 aa, Oryza sativa
  unsure (1)..(582): unsure at all Xaa locations
  Clone ID: PAT_MRT4530_55122C.1.pep
MKPSDDKAQLSGLAQSEESSLDVDHQSFPCSPSIQPVASGCTHTENSAAYFLWPTSNLQHCAAEGRANYFGNLQKGLLPRHPGRLPKGQQANSLLDLMTIRAFHSKILRRFSLGTAVGFRIRKGDLTDIPAILVFVARKVHKKWLNPAQCLPAILEGPGGVWCDVDVVEFSYYGAPAQTPKEQMFSELVDKLCGSDECIGSGSQVASHETFGTLGAIVKRRTGNKQVGFLTNRHVAVDLDYPNQKMFHPLPPNLGPGVYLGAVERATSFITDDVWYGIYAGTNPGTAVPADRAWPPSAVVFDISTVTTVVRGGGDIGDVKVIDLQCPLNSLIGRQVCKVGRSSGHTTGTVMAYALEYNDEKGICFFTDILVVGENRQTFDLEGDSGSLIILTSQDGEKPRPIGIIWGGTANRGRLKLTSDHGPENWTSGVDLGRLLDRLELDIIITNESLQDAVQQQRFALVPAVTSAVGESSGAPVAIPEEKVEEIFEPLGIQIQQLPRHDVAASGTEGEEAXTXVVNVEEHQFISNFVGMSPVRDDQDAPRSITNLNNPSEEELAMSLHLGDREPKRLRSDSGSSLDLEK

SEQ ID NO: 155352 - protein, 48 aa, Oryza sativa
  Clone ID: PAT_MRT4530_55123C.1.pep
KLEDYTYYILKKKLIQKKKKKTKRANSIINPGFLTSSFQLITIWYIFK

SEQ ID NO: 155353 - protein, 75 aa, Oryza sativa
  Clone ID: PAT_MRT4530_55124C.1.pep
HFSFPAFCHPPRMFPTFVSPPPAMLGIAPLSYFLLPGYSPHHLGTNFHITQHHPPCTGSVHIAFTMWAARLFWYK

SEQ ID NO: 155354 - protein, 155 aa, Oryza sativa
  Clone ID: PAT_MRT4530_55125C.1.pep
MSFSLPLFLLSPHLPSLHLSFQEEGSGTDTDGGDWGGGMGTDKGVGEEGVEQDRGAEVDNGVFEIEFFNPPGSNDTYVRVVNRADQVPGPVGATLSMSRGCELADANSTVVWLVSPMAAVKGSCAARIRDDGNWVVTDMMLKTTVGKQRPELGGR

SEQ ID NO: 155355 - protein, 60 aa, Oryza sativa
  Clone ID: PAT_MRT4530_55126C.1.pep
CRRREGQNINWIMYERKSVYVKFYIFVCIHEIIDVGWLFAVGVTLVCKASRNHVPLRLSV

SEQ ID NO: 155356 - protein, 98 aa, Oryza sativa
  Clone ID: PAT_MRT4530_55127C.1.pep
DSCEEIGYKSMLKVKHNEVENSYHWACGRPTSLHDCGRDSDDDDFRDMDYDVVALTNNLSQALRYGIYSNDDMEEDVYFDDESAEVVICSLRLGDDQD

SEQ ID NO: 155357 - protein, 81 aa, Oryza sativa
  Clone ID: PAT_MRT4530_55128C.1.pep
RPTSLHDCGRDSDDDDFRDMDYDVVALTNNLSQALRYGIYSNDDMEENQGTLEHDDEDVYFDDESAEVVICSLRLGDDQDG

SEQ ID NO: 155358 - protein, 89 aa, Oryza sativa
  Clone ID: PAT_MRT4530_55129C.1.pep
LCGKPDELASVHPFYQGGDSVDEKIEHTGLGDLLNSRAIQEVECTDAALNDADVDDTIAWADGTLDIPLRQRLNTDAAPRQVPSPAGIS

SEQ ID NO: 155359 - protein, 653 aa, Oryza sativa
  unsure (1)..(653): unsure at all Xaa locations
  Clone ID: PAT_MRT4530_5512C.1.pep
MGINGIKTKSQGYTRDVTKFKGMQGMEQTLGVCFGKKTSTKITRFNMYQLTTAHQVSEAFSFGISSPKGYGLGIPFTLRYTSHIDPYTNVPQYPLYPVYGYHPSTVARQVGALGIQGSTTMSSSLVDNSVNTNLSQVIPASTMLVWTKVGEIVFPVYTTTPISTGPSMTGNENAVATNQGESMSKNPPAETENGASMTSKLEKDSDAAKPCHSDMNHEPTKMTSEAARSWCPIHKTRKHTLQACWVFLNVRAEIRACKERGIQRISPTRDVYCPIHKTKNHNLSSCKVFLSAMKAPSPKVQQSHIPIRDKDKEQGATSTSDRFVGVIDIDPHEPSVLHLLEDYGSSTTSAPREVLAIDDIGTSTRTNAEAENQLATPAQHIRAVNAILRETPYDPILNDDLARWTERLRESVTNLSNAFEEAAAAAHPEXPPTGDANGEDPERRESPHRATPPPRGTGDLRDHLNGRREARRTRDNENHQRRRRRAGNGDDQRRRRRRLEVCRRSRIDEARRWRQIDEARRRIDEARRRGRRAGDGDDRRRQRPAAAARLGHGRVVQRRRRRRRPASSDASSPVSAAPPSFSSFHYPRLLSLHQPSPPAAGRRPRPRRLRSAMRRRRPRWLGRPSKSSRHSPYLYFFPVHIGSFNRDATSHVS

SEQ ID NO: 155360 - protein, 59 aa, Oryza sativa
  Clone ID: PAT_MRT4530_55130C.1.pep
MALALSTSAAAAAAAAARALAARVTTTRGYAELTGMQEPWLNESLDYSYDHDAYLTHSH

SEQ ID NO: 155361 - protein, 76 aa, Oryza sativa
  Clone ID: PAT_MRT4530_55131C.1.pep
MASTLTNVGLSTPAAACVFLVRPVAGAGRVVFPRVGRGGFSAVRASGPATPPDISDKMSESIYKAKEACAEDTASG

SEQ ID NO: 155362 - protein, 37 aa, Oryza sativa
  Clone ID: PAT_MRT4530_55132C.1.pep
MSTWGTLRSIPDKRQRHDGPAEHTGPGPIRSIHDLRW

SEQ ID NO: 155363 - protein, 116 aa, Oryza sativa
  Clone ID: PAT_MRT4530_55133C.1.pep
KKNKNIKKKKKKKKKKKKKKKKKKKKKKKKKKKGGAEKKGPKLTTPGRPRQNFSMGPPKSNPRAGVSHRRDGKTPGVTHLNRLEEHPPYPSGGNSKKARTEGLSQQVGHPDWARGP

SEQ ID NO: 155364 - protein, 71 aa, Oryza sativa
  Clone ID: PAT_MRT4530_55134C.1.pep
RPQKSRGPDPAAGLDPPKTPPGFTGQAYFRNFTWPLFYGPKGVGHLSPSGTLPYAGGSFFFFFFFYRNWGR

SEQ ID NO: 155365 - protein, 955 aa, Oryza sativa
  Clone ID: PAT_MRT4530_55135C.1.pep
MAPLCCCLLRARRLLFFFFFFFFFFFAVAVVLFSSVSVAQIPGFQSIDCGGSGNYTDEVGLEWTGDEAYVGGGAGTTASISSISGQGRRPYRTVRYFPADGRKYCYRVSVKARTRYLVRASFLYGNFDGSRVFPEFDLYVGASRWSTIVIYDESKVVTREMVALAQSGPSLSVCLANATTGHPFISTLELRPLNASLYHTAFEAAFFLSLAARINFGAPTADPVRYPDDPYDRVWESDMARRPNFLVDAAPGTIRVATDNPVFVASGERPPQKVMQTAVVGTLGALTYRLDLNGFPGSGWACSYLAEIEDDAAATARRFKLYIPGLAEVSKPTVDIGENAPGKYRVYQPGYDNISLPFVLPFAFRKTDDSARGPILNAMEIYSYIPILPASPDAVAMDALAARYQQQQHSWAREGGDPCVPAPWSWLTCTSSRVIAIRLDNNMLTGPIPDLSACTNLTVIHLENNQLEGGVPSYLSGLPKLSELYLENNRLSGVIPRALLSRTIVFKYSGNKHVRVGKQEEEERNVIIGICALMGIGLLLAAALCYAYNVSVSGRKQLQGASAGGNSKSKSIVVSAEQKKKATPVAGGGGGEIDNMMAAMAARGPLEFEVRELEEATSKFARKIGSGGFGVVYYGRLGDGREIAVKVASSNESIQGKKQLANEVALLSRIHHRNLVAFLGYCWERDSSSYMLVYEYMHNGSLKEQLQMMSISWLRRLQVAEDAAKGIEYLHCGCTPAIIHRDIKTSNILLDAHMRAKVSDLGLSKSNKATNSTTNTITTHVRGTLGYLDPHYYVSQQLTHKSDLYSFGIILLELISGRPPILLTPGAGAMASLGPWAKSHYESGDIEAIVDPSLRGRYRDVHSVWKVAETAVRCIDADPRGRPSMPEVVKDIQEAIALEMPSSESERPAASFFSPGAGAAGARSSATVRSHDLVMDNLMYDSSFCDSLNLPRTPR

SEQ ID NO: 155366 - protein, 383 aa, Oryza sativa
  unsure (1)..(383): unsure at all Xaa locations
  Clone ID: PAT_MRT4530_55136C.1.pep
MSRVSTSWGFVYSRVNKAEGRGARTGSTGVGPTQQPHGPRWTGCTRLTPAGAVGPTRQPYPRARAADGRAPHGSRGARPKAASPAQPTGGDAPAPRWSPPATTGAAERRPREGREGGSETAVHGSPRVDGDNGNGDRSGERRRRGSGRRGRRRSGGRRAKRRGGRGRRGRGEPEEGDAETGXGSGRRRRRTGARRRRRRERTTARARFRRGERAARVGNGGGRHGERLYRVGRGRERPDEGESAAEDPAAIDXAGEVXGESFQTNPREREREKWGERERESRGVISPSLLRAGAAGCGGIRGGGGARARARRRVRREVGDDGWAPPVSEGGGRARPSAARARGKAGWAAGERREREGAGPSRPKKGRGGKXRLFRVFLFIKPF

SEQ ID NO: 155367 - protein, 134 aa, Oryza sativa
  Clone ID: PAT_MRT4530_55137C.1.pep
RCPSTPDFVHLHPCTFVYNQTEPQTKPYPLDMWKYGSALQQRPELHPYSGRGATFHNWHAPKPHRKTGFRGFERGREGERPSEPSATTANHASGTSGTTEATRSTQAKLQAYKEAITTHKKKAHFATIKHVLTL

SEQ ID NO: 155368 - protein, 109 aa, Oryza sativa
  unsure (1)..(109): unsure at all Xaa locations
  Clone ID: PAT_MRT4530_55138C.1.pep
MVEXLELGVVVHSLIIGMSLGASDFPSTVRPLVPALTFHQFFEGIGLGGCIVQVIYPHIYSALTIVNFNLFFFFFERERERERFQRFWCSYPINPSCLLTRPKIPISNK

SEQ ID NO: 155369 - protein, 158 aa, Oryza sativa
  unsure (1)..(158): unsure at all Xaa locations
  Clone ID: PAT_MRT4530_55139C.1.pep
LPSSCWSLWAHGAARMPVAVDVSRWLGDRPGLRRSAWSVPDAAHLIAAADREGXRSWRSSSSSEARGSSFGFPRPSSASFSRLLGGCRRLLSIAGTPPPSLASSSPLPRPPPLRHRLPTPPLHPPASRPSPERRLIERXERERRKGEKESGRPADVAH

SEQ ID NO: 155370 - protein, 122 aa, Oryza sativa
  Clone ID: PAT_MRT4530_5513C.1.pep
RKSRWVGAGSRRRGEAGRQCPAPPTPTLARCSSFPRRGRRVSISASTSASPRIAGLGRVMSAAAAYLLRWQVFVCSALIMLPTAAAAALLLRLRRAAAAPSPSPPPRPVVDGVMMRCEAGGR

SEQ ID NO: 155371 - protein, 435 aa, Oryza sativa
  Clone ID: PAT_MRT4530_55140C.1.pep
MDEVGRRWTFSRANEGYTSCGPMFNREKGKNVSGYAPSNSSFQLNPPLASRELTRAHPWSIPSTLLSSQLPLVGSQDQNQYVFDRAFATQVNELPMPGEDVPFCHDCREQGHYALNCPWVYAKEAPSFGLTGQASLNQPPHTKSSLQPSVQSRELNGENPLNPGKCFPPSLSYHVGSHTKQAKGKKSKNQKRKAPMRTEEEVRKMTITSTEWPPAGITIPRRQRGNTFRGARQLTQHLLSHDGRVSDSEGSDQVSSDYEDESLRHLGEEEMESKACPRCGEIGHIASMCLTLCTHCEEDHPPGECLTRKVTCFLCEGTNHVPKDCQLSVLLTKTVEIQRTTLRLSHQLVSSNSNIDDIIHSTNAPPAAPDSAVNHSDNTFSTNHSLHRQPQQRIVVDGRSCVSPRPGKEVGRKVIDKRNLYEVDSKDTSYKKFWN

SEQ ID NO: 155372 - protein, 471 aa, Oryza sativa
  unsure (1)..(471): unsure at all Xaa locations
  Clone ID: PAT_MRT4530_55141C.1.pep
MSWHRAGVLLLXGSVLPTCPGGSGRRXGVGSVLLSMARMGWKLCHVFRLYTVVMYNREKGKNVSGYASSNLSFQLNPPLASRELTRAHPWSIPSMLLSSQLPLVGSQDQNQYVFDRAFATQVNELPMPEEQVPFCHDCREQGHYALNCPWVYVKEAPSLGLAGQTSLNQPPHTKSSLQPSVQSRELNGENPLNPGKCFPPSLSYHVGSHTKQAKGKKSKNQKRKAPMRTEEEVRKMTITSTEWPPAGITIPRRQRGNTFRGARQLTQHLLSHGGRVSDSEGSDQVSSDDEDESPRHLGEEEMESKACTRCGEIGHVASMCLTLCTHCEEDHPPGECPTRKVTCFLCEGTNHVPKDCQLSVLLTKTAEIQRTTLRLSHQLVSSNSNIDDIIPSTNAPPAAPDSAMNHSNNTFSTNHSLHRQPQQRIVVDGRSCVSPRPTPGRAKGNQPQEGDTKQKTVIRFNQQSEGSFSCE

SEQ ID NO: 155373 - protein, 360 aa, Oryza sativa
  unsure (1)..(360): unsure at all Xaa locations
  Clone ID: PAT_MRT4530_55142C.1.pep
IPIESSSIAPKFPLDSLPVVPSPLPAALLSLPRRRPPPAACAASTVRRPAAPSPPPASPPPPPPRPALRFARRLSLLTGAPSGRAVFSLGLAATSSPSVSPPFRGGSTGDASSPAKQWRCRHCSTSGRHCRVSRAPADVATTSLGXSATPPSSPASPPPRPKFAGTPAPRQPPIPPRRLVAPLHHHLLQHRSSAFHAVPSSAQPLLPAIIVSSSPFVLADRRPVGRPAHRLAAPPPSSSSLRRVPRRPRPRAAAAGCPRRLLAGPGRRRRRRPLVVPGRRGVRPSVEPFSSVVRVRQASRCSPVLASVLGSASSSLVPAASRLCPRIAAEAVPSPFVSVVPVCLRRARSSLAFPRLVAWW

SEQ ID NO: 155374 - protein, 42 aa, Oryza sativa
  Clone ID: PAT_MRT4530_55143C.1.pep
GTGVLRITDGALVPVDCPEGVCANTDTGLGQALWRGLLTLLT

SEQ ID NO: 155375 - protein, 1468 aa, Oryza sativa
  unsure (1)..(1468): unsure at all Xaa locations
  Clone ID: PAT_MRT4530_55144C.1.pep
MPRYKPEYLFGVEGFVQELRTMSFAIGFGTAPFYAQIPHDRHEEKCRVKVTLNSNSEDIPSEMFEAGGRNYIHACQEVARIAIGELRDSYSDQLADTEYRYHPRQPQGSDRGSYLETEGIENDATTRHLVEMLWAMDETRAETMLAVQDREDRNRGKICKLEDKVDRLEKELAALKGEAPPQKARIRLTARKRALFVPRYQLAPKVRVVEKEVTPALADPPVVNMVLTRSNGNGPNNNNNNNNGENPTLAQVLAQQAQLMNMMMQQLQNQQNQLNQGNNNAPPPQNKLAEFLRLHAIEKKLDLLQCTDQEKVSFASHQLHGPASEWWDHFRLNRTTAEPITWLEFTAAFRKTHIPSGVVFLKKKEFRSLTQGSRSVTEYLHEFNRLARYAPEDVRNDEERQEKFLEGLNDELSYPLMTGDYPDFQKLVDKAIRQEDKYNRMEQKKRRIAHFKAQQGNTSTQQQPAKKEQGSKPVVCFNCGDPGHYADKCPKPRRVKVVPAQSNSTAPASKARVNHVAAAEAKDAPDVILGTFFVNSVPATVLFDFGATHSFLSMSFAGNHGMEVEDLRCPLMVSTPSNQALSLQRSPSVRIEIQGVPFLANLILLESKDLDVILGMDWLARYKGVIDCANRKVTLTSNDGRVVTVHALSSEFLRSSLNQIALEEIPIVQEYPDVFPDDLPGMPPKRDIEFRIDLVPGTTPIHXRPYRMAANELAEVKRQVDDLVQKGYIRPSSSPWGSSVIFVEKXKDHTQRMCVDYRALNDVTIKNKYPLPRIDDLFDQLKGATVFSKVDLRSGYHQLRIKEEDIPKTAFTTRYGLFECTVMSFGLTNAPAFFTNLMNKFLGHVISAGGVAVDPSNVESVTNWKQPKTVSEIRSFLGLAGYYRRFIENFSKIAKPMTRLLQKDVKYKWLEECEQSFQELKNRLISAPILILPDPKKGFQVYCDASKLGLGCVLMQDGKVVAYASRQLRPHEKNYPTHDLELAVVVHALKIWRHYLFGTRTELCKELERLNLGIVSRGFVAALEAKPTLIDQVREAQINDPDIQEIKKNMRRGKAIGFLEDEQGTVWLGERICVPDNKDLKDAILKEAHDTLYSIHPGSTKMYQDLKERFWWASMKREIAEYVAVCDVCQRVKAEHQKPAGLLQPLKIPEWKWEEIGMDFITGLPRTSSGHYSIWVIVDRLTKVAHFIPVKTTYSGSRLAELYMARIVCLHGVPKKIVSDRGSQFTSNFWKKLQEEMGSKLNFSTAYHPQTDGQTESYQASLQMAPYEALYGRKCRTPLLWDQTGARQVFGTDILREAEEKSRHKSYADNRHRDLSFEEGDYVYLRVTPLRGVHRFHTKGKLAPRFVGPYKIVSRRGEVAYQLELPQSLAGVHNVFHVSQLKKCLRVPTEEANLEQIEVQEDLTYIEKPVRILEIDERRTRNRVIRFCKVQWSNHSEEESTWEREDELKSAHPHLFASSSESRGRDSV

SEQ ID NO: 155376 - protein, 105 aa, Oryza sativa
  Clone ID: PAT_MRT4530_55145C.1.pep
VATGGLAHALPRPVKTKASRHSSQAGGVVDKNDRSDTGRISNGQPRSHVAPVSAGSGGRCGPKPPAEPAKGGLRGLPVRSHELRQYRWDLPVHLAMQSLRSSWTA

SEQ ID NO: 155377 - protein, 57 aa, Oryza sativa
  Clone ID: PAT_MRT4530_55146C.1.pep
TSTYGTGEYLNQSSHTHYHFRGEPTSNTLRYIEAIYNKTYINAQHRHSNTRPQTDTP

SEQ ID NO: 155378 - protein, 272 aa, Oryza sativa
  Clone ID: PAT_MRT4530_55147C.1.pep
MVAAGDHRRGGAAAERGEGKGERRRRSTAHPEATAATEEAAGAEGGGGAARVDGDDGAPAVGDRNGEVDEVGEDAAKPKEAAPRMQIQICINEIHGFKLISYAPGMDQSEHHRRFAFAATDWCYRLHSWPIMPLLLSVYVFTDRSPRPPPTGVSACMAGLLCRRCWASTSSPTGCLVRRRLVNEDIPSIHSSPNEATLDIAGPITRSRAKQLEKEIHSQVNANLMLNNQITLNEPMLLSTCFNVLRNDGVHEQAWDDDGFCPPNICKEPGRA

SEQ ID NO: 155379 - protein, 40 aa, Oryza sativa
  Clone ID: PAT_MRT4530_55148C.1.pep
KHMFNCLKLSNSFIINSITGHNFDPNYDTTKNTYSETRKG

SEQ ID NO: 155380 - protein, 1751 aa, Oryza sativa
  unsure (1)..(1751): unsure at all Xaa locations
  Clone ID: PAT_MRT4530_55149C.1.pep
TPQPPPEVTFPLTSWGPSAIPTFPESPFSQEKNLNSSKASKATPGLEWYIPGLEIDLYSRXGCSGWLGLSSMMPRYKPEYLFGVEGFVQELRTMSFAIGFGTAPFYAQIPHDRHEEKCRVKVTLNSNSEDISSVMFEAGGGNYIHACQEVARIAIGELRDRYSDQLADTEYRYHPRQPQGSDRGSYLETEGIENDATTRHLVEMLWAMDKTRAETVLAAQDREDRNRGKICKLEDKVDRLEKELAALKGEAPPQKARIRLTARKRALFVPRYQLALKMVLTRSNGNGPNNNNNNNNNGENPTLAQVLAQQAQLMNMMMQQLQNQQNQGNNHAPPQNKLAEFLRVRPPTFSSTTNHVEAGDWLHAIEKKLDLLQCTDXEKVSFASHQLHGPASEWWDHFRLNRTTAEPITWLEFTAAFRKTHIPSGVVSLKKKEFRSLTQGSRSVTEYLHEFNRLARYAPEDVRTDEERXERFLEGLNDELSYPLMTGDYHDFQKLVDKAIRQEDKYNRMEQKKRRIAHFKAQQGNSQRPRLTLGPQSMPQGVSSSVVRLQRQFFNNNAGNNIRNQAPRPVAASTQQQPAKKEQGSKPGVCFNCGDPGHYADKCPKPRRVKVVPAQSNSTAPASKARVNHVAAAEAQGAPDVILGTFLVNLVPATLLFDSGAIHSFLSMSFAGNHGMEVEDLRRPLMVSTPSNQALSLQHSPSVRIEIQGVPFLANLILLESKDLDVILGMDWLARYKGVIDCANRKVILTNNDGRVVTVHALSSESLRSSLNQITLKEIPIVREYPDVFPDDLPGMPSKRDIEFRIDLVPGTTPIHKRPYRMAANELVEVKRQVDDLLQKGYIRPSSSPWRAPVIFVEKKDHTQRMCVDYRALNDVTIKNKYPLPRIDDLFDQLKGATVFSKIDLRSGYHQLRIKEEDIPKTAFTTRYGLFECTVMSFGLTNAPAFFMNLMNKVFMEYLDKFMVVFIDDILIYSRTKEEHEEHLRLALEKLREHQLYAKFSKCEFWLSEVNFLGHVISAGGVAVDPSNVESVTNWKQPKTVSEIHSFLGLAGYYRRFIENFSKIAKPMTRLLQKDVKYKWSEECEQSFQELKNRLISAPILILPDPKKGFQVYCDASKLGLGCVLMQDGKVVAYASRQLRPHEKNYPTHDLELAAVVHALKIWRHYLFGTRTEVYTDHKSLKYIFTQPDLNMRQRRWLELIKDYDMGIYYHPGKANVVADALSRKGYCNATEGRQLPLELCKEFERLNLGMVSRGFVAALEAKPTLIDEVREAQINDPDIQEIKKNMRRGKAIGFLEDEQGTVWLGERICVPDNKDLKDAILKEAHDTLYSIHPGSTKMYQDLKERFWWASMKREIAEYVAVCDVCQRVKAEHQKPAGLLQPLKIPEWKWEEIGMDFITGLPRTSSGHDSIWVIVDRLTKVAHFIPVKTTYSGSRLAELYMARIVCLHGVPKKIVSDRGSQFTSKFWKKLQEEMGSKLNFSTAYHPQTDGQTERVNQILEDMLRACALDFGGSWDKNLPYAEFSYNNSYQASLQMAPYEALYGRKCRTPLLWDQTGERQVFGTDILREAEEKVKIIQERLRVAQSRHKSYADNRRRELSFDEGDYVYLRVTPLRGVHRFHTKGKLAPHFVGPYKIVSRRGEVAYQLELPXSLAGVHNVFHVSQLKKCLRVPTEETNLEQIEVQEDLTYLEKPIRILEIDERRTRNRVIRFCKVQWSNHSEEESTWEREDELKSAHPHLFASFSESRGRDSV

SEQ ID NO: 155381 - protein, 91 aa, Oryza sativa
  Clone ID: PAT_MRT4530_5514C.1.pep
PAPRDLAHQQSAHRAGLDQGIVDVASLQHLVVAVHIRLVCSVPHLINAGRHGMCSLSLYSHRCMYMIVLSSCGWQHTYIFSLALDDPARVG

SEQ ID NO: 155382 - protein, 550 aa, Oryza sativa
  unsure (1)..(550): unsure at all Xaa locations
  Clone ID: PAT_MRT4530_55150C.1.pep
MGIYRSVYHLTCVRLWLGGSRTVVRSGYTTLIPGRYHSSPLLVFTAVRLSCLQPYHSCSSFSPPVFATSFIADSMAPRKPTKAGSSGEDPGSLSDGWSCYLGKFLVKEADLAELVLSSVLAERQVSCAGEDVVPSTGDGRTVVFAGFFTAGLRLPCDNFXELFATLFMVCVGTKDDNTLAGPKKTVFGXCNFMLRPKRSDAWPVLVSMAKWDRNSMQKWFYIANPYFSKDDSAEDDKAKWLRFRRLSIAMIIKPNVDVDGVLEARLILLRKVAHRLSTRDLCEKFCMLQISPLARDWGITTAEGEESNGQANRVYDGTLASRANPARVDHDVGTSKKWKRDVAKRSQAGAAAQRKKKGVVQVAGGFSDSETSSDGMPTSSGPRHPPPQKRLLSPLPASDADAPTGGSTSANAVASDQALQLATAKASGAVSDMTLTAPQVVSDFTFRPEIGSFVEGVCQIISVSGGSSITEHNEFGVGRQVAYDLRPAFSARRTVSRPGVASSGFAALPSTPSNPSLSPRTAGPPSTPTTRAAPPPSSAPTAFFVVAVDL

SEQ ID NO: 155383 - protein, 48 aa, Oryza sativa
  unsure (1)..(48): unsure at all Xaa locations
  Clone ID: PAT_MRT4530_55151C.1.pep
GXXLDGLPIAQELIMHSTLSRPPAYLNGAFWTVRYSMFRRTDRCFVAY

SEQ ID NO: 155384 - protein, 47 aa, Oryza sativa
  Clone ID: PAT_MRT4530_55152C.1.pep
LHTNWFSSWDRSPQRLVASQTAESEFRSNFARSRILPPPTLVHRGRH

SEQ ID NO: 155385 - protein, 132 aa, Oryza sativa
  unsure (1)..(132): unsure at all Xaa locations
  Clone ID: PAT_MRT4530_55153C.1.pep
VPHIIHILRLGVRATAGYRSVARCSSFFLIRQGLVSTHGYKYVHXGHYNLSISRSIQLLLAHRHPLSRGLXLSSSGIRHPMWGCIGSVRYPAKGXVLRFAGPGESIGHVGVVQGCIASISWIALVWLIYLPT

SEQ ID NO: 155386 - protein, 60 aa, Oryza sativa
  Clone ID: PAT_MRT4530_55154C.1.pep
MKIEGFTPKLTTPGRSHWAKLGDEGQRVRHQAHHLAKSPLRAKAIRRSKRPSPELEDAFS

SEQ ID NO: 155387 - protein, 1187 aa, Oryza sativa
  Clone ID: PAT_MRT4530_55155C.1.pep
EGCINPDNTNETARQAIAPDSFSPVVSEELVSSDDEIDFSVEPEFYDPDLGDVGQRWVSKQRKGRTSDAVLSCPAVLALTLCLDCQRLEDVCKSVQCNVRSQLQGTRLNRIYGRGSLEGGIPPALAIGCSKLESLSLDSNHLRGEIPGEIAALRNLAYLNLRANNLSGEIPPSLGNLSSLYFLNLGFNMLFGEIPASLGNLSQLNALGIQHNQLSGGIPSSLGHLNNLTSLLLQANGLIGSIPPNICNISFLKHFSVENNELSGMLPPNVFNTLPMLETFDAGENMFDGHIPSSLVNASKLSRFQIAENHFSGVIPPELGGLQGLKWFILTENDLEAKESNDWKFMKALTNCSQLEVLELEANKFSGTLPSVISNLSASLTILTLASNKIVGNMPREIGKLINLGALVAHNNFLTGSPPSSLGMLQNLRILWLDNNYFSGPFPRVICNLTHMDSLDLGRNNFSGSIPITVGNMVSLSSLRFSFNNFIGTIPTSLFNITTLSIYLDISYNHLDGSIPPEVGNLPNLVYLDARYNQLSGEIPITFEKCQLLQILYLQNNSFIGNIPSSFSEMKGLEILDLSSNNFSGQIPKFFGHFLTLYDLNLSYNNFDGEVPVFGVFANATGISVQGNNKLCGGIPDLHLPTCSLKISKRRHRVPGLAIVVPLVATTICILSLLLFFHAWYKNRLTKSPSTMSMRAHQLVSYQQLVHATDGFSTTNLLGTGSYGSVYRGKLFDETGENENLIAVKVLKLQTPGALKSFTAECEAMKNLRHRNLVKIVTACSSMDFNGNDFKAIVFDFMPNGCLEEWLHPQIDNQLEERHLNLVHRVGILFDVACALDYLHFHGTTPVVHCDLKPSNVLLDADMVAHVGDFGLAKILSSQPSTSSMGFRGTIGYAPPEYGAGNMVSTHGDIYSYGILVLEMITGRRPTDNTCEQGFSLRKCVEMALNNRAMDILDVELVTELENAPPATSMDGPSERVNSLISLLKLGLLCSGEMPLSRMSTKDIIKELLADTKLSVRPKTSQPQEREESRRKKAGEAEARAHGGGEEGFMEPEKSKEAASQPMEADAGGPVDPRELVSSDDEIDYSVEPEFYDPDLDDVDERHETYVNQYRAMFVRNCKVKTDQILREGKGKRKNRKGKAADSSTTSEGEKKGAVYHPVCCEVCSTEVGVFDEDEVYHFFNVIPSNS

SEQ ID NO: 155388 - protein, 87 aa, Oryza sativa
  Clone ID: PAT_MRT4530_55156C.1.pep
TTSKQTGTFGQPSKCWKTKQNISPYRAHEKEQSGPTLHKGVFSLTGPHTMWGRGYMLYKMETGPRELFKNPVAKTLKPCWQCCWKAQ

SEQ ID NO: 155389 - protein, 127 aa, Oryza sativa
  Clone ID: PAT_MRT4530_55157C.1.pep
MEPEKSKEAASQPMEADAGGPVDPRELVSSDDEIDYSVEPEFYDPDLDDVDERWVSKQRKGRTSDAVLSCPACFTTLCLDCQRHETYVNQYRAMFVRNCKVKTDQILREGKGKRKNRKGKAADSSTT

SEQ ID NO: 155390 - protein, 135 aa, Oryza sativa
  Clone ID: PAT_MRT4530_55158C.1.pep
MAMAVVRAAAVDGDGDGCLWRRFASSPSSSSFVADCCVAHATLVERGAALADRLEVARSLLGENGYTITRCRCGPVWQILRRNLVAETLHPSRVRLAGRPREDTTDQQQLVFPGNNCRAEQDTSRRKISSVIFFF

SEQ ID NO: 155391 - protein, 41 aa, Oryza sativa
  Clone ID: PAT_MRT4530_55159C.1.pep
KYCEEVIRLAPPGVHYRMLKQYSHVFWSPKWMYKRPLGDRR

SEQ ID NO: 155392 - protein, 98 aa, Oryza sativa
  Clone ID: PAT_MRT4530_5515C.1.pep
YHHVRVAVATTASTISSFPAAPRRHAAADALSSDDFYAGEPEKNQWQMRSPWARPVTPSKRCTALRRRPATVPPSAGTPPRLAGLSMPSVSLCCSSPS

SEQ ID NO: 155393 - protein, 89 aa, Oryza sativa
  Clone ID: PAT_MRT4530_55160C.1.pep
PGAWCIRIRLQCLPSFTHTMRTIREVVNTIAVRVPFTTSYCTVGSWFIIVVKLLPGLGKVSISSHFHEAHCCDSCHPNTLRMIHHKTCS

SEQ ID NO: 155394 - protein, 241 aa, Oryza sativa
  Clone ID: PAT_MRT4530_55161C.1.pep
MAAAARHRGTVKWFNDTKGFGFISPDDGSEDLFVHQSSIKADGFRSLAEGEQVEFAISESEDGRTKAVDVTGPDGSFVKGGAGGGGGGGGGFGSRGGGGSGGGGRSYGGSWGGGRRSGGGGPGGGCFKCGESGHMARDCFNGGGVGVGGGGGGGGGAGGGCFKCGEMGHMARDCFNSGGGGGGGGGGGGGGACYNCGETGHLARDCYNGGGGGGGGRFGGGGDRSCYNCGEAGHIARDCHK

SEQ ID NO: 155395 - protein, 218 aa, Oryza sativa
  Clone ID: PAT_MRT4530_55162C.1.pep
MAGICKTIIDHLARHRHLRRDMKSDQHDSNEVRDDVLTKIKFALPYFKGNYDPHAYIYWELAVGREFKKHGLAEKQKEMHNHGKDERNMNEPPIPLFTIQIEAPPSSEQIIKGKLNGAETNQVEQPLVEPTAETPLSQVGLFVVPCDKDELSDNDSHISIPQLVNEHAIPTVNSYCADFMHVIHIAIEIEERIRLICTGNINNPWRGVSIAKVQHNNV

SEQ ID NO: 155396 - protein, 180 aa, Oryza sativa
  Clone ID: PAT_MRT4530_55163C.1.pep
PVLSRRAPAPRSSRRGPSAARSRTTATTTTAGILPPDVLSGEGLDNRDAGFPPSQRSASKITGDRAAVNPAAADPPMPVPGLHHHPNIPAANRQLPPAARLLINCGIFLVATAGSSIVFHTAGDPSAIDGPAYALVAFFFVLLGLWFVLLGPVAGQFPGATRVAVAIAKALKGYLLGGGN

SEQ ID NO: 155397 - protein, 396 aa, Oryza sativa
  Clone ID: PAT_MRT4530_55164C.1.pep
AAMARSCAAKSIIFFEISTRPSLIRGLTRHSGGWGRTPGTGAEMGRREGICLRTWSDDEGSTEDTALGIGAASGNRGRGAGIGAASGNRDVARRVERAEQQEAAQAQMARWRRDCFRAGRRIAINLRIKASKIKAISSSPASSVSHLFLSLCPSRVADHSPPIRHNPFGELKRLTQTSTVVAYQECFLALTSRIPDPLTESQQVQLFIAGLQDDISIDVELQKPDDLQDAMRLPRAYEWKANKPGAPPRRVLKRTEFRRHLLVPVHLCVPKGTQAPGGGPSIRDAIDDDIEIRLAGKKGQLCGGDKFHGPVTGGGGAPAFPGQIGWGDTDQAGLGRLGRGGSLLEGRLPRTTSRQSAQSLVPSTGLAMVLLWEVHGERTGPKFPRRQRRRLGVKPG

SEQ ID NO: 155398 - protein, 549 aa, Oryza sativa
  unsure (1)..(549): unsure at all Xaa locations
  Clone ID: PAT_MRT4530_55165C.1.pep
GRFGTRHLGIHYHPGKANVVADALSGKGYCNATEGRQLSLELCKEFERLNLGIISRGFVAALEAKPTLIDQVREAQINDPDIHEIKKNMRRGKAIGFLEDKQGTVWLGERICVPDNKDLKDAILKEAHDTLYSIHPGSTKMYQDLKEIFWWVSMKREIAEYVAVCNVCQRVKAEHQKPAGLLQPLKIPEWKWEEIGMDFITGLPRTSSGHDSIWVIVDRLTKVAHFIPVRTTYSGSRLAELYMTSIVCLHGVPKKIVSDRGSQFTSKFWKKLQEEMGSKLNFSTAYHPQTDGQTERVNQILEDMLRACALDFGGSWDKNLPYAEFSYNNSYQASLQMAPYEALYGRKCRTPLLWDQTGERQVFGTDILREAEEKVKIIQERLRVAQSRHKSYADNRRRDLSFEEGDHVYLRVTPLRGVHRFHNKGKLAPRFVGPYKIVSRRGDVAYQLELPQSLAGVHNVFHVSQXKKCLRVPTEEANLEQIEVQEDLTYVERPIRILETDERRTRNRVIRFCKVQWSNHSEEESTREREDELNAGFEFGSDSFFRSKP

SEQ ID NO: 155399 - protein, 270 aa, Oryza sativa
  unsure (1)..(270): unsure at all Xaa locations
  Clone ID: PAT_MRT4530_55166C.1.pep
MGSGSIPPASLCMVPRPGRAPSYCSFFMNAVFEEDFSRSIAAGGLTENRMEEMRMTTIPTSEVAIGCMSSFKQKSEATVRVTNKDQINWHASIPEGEFWTCTGVKQISHASCFSSTRFWHAWWDRLEVRSPLMDGKPPASSSSASPGSVKEKVQQLDQSDVNEGNVMTITLDKLTPDQKKEFEAMMQXARNQFLNSFMQTRKGTVVQKYQVTVVADVPGTSSSKDGGVKQAPNGSAQPSNKGAADDYQGNQGDNSQGAQGVQGDGFQGVQ

SEQ ID NO: 155400 - protein, 1458 aa, Oryza sativa
  unsure (1)..(1458): unsure at all Xaa locations
  Clone ID: PAT_MRT4530_55167C.1.pep
MPRYKPEYLFGVEGFVQELRTMSFAIGFGTAPFYAQIPHDRHEEKCGVKVTLNSNSEDIPSVMFEAGGRNYIHTCQEVARIAIGELRDRYSDQLADTEYRYHPRQPQGSDRGSYLKTEGIENDATTRHLVEMLWAMDESRVETVLAAQDREDRNRGKICKLEDKVDRLEKELAALKGEAPPQKARVRLTARKRALFVHRYQLAPKWWMMVLTRSNGNGLNNNNNNNNNNGENPTLAQVLAQQAHLMNMMMQQLQNQQNQGNNHAPPQNKLAEFLRVRPPTFSSTTNPVEAGDWLHAIEKKLDLLQCTDQEKVSFASHQLHGPASEWWDHSRLNRITAEPITWLEFTAAFRKTHIPSGVVSLKKKEFRSLTQGSRSVTEYLHEFNRLARYALEDVRTDEERQEKFLEGLNDELSYPLMTGDYPDFQKLVDKAIRQEDKYNRMEQKKRRIAQFKTQQGNNQRPRLTLGPQSMPQGGSSSVVRPQRQFFNNNAGNNIRNQAPRPVAAPTQQQPAKREQGSKPVQLYRTSAKGPCXNHVAATEAQGAPDVILGTFLVNLVPATVLFDSGATHSFLSMSFAGNHVMEVEDLRRPLMVNTPSNQALSLQRSPSVRIEILRSLFLANLILLESKDLDVILGMDWLARYKGVIDCANRKVTLTSDDGRVVTIHALSSESLRSRLNQITLEEIPIVREYPDVFPDDLPGMPPKRDIEFRIDLVPGTTPIHKRPYRMAANELAEVKRQVDDLLQKGYIRPSSSPWGAPVIFVEKKDHTQRMCVDYRALNDMTIKNKYPLPRIDDLFDQLKGATVFSKIDLRSGYHQLRIKEEDIPKTAFTTRYGLFECTVMSFGLTNAPAFFMNLMNKVFMEYLDKFVVVFIDDILIYSRTKEEHIEHLRLALEKLREHQLYAKFSKCEFWLSEVKFLGHVISAGGVAVDPSNVESVTNWKQPKTVSEIRSFLGLAGYYRRFIENFSKIAKPMTRLLQKDVKYKWSEECEQSFQELKNRLISAPILILPDPKKGFQVYCDASKLGLGCVLMQDGKVVAYASRQLRPHEKNYPTHDLELAAVVHALKIWHHYLFGTRTEVYTDHKSLNRGFVAALEAKPTLIDQVREAQINDPDIQEIKKNMRRGKAIGFLEDEQGTVWLGERICVPDNKDLKDAILKEAHDTLYSIHPGSTKIYQDLKERFWWASMKREIAEYVAVCDVCQRIKAEHQKPAGLLQPLKIPEWKWEEIGMDFITGLPRTSSGHDSIWVIVDRLTKVAHFIPVKTTYSGSRLAELYMARIVCLHGVPKKIVFGTDILREAEEKVKIIQERLRVAQSRHKSYADNRRRDLSFDAGDYVYLHVTPLRGVHRFHTKGKLAPRFVGPYKIVSRRGEVAYQLELPQXLAGVHNVFHVSQLKKCLRVPTEEANLEQIEVQEDLTYVEKPIRILEIDERRTRNRVIRFCKVQWSNHSEEESTWERER

SEQ ID NO: 155401 - protein, 52 aa, Oryza sativa
  Clone ID: PAT_MRT4530_55168C.1.pep
MELKQCHLGTEKTREWCSFLRGMRKQLKKMSKHEEVAHLEEEVVPSNWQDRW

SEQ ID NO: 155402 - protein, 196 aa, Oryza sativa
  Clone ID: PAT_MRT4530_55169C.1.pep
MSRVSTSWGFVYSRVNKEIRGGARTGSTGVGPTRQPHGPRWTGCTRLTPAGAVGPMRQPHPRARAADGRAPHGSRGAHPKAATPAQPTGGGALVPRWSPPATTGAAERRPREGREGGNESAVHGSPRVDGDGGNGDRSGGRRRRGSGRRGRRRSGGRRPKRRGGRGRRGCGEPEEGDAEAGEGGNTSRRRRRPAGR

SEQ ID NO: 155403 - protein, 135 aa, Oryza sativa
  Clone ID: PAT_MRT4530_5516C.1.pep
KGNNRTNVIQGRSPGENHLWGLSLDHGRRIRCAAATRSCTRGSTNSATFRKVFLGFLRHDDAGVYTLLADGRILLKFLTTTLIAQGVESFHGGIRGSLIGPKNLLGRDDAEVWAMLVVDGVFLLLLSTRIGAPTL

SEQ ID NO: 155404 - protein, 542 aa, Oryza sativa
  unsure (1)..(542): unsure at all Xaa locations
  Clone ID: PAT_MRT4530_55170C.1.pep
LQLRSTTLLKXGNNSKAEYNHRTXQATPTMQTCKGNTRTRKATLQAQPLPTLACGAGPTRQRQSPPWTESTAAAGHVGAHPTLRIGRGRSDGRGRPSGTTGQARPQAAATAEPRPPATTPAAGGDGARGGERVEREAVLTERMGRRDEDEEGDGRGATGGTKVAVARVHRGAGGSGVEWRSGVVAGLAGGAAKLVVVAARLEVDGNGGKRLPKAAKRRRCSDRGVHHHHHHSSSPTIPNPSSSDSPPVAASVCSPARRAPAGECTARGRLVDAISGVLRGDLCCARSRSSLAVDRPVQIRVVYTVRGCSSIYGSDLGLMENRVGESSATAVDGGGGAKDSGSFECNICLELAQDPVVTLCGHLFCWPCLYEWLHVHAHSRECPVCKAGLEEEKLVPLYGRGKASTDPRSRSVAGVQIPSRPAGQRPATASQPDHHHDHLPHHDPWFMGGAGAPVAGGRWGNYTFSAAIGGLFPLLSFQVHGFPQAAAYGPAAGFPYGYGHSFHGWHGHGFPHQAPQGQHVDVFLKVLLVLVGVLVIASLIVF

SEQ ID NO: 155405 - protein, 48 aa, Oryza sativa
  Clone ID: PAT_MRT4530_55171C.1.pep
KKFFFLRNRSKNFMAIIQVDPFATKPSYTTNPSRNSTTHQISNFHLFD

SEQ ID NO: 155406 - protein, 282 aa, Oryza sativa
  unsure (1)..(282): unsure at all Xaa locations
  Clone ID: PAT_MRT4530_55172C.1.pep
MTSPPAAAARRLGRRTLAGERRRFGTNGGHQRVADGTANSPATKATAEDQRTATATRLKWRRSSAXMTATMLRXLRRWRSGRRGRRRLGEHDGGLPERRRXLERRRRTAGATAATAALGHTALGRFRRREAKARVAAGRGDTGGPFKGARRRRRRPTAAGDEMESSSSQREKLIRFELESIDFQTDLADVSKGEKVEEISGIISPLSIRPEKEMSGRIWKGTAAARNYGFGRRRRDEDDDPDRWGPPVSGRERRAAARTGPSGPRRERAVLGRLSAQSQKKT

SEQ ID NO: 155407 - protein, 145 aa, Oryza sativa
  unsure (1)..(145): unsure at all Xaa locations
  Clone ID: PAT_MRT4530_55173C.1.pep
FQTNVRKKDSLLAELVTDHRSLPSENDSIGSPFVLSKVMYLANINDSLSASAVPVGARCDDXQPTPVSKSFFDRSIGLPASVXSLRPPLLIKRHNYAAGLILRSKNFAVSLAELISAAGKPNNSGEASRFFTGFGQMSCQMQNGM

SEQ ID NO: 155408 - protein, 424 aa, Oryza sativa
  Clone ID: PAT_MRT4530_55174C.1.pep
MKASDWLRTVEKKLGLIQCTDQERVGFATHQLVGPTSEWWDSYEASRPEGHTITWDEFSSVFKRSHVPAGMITLRKREFRYLKQEDLTVTEYLHEFHRLAHYAPEDVETDEDKQEKFLQGLKDEVAVQLLLEDYEDFEKLVDTSHTTRKDHSDQACDVNSIHQDIDDSINEGTQNDNPSNFDSEKDSNGDSNYGTTDANVSKDFQPPIPTPSQNDRSQTNSSVKKTLICYNCKEPGHFSTDCPQPKRNLRHHSGHYARRRQVTRLVVTGANAIPVSLKGSRLKYHIVTRSIHNSRSEEYLVDKGQKMIDRRYRKRCLLPGKEVGRNVIDKRNRERTHQVDNLCEVDAEDMNHEKFWNGSIIKLPQPSLSNLKGAPWFESGEEKIPSAIGGQAKQFRVVKFCWKFVKTQQKKSDKKRRPPNLSSC

SEQ ID NO: 155409 - protein, 643 aa, Oryza sativa
  Clone ID: PAT_MRT4530_55175C.1.pep
MPGPKGTITIQGNAKLAVQCDKRSLDMVEQTPSPPATTEPPKKPSDIPGVPREVIEHKLMVRPDAKPVKQRLRRFAPDRKQAIREELDKLLKAGFIREVLHPEWLANLVMVRKANGKWRMCVDFTDLNKACPKDHFPLPRIDNWWTQQPAKCTFGVPSGKLLGFLVSGRGIEANPEKIKAIENMKSPTRLKEVQKLTGCMAALSRFVARMGERGQPFFALLKKQDISIKSQVLADFVADWTMPDNKSDNQVDNETWTMAFDGALNSQGVGAGFILTSPSGDQFKHAIHLNFRATNNTAEYEGLLAGIRAAAALGVKRLIVKGDSELVVNQVHKDYKCSNPELSKYLAEVRKLEKRFDGIEVRHIYRQDNIEPDDLARRASRRQPLEPGTFLDILTKPSVKEVSGEVSSATPDISSEATKAERAVANIETTDDWRTPLIKFINSEELPEDDTEAEKITRKEKIYCMVGNDLYKKVPNRADNAIKFIKEIFCRYGLPHPIITDNGSQFISADFQDYYIGLGVKICFASVSHPQSNGQVERANSIVLQGIKTRVYDRLMSHDKKWVEELPPPRNLRDLRLGTPRADKALSDPKEVVAMPVSTGRFWSTSSCGTYGSSASAGTITGNSGCPRCWTSSTSTCALLAAP

SEQ ID NO: 155410 - protein, 1253 aa, Oryza sativa
  unsure (1)..(1253): unsure at all Xaa locations
  Clone ID: PAT_MRT4530_55176C.1.pep
MKWSEQKIEFSEEDHPKTAVTPGRYPIVVEPTIRNIKVGRVLIDGGSSINLFFASTLDAMGIPRSELTPTDQPFHGITLQSSSKPLGKITMPMTFGQANNFRTEQITFDVAEFDTTYNAIIGRTALAKFMATSHYAYQVLKMPGPKGTITIQGNAKLAVQCDKRSLDMVEHTPNPPTSAEPPKKVSKTNMTPKPDGAIKVVPLSSANPDKTELALITFLRDNADVFAWQPSDMPGVPRXRFAPDRKQAIREELDKLLKASFIREVLHPEWLANPVMVRKANGKWRLCVDFTDLNKACPKDHFPLPRIDQLVNSTAGCELLSFLDAYSGYHQISMAKEDEEKTSFITPFGVFCYVKMPFGLITAGNTFKRTVQGALSDQLGNNVEAYVDDIVVKTKTSDSLIDDLREMFDNLRRYRLMLNPEKCTFRVPSGKLLGFLVSKRGIDANPEKIKTVENMKLPTRLKEVQKLTGRMAALSRFVARMGERGQPFFALLKIQDKFVWTQEAEEAFIALKRYLSNPPVLVAPQPNEELFLYIAATPYSVSIVIVVEREKVQRAVYYVSEALHDAKTRYPQIQKLLYVVIMTSRKLCHYFQAHRVTVVSSFPLAIKSQVLADFVADWTVLEDRSDSQTDSETWTMAFDGALNSQGAGAGFILTSPSGDQFKYAIHLNFRATNNTAEYEGLLAGIRAAAALGVKRLIMKGDSELVSNQVHKDYKCSSPELSKYLAEVRKLEKRFDGIEPSVKEANDEDSIVVPDISSGATEAERAVADIETTDDWRTPLIKFLSSDELSEDDAEAEKITRQAKIYYMIDNDLYKKALNGLLLKCVSSDDGKHLLLDIHEGICGLHAAGRTLVGKAFRQGFLWPTALKDACDMVQRCEAFQFHSXTHKATSASAPDYPSYLAVLVLGVRHTRTIPTRTGWLQVPIXVAIDKFTKWIEATPTGEIKADNTVKFIKGIFCRYGLPHCIITDNGSQFISADFQDYYIGLGVKICFASVKITIKVFLPDDPLPRRHLALKPILMSLYAVLTRPLRNLRELRLGTPRADKALSDHVETNDHAIPKSETDTSGYLFRFHPAQLIVEAEEIKKWLYPNVGLTKIGENAKKCDRIGVQMKQGKAVEIQDEKKKLGRRRKKTAKNVILNRNHAAQDRFRVSTSCFPLHGPATREGTVVLQLLQGRIGGGGFVEVHHCRKIAGEQDKMGKLGFFYRSGEEEGCLKAGKFCSKRTSKWIPKTPLNKRTTDGANSKERREMAAGNF

SEQ ID NO: 155411 - protein, 1203 aa, Oryza sativa
  Clone ID: PAT_MRT4530_55177C.1.pep
MDISRTNEGYTSYGPVVEMSWHRASVLLLGAHSCLPVPEVPAVGGVGSVLLFMAKMGWELCHVFRPYTVVELATRRITTTRRLFEVVDRCAHADDALRRKNDKLKTGGEKKPTNDAPEPSKKKSGNSGKRKAQAEVLASEYERPPKHPDPQGSDTKRIWCPIHKSNIHSLEDCLIFKKSLEKQLALEKGKCISPRCGRWMLGDPQKGAAPKMKWSEQKIEFSDEDHPKAAVIPGRYPIVVEPTIRNIKVARVLVDRGSSINLLFASTLDAMGIPRSELTPTDQPFHGITPQSSSKPLGKITLPVTFGRASNFRTEQITFDVAEFDTAYNAIIGRTALAKFMAASHYAYQVLKMPGPKGTITIQGNAKLAVQCDKRSLDMVEHTPSPPATAEPPKKPSDMPGVPREVIEHKLMVRPDAKPVKQKLWRFAPDRKQAIREELDKLLKAGFIREVLHPEWLANPVMVRKANGRWRMCLNKACPKDHFPLPRIDQLVDSTAGCELLNFLDAYSGYHQISMAKEDEEKTAFITPFSVFCYVKMPFGLITARNTFQRMVQGALNDQLGNNVEAYVDDIVVKTKTGNSLIDDLWETFDNLRRYRLMLNPEKCTFRVPSGKLLGFLVSGRGIEANPEKIKAIENMKSPTRLKEEAEEAFIALKRNLSNPPVLVSPQPNEELFLYIAATPYSVSTVIVVEREKVQRPVYYVSEALHDAKTRYLQIQKLLYAVIMTSRKLRHYFQAHRVTVVSSFPLGEVVRNKDIVGRIAKWVVELSQFDVHFLPRTAIKSQVLADFVADWNMPENRLDSQTDNKTWTMAFDGVLNSQGAGAGFILTSPSGDQFKHAIHLNFRATNNTAEYEGLLAGIRAAAALGVKRLIVKGDSELVANQVHKDYKCSCPELSKYLAEVRKLEKRFDGIEPSVKKANDEDSPIGPDISSGATEVERAIANIETTDDWWTPLIKFISSDKLPEDDTEAEKITRQAKIYCMIGDDLYKKAPNGVLLNCVSSDDGRHFLLDIHERICESHAAGQTLVRKAFRQGFFWPTSLKDVCDMVQRCKACQFHSKHTKLPAQALQTIPLTWLFSCWGLDILGPFPRGQGGYRFLFVAIDKFTKWIEVTPTREIKAENAIKFIKGIFCRYGLPHRIITDNGSQFISADFQDYCIRLGVRICFASVSHPQSNGQVERANDIVLQGIKTRVYDRLMSHDKKWVE

SEQ ID NO: 155412 - protein, 37 aa, Oryza sativa
  Clone ID: PAT_MRT4530_55178C.1.pep
ISPPSSRFFGVVRIPMYIHYYFPRSRWSITSGSSREP

SEQ ID NO: 155413 - protein, 72 aa, Oryza sativa
  Clone ID: PAT_MRT4530_55179C.1.pep
FPCVGFSTPPGVGFSHVGFFPFLFFLPPTPGLSWHFKVGPLPILADFYSLKKKKKKKKKKKKKKKRKKKKNN

SEQ ID NO: 155414 - protein, 57 aa, Oryza sativa
  Clone ID: PAT_MRT4530_5517C.1.pep
SIGSSMIAARFDGLVGQPRLLLFFLIRSRFRSCVLVEANRSDRPVNDDSQNPTTQSE

SEQ ID NO: 155415 - protein, 459 aa, Oryza sativa
  Clone ID: PAT_MRT4530_55180C.1.pep
MPSPEGGDPAAARRVAVELELELPLGGAPPYPGAAPFDLEAAVCSHGLFMMAPNRWDPASRALVRPLRLASDRAASVAVRVSRHPARPSDALLVSVLGAPDDDALSPLDQTSILEQVRRMLRLDEEDGRAVAEFQAMHAVAREVGFGRIFRSPTLFEDMIKCILLCNCQWTRTLSMSTALCELQLELRSSSSTENFQSRTPPIRECKRKRSNKRNVRVKLETKFNEDKMFHKRASTISSVQKELDNIYGKYAPFQFLAYWCELWGFYNKQFGIISDMEPINYRLFTAKCSAMFGDGISRWLKNLRRTMSIIQRETGRLPVRAGGGGDDGIGGVGGGGGHGLRSVGWGHRREESGEFERGFVRSGTRRRKKKKEERRARRVWWGKTEKEWGRETESGEGLEWSRRRKRRGRRRERRAEEDLAFELWCGVWPPFFLLLHLSVPNECAVYEPLLSYQGRQQR

SEQ ID NO: 155416 - protein, 50 aa, Oryza sativa
  Clone ID: PAT_MRT4530_55181C.1.pep
MDSTKIPKSFVVVMPRHRRYRRCRERQHHGNAGIHNIAAASGSCCHAAPH

SEQ ID NO: 155417 - protein, 130 aa, Oryza sativa
  Clone ID: PAT_MRT4530_55182C.1.pep
MRQIEKKYVKYDDSLSSRHTSTLALPPPSGVPDQPCSITTSPSSSARGMEVERRYLLDLVAEARSRGGGPPTAGCRSFVATPPPAPRSNVAAARRSSARDPAARARGRAAAARTSPPKTLARPLPSPVVR

SEQ ID NO: 155418 - protein, 191 aa, Oryza sativa
  unsure (1)..(191): unsure at all Xaa locations
  Clone ID: PAT_MRT4530_55183C.1.pep
MSPHAASQLPSQSGGGGGLEGNGGRLTGGGSGDDGGSDGGARWRENGGAGTETXRRGSTTAAVRRHYDGGAAALRWRRDGVEDGDAAAGTGWRRGARGGXGARGGAGLGDGDATGGDGVXGARGEVAGGDGTATRRGTATRRXRRGSGTGAARHGARRDDDGDATASDAAEGRRSGARGRGGERLGTRSNT

SEQ ID NO: 155419 - protein, 167 aa, Oryza sativa
  unsure (1)..(167): unsure at all Xaa locations
  Clone ID: PAT_MRT4530_55184C.1.pep
DGGSDGDARWRENGGAGTETVGAAARRRRCGGTTMAARRRGGVGGGDGEKGGEYCGDGMAARGSGRRDARRDGDGRAATGRRRDGRRRAAMATSGRRGAGLGAARRGRGRRXTGGDGVRGRAGRGGRRRWDGDATRDGDATRQRGGGAARVAGEGKGWGPGRTRGGQ

SEQ ID NO: 155420 - protein, 275 aa, Oryza sativa
  unsure (1)..(275): unsure at all Xaa locations
  Clone ID: PAT_MRT4530_55185C.1.pep
PAPLTPFGRPARSGGGALGQRRQWRKYELLHHRPAGIVLNHRTERSGIHPKAEIDKAAEFRQRHAIATGNDRTKTYWTPSSSSPSCGGGGLEGNGGRLTGGGSGDDGGSDGGARWRENGGAGTETVGAAARRRRCGGTTMAARRRGGVEGKERRGRGGDAAAVTGWRRGARGGGTRDATATDERRPDGDATGDGARRWRRAGGAARGSERLGAGGDGDATGGDGVRGRAGRGGRRXMGRRRDTGRRRDAAEGRRSGARGRGGERLGTRSNTWRAM

SEQ ID NO: 155421 - protein, 137 aa, Oryza sativa
  unsure (1)..(137): unsure at all Xaa locations
  Clone ID: PAT_MRT4530_55186C.1.pep
MTLKSNLPEFVTESFHRSKPLLTDLMELGVLAVPFSTDGNTPDLRFDETDDDDXTTRQLSSSYNQSKIQTLIHYSWLDGQKKQANVSPDSPVYLSLRPDSRVRGSDVGYPPWQAFVAQLPPVKGMWSDLLNGMDGRV

SEQ ID NO: 155422 - protein, 162 aa, Oryza sativa
  Clone ID: PAT_MRT4530_55187C.1.pep
LYLHKHSRLRVTHRDLKASNVLLDHNMNPKISDFGLAKIFSSNDIEGNTKRVAGTYGYMAPEYASEGLFSVKSDVFSFGVLTLEIVSGKRNPGFHQYGDFLNLLGYAWQLWTEGRWLKLIDVVLLTDCLVEAPLMMKCVNIALLCVQENAADRPTMSDVVAM

SEQ ID NO: 155423 - protein, 46 aa, Oryza sativa
  Clone ID: PAT_MRT4530_55188C.1.pep
MTTELRHSSNTTHYRESWYACRYRSGIPGSTHASDFDSLYTFKNFS

SEQ ID NO: 155424 - protein, 118 aa, Oryza sativa
  Clone ID: PAT_MRT4530_55189C.1.pep
DAHPAFRPDNGGHWCQILDFVLKSCDEAVFFSFVRWIGISYMACQLSLARQATPDICHASLLPRRSLSDSATLAMHAPLLGIPMGAAIDMYVWCFIRSGLNSECPMDNPTLFCGFSFV

SEQ ID NO: 155425 - protein, 54 aa, Oryza sativa
  Clone ID: PAT_MRT4530_5518C.1.pep
TDPTVVAVNARIQRWRPSPHGSGSRPPSPHAGSSSPPLPFLPSLDPAEGRGVGG

SEQ ID NO: 155426 - protein, 77 aa, Oryza sativa
  Clone ID: PAT_MRT4530_55190C.1.pep
MRIRRVRGVRLQLQMATIEETRRHITLVIPCPVAVHPMSRASPRHPIPDLPRTRVPSPSPPGKPLYSPSTANSLLSL

SEQ ID NO: 155427 - protein, 420 aa, Oryza sativa
  Clone ID: PAT_MRT4530_55191C.1.pep
MGSRTVGWWLLAAAVVLAAAAADSGEAERAAEQHSERISGSAGDVLEDNPVGRLKVFIYDLPRKYNKKMVNKDPRCLNHMFAAEIFMHRFLLSSAVRTLNPKEADWFYTPVYTTCDLTPAGLPLPFKSPRVMRSAIQYISHKWPFWNRTDGADHFFVVPHDFGACFHYQEEKAIERGILPLLQRATLVQTFGQENHVCLKEGSITIPPYAPPQKMQAHLIPPDTPRSIFVYFRGLFYDTGNDPEGGYYARGARASLWENFKNNPLFDISTDHPPTYYEDMQRAVFCLCPLGWAPWSPRLVEAVVFGCIPVIIADDIVLPFADAIPWEEIGVFVEEKDVPKLDTILTSMPIDDILRKQRLLANPSMKQAMLFPQPAQPRDAFHQILNGLARKLPHPEGVYLQPSDKRLNWTAGPVGDLKAW

SEQ ID NO: 155428 - protein, 120 aa, Oryza sativa
  unsure (1)..(120): unsure at all Xaa locations
  Clone ID: PAT_MRT4530_55192C.1.pep
APATPYLVQMHLMESKTPRGPPTGRWTPMRQLWGSIWRXGTSVRLQAPLSIRIGSEYGNTLVANNVIXANCRPATFFRSFVQYSLSAARGRRPSAPAWPPLLLLVIRRILRRNCVSGWVL

SEQ ID NO: 155429 - protein, 39 aa, Oryza sativa
  Clone ID: PAT_MRT4530_55193C.1.pep
NLVSTSYADLEFLSLYARLKCPFVSVAWHVAASYPALEY

SEQ ID NO: 155430 - protein, 90 aa, Oryza sativa
  Clone ID: PAT_MRT4530_55194C.1.pep
MHTPHPGFPVSQPLSRRRQRRPPTRRTGGTVACANESTRGCCALVGSPVRLVVFPSLSTGGTQAVGGCRRLLPRRLRHPYVGMQNGGALT

SEQ ID NO: 155431 - protein, 73 aa, Oryza sativa
  unsure (1)..(73): unsure at all Xaa locations
  Clone ID: PAT_MRT4530_55195C.1.pep
NPAIISLIFYSLSKVHHRSLDLYRCVIPVPKLINXPFRFSNLFDCIIPVPKLANHSFRSSNLFSCVTSVPKHD

SEQ ID NO: 155432 - protein, 414 aa, Oryza sativa
  Clone ID: PAT_MRT4530_55196C.1.pep
MKHHHVARGRAEPRRMGNAAMVITMLLSLCVLTYIKGRYCSTPFPKAAEEMEVVEIDEDYDSTRYKMTGPIGEEDFDPTRPTCYVTSKWSDRCASVGDIGVDGNHSKIYINPLDKEWRTKPGGFAGNLYHDYTDVLVPLFTSTNHFGGEVQFLLSGIKDWWLDKFTPLFRQLSRYDVIDVDNDQKVHCFPRIFIGATFHRAMGIDPARSPGGVTVADFKRLLRRTFRLERAVASRTGAPRRDKPRLLIISRKSSRRFLNERAMAHAAALARFDVRIAEPDNHTDMPNFARLVNSADVMMGVHGAGLTNMVFLPSRAVLIQVVPFGGLEWLTRVTFKDPAKDMDVNYMEYNVSFDESSLRELYPRDHFYIQHPYDVHKKGWDAIKTVYLDKQNVELNLTKLTNTLERARDFLPEP

SEQ ID NO: 155433 - protein, 483 aa, Oryza sativa
  Clone ID: PAT_MRT4530_55197C.1.pep
MSGGGGEVEAAAEAAPLLVPHDPQPAVGAEVRRQVGLAAPLVACSLLQYSLQVVSVMFAGHLGELSLSGASVASSFANVTGFSVLLGMGSALDTFCGQSYGAKQYDMLGTHAQRAIFVLMLMGVPLAFVLAFAGQILIALGQNPEISSEAGLYAVWLIPGLFAYGLLQCLTKFLQTQNIVHPLVVCSGATLVIHILLCWVMVHCFDLGNRGAALSISLSYWFNVILLAIYVKVSEVGRRSWPGWSREALKLKDVNMYLRLAIPSTFMTCLEYWAFEMVVLLAGFLPNPKLETSILSISLNTMWMVYTIPSGLSSAISIRVSNELGARNPQAARLSVFVSGIMCLTEGILVAIITVLVRDIWGYLYSNEEEVVKYVAAMMPILALSDFMDGIQCTLSGAARGCGWQKVCSVINLCAYYTIGIPSAVTFAFVLKIDGKGLWLGIICAMTVQILALVVMLLRTSWNEEAEKARARVQGSDGRITLA

SEQ ID NO: 155434 - protein, 98 aa, Oryza sativa
  Clone ID: PAT_MRT4530_55198C.1.pep
FVFNCIFSPWFLFNLIPIDRIKQFKHQNESELNAWLHNLRRTPNTGWMDRGLCDWGEPLETISTRVDDKRIMTRLAKDNWPRWAPPVNSFQLPPESPS

SEQ ID NO: 155435 - protein, 291 aa, Oryza sativa
  unsure (1)..(291): unsure at all Xaa locations
  Clone ID: PAT_MRT4530_55199C.1.pep
MTSAMTSPTAAAARRSGRLGRRTLAGERRHFGTNGGHQHVEDDVANSPVTKTAAEEQRTTTATRRKRRQPSGRRXRRCSGGLRRWRSGGRGRRRLGEHNGGLPERQRRLKRRRRTAGAAATTAALGHTALGFFRRREAKARVAAGRGDTGGPFKGARRRRRRPTAAATAKESSRLEGKRXDPNRTRFHELPKRFSRSFQRRKGRGDPGDHFPSFNLAGEGKERPDLEGDGGGAKLGFRAVAAGGRRRXPTGGTHLSATERARARAADWAGWAEEREKGFGPTFGPKPKEDF

SEQ ID NO: 155436 - protein, 44 aa, Oryza sativa
  Clone ID: PAT_MRT4530_5519C.1.pep
AMWRRHPCRAYAVCLPPYVAACRRFLHLGIACPMNASADGANAW

SEQ ID NO: 155437 - protein, 163 aa, Oryza sativa
  Clone ID: PAT_MRT4530_551C.1.pep
EAAGAAEQGNGAPAPVADAADVEGVDGIRIRRRPVTGPPVHYVGPFQFRLENEGNTPRNILERIVWDKEAEVSQMKERRPLYMLKGPLENAPPVRDFVGVLKASFDRTGLPALIAEVKKASPSRGVLREDFEPVQIAQTYEKNGAACLSVLTDAKYFQGSFDY

SEQ ID NO: 155438 - protein, 34 aa, Oryza sativa
  Clone ID: PAT_MRT4530_55200C.1.pep
YIFQKVGCEYGLLIEEFKILVAQITYVVKSVNYR

SEQ ID NO: 155439 - protein, 374 aa, Oryza sativa
  unsure (1)..(374): unsure at all Xaa locations
  Clone ID: PAT_MRT4530_55201C.1.pep
MDNTGNKGYGNDGSDDSRTQANGNEKSINETSPELIQIVVNQTNILATAFQLLQNWYNPAGATNVQVPTVQQQYKLSEFLKTEPPTFAITVDPMEASDWLRTVEKKLGLIQCTDQERVVFATHQLVGPASEWWDSYKASRPEGHTITWGEFSAVFKRSHVPAGMITLRKREFRYLKQEDLTVTEYLHEFHRLAYYAPEDVETDEDKQEKFLQGLKDELVVQLLLEDYEDFEKLVDKAMQLESEHNRMTNCKRRIVNIPVFPXEPLQITGSSVAHQEFLPQEDGHNADNNISNTNADDTTNNHGSCPIHDHLDQECNVNSIHQDIDDSINEGTQNDNPSNFDSEKDSNGDSNYGFSERQQAQVPHRHQNHPQLSE

SEQ ID NO: 155440 - protein, 393 aa, Oryza sativa
  unsure (1)..(393): unsure at all Xaa locations
  Clone ID: PAT_MRT4530_55202C.1.pep
MAGQAKAHDLSPSVSGDDGEPNPRRRARTPPPPPHQSPKQGEALERVDRSAASPIAGDGGERRDGERCLLVYGDGSTPQGALQAAGALLRHSPVVPDPESPAQRWLDDVANLVMTAQQRLGAGGRSSTTRTSGAATTGSVSSRRRARRAAAVARHSAATPSSAPSTRDDQRGEPDARLDIERRRNDRRAPHATEGASSSRVSPRHGHEDQPSVPPAGGVGCRAFVASLRNVRWPPRFRPTIAEKYDGSVNPTEFLQVYTTGIEATGGDDXGTYPRPGEEADLHAVQRGDDESLRSYIQRFCQVRNTIPCIPAHALADRVARKEEAWTWNPSGSGVAASAAPGSAAQTGQRDRRKKKRSVHSGDEGHVLAVEGAPRATRKGRPASDKKKEADAP

SEQ ID NO: 155441 - protein, 683 aa, Oryza sativa
  Clone ID: PAT_MRT4530_55203C.1.pep
MPLRRRWAALLLGVAVVLAVAAAGARAQDYNNGGGGDGEDEEEEEKPSFKAQEACNGAFLTYTFTEREKEYPRTKNATAQAFAFKATATVLNTMTEDLKAWQMFVGFQHKEILVTVGGAVLLDGTDLPANVSGGVTFAGYPMANLLNSIETAGDLTQIQAQIDITGTQFGVKPPTAPMPRTIKLSNPGFRCPKPTHKQSVMYVCCVKDPKFKAKKVNTTTRYLPRQKADLTIAYDVLQAFGNNYMVQVTIDNWSPIGRLDNWNLTWEWKRGEFIYKMRGAYTLNKEGPACVYSPAAGYYKDFDFTPAYSCEKRPIVVDLPPEREKDKDVGNIPFCCKNGTLLPPTMDESKSRAVFQMQVFKLPPDLNRTALYPPQNWKIIGKLNPQYACRQPVRVSPVVFPDQTGLMSSTPAVASWQVACNITRPKRRAAKCCVSFSAYYDDSVVPCNTCACGCGGGGGGGNDTATCDADARATPLPPEALLIPFDNRTAKGRAWAKIKHRRVPNPMPCGDNCGLSVNWHIMNNYKSGWAARITIFNWQDYTFKDWFAAVTMRDHYSGYENVYSFNGTKMGAPFNNSIFMQGLPGLTYLEPITDGRTPEDPRVPGKQQSVISFSRKDAPNVNIAKGEGFPKRLYFDGEECALPDTIPKPSSAHRRAAAAASLGQIVMAVVLVMVVAVVDSLCL

SEQ ID NO: 155442 - protein, 270 aa, Oryza sativa
  unsure (1)..(270): unsure at all Xaa locations
  Clone ID: PAT_MRT4530_55204C.1.pep
GEQAEGEGARTGSTGVGPTRQPLGPRWTGSTRLAAAGAVGPTRQPHPRARAADGRXPLGSREGTPECGLARTXSGGGPRPRPDGHRRRPPARWSGSRERGGKGEANGTVFGSPRSTATTGTAAEAEEGGGAVRDGEDDGAPPVGEQTEGADEVDGTAAKPMKVTPSGKEVRSDGGGEPEHGGDGGXKVQRCGLDSHGESERRAAETEEESTGXRLNSTGRRRACPEREETGAEISAAIDCAGEVCGMEIGRIRGRERGESGGIGRGNRGE

SEQ ID NO: 155443 - protein, 304 aa, Oryza sativa
  unsure (1)..(304): unsure at all Xaa locations
  Clone ID: PAT_MRT4530_55205C.1.pep
QVGPTCHLPPLAAPAASARAPRVPLPRFPLFPLSLSLGFVRIKPVIVAGAINGAESXRAIPPSPAALSFPRRYLNPPRAPLFRFRRSPLTLAVGIVLAPXHLLSAVAAVLRLAAAAAPLLLPTRRHLPRHRRIAVDLVRASVSLADRRSTVVIVIPSRAAVSLRSGRRSRRRRCPGVSRGPPFAFPLPSSLSGAAPPRRWSPAVTIGARARRSRRPRRRGRPRARPRGCQVGPAVSRPRPRVRLTRGTHGADRRQPRAPGPPWTVGLTRGPHSPWTRSVKKRTSSVVCRSSRRLQDLRVKWRKQ

SEQ ID NO: 155444 - protein, 142 aa, Oryza sativa
  Clone ID: PAT_MRT4530_55206C.1.pep
MKIGGEEEARLKVDLKELQAVGISCGRRKIRKRTDTAVAFHPREFKGYRIYISVGKRWCKVHDRNWYLTTITNTTKLNLCSSSSKVMSEEVNFSQENDICAYIWGNLKYSSQKFYAPNFQAMQPPIHFHWLWKRKATSKVKV

SEQ ID NO: 155445 - protein, 1963 aa, Oryza sativa
  Clone ID: PAT_MRT4530_55207C.1.pep
MAAGVLMTKPFMAAAAAALVSLLVMLRCLPSVVATTVSFNYSSFSNASKNITLQGSAALAGAEWIELTKGKGNNLSSGGTMGRMVYTPPVQLWDAATGEVASFTTRFSFNITPKNKSNKGDGMTFFLVSYPSRMPYMGYGGALGLTSQTFDNATAGDRFVAVEFDTYNNSFLDPDATYDHIGIDVNALRSVKTESLPSFILIGNMTAIVDYNSNSSIMSVKLWANGSTTPYNLSSKIDLKSALPEKVAVGFSAATGSSFEQHQLRSWYFNLTLEQKQPTGQHSRGGVVAGATVGAILFIVLLFTMVAILVRRRQRKKMREEEEDDSEGDPIVEIEMGTGPRRFPYHILVNATKSFAAEEKLGQGGFGAVYRGNLRELGIDVAIKRFAKDSSKQGRKEYKSEIKVISRLRHRNLVQLIGWCHGRNELLLVYELVPNRSLDVHLHGNGTFLTWPMRINIVLGLGNALLYLHEEWEQCVVHRDIKPSNVMLDESFNTKLGDFGLARLIDHAIGAQTMTHPSGTPGYVDPECVITGKASAESDVYSFGIVLLEVACGRRPMNLLDDQNNGLFRLVEWVWDLYGQGAVLKAADERLNGDYDATDMECVLVVGLWVAFLLESVPGEIRDSAFVSPDSFYVVASMSIVLGVDPFMNSLEERADGNVRQHAHLWHPPVSTTLRPLTCLVPLWQPLAGVAQRPEKPHTVVDGKEKEQGKGKAPALASRGCTRQVAAAAAQVKLALPPWSSHPPSSRRTRRRLTHTRGRGRRPLLPGVAGDTSPARAKLTDASSTNDQREGRPMDLAPCSAAVPDVAVAREDRCRGRQVVAVLVRPFAVAGDRRSFVAVDNPKVSAVSSSSPSSFVVFPPPFWSPVCSPRRPLRAGALRLRPRAAVRRRACAARAVRSAEPPPLSVTSLLTSSGSSAMPRYKPEYLFGVEGFVQELRTMSFAIGFGTAPFYAQIPHDRHEEKCRVKVTLNSNSEDVPSVMFEAGGRNYIHACQEVARIAIGELRDRYSDQLADTEYRYHPRQPQGSDRGSYLETEGIENDATTRHLVEMLWAMDESRAETVLAAQDREDRNRGKICKLEDKVDRLEKELAALKGEAPPQKARIRLTARKRALFVPRYQLAPKVRVVEKEVAPAQADPPVIIISDEEEESKRTRSKIEWVATQDDEDEPNEPTIDLRCLEELDTTNPVEASDWLHAIEKKLDLLQCTDQEKVSFASHQLHGLASEWWDHFRLNRITAEPITWLEFTAAFRKTHIPSGVVSLKKKEFRSLTQGSRSVTEYLHEFNRLARYAPEDVRNDEERQEKFLGGLNDELSYPLMVGDYPDFQKLVDKAIRQEDKYNRMEQKKRRIAQFKTQQGNNQKPRLTLGPQPMPHGGSSSVVRPQRQFFNNNAGNNIRNQAPRPVAAPAQQQPAKREQGSKPVVCFNCGDPGHYADKCPKPRRVKVVPVQNNSAVPASKARVNHVAAAEAQDAPDVILVREYPDVFPDDLPANELAEVKRQVDDLLQKGYIRPSSSPWGAPVIFVEKKDHTQRMCVDYRALNDVTIKNKYLLPRIDDLFDQLKGATVFSKIDLRSGYHQLRIKEEDIPKTAFTTRYGLFECTVMSFGLTNAPAFFMNLMNKVFMEYLDKFVVVFIDDILIYSRTKEEHEEHLRLALEKLREHQLYAKFSKCEFWLSEVKFHGHVISAGGVAVDPSNVESVTNWKQPKTVSEIRSFLGLAGYYRRFIENFSKIAKPMTRLLQKDVKYKWSEESLEAKPTLIDQVREAQINDPDIQEIKKNMRRGKAIGFLEDEQGTVWLGERICVPDNKDLKDAVLKEAHDTLYSIHPAPCALASPSPPPLQPCAAVVSAVAIAREDHRRARQVVAVLVRPFAVAGDHRSSFAVVDPKVPAASSSSPSPSVGLPPPFRSPCRRSPASVRRPSRLLRRAAAAVGDVTADVIGVVRREPVVDRSISAVRFGWIDLGRPFA

SEQ ID NO: 155446 - protein, 351 aa, Oryza sativa
  unsure (1)..(351): unsure at all Xaa locations
  Clone ID: PAT_MRT4530_55208C.1.pep
GFIALAEGRGARTGSTGVGPTRQPHGPRWTGCTRLTPGGAVGPTRQPYPRARAADGRAPHGSRGARPKAASPAQPTXAERRPREGREGGSETAVHGSPRVDGDNGNGDRSGERRRRGSGQRGRRRSGGRQAKRRGGRGRRGRGGAEGGDAEAGESPRRRRRRTGARRRRRREGTTARARFRRGERAASGGNGGGRHGERLYSVGRGRERPDEGESAAEDPAAIDXAGEVCGXSFQTNPRXRERVKWGERERESRGVISPSLLRAGXAGCGGIRGGGGARARARRRVRREVGDDGWAPPVSEGGGRARPSAARARGKAGWAAGERREREGAGPSRPKRGKGGKKTFLGFFFL

SEQ ID NO: 155447 - protein, 57 aa, Oryza sativa
  unsure (1)..(57): unsure at all Xaa locations
  Clone ID: PAT_MRT4530_55209C.1.pep
TISSCFYATFMKKERKEAAAKNLTILTNPLRIHAGSYASQQPGFVLLEGXLLGKAPA

SEQ ID NO: 155448 - protein, 98 aa, Oryza sativa
  Clone ID: PAT_MRT4530_5520C.1.pep
SPVTEAKGDVVKRQQQLLASLAGDEDGEGRGGEAAAVPHLRLRLVNVVRRRQTGAAAGGSVAPRTRAPKCPRRQRQWAHPAALLAIPPLSTAASEGEG

SEQ ID NO: 155449 - protein, 480 aa, Oryza sativa
  unsure (1)..(480): unsure at all Xaa locations
  Clone ID: PAT_MRT4530_55210C.1.pep
MSSGANEGYTSCGPVVEMSWHRAGVLLLGGSILPACPGGSGHVPFVSCLFGVPRLFLGRGLIHXAFGKRISETNNTSTRRVSSFKVLSLVLMFNREKGKNVSGYASSNSSFQLNPPLASRELTRAHPWSIPSMLLSSQRPLVGSRDQNQYVFDRAFATQVNELPMPEEHVPFCHDCREQGHYALNCPWVYAKEAPSFGLAGQTSLNQPPRTKSSLQPSVQRREPIRENPLNPGKCFPPSLSYHVGSRTKQAKGKKSKNQKRKAPMRTEEEVRKMTITSTEWPPAGITIPRRQRGNTFRGARQLTQHLLSHGGRVSDSEGSDQVSSDYEDESLRHLGEEEMESKACPRCGEIGHVASMCLTLCPHCEEDHPPGGCPTRKVTCFLCEGTNHVPKDCQLSVLLTKTAEIQRTTLRLSHQLVSSNINIDDIIPSTNAPPAAPDSAVNHSNNTFNTNHSLHRRPQQRIVVDGRSCVSPRRADLDA

SEQ ID NO: 155450 - protein, 43 aa, Oryza sativa
  Clone ID: PAT_MRT4530_55211C.1.pep
VNQVLGATVSIISPPSLRRQVSVCHVDGLASERDTVSVCRYVG

SEQ ID NO: 155451 - protein, 489 aa, Oryza sativa
  unsure (1)..(489): unsure at all Xaa locations
  Clone ID: PAT_MRT4530_55212C.1.pep
MDISRTNEGYTSCGPVVEMSWHRAGVLLLGXSILPACPRGSGRRXGVGSVLLFMARMGWELCHVFRPYTVVMFNREKGKNVSGYASTNSSFQLNPPLSSRELTRAHPWSIPSMLLSSQLPLVGSQDQNQYVFDRAFATQVNELPMPEEDVPFCHDCREQGHYALNCPWVYAKEAPSFGLIGQTSLNQPPRTKSSLQPSVQSREPNGENPLNPGNCFPPSPSYHVGSRTKQAKGKKSKTQKRKAPMRTEEEVRKMTITSTEWPPAGITIPRRQRGNTFRGARQLTQHLLSHGGRVSDSEGSDQVSSDDEDESPRHLGEEEMESKACTRCGEIGHVASMCLTLCAYCEEDHPPGECPTCKVTCFLCEGTNHVPKDCQLSVLSTKTAEIQRTTLRLSHQLVSSNGNIDDIIHSTNAPPAAPDSAINHSNNTFSTNHSLHRQPQQRIVVDGRSCVSPRPTPGQAKGNQPQEGDTKQKTVIRFKQQSEGSFSCE

SEQ ID NO: 155452 - protein, 126 aa, Oryza sativa
  Clone ID: PAT_MRT4530_55213C.1.pep
MKCFQRSAQEDIEGGRCTSHDRADPFNVASNYDCHLDDCLYNSGREVVGVRHRVGLVAPAFGRSIGRGDREHFDREAVDEYVVVAMRSRGCDAHCCWHRAVGSVSVLENLIVLERVLRGRRPSISH

SEQ ID NO: 155453 - protein, 1782 aa, Oryza sativa
  unsure (1)..(1782): unsure at all Xaa locations
  Clone ID: PAT_MRT4530_55214C.1.pep
MSSGTNEGYTSCGPVVEMSWHRAGVLLLGAQSCLPVPGVPAVGGIGSMYTSDQSIIYSNSRALGYGQAEQCTQMAGSINRRGLDLTGFVLELRGMCVVLGYPHGVDYQGKQLPEQEGDDAEPHAAWEVTAVILTGSPERTSLAVTAGGDSFSAACQNAALLAIGTLHQRYPDELQHSPYRYHPRRGGARDYATFRDASSEDDATIMHLARMVEAYDAARMDFHQMVRRGLVENNMKILELRQENLQLKKDLDVVEAQLCQLKIAQGEVCRPKRRRVCRSLKITARKSTSRPELVRQSLAWTCFVETPRAEPAPVVPQEDGVSGVGSTEDALLLTFHXTTRRSAATGDGNQPVGSNHNNHGSPPPPPPPPPPPPLDTNTILTQIIAQRANMMAAFLHHIQNPPQHNAPPPPPQHSKLAEFLRIRPPTFSSSNNPVDALDWLHAVGKKLDTVQCNDEEKVIFAAHXLQGPASLWWDHFQATXPEGQPITWARFTASFQRTHVPVGVMALKKREFXELKQGNRSMMEYLHEFNNLARYAPEDVREDEEKQEKFLAGMDPELSVRLVSGDYPDFQRLVDKSIRLEAKHKELESHKRRLANFRNQQGANQRVRYTNPYPGGSSSQQQQQQQPRSTSRPQFVVHVPQPQQQQSQQGTRAPRPPTPAVQPVQGRRDAQGQQRLCFNCFEPGHFADKCPKPRCQQGQAPPRSNNGGKDVIRGRVNHVTAENVLTTPDVIVGTFLIHSIPATILFDSGASHSFMSVPFVGRNQLGVERLRNPLLITTPGGVMTAKYYSHAVPIEIQGIPFLSDLILLDTKNLDVILGMNWLAQFQGVVDCARRTITLYRGPEQPVVFFAPPTSVGSSELHQIKLSEIPIVREFGDVFPEELPGMPPKREIEFRIDLAPGTAPLYKRPYRMAANELAEVKKQLEELKEKGYIRPSISPWGAPVIFVEKKDKTKXRMCVDYRALNEVTIKNKYPLPRIDDLFDQLKGATVFSKIDLRSGYHQLRIREEDIPKTAFTTRYGLYEFTVMSFGLTNAPAFFMNLMNKVFMEYLDKFVVVFIDDILVYSQLEEDHQHHLRLVLGKLREHQLYAKLSKCEFWLSEVKFLGHVISAKGVAVDPETATAVTDWKQPKTVTQIRSFLGLAGYYRRFIENFSKIARPMTQLLKKEEKFVWSPQYEKAFQTLKERLVSSPVLILPDTRKDFMVYCDASRQGLGCVLMQEGHLVAYASRQLRPHEGNYPTHDLELAAVVHALKIWRHYLIGNRCEIYTDHKSLKYIFTQSDLNLRQRRWLELIKDYDVGIHYHPGKANVVADALCRKSHCNTLNVRGIPAKLNQQMEALNLSIVGRGFLATLEAKPTLLDQIREAQKNDPDMRGLLKNMKXGKAAGFTEDEHGTLWNGNRRVKAEHQRPAGLLQPLQVPEWKWDEIGMDFITGLPKTQGGYDSIWVVVDRLTKVARFIPVKTTYGGNKLAELYFARIVSLHGVPKKIVSDRGSQFTSHFWKKLQEELGTQLNFSTAYHPQTDGQTERLNQILEDMLRACVLDFGKTWDKSLPYAEFSYNNSYQASIQMAPYEALYGRKCRTPLLWDQVGEXQVFGADILREAEAKVRTIRDNLKVAQSRQKSYADNRRRNLEFVVDDFVYLRVTPLRGVHRFQTKGKLAPRFVGPFRIIARRGEVAYQLELPVSLGNVHDVFHVSQLKKCLRVPSEQADSEQIVVCEDLTYVXRLVKILDTMERRTRNRVIRFCKIQWSNHAEEEPTWEREDEMKAAHPNLFASSSESRGRDSV

SEQ ID NO: 155454 - protein, 38 aa, Oryza sativa
  unsure (1)..(38): unsure at all Xaa locations
  Clone ID: PAT_MRT4530_55215C.1.pep
PKSIHRPHIQGRYTDSSTAARGLICXPRKGGQKTNRRG

SEQ ID NO: 155455 - protein, 139 aa, Oryza sativa
  Clone ID: PAT_MRT4530_55216C.1.pep
TQCQKLYNSELSYGTLQLSPLRSTEAMERQAYNLQAALLQEHCWYNFSSMQWSYASLKRASLFIFLAPGSRTIPQRKQWIRIRFHSLLFPACTVQSTMLLPAQQMAISHLLHCLQFPGKELFDVLAEFVGLEVYLVPNL

SEQ ID NO: 155456 - protein, 55 aa, Oryza sativa
  Clone ID: PAT_MRT4530_55217C.1.pep
LGPTMKLTVCKKKVNKLQTSDEWDKLNGGFFFGGISGVIWAYFVLYVLDIQYFFK

SEQ ID NO: 155457 - protein, 123 aa, Oryza sativa
  Clone ID: PAT_MRT4530_55218C.1.pep
RDTVSHPADGSQWRNIDRTFKDFGPKQPGNDIDVYLRPLVEDLKLLWKKEGVPVWDEDKQEEFNLRALLFVTINDWPILSNVSGQSNKGYKTCTHFIIRGILPDNVRATITKQCAFMNAISQK

SEQ ID NO: 155458 - protein, 433 aa, Oryza sativa
  Clone ID: PAT_MRT4530_55219C.1.pep
MDGTRSAKRMKRFSGACPCPLPDDIVDEILSHLPVKSLLRFRCVSRRFHATITSSHLFQEAHFLQRKQRNKHPPRLFIRPPFGPRQPFFAWQWQWQHLIPRPPVEEIMTARHLPHGTIFPLASKSCHGLVLLKITGHHTHYLWNPSTRHILRLPGTDNTPPPATYGLGYCSATRRHKVVRVVGCRCCSPATVVWEVLALDGDEPSPSSSWRPPAAASTTPPPRHWHYPRENWRRGAALCNGGDLHFLRGDGDIVTFNVTDESFGVSSLKPPPELQSRDDFELTELDGCLCVYTFTDVKLQLVDEEPESPTCEIWVTREAAAGSWEKLCSIEWVSVLPPDHSCLRWYWIAPIHMFSDGNNEEKKKKKIMFATGTGHVLVFDPSVGTLEIIFSPEDEAVGEYHDYSNNEVSTLGLFEESLALVGNTSENIVFSQP

SEQ ID NO: 155459 - protein, 83 aa, Oryza sativa
  Clone ID: PAT_MRT4530_5521C.1.pep
NMKDNFAHKANMQLLYTDIMWEYELNMNFKSILLTQEIKTYPAGLHTRSGLYQPSEIITILNCPVYASNLFFFWGLPATMRPN

SEQ ID NO: 155460 - protein, 1008 aa, Oryza sativa
  Clone ID: PAT_MRT4530_55220C.1.pep
GKVQVVINVHKAALQFIDGVKQYHLPPELIEEGFCISPDELAAIANMREDYTMLRMHGGINGISRKIKASLEDGAKETDIATRQMLYGANRHAEKPPRSFWMFVWDALHDLTLIILVVCALVSIVVGLATKGWPMGIYDGFGIILSILLVVLVTATSDYQQARKFMELDREKQKIYIRVTRDKKTKEVLVHDLVVGDILHLSIGDVVPADGLFISGDCLMIDESSLSGESEPVNISEERPFLHAGNKVVDGAAKMLVTAVGTRTEWGKIMGTLNGDGVDETPLQVKLNGVATIIGQIGLVFAVLTFLVLLARFLADKGMHVGLLNWSANDALTIVNYFAIAVTIIVVAVPEGLPLAVTLSLAFAMKKLMHDKALVRHLAACETMGSASCICTDKTGTLTTNHMIVDKVWIGDVKFVGDKKNSELKSTISERVMAILIQGIFVNTASEVVKGDDGKNTILGLATETALLEFGLSLEEHLYDDYNKLTRIKVDPFNSVKKKMSVTIQLPNGGIRTFCKGASEIILEQCNTIHNTDGNIVPLSEMQKHNVLNIINSFASEALRTLCIAFKDMDEFPNDQPISDDGYTLIAVFGIKDPVRPGVKDAVRTCMAAGIRVRMVTGDNINTAKAIAKECGILTEDGIAIEGQQLNNKSSDELKELLPKIQVIARSLPMDKYKLVTSLKSMYQEVVAVTGDGTNDAPALHESDIGLAMGITGTEVAKESADVIIMDDNFETIVNVARWGRAVYLNIQKFVQFQLTVNIVALIVNFVSACIIGSAPLTAVQLLWVNMIMDTLGALALATEPPNDEMMKRPPVRRGDNFITRIMWRNILGQGLYQLLVLATLMVIGKKLLSIEGPQSDKTINTLIFNSFVFCQESVLYFNGNFTILEKVSGGTLRYFLKEGKISLILTVFNEINCREMEKINVLQGIFRNWIFVGILTATVIFQVIIVEFLGTFANTVPLSGELWLLSVVIGSISMIISVILKCIPVEFNKTNTKPHGYELIPEGPEIL

SEQ ID NO: 155461 - protein, 32 aa, Oryza sativa
  Clone ID: PAT_MRT4530_55221C.1.pep
CVLWGKETDYVVLHNCRLGHTPIIVWLMTCSA

SEQ ID NO: 155462 - protein, 90 aa, Oryza sativa
  Clone ID: PAT_MRT4530_55222C.1.pep
MVSMDVNEVVAVDVEGPRGCRDPRASMRLAKAFTVEADGERERGRDGCLRHTPPSLRRAGKTGRRGREGARTLPTPSSPSTRHREGAVAA

SEQ ID NO: 155463 - protein, 67 aa, Oryza sativa
  Clone ID: PAT_MRT4530_55223C.1.pep
SSSPRRNVIVDILSICLSFFLPSASDLKLLVVCSVIQLQRRNSSSCHVRMHGSFFFPPKLNYFCWSI

SEQ ID NO: 155464 - protein, 115 aa, Oryza sativa
  Clone ID: PAT_MRT4530_55224C.1.pep
ASTKNTTPQSHNKKEVSKKKQQSPRGQRCGGVARTESPRARRESRRSQEPNPKKAPSQESGQKRKKKKGKRQDTVRKVAGGPKSSPASGGRRSGPESGGGSGHQWSGSRRGEEEG

SEQ ID NO: 155465 - protein, 2253 aa, Oryza sativa
  unsure (1)..(2253): unsure at all Xaa locations
  Clone ID: PAT_MRT4530_55225C.1.pep
MMKPPSKTEVEPSNMILVTLDDFEGEDRKAMEEYINEFTQEALMRASTRTRQGVIIKPGPRPKLTPDSVSNDEVSQSIQQQIASTIDSSMLVFKDQLDATFEGKFDEFLRVKFGPLLADHMVKPKERRTRPVRPRHSRRSDRPDGRSDRVLPRRSDRDSGRSDRASGRRSDRALGRTSDPPISTTTSNPQVPPHVPNAYNDVARGYPPDTRQGQYNHIAPQTQPIRPPNLPLNQQGPNNMEDIISDIMRNRFRIETRNRARTYKKPYPDYYDIIPYPRGYKIPEFTKFSGEDSRTTWEHVDQFLAQCGEANWNTCKLRLFSLSLSGTAFTWFTSLPANSISTWAQLEQKFYDYFHTNETELKLSDLTSVRHKCNESVADYIKRFMNVKNRCFNLKITDKDLANIAFDGLLDSIKEKLNGQIFLDVDHVLHEVLAQESRVNDDSLHASLDESAISCEKGEEVWVRKEAKAPEVVAIKEESQDVHVPTGDAMEITQAKEIEADAVTVNIGGLTEIAGRSNRQTMAGLTNPPGRFDRRLVAGLTGPRGRSDRGALEKSEKIESNTGGSTSTKNMKNHHLAPGKQPQPKWIPSGLSRSQNRRLQRLRAMGKKEKETKDVENKTCNNLDPRTTSRQVWRPKEGYGLGIPLTLRYAPHIDMAYPRIHGHYLHILRKSSTVFKSYSDKTGSSIYRVGFVDNSVNTNLNHGFPASTTLVWTQVGEIVFPVYTTMPISAGPSMTGNENAVAATQGDSMSKDPPAEAGNGTSTTPELEKDSNAAEPCLSDKNHEPTRTASEATRSWCPIHKTRKHTLQACWVFLNAHAEIRACRERGIQRVSPTRDVYCPIHKTKNHDLSSCKVFLSAIKMSSPKVQPSSVSLREEDKRQGTTLTSDRFVGAIDIDSHEPSVLHLLKDYGSSSTSTPCEVLAIDGTSTSARANAEAENQVVTPAQRISTLNTILREAPYDPVLNDDLAWWQERLRESVTNLSHTFEGAAADAHPEQPPTGGVDGENPEQRESPYRATPSPRGTGDLGDHLNGRREARRTQANGSRSRHHIPLRHHDNEEREGRSNEDRDRDDRDNRERXGAGNTSRGRRHNGEDDRDRPRDNDGGRRWDSREPGRCPRNPTPEPSDSSSSSSSSSSSSSDRHPRRTHDRRQPTAPSAGCRAFXFRPGTIEKYDGSTNPEEFLQVYSIVLYAAGADDNALANYLPTALKGSARSWLMHLPPYSISSWADLWQQFVANFQGTYKRHAIEDDLHALTQNSGESLREYVRRFNECRNTIPKITDASVICAFKSGVRDHYTTQELATRRITTTRRLFEIVERCAHVDDALRRKNDKPKTGGEKKTATDAPELSKKKNRKSAKRKAQAEVLAAEYANPSKRPDPQGSDARKAWCPIHKTDRHSLEDCLVFKKSLEKHMALEKGKRVRVVEKDAEAAAQELDSAYPDSDLHGAAPNMKWSEQKIEFSEEEHPKTAVIPGRYPIVVEPTIRNIKVARVLIDGGSSINLLFASTLDAMGVPRSELTPTNQPFHGITPQSSSKPLGKITLPVTFGQANNFRKEQITFDVAEFDTAYNAIIGRTALAKFMAASHYAYQVLKMPGPKGIITIQGNAKLAVQCDKRSLDMVEQTPNPPATTEPPKKLSDMPGVPREVIEHKLMVRPDAKPVKQKLRRFAPDRKQAIREELDKLLKAGFIREVLHPEWLANPVMVRKANGKWRMCVDFIDLNKACPKDHFPLPRIDQLVDSTAGCELLSFLDAYSGYHQISMVKENEEKTAFITPFGVFCYVKMPFGLITAGNTFQRTVQGALSDQLGNNVEAYVDDIVVKTKTSDSLIDDLRETFDNLRRYRLMLNPEKCTFGVPSGKLLGFLVSGRGIEANPEKIKAIENMKSPQXQRNNQIDNETWTMAFDGALNSQGAGAGFILTSPSGDQFKHAIHLNFRATNNTAEXEGLLARIRAATAFGVKRLIVKGDSELVANQXVRKQEKRFDGIKVRHVYRKENVEPDELARRTSRREPLEPGTFLDILAKPSVKEVSGEVNPDTPDISSEATEAERAVADIKTTDDWRTPLIKFINSDELLEDDAEAKKITRKAKIYGTIGNDLYKKAPNGGGYRFLFVAIDKFTKWIEAMPTGEIKADNAIKFIKGIFCRYGLPHRIITDNGSQFISADFQDYYIRLGVKICFASVSHPQSNGQVERANGIVLQGIKTRVYDRLMSHDKKWVEELPSVLWAVRTTPTTSNKETPFFLMYGSEAMLPSELRHQST

SEQ ID NO: 155466 - protein, 70 aa, Oryza sativa
  unsure (1)..(70): unsure at all Xaa locations
  Clone ID: PAT_MRT4530_55226C.1.pep
GSPGLGGGPVLFRISGVVPPVGGPPPFWLNPSLGAAPLGHPPVFGXIRGWARSGPPPVFLQQGFGPRRGP

SEQ ID NO: 155467 - protein, 932 aa, Oryza sativa
  Clone ID: PAT_MRT4530_55227C.1.pep
MELGRPGCPVDRLPDSPRHERGVARCLLGTGANPKVWCDRLERVMRRVMSRPLSELKFFSVGDVLKSTDIIFKVLPPTIIPALRKYLDSRVEESLETDSRLHVRITDADHPRWEVPQDVIPRPSPDSFLAATRPGGGRVLSTATSDLTFAIHTSPFRFTVTRRSTGDVLFDTTPNLVFKDRYLELTSSLPPPGRASLYGLGEQTKRTFRLQRNDTFTLWNSDIAAGNVDLNLYGSHPFYMDVRSGGGGGGGAAHGVLLLNSNGMDVIYGGSYVTYKVIGGVLDFYFFAGPSPLAVVDQYTQLIGRPAPMPYWSFGKLALCFALLLQFFLLDLAAADIVAFVVAGFHQCRYGYKNVADLEGVVAGYAKARIPLEVMWTDIDYMDAYKDFTLDPVNFPADRMRPFVDRLHRNGQKFVVIIDPGINVNTTYGTFVRGMKQDIFLKWNGSNYLGVVWPGNVYFPDFLNPRAAEFWAREIAAFRRTLPVDGLWVDMNEISNFVDPPPLNAIDDPPYRINNSGVRRPINNKTVPASAVHYGGVAEYDAHNLFGFLEARATHDALLRDTGRRPFVLSRSTFVGSGRYTAHWTGDNAATWEDLHYSINTMLSFGLFGIPMIGADICGFGGNTTEELCSRWIQLGAFYPFSRDHSAIGTVRRELYLWESVARSARKALGLRYRLLPYLYTLMYEAHTTGAPIARPLFFSYPGDVETYGIDRQFLLGRGVLVSPVLEPGATTVTAYFPAGRWFSLYDFSLAVATKTGKRVTLPAPADTVNVHVAGGNILTLQQPALTSSRVRQSVVHLLVALADDGTATGDLFLDDGESPEMAGPRSRWSQIKFSGATESGGGVVRVRSHVVHDSYAPSRTMAIGKVVLMGLRSAAPPKGFAVYANGVQVNASTAVGGAAGSPEKGALGVAHVSGLTLVVGQEFDLKVVMTY

SEQ ID NO: 155468 - protein, 525 aa, Oryza sativa
  unsure (1)..(525): unsure at all Xaa locations
  Clone ID: PAT_MRT4530_55228C.1.pep
VDGDDEKGGRSGGRRRRGSGRRGRRRSGGRRTRQGGGRGRRRCGEAGGGDAGAGDGPGERRRPAEGXGNRGERERRRELDCRRGGRAARGGNGQRRCGEGLNRVGRGRGAPQQKPWADMIANVMREQFGHKPKDSENLYRHPYPEYFERVPLSNRYKVPDFSKFSGQDNVTTYEHVSXFLVQCRESSATDALRVRLFPLSLSRLAFTWFSSLPYNFVQSWADLEKQFHKYFYSSSISTFIAGFIXMKLSDLTSIKQKHDKSVQDYIQRFRDMRNRCFSLALTDSQLADLAFQGLLVPIKEKFSAQEFESLAHLAQKVNNVSTYVSETEEDEDPEVAIAEWARNKXVVTCQWVKDSGKEEKIDFDITKDDRIFDLLLREKQIHLPAGHVIPSATELGKRKYCKWHNTRSHNTNECTVFRQQIQSAIEQGRIKFDDPKKSMEIDGNPFPVNMNEGMRLPSKEGCPXCSDADENHVGSSSQFRPGKENRSVQKKLPVDQRLGPLSLVPVQIPGTKDRSLVPVGVTNRD

SEQ ID NO: 155469 - protein, 601 aa, Oryza sativa
  Clone ID: PAT_MRT4530_55229C.1.pep
MASTFGATSTVGLMAAPTGIVSDKKPSSLSSVSSVSVASRPRNARLQRKCNFRVKAAKELYFNKDGSAIKKLQTGVNKLADLVGVTLGPKGRNVVLESKYGSPRIVNDGVTVAREVELEDPVENIGAKLVRQAAAKTNDLAGDGTTTSVVLAQGLIAEGVKVVAAGANPVQITRGIEKTAKALVEELKKLSKEVEDSELADVAAVSAGNNYEIGNMIAEAMSKVGRKGVVTLEEGRSSENNLYVVEGMQFERGYISPYFVTDSEKMSAEYENCKLLLVDKKITNARDLINVLEEAIRGAYPILIIAEDIEQEALATLVVNKLRGSLKIAAIKAPGFGERKTQYLDDIAILTGATVIRDEVGLSLDKADKSVLGTAAKVVLNKESTTIVGDGSTQEEVTKRVAQIKNLIEAAEQEYEKEKLNERIAKLAGGVAVIQVGAQTETELKEKKLRVEDALNATKAAVEEGIVVGGGCTLLRLAARVDAIKDNLENDEQKVGAEIVRRALSYPLKLIAKNAGVNGSVVTEKVLSNDNFKFGYNAATGQYEDLMAAGIIDPTKVVRCCLEHAASVAKTFLTSDVVVVEIKEPEPAPVTNPMDNSGYGY

SEQ ID NO: 155470 - protein, 381 aa, Oryza sativa
  Clone ID: PAT_MRT4530_5522C.1.pep
MAAEAWRARFRERVVEAAGRWERVREGLATALAHVTSPMLAADEEAAAAARTRIQLAMGQLEDASRDLASAMSLMKAADLLALHGDSVNPSTFLGGIGHLGAQYLAERIAVTKLREAWEDARDAYTNVEWCRSHLDAILLMLDHPHLPSVDGLIEEDRAAADGFLQAAIGRAELGNERAVDARQDRASESDMAAEAWRSRFRERVVEAAERWESVGESLATALTHLKSPMHAGDEEEAAAARTRIQLAMGELVDASRNLASAMSLMKVAELLALHGGSVNPSTHLGEISLLGDQYLAERNAGIKLLEAGKDARKAYISVDGCRGNLDAILLLLDHPRVPCVDDFIEEELFVAGDNLQGAIGNAKLGTERAVGARQDVSGAN

SEQ ID NO: 155471 - protein, 1533 aa, Oryza sativa
  unsure (1)..(1533): unsure at all Xaa locations
  Clone ID: PAT_MRT4530_55230C.1.pep
MLWAVDETRAETVLAAQDREDRNRGKICKLEDKVDRLEKELAALKGEAPPQKARIRLTARKRALFVPRYQLAPKFSPVSLLVSCPCQMVLTHSNGNGPQXNNNNNNNNGENPTLAQVLAQQTQLMNMMMQQLQNQQNQGNNHAPPQNKLAEFLRVRPPIFSSTTNPVEAGDWLHAIEKKLDLLQCTDQEKVSFASHQLHGPASEWWDHFRLNRTIAEPITWLEFTAAFRKTHIASGVVSLKKKEFRSLTQGSRSVTEYLHEFNRLARYAPEDVRNDEERXEKFLEGLNDELSYSLMTGDYLDFQKLVDKAIRQEDKYNRMEQKKRRIAQFKTQQGNNQRPGFTLGPPSMPQGASTQQQPAKKEQGSKPVVCFNCGDPGHYADKCPKPRRVKVVPAQSNSTAPAPKARVNHVAAAEAQGAPDVILGTFLVNLVPATVLFDSGATHSFLSMSFAGNHGMEVEDLRRPLMVSXPSNQALSLQRSPSVRIEIKGVPFLANLILLESKDLDVILRMDWLARHKGVIDCANRKVTLTSNDGRVVTVHALSSEFLRSRLNQIXLEEIPIVREYPDVFPDDLPGMPPKRDIEFRIDLVXPGTTPIHKRPYRMAANELAEVKRQVDDLLQKGYIRPSSSPWGAPVIFVEKKDHTQRMCVDYRALNDVTIKNKYPLPRIDDLFDQLKGATVFSKIDLRSGYHQLRIKEEDIPKTAFTTRYGLFECTVMSFGLTNAPAFFMNLMNKVFMEYLDKFVVVFIDDILIYSRTKEEHEEHLRLALEKLRGHQLYAKFSKCEFWLSEVKFLGHVISAGGVAVDPSNVESVTNWKQPKTVSEIRSFLGLTGYYRRFIENFSKIAKPMTRLLQKDVKYKWSEECEQSFQELKNRLISAPILILPDPKKGFXVYCDASKLGLGCVLMQDGKVVAYASRQLRPHEKNYPTHDLELAAVVHALKIWRHYLFGTRTEVYTDHKSLKYIFTQPDLNMRQRRWLELIKDYDMGIHYHPGKANVVADALSRKGYCKATEGXQLPLELCQEVERLNLGIVRRGFVAALEAKPTLIDQVREAQINDPDIQEIKKNMRGGKAIGFLEDEQGTVWLGERICVPDNKDLKDAILKEAHDTLYSIHPGSTKMYQDLKERFWWASMKREIAEYVAVCDVCQRVKAEHQKPAGLLQPLKIPEWKWEEIGMDFITGLPRTSTGHDSIWVIVDRFIKVAHFIPVKTTYSGSQLAELYMARIVCLHGVPKKIVSDRGSQFTSNFWKKLQEEMGSKLNFSTAYHPETDGQTERVNQILEDMLRACALDFGGSWDKNLPYAEFLYNNSYQASLQMAPYEALYGRKCRTPLLWDQTGERQVFGMDILREAEEKVKIIQEGLRVAQSRHKSYADNRRRDLSFEEGDYVYLRVTPLRGVHRFHTKGXLAPRFVGPYKIVSRSGEVAYQLELPQSLAGVHNVFHVSQLKKCLRVPTEEANLEQIEVQEDLTYVEKPIRILEIDERRTRNRVIRFCKVQWSNHSEEESTWEREDELKSAHPHLFASSSESRGRDSV

SEQ ID NO: 155472 - protein, 273 aa, Oryza sativa
  Clone ID: PAT_MRT4530_55231C.1.pep
MEKYEKLEKVGEGTYGKVYKAQDRATGQLVALKKTRLEMDEEGIPPTALREISILRLLSQSLYVVRLLSVEQATKNGKPVLYLVFEFLDTDLKKFVDAYRKGPNPRPLPTNVIKSFLYQLCKGVAHCHGHGVLHRDLKPQNLLVDKEKGILKIADLGLGRAFTVPMKSYTHEIVTLWYRAPEVLLGSTHYSTGVDIWLLGTPTEEQWPGVTDLRDWHEFPQWKPQILERQVPSLEPEGVDLLSKMLQYNPANRISAKAAMEHPYFDSLDKSQF

SEQ ID NO: 155473 - protein, 215 aa, Oryza sativa
  unsure (1)..(215): unsure at all Xaa locations
  Clone ID: PAT_MRT4530_55232C.1.pep
AACGSGAGAPGLASAGAVGPTRQPHPRARAADGRAPRGSHSTRPRAAKPAQSAGVGAPAPRWSPPATTGAAERRPREGRKGGKEATVHGSPRGDGGDGGGGRSGGRRWCGSGRRGRRRSSGRRPKRRGGRGRQGCGEAEGGGTEVGGGPGRRRRQTGALRRRRRERATSXARIRRGGRVARGGNGWRRCGEGLNRVGRGRERPEGKETGVGGRPP

SEQ ID NO: 155474 - protein, 72 aa, Oryza sativa
  Clone ID: PAT_MRT4530_55233C.1.pep
AFCCYLGFLTLGARRGTGARLTSGLPPEYLPSGLRSSTPEPKASPLPPIPTSTGHFDGAYAKEHLRLKNSPY

SEQ ID NO: 155475 - protein, 355 aa, Oryza sativa
  unsure (1)..(355): unsure at all Xaa locations
  Clone ID: PAT_MRT4530_55234C.1.pep
MDLLRQPRGGARGPGPRGWGPRGSPTVHGGPGAPGLTPAGAVGPTRQPHPRTRAADSRAPRGSRTVRPKAATPAQXAGGGAPAPLWHGGAAAERGEGKGEKKRRSTAHPGSTATTETATGAEEGGGAARVDGVDGAPAVGERNGGVDEVAGDAVKPKVATPRREVVRGDDGGGPELGGDGGERERRRELDSDGERGRRVAETVEGGTGKVYIGLGGGGSCRTRGKRARKIRSPLMAPARLGERFPNESEGEREGKMGGKREGITGNISPHFIARXTAGGGGIRGGGGARARARRRERREEGDDGWAPPVSEGGGRARPSAARARGGGRMGRGXRGERGREMGRAGPRGGGGGKGL

SEQ ID NO: 155476 - protein, 69 aa, Oryza sativa
  Clone ID: PAT_MRT4530_55235C.1.pep
MNQAKRATMKQMVIPQWNAGGEWLPTTGDGQRPSATGNDQRQPATSPRPHEAPTASNGWRRAAGDDERR

SEQ ID NO: 155477 - protein, 1104 aa, Oryza sativa
  unsure (1)..(1104): unsure at all Xaa locations
  Clone ID: PAT_MRT4530_55236C.1.pep
MRVRAAEPPPPVVRQGEEKPGRTSSFVAGRRSSPLPVKPSRRRRSSRRRPSSFVVWLKGEYRWVRLVVLHVYMSSKFAADHPISGEVANPGRPLMIRAEQPSPPSPPLAATAISTTNPVEAGDWLHAIEKKLDLLQCTDQEKVSFASHQLHGPASEWWDHFRLNRTTAEPITWLEFTAAFRKTHIPSGVVSLKKKEFRSLTQGSRSVTEYLHEFNRLARYAPEDKLVDKAIRQEDKYNRIEQKKRRIAQFKTQQGNSQRPRLTLGPQSMPQGGSSSVVRPQRQFFNNNAGNNIRNQALRPVAASTQQQPAKREQGRKPVVCFNCGDPGHYADKCPKPRRVKVVPAQSNSTAPAPKARVNHVAAAEAQDAPDVILXKGYIRPSSSPWGAPVIFVEKKDHTQRMCVDYHALNDVTIKNKYPLPRIDDLFDQLKGATVFSKIDLRSGYHQLRIKEEDIPKTAFTTRYGLFECTVMSFGLTNAPAFFMNLMNKKQPKTISEIRSFLGLVGYYRRFIENFSKIAKPITRLLQKDVKYKWSEECEQSFQELKSRLISAPILILPDPKKGFQVYCDASKLGLGCVLMQDGKVVAYASRQLHPHEKNYPTHDLELAAVVHALKIWRHYLFGTRTEVYTDHKSLKYIFTQPDLNMRQRRWLELIKDYNMGIHYHQGKANVVADALSRKGYCNATEGRQLPLELCKEFERLNLGIVSSGFVAALEAKPTLIDQVREAQINDPDVQEIKKNMRRGKAIGFLEDEQGTVWLGERICVPDNKDLKDAILEEAHDTLYSIHPGSTKMYQDLKEGFWWASMKREIAEYVAPLKIPEWKWEEIGMDFITGLPRTSSGHDSIWVIVDRLTKVAHFIPVKTTYSGSRLAELYMARIVCLHGVPKKIVSDRGSQFTSKFWKKLQEEMGYKLNFSTAYHPQTDGQTERVNQILEDMLRACALDFGGSWDKNLPYAEFSYNNSYQTSLQMAPYEALYGRKCRTPLLWDQTGERQVFGTDILREAEEKSRHKSYADNRRRDLSFEEGDYVYLRVTPLRGVHRFHTKGKLAPRFMGPYKIVSRRGEVAYQLELPQSLAGVHDVFHVSQLKTCLRVPTEEASLEQIEI

SEQ ID NO: 155478 - protein, 331 aa, Oryza sativa
  Clone ID: PAT_MRT4530_55237C.1.pep
MEENLAISIVTLCLTYLVLVGGVKIHIDRDGIIGSTIPSKDLNMTIQELIVQKTGDGDVYDCVDIYKQPAMNHPLLKNHIIQMEPSSYPLDLDIQSILSSNISESNFPDIKCPTGTIPILRHNSSEAHMPNGGSQEEVWPSFSGDNFVRFHIRWVDSSNKPCYDFNCPGFVQVSQLAGIGGKITPVSIYNGPQYIITVMLFQDRKTKDWWLARLDKSSAIGYRPLGYWPSKLFDTLQEKATYAFWGGWVRGPTVSLDPPPMGSGHFAKEGYRKAALVKGIRIANKDNNFVNPNVGKATTVTTRGLCYTVDGFGVLKMGMHVFFGGPGQCPN

SEQ ID NO: 155479 - protein, 68 aa, Oryza sativa
  Clone ID: PAT_MRT4530_55238C.1.pep
SLFQFLNLFKWPQIRKRVLRLRFIAAPIVPAQKRKDFLELALEPWSSWYPCLLYNPVDFQGRMKFLPP

SEQ ID NO: 155480 - protein, 643 aa, Oryza sativa
  Clone ID: PAT_MRT4530_55239C.1.pep
MIYTAIDTFYLTDEQLRDSPSRKDGIDEATETALRVYGCDLIQESGILLKLPQAVMATAQVLFHRFYCKKSFVRFSVKRVAASCVWLAGKLEESPRRSKHIIIVFHRMECRRENVPIEHLDVFSKKYSDLKHDLVRTERHLLKEMGFICHVEHPHKFISNYLATLEAPELTQEAWNLANDSLRTTLCVRFKSEVVACGVVYAAARRHGVPLPEDPPWWNVFDADEAGIQEVCRVLAHLYSLPKSQYIQVYKDNDSFTHRRTSDTNASKESPATTVASDKGTPVPSSSSQEKDALIKAGSDKVKEKGDDDGKTLPSEPNGKEGPAVNLKSEKSESNVDRSRERERDRSRGRDRDSRGRDSDRDSKGRDSDRERERDREADRDRQRRHHSKDRSSGYSDKEKSRHRSSREKEFFFCDHRTNVPQYPLYPVYGYPPSTVARQVGGLGAQGSTIMTSSFVNNSVNNGVKQKSTQTHKASSASTANHPSHLAVLVLGLNILGPFPRGQAGYKFLFVAIDKFTKWIEAIPTGEIKADNAIKFIKRIFCRYGLPHRIITDNGSQFISADFQDYCIGLEVKICFASVSHPQSNGQFERTNGIVLQGIKTRVYDRLMSHDKKWVEELPSVLWAVRTTPTTSNKETPFFLVYS

SEQ ID NO: 155481 - protein, 66 aa, Oryza sativa
  Clone ID: PAT_MRT4530_5523C.1.pep
CKNSQAHAQGLLYLLIKDEFNRVLVIQKFLQLLPTAYLTKKNMGSCSGYLAYLGESVSLQDNLAIA

SEQ ID NO: 155482 - protein, 308 aa, Oryza sativa
  Clone ID: PAT_MRT4530_55240C.1.pep
MMKPPSKTEVEPSNMIPVTLDDFVGEDRKAMEEYINELTRETLMRASTRTRQGVIIKPGPRPKLAPDLTEPQTKPYPLDMWKYGSALQQRHELNPYSTQGESARGPGPRGWGPRGSLTVHGGLGAPGLTPAGAVGPTRQPHSRARAADGRAPRGGHSARPKAATTARSAAGGTRAPMVAGSGHRHGGAAVERGEGKGEKRRWSTAHPRSTATTKKAARAEEGGGAARVDGVGGVPAVSELGVGVDGVDGGAAKPEEATPGRETVLASGEGRPEVVGDGGERGQRRELDSGEEKARQRVETGEGGAGRV

SEQ ID NO: 155483 - protein, 393 aa, Oryza sativa
  Clone ID: PAT_MRT4530_55241C.1.pep
MTVANYVGKMRALADELVVSGKFVDNDELISYIIASLEEDYEHVIQSIVGRPDQVTVSEAFFQLLSFEHRLLLCRGEEGQASANRGQSHNTIGGGSNNRTRGGSNNVGNGNRGGRGRGNPSGARGNPGGVDNRPKCQLCYKRGHTVKDCWFRYDENFVLDERFASSAISYGVDTNWYLDTGATDHATGELEKLTVHDKYHGNDQIHTASEAGNGGGSAVGRGEANAAELAGPLMACAADGGGEASALPGGPTEVKREQRQEEKRVDWFTTTCGNGDRICLVCRDAVLGIGVVAFAYFFRAVSSDFTARAIACCHVFTHTFFSVLGTPVWRWRIHVIVSLCCGRFHVRIFWSHELMSTTEDPSSAQNNDDDDDDDDGPPRPRTSVWNQKGEGLH

SEQ ID NO: 155484 - protein, 313 aa, Oryza sativa
  Clone ID: PAT_MRT4530_55242C.1.pep
MAAAGEEASGGRDKYRSFMYGEGEKDTVWRLGSPPNYDVVNKLFEEERTKEWPEGSLEEKVQRLLKTWEMELIHKVRPEDQKSVHSQKFCASTNGMRFLSRKEVMAIGGYNAFLQTKLPPEHRIYDPDNETLESGMATFLTAFPRGFAIEVLDVYSGPPRIVFKFRHWGHMEGPFMEHPPHGERVEFFGICIFHDEAWHISIGANVSSLRDNTLNSGLRRVPRGFRLDGMGQGVRQTASRHLTRDMTDFLKGVGVPRPSGPGQAQPDPPSGEIRRRADTSPSGPTSPKVPGHVGDCVCLKPLVMILPVPYHRQ

SEQ ID NO: 155485 - protein, 63 aa, Oryza sativa
  Clone ID: PAT_MRT4530_55243C.1.pep
MAKPACALMAREAENGIHDPMKGGREAASEDAMVSVARIAVRREEVWGMTNRRVPELVAALSI

SEQ ID NO: 155486 - protein, 47 aa, Oryza sativa
  Clone ID: PAT_MRT4530_55244C.1.pep
PEKSSFKNWLSSILSSCICSCDLPKCMSIQVFRTSFSISFLKTILCL

SEQ ID NO: 155487 - protein, 92 aa, Oryza sativa
  Clone ID: PAT_MRT4530_55245C.1.pep
PTFSLPSPSPSVAPALSTSGTVGVSSPSASLPPPSSSYHAWHQVRGRHRQAAARPAASPPGRRRRGRWHGASHLSDTSTGKSGGAVKSSGPG

SEQ ID NO: 155488 - protein, 83 aa, Oryza sativa
  Clone ID: PAT_MRT4530_55246C.1.pep
QPATEPARFPPIPLLSASAQKHPSAQRSLSTLPLLLLSLCGGPVGRFSPFVDPSPPLPLPLPPPTAPLPTGGATPIPPPRAPP

SEQ ID NO: 155489 - protein, 438 aa, Oryza sativa
  Clone ID: PAT_MRT4530_55247C.1.pep
MDADEVVEEKDSGILSQDFFCTPDYITPDAPQLGSGFDANKENIPCPNSPEKSVCRSKRYKRDCSPKGLGSNDIFDSQWIAPVQFEGLDDSEEEQLKESSSHKRGSYVSQSAVALRCRVMPPPCIRNPYLNTDHQIDDNVFGGRQCKSSGFSPSVDGDGLSRYRTDFHEIEVIHFHFMLVLLMSTLDFQQIGRGNFSVVFKVLKRIDGCLYAVKRSIRQLHNDRERRQAVKEVQALAALGCHENIVGYFTSWFENKQLFIQMELCDRCLSMDRNQPLKCGEALELLYQICKGLDFIHERGIAHLDVKPDNIYVRNGVYKLGDFGCATLIDRSLAIEDGDSRYMPPEMLNDKYEHLDKVDIFSLGAAIYELIRGTQLPDSGPQFTSLREGKIALLPGCPMQFQSLIKSMMDPDPVRRPSAKEVLRHPIFDKLHKAPAKK

SEQ ID NO: 155490 - protein, 170 aa, Oryza sativa
  Clone ID: PAT_MRT4530_55248C.1.pep
MGPHMSSSLSPTLYPPSLSPLLSIPLSLQPAERGRRLPKRATGGMEWSGGGGGNNGGGGRRRSSSSCWKTLRASPFELSRMASQKPEKKGPPEGEEKPNEVTMCKIVDKYNGSVDICAHCWGGIRHPKDGGFVGYVGALPEGLTINHANMLMLEDKVVGDPTGIIRAISR

SEQ ID NO: 155491 - protein, 256 aa, Oryza sativa
  unsure (1)..(256): unsure at all Xaa locations
  Clone ID: PAT_MRT4530_55249C.1.pep
HSXALSSSLAGRAHSRGHAFAFLRRRLNPFPCRPVPHSHAPSAQSFSPATLYIWKTLRASPFELSRMASQKPEKKGPPDAAEEFFHHRMLQPDAISRDRSKLPGPLNWQEHKNTSQCHQTRVCTRLAMHYYNLENPANKATKGVAKDSHMFILRLADKQCFWHVYFRATVAGCSTPLFAELRGEEKPNEVTMCKIVDKYTGSVDICAHCWGGIRHPKDGGFVGYVGALPEGLTINHANMLMLEVRKEERDLKDENC

SEQ ID NO: 155492 - protein, 83 aa, Oryza sativa
  Clone ID: PAT_MRT4530_5524C.1.pep
AMKGNCAQGANRLSPFLGRFPNAQGRWRFRFGERTVCGKHITVDGSLISHHRPHALCFRLEGCVMWGTDNGFPFDTVKTYLRI

SEQ ID NO: 155493 - protein, 65 aa, Oryza sativa
  Clone ID: PAT_MRT4530_55250C.1.pep
HPKNFRPDALFSGNTADPSVFNNAIAMLLGNDLSIDCRPVLGDGIMFNSSSWSNMPHACEMSEFK

SEQ ID NO: 155494 - protein, 190 aa, Oryza sativa
  Clone ID: PAT_MRT4530_55251C.1.pep
MEVAEPCATGGSDGAACAGVGPCGATNERWRRVRRRGRAELCAGGGAPRNRGGARGRRSRDGRSPAALVEATMPAGRGGDRCTEFPCRAGREQEAEYPGARVAWRVVVKFDVVVGSILTMLAPRRCSAAAHKDEASAKQSKHDTEAASWGLTLFRHGRSMEQRRRDEAESTRSIVGASRPTTRGRSAARR

SEQ ID NO: 155495 - protein, 36 aa, Oryza sativa
  Clone ID: PAT_MRT4530_55253C.1.pep
DTIFITTGNTFKNTCITPQIISSAQQMSNIISPLFP

SEQ ID NO: 155496 - protein, 132 aa, Oryza sativa
  Clone ID: PAT_MRT4530_55254C.1.pep
KKKKKKGEKKKKKGGGRFRGPRFPSPCLQRITFFLGSPNFISLAAFFHRGDWKTLGFPQFNRFAALPLFPSWRISEKARPDRLFQHLPNPIGKWDPPFSGPLSPGVVGVTPRVTVTFASPLAPAPFGFFPSF

SEQ ID NO: 155497 - protein, 101 aa, Oryza sativa
  Clone ID: PAT_MRT4530_55255C.1.pep
CNKIKLPNEISRKPTLRNTIVLLQRDRSNTEWYKTVASQRFCSIANQELTILNPSVACSLNPEGNKEEIIATNKEKIGVPTGQSILEVNDNRRVGKNKRVN

SEQ ID NO: 155498 - protein, 83 aa, Oryza sativa
  unsure (1)..(83): unsure at all Xaa locations
  Clone ID: PAT_MRT4530_55256C.1.pep
MGSSWTLDQNKVFELALATYGKDTPDRWENVARAVGGGKTEDDAKRYYKKLENDIXRIDLTGGRSFNGRSRSEGKRCCKCQGW

SEQ ID NO: 155499 - protein, 799 aa, Oryza sativa
  Clone ID: PAT_MRT4530_55257C.1.pep
MEQDQGVAAAAASENPSAGQGAHDSGSAGAGAAASSIASFDSATANPDANVYSQNPSSVPQADGAQGADASVYPADHAPLNGTSGQVVDYQSAGAAENGAATNEMGEPVPEQSYADAVLSAEEARLWNAVTANCLDFNAWTALIDETEKTAESNILKLRKVYDAFLAEFPLCFGYWKKYADHEARLDGVTKVIEVYERAVLAVTYSVDIWYNYCQFAISTYEDPDIIRRLFERGLAYVGTDYRSNILWDEYIKYEESLQAWSHLAIIYTRILEHPITQLDRYFHCLKELAATRSLSEILTSEEAAMYSVTAENTAQTLDGETQPGDVDMSAQPEISGSTEADNLAKYVSVREEMYNKAKEYESKIIGFELAIRRPYFHVKPLDNPELENWHNYLDLIEKEEDINKLFEFLISYMQVIKLYERCVIACASYSEFWIRYVLCMEARGSIELANNALARATHVFVKKQAEIHLFSARFKELSGDVSGARVEYQHLYSDLYPGLLEAIVKHSNMEHRLGDKESACSIYEKAIAAEKEKDRSQILPTLLIQYSRFLSLAIGDIEKAKETLTGFLEQCDLTKSIIEAIMQLESILPSEKRIEFLDSLVEKFLTAEPTEGEVTSLADKEDISSIFLEFLDLFGDAQAIKKATNRHLTHFSRKRSMLSSKKRRADDVIMSDRDKLARIGDGTQPVVGTDPNAHNPPVWPATSEASGQQWGAAYAPQATYPAYGTYDYSHQMPQSAPQAAAYGAYPPTYPAQAYTQQTYAQPSAMAVAAPAPAVAPAAAYPQQPVAAQQPYYGTGTYY

SEQ ID NO: 155500 - protein, 74 aa, Oryza sativa
  Clone ID: PAT_MRT4530_55258C.1.pep
LGHFTTGQQGCHHHVVILPSHTPSTAAQHFGHTPHTGTHTHTQHHGHHSHHHAQAPFSVHPLHRNDTRNHWHIH

SEQ ID NO: 155501 - protein, 363 aa, Oryza sativa
  unsure (1)..(363): unsure at all Xaa locations
  Clone ID: PAT_MRT4530_55259C.1.pep
MAAERDIDDLPRGGANYTALTPLWFLERAALAHPARASVVHGPVRYTWADTYRRCRRLASALERRSVGHGSTVAVIAPNIPAVYEAHFGVPMAGAVVNCVNIRLNAPTVAFLLEHSSAEVVMVDQEFFSLXEDSLRIIAEQKKGAFKQPLLIVIGDQTCDPVSLXSALSKGAIECVRFLETGDPEFAWKPPQDEWKSIALGYTSGTTSNPKGVVLHHRGAYLMSLSGALVWGMNEGAVYLWTLPMFHCNGWCYTWTLAALCGTSICLRQVTAKAIFSAIANQGVTHFCGAPVVLNTIVNAPPADAILPLPRVVNVMTAGAAPPPXVLAXMXKLGFRITHTYRLSETYGPSTVXAWXPEWDELA

SEQ ID NO: 155502 - protein, 698 aa, Oryza sativa
  Clone ID: PAT_MRT4530_5525C.1.pep
MVNFGKKLMADQIPEWKGYYINYKLMKKKVKQYGQQVQQGEKDRRRVLKDFSKMLDDQIEKIVLFLLEQQGALASRIEKLGKQRAILAEQPDISAIAELREAYREVGLDLIKLLKFVDLNATGIRKILKKFDKRFGYRFTDYYVTSRSNHPYSQLQQVFKHVGVGAVVGALSRNLADLQERQGSYLSIYDQPSTALKDPIIDMINSSVDKLTRSTNFLRFLGQHALIVGEESPSTAEEEEIEDQKYHFMSLMLNLVNTFLYMVNTYIIVPTADDYSVSLGAASTVCGVVIGSMAVAQIFSSVYFSAWSNKSYFRPLIFSSIVLFLGNVCYAMAYDMKSLTVLIIGRLLCGMGSARAVNRRYISDCVPARIRMQASAGFVSASALGMACGPALAGLLQWKFKIYMVTFNQSTLPGWVMAVAWLLYLVWLWISFKEPNRATEVNGTQQNPASVQRADIEQLENGLAQPLLRDSSKKDEDDDEEVDDSEEGTHDSRKPATSIGSAYRLLTPSVKVQLLIYFMLKYAMEILLSESSVITNHYFNWNTSAVAIFLAILGLTVLPVNAVVGTYISNMFEDRQLLMVSQITLLVGIIFSFKITSTYSVVQYVVSALVTFVSAEVLEGVNLSLLSSVMSSRLSRGTYNGGLLSTEAGTLARVVADCTITAAGYLGIGKLLNVTLLPSLVICAASIASTFLTYNSLF

SEQ ID NO: 155503 - protein, 209 aa, Oryza sativa
  unsure (1)..(209): unsure at all Xaa locations
  Clone ID: PAT_MRT4530_55260C.1.pep
SRSRTATAAARRTPPPPPAPPPPRAAAAPPSPPPPTPPSPWPRGRGRLTAGPHMAAAGRARRRPRRHSXGRRRARAPMVAGGGHRHGGAAAERGEGKGEEKRRSSAHPGSTATTETATGAKEGGGAARVDGVDGVPAVGDRNGGVDEVGEDAAKPKEAAPRWETVRGDDGGGPELGGDGGERERRRELKSGEEEGRREAEPDGGGAGRV

SEQ ID NO: 155504 - protein, 58 aa, Oryza sativa
  Clone ID: PAT_MRT4530_55261C.1.pep
MSLYRLSKTTAIISEICRYSLVVGADADDDNDCRDDNGADTWVPPPAATTTPPRSTAG

SEQ ID NO: 155505 - protein, 181 aa, Oryza sativa
  Clone ID: PAT_MRT4530_55262C.1.pep
KDPRCLLYPSPPSPSPLVVGIALAPCALALPSPPPLQPCAAVVSAVAVAREDHRRARQVVAVLVRLFAVAGDHRSSIAVVNPKVPAASSSSPSPSVGLPPPFRSPVSSPRCPLRLGALRLRPSAAVRRRACAVRAVSSAEPPPLSVTSPLTSSGSSAVSRRGPDRSRPSILDRLNLGRPFA

SEQ ID NO: 155506 - protein, 94 aa, Oryza sativa
  Clone ID: PAT_MRT4530_55263C.1.pep
IKGQSPPFPLKKPMSFYKKGVLENPRGKTPRGSQKKQRQNEIQLAQALKFYAGLKVLCYLSITQLIFLQITIGSSTTSLSTASIKQPRVTPIKL

SEQ ID NO: 155507 - protein, 659 aa, Oryza sativa
  Clone ID: PAT_MRT4530_55264C.1.pep
RRVPRHPRPRAAAAGCPRRLLAGPGRRRPRPLVVPDRRGVRPSVKPFSSVVRVRQASRCSPVLVFVLGSASSSLVPAASRLRPRIAAEAVPSPFVSVVPVCLRRARSSLSFPRLVAWWSVEDIVSCLPKLQKTAGSASEVEEAVKPAGKQDKRLRSVKVLSLVSNLSLPFVFPLSLSKPLQQMADNEKGNKVRSQDIGTSNSRVNEAPDTSCVAVVQHLINQNKLLIEILQQHRMPILNPSQMQPQVQLEAVQALTPQVSAPPTSQKAPHAMPHVDPKEASIICFMCDEQGHYARNCPQQKRKAPMRTEDEVRKMIITSTEWPPPGMTKHQRRNSFRGAQQLTEHLLANGGRVSDSEDSDQVSSDDEGAKPPQGFNQNKIELKACSRCGEIGHVASSCASICVHCEEDHPPDRCPTSRITCFFCEGTDHVPKDCRFSFLLTKKMANQPASSNGEKHQGNTNPRQDSSFSLTPVPGQRNQNEKRKCRVREDICCFNCQGMGHFADKCPKPRNVAASTSVHANPRNQKLAPQRIVIHASRSSPIARVATAPTPMSALPQGVNAQFQPQPPADKTEASICVVPLEVPIQQLRNQVQDEEPECKKVIVCYNCNEEGHYSKNCPQPRQNRPPHYRQFTRSRHSNRIVVTGANAVPVRPRVNQNP

SEQ ID NO: 155508 - protein, 383 aa, Oryza sativa
  unsure (1)..(383): unsure at all Xaa locations
  Clone ID: PAT_MRT4530_55265C.1.pep
MSRVSTSWGFVYSRVNKAEGRGARTGSTGVGPTRQPHGPRWTGCTRLAPAGAVGPTRQPHPRARAADGRAPHGSRGARPKAASPARPTGGGAPAPRWSPAATSGATERRPREGREGGSEMAVLGSPRVDGDDGNGDRSGERRRRGSGRRGRRRSGGRRAKRRGGRGRRGRGEAEGGDAEAGGGPGRRRRRTEARRRRRRERTTARARFRRGEKAARVGNGGGRHGECLNSVGSERGRPEGKETGAAIXGSINDAGEVCGRXFQTNPREREREKWGERGRESRGVISPXSLLRAGAAGCGGIRGGGGARARARRRARREVGDDGWAPPVSEGGGRARPSATRARGKADGPRGRXREREGAGPSRPKRGRGEKGLLGIFLFIKPL

SEQ ID NO: 155509 - protein, 553 aa, Oryza sativa
  Clone ID: PAT_MRT4530_55266C.1.pep
MAGPRALAVAAAVVVAAWAVAAAGDPPLSPKGLNYEVAALMAVKSRMRDEKGVMGGWDINSVDPCTWSMVACSPDGFVVSLQMANNGLAGTLSPSIGNLSHLQTMLLQNNMISGGIPPEIGKLTNLKALDLSGNQFVGEIPSSLGRLTELNYLRLDKNNLSGQIPEDVAKLPGLTFLDLSSNNLSGPVPKIYAHDYRWRLPFASADQDLEIELGHLKHFSFHELQSATDNFNSKNILGQGGFGVVYKGCLRNGALVAVKRLKDPDITGEVQFQTEVELIGLAVHRNLLRLYGFCMTSKERLLVYPYMPNGSVADRLRDYHHGKPSLDWSKRMRIAVGAARGLLYLHEQCNPKIIHRDVKAANILLDESFEAIVGDFGLAKLLDRQESHVTTAVRGTIGHIAPEYLSTGQSSEKTDVYGFGILLLELITGPKTLSNGHAQSQKGMILDWVREVKEENKLDKLVDRDLKYSFDFAELECSVDVILQCTQTNPILRPKMSEVLNALEANVTLPENGIDLNREVPPYGGSCSFSVRHEDPHDSSSFIIEPIELSGPR

SEQ ID NO: 155510 - protein, 551 aa, Oryza sativa
  unsure (1)..(551): unsure at all Xaa locations
  Clone ID: PAT_MRT4530_55267C.1.pep
FLWSLLSYDFGPTSKFLPSCRESERAHDRTLCITPSNQAHHTSGFTPTPRKAAGSPLSCLGESGSRIDRRRAHPNSITPTLAWKRRLLTLAKGRGSAGKRAPPVSDTRAPVHRGPGPPRRSTAGPREPTARIGAAGARHXQAGPAERWRAAARPSATTAGDGAGRRGGMLTKGGDGETTTGKPAAGSSGRQRWSGGVPRARAAYGDRDDRGGGEGDFSGSRRRRSSGRGAARGWLSEGGNGAGPGINRGRRGRHRWRRQTRRRSRVGGEVGARAARGNNRARGRAXFEAAXGTGSGGALGRRLGGGGGAAVVGERGGGLGCAVGVVLEGWRGGNKRRPDFPLQWRSWRWRRLGVATAVAAGNGDRNSPECGSAWVRRGESEGEYAGLGKNGEMDEGSTGMLFIGXGRRDRARXGGNRRRSGAASWRVWRLGVASIPAGREGEWGGMWSRGGRGLGSTPVGTRGGVGSAXEWAAWPTVGAGRRLGXQVVGEEDDRWVLGSHLSGRERGKRAREVKQTXRERESRAGRGRRRKTWAENGPKRGRGXFNCFLFI

SEQ ID NO: 155511 - protein, 159 aa, Oryza sativa
  Clone ID: PAT_MRT4530_55268C.1.pep
MAAWIEAKTVVMALLAFQTGGDRGGSGISADGALRIGRPASRRSWMRRLYWLGLAERGGTLVAAVMGRAKGGRWQTAKAFIAAASRCRSCNGFGTKGGGMVAKGNRDSSSVPAGVGGNSETGGSRRSAVVRSSGGFKPAVVPVLLVAAPLPHREEDRGV

SEQ ID NO: 155512 - protein, 1167 aa, Oryza sativa
  unsure (1)..(1167): unsure at all Xaa locations
  Clone ID: PAT_MRT4530_55269C.1.pep
RGRLLLQLATSLAEWEARFKKGGGETSSPQRNKPSXGRDKSHIKCFNCEEFGHYSTQCPHPKKKKAEAHLAQTEDAGPALLLAVTEAVQNAPCQDALCGLVVHEERVWPRLMLAEKGAAAGDLWYLDNGASNHMSGDRRKFRELDETVTGQVRFGDASSVQIMGQGSILFSCKNGDQWLLDDVYYIPSLCCNMVSLGQLTETGHRVVMDGDDLEVFDKNPWRLVMKVRRTSNRLYRIELQLASPLLVDKEMVAGVPAVHHPNQLCQACLVAKQVRQSFPGMANYRAEAPLELLHMDLCGPITPSTFAGNRYFMLIVDDFSRWMWVFVIKSKDQALAASEKFKPLAENTAGRTIKTLRTDRGSEFLSGEFARVCDAAGIERHLTAPYSPQQNGVVEHRNRTVMAMARSLLKGMSVPGRMWGEAVRHAVFLLNRLPTKAMGNRTSFEAWMGKKPHLGHLWVFGCTAHTKVTAPHLMKLDDRSNPFVYLGVEEGSKAHRLFDPRRRQIIVSRDVVFDENTPWQWSAAAGEVTSTEFEVEEPVGAEQAASVPWYRAPPAGRRAGKEPEVAEQRGTPPASPARFSPTLPSTPTLGSSSTHSAEVQASPRTPGSDDGPVRYRSLVEIMLEAPRVDLVEDDDDAEALLAEMEEPTSYREAAGETAWVNAMNKELEAIEKNRTWSLCMLPAGRKAIGLKWVFKLKKNTAGEVIKHKARLVAKGYVQRQGVDFDEVYAPVARLDTVRAILAVAADRRWQVHHLDVKSAFLNGDLEEEVYVFQPEGRLPLLSSVPRPAQADGGLPARCRCALTPPPDRVGPTRQADRLCRLARAPAGRAVASSSVAATSSTPACPPFRAVTAGGAFPPSSFFFLRAGRLQPPLPPRRSAVRPRRLLPRPRSHLLSLGQPSVSRGKHRRRVLAGKTVALPPLFHLRPPLSRFPCAGRRRHHLPRLRDATLIPGITSSSPEVRRNAAAAPTTHSSSSARRPAAPPPSPTSQQRVPLRPLLRSAAAACHHRFHVTVRPRRSTSRRSPGSSSRGAASVIVIAAACSTPSSSPCSRCRLSSSPPRRSRSSSSSSSSRRSRPVLVFVLGSASSSLVPAVSRLRPRIAAEVVPSPSVSAAPVRRCRSLASSRGGKDLSSRCPVLVLSVSPRIRCAVVDPGTRVPVSVVVHVCGW

SEQ ID NO: 155513 - protein, 54 aa, Oryza sativa
  unsure (1)..(54): unsure at all Xaa locations
  Clone ID: PAT_MRT4530_5526C.1.pep
LSFIGAALPAMIDDDFSPSASGDMHDRSTATVGYLLIXHLIIPLPFFSHFLVYV

SEQ ID NO: 155514 - protein, 283 aa, Oryza sativa
  unsure (1)..(283): unsure at all Xaa locations
  Clone ID: PAT_MRT4530_55270C.1.pep
VTSPTAAAARRRRRLERRTLAGERRHQDANGGHQDVEDNTANSPVTXTAAEDQQTATATRRKRREPSGRRRRSCSGDLRRRRRVGRGRRRLGEHDGGLPERRRRLKRRRRTAGAAAATAKLGHTALERFRRLEAKARVATGRGDTGGPFKGARRRRRRPTATATAKESSGRTNPRRTRIQLFPKRFSQRFQRRKGRGDPEDHFPSFNSAGEGKERPDXWKGNGGGAKLGFRXAAAEGRRRLTGGPHLSASEGARAXRRTGPAWAEEREXGFGPTFGPKPKEDF

SEQ ID NO: 155515 - protein, 1779 aa, Oryza sativa
  unsure (1)..(1779): unsure at all Xaa locations
  Clone ID: PAT_MRT4530_55271C.1.pep
MTFCRCFGHRGVLHLRRHAVVHRRAREAEPPLVMTSSLTSSTPSVIPTFRESPNLQEKTLKSSKASKATPGLEWYIPGLEIELYSRXGCSEWLGLCNTMPRFKPEYLFGTEGFVLELRTMSFLIGFGTAPLYAQIPHDRDEEKCRVKVTLNSNREDIPSVMFEAGGGNCIHACQEVARITIGELRERYNDQLADTEYRYHPCQPQGSGRGSYLELAGIENDATTRHLVEMLWAMDETRAEIVLAAQDHEDRNRGKICKLEDKVDRLEKELAALKGEAPPQKARVRLTARKRALFVPRYQLAPKMVLTRSNGNGPNNNNNNNNNNNGENPTLAQVLAQQAQLMNMMMHQLQNQQNQGNNHAPPQNKLAXFLRVRPPTFSSTTNPVEAGDWLHAIEKKLDLLQCTDQEKVSFASHQLHGPASEWWDHFRLNRTTAEPITWLEFTAAFRKTHIPSGVVSLKKKEFRALTQGSRSVTEYLHEFNRLARYAPKDVCTDDGRQEKFLEGLNDEFSYPLMTGDYHDFQKLVDKAIRQEDKYNHMEQKKRRIAHFKALQGNSQRPRLAMGPQAVLQGGSSSVVRPQRQFFNNNAGNNNRNQAPRPVATPVQHQPAKREQGSKPGVCFNCGEQGHYSDKCPKPRRVKVVPAXSNSTAPATKARVNHVAAVEAQGALDVILGTFPVNSIPATVLFDSGATHSFLSMSFAGNHGMQVEDLRRPLMVSTPSKQALTSQRSPSVRIEIQGVPFLANLILLESKDLDVILGMDWLARYKGVIDCANRKVTLTSNDGQVVTVHALPSEPLWSSLNQITLEEIPIVREYPDVFLDDLPGMPPKRDIEFRIDLVPGTXPIHKRPYRMAANELAEDKRQVDDLLQKGYIRPSSSPWRAPVIFVEKKDHTQRMCVDYRALNDVTIKNKYPLPRIDDLFDQLKGATVFSKIDLRSGYHQLRIKEEHIPKTVFTTRYGLFECTVMSFGLTNALAFFMNLMNKVFIEYLDKFVVVFINDILIYSRTKEEHEEYLRHALEKLREHQLYAKFSKCEFWLSEIKFLGHIISAGGVAVDPSNVESVTNWKQPKTVSEIRSFMGLAGYYWRFIENFSKIAKPMTRLLQKNVKYKRSEECEQSFQELKSRLISAPILILPDPKKGFQVYCDASKLGLGCVLMQDGKVVAYASRQLRPHEKNYPTLDLELAAVVHALKIWRHYLFGTRTEVYTDHKSLKYIFTQPDLNMRQRRWLELIKDYDMGIHYHPGKANVVADALSRKGYCNATEGRQLPLELCKEFERLNLGIVSRGFVAALEATPTLIDQVREAQVNDPDIQEIKKNIRRGKAISFLEDEQGTVWLGERIYVPENKELKDVILKEAHDTLYSIHPGSTKMYQDLKEKFWWASMKHEIAEYVAVCDVCQRVKAEHQKPTGLLQPLKLPEWKWEEIGMDFITGLPRTSSGHDSILVIVDRLTKVAHFIPVWTTYSGSRLAELYMARIVCLHGVPKKIVSDRGNQFTSKFWKKLQEEMGSKLNFSTAYHPQTDGQTERVNQILEDMLRAYALDFGGSWDKNLPYAEFSYNNSYQASLQMAPYEALYGRKCRTPLFWDQTGERQVFRTDILREVEEKVKIIQKRLRIAQSRHKSYADNRRRDLSFEEGDHVYLRVTPLRGVHRFHTKGKLAPCFAGPYMIVSRRGEVAYQLELPQSLAGVYNVFHVSQLKKCLRVPTEEANLEQIEIQKDLTYVEKPIRILETDEIRTKNRVIRFCKVQWSNHTEEEATWEREDELKSAHPHLFDSSSESRGRDSV

SEQ ID NO: 155516 - protein, 1010 aa, Oryza sativa
  Clone ID: PAT_MRT4530_55272C.1.pep
MTARTCAAGEMNNVVTAVVMENNQRRASISELAYNRRGSGKAPHDGGGDRAVVEEAEQRRTDSSQRAVMATSSNNSDFVHVEGKGVRCSPRLNKFKQSDIGLLKKTCSSLPKKSCASTSGNKKRKRAENGKEGCSFPKDMTLWLLNHVNTELGTLEFDGLSIPIRPLIKKVIGIPEGHMRLKLTEDTDHRLKEKFIEGGRGQSLNKAISRMLLEHNEDEFIVSFMMVALGVYLVPGSNLTVHREYLTAISDVKNIKNLNCCNHVADYLFEAIHDFRINTSINLNVRGCVHILNVIFLDFVAGINVPQGTPRIAHITTAHIDEVKTIATSRSKHADYDSIQIKDIESTVYRDGESPLHESPQHMLSIGYRQDVEEGVHDDATCVDEGQHTPDPQGHIAAGVDEEHMNIGQHTPDPQGAPAAAGDEEQMNMQDGQVGQDPKSTGCDANPNNACDEPPVISELLMKMKEKLKIRRTEIISTCMEQLEFILDKSDNDILSEFSTKLKKLARVKGMASTSEAYRAETRSNYKAEEIGRHSGNVDATDFAEVIAIGAVAAHEVSQFDVQNVRDNNMDGKVHPPAAHKGAMDEGAQTEEDDGKQDEDDEDKGDEKVEDSVDDEYGEDGAGGSHSAGSQGGADENNDTDDSSGDSKQGQQPIPSEEQYPGASMMDSVTDDTSLGTPVYHDVVVIEDSSQESLRANTMVPELTEPIASGERFPDGGSVPPINKQRAKRCKTNHQSVEAIATLRKGIHLDHFVNDTYEKHVVDNFDGDGGATKVNRAWITEQDFRSTLRRKGEVSNNFMWLCCSAIMKDWDSKSKVILDLATVDQLVSPLEKCCDAKVRRTFSKIDLKLIERLYLPVLKEHHWFLIAINLRSRIVQIYDSIRNQNNLQVALDTGTNSSPFGFGDLSTVEYPETPYQVELYATLIQCLMPISVWQQPRYQACNPKYQAPVSALTNTGTSVWCLTATQVPGTKSVTWQYMVLGTRHPGIRSKPRYQDWYLAVPTGYRTWYLT

SEQ ID NO: 155517 - protein, 123 aa, Oryza sativa
  unsure (1)..(123): unsure at all Xaa locations
  Clone ID: PAT_MRT4530_55273C.1.pep
RLRSVGGSKEVHHWLRRRRRRGHLGLAASYDDDNDSSSGGGDSGGGGADGGGXAESVAPSPPRSGRKRRASRQQRRTEEESHRSEGEGPDGEASAGASAGRXGVVAADFFCSLKIFLQVGGSN

SEQ ID NO: 155518 - protein, 82 aa, Oryza sativa
  unsure (1)..(82): unsure at all Xaa locations
  Clone ID: PAT_MRT4530_55274C.1.pep
MVVVAHVLAVAATXMVLAWCVHFRGGLALRSHNTQLIFNTYPVLMLLGLVALXAEGILSYRSLSIIVLCSDPRKKVHMRLHA

SEQ ID NO: 155519 - protein, 358 aa, Oryza sativa
  unsure (1)..(358): unsure at all Xaa locations
  Clone ID: PAT_MRT4530_55275C.1.pep
CFATEARRPVLIWPRWVHGGPGARGXTPAGAVGPTRQPHPRARAADGRAPHGSRGARPKAASPAQPTGGGAPAPLWSPAAGHRHGGAAAERGEGRGKLNGRSTAHPGSTATAETATGAEEGSGAARVDEDGGVPAVGDRNGEVDEVGEVAANPKKATPKREKVRGDDGGGPELGGDGGERXRRRELDSDGERERRVAETVEGGTGSVYIGSGGGERGRMRGNRPRKIRPPLMRRRGLXGETFPNKSEGERERKVGGKREGITGNDFPLFIARGXAGGGGIRGGGGARARARRRERREVGDDGXPPVSEGGGRARPSAARARGGGXIGPRGRGERGREVGRAGPRGEGGGKGLFRVFLF

SEQ ID NO: 155520 - protein, 139 aa, Oryza sativa
  Clone ID: PAT_MRT4530_55276C.1.pep
MANAASGMAVDDECKLKFLELKAKRTYRFIIYKIDEKKKMVVVEKVGEPVLNYDDFAASLPANECRYAIFDYDFVTEENCQKSKIFFIAWSPDTSRVRSKMIYASSKDRFKRELDGIQVELQATDPTEVGLDVIRGRAN

SEQ ID NO: 155521 - protein, 144 aa, Oryza sativa
  Clone ID: PAT_MRT4530_55277C.1.pep
PSDEATSRRPSTPELPHRRAQPTTSTISTGRRRRRAAPAPRPTPPPPSMPVAFVSRQPHRRPAASSPASPAPPAAATRARRRRHAPHRRSAFPARRVTSSCRRQAVAGVVAPPLPSRRAAQFPAARSGGGEAGERRRGWRRPSV

SEQ ID NO: 155522 - protein, 68 aa, Oryza sativa
  Clone ID: PAT_MRT4530_55278C.1.pep
TASISLLPSSSHPSTKGIKGLITPPSWREKKLSARQDRSRLNSFGGGRYIFFRQGSPFSPVVQILLLR

SEQ ID NO: 155523 - protein, 122 aa, Oryza sativa
  Clone ID: PAT_MRT4530_55279C.1.pep
QEIECHASGREKDGSKVEKRKKKSAKQEKSSRNVKQAVSSQTADTVLVDPPNQNQYFATEDMATNSSIGRPFFYQGFPSAGVSTSQIQGHTNIHSVPQCAPQEYSAYGAAHPPPTFGGGRNF

SEQ ID NO: 155524 - protein, 756 aa, Oryza sativa
  Clone ID: PAT_MRT4530_5527C.1.pep
MASRPPLLLQYSSLLLLCLAVSAPPAAAGNVPAPVAAVSKPGCPTKCGAVDIPFPFGIGEHCGLEAPYTNYPFKFDCKPVDGTSKPFFRGMEVTKISMEDGKAWMKMNISKNCYNQSTGTREDNTNTTSVSFSRSPFWISDRDNKIIVIGCETFSYMQINNVSKTTLTCELEVLTGCVPSCRNDPKDGICSGEAGCCKLDFPNGTWYYSTYFSKRNNNSSPCSFITVMETTTFNFNKNYFNSTTFYDTYNGLAKVSLDWIITMDSCDRVKRNTTSYACISGKSRCVDDPKGGYRCKCSDGYEGNPYVKDGCKDINECLDNATYPCPGICKNTLGNFTCSCYPGNYMMNGICIPNQKSGFPKNLVIGASVGAVLLVIIVTYACFIREKRKLQYVKRRYFRQHGGMLLFEEIKSQQGISFKIFSEEELQQATNKFDKQQVLGQGGNATVYKGLLKGNTEIAVKRCITIDMKQKKEFGKEMLILSQTNHRNVVKLLGCCLEVEVPMLVYEFIPNGTLFSLIHGNHNQHISLDTRLRIAHESAEALAYLHSWASPPILHGDVKSSNILLDKDYVAKVSDFGASILAPTDESQFVTLVQGTCGYLDPEYMQTCQLTDKSDVYSFGVVILELLTRKKAFNLESPEDERSLAMRFLSAMKEKRLSDILDDQIMTGDNLEFLEEIAELAKQCLEMSGENRPLMKEVADKLDRLRKVMQHPWAQQNPEEMESLLGDSSYEINNSTVENTGNFSINSELQCLESGR

SEQ ID NO: 155525 - protein, 458 aa, Oryza sativa
  Clone ID: PAT_MRT4530_55280C.1.pep
MRISMALAAAALLLLLSLAAADMSIVSYGERSEEEARRLYAEWKAEHGKSYNAVGEEERRYAAFRDNLRYIDEHNAAADAGVHSFRLGLNRFADLTNEEYRDTYLGLRNKPRRERKVSDRYLAADNEALPESVDWRTKGAVAEIKDQGGCGSCWAFSAIAAVEGINQIVTGDLISLSEQELVDCDTSYNEGCNGGLMDYAFDFIINNGGIDTEDDYPYKGKDERCDVNRKNAKVVTIDSYEDVTPNSETSLQKAVANQPVSVAIEAGGRAFQLYSSGIFTGKCGTALDHGVAAVGYGTENGKDYWIVRNSWGKSWGESGYVRMERNIKASSGKCGIAVEPSYPLKKGENPPNPGPTPPSPTPPPTVCDNYYTCPDSTTCCCIYEYGKYCYAWGCCPLEGATCCDDHYSCCPHEYPICNVQQGTCLMAKDSPLAVKALKRTLAKPNLSFLFGNGKKSSA

SEQ ID NO: 155526 - protein, 470 aa, Oryza sativa
  Clone ID: PAT_MRT4530_55281C.1.pep
MRISMALAAAALLLLLSLAAADMSIVSYGERSEEEARRLYAEWKAEHGKSYNAVGEEERRYAAFRDNLRYIDEHNAAADAGVHSFRLGLNRFADLTNEEYRDTYLGLRNKPRRERKVSDRYLAADNEALPESVDWRTKGAVAEIKDQGGCGSCWAFSAIAAVEGINQIVTGDLISLSEQELVDCDTSYNEGCNGGLMDYAFDFIINNGGIDTEDDYPYKGKDERCDVNRVSFVFFAPLVFQKNAKVVTIDSYEDVTPNSETSLQKAVANQPVSVAIEAGGRAFQLYSSGIFTGKCGTALDHGVAAVGYGTENGKDYWIVRNSWGKSWGESGYVRMERNIKASSGKCGIAVEPSYPLKKGENPPNPGPTPPSPTPPPTVCDNYYTCPDSTTCCCIYEYGKYCYAWGCCPLEGATCCDDHYSCCPHEYPICNVQQGTCLMAKDSPLAVKALKRTLAKPNLSFLFGNGKKSSA

SEQ ID NO: 155527 - protein, 109 aa, Oryza sativa
  Clone ID: PAT_MRT4530_55282C.1.pep
MVDVGNKENKNNRNTADNDVVNLTRKTEEEERWESVLRRPNGSEEEDAPGKREREGEGYWEESDAKEERGATRVEGGSAGEKGVGRRGLFMRRGAVGRRSAREEWAAGW

SEQ ID NO: 155528 - protein, 101 aa, Oryza sativa
  Clone ID: PAT_MRT4530_55283C.1.pep
MGSLPTAVQVPCKDRVVFGKDISCILGINMTRDPAIRGGFSKHQEGIGKRFKTKAQKQGEEIENLKKAIIDTQKAAADTQNLIREMIAFEQTQVTHQTTPP

SEQ ID NO: 155529 - protein, 427 aa, Oryza sativa
  Clone ID: PAT_MRT4530_55284C.1.pep
MARRAASWPRLLLLSRAFAAAAAEPKRVLVPVADGTEPVEAAATADVLNRAGARVTVATADPAGDDRGLLVEAAFGVKLVADGRVADLEGEAFDLIALPGGMPGSANLRDCKVLEKMVKKQAEQGGLYAAICATPAVTLAHWGLLKGLKATCYPSFMEKFTAEIIPVNSRVVVDRNAVTSQGPATAIEYALALVEQLYGKEKSEEVAGPLYVRPQPGVDYVIDEFNSVEWKCSGTPQEGIPGQGLLSKHKVLVPVANGSEEMEALNLIDILRRAGANVTVASVEDKLQVVTRRHKFNLIADIMVEEAAKREFDLIVMPGGLPGAQKLSSTKVLVDLLKKQAESNKPYGAICASPAYVLEPHGLLKGKKATSFPPMAHLLTDQSACDSRVVVDGNLITSKAPGSATEFALAIVEKLFGREKAVPVTCE

SEQ ID NO: 155530 - protein, 108 aa, Oryza sativa
  unsure (1)..(108): unsure at all Xaa locations
  Clone ID: PAT_MRT4530_55285C.1.pep
THILGVKPLEPTIPKYLSIANISQYSSGMQCRALGLRGNAIFPPRSSPSTSQCDLHFGHSFWRSPLVARNSVALAGAPNSXHWWSRSFKIRSIQWSINVVFRGGAQCG

SEQ ID NO: 155531 - protein, 755 aa, Oryza sativa
  Clone ID: PAT_MRT4530_55286C.1.pep
MALKVQSRMWFARPHLLWSRLMCCSFSDAPAARASAAGGGGGGGARGCSSEFDSAIRSLRINPQPERLAHILDSASDFNLALRIFRWASYQRMPIHTVDTYARMIAKLGDAGNHDEIGGFLKEMVRLDVPGLEKVMNDLVQFLSGKNRFDEALLVIQHASSGNFKISVSSCNGVLCGLVKEGRGLRPFMRAYMEVVKAGVLPDVETLNWLIEVLCEAGHLELALVQFDKMSKKRCIPNSRTFKILITALCSHGRADESADAFDKMLQLRCIPDSSFCVQVLPLFCKFNKLKEARKLHQMMKEYKLQSDQHLYSALIRCLCENQLLDDAVTTVNDMIASGHALMRSTFVNIVDCYCTLGQFHKAVNFLEENDVAEIEAYNVLLRSLCKTGRVQDSVNYLTELHSRGLVNCQSWNIVIAQFCNNGNIRRASELICRMIVSSFTADESTYSSVVSCYCKLGLYKNALDMFRRLDVSNLSLNSESFSQLVESLCHMKKIQEAAEVFKYHCKRGCNLTSESLEMLIQESCMVGMIREAIKMRSLAVCTGTSCTFTTYNTIFRALLHLKKEKDVLLLFAHMLMEGCLLNEYTYNCILRYFLTKETIFEAAILFNRMVKDGFVPDQETFELLVPEMALSSLLNMISESLLTVVNMDGMMSPRISNIIIYGLIKEGFKSEACKFLDQMIEKGWVPDSRTHSILLSSSGREEPRESDEVNHTVDDDNMADSRLMLRLYRFWSPNGLQGLNALCVMLMEVTRENL

SEQ ID NO: 155532 - protein, 272 aa, Oryza sativa
  Clone ID: PAT_MRT4530_55287C.1.pep
PGRPTRPVSGCDASVLVAATAFEKSEQSAEINPSLPGDPFDAVVRAKLALELECPEVVSCADILALAARVLITMTGGPRYPISFGRKDSLTSSPTAPDKEMPQSNFTMDQVIKLFQDKGFTVQEMVALSGGHTLGFSHCKEFAQRIYDYQGKPGNVDPTMNPVLSKGLQTACKEYLKDPTIAAFNDVMTPGKFDNMYFVNLERGLGLLATDEEMWSDKRTQPFVKLYASNPTAFFDDFSRAIDKLSLFGVKTGAAGEIRRRCDTYNHGPMPK

SEQ ID NO: 155533 - protein, 101 aa, Oryza sativa
  Clone ID: PAT_MRT4530_55288C.1.pep
LVKVTYVYLSLREKEAGKRTPVKMKKLNRMEEIKREDNEIEEKERECQGRFPQSKGNDETFQRLPERQRKEESKQAIITPIFDLSSVLSKHKQTNKKAVKS

SEQ ID NO: 155534 - protein, 205 aa, Oryza sativa
  unsure (1)..(205): unsure at all Xaa locations
  Clone ID: PAT_MRT4530_55289C.1.pep
MAPNPPRPPPPRPLPIPSLFLPPPSLTPPPPIFCPPIPPFSPSPLYFPLSSPFSLPPRPPLPPPFPPPLFPPPHPRFSPPPPLFPPPPPPPHNLLVYIYHLPLPPSPSPFLAPHPPPLDAPFPTPPLFPFFPRPPAFFSTHSSPRYLPPPLFFPSPLPSPSPFFPNTDRRSPVTPPSPXPSSLVYPPSPPPSSSFIPPPPPLPTL

SEQ ID NO: 155535 - protein, 112 aa, Oryza sativa
  unsure (1)..(112): unsure at all Xaa locations
  Clone ID: PAT_MRT4530_5528C.1.pep
RALLVVVVSELAASTTMADHHQEQADYTDRPAMLVQESTYHDRSPXPAMPARSVKRQCVDASTEDELRQXGCCRQLTXIGCTWCTCYALNHMLRIIYRXSGAVDAGHSMGEE

SEQ ID NO: 155536 - protein, 164 aa, Oryza sativa
  unsure (1)..(164): unsure at all Xaa locations
  Clone ID: PAT_MRT4530_55290C.1.pep
GPSTEPQGRSNRGASEIARRSESSTXASNSNKSIKNHHLPPGTQSQPQWIPSGLSRSQKRRLQCLGAKDRKETKAEDVKNQTCNNLEPQAPKRVWRPKAVKDERTVISXSSDKSNSLREEPSVISHKXLDPHDVVDINMVFILPSKSSTKKSXFCSGGKTLMFF

SEQ ID NO: 155537 - protein, 125 aa, Oryza sativa
  unsure (1)..(125): unsure at all Xaa locations
  Clone ID: PAT_MRT4530_55291C.1.pep
IIIKNTRYSTSACKVISLYSDTKKKVTGSSWVQRRGWRVSAVSLLICLALLPFFGRWLNTVEAGTPRPFQHLLILNGXWFSPCGESLSAADVALSPSVALPLATVEPPVSFAFYPWFVAASAGFP

SEQ ID NO: 155538 - protein, 46 aa, Oryza sativa
  Clone ID: PAT_MRT4530_55292C.1.pep
QLGQMALSFISMLLFFDMHLYAFFFCIFICMLLWTLYVCPICRTYP

SEQ ID NO: 155539 - protein, 369 aa, Oryza sativa
  Clone ID: PAT_MRT4530_55293C.1.pep
MESVVQLWSDWEIQLLMLLSFTLQMLLFFSGGLRRCSTKALVRFCLWIAYLGADMVALYALGYLSRHQDVIIGGSTLREVHPLSFLWAPFLLMHLGGQDTITAFAIEDNNMWLRHLLNLGVQVALTLYVFWKSVDRHNVHILIPGIFLFVAGIINNSGWPKERPLWSNSMGQYNFLSYLGCDESRLSKLVKKVIRKMGSLVGAGEEAGTSLWMSKLLDTNITYRNDHYKNRTLKRARDRLQIQEPADMGIKTLEEIRDMWAMLLIYSAGKSKANMHAAQLSKGGELLTFAWLLMAHLQLGDVGEQFEFLFGSVPGPESKEDNRDLQWRSQDLTTPRAQIEGTIHDNSYAEVQSTDKKNCKTEITEQNQA

SEQ ID NO: 155540 - protein, 150 aa, Oryza sativa
  Clone ID: PAT_MRT4530_55294C.1.pep
PGCRNSARGKKVEYARVRTLVDNAYKKDPRIQRRKEEEKAEKQRRKEAKYLAKKMQEEEAARAAEEERKRKEEEAKRAAEAALNQKKLKEKEKKLLRKEKTRLRNLVAPVVAESHFSLSEDDVETACSSLDMERLKKLCDSMENKDTTEK

SEQ ID NO: 155541 - protein, 355 aa, Oryza sativa
  Clone ID: PAT_MRT4530_55295C.1.pep
MGAKTPYVVIVIVELIYTGMYIISKAAFNQGMNTFIFIFYRQAAASVLLLPLAIVLERSTGTLNLYNMGLKYTTSTVASAAGSSIPVMSFFLALLLRQEMIRLRSLPGSAKAAGVGLCLAGVLVIALYTGPTISPLIHHRVFAGGGHEASASGSGRTRWIVGTVLILLSNVTWLLWSMLMAPVLREYPNKLLATTWQCVISAAQSLAVAAVAAARDPAAWRLRLDTGLLAVAYSGVVVTAVAFYLMAWCIEKKGPVFLAMSTPLAFVFTVFCCIFFLGETVHAGSVVGGVLMVAGLYSVLWGKSKEQDKLTLATATPTVAAVEQKEAAAAAPDADASNSGSELHHGRLVSLEQQV

SEQ ID NO: 155542 - protein, 1118 aa, Oryza sativa
  unsure (1)..(1118): unsure at all Xaa locations
  Clone ID: PAT_MRT4530_55296C.1.pep
MEEDEVEDENIPDLAQYGGFEENTMGEAELDVEGNDGADELGQILRDLQEDCESEKEVQKLERMLADHKTALYPGCEKGYKKLSTILEFLQWKAKNGDGMLRHPADESQWRNIDRTFKDFGEDARNMRFGLSTDGMNPFGEMSSGHSTWPVTMCIYNLPPWLCMKRKYIMMPIIIQGPKQPDNDIDVYLRPLVEDLKVLWRKEGVPVWDEDKQEQLTYERCYSLQLTIGLRLVTYPDNQTRGGPHTSAGQGNRSTVDRDHGVARLSTGTAQAGPAERRLAAARPPAATAGACEKAAVRRGKGIRAAQASGAAASRPADLTVAAHGPVVAGGGHRRGSAHGRQRREAKRKRSSSPKTWRRGAGKDGGARRRRGREGSQRHESLVGGENGRRMLTGARGTVFRQDPGHEKRRPRCCSALRSERRQQRDLGWLGAAPSGDWSRRRQWKEVVRVATVLRRRGGEMERMPGGGEAGPSPGEAESGRQPPVAWAASWGVGGGFGGERWGKTARTWAARSHGRARARGVEEVGGNGGVVGRLGRPWRQLELEEGDDSHEPGQKITGYKYQLHRLPRATLRLLHDRSSSSRSITAPDVAAASAVVVVVLAALIRPCERHQQRCLPQDRDDEQFLLDTIAEGSSQYWVDDEGNEDPNQYLNEEGNDEGNQEANQEGTEEGTDSQPSAGQKRPRGKIGPAKKLEGRHIVTEIAPDGEPVALAEKDMLWTTMLETFTIPEADRPRCKEWTLKKMAELFQSYKSDLYKRYILKGLTPDFNVHNKLRDHWDAFVAYKTGAQGQAQIEKNKANAAKKKYHHRLGSGGYGKAIPKWDKLEAELIARGIEPTTANWPERSRNWFYAHGGSLNPGDGSLIFGDEIRDAARRLADAIEASTQGTFQPDREKDELTLALQNPEHPGRTRGKGVIPWKYGFKEDIHTYRSRMRSKRDTESKIVDLEYRVSTYEARMQEEVTRQVDQRLAEQRGMETQAPVMVSPSGNRSSCASTGQVGSEGIEAVAAHEATHFPVDDVTPIPHGYAKVEIELVERTYEDLELDIPGGDGEKKLGDTAHAIILWLSSAITASSVSXAPSPAPPSPPRAPAAKSAPSGPRATTPPRAPAAKSTPSRSRPY

SEQ ID NO: 155543 - protein, 42 aa, Oryza sativa
  Clone ID: PAT_MRT4530_55297C.1.pep
MVVHRWHHLRLDGDINARPEPEPDLDKPDLGLIYYRIVWVGP

SEQ ID NO: 155544 - protein, 1818 aa, Oryza sativa
  unsure (1)..(1818): unsure at all Xaa locations
  Clone ID: PAT_MRT4530_55298C.1.pep
VAFDCSYLLLTLQPTLTDTSMDRQRMYADRRSKVFVDGVHYFLGVANDNKRNGFISCPCDKCKNQKEYSTTRTIHAYLFQWGFMRSYNCXTSHGEVGVAMEEDEVEDENIPDWAQYCGFEENTMGEAELDVEGNDGADELGQILRDLQEDCESKKEVQKLEHMLADHRTVLYPGCDKGYKKLSTILEFLQWKAKNGVSDKAFGELLKLVKNILPEGNELPESTYEAKKTVCPLGLEVQKIHACPNYCILYRGEYENLEACPVCKALRYKIRRDNLGEVDGXPLKKRIPAKVIWYFPIISRLKRFFRNKSHARMMRWHVEEHKQDGMLRHPADGSQWRNIDRTFKDFGEDARNVRFGLSTDGMNPFGEMSSGRSTWPVTMCIYNLPPWLCMNQKYIMMPIIIQGPKQPGNDIDVYLRPLVEDLKVLWRKESVPVWDEDKQEQFNLRALLFVTINDWPALSNLSGQSNKGYNACTHYLDETESVYGKSKDTLEARNDLKHMEQREGLHPEPNEKGSHYLSPASYTLSKEEKESMFQCLKSIKVPSGYSSNVKRIISTKDKKFTNLKSHDCHVLMTXLLPVIICGILPDNVRVTITKLCAFMNAISQKVIDPESLAALQHDVRYMGVLKKYVRNRSRPEANIAKGYGTEEVIEFCVDFIEDLEPIGVPESFHEGRLRGKGTLVRRAIMTVDNDLFRKTHFTVLQXSSLVAPYINEHLAIVRSENSGKSDAXITRHHIDTFPAWLREHLLGNETIDRQLAFLARGPSGSVTTFQGYEINGYTFYTRAQEKKSTNQNSGVRIDAIGHDGPTSTYYGVIDNIWELEYGPLKVPLFLCQWVRLTGGGVTIDDSGMITVDLNKVGYSDEPFILANDVTQVFYVKDMDSKPKKGKGPDEPRRHVVLPGKRKIVGVEDKTDKNYDLFEGQPPFAVTVDPSIILSKEDTPYSRNDHSEGTIYLNEEGNDEGNQEANQEGTEEGIDSQPLAGXKRPRGKRGPAKKLEGRHIVTEIAPDSEPVAPAGIGRKFVNHCGWVVRDNVPISIVYWRRTRSRGDEDSFLPDTEKDMLWTTMLETFTIPEADCPRCKEWTLKKMAELFQSYKSDLYKRYILKGLTPDFNVHNKLRDHXDAFVAYKTGAQVQAQIEKNKANAAKKKYHHRLGSGGYGKAIPKWDKLEADLIARGIEPAMANWPERSRNWFYAQGGSLNPGDGSLIFSDEIRDVARRLADAIEASTQGTLRPDREKDELSRMRSKRDTEAKIVDLEYRVSTYEARMQEEVTRQVDQCLAEXRGMETQAPVMVSPSGNRSSCASMGQVASGMAIPTDPSSTYHCRPIPHGYAKVEIELVERTYEDLELDILGGDGEKKLGDTAHAIILWHKKYIVFPGQERPPAPPSRPQAXSPPPSLPRXSPPAPSPAPPPPPPPATKSTPSRSRPYEPAPSRPKKKARSDEPRLPALKKRAYDLTPEELDEAVRAEVMEQLKPRSPEKKIPIAPEVEDHFIMMAEPGKPVEVSDYDRTLRKALKAKPSAVKCGKEVPQLGQQPRQEVEPLIVEPAQLEICNFLKDTGLSMEQLLEDAPIETAPVMYTFKLGELLVTPDKIRELPTQMYRFHQWYMDKSGMGREMFGARVRNSDYYQGEDVIWIRYKEVFDLYHLKALDVSILSAWTLMEIQLCRQHNKFNTGFVDPCKVNTLMIQQYEKQTKDNIVHFLVQQHYKRFILLPYNTSVHVYDSMDKPEKTFAKIFEVIDRAWIRFRTLVRGIWNEKLTRRFNFLMIYLIDNTTHDDFIRAVQEQIMGFINKHILHPTGEFYYDGSTIHKAGPSSSYVTKS

SEQ ID NO: 155545 - protein, 98 aa, Oryza sativa
  unsure (1)..(98): unsure at all Xaa locations
  Clone ID: PAT_MRT4530_55299C.1.pep
AVLLAAAADPRSGLVYCLAAHHVAPRDPARAAAFLAACDDNLGAATEYQEXRAFRALFALIGEERDEQVAIERHCELLKEYPRDLTYPKRAQLICFSH

SEQ ID NO: 155546 - protein, 183 aa, Oryza sativa
  unsure (1)..(183): unsure at all Xaa locations
  Clone ID: PAT_MRT4530_5529C.1.pep
SRDSTHCFHWRNSSNSTLSVDRIRISHLFLTSPYPGAARESTIRPPXPPPSSFSASPSPERPPAKPRSRKDGGGGASRQLARAARGVTLGGGDDNHQICVASAGSSGVAAGSGEGIGNEGNGDGGRDGDGDGSLGNXEAAVAETADPVAGHPDLAPLRWICPVAAWAGRRGLVRLAGGWRNHG

SEQ ID NO: 155547 - protein, 47 aa, Oryza sativa
  Clone ID: PAT_MRT4530_552C.1.pep
FQRGAKSLGHLVRGLAASDDNHPSHPASARVQTSRVSRGASAFNVWL

SEQ ID NO: 155548 - protein, 176 aa, Oryza sativa
  Clone ID: PAT_MRT4530_55300C.1.pep
MAAAVDGAVQQRRRAPPTAKGGGVQATGGRLNHHPLPPLLEMAMRMPLQTAVVTDICRQGGLENMQHFVGSINFDRFARFGHLNKVILNIRGYRDLLFRTTWLQLLPNFCSNGFIELLRSQVTWQLVHAEEVVVQGKEPEETDEAVMAEETVLAAGNEERAAVLARETRCTSYARV

SEQ ID NO: 155549 - protein, 700 aa, Oryza sativa
  Clone ID: PAT_MRT4530_55301C.1.pep
MEEDEVEDENIPDWAQYGGFEENTMGEAELDVEGNAGADELGQILRDLQEDCESEKEVQKLERMLADHRTTLYPGCEKGYKKLSTILEFLQWKAKNGPKQPGNDIDVYLRLLVEDLKVLWRKEGVPVWDEDKQEQFNLRALLFVTINDWPALSNLSGQSNKGYNACTHCLDETESTYLKHCRKVVYMGHRRFLAANHPVRKKGKHFEQKADHRTKPKHRNGKAVFEMVKDLKVVSGKGPGSQPIESEDGHAAMWKKNSIFWEVPYWEVLDIRHAIDVMHLTKNLCINLLGFLGVYGKSKDTLEARNDLKHMEQREGLHPEPNDKGIHYLSPASYTLSKEEKESMFQCLESIKLLPVIIRGILPDNVRATITKLCAFMNAISQKVIDLESLAALQHDVVQCLVSFELIFPPSFFNIMTHLLCHLVKEIGILGPMYLHNMFPFERYMGVLKKYVRNRSRPEASIAKGYGTEEVIEFCVDFIEDLEPIGEDTPYSRNDHSEGTIVRRKLLHDRSSSSRAITAPDVVAASAVIVVVLAALICPRERNRQRCLPQGEGRKSCASDLAFSLSRSILTRAGRPDRPRRHLRRRLHRRPPPPRADSTSTAAAAAAHRLHLRRRHRRHRCRRLHHRRRHAPTPPPPPPPPPPCADSTADSTVEHRDDEQILLDTIADGSSQYWVDDEGNEDPNQYLNEEGNDEGNQEAN

SEQ ID NO: 155550 - protein, 428 aa, Oryza sativa
  unsure (1)..(428): unsure at all Xaa locations
  Clone ID: PAT_MRT4530_55302C.1.pep
CEFLHLNFNLKIGFIASAEGRGARTGSTGVGPTRQPHGPRWTGCTQLAPAGAVGPTRQPHPRARAADGRAPHGSRGARPKAASPAQPTKGDAPAPRWSPAATSGATERRPREGREGGSEMAVLGSPRVDGDDGNGDRSGERRRRGSGRRGRRHSGGRRAKRRGGRGRRGRGEAEGGDAEAGGGPGRRRRRTEARRRRRRERTTARARFRRGERAASGGNGGGRHGERLYSVGSERGRPEGKETGAAIXGSINDAGEVCGRXFQTNPRERERXKVGGERGRESRGVISPSLLRAGAAGCGGIRGGGGARARARRRERREDRDDRWAPPVSEGGGRAHPSAARARGXEAGWAAGKRRERERDGPSRPKRXRGGERLFRVFVTTRRAAQWKKALRSRRNPRDVARVDVEEVVNRTGSTFSSSCVLLAVLPR

SEQ ID NO: 155551 - protein, 456 aa, Oryza sativa
  Clone ID: PAT_MRT4530_55303C.1.pep
MSKKTKRKAALVLGDLPKPCNQWGFKPKTSSSSGRSPHGKDYEAKTANGEESRYRRVSRASGARRRSWCGTINFGPCPATTTFGSCHFDGAGTEHGRCGEGGSGGKDAPDQGGDPFNKSAGGAPNCFAAAGYSFDRAHRHTSQLQPRSASRSQHGGHASEHGATPGHASSNARAAVGIRSGPASQGRLGPHSLVFGRLHPTLGLPASADASPSVTSHASASVLRRTAFDRNSTPDPSCTATSSAGRCPSTQPAARSNVASNGGTNQAPNQVAMAWTQPSFDPSMAAHQASPFGAGQPNTVAQPHAQAMTSSFATPYPNGPLQQGAVSKAGGEKGLPLSGGIKIRPIPPLYKFPPVPRYSGETDPKEFLSIYESTIEAAHGDENTKAKGQCGWRALSDAGLGGGVVGELRPVRIGGGVAGELRAARIVIAWPARAVRWSCLDGDAVDPDGGAPRLPG

SEQ ID NO: 155552 - protein, 739 aa, Oryza sativa
  Clone ID: PAT_MRT4530_55304C.1.pep
MDQQWMCADRRSKEFIDGMHYFLSVANANKRNGFICCPCNKCKNQKEYSTARTIHSYLFQWGFMRSYNCWISHRELGVAREEDEVEDENIPGWAQYWGFEENTTGEADVDVEDNDGADDLGQMLWDVQEDRESEKEQWKAKNGVSDKAFGELLKFVKNILPEGNELPETTYEDGINPFGEMSSGHSTWPVTMCIYNLPPWLCMKRKYIMMPIIIQGPKQPGNDIDLYLRPLVDLYLRLLVDDLKVMWRKEGVPVWDEDKHEKFNLRALLFVTINDWKVVYMGHCQFLVTNHPVQKKGKHFKQKADHRTKPKHHNGKSMFAMVKNLKVVFGANLQRAKMATWRCGRRTLFFGSYPIGVLGVTLLGNFGCIYGKSKDTLEARNDIKHMEQRDVLHSEPIEKGSHYLSPASYTLSKKEKEIMFECLESIKVPSRYSSNIKSIISTKDKKFINLKSHDYHVLMTQLLPVITRGFLADNVRATTTKLCVFLNAISQKIIDLDSLAALQEDVVQCLVSFELIFPLSFFNIMTHILCHVVKEIDIIDPVYLHNMFPFERYMGVLKKYVRNRSRPEASIANGNGTEEVIELCIDFIEDLRPIREHQAIVRSENIGKSDAWITCYHIDTFPAWLRQHLMGNEMIDRQLAFLARGPSCSVSTFQGYEINGNTFYTRAKDKKSTNQNNDVRINAIRYDSTTSMYYGVIDNIWELDYGPLKVPLFRCQWVRLTGGGVTIDDSGSSVVGPMV

SEQ ID NO: 155553 - protein, 863 aa, Oryza sativa
  unsure (1)..(863): unsure at all Xaa locations
  Clone ID: PAT_MRT4530_55305C.1.pep
MSWQRVGALLLGGSVLPACPGCPGRRRIGSVLLFMARMGWELCHVFRPYTVVMDNTGNKGYGNDGSDDSRTQANGNEKSINETSPELIQIVVNQTNMLATAFQLLQNWNNPAEATNVQVPTVQQQCKLSEFLKTEPPTFAIAVDPMEASDWLRTIEKKLGLIQCTDQERVGFATHQLVGPASEWWDSYEASRPEGHTITWNEFSSVFRRSHVPAGMITLRKREFRYLKQGDLTVTEYLHEFYRLAHYAPEDVETDEDKQEKFLQGLKDELAVQLLLEDYGNFEKLVDKAMQLESEHNRMTNCKRRIVNIPVFPCGNQRQRTEPLQITGPSVVHQEFPPQEDGRNADNNTSNTNDDDTTNNHGSCPISDHSNKACNVSSIHQDVNDSINVGTQNDNLSNVDTEKDSNGDSNYGTTDANVSKDFQPPIPTPSQNDRPQMDSSVQKTLICYNCKEPGHFSRDCPQPKRNLCHHSGHYARRRQVTRLVVTGANAVPVSLKGSRLKYHIVTKSIHNSRSEEYLVDKVDAKDMNYEKXSGTEVPSSSATTQSKSAKRCTLXKSATSSPSVSPPFRGESTGDAFSPAXSGVAATVPPPAATVAFPVRRPTSPPPPSAPRRRPPPRLLLGFAGTPSPRRPLHPLRRRRPFGHPFLLVGXVAPLHHHLLQHRSSAFHAVPSSAQPLLPAIIVSSSPFVLXIDVTSVAWLIVSRRRLRRRHRSGVVRAILASVQPLPAALIASSPAPVVAVVVLSSFPVVVAFVPPSSRSRPSSAFVKRTAAAPSSSSSSAPRRQASCRPRLAFVQGSPPKPSPRRSSPLCPSVSAAPVRRCRSHASSRGGKVPSXRCPVLVLSVSPVPVVRLSTPVPMYRCR

SEQ ID NO: 155554 - protein, 125 aa, Oryza sativa
  Clone ID: PAT_MRT4530_55306C.1.pep
QKKKKKKKKKKKKKKKKKKKKKGKKKKKKTKKKKKGRHFKNSGAAVLGVPTLLPLVCDTLIFFLGPLISIHGPGFTHGLPGKTRWFPNLFSLHTIPFSRPGLLAIGARPIAFPKIGPPFLAIGTP

SEQ ID NO: 155555 - protein, 1223 aa, Oryza sativa
  Clone ID: PAT_MRT4530_55307C.1.pep
MSSSTNPSDAPSAEYAESWITWYQRVSASKKVHWDEIRIGQALALTTANSAKDEHLMTAATYFWSNTINAFLFNQGPMTPTLIDITMITGLDVTSSANPMSMNTKNQFDFKTKNIAEALESKKEFPLGKILLGYLYQMLNNASAKIAVGSIVGAGGPWWLLQTWLNLIVMKVVNRPYVTEAEFPLPEPIVEDDGEERTHRRCMSYGAYASTPTDAGAKLSAKLLKDWFCSFYEGFKKDARIWFPYEDSVDLELPSDFRFEDINHEKFQKSREVLTAAISPCILPVGIHQGRNIQVSYEFYHPMSSARQLGLGQLPIGLFFADKIQCRGQITSTLMMDRLLNLPGPSLGSIENIELAGFRSKNFDRWWGLILNGGGLSPPVIGYHGPKTSTLLHGLTREPANAGKKRKTRSSAVSTLVLAPKKKAKFKKTKPTDKPADDLPALDPSIEQALDEEEIGEDVDQALAEISDTERTPSASPKQTPPTPSTPVHFTRKKKTAVKKKPVATIAKSAPPMADCDDEQILLDTIAEGSNNVPISIVYWRRTRSRGDEDSFLPDTEKDMLWTTILETFTIPDADRPRCKEWPLKKMAELFQSYKSDLYKRYILKGLTPDFNVHNKLRDHWDAFVAYKTGAQGQAQIEKNKANAARKKYHRRLGSGGYGKAIPKWDKLEADLIARGIEPATANWPERSRNWFYTHDGSLNLGDGSLIFGDEIQDAARRLADAIEASTQGTFQPDREKDELTLALQNAEHPGRTQGKGVLPWKYGFKEDIHMYRSRMRSKRDTEAKIVDLEYRVSTYEARMQEEVTRQVDQRLAEQRGMETQAPVMVSPSRNRSSCASTGQVGSEGIKAVAAHEATHFPVDDITQRTPCDMHTPFRNLSIKVALGMAIPTDLSGTYHCRPIPHGYAKVEIELVERTYEDLELDIPGGDGEKRLGDTAHAIILWRKKYIVFPGQEQLPAPPSPPQAQSPPPSPARQSPPAPSPAPPPPPRAPAAKSAPSGPRATTPPRAPATKSTPSRSRPYEPAPSRPKKKAKSDEPRLPALKKRAYDLTPEELDEAVRAEVREQLKPLSDYDRTLRKALQANLAAVKCRKEVPQLGQQPRQEVEPFVVEPAQLEICNFLKDTGQSMEQLLEDAPIETAPVMYMFKLGEPLVTPDKIRELPTQMYRFHQWYMDKSVMGREMFGARVRNSDYYQGEDVIWIRHKEVFDLYHLKALDVSILSAWTL

SEQ ID NO: 155556 - protein, 601 aa, Oryza sativa
  Clone ID: PAT_MRT4530_55308C.1.pep
MAEERESFESQWAPSDVMEENLKEMVAHGVLPVKEIIGCLHHLNPNSIVHIANFIHACEAFLGIRPHFALFRRIFFLKPQPNKSKPCVVGGAGFQLRGTLSQKYFSMPFKTSNKGWHANWFYVQNPEPALPEYSCLPPVCQDTWNSLPMGDEAAQAVELMERMLKLKEQGLQGKQITRHFIKSRLAPIKERSRTAFEFDGKHDPNREDPDSLDFKVMKERMYKIFSNAIVVSYSHLLPVVPYNAFNPPPPEFTLMKSDPPITQHRTPCGKTSQTSGGPKIRSDSHPTTTQSANQSDFRKRKLVLSDDDDAEKAGSKGVTGKHPRQANPKKKTSSRPMPKIRKSSRKPSDIDPSRKDSEPTGMETGFSKETEPTAGDRLSDEQPATDNVGPSNEPPTGNQSAEARVDANQEPPTGNQSGTERNKDILEVEAQVDNPPKKDANVDLGSSSPAKVQGPARPRPEIITAVTVAREDRRRGRRRVAVLVRPFAVAGDHRSFVAVDNPKVSAVSSSSSSSSVVLPPPFWSPVCSPRRPLRAGALRLRPGAAVRRQACAARAVRSAEPPPLSVTSPLTSSGSSAVSRSWTIRSRPSVLDWFDLGRPFV

SEQ ID NO: 155557 - protein, 152 aa, Oryza sativa
  Clone ID: PAT_MRT4530_55309C.1.pep
MASAGGEVVGVDPAAAAVAPDVEHHAPAPRLTPAGSGGRLMAELLGVFNGLTERMGDDVATSSSWTLLFRALKLALPALRDAAGGRSLARALIVAASLADLQMDAEVISAGIVRQAMDAGAVAMADAEAQLGPGAAALLRESLDVKNAPTRV

SEQ ID NO: 155558 - protein, 476 aa, Oryza sativa
  Clone ID: PAT_MRT4530_5530C.1.pep
MDDLAAASPPHPPPPPPESHVPPPPQTPEKDSCEDTGDMRISEEKPCTDQELDADQMNSSSFNSSSECENQTPSNDEMTGSESKSEAAQTEGGGSSEEKVLKKPDKILPCPRCNSMDTKFCYYNNYNINQPRHFCKSCQRYWTAGGSMRNLPVGAGRRKSKSSTANYRSILITGSNLAAPAGDAPLYQLSIKGDQTATAVKFAPDSPLCNSMASVLKIGEQSKNAKPTSTAQPRNGETQTCPASGTTSDSPRNEPVNGAVSGHQNGIVGHSGVPPMHPIPCFPGPPFVYPWSPAWNGIPAMAPPVCTAPAEPANSSDNGSTASVQWSMPPVMPVPGYFPVIPSSVWPFISPWPNGAWSSPWIQPNCSVSASSPTSTSTCSDNGSPVLGKHSRDSKPQGDDKAEKNLWIPKTLRIDDPDEAAKSSIWTTLGIEPGDRSMFRSFQSKPESREQISGAARVLQANPAALSRSQSFQETT

SEQ ID NO: 155559 - protein, 744 aa, Oryza sativa
  Clone ID: PAT_MRT4530_55310C.1.pep
DLYKGYKSDLYKRYILKGLTPDFNVHNKLRDHWDAFVAYKTGLQGQAQIEKNKANAAKKKYHHRLGSGGYGKAIPKWDKLEADLIARGDGSLIFGDEIRDAARRLADAIEASTQGTFWPDREKDELTLALQNPEHPGRTSRMRSKRNTEAKIVDLEYRVSTYEARMQEEVASGMAIPTDPSSTYHCRPITHGYAKVEIELVERTYKDLELDIPGGDGEKKLGDTAHAIILWCKKYIVFPGQERPPAPPSPPQAQSPPPSPPRQSPPAPSPAPPPPPRAPAAKSAPPGPRATTPPRAPAAKSTPSRSRPYEPAPSRPKKKARSDEPRLPALKKRAYDLTPEELDEAVRAEVREQLKPRSPEKKIPIAPEVQDHFIKMAEPGKPVGVSDYDRTLRKALKAKPSAVKCGKEVPQLGQQPRQEVEPLVVEPAQLEICNFLKDTGLGMEQLLEDAPIETAPVMYTFKLGEPLVTPDKVRELPTQMYRFHQWYMDKSAMGREMFGARVRNSDYYQGEDVIWIRYKEVFDLYHLKALDISILSTWTLFHWVLLLFDLEKSKVHVYDSMDKPEKTFAKIFEVIDRAWIRFRTLVRGIWNEKLTRRFNFPCAKQEKGTNLCGYYVCHYMHCLAHQIRTGQDLEMIYLIDNTTHDDFIRAVQEQIMGFINKQILDPTGEFYYDGSTIHKAACKESGETGSHFNTSSDMLQPNDKKDVMTSTASWLEMGWDSRWSDLCDGPPKMLKLYVVSHMVI

SEQ ID NO: 155560 - protein, 728 aa, Oryza sativa
  unsure (1)..(728): unsure at all Xaa locations
  Clone ID: PAT_MRT4530_55311C.1.pep
MFRPCARKTLLERMPFWRFLALRRSRELLPGRRRRRGRLCKLAVAFRTVRAASPSSPERRPVAPSPSSSIAAASSSPAYPLSPAETSGSASPPATVVLPPRFRLRSPLPRPRCAGRRRHHLSRHRSAVLFPGKATASPEFRRNAVARVGLSFLLVDVSSGSPLPPGPCISRRCRPSLGMPRRRPRPRLPSDRTPPVSVVVFTVHPRRLVVSRCRLRRRIRSGAFHVVPVSVQLPPAALIVSSPAPVVVVVVLSSFSVVVAPVLVFVLGSASSSLVPAASRLRPRIAAEAVPSPFVSVVPVCLRRARSSLSFPRLVTWWTNEGYTSCGPVVEMSWHRVGALLLGAQSCLPVPEVPAVGGIGSNWNNPAGATNVQVPTVQQQCKLSEFLKTEPPTFAIAVDPMEASDWLRTVEKKLGLIQCTDQERVGFATHQLVGPASEWWDSYEASRPEGHTITWNEFSSVFKRSHVPAGMIALRKREFRYLKQGDLTVTEYLHEFYRLAHYAPEDVETDEDKQEKFLQGLKDELAVQLLLEDYEDFEKLVDKAMQLESEHNRMTNCKRRIVNIPVFPGGNQRQRTEPLQITGSSVVHQEFLPEEDGRNADNNTSNTNDDDTTNNHGSCPISDHPNKACNVSSIHQDVNDSINVGTQNDNLSNFDTEKDSNGDSNYGTTDANXHFSRDCPQPKRNLRHHSGHYARRRQVTRLVVTGANAVPPPLPPRRSAVRSRRRLL

SEQ ID NO: 155561 - protein, 1127 aa, Oryza sativa
  Clone ID: PAT_MRT4530_55312C.1.pep
MDRQWMYADRRSKEFIDGMHYFLGVANDNKRNGFISCPCDKCKNQKEYSTTRTIHAHLFQWGFMRSYNCWTSHGEVGVAMEEDEVEDENIPDWAQYGGFEENTMGEAELDVEGNHGADELGQILQDLQEDCKSEKEMQKLERMLADHRTMLYPGCEKGYKKLSTILEFLQWKAKNGVSDKAFGELLKLVKNILPEGNELPESTYEAKKTVYPLGLEVQKIHACPNDCILYHGEYENLEACPVCKALRYKIRRDDPGEVDGQPLKKRIPAKVMWYFPIIPRLKRFFRNKSHARMMRWHAEERKQDGLRRHPADGSQWRNIDRTFKDFGEDARNRKYIMMPIIIQGPKQPGNDIDVYLRPLVEDLKVLWRKEGIPVWDEDKQEQFNLRALLFVTINDWPALSNLSGQSNKGYNACTHCLDKTESTYLKHCRKVVYMGHRRFLAANHPVRKKGKHFEHKADHRTKPKHRNGKAVFEMVKDLKVVFGKGSGSQPIESEDGHVAMWKKNSIFWELPYWEVLDVRRAIDVMHLTKNLCVNLLGFLGVYGKSKDTLEARNYLKHMEQREGLHPEPNEKGSYYLSPASYTLSKKEKESMFQCLESIKVPSGYSSNVKRIISTKDKKFTNLKSHDCHVLMTQLLPVIIRGILPDNVRATITKPCAFMNAISQKVIDPESLAALQHDVVQCLVSFELIFPPSFFNIMTHLLCHLVKEIGILGPVYLHNMFPFERYMGVLKKYVRNRSRPEASIAKGYGTEEVIEFCVDFIEDLEPIGVPESIHEGRLRGKGTLGRRAIMTVDNDLFRKAHFTVLQQSSLVAPYIDEHLAIVHSENSGKSDAWITRHHIDTFPAWLREHLLGNETIDRQLAFLARGPSGSVTTFQGHDGPTSTYYGVIDNIWEQEYGPLKVPLFRCQWVRLTGGGVTIDDSGMTTVDLNKVGYSDEPFVLANDVTQVFYAKDMDSKPKKGKGLDEPRRHVVLPGKRKIVGVEDKTDLAGFLVPDSTAGRRHRAPTPPLPCADSTSTAAAAVPRRFYLRRRQRRSPLRRPRTYPLITFPGYKYPLHRLPRATLRLLHDQYPSSRAITAPDVAAASAVVVVVLAALIRPRERHRQRCLPQGEGRKSCASDLAFSLSIDRS

SEQ ID NO: 155562 - protein, 363 aa, Oryza sativa
  unsure (1)..(363): unsure at all Xaa locations
  Clone ID: PAT_MRT4530_55313C.1.pep
TSRGEGARGPGPWEWGPRGSLTVHGGPGAPGSHRPAPWVPRVSRTRGRGRLTAGPHTAAARHARRRPRRRSGGRRRARAPMVAGGGHRHGGAEAERGEGKGERKRRSTAHLGSTATTETATGAEEGGGAARVDGVDGVPAVGERNGGVDEVGEDAAKPKEAAPRWEVVRGDDGGGPELDGDGGERERRRELYSSGERGRXVAETVVGSSGRVYIGLGVREGGRRREKWARETRPPLMPPARLGXGFQTNPRERERKKWGERGRGSRGIIPPSLLRAGTAGGGGIRGGGGDRARASRRDRREKGDDGWAPPVSEGGGRARPSAARARGXGRMGRGGEERGGGRWAEPAQEGEGGKGDFLEFFFL

SEQ ID NO: 155563 - protein, 122 aa, Oryza sativa
  unsure (1)..(122): unsure at all Xaa locations
  Clone ID: PAT_MRT4530_55314C.1.pep
TPAPPAPLPPPPPPCVPAAKSAPSGPRATTPXEPRLPALKKRAYDLTPEELDEAVRVEVREQLKPWSPEKKIPISPVVQDHFIKMAELSKPVVVSDYDRTLRKALKAKPPRRPRRLEDNILH

SEQ ID NO: 155564 - protein, 492 aa, Oryza sativa
  unsure (1)..(492): unsure at all Xaa locations
  Clone ID: PAT_MRT4530_55315C.1.pep
MWIPQDHAHASQLQDEASHVQTTTGDAAGHLQTKQKEKQHFRDQILECPSTPDFIHLHPCTFVYNQTEPQTKPYPLDMWKYGSALQQRPEDRSLYGRGATXQNHAPRAQPKTILRVLNRGGERERPSEPSATTTNHASRTSGTTEATRSTQAKLQAYKEAITIHKKKTGYTETVHGSTEADPVCQPRRVADKRTPLDTTRAAHVETTRLPSGHTNTVTTRTSERLPTPIHGRDAAGTRLDDAELRTKMTTGXAAHLTKRGRQTRMSRRRDERHDDRKRREDDDXDDRVRRGGDEGSRQWLHGDGDDVEHAAAMTMTEAAPRDDDVGRRSDEGQQPERRRRQWRGSSCDAAGGDGATGRRSGEEGEAAGGGRRHGRERTTAGRGGGFTGEREELCGRRKKRLAGGSHAGRALSARATRVHAGGRGGSGRGRGLGRAAGPRGEEGEAXPGERGRRKLGRGEGEPKRRRERRRGRERMIFXFGMNLSXRDIQDHT

SEQ ID NO: 155565 - protein, 115 aa, Oryza sativa
  unsure (1)..(115): unsure at all Xaa locations
  Clone ID: PAT_MRT4530_55316C.1.pep
LGWSSSWWASPPFWGVLAPRVCVSASAPRAXFFPLVVALRVVLLGXXGFVSPCGCPFFXVCPGCVPFLWRCLLASFFPFGXGLAFFPVCCXXNCHSHXXXGNKMPPKLCXLXFLG

SEQ ID NO: 155566 - protein, 32 aa, Oryza sativa
  Clone ID: PAT_MRT4530_55317C.1.pep
MNQCKCGCPVMQKQRLALLVIGIETSNQVLAL

SEQ ID NO: 155567 - protein, 43 aa, Oryza sativa
  Clone ID: PAT_MRT4530_55318C.1.pep
MAPAARLQDVELNFGRNFQPDERFDSLQCSMSFHGDVPLVSIS

SEQ ID NO: 155568 - protein, 896 aa, Oryza sativa
  Clone ID: PAT_MRT4530_55319C.1.pep
MAPGGASPGAPGPPWTTLQLRKIRSSWKLKPTFGKASKASHIILEHIESQWTKSGSMDISRTNEGYTSCGPVVEMSWHRAGVLLLGAQSCLPVPEVPAVGGIGSVLLSMARMGWELCHVFRPYTVVNKPNIHHNSKRLRSVKVLSLVSNLSLPFVFPLSLSKPLQQMADNEKGNKVRSQDIGTSSSRVNEAPDTSCVTLVQHLINQNRLLIEILQQHQTPILNLSQIQPQVQLEAVQALTPQVSMPPASQKTDGGVPHVDSKEASIICFMCDEQGHYARNCPQQKGKTPMRTEDEVRKMIITSTEWPPPGMTKRQRRNTFRGAPQLTEHLLANGGRVSDSEDSDQVSSDDEDEKSPQDCQFSFLLTKKMANQPASSNGEKHQGNTNPRQDYSFSLTPVPGQRNQNEKRKCRVREDICCFNCQGMGHFADKCPKPRNIAASTSVHATPCNQKLAPQRIVIHASRSSPIARVTTAPTPASALPQGVNAQFQPQPPVDKTEASIGIVPLDVPAQQPRNQNWNNPAGATNVQVPTVQQQCKLSEFLKIETPTFAIAVEPMEASDWLRTVEKKLGLIQCTDQERVVFATHQLVGLASEWWDSYEASRPEGHTITWDEFSSVFKRSHVPAGMITLRKREFRYLKQEDLTVTEYLHEFHRLAHYAPEDVENDEDKQEKYLQGLKDEIAVQLLLEEYEDFEKLNCKRRIVSIPVFPCGNQRQRTEPLQITGSSVAHQEFPPQEDGHNADNNISNTNDDDTTNNHASCPISDHSNQACNVNIIHQGVDDSINDGTQNDNPSNCDSEKDSNGDSNYGTTDANVSKDFQPPIPTPSQNDRPQTDSSAKKTLICYNCKGPGHYSRDCLQPRQSRPPHYRQFTRSRHPNRIVVTGANAVPVRPRVNQNP

SEQ ID NO: 155569 - protein, 1491 aa, Oryza sativa
  Clone ID: PAT_MRT4530_5531C.1.pep
MAREIHKIASLRRESSLWRRGDDGVYFSRSSTGASSSRFRDEEDDEEALRWAALERLPTRDRVRRGILLQAAEGNGEKVEVDVGRMGARESRALIARLIRAADDDHALFLLKLKDRMDRVGIDYPTIEVRFEKLEVEAEVHVGNRGLPTLLNSIINTVQLLLRTFNLKALINRILEDLGRYDNPFTLCDYKMVYEQGKLQAIGNALHISPTRKQPMTVLHDVSGIIKPRRMTLLLGPPGSGKTTLLLALAGKLEDNLKVSGKVTYNGHGMDEFVPQRTAAYISQHDLHIGEMTVRETLAFSARCQGVGSRYELSRREKAENIKPDQDIDVYMKASAIGGQESSVVTEYILKILGLDICADTVVGNDMLRGVSGGQRKRVTTGEMLVGPARALFMDEISTGLDSSTTYQIVNSIGQTIRILGGTAVISLLQPAPETYNLFDDIILLSDGQIVYQGAREHVLEFFELMGFRCPQRKGVADFLQEVTSKKDQEQYWYRNDIPYSFVPVKQFADAFRSFHVGQSIQNELSEPFDRSRSHPASLATSKFGVSWMALLKANIDRELLLMKRNSFVYIFKAANLTLTAFLVMTTFLRTKMRHDTTYGTIYMGALYFALDTIMFNGFAELGMTVMKLPVFFKQRDLLFFPAWTYTIPSWILQIPVTFFEVGVYVFTTYYVVGFDPNVSRFFKQYLLLVALNQMSSSLFRFIAGIGRDMVVSQTFGPLSLLAFTALGGFILARPDVKKWWIWGYWISPLSYAQNAISTNEFLGRSWNKSFPGQNDTVGISILKSRGIFTEAKWYWIGFGALIGYTLLFNLLYTVALSFLKPLGDSYPSVPEDALKEKRANQTGEILDSCEEKKSRKKEQSQSVNQKHWNNTAESSQIRQGILPFAQLSLSFNDIKYSVDMPEAMTAQGVTEERLLLLKGVSGSFRPGVLTALMGVSGAGKTTLMDVLAGRKTGGYIEGDITISGYPKKQETFARISGYCEQNDIHSPHVTVYESLVFSAWMRLPSEVDSETRKMFIEEVMELVELTSLRGALVGLPGVNGLSTEQRKRLTVAVELVANPSIIFMDEPTSGLDARAAAIVMRTVRKTVDTGRTVVCTIHQPSIDIFEAFDEVDNSLLSIWIKLFLMKRGGEEIYVGPLGQNSSKLIEYFEGIEGISKIKDGYNPATWMLEVTSTTQEEMLGIDFSEIYKRSELYQFVSFHAVLVNCILYIGIQNSGCVQPVVVVERTVFYRERAAGMYSGFPYAFGQVAIELPYILVQTLVYGVLVYSMIGFEWTVAKFIWYLFFMYFTLLYFTFFGMMAVGLTPNESIAAIISPAIYNAWNLFSGYLIPRPFCNHEVQLPEEMKKMPFLDVVVEDGVVSYIEFIFIRYIENVTSSLIPKGALEKIDYFRRRYLWQEDQGIRKYHLVQWPIVCSPRDMGGLGISDLETMNKTLLGKWLWRLENTDALWQKLLREKYLKKKPLTAQKIKQGDSHFWHGLMEIKENFISVKYP

SEQ ID NO: 155570 - protein, 547 aa, Oryza sativa
  unsure (1)..(547): unsure at all Xaa locations
  Clone ID: PAT_MRT4530_55320C.1.pep
MARMGWKLCHVFRLYTVVMDNTGNKGYGNDGSDDSRTQANGNERSINETSPELIQVVVNQTNMLATAFQLLQNWNNPAGATNVQVPTVQQQCKLSEFLKTGPPTFAMAVDPMEASDWLRTIEKKLGLIQCTDQERVGFATHQLVGPASEWWDSYEASRPEGHTITWNEFSSVFKRSHVPAGMITLRKREFRYLKQGDLTVTEYLHEFYRLAHYAPEDVETDEDKQEKFLQGLKDELAVQLLLEDYENFEKLVDKAMQLESEHNRMTNCKRRIVNIPVFPCGNQGQRTEPLQITGSSVAHQEFPPQEDGHNADNNISNTNDDDVTTNNHASCPNSDHSNQACNVNIIHQDVDDSINDGTQNDNPSNWDSGKDSDGDSNYGTTDANVSKEFQPPIPTPSQNDCPQTDSSAKKTLICYNCKEPGHYSRDCLQPRQSRPPHYRQFTRSRHPNRIVVTGANAVPVSLKGSKPKDLIVPRSVRNPHXEYHLLEVDAKDMNYEKXSGTEVPSSSATIQSKSARGATREKSGEEKIPSATPARAPLTGGPARHPR

SEQ ID NO: 155571 - protein, 71 aa, Oryza sativa
  unsure (1)..(71): unsure at all Xaa locations
  Clone ID: PAT_MRT4530_55321C.1.pep
SARPTTASTAPPAPPPPLDRVGTXRRXXPPRSEVXEQFYQAPMLLIFSSWFIRLHEAMTYVLHRGLICLFF

SEQ ID NO: 155572 - protein, 1600 aa, Oryza sativa
  Clone ID: PAT_MRT4530_55322C.1.pep
MGKHTYDSMRTDKNRHNLQPLHQTNLKRTTRAYLISLMQINQSGVSATQTIPIGFTNAHQTSQPIFTRYSLSFSPSDLRCLHPCVLCWNRMAGPVRPVRLMLQLCSWKRKLSWAEEALWQSITEEAPKRPGETEDWAKNFFRRFCRTVPGSVADAIELDVPGFNYEVPVIVRLLAERTKTKLLPGAVTDATCELRLDCMRSGFASAQVASSVSNHRRTEDVVWGASLCNKDSNISTSHGCFVEERTAMMDIGSSLTRSNGTVPPSWGRGDGDDDCCLWERVKCSNITGRVSHLYFSNLYDSLEVLNAHGDSFWRFNTTVFSSFPELQFLDLSSIYPSSLNIDGLVGLKLPKLQHLNLSYNWLQESILADLGELVSLEVLDASSNAMSGVVPTAGSSLAGRTPINSSLEPVSLQVLNLNNNRMSGALPTERGLRFSQNNLSGKLSFFWLRNLTKLEEINLSGNINLAVDVNIPGWAPPFQLKQLALSGCGLDKGIIAEPHFLRTQHHLQELDLSNNNLSGRMPNWLFTKEATLVNLNLGNNSLTGSLSPIWHPQTALQSIVISTNRITGKLPANFSAIFPSLSTLDLSDNNFHGEIPMSLCSIKHMKDLSLSNNNFSGKMPTCVFTDFLELWTLSASNNQLGGLVFGGMKKLSIGFAMHLQNNKFEGTLPRNLSGALVIMDLHDNSLSGELDTSFWNLSKLQVLDLSGNHITGSIPQKICSLASIEILDLSNNNLSGSIPRCASASLSSLNLYGNSLSGNISDDLFNTSNLMYLDMRHNKLTGNLNWLRHLDKIKTLSLGWNDFEGQITPNLCKLKCPRIIDFSHNKLSGSLPPCVGNISCESDTAAQNYSPLLLIYVIIEAYIIVHDPIDFTFATKGGQYTYGYNFFDLMSGIDLSGNMLSGEIPWELGNLSHIKSLNLSNNFFTGQIPASFANMSEIESLDLSHNELSGLIPWQLTKLSSLAVFSVAYNNLSGCIPNSGQFGTYGMDSYQGNSNLRSMSKGNICSPDSGAGDLPSEGRDSMADDPVLYAPVGGASGRGGGRHHDGGRRLPKMGLGRRQQGGNGTGVDGEAGVVDGGCDAVEVAHLAATGIFDLELTRAATTNASRASPTVRPQGRTRRHCLPSQASQPLPLPFSRVVTVAAGLSPKANILVMRSPRNRVTIVPLGLPEPRCKRVLLAEIELFLARTFFELLNDSNISTSSHGCFVEERTALMDIGSSLTRSNGTAPRSWGRGDDCCLWERVNCSNITGRVSHLYFSNLYDSNEVLDAHGHSFWRFDTTVFSSFPELQFLDLSMNNATFQSWDGLLGLTKLRYLKLNNNCLNGTIPASIGKLVSLEVLHLQFTGVGGVLPSSVFESLRNLRELDLSSNRLNGSIPSLFSLPRLEHLSLSQNLFEGSIPVTPSSNITSALKTFNFSMNNLSGSLGPIWYPQMNLQAISLPMNRISGHLPANISSVFPNMSFLDVSSNTISGEIPSSLCNITRMEYLDLSNNSLSGELPNCLLTEYPILTTLKVSNNKLGGPIFGGTNHLSIKHALYLDGNKFEGTLPRYLTADFDAHGTLDLHDNNLSVPFSFFNSSTVMALDLSHNQFNGNIEWVQYLGE

SEQ ID NO: 155573 - protein, 820 aa, Oryza sativa
  Clone ID: PAT_MRT4530_55323C.1.pep
MAAAGRARRRPRRHSRREAAHPRPDGRRRRPPARRSGARERGGKGETNRRSTAHPGSTATTGTATGAEEGGGAARVDGDGGVPAVGGRNGGVDEVGEVAAKPKEAAPKREKVRGDDGGRPELGGIISRMYFRVILGRDSSTSYTSKREYKMIECEVCSTLQGATAKMKWSKHKIEFSEADHPKIATTPGRYPIVVEPTIRNIKITFDVAEFNTAHDAIIGRTVLVKFMAASHYAYQVLKMPGPKWTITTQGDAKLAVQCGKRSLDMVKHTPNPSTTTELPKKELAFIIFLCDNVDVFAWQPLDMPGVPRVVIKHKLMVRPHAKPVKQKLRRFAPDRKQAIREELDKLLKAGFIREVLHPEWLANPVMVRKANGKWRMNVDFTDLNKVCPKYHFPLPRIYQLVDSTASYEFLSFLDTYSSYHQISIAKEDEEKTAFITPLGVFCYTKMPFGLISADNTYQRRIQGALGDQLRRTVEAYVDDIVVKTKTRDSLIDDQRETFDNLRRYQMKLHPEKCTFGVPSGKLLGFLVSRRGIEANAKKIKAIENMKSPTRLNKVQRLTRCMASLSCFVTRMGERGQPFFALLKKPDKFEWTQEAENAFIALRHYLSNPPILVAPQLDKELFLYIATMSYFVSTVIVIEKERVQHPVHYISEALHDAKTRYPQIQKLLCVVTMTSRKLCHYFQAHKTIPEDRPDDQTDNETWTMAFDGALNSQGAGAVFVLTFPTGVQFKHAIHLNFRATNNTVEYEGLLTGIRVASALGIKRLIVKGDLELVANQVHKDYKCSNPELAKYLTEVDLIEVQHVYRKDNIEPNNLARHASR

SEQ ID NO: 155574 - protein, 73 aa, Oryza sativa
  Clone ID: PAT_MRT4530_55324C.1.pep
MTLSFKRHTRGGVAFFLTNQPFFCANLGPNPPNRGNSPGDPYYNWGKTPDRGVTPEIRDGARGGNKFSLKGGD

SEQ ID NO: 155575 - protein, 343 aa, Oryza sativa
  Clone ID: PAT_MRT4530_55325C.1.pep
MAAAARGVHLIVLPFGFRPVTKKYKVTHFLGDSRKAHPRAKDSFYAIQVHTLGDEKWKDVGSPEALSLNCVKNSGVVNVDGIMYWLTEDQGASWQHAVISFDLSRESFGRIQLPTVVLEDFAFYGPHQYWIKEIDGKVCIATSQTTQNQPRELIGEIQIWTLHIHLEQRWIQKYMIQSSPQCILGPNIFHGDKILSQQYGSILYSCELLGKNLEVKMSNADRLLDFTPRKPGNMQSYTFVKSLVRLDAYKKASIVTRKNFHTVTNWLLLRQPDDEALKCISMRIDQMLRCLSDCPNQVELTCLSASNQEGGDLLRMITSYLRDQVAISFYMFRSDPICNIQGI

SEQ ID NO: 155576 - protein, 1061 aa, Oryza sativa
  Clone ID: PAT_MRT4530_55326C.1.pep
MGKHTYDEEAPKRPGETEDWAKNFFWRFCRTVPGSVADAIELDVPGFNYEVPVIVKLLAECTKTKLLPGAVTDATCELRLDCMRSGFASAQVASSVSNLKSVHAENEGKGLGNLWKERSLREFLILEKDSNISTSHGCFVEERTALMDIGSSLTRSNGTVPPSWGRGDGDDDCCLWERVKCSNITGRVSHLYFSNLYDSLEVLNAHGDSFWRFNTTVFSSFPELQFLDLSSIYPSSLNIDGLVGLKLPKLQHLNLSYNWLQESILADLGELVSLEVLDASSNAMSGVVPTAVLKNLTNLKELNLSANGFSGSLPGSLLELPHLDPSGSSLAGRTPINSSLEPVSLQVLNLNNNRMSGALPTERAFGYLRNLRELHLSSNNFTGNISTFLLSLPHIERLDLSGNTFEGPIPITPSSNLSLSLKGLRFSQNNLSGKLSFFWLRNLTKLEEINLSGNINLAVDVNIPGWAPPFQLKQLALSGCGLDKGIIAEPHFLRTQHHLQELDLSNNNLSGRMPNWLFTKEATLVNLNLGNNSLTGSLSPIWHPQTALQSIVISTNRITGKLPANFSAIFPSLSTLDLSDNNFHGEIPMSLCSIKHMKDLSLSNNNFSGKMPTCVFTDFLELWTLSASNNQLGGLVFGGMKKLSIGFAMHLQNNKFEGTLPRNLSGALVIMDLHDNSLSGELDTSFWNLSKLQVLDLSGNHITGSIPQKICSLASIEILDLSNNNLSGSIPRCASASLSSLNLYGNSLSGNISDDLFNTSNLMYLDMRHNKLTGNLNWLRHLDKIKTLSLGWNDFEGQITPNLCKLKCPRIIDFSHNKLSGSLPPCVGNISCESDTAAQNYSPLLLIYVIIEAYIIVHDPIDFTFATKGGQYTYGYNFFDLMSGIDLSGNMLSGEIPWELGNLSHIKSLNLSNNFFTGQIPASFANMSEIESLDLSHNELSGLIPWQLTKLSSLAVFSVAYNNLSGCIPNSGQFGTYGMDSYQGNSNLRSMSKGNICSPDSGAGDLPSEGRDSMADDPVLYAVSAASFVLAFWGTVAFLFFHPLGRRAILATRNLVFWCGH

SEQ ID NO: 155577 - protein, 229 aa, Oryza sativa
  unsure (1)..(229): unsure at all Xaa locations
  Clone ID: PAT_MRT4530_55327C.1.pep
IRKRQRPSQGPPRSITPTLADRGDGDDARANALPATHATDDGSDRRHARRRRSKATARDLKRRRGTKXERKGKRGEGMPHRGWPARRKTMANGDGKPREDDVGERTSFGVPRVRGNEGSGNEPRRRRGGRGGSRPREPDGGDGAACRRPRERREAGSLAGPRLHPVRRRAPAIGRADLRNLCLRRHAQEEGGNKVFGKRFARLLPVRSRRLVFLFARVLRAFVDVRNRE

SEQ ID NO: 155578 - protein, 85 aa, Oryza sativa
  Clone ID: PAT_MRT4530_55328C.1.pep
FARGCFNNLLPYNGAATPAYGRSNHALSASLTCQGADLLDLPNAKTSILRCTLKAARAFLGQTTNPPSTSTDHGAGQVEHPMTEA

SEQ ID NO: 155579 - protein, 293 aa, Oryza sativa
  Clone ID: PAT_MRT4530_55329C.1.pep
MLRRNTRLRREYLYRKSLEGKERQHYEKKRRLREALDEGKPIPTELRNEELALRREIDLEDKDSAVPRSLIDDEYAGAALREPKILLTTSRNPSAPLTQFVKELKVVFPNSQRMNRGGQVISEIVESCRSHDITDLVLVHEHRGQPDGLIVCHLPFGPTAYFGLLNVVTRHDIKDRKAMGKMSEAYPHLILDNFTTKTGERTANIVKHLFPVPKPDSKRIITFANRDDYISFRHHVYEKHGGPKSLDLKEVGPRFELRLYQIKRGTVDQAEAQNEFVLRPYMNTAKKQKSLGA

SEQ ID NO: 155580 - protein, 125 aa, Oryza sativa
  Clone ID: PAT_MRT4530_5532C.1.pep
MADHMSSMHIIAKKNVIYAHHKLPVVRRAAATSEGGEAYAAVATRPQPVLPDEAPSATTLFLDPVPRLRVLPSAVVRAGASLHSGYVEVRLQNPVSNGTAAFAPLQFVLCRLSQKRIAQSFNPRR

SEQ ID NO: 155581 - protein, 141 aa, Oryza sativa
  Clone ID: PAT_MRT4530_55330C.1.pep
MEPGSIAERFRDRSILITGSTGFLAKMLVEKILRIQPDVRKLYLLVRAPDAAAAKERLLTEVVGKGLFDVLREQHGASFHSFIKEKVCPLPGDITHQNFGLGNSEILRLSQDVDIIVNGAATTNFMERKVNETLNLLENFL

SEQ ID NO: 155582 - protein, 53 aa, Oryza sativa
  Clone ID: PAT_MRT4530_55331C.1.pep
MRRAVEDCGHAEFVGENGHWSLVVTTAPLLRSDLRRPSPLVNKATATASASST

SEQ ID NO: 155583 - protein, 436 aa, Oryza sativa
  Clone ID: PAT_MRT4530_55332C.1.pep
MRQIDIEAHPSGRLKEGRSYHPRARPPRGGQATWVIAPAQSSSHDTPGPMSPTKPMIKDVKVEIAAITADDWRKLRYKALKYTLLDDELYYRTIDGVLLKCLSVDQAKVAIGEVHEGICGTHQSAHKMKWLLRRARYFWPTMLEDCFRYYKGCQDCQKFGAIQRAPASAMNPIIKPWPFRGWGIDMIGMINPPSSKGHKFILVATDYFTKWVEAIPLKKVDSGDAIQFVQEHIIYRFGIPQTITTDQGSIFVSDEFVQFADSVGIKLLNSSPYYAQANGQAEASNKSLIKLIKRKISDYPWQWHTRLAEALWSYRMACHGSIQVPPYKLVYGHEAVLPWEVRIGSRRIELQDGLTADEYYNLMADEREDLVQSRLRALAKVTKDKERVARHYNKKVVPKDFSEGELIWKLILSIGTRDNKFGKWSPNWEGPFQIFK

SEQ ID NO: 155584 - protein, 363 aa, Oryza sativa
  Clone ID: PAT_MRT4530_55333C.1.pep
MEKPMMDTGGGMIERTKSDQLAPPPPPSSAQSLSRTASAETVLSTADVTTTTSLSRKSSFGKRSASGGAGAGGNSHGYSSSNNNNSHIRKSRSAQLKLEMEDLVSSGAALSRASSASLGFSFTFTGFTPPPQDTMSSAELHPFSDDDNTMDIEAGTPRKKLMTEPTLPIYLKFAEVKYKVAVKGTPREILSGISGSAAPGEVLALMGPSGSGKTTLLSILGGRVAGPGDVEGCVSYNDEPYCKSLNRRIGFVTQDDVLFTHLTVKETLTYAALLRLPRTMTRQEKEERTIDIIYELGLERCQDTMIGGSFVRGVSGGERKRVCIGNEIIINPSLLFLDEPTSGLDSTTALRIIQLLHDIAEVT

SEQ ID NO: 155585 - protein, 918 aa, Oryza sativa
  Clone ID: PAT_MRT4530_55334C.1.pep
MATTAAAANLLLFSAVLLLATPSNAASAAAPAVAAMPVQPQELLLSFRSSLNDPSGALSTWSRSTPYCNWSHVTCTAGGGGGGVAVGLSLQGLGLSGDIAAEPLCRVPGLAALSLASNTFNQTVPLQLSRCALLVSLNLSSAGLWGPLPDQLAMLASLASLDLSGNDIEGQVPPGLAALRGLQVLDLGGNRLSGVLHPALFRNLTKLHFLDLSKNQFLESELPPELGEMAGLRWLFLQGSGFGGAIPETLLQLEQLEVLDLSMNSLTGALPPAFGHNFRKLLSLDLSQNGFSGPFPKEIGKCVMLQRFQVQGNGFTGELPAGLWSLPDLRVVRAESNRFSGRLPELSAAASRLEQVQVDNNSISGEIPRSIGMVRTMYRFTASANRLAGGLPDTLCDSPAMSIINVSGNALSGAIPELTRCRRLVSLSLSGNALTGPIPASLGGLPVLTYIDVSSNGLTGAIPAELQGLKLALLNVSYNHLTGRVPPSLVSGALPAVFLQGNPGLCGLPADGGCDAPAAPPSRNRLALAATVASFVTGVLLLLALGAFAVCRRLHAAAKLVLFYPIKITADELLAALRDKNAIGRGAFGKVYLIELQDGQNIAVKKFICSSNQTFGAVKNHMKTFAKIRHKNIARLLGFCYDSHGGGGEVSVIYEHLRMGSLQDLIRAPKFAVGWNDRLRIAIGVAEGLVYLHRDYTPRFLHRDLKSSNVLLGDDFEPRVTGFGIDRVVGEKAYRSSLASDLNYSCYIAPVIHFTQKQNFIRIAISTAELHSRFHKTLALCALIPLKLFALLLKPEVNCTKKPTHLMDVYSFGVILLELITGKPAGQPASDDSVDIVRWVRRRVNVAGGAAQILDPAAAVSHAAQQGMQAALELALLCTSVMPDQRPAMDEVVRSLQLLHSPQTLPPPPPFTGVAVEP

SEQ ID NO: 155586 - protein, 126 aa, Oryza sativa
  Clone ID: PAT_MRT4530_55335C.1.pep
MASGLVRLALECEKAAPPTNPGEKRRRAALMEETTWRAYCNGRKCGYAVRRECGAEEWRVLRAVEPVTVGAGVLPDGGGVAGGEGDMMYMRARFERVVGSRDSEAFYMVSPDGNAGPELSIYLLRV

SEQ ID NO: 155587 - protein, 813 aa, Oryza sativa
  Clone ID: PAT_MRT4530_55336C.1.pep
MVSLFNLSLANNLLHGNIPEELGSLQNLEYLDLSLNNLSGPIQGSIENCLKLQSLRLGHNHLGGSIPIKLGMLTYLQELLDLSDNSFAGIIPSQLSGLNMLEALNLSHNTLNGSIPPSFKGMISLSSMDVSYNNLEGPVPHIKFLEEAPVEWFVHNKHLCGTVKALPPCNLIQKGGKGKKFRPILLGIVAAAGISIVFITALVTWQRRKMKYGEQSENGVGNTKVFSVWNFEGGDACKQIFEATENFNGTHCIGMGGNGSVYRAQLPTGEIFAVKKIHMTEDDELIFKREVDALMSIRHRNIVKLFGYCSAVHVKFLVYEYMDRGSLSRYLENHNTAIELDWMRRINIVKDVDNALSYIHHDCFAPIVHRDITSNNILLDLEFRACISDFGIAKILDVEASNCTKLAGTKGYLAPELAYTTRVTEKCDVYSFGVLVFELFMGCHPPLPTVAAAAAAGMPPRRRRRVRPPLPPSPPLLSSTTATPPPTPPVGTPKSEAADRRPPPARRRLPLVSAAAVEEEDGEWHPLPLSAADLSLPLTLPTGQTFLWRRTSLSPLRFTGAVGPHLVSLSHLPSSDGRLAFLLHNNGGSSSSSVPAAARAALSDYLNAAVPLADLWRRFAAADARFAEVSARLGGGGARVLRQDPVECVFQFLCSSNNNIARIEKMVWALAGYGERLGEVGGYQFHQFPTIERLARVSEQELRDAGFGYRAKYIVGTAKILQAKPGGGEKWLASLRTRELPEVIEALCTLPGVGPKVAACVALFSLDQNHAIPVDTHVWKVGVPYLYDALVVSTLQRGVQMPSRYGLLWAHPR

SEQ ID NO: 155588 - protein, 554 aa, Oryza sativa
  Clone ID: PAT_MRT4530_55337C.1.pep
MASPELAAGDGSYNFHLRSLSAASRDSAAAADPASDPILLESVRRVCEMCKKAKGPSDEMVARAFPVMSKLFQRCAAAPTQSVASSGVLLLTILQFFLDFGEAVLHDADGSLRTFFRSCLSREFADPIVAERTLEFLIANKTKILSSFPTLIPQFFPLLLKLIASNGERLERKFSEVLPLMMSAGSFLPLFLSLMDLPMLVVALEKVERSSGTLIGSSIATIQKSAAPEMLLALMDEAYTGSAIEDAIGNAGSDDSGPLDLADPMFLDLLKDENDGIAAAVNSPQSDRLKQSLKMAPRFLTLYFATALRDVNDSLLCALIPVVMSRYAAMFPDKVYSFEVRKRLSDFILAAFQRSPDIIALLKTELALHLCWAIGEHGAGGKNRKDVARELFENLELLLYENLATSRLGLSQDTGFDPMGASSRKSSQARLLCFVVTAIAKLATFHNELLPRARVSLAKVGPNPSSLRNIKVARSRTSDRRVWQRACDYLGLLNEPAICLSVLGPSTAQGNGPGIVNWSEGGTKMVAHIPFYLLAEQKGAPIHDFSFDDLVPTE

SEQ ID NO: 155589 - protein, 574 aa, Oryza sativa
  Clone ID: PAT_MRT4530_55338C.1.pep
MASPELAAGDGSYNFHLRSLSAASRDSAAAADPASDPNLLESGGWDVLTFWLVDSCGLCGVKVRRVCEMCKEAKGASDEMVARAFPVMSKLFQRCAAAPTQSVASSGVLLLTILQFFLDFGEAVLHDADGSLRTFFRSCLSREFADPIVAERTLEFLIANKTKILSSFPTLIPQFFPLLLKLIASNGERLERKFSEVLPLMMSAGSFLPLFLSLMDLPMLVVALEKVERSSGTLIGSSIATIQKSAAPEMLLALMDEAYTGSAIEDAIGNAGSDDSGPLDLADPMFLDLLKDENDGIAAAVNSPQSDRLKQSLKMAPRFLTLYFATALRDVNDSLLCALIPVVMSRYAAMFPDKVYSFEVRKRLSDFILAAFQRSPDIIALLKTELALHLCWAIGEHGAGGKNRKDVARELFENLELLLYENLATSRLGLSQDTGFDPMGASSRKSSQARLLCFVVTAIAKLATFHNELLPRARVSLAKVGPNPSSLRNIKVARSRTSDRRVWQRACDYLGLLNEPAICLSVLGPSTAQGNGPGIVNWSEGGTKMVAHIPFYLLAEQKGAPIHDFSFDDLVPTE

SEQ ID NO: 155590 - protein, 597 aa, Oryza sativa
  Clone ID: PAT_MRT4530_55339C.1.pep
MVLTRSNGNGPNSNNNNNNGENPTLAQVLAQQTQLMNMMMQQLQNQQNQGNNHAPPQNKLAEFLRVRPPIFSSTTNPVEAGDWLHAIEKKMDLLQCTDQEKVSFASHQLLGPASEWWDHFRLNRITAEPITWLEFTAAFRKTHIPSGVVSLKKKEFRSLTQGSRSVTEYLHEFNRLARYAPEDLRNDEERQEKFLGGLNDELSYPLMVGDYPDFQKLVDKAIRQEDKYNRMEQKKRRIAHFKAQQGSNQKPRLTLGPQSVPQGGSSSIVRPQRQFFNNNAGNNIRNQVPRPVAASTQQQPAKRKQGSKPVVCFNYGDPGHYADKCPKPRRVKVVPAQNNSAVPASKARVNHVAAAEAQDAPDVILDLDVILGMDWSRLNQITLGEIPIVREYPDVFPDDLPGYYRRFIENFSKIAKPMTRLLQKYVKYKWSEESLEAKPTLIDQVREAQISDPDIQEIKKNMRRGKAIGFLEDEQGTVWLGERICVPDNKDLKDAILKEAHDTLYSIHPGSTKMYQDLKERFWWASMKREIAEYVAPSPSLGKTTVVLAKSSPSSSASSLSPEITGAASPSSTRRFPPLPPRRRRRLLVFRRRLGHR

SEQ ID NO: 155591 - protein, 190 aa, Oryza sativa
  unsure (1)..(190): unsure at all Xaa locations
  Clone ID: PAT_MRT4530_5533C.1.pep
SLLSTQSYYKKGSRFEWSRVRCGHILYFGYKYXPIPCNELTPVQYTXSAHRHXFYFHCFDEFLLSSWAASVKISDERXNLLYKLYDVNIYSRXSEFSSLSXYTLHCRSKLYCIGLILDDTSSAIQPIGYRLWYVSCRFKCCRIFGPALEXSKSLRPVCVFCINRRLPQTAQLRETSARGSGGGSGVGFSR

SEQ ID NO: 155592 - protein, 912 aa, Oryza sativa
  Clone ID: PAT_MRT4530_55340C.1.pep
MHHGGGGGAIRVLNVAEKPSVAKSVAEILSRPSGGMRSREGRSRYNRVFEFDYSIGGRACHMLVTSVTGHLMELEFDDRFRRWHSCDPADLFHAPVRKSVPQGTALKELYSRVLQELDRGTSHDCYSFLNWEPLVLLVICTVAQQQSGSSHIRLKISKLEAEVKQIYKFPLILPFFQHQENKMLLFLSVALPQPCWSLLVDKQDIKRTLEEEARKCQWLVLWLDCDREGENIAYEVIDICAGANSRLNIWRARFSALIDREIHEAVQHLDRPNKLFADAVDARQEIDLRIGASFTRFQTMLLKDAFVLDDTGDDRNIILSYGPCQFPTLGFIVERFWEIQAHEPEEFWTINCSHTSDEGTASFGWIRGHLFDYSSAVVIYEMCVEEPMATVQNVRNQEKLKYPPYPLSTIELQKRASRYFRMSSEHTMKVAEELYQAGFISYPRTETDNFSPNTDLHSIVHEQVAHPNWGTYAQRLLDPEARLWRNPSNGGHDDKAHPPIHPTKFSAGETNWTDNHKKLYELVVRHFLACCSQPAVGAETTVEIDIAGEQFNASGRVVLAKNYLDVYRFDSWGGTLLPTYIIGQQAGIGTDATMHDHIKKLLDRCYATKDANTRFSPTNLGEALVMGYDEMGYELWKPYLRSMMEADMKSVSIGTKSKSEVLENCLQQMKACFLDARANKVKLFDAMGTFFARSSRPVNETQNSIETVRPCAACNESEMFLKQRPCRNVVWLPRSLSGAAVTDQVCPTCAPGPVYKIQFKFRRRDIPPNFDVDHLGCIGGCDDILKELMELSRFGSHSQTATPARNQSQTASGVRQGSSRQDLHTSFHPAVQFTNGQTPVVNPQGFRSTHTQSSGNASDGKTMWRTLRRGAVAGVGGAGAVAAGNHLHLHLQGGEAAPKGEAGGAEDGMLMA

SEQ ID NO: 155593 - protein, 1721 aa, Oryza sativa
  unsure (1)..(1721): unsure at all Xaa locations
  Clone ID: PAT_MRT4530_55341C.1.pep
KVRCSGLCCARGTVTAPFRAPGLEWYIPGLELELCSRDGCSEWLGLCNRMPRYKPEYLFGVEGFVQELRTMSYVIGFGTAPFYAXITHDRHEEKCRVKVTLNSNSEDIPSVMFEAGGRNYIHACQEVARIAIGELRDRYSDQLADTEYRYHPRQPQGSDCGSYLETEGIENDATTRHLVEMLWAMDETRAETVLAAQDREDRNRGKICKLEDKVDRLEKELAALKGEAPPQKARIRLTARKRALFVPRYQLAPKMVLTRSNGNGPNNNNNNNNGENPTLAQVLAQQAQLMNMMMQQLQNQQNQGNNHAPPQNKLAEFLRVRPPTFSSTTNPVEAGDWLHXLLQCTDQEKVSFASHQLHGPASEWWDHFRLNRTTAEPITWLEFTAAFRKTHIPSGVVSLKKKEFRSLTQGSRSVTEYLHEFNRLARYAPEDVRTDEERQERFLEGLNDELSYPLMTGDYHDFQKLVDKAIRQEDKYNRMEQKKRRIAHFKAQQGNSQRPRLTLGPQSMPQGGSSSVVRPQRQFFNNNAGNNIRNXAPRPVAAPTQQQPAKKEQGIKPGVCFNCGDPGHYADKYPKPQRVKVVPVQSNSTAQASKARVNHVAAAEAQGAPDVILGTFLVNSVPATVLFDSGATHSFLSMSFAGNHGMEVEDLRRPLMVSTPSNQALSLQRSPSVRIEIQEVPFLANLILLESKDLDVILGMDWLARHKGVIDCANRKVTLTNNDGRVVTVHALSSESLRSSLNQIALEEIPIVQEYADVFPDDLPGMPPKRDIEFRIDLVPGTTPIHKRPYRMAANELAEVKRQVDDLLQKGYIRPSSSPWGAPVIFVEKKDHTQRMCVDYRALNDVTIKNKYPLPRIDDLFDQLKGATVFSKIDLRSGYHQLRIKEEDIPKTAFTTRYGLFECTVMSFGLTNAPAFFMNLMNKVFMEYLDKFVVVFIDDILIYSRTKEEHEEHLRLALEKLREHQLYAKFSKCEFWLSEVKFLGHVISAGGVAVDPSNVESVTNWKQPKTVSEIRSFLGLAGYYRRFIENFSKIAKPMTRLLQKDVKYKWSEECEQSFQELKNRLISAPILILPDPKKGFQVYCDASKLGLGCVLMQDGKVVAYASHQLRPHEKNYPAHDLELAAVVHVLKIWRHYLFGTRTEVYTDHKSLKYIFTQPDLNMRQRRWLELIKDYDLGIHYHAGMANVVADALSRKGYCNAMDGRQLPLELCKEFERLNLGIVSRGFVAALEAKPTLIDQVREAQINDPDIQEIKKNMRRGKAIGFFEDEQGTVWLGERICVPDNKDLKDAIMKEAHDTLYSIHPGSTKMYQDLKERFWWASMKREIAECVAVCDVCQRVKAEHQKPAGLLQPLKIPEWKWEEIGMDFITGLPRTSSGHDSIWVIVDRLTKVAHFIPVKTTYSGSRLAELYMARIVCLHGVPKKIVSDRGSQFTSNFWKKLQEEMGSKLNFSTAYHPQTDGQTEKVNQILEDMLRACALDFGGSWDKNLPYAEFSYNNSYQASLQMAPYEALYGRKCRTPLLWDQTGERQVFGTDILREAEEKVKIIQERLRVAQSRHKSYAYNCRRDLSFEEGDYVYLRVTPLRGVHRFHTKGKLAPRFVGPYKIVSRRGEVAYQLELPQSLAGVHNVFHVSQLKKCLRVPTEEANLEQIEVQEDLTYVEKPIRILEIDERRTRNRVIRFCKVQWSNHSEEESTWEREDELKSAHPHLFASSSESRGRDSV

SEQ ID NO: 155594 - protein, 1054 aa, Oryza sativa
  unsure (1)..(1054): unsure at all Xaa locations
  Clone ID: PAT_MRT4530_55342C.1.pep
DVILGMNWLAQFQGVVDCARRTVTLYRGPEQPVVFFAPPTSVGSSELHQIGLSEIPIVSEFGDVFPEELPGMPPKREIEFRIDLAPRTTPLYKRPYRMAANELAEVKKQLEELKEKGYIRPSTSPXGAPVIFVEKKDKTKRMCVDYRALNEVTIENKYPLPRIDDLFDQLKGATIFSKIDLRSGYHQLRIREEDIPKTAFTTRYGLYEFTVMSFGLTNAPAFFMNLMNKVFMEYLDKFVVVFIDDILVYSQSEEDHXQHLRLVLGKLREHQLYAKLSKCEFWLSEVKFLGHVISAKGVAVDPETVTAVTDWKQPKTITQVRSFLGLAGYYRRFIENFSKIARPMTQLLKKEEKFVWSPQCEKAFQTLKEKLVSSPVLILPDTRKDFLVYCDASRQGLGCVLMQEGHVVAYASRQLRPHEGNYPTHDLELTAVVHALKIWRHYLIGNRCEIYTDHKSLKYIFTQSDLNLRQRRWLELIKDYDVGIHYHLGKANVVADALSRKSHCNTLGVRGIPPELNQQLEALNLSIVGRGFLATLEAKPTLLDQIREAQKNDPDMHGLLKNMKQGKAAGFTEDEHGTLWNGNRVCVPDVRELKQLILQEAHESPYSIHPGSTKMYLDLKEKYWWVSMKREIAEFVALCDVCQRVKVEHQXPAGLLQPLQVPEWKWDEIGMDFITGLPKTQGGYDSIWVVVDRLTKVARFILVKTTYGGNKLVELYFARIVSLHGIPKKIVSDRGSQFTSHFWKKLQEELGTRLNFSTAYHPQTDGQTERLNQILEVMLCACVLDFGKTWDKSLPYAEFSYNNSYQASIQMAPYEALYGRKCRTPLLWDQVGESQVFGTDILREAKAKVRTIRENLKVAQSRQKSYADNRRRDLEFAVDNFVYLRVTPLRGVHRFQAKGKLAPRFVSPFRIIARRGEVAYQLELPASFGNVHDVFHVSQLKKCLRVPSEQADSEQIEVREDLTYVERPVKILDTMERRTRNRVIRFCKVRWSNHAEEEATWEREDELKAAHPDLFARARARRLPPAVPMWPPPGAPSGCRMGPGHQPPAPWGRG

SEQ ID NO: 155595 - protein, 167 aa, Oryza sativa
  Clone ID: PAT_MRT4530_55343C.1.pep
MVRCDDSDSSTSGGGAVGLTRQRQRQKNGQERGGASTIQPPMRTAIRLPIGTRPQRPGRDGGEGLARSTEARPPSTPVGAGLTRRWRTDPKREGTTAIEVEVVVPASLGQPWSLTSRRSNRPYRVLLFLLLPHLLAAIGSAPCGCVAVKLAMSGRDANPSACSLQRR

SEQ ID NO: 155596 - protein, 264 aa, Oryza sativa
  Clone ID: PAT_MRT4530_55344C.1.pep
MPRYKPEYLFGVEGFVQELRTMSFAIGFGTAPFYAQIPHDRHEEKCRVKVTLNSNSEDIPSVMFEAGGRNYIHTCQEVARIAIGELRDRYSDQLADTEYRYHPRQPQGSDRGSYLETEGIENDATTRHLVEMLWAMDETRAETVLAAQDREDRNRGKICKLEDKVDRLEKELAALKGEAPPQKARIRLTARKRALFVPRYQLAPKVRVVEKEVTPALADPPVVNISDDEVEESKRTYSKIEWGATQDDEDEPDEPSINSDARKN

SEQ ID NO: 155597 - protein, 68 aa, Oryza sativa
  Clone ID: PAT_MRT4530_55345C.1.pep
CRLRWFNQLDPRINRSPFTEEEEELLLASHRAHGNRWAVIARLFPGRTDNAVKNHWHVIMARRCRERM

SEQ ID NO: 155598 - protein, 35 aa, Oryza sativa
  Clone ID: PAT_MRT4530_55346C.1.pep
FQVSIRACRMTTLNAYRPVGASKHKPKNNRRELAS

SEQ ID NO: 155599 - protein, 396 aa, Oryza sativa
  unsure (1)..(396): unsure at all Xaa locations
  Clone ID: PAT_MRT4530_55347C.1.pep
SGHHAMRRGNDKDERARRRRXGTTEANGEGTTSAAILARSRDAASTRLDDTEPRTKTTTGXHDDRERREDDDWNQRGGDEGSRQQLHGDEDGAEHATAMPKVVEVRPTGARARRDGRRAXEGTAAPADARAWQKGXAGGDVDEEEGEAXRATAFWRNSGDAVAWPGKRTAFRCRERWWRRRPAHRGRGRSGRRRNSGGNATVAGRDALLEVSAXNRGQAGEEEAAATLEEATARPAGVLTRRQGRPHSVSRPPSSPRTTSRFGIACFGIAVSLPISSTPFPLPSPLSAAAPSRRRSPPATIGARARRLPSAVPARPPSGASRGCQVGPGRQPPAPAGAADAWDPRRRPASAACARSTMDREADAWAPLPWTRSARPLPRLVHPRINKTSTSGHSTH

SEQ ID NO: 155600 - protein, 125 aa, Oryza sativa
  unsure (1)..(125): unsure at all Xaa locations
  Clone ID: PAT_MRT4530_55348C.1.pep
IWSTTHNRGHGYSNSFTLIKGVQLYPQDTAPRHVSVXPTCRHDIPERGRDRTLHITPSNQAHHTSGFTPTPRKAAGSPLSCLGESGSRIGRRRAHPNSITPTLAWMRQLEESYTTSPAVAHAGLW

SEQ ID NO: 155601 - protein, 1232 aa, Oryza sativa
  unsure (1)..(1232): unsure at all Xaa locations
  Clone ID: PAT_MRT4530_55349C.1.pep
MVNTRSNGNGPNNNNNNNNNNEGNPTLAQVLAQQTQLMNMMMQQLQNQQNQGNNHAPPQNKLAEFLRVRPPIFSSTTNPVEAGDWLHAIEKKLDLLQCTDQEKVSFASHQLHGPASEWWDHFRLNRTTAEPITWLEFTAAFRKTHIPSGVVSLKKKEFRSLTQGSRSVTEYLHEFNRLARYAPEDVRNDEERQEKFLEGLNDELSYPLMTGDYSDFQKLVDKAIRQEDKYNRMEQKKRRIAQFKTQQGNNQKPRLTLGPQSVPQGGSSSVVRPQRQFFNNNAGNNIRNQAPRPVAAPTQQQPAKREQGNKPVVCFNCGDPGHYADKCPKPRRVKVVPVQSSSTALALKARVNHVAAAEAQDAPDVILVREYPDVFPDDLPANELAEVKRQVDDLLQKGYIRPSSSPWGAPVIFVEKKDHTQRMCVDYRALNDVIIKNKYPLPRIDDLFDQLKGATVFSKIDLRSGYHQLRIKEEDIPKTAFTTRYGLFECTVMSFGLTNAPAFFMNLMNMVFMEYLDKFVVVFIDDILIYSRTKEEHEEHLRLALEKLREHQLYAKFSKCEFWLSEVKFLGHVISAGGVAVDPSNVESITNWKQPKTVSEIRSFLGLAGYYRRFIENFSKIAKPMTRLLQKDVKYKWSEECEQSFQELKNRLISAPILILPDPKKGFQVYCDASKLGLGCVLMQDGKVVAYASRQLRPHEKNYPTHELELAAVVHALKIWRHYLFGTRTEVYTDHKSLKYIFTQPDLNMRQRRWLELIRNYDMGIHYHSGKANVVADALSRKGYCNATEGRQLPLELCKEFERLNLGIVSRGFVAALEAKPTLIDQVREAQINDHDIQEIKKNMRRGKAIGFLEDEQGTVWLGERICVPNNKDLKDAILKEAHDTLYSIHPGSTKMYQDLKERFWWACMKREIAEYVAVCDVCQRVKAEHQKPAGLLQPLKIPEWKWEEIGMDFITGLPRTSSGHDSIWVIVDRLTKVAHFILVKTTYSGSRLAELYMARIVCLHGVPKKIVSDRGSQFTSNFWKKLQEEMGSKLNFSTAYHPQTDGQTERVNQILEDMLRACALDFGGSWDKNLPYAEFSYNNSYQASLQMAPYEALYGRKCRTPLLWDQAGERQVFGTDILREAEEKVKIIQERLRVAQSRHKSYADNRRRDLSFEEGDYVYLRVTPLRGVHRFHTNGKLAPRFVGPYKIVSRRGEVAYQLELPQSLAGVHNVFHVSQLKKXFKGTYRRS

SEQ ID NO: 155602 - protein, 75 aa, Oryza sativa
  unsure (1)..(75): unsure at all Xaa locations
  Clone ID: PAT_MRT4530_5534C.1.pep
DREKNVTRKVLHRRLAVEEGCAPEHAPNHVPTDQTHXTEREAKHRTDHHYARPIATGPTTPPXTRXXKTTPSRGS

SEQ ID NO: 155603 - protein, 92 aa, Oryza sativa
  Clone ID: PAT_MRT4530_55350C.1.pep
MAAAVAQRREKARLLDVSRRRQGGGQRVNRSGGGSMRRGGDNGSLARGDDIGGGSTCGGGSGSLPAWEATLPLPAAALGCPAPVARRARRHP

SEQ ID NO: 155604 - protein, 1322 aa, Oryza sativa
  unsure (1)..(1322): unsure at all Xaa locations
  Clone ID: PAT_MRT4530_55351C.1.pep
MAPPFVFPSTLRDLERDGDGGGDDEPALRPQNPVAVGALRAADLEEFVKGTSFDLSDKELFCIEEQDVFDRVYSLVRDFTCLPPALKFNLVETLRSNLSVLLPNIDSLSRASMSSPSDGIPVTDRIASHRNALKIYSFFLLSIVVAEESGADSCNGPKVAVHGRKKNAVYAWNWEAQRGRIMNLIANSLEVDLSLLFGPGGADEQYLSFVSKCTFVLCENQNVLKDEEIRNGLCRIIGAIATKHQRVSQTSASVLHLIHKFDFTVVLLAESVAAAEKRFGDGSLAILLIREIGRTDPKDYVRDSAGADNAGRFLVELADRLPKLMSTNIGVLIPHFGGESYKIRNSLVGVLGKLAAKAFKDVEGDSDAHSLRLRSKHAMLEILLERCRDVSAYTRSRVLQVWAELCEENAISIGLWNEVASVASGRLEDKSAIVRKSALQLLITMLQHNPFGPQLRTATFEATLERYKEKLQGMEPPSPEKDELLNDSSLGEVIAGQDESVSDSCLPSSQDPKDQDPTIVDITNLEQIRALVASLEAGLRFSACITSLMPTLVQLLASSSATDVENTILLLMRCRQFQIEGSEEALRKMLPLVFSQDKSIYEAVESAFITIYTKKSPTETAKSLLNLTIECSIGDLAALESLVSSLITALWDYFCFHINGVKPVQSRGALSILCMAAKSSPSILGTHLQDIIDIGFGRWAKEEPLLARTACIALQRLSNEDKVKLISTGSRVFAALQGLITSLSLPEKIWYGAADKAISAIYALHPAPEIFAAQIVKKSLNSVFGVLGTDCMSNENETQNGSMLSSTPATNLGRFLFIISHIALNHLVYIETSVKKIQKQKRKNDKSEPTAEDLQADASKNSEAQGINAELGIGASVDIAIESLAEKAEREIVSNSEKNLIGYCAPFLAKLCRNLALLQKFPGLQASAMLALCKLMIIDAEFCEANLQILFTAAESAPSEVVRSNCTIALGDLVVRFPNLLEPWTEHIYARLRDPSASVRKNTVLVISHLILNDMMKVKGFINEMAVRIEDEDERISSLAKLFFHELSKKGMSSKCVGSNPIYNLLPDILGRLCNQQLKDETFCSIMQFLISSIKKDKQMEALVDKLCNRFAGVNDVRQWEYISYCLSQLTFTEKGLKKLVDNFKIFEHALSEDSVMNHFRTVIAKCKKFAKPDLKVCIEEFDEKLSKVHQEKKEQEATTRNAEAHKQRIGSLDKLMVTKRTGKDKGKSAEVAEETSEVVDPSTESNSEDKENMPECSDNICSEKSHTSSTFTESDGDSTEVQSARTSCKGNRWSHCXKMREPEDSEDSAPIRRVSRRRPVR

SEQ ID NO: 155605 - protein, 1433 aa, Oryza sativa
  unsure (1)..(1433): unsure at all Xaa locations
  Clone ID: PAT_MRT4530_55352C.1.pep
MLTSPRVTLSRSKLHRNTSVMDKMSIIAEVAGGVAHKSKNKAPHETLPQDFWDFIPDDNQPPIFNVTKKILSPYQVFHMLKKLDPELINQDDRTKAYKRMVDLYSKKSDDESSASTDTYGTKWLKDIILSKRSDNAFRSIMVGDPKINLNEIGIPMGLALNLVVSEQDGDLVLVNSPPSVHQHSLIALSAKLLSTQSAVSINPLCCDPFKGDFDGDCLHGYIPQCLQSRIELEELVGLSGQLLNQQDGRSLVSLTHDSLAAAHQLTNADVFLEKAEFQQLQMLSSSISLTPMPSVFKSTNSQGPLWTDLYLFSDHYSRRKLSEEVHLALDEAEEAFQIKQILLNSVSIPNLKYYDGGDDRSNTDEQSGFTQVSLPIIRSSMTSFKSVFNDLLKMVQQYVSKDNSMMTMINSGSKGSVLKFVQQTACVGLQLPASKFPFRIPSQLSCVSWNRHKSRNCEITDGTSECVGGQDMYAVVRNSFLDGLNPLECLLHAISGRANFFSENADVPGTLTRKLMYHLRDTYVAYDGTVRSSYGQQIVRFSYDTADGMYSDHDLEGEPGAPVGSWAACSISEAAYGALDHPVNSLEDSPLMNLQEVLKCHKGTNSLDHTGLLFLSKHLRKYRYGFEYASLEVKDHLERVDFSDMVDTETMKIKRLRLEFIVREIIDQYNTLRKQLNNAIPSVSISNSETLHLKMENKSGKLGKNLGTGNECVKNQTCCVTMVAQVESNSTSQLDVIKERVIPSILATLLKGFLEFKNVKVQCQEDNELVLKVVCKIHNXAIGRNIHRQHLLVVADCLSVSGQFHGLSSQGLKQQRXLRPAHSFINAAKRDSVDNLSGTLDAIAWGKEPCAGSSGPFKILYSGKSHETKQNEHIYDFLHNPEVQALEKNVMDTYRKRTEKTSKRRSALNSEGNATINGGAISFNQKFLNAKVGIWENIIDMRTSLQNMLREYTLNEVVTEQDKSCLMEALKFHPRGYDKIGVGIREIKIGVNPGHPSSRCFIVLRNDDTTADFSYNKFQGVCSRGGCGVLHIGGSGPMLLAGRRYGDECRCYLHAGSINDGFSLLTPLRGHQKEPLLFVGIPDAVKAWDLAKLQWTHPFWSYRSYNALALLGSISIILFSGSNNQGLGCYGKLETGSLAVTYTHNEDHGALALAGMQDAQLNPILLWSTNYNIVHLYELPSMEEQVRKAVFLNRETFGSQFALAISRIPYSVVEEYTSTGLEELFADVGTWKKQVGDTSLSRGLETVGTKHTLAQVQENGLSDLFLHFKITGSPWKRKNKHLNQQQMYDYQAMTLRPIQEMMRNNTEHYGFNFFLFEKLGQQTGTCTSDHLNKKVAVCSNLGMEINRNELGYTHLLLASRLPLDVGAYLERTCNGVSSKRFVGNHFTAHIPLRESSADRRPRENKRRERKSKATMPVSTLVTVLHITYSAIPS

SEQ ID NO: 155606 - protein, 848 aa, Oryza sativa
  unsure (1)..(848): unsure at all Xaa locations
  Clone ID: PAT_MRT4530_55353C.1.pep
MTELVAPHRETAQAPLCQFGRGLRVRAAEKQWAEISTVAVRMTLRWDCPYLPPLPPGDEAWHISIGANVSSLRDNTLNSGLRRVPRGFRLDGTGQGVRQTASCHLTRDLTDFLKGSGCLGPRGRGKRNPTPPPLGGNQEEGRHLTLGPDVPEGARPRGRLCLPQASGHDTPGPISPTSLVLNKRTRIEIDEVVATMDISEANEGYVSCGSVIEMSRQMKAARAGVRAQSXPACXGIPTVGKVGSVLLFTARMGEGLCHMFTTGSKAMECGVKMCLVGWPWLAWDELGPRSGYQFGLNHRRPLVKAVLDGHLCEEEDAVNCLPKLRKTVGSASEAKEAVKPAVKQEKKIRSVKVLSLVSDLSLPFXVFPLSLSKPGXQMADNEKGSKVRNQDKGASCSQVNKAPDTSCVVVVQHLINQNKLLIDLLQHHQTPILNPSQMQPQVQFEADQAPTSPDNVPLASQQAHCAMPHVDSKEAIIICLIYDEQGHYARNCPQQKRKAPMRTDDEVRKMTITGTEWPPPGMTKRQIGNFFRGAPQLTQHLLANGGRVSDSEDSDQVSSGDEDEKSPXGFKQNKMEHKACSRCGEIGHVASSCVTTCLHCEKDHPPGECPMSRITCFLCEGTDHVPKDCQFSFLLTKKMANHPASSNKEKHQDHVNPRQEYSFQPNSRVGQRNQNGKSKSRVRQDISCLNCQXLGHFAARCPKLRNIAASMSVHATPHNQKLVPXRIVIHASRSSRIAXLQQLSALPQRCQCXFQPQPPVDKTEANICVVPLDVPVQQPRNXVLDEELGRKKVIVCYNCSEERHYSRNCPQPKRNPRHHSGRYARRRHDHNIRVTGANAVPVKPSASQ

SEQ ID NO: 155607 - protein, 1135 aa, Oryza sativa
  Clone ID: PAT_MRT4530_55354C.1.pep
MEIRNGSRDSNNACGSEEPIDGARANSASGNSPSPPPENPTIAQVLDNQTQMMTMMMQQMQQQYHQSKLLEFLRVKPPTFSSTTNPIEAHDWLHAIEKKLNLLQCNEQEKVAFATHQLQGPASIWWDNYMVTRPAGAEVTWTEFRHSFNKAQVPEGIVAQKKREFRSLQQGTRTVIEYLHEFNRLARYAPEDVRTNAERQEKFLSGLDDELTNQLISRDYEDFEKLVDKAIRQEEHGNKINRKRKAAQFRTPQGKSQKPRFTMGRHGGPSTMIIRQHRPYHPGSFNKNHHNGSHNNSEQHSLNPTPSSLKIPAQSVQPALPEQPKRLGEKPELCFNCNKPGHTVGKCPKPRRAGPKFVQARVNHASAEEAQSAPERFAGAHGLSLVKLKIPMRVNTPGGGMTTTHYCPSVTVEIQGLIFPANLILLESKDLDVILGMDWLTRHRGVIDCASRTIKLTHAKGEVVTFQSLVPRKPGISLNQAAGEEQEVAVEKTTKKLEDIPIVREYPEVFPDDLTTMPPKRDIEFRIDLVPGTAPIHKRPYSMGANELAEVKKQVDEQLQKGYIRPSTSPWGAPVIFVEKKDKTKRMCVDYRALNEVTIKNKYPLPRIDDLFDQLKGATVFSKIDLRSGYHQLRIREEDIPKTAFITRYGLFECTVMSFGLTNAPAFFMNLMNKVFMEFLDKFVVVFIDDILIYSKSEEEHEQHLQLVLEKLKEHQLYAKFSKCDFWLKEVQFLGHIVNAQGVAVDPANVESVTKWTPPRTVTQVRSFLGLAGYYRRFIENISKIAKPMTQLLKKEEKFIWSAECNRSFEELKRRLVSAPVLILPDQTKDFQVYCDASRQGLGCVLMQDGKVVSYASRQLRPHEGNYPTHDLELAAVVHALKIWQHYLISNRCEVYTDHKSLKYIFTQADLNLRQRRWLELIKDYDMGIHYHPGKANVVADALSRKSYCNVAWVEQLCCEVQRDLEHLNLGIVEHGFVAALEAQPTLVEQVRIAQASDPEIAELKKNMRVGKARGFVEDEQGTIWMGERFTVWTKVSYSALLGSDRVTELVAPHRETAQAPLCQSGRGLREEGGHLTLGPDVPEGARPRGRLRLPQASGHDTPGPISPTVAPGVMPEQFPFPREAVRCDATPKAW

SEQ ID NO: 155608 - protein, 268 aa, Oryza sativa
  Clone ID: PAT_MRT4530_55355C.1.pep
MGGGGGDDALYARCLVILYLISPITVFLLRFVSAPYGKLSRPGWGPAVPAALAWFLMESPTMCLPPLVLSAAASSSALRAAALLPAALYALHYVNRTLVHPLRLLRLRRAPAPVPILVAAFAFGFNLLNAYVQARSWALDAAAPHSTATATATPAAVARCLVGLALFAWGMRTNIAADKALLRLKEAGKGYQIPRGGLFDVVTCPNYFGEAVEWLGYALVAWTPAAWAFFLYTCSNLGPRARDHRRWYVGKFGDKYPASRKAFVPYIY

SEQ ID NO: 155609 - protein, 45 aa, Oryza sativa
  Clone ID: PAT_MRT4530_55356C.1.pep
FHNRFLKKGIFLYSFIKPLNYLTFVPRYHTWHHLLTTYSKSTGQN

SEQ ID NO: 155610 - protein, 116 aa, Oryza sativa
  Clone ID: PAT_MRT4530_55357C.1.pep
MPLHHNFRPLRHIQPSPCYLLVVFVFVSTDKPAPEEESTAADGERRRMGKGFTGAAVPVRCASAIAHRLQPLYEVPCGRACTQCLRLPFEYDLPVALLLKLIAKTKFMGLLFLSQL

SEQ ID NO: 155611 - protein, 384 aa, Oryza sativa
  unsure (1)..(384): unsure at all Xaa locations
  Clone ID: PAT_MRT4530_55358C.1.pep
WPGCYFPQLACTQTPPKTGFRGFERGREGDLPCSLSQTPASTSTKSGSSEAAASGARGWRRSAPWVPRVSRTRGRGRLTAGPTWQPRGRTRGRPRRRGRREWRXTRAPMVAAGDHRRGGAAPEREEGRGKRRGRSTAHPGTTTTTKTAAGAEEDGGAVRDDDDDGAPAVGGRSGGADGVGNHSAKRTEGSPSRKEDRSDVGGEPKVDGDGGERGARREHETDGESEXRRAAETEERSTGIEYIATGGGERGRGERKPRAEISGAIEDAGELRGMNPDESEGEREGKEGESGEGNAGSNSPLIKARGEGGMRRIXGGGGARARAGGGSGGRKAMTGGPHPSARVAGGPACQRRARGXRPMGRGERREREGLGRVGPRRKGGKRGL

SEQ ID NO: 155612 - protein, 1432 aa, Oryza sativa
  Clone ID: PAT_MRT4530_55359C.1.pep
METRNGSRDSNNASGSEEPIDGARANGASDNNPSPPPKNPTIAQVLDNQTQMMTMMMQQMQQQYHQVLQQVQQQAQQQQQNLQFGPPPPQSKLLEFLRVKPPTFSSTTNPIEAHDWLHAIEKKLNLLQCNEQEKVAFATHQLQGPASIWWDNYMVTRPTGAEVTWTEFCHSFNKAQVPEGIVAQKKREFRSLQQGTRTVIEYLHEFNRLARYAPEDVRTDAKRQEKFLSGLDDELINQLISRDYEDFEKLVDKAIRQEEHCNKVNRKRKAAQFRTPQGKSQKPRSTMGHHGGPSTMIIRQYRPYHPGSFNKNHHSGSHNNREQHSLNPTPSSLKIPAQSVQPALPEQPKRLGEKPELCFNCNKPGHTVGKCSKPRRAGPKFVQARVNHASAEEAQSAPEVILGTFPVNSTPAVILFDSGATHSFISKRFAGAHGLSLVKLKIPMRVHTPGGGMTTTHYCPSVTVEIQGGVIDCASRTIKLTNAKGEVVTFQSPVPQKSGISLNQAAGEEQEVAVEKTTKKLEDIPIVREYPEVFPDDLTTMPPKRDIEFRIDLVPGTAPIHKRPYRMGANELAEVKKQVDEQLQKGYIRPSTSPWGAPVIFVEKKDKTKRMCVDYRALNEVTIKNKYPLPRIDDLFDQLKGATVFSKIDLRSDYHQLRIREEDIPKTAFITRYGLFECTVMSFGLTNAPAFFMNLMNKVFMEFLDKFVVVFIDDILIYSKSEEEHEQHLRLVLEKLKEHQLYAKFSKCDFWLKEVQFLGHIVNAQGVAVDPANVESVTKWTPPRTVTQVRSFLGLAGYYRRFIENFSKIAKPMTQLLKKEEKFIWSAECNRSFEELKRRLVSAPVLILPDQTKDFQLRPHEGNYPTHDLELAAVVHALKIWRHYLIGNRCEMAPFEALYGRRCRTPLFWDQTGERQLFGTEVLNEAEEKVRAVRERLRIAQSRQKSYADNRRRELVFQAGDYVYLRVTPLRGVHRFQTKGKLAPRFVGPYRILERRGEVAYQLELPSNMLGIHNVFHVSQLKKCLRVPEEQASPDQIEIQEDLTVSPPPVRASASPVIAAVFILRAGRRAHSEELLSSILPSVPHALPLPALAIAFVRRRRSVRRPPPPPTPLVAVTGDRMPPPFAMLAGRLEAEAEPGTGGEGGRDGVGSAGVSGCPAAGFTVAQEGTAHCLLRGGASHGLLVHQMNVKTAFLNGELEEEIYMDQPDGLNVIEEVKDFLSKSFEMKDLGVADVILHIKLLRGDEGGITLVQSHYVDKATSGYVFTLGRGAVSWKSCKQTILTRSTMEAELASLDTATVEAKWLRELLMDLPVVEKLVPAILMNCDNQTVIIKVNSSKDNMKSSRHVKRRLKSVRKQKNSGVIALDYVQMAKNLADQFTKGLPPRLLCIIFTNMLTTGDNNNTRDKEKELPVNTNGGNTVSNSSGGPFSGVL

SEQ ID NO: 155613 - protein, 638 aa, Oryza sativa
  Clone ID: PAT_MRT4530_5535C.1.pep
MEEFQEADILWPDTAAVSSQEGAPSSGMRYELQAASCCSASSSGASLFGPCSRSEEFLSGASSTAGASNDDEEEELMEADVLWPDTAPQPDEGGYAYMEELQEADVLWPAEHHRDYERCRHHHHAAQPAVCPVAPLRPSSSSAPVRIPAPTTTTFAGARRGYYEDDGTRTDYSAGAGASSRIVPPHVYVAAARRGSEGRTVASSVCVGHGRTLKGRDLRAVRNAVLHMTGFLGGGPDEPNPPMQQLVRAQDVPRRPDLLMPLVLLRDASPSRLQRTRFSWKQMRGAVHPPSRTSSSPPRRSALITSVPAVLALAFLLILAAGVFLYSGTTTTPSRAVTSAGRVNEARGGGHALLSPTVGSIGGARAIWELPAAPARAVLFVAHGCHCRPENFWPPSPRCPGCVGLPEDVAITERALRRRFAVLALASARECWSMGKEVSAAKRGIRSWATENGLADLPVAALGASSGGYFVSRLAAEMKLAAVVLMIAEGSFGPGGAPAGYPPAMFLHMPKDQRRAALVERNSKMLRSNGVEVNELRSLELPLTPTMLSDRIPGLNRGLSERIWRVFTEDGFVDERGFMRKDGRATPWKDAVVKRGFWEEVAGWADHIQEELNLAYGYHEMTSLHTDEMFDWIEEHLS

SEQ ID NO: 155614 - protein, 160 aa, Oryza sativa
  Clone ID: PAT_MRT4530_55360C.1.pep
FFLGELLHIIHYSKIVTPLVYFSLICTQITGVGPCLGAKDRPSPSPLVELYHCLSSPPLKAYKHLGDHCPTGRATKTLECASLGILTHLGTGHLLHSGACTVDTPMGKIPFHGSEALSTNQIGAKFLGGGIPTRILGWDGCKGFTQIQKERIFPTPTTGG

SEQ ID NO: 155615 - protein, 121 aa, Oryza sativa
  unsure (1)..(121): unsure at all Xaa locations
  Clone ID: PAT_MRT4530_55361C.1.pep
MEMDKVGGRWTXSRANEGYTSCGPVVEMSWHRAGVLLLGAQSCLPVPGVPAVGGVGSDGLETMSCLPSVYRGGMWHVVTREEDVSCGTCGCVLLSTVIVLSLAQFFPNPEEEPLDDEGFGV

SEQ ID NO: 155616 - protein, 990 aa, Oryza sativa
  Clone ID: PAT_MRT4530_55362C.1.pep
MVKTRNGSRVSNDASGSEEQISGARASDASNSSSSPPPKNPTIAQQQQQQNLRFGPPPPQSKLLDFLRVKPPTFSSTTNPIEANDWLHAIEKKLNLLQCNDQEKVALATHQLQGPAFVWWDNYMVTGPAGTEREFRSLQQGTRTVIEYLHEFNRLARYAPEDVRTDAERLEKFLSGLDDELTNQLISRDYEDFQKLGNSQKSRFMTGHQGGPSTMIIRQHRPYHPVQPAQPTQPEQPKRFGEKPELCFNCNELGHMVGSCPKPRRSGLKFVQARVNHASAEVAQSAPEVILGTFPINSTPAVILFDSGVTHSFISKRFAGAHGLSLVKLKIPMRVYTPRGGMTRTHYCPSVIVEIQGLIFPANLILLESKDFDVILGMDWLTRHIGVIDCASRTIKLTNAKGEVVTFQSLVPQKQGISLNQSTGEEQEEAVEKTTKKLEDIPIVREYPEVFPDDLTTIPPKRDIEFRIDLVPRTAPIHKRPYRMGANELADVKKQVDEQLQKGYICLSTSPWGAPVIFVEKKDKTKRMCVDYRALNEVTIKNKYPLPRIYDLFDQFKGATVFSKIDLRSGYHQLRIREEDIPKTAFITWYGLFKCIVMSFGLTNAPAFFMNLMNKVFIEFLDKFVVVFTDDILIYSKSEEEHEQHLRLVLEKLKEHQLYAKFSKCDFWLKKVQFLGHVVSAQGVAVDPANVESVTKWTPPRTVSQIRSFLGLAGYYSRFIENFSKIAMPMTQLLKKEEKFIWSAECNRSFEELKRRLVSAPVLILPDQTKDFQVYCDASRQGLGCNYPTHDLELAAVVHALKIWRHYLIGNRCEDYDMGIHYHPGKANVVADALSRKSYCNVAWIEELCCEKLIKLSMPFILAVPKCTKTSNKSSGGGEVAYQLELPSSMLGIHNVFHVSQLKKCLRVPEEQTSPYYIEIQEDLTYVEKPTRILETSVPHLLVVSYLRQLEPEPQPPAPPPFPPIRAPTPPAPRAHVAALSPRLLPPARA

SEQ ID NO: 155617 - protein, 1077 aa, Oryza sativa
  Clone ID: PAT_MRT4530_55363C.1.pep
MVTGGGHRHGGAAAERGEGKGETKRRSTAHSGSTATTETATGWTGSTVLRRVVLGRDNPRRAYDRRQPTAPGGGCRAFTPALRDVRWPEKFQLGAIEKYDGSTDPEEFLQVYSTVLYAAGADDNALASYLPAALKGSAHSWLVHLPPYSISSWADLWQQFVANFQGTYKRHAIKDDLHALMQNSGESLRDYFWRFNECRNTILEITDASVIRAFKSGVRDRYTTQELATRQITTAHKLFEIVDRCAHADDALRRKNDKAKTGGEKKSAKDAPESSKKNSRRSGKRKAQTEVLTAEPVDPPKYPYPQGDDTKKIWYPIHKLDKHSLETCFVFKKALTKQLALEKGKRVRVVEKAAEAATQDSDSAYPDFDLHVSHIFRGSTAYSSKREYKKVERKVCSTWQGAASKMKWSEQKIEFSEADHPKTVVAPGRYPIMVKPIIRNIKVARVFIDGGSFINLLFASTLDAMGIPRSELTPTDQPFHWITPQSSSKPLGMITLPVTFGQANIFDVAEFDTAYNAIIGRTALAKFIAASHYAYQVLKMPGPKGTITIQGNAKLAVQCDKQSLDMVEHTPNPSATAELLKKVSKTNKTPKPDGAIKIIPLSNVFAWQPSDMLGVPREVIEHKLMVRHDAKPVKQKLRRFAPDQKQAIREELDKLLKVGSIKEVLHPEWLAKPVMVRMANGKWRMCVDFTDLNKACPKDHFPLPRIDQLVDSTTGCELLRFLDAYSGYHQISMAKEDEEKTSFITPFGVFCYVKMPFGLITAGNTFQHMVQGALNDKLGHNVEAYVDDIVVKTKTSDSLIDDLRETFLVSGRGIEANPEMIKAIENMKSPTRLKEVQKLTGCMAALSRVIVVSSFPLEEVVRNKDVVGRIAKWVVELSQSDVHFVPRIAIETQVLADFVAEWTMPENMSNSQTDSETWTMAFDGALNSQGARAGFILTSPSGDQFKHAIHLNFRATNNIAEREPLEPGTFLDVLTKPSVKEANDEGSTVVPDISSGATEAEHVVADIETTDDWRTPLIKFLSSDELPDDDAEAKKITRQAKIYSPTGEIKADNAIKFIKGIFYRYGLPNRIITDNGS

SEQ ID NO: 155618 - protein, 1507 aa, Oryza sativa
  Clone ID: PAT_MRT4530_55364C.1.pep
METRNGSRDSNNASGSEEPINGARANGASDNSPSPPPENPTIAQVLDNQTQMMTMMMQQMQQQYHQVLQQVQQQAQLQQQNLQFGSPPPQSKLLEFLRVKPPTFSSTTNPIEAHDWLHAIEKKLNLLQCNEQEKVAFATHQLQGPASIWWDNYMVTRPTGAEVTWTEFRHSFNKAQVPEGIVGQKKREFRSLQQGTRTVIEYLHEFNRLARYAPEDVRTDAERQEKFLSGLDDELTNQLISRDYEDFEKLVDKAIRQEEHCNKINRKRKAAQFRTPQGKSQKPRFTMGHHGGPSTMIIRQHRPYHPEEAQSAPEVILGTFPVNSTPAVILFDSGATHSFISKRFAGAHGLSLVKLKIPMRVHTPGGGMTTTHYCPSVTVEIQGLIFPANLILLESKDLDVILGMDWLARHRGVIDCASRTIKLTNAKGEVVIFQSPVPQKPGISLNQAAGEEQEVAVEKTTKKLEDIPIVREYPEVFPDDLTTMPPKRDIEFRIDLVPGTAPIHKRPYRMGANELAEVKKQVDEQLQKGYIRPSTSPWGAPVIFVEKKDKTKRMCVDYRALNEVTIKNKYPLPRIDDLFDQLKGATVFSKIDLRSGYHQLRIREEDIPKTAFITRYGLFECTVMSFGLTNAPAFFMNLMNKVFMEFLDKFVVVFIDDILIYSKSEEEHEQHLRLVLEKLKEHQLYAKFSKCDFWLKEVQFLGHIVNAQGVAVDPANVESVTKWTPPRTVTQVRSFLGLAGYYRRFIENFSKIAKPMTQLLKKEEKFIWSAECNRSFEELKRRLVSAPVLILPDQTKDFQVYCDASRQGLGCVLMQDGKVVSYASRQLRPHEGNYPTHDLELAAVVHALKIWRHYLIGNRCEVYTDHKSLKYIFTQPDLNLRQRRWLELIKDYDMGIHYHPGKANVVADALSRKSYCNVAWVEELCCEVQHDLEHLNLGIVEHGFVAALEAQPTLVEQMAPFEALYGRRCRTPLFWDQTGERQLFGTEVLNEAEEKVRAVRERLRIAQSRQKSYADNRRRELAFETGDYVYLRVTPLSGVHRFQTKGKLAPRFVGPYRILERRGEVAYQLELPSNMLGIHNVFHVSQLKKCLRVPEEQASPDQIEIQEDLTYVEKPTRILETSERKTRNKVIRFCKVQWSHHSEEEATWEREDELKATHPHLFASSSESRGCRRRPSVPPRRRSSPLVSSHAGRRHRLGEESPFLLPFLSPVSAAALRASAVVFGCRRRLRAGCRRLPAPPVTAGGTGGEGGRDGVGSAGVSGCPAAGFTAAQEGTAHCLLRGGELKIFLVGAVLSKLVSSLPSRIACGVESPAAEVKLPGGGHVRCIMGNCAGALSCSVSGEPPATLTEYTLGSRPRPVAHRWVQHAGELPADQRRRRRVVKFEHVCPLTSYSMFFKGLCPDAYSYAKDDQNSTFTYPVDTNYYVDFCPPTSGMTAGDDNGRGGGWRRQSARYVLDEMLSGNPCPLLLEEKSPPSEPSLLGRTALLMRALLSLCQVRLLSYFDFLAC

SEQ ID NO: 155619 - protein, 47 aa, Oryza sativa
  Clone ID: PAT_MRT4530_55365C.1.pep
LLAINLDTLLSRSIAKNAYILERREYNCIIKLVLLVRYIYMQEHTTP

SEQ ID NO: 155620 - protein, 167 aa, Oryza sativa
  Clone ID: PAT_MRT4530_55366C.1.pep
MLARISQDDALEPWDATLNRIKADKTRALLESINVARASASVDDDDGLNLQAAATCPTSNFDVVDVVSISHHIQYIGNSSIGDNQMQMTPRLAPAADAELQLPEQEPGAEVARRSGGVKEQGPGRLAGSVAGPWQWRPGRLRAASGRRPSGVSRRYTLGRRMAGGGS

SEQ ID NO: 155621 - protein, 1461 aa, Oryza sativa
  unsure (1)..(1461): unsure at all Xaa locations
  Clone ID: PAT_MRT4530_55367C.1.pep
TSRGEGRAARVHGSGAHAPASRSTVDRAHRGSHRPVPWAPRVSRTRGRGRLTAGPHAVATRRARGRPRRRGRREAARPRPDGRRRQPLARRKGGRERGGKGERRRRXRLTPGRRRRRRSPRRAYDRRQPTAPGGGCRAFTPALRDVRWPEKFQLGAIEKYDGSTDPEEFLQVYSTVLYAAGADDNALASYLPAALKGSAHSWLVHLPPYSISSWADLWQQFVANFQGTYKRHAIKDDLHALMQNSGESLRDYFWRFNECRNTILEITDASVIRAFKSGVRDRYTTQELATRQITTAHKLFEIVDRCAHADDALRRKNDKAKTGGEKKSAKDAPESSKKNSRRSGKRKAQTEVLTAEPVDPPKYPYPQGDDTKKIWYPIHKLDKHSLETCFVFKKALTKQLALEKGKRGAASKMKWSEQKIEFSEADHPKTVVAPGRYPIMVKPIIRNIKVARVFIDGGSFINLLFASTLDAMGIPRTYNAIIGRTALAKFIAASHYAYQVLKMPGPKGTITIQGNAKLAVQCDKQSLDMVEHTPNPSATAELLKKLVDSTTGCELLRFLDAYSGYHQISMAKEDEEKTSFITPFGVFCYVKMPFGLITAGNTFQHMVQGALNDKLGHNVEAYVDDIVVKTKTSDSLIDDLRETFDNLXRYRLMLNPEKCTFGVPSGKLLRFLVSGRGIEANPEMIKAIENMKSPTRLKEVQKLTGCMAALSRFVARMGERGQPFFALLKKQDKFVWTXEAEDAFIALKRYLSNPPVLVAPQPNEXLFLYITATPYSMSTVIVVEREKVQRPVYYIQKLLYAVIMTSRKLRYYFQAHRVIVVSSFPLEEVVRNKDVVGRIAKWVVELSQSDVHFVPRIAIETQVLADFVAEWTMPENMSNSQTDSETWTMAFDGALNSQGARAGFILTSPSGDQFKHAIHLNFRATNNIAEYEGLLAGIRAAAALGAKRLIVKGDXELVANQVQKDYKCSSPELSKYLAEVRKLEKRFDGXHVYHKDNIEPDDVARRASRREPLEPGTFLDVLTKPSVKEANDEGSTVVPDISSGATEAEHVVADIETTDDWRTPLIKFLSSDELPDDDAEAKKITRQAKIYSPNGVRLKCISSDDGKHLLLDIHEGVCGSHAGGRTLVGKAFRQGFFWPTALKDACDMVQRCEACXFHSKHTKMPTQALQTIPLTWPFSCWGLDILGPFPRGHGGYKFLFMAIDKFTKWFEAAPTGEIKADNAIKFIKGIFYRYGLPNRIITDNGSXFISADFQDYGIGLGVKICFASVSHPQSNGQVEKANDIVLQGIKTRVYDRLMSHNKKWIEELPSVLWAVRTILTTPNKETPFFLVYSLEAMLPTELRHQSTXVQKYSDEEXEEQRSDDVNLLEEHRERVAVRAASYQQALRRYHEKCIRTRTLSIGDYVLXRVQSQAGRNKLSPKWEGPYTVTQVLWPSAFKIADGEGRELANSWNIDQLCKFYI

SEQ ID NO: 155622 - protein, 1355 aa, Oryza sativa
  Clone ID: PAT_MRT4530_55368C.1.pep
METRNGSRDSNNASGSEEPINGARANGASDNSPSPPPENPTIAQVLDNQTQMMTMMMQQMQQQYHQVLQQVQQQAQLQQQNLQFGPPPPQSKLLEFLRVKPPTFSSTTNPIEAHDWLHAIEKKLNLLQCNEQEKVAFATHQLQGPASIWWDNYMVTRPAGAEVTWTEFRHSFNKAQVPEGIVGQKKREFRSLQQGTRTVIEYLHEFNRLARYAPEDVRTDAEKQEKFMSGLDDELTNQLISRDYEDFEKLVDKAIRQEEQCNKMTRKRKAAQFRTPQGKCQKPRYTMGRHGGPSTMIIRQHRPYHPGSFNKTHHSDSHNNSGSHSSLNPTPSPLMIPAQSDQPALPEQPKRLVEKPELCFNCNKPGHTVGKCPKPRRAGPKFVQARVNHASAEEAQSAPEVILGTFPVNSTPAVILFDSGATHSFISKRFAGAHGLSLVKLKIPMRVHTPGGGMTTTHYCPSVTVEIQGSIFPANLILLESKDLDKDKTKRMCVDYRALNEVTIKNKYPLPRIDDLFDQLKGATVFSKIDLRSGYHQLRIREEDIPKTAFITRYGLFECTVMSFGLTNAPAFFMNLMNKSEEEHKQHLRLVLEKLKEPQLYAEFSKCDFWLKEVQFLGHIVNAQGVAVDPANVQSVTKWTPPRTVTQVRSFLGLAGYYRRFIENFSKIAKPMTQLLKKEEKFIWSAECNRSFEELKRRLVSAPVLILPDQTKDFQVYCDASRQGLGCVLMQDGKVVSYASRQMRPHEGNYPTHDLELAAVVHALKIWRHYLISNRCEVYTDHKSLKYIFTQADLNLRQRRWLELIKDYDMGIHYHPGKANVVADALSRKSYCNVAWVEQLCCEVQRDLEHLNLGIVEHGFVAALEAQPTLVEQVRIAQASDPEIAELKKNMRVGKARGFVEDEQGTIWMGERLCVPENKELKDLILTEAHQTQYSIHPGSTKMYQDLKEKFWWVSMRREIAEFVALCDVCQRVKAEHQRPAGLLQPLQIPEWKWEEIGMDFVTGLPRTSSGHDSIWVVRDRLTKVAHFHSVHTTYSGKKLAELYLARIMCLHGVPKKIVSDRGSQFTSKFWQKLQEELGTRLNFSTAYHPQTDGQTERVNQILEDMLRACALDFGGAWDKSLPYAEFSYNNSYQASLQMAPFEALYGRRCRTPLFWDQTGERQLFGTEVLNEAEEKVRAVRERLRIAQSREKSYADNRRRELVFQVGDYVYLRVTPLRGVHRFQTKGKLAPRFVGPYRILERRGEVAYQLELPSNMLGIHNVFHVSQLKKCLRVPEEQASPDQIEIQEDLTYVEKPTRILETSERKTRNKVIRFCKVQWSHHSEEEATWEREDELKATHPHLFASSSESRGRDSV

SEQ ID NO: 155623 - protein, 525 aa, Oryza sativa
  Clone ID: PAT_MRT4530_55369C.1.pep
MEMRRFLGGLCFLALLRLGGAAEAVVGVAGVDGRRAIAATDEDFVCATMDWWPPDKCDYGTCSWGLASLLNLDLSNKILLNAIRAFSPLKLRLGGSLQDKLVYGTGDGGGPCAPFVKNTSEMFGFTQGCLPLHRWDELNAFFQKSGARIVFGLNALNGRVPLPDGSMGGPWDYTNAASLIRYTASKGYKIHGWELGNELSGSGVGTKVGADQYAADVIALKSLVDTIYQGNPSKPLVLAPGGFFDAGWFTEVIVKTRPNLLNVVTHHIYNLGPGVDTHLIEKILNPSYLDGMVSTFSNLQGILKSAGTSAVAWVGESGGAYNSGRHLVTDSFVFSFWFLDQLGMSAKYDTKSYCRQSLIGGNYGLLNKETFQPNPDYYSALLWHRLMGTKVLSATFNGTNMIRTYAHCAKDSPGITLLLINLSGNTTSQVSVTSEGAHANTVKKHSRKTRHLAAGSMREEYHLTAKDGSLQSQVMLLNGRALVADENGEIPRLEPVKVDAAQPIAVAPYSIVFAHIHNFPAPACS

SEQ ID NO: 155624 - protein, 151 aa, Oryza sativa
  unsure (1)..(151): unsure at all Xaa locations
  Clone ID: PAT_MRT4530_5536C.1.pep
MASIDRPIVFFTACLFLLCDGSLAQAAIXAQSTSQWQSSRRGSPRGCRFDRLQAYEPIRSVRSQAGTTDSFDVYNELLQCTGVCDVRQGIEPRGLLLPHYTNGASLVYIIQGRAITGPTLRGXPETYQQQDQSSGPAQLTERKADTVSGRK

SEQ ID NO: 155625 - protein, 216 aa, Oryza sativa
  Clone ID: PAT_MRT4530_55370C.1.pep
MGIPRSELTPTDQTFHGITPQSSSKPLGKITLPVTFGQANNFRTEQITFDVAEFDTTYNAIIGRNALAKFMAASHYAHQVLKMPGPKGTITIQGNTKLVVQCDKRSLDMVEHTPNPPATTEPPKKISMAKEDEEKTTLITPFGVFCYVKMPFGLITAGNTFQRTVQGALNDLLGHNVEAYVDDIVFKTKTSDSLIDDLRETFDNLRRYRLMLNPEK

SEQ ID NO: 155626 - protein, 1249 aa, Oryza sativa
  Clone ID: PAT_MRT4530_55371C.1.pep
MAAAAAAAADHDAAPRAHALILPYPAQGHVIPLMELAYCLIDRGFAVTFVNTEHNHRRVVAAAAGAGGVQAPGSRARRLRLVAVADGMGDGDDRDNLVRLNAVMEEAIPPQLEPILDGAGGEGQLGKVTCVVVDVGMSWALDAVKRRGLPGAALWAASAAVLAVLLGAQKLIRDGVIDDDGGAHLSVVPYLRSLEPELQPPAPPPSPLHVAPPLRARTSRPRRRPLPASPAVEVLLSWSRLREVGSVAAVKMEIRNGSRDSNNASGSEEPINGARANSASDNSPSPPPENPTIAQVLDNQTQMMTMMMQPMQQQYHQVLQQVQQQAQQQQQNLQFGSPPPQSKLLEFLRVKPPTFSSTTNPIEAHDWLHAIEKKLNLLQCNEQEKVAFVWWDNYMVTRPTGAEVTWTEFCHSFNKAQVPEGIVAQKKREFRSLQQGTRTVIEYLHEFNRLARYAPEDVRTDDGRQEKFLSGLDDELTNQLISRDYEDFEKLVDKAIRQEEHCNKINRKRKAAQFRTPQGKSQKPRFTMGHHGGPSTMIIRQHRPYHPGSFNKNHHSGSHNNSEQHSLNPTPSSLKIPAQSVQPALPEQPKRGGAVSTIGYIGHIPRQLDTGNKFVVVFIDDILIYSKSEEEHEQHLRLLRPHEGNYPTHDLELAAVVHALKIWRHYLIGNRCEDYDMGIHYHPGKANVVADALSRKSYCNVAWVEQLCCEVQRDLEHLNLGIVEHGFVVALEAQPTLVEQVRIAQASVPEIAELKKNMRVGKAREVLNEAEEKVRAVRERLRIAQSRQKSYADNRRRELVFETRDYVYLCVTPLRGVHRFQTKGKLAPRFVGPYRILECRGEVAYQLELPSNMLGIHNVFHVSQLKKCLRVPEEQASPDHIEIQEDLTWGPPVGRPLPPVVGAGAPTARAAAFSAPRRASTPRPHLAPTSPPSPRISRVRAPASGAPLKLENNSFRLSEFTPPMDATFLAWNFMGNRDAERMVFHYLTSSARAAAAKADILLCNSFVELEPAIFTLKSPATILPIGPLRTGQRFAHQVEVVGHFWQTNDDTCLSFLDEQPYGSVVYVAFGSLTIMSPGQLKELALGLEASGHPFLWVVRPGLAGNLPTSFLDATMGQGKGIVVEWAPQEQVLAHPAVGCFVTHCGWNSTVESIRNGVPMLCWPYFTDQFTNQIYICDIWRIGLKMVQTCGEGIVTKEIMVERLKELLLDEGIKERVQRLKEFAETNMSEEGESTSNLNAVVELMTRPMS

SEQ ID NO: 155627 - protein, 39 aa, Oryza sativa
  Clone ID: PAT_MRT4530_55372C.1.pep
SYLNCQLLYHGGDVHGRVGLSSRRYQNSLRLSSRLDQMN

SEQ ID NO: 155628 - protein, 142 aa, Oryza sativa
  Clone ID: PAT_MRT4530_55373C.1.pep
SLHPEPGNSHGDRPPVHLDIVANDFRGCTAHDEQRQDVPRDDRRVVAAEDGVDQRAEAQGHRDGGRHEVVPEQPVPGGGVGVGAGGSLRLRRRRHPTRRQLCIHIRTRILRPRRLLLLHRESAQAAYLARARVYRSRRWRVE

SEQ ID NO: 155629 - protein, 902 aa, Oryza sativa
  Clone ID: PAT_MRT4530_55375C.1.pep
MVKTRNGSRDFTNVSGSEEHISLARASDTSNDNSSPPHENPTITQVQQQAQQQQQQNLRFGLPPSQSKLLEFLRIKPPTFSSTTNPIEANDWLHAIEKKLNLLQCNDQEKVAFATHQLQGPASVWWDNYMVTRPARTEVTWSEFCQSFNKAQVPEGIIAQKKREFRSLQQGTRTVIEYLHEFNRLARYAPEDVRTDAERQEKFLFGLDDELTNQLISKDYEDFEKLVDKAIRQEEQCNKMNLKLKIPMRVHTPGGGMTTTHYCPSATVEIQVVIFPANLILLESKDLDVILGMDWLTRHRGVIDCASRTIKLTSAKGEVATGEEQEVAVEKTTKKLEDIPIVREYPEVFPEDLTTMPPKRDIEFRIDLAPGTAPIHKRPYRMGANELAEVKKQVDEQLPKGYIRPSTSPWGAPVIFVEKKDKTKRMCVDYRALNEVTIKNKYPLPRIDDLFDQLKGATVFYKIDLRSGYHQLRIREEDIPKIAFITRYGLFECTVMSFGPTSAPAFFMNLMNKLKEHQLYAKFSKCDFWLKEVQFLGHIVNAQGVAVDPANVESVTKWTPPKTVTQIRSFLRLAGYYRRFIENFSKIAKPMTQLLKKEENFEELKRRLVSTPVLILPDQAKDFQLHPHEGNYPTHDLELAAVVHALKIWRHYLIGNHCERRWLELIKDYDIGIHYHPGKANVVVNALSRKSYCNVAWVEELCCEVQRDLEHLNLGIVEHGFVAALEAQPTLVEQRVKAEHQRPAGLLQPLQIPEWKWEEIGMDFITVLNEVEEKVRAVRERLRIAQSRQKSYADNRRRELVFEAGDYVYLRVTPLKGVHRFQTKGKLAPRFVGPYRISERRGEVAYQLELPSNMLGIHNVFHVSQLKKCLRVPEEQASPDHIEIQEDLTYVEKPTVSLKPTR

SEQ ID NO: 155630 - protein, 47 aa, Oryza sativa
  Clone ID: PAT_MRT4530_55376C.1.pep
IRHGTFEMHHYNLETGTWYSEHHYTFQKEQPYNHPNEHRNSNLWPIR

SEQ ID NO: 155631 - protein, 1390 aa, Oryza sativa
  Clone ID: PAT_MRT4530_55377C.1.pep
MAVKDRFTGNPGRLTVLTTSGSGCFTAFNYWFEMPAFCKRTPSFLWLYPASYLLFRGSEEPINGARANSASDNSPSPSPENPTIAQVLNNQTQIMTMMMQQMQQQYHQVLQQVQQQAQQQQQNLQFGPPPPQSKLLEFLRVKPPTFSSTTNPIEAHDWLHAIEKKLNLLQCNEQEKVAFATYQLQGPASVWWDNYMVTRPAGAEVTWTEFCHSFNKAQVPEGVVAQKKREFHSLQQGTRTVIEYLHEFNRLARYAPEDVRTDAEKQEKFMSGLDDELTNQLISRDYEDFEKLVDKAIRQEEQSNKMNQEVQSAPEVILGTFPVNSTPAVILFDSGATHSFISKRFAGAHGLSLVKLKIPMRVHTPGGGMTTTHYCPSVTVEIQGLIFPAHLILLESKDLDVILGMDWLTRHRGVIDCASRTIKLTNAKGEVVTFQSLVPQKPGISLNQAAGEEQEVAVEKTTKKLEDIPIVREYPEVFPDDLTTMPPKRDIEFRIDLVPGTAPIHKRPYRMGANELAEVKKQVDEQLQKGYIRPSTSPWGAPVIFVEKKDKTKRMCVDYRALNKVTIKNKYPLPRIDDLFDQLKGATVFSKIDLRSGYHQLRIREEDIPKTAFITRYGLFECTVMSFGLTNTPAFFMNLMNKVFMEFLDKFVVVFIDDILIYSKSEEEHEQHLRLVLEKLKEHQLYAKFSKCDFWLKEVQFLGHIVNAQGVAVDPANVESVTKWTPPRTVTQVRSFLGLAGYYRRFIENFSKIAKPMTQLLKKEEKFIWSAECNRSFEELKRRLVSAPVLIQPDQTKDFQIWRHYLIGNRCEVYTDHKSLKYIFTQPDLNLRQRRWLELIKDYDMGIHYHPGKANVVADALSRKSYCNVAWVEQLCCEVQRDLEHLNLGIVEHGFVVALEAQPTLVEQVRIAQASDPEIAELKKNMRVGKARGSVEDEQGTIWMGERLCVPENKELKDLILTEAHQTQYFIHPGSTKMYQDLKEKFWWVSMRREIAEFVALYDVCQRVKAEHQRPAGLLQPLQIPEWKWEEIGMDFITGLPRTSSGHDSVWVVVDRLTKVAHFIPVHTTYSGKKLAELYLARIMCLHGVPKKIVSDRGNQFTSKFWQKLQEELGTRLNFGTAYHPQTDGQTERVNQILEDMLRACALDFGGAWDKSLPYAEFSYDNSYQASLQMAPFEALYGRRCRTPLFWDQTGERQLFGTEVLNEAEENVRAIRERLRIAQSRQKSYADNRRRELAFETGDYVYLRITPLRGVHRFQTKGKLAPRFMGPYRILERRGEVAYQLELPSNMLGIHNVFHVSQLKKCLRVPEEQASPDHTEIQEDLTYVEKPTRILETSERRTRNKVIRFCKVQWSHHSEEEATWEREDELKAAHPHLFASSSESRGRDSV

SEQ ID NO: 155632 - protein, 346 aa, Oryza sativa
  Clone ID: PAT_MRT4530_55378C.1.pep
MGVAVAVAACALCLLPATTSGALRVGFYQSSCPNAEALVRQAVAAAFARDAGVAAGLIRLHFHDCFVRGCDASVLLTKNPAGGQTERDATPNNPSLRGFEVIDAAKAAVEAACPRTVSCADIIAFAARDSVKLTGNVDYQVPAGRRDGSVSNGTEALHNLPPPNATAQQLADTFFANKFLTLEDMVVLSGAHTVGRSFCASFFNRVWNGNTPIVDAGLDPAYAAQLRALCPTRDTLATTPMDPDTPATLDNNYYKLLPQGKGLCFSDNQLRVNATMNALVTRFAANEAEWKQRFADDMVKMGHLEGQTRRCGQIKVDCDVVNPAAFDQEVELAGEDQESGGGVAAC

SEQ ID NO: 155633 - protein, 701 aa, Oryza sativa
  Clone ID: PAT_MRT4530_55379C.1.pep
MEIRNGSRDSNNASGSEEPINGARANGASDNSPSPPPENPTIAQVLDNQTQIMTMMMQQMQQQYHQVMQQVQQQAQLQQQNLQFGPPPPQSKLLEFLRVKPPTFSSTTNPIEAHDWLHAIEKKLNLLQCNEQEKVAFATHQLQGPASIWWDNYMVTRPAGAEVTWTEFRHSFNKAQVPEGIVGQKKREFRSLQQETRTVIEYLHEFNRLARYAPEDVRTDAEKQEKFMSGLDDELTNQLISRDYEDFEKLVDKAIRQEEQCNKMNQEAQSAPEVILGTFPVNSTPAVILFDSGATHSFISKRFAGAHGLSLVKLKIPMRVHTPGGGMTTTHYCPSVTVEIQGLIFPANLILIESKDLNVILGMDWLARHRGVIDCASRTIKLTNAKGEVKKDKTKRMCVDYRALNEVTIKNKYPLPRIDDLFDQLKGATVFSKIDLRSGYHQLRIREEDIPKTAFITRYGLFECTVMSFGLTNAPAFFMNLMNKVFMEFLDKFVVVFIDDILIYSKSEEEHEQHLRLVLEKLKEHQLYAKFSKCDFWLKKVQFLGHIVNAQGVAVDPANVESVTKWTPPRTVTQVRSFLGLAGYYRRFIENFSKIAKPMTQLLKKEEKFIWSAECNRSFEELKRRLVSAPVLILPDQTKDFQVYCDASPQGLECVLMQDGKVVSYASRQLRPHEGNHPTHVLELTTKIHALKIWRHCMGIL

SEQ ID NO: 155634 - protein, 61 aa, Oryza sativa
  Clone ID: PAT_MRT4530_5537C.1.pep
LLCIYKPAINTYPEDKRRERRVAGYRFVASCSTDSKTQCLYDRWDYILISVVYMFIDNYCI

SEQ ID NO: 155635 - protein, 70 aa, Oryza sativa
  unsure (1)..(70): unsure at all Xaa locations
  Clone ID: PAT_MRT4530_55380C.1.pep
KMPPPEAAWGGGLLVSAASSRGLGFWGGXQKEKLCTRCASVKHYGNIISHADEWSSLVRYCSESTKRFIC

SEQ ID NO: 155636 - protein, 1074 aa, Oryza sativa
  unsure (1)..(1074): unsure at all Xaa locations
  Clone ID: PAT_MRT4530_55381C.1.pep
METRNGSRDSNNASGSEEPINGARANSASDNSPSPPPXVLDNQTQMMTMMMXQMQQQYHQVLQQVQQQAQQQQQNLQFGPPPPQSKLXHAIEKKLNLLQCNEQEKVAFATHQLQGPASVWWDNYMVTRPTGAEVTWTEFCHSFNKAQVPEGIVAQKKREFRSLQQGTRTVIEYLHEFNRLARYAPEDVRTDDGRQEKFLSGLDDELTNQLISRDYEDFEKLVDKAIRQEEHCNKINRKRKAAQFRTPQGKSQKPRFTMGRHGGPSTMIIRQHRPYHPGSFNKNHHSGSHNNSEQHSLNPTPSSLKIPAQSVQPALPEQPKRLGEKPELCFNCNKPGHTVGKCPKPRRAGPKFVQARVNHASAEEAQSATEVILGTFPVNSTPAVILFDSGATHSFISKRFAGAHGLSLVKLKIPMRVHTPGGGMTTTHYCPSVTVEIQGLIFPANLILLESKDLDVILGMDWLTRHRGVIDCASRTIKLTNAKEEVVTFQSPVPQKPGISLNQAAGEEQEVAVEKTTKKLEDIPIVREYPEVFPDDLTTMPPKRDIEFRIDLVPGTAPIHKRPYRMGANELAEVKKQVDEQLQKGYIRPSTSPWGAPVIFVEKKDKTKRMCVDYRALNEVFMEFLDKFVMVFIDDILIYSKSEEEHEQHLRLVLEKLKKHQLYAKFSKCDFWLKEVQFLGHIVNAQGVAVDPANVESVTKWTPPRTVTQDGKVVSYASRQLRPHEGNYPTHDLELAAVVHALKIWRHYLIGNRCERRWLELIKDYDMGIHYHPGKANVVADALSRKSYCNVVWVEQLCCEVQRDLEHLNLGIVEHGFVVALEAQPTLVEQYSIHPGSTKMYQDLKEKFWWVNMRREIAEFVALCDVCQRVRAEHQRPAGERQLFGTEVLNEAEEKVRAVRERLRIAQSRQKSYADNRRRELAFETGDYVYLRVTPLRGVHHFQTKGKLAPRFVGPYRILERRGEAAYQLELPSNMLGIHNVFHVSKLKKCLRVPEEQASPDHIEIQEDLTYVEKPTRILETSERRTRNKVIRFCKVQWSHHSEEVATWEREDELKATHPHLFASHSESRGRDSV

SEQ ID NO: 155637 - protein, 80 aa, Oryza sativa
  unsure (1)..(80): unsure at all Xaa locations
  Clone ID: PAT_MRT4530_55382C.1.pep
PLAAIIAGRTKMKSKKNFMFLYMPSKKSWHTLSTLLALLVPVIYFPCMSQTVKXNSFYHXKKVWEAILPSLSTSVSKKHK

SEQ ID NO: 155638 - protein, 175 aa, Oryza sativa
  unsure (1)..(175): unsure at all Xaa locations
  Clone ID: PAT_MRT4530_55383C.1.pep
SGAVSLPTWRGDAEVARGSAPEWLAPLPPTSAAEAESLTCLEGLKEAMKWIHMSIILELDNAEVVQALTKQVASRSSWAMTIAEINSVIQCIXRVQVHKIKREANRVAHVLAQMAMSIRSCGEWRLCAPSPILDLLNQKYLAGEVDLITPPRLCRSRRGPPAPYIRLMTCWAALC

SEQ ID NO: 155639 - protein, 72 aa, Oryza sativa
  Clone ID: PAT_MRT4530_55384C.1.pep
MLCWEIKVNWQKEISFALFIRAPAMVKCWVYVEKTLCKQPHVTEFLKALGNILTMPFHRLGRQQVTVAERKQ

SEQ ID NO: 155640 - protein, 60 aa, Oryza sativa
  Clone ID: PAT_MRT4530_55385C.1.pep
YSFLHMYSKFFSILCLSNMMYSCTRRMKNVYTTSSSIFTSRSTQGGNQDSANCKVGCRVG

SEQ ID NO: 155641 - protein, 126 aa, Oryza sativa
  unsure (1)..(126): unsure at all Xaa locations
  Clone ID: PAT_MRT4530_55386C.1.pep
MKLLCSACEAAEASVLCCADXAALCARCDRDIHAANRLAGKHLRLPLLSPASSSSPPPPPSRRRRRRXPKCDICQESHAXFFCLEDRALLCRSCDVAVXXAXAFVSAHRRFLLXGVXVGQGTRALP

SEQ ID NO: 155642 - protein, 44 aa, Oryza sativa
  Clone ID: PAT_MRT4530_55387C.1.pep
SCLVKILMFLQQFISNNDNGRNMIARSLPEWSTVQAWVGMKVTI

SEQ ID NO: 155643 - protein, 350 aa, Oryza sativa
  Clone ID: PAT_MRT4530_55388C.1.pep
MGAVLGTGRVGTLTRVALTIVVFLLLLPSHALAAAVAKDTSATLVETLPLPTTLVGPESVAFDKFGDGPYSGVSDGRILRWDGADKGWTTYSHAPGYNVAKCMAPKLHPAELTESKCGRPLGLRFHNTSGNLYIADAYKGLMRVGPRGGEATVLATEADGVPFKFTNGVDVNQVTGEVYFTDSSTRFQRSQHEMVTATGDSTGRLMKYDPTTGYLDVLQSGMTYPNGLAISADRSHLVVALTGPCKLVRHWIEGPKAGTSEPFAELPGYPDNVRPDGKGGYWVALHREKTETPYGSDTHLLAVRIGRKGKILQELRGPKNVRPTEVIERGGGKLYLGSVELGHVAVVKAT

SEQ ID NO: 155644 - protein, 201 aa, Oryza sativa
  Clone ID: PAT_MRT4530_55389C.1.pep
MDAPPPAQPDAAAAAPAAPPTSTSASAPSSAPQPNPTPSASTAAPPTPDTTLAPAPNPTPAPVQTLETPAPSPASARPPVPRMRPPYTHLASPITMSSSPATGAASSSSASAPAATSASSSAMPRGGVALGLPAHPRAPQTPVGYTGFVPPPTLAAQFGSMHRGPDQPPPSSTQEITDLDDSKNYILLYNNDTISDPIMGV

SEQ ID NO: 155645 - protein, 45 aa, Oryza sativa
  Clone ID: PAT_MRT4530_5538C.1.pep
FISNGSIFLRLRLLNHPEYIPQTQFTFHSSLRILMLISGCIHSLC

SEQ ID NO: 155646 - protein, 137 aa, Oryza sativa
  Clone ID: PAT_MRT4530_55390C.1.pep
MSVLAGLLAQDQDGDDQEVTSHAAAASTQGDANFTGGLDGVDDAASLWVQPKAKNPLVDDPDLIRFADDLLNLTGKKKVNNKKKKKKKKKISGAGEVSWACGGGGGAVSEGERRFGAAATAVVAGVGSGSASSLPRR

SEQ ID NO: 155647 - protein, 1676 aa, Oryza sativa
  unsure (1)..(1676): unsure at all Xaa locations
  Clone ID: PAT_MRT4530_55391C.1.pep
MMMLMSCLTPGLEWLIPSLEIALCSXMPRYKPEYLFGTEGFVQELRTMSFLIGFGIAPLYAQIPHDRDEEKCRVKVTLNSNREDIPSVMFEAGGGSYIHACQEVARIAIGELRESYNDRLADTEYRYHPRQPQGSDHGSYLEPAGIENDATTRHLVEMLWAMDETRAEIVIAAQDREDQNRGKICKLEDKLDRLEKELAALKGEAPPQKARVRLTARKRALFVPRYQLAPKVHLDNGNGPNNNNNNNNAENPTLAQVLAQQTQLMNLMMQQLQNQQNQGNNHAPPQNKLAEFLRVRPPVFSSTTNPVEASDWLHAIEKKLDLLQCRDQEKVSFASHQLHGPASEWWDHSCLNRTTAEPISWLEFTAALRKTHIPSGVVSLKKKEFRSLTQGSRTVTEYLHEFNHLARYAPEDVRTDEERQEKFLEGLNDELSYPLMTGDYHDFQKLVDKAIRQEDNYNRMEQKKHRIAHFKAQQGNSQRPRIASGPLSMPQGGSSSVVRPQRQFFNNNAGNNNRKPAPCPVATPSQQXPAKREQGSKPGVCFNCGDPGHYADKCPKPCRAKVVPAQNNSSAPAAKARVNHVAAAEAQGAPDVILGTFPVNSVPATVLFDSGATHSFLSMSFAENHGMEVEELRRPLMVSTPSNQALSSQRSPSVRIEIQGVPFLFNLILLESKDHDVILGMDWLARYKGVIDCSNRKVTLTSNDGQVVTVHALPSEPRRSSLNQITLEEIPIVREYPDVFPDDLPGMPPKRDIEFRIDLVPGTTLIHKRPYRMAANELEEVKRQVDDLLQKGYIRPSSSPWGAPVIFVEKKDHTQRMCVDYRALNDVTIKNKYPLPRIDDLFDQLKGATVFSKIDLRSGYHQLRIKEEDIPKIAFTTRYGLFEYTVMSFGLTNAPAFFMNLMNKVFMEYLDKFVVVFIDDILIYSRTKEEHEEHLRLALEKLREHQLYAKFSKCEFWLSEVKFLGHVISAGGVVVDPSNVESVTNWKQPKTVTEIRSFLGLAGYYRRFIENFSNIAKPMTRLLQKDVKYKWSEECEQSFQELKSRLISTPILILPDPKKGFQVYCDESKLGLGCVLMQDGKVVANASRQLRPHEKNYPTYDLELAAVVHALKIWRHYLFGTRTEVYTDHKSLKYIFTQPDLNMRQRRWLELIKDYDLGIHYHPGKANVVADAVSRKGYCNAMEGRQLPLELCKEFERLNLGIVSRGFVAALEAKPTLIEQVREAQINDPDIHEIKKNMRRGKAIGYLEDEQGTVWLGERICVPENKDLKDAILKEAHDTLYSIHPGSTKMYQDLKERFWWASMKREIAEYVAVCDVCQRFKAEHQKPAGLLQPLKIPEWKWEEIGMDFITGLPRTSSGHDSIWVIVDRLTKVAHFIPTDGQTERVNQILEYMLRACALDFGGSWDKNLPYAEFSYNNSYQASLQMAPYEALYGRKRRTPFLWDQTGERQVFGTDILREAEEKVKIIQERLRIAQSRHKSYADNRRRDLSFEEGDHVYLRVTPLRGVHRFHTKGKLAPRFVGPYKIVSRRGEVAYQLELPQSLAGIHNVFHVLQLKKCLRVPTEEANLEQIEVQEDLTYVEKPIRILEIDERRTRNRVIHFCKVQWSNHSEEESTWEREDELKSAHPHLFASSSESRGRDLGPASSTSHRRRSRTLAEPRRRLLPNLIASFLLRSNQ

SEQ ID NO: 155648 - protein, 44 aa, Oryza sativa
  Clone ID: PAT_MRT4530_55392C.1.pep
ASFFFTQYHTLSAGGWGLFKNCGPLANAVLVQSMMLDPRLTLPS

SEQ ID NO: 155649 - protein, 221 aa, Oryza sativa
  unsure (1)..(221): unsure at all Xaa locations
  Clone ID: PAT_MRT4530_55393C.1.pep
CLRWFLNTWCATSSRIFIITKGPHSPRWTGRTRXLTPAGAVGPTXRGARPKAATPAQPTGGGAPAPRWSPPATTGAAERRPREGRERGNESAVHSSPRVDGDDGNGDRSGGRRRRSSGGRGRRCSGGRRAKRRGGRGRRGCGEAEGGGAEGRGGPGRQRRRTGARRRRRRERATARARFQRGERAASGGNGGGRHGEGLYRVGSERGRPDEGETGAEDRPP

SEQ ID NO: 155650 - protein, 327 aa, Oryza sativa
  Clone ID: PAT_MRT4530_55394C.1.pep
MPEDVTTAPSLAGVQQHSAVPGADRDFFFSNSRGYGATPAGARRRLFHRPGGVNAQVQALTDERAALEAEWAQLAADCARVDEGRHAMDDMVEVGRKMRQAQLAEIQSREQMLHSVIRETEEERQAAIIASSVLQEALGEIPLQYEAHAEDLAKRVEDACGDLDAAAAQEQRASEVDASLRARMAALEAECKALDEHARSMQEFEATIRRLIELLDRNQREQDERGREQAQRARELEEHARALEEHARALEERARMLDHGETTLAAHERVVAEAESSLRLREEAAAKRNLTTLTAEALVARRAEELRLREDACQEREAALAEREAEA

SEQ ID NO: 155651 - protein, 735 aa, Oryza sativa
  Clone ID: PAT_MRT4530_55395C.1.pep
MVGCDFGGHVHVEDDETNPTTEPQTKPYPLDMWKYGSALQQRPEDRSLYGRGFIASAEGRGRGPGPWEWGPRGSLTVHGGSGAPGLTPAGAVGPTRHPHPWARAADDRAPRGSHSARPKAATWRGRREAAPAPLWTPAAAIITVERRPREGKGRGKRGSGPRLTLGRRRRRKRRPERRKAAARLGSTGSTAFRRSANSARGWTGSTAATEEGESDGASSIPARRKGGEWRKRTEERRWLELIKDYDVGIHYHPSKANVVTDALSRKSRCNTLGIRGIPPELNQQLEALNLSIVSHGFLATLEAKPTLLDQIREAQKNDPDMHGILKNMKQGKAAGFTEDEQGTLWNGNRVCVPDDKELKQLILQEAHESPYSIHPSSTKMYLDLKEKYWWRVKAEHQRSAGLLQPLQVPEWKWDEIGMDFITGLPKTQGGYDSIWVVVDRLTKVARFIPVKTTYGGNKLAELYFARIVSLHDVPKKIVSDRGSQFTSHFWKKIQEELGTRLNFSTAYHPQTDGQTKRLNQILEDMLRACVLDFGKTWDKSLPYAEFSYNNSYQASIQMAPYEALYGRKCRTPLLWDQVGESQVFGTDILREAEAKVRSIRDNLKVAQSQQKSYADNRRRNLEFAVDDFVYLRVTPLRGVHRFQTKGKLAPRFVGPFRIIARRGEVAYQLELPTSLGNVHDVFHVSQLKKCLRMPSEQADSEQIEVREDLTYVEKPVKILDTMELGIGPFKSLIFP

SEQ ID NO: 155652 - protein, 1458 aa, Oryza sativa
  unsure (1)..(1458): unsure at all Xaa locations
  Clone ID: PAT_MRT4530_55396C.1.pep
DDRERRVLGDTSRGRRHNDDDDGDRHQDNNGRRRQDSREPGRRPRNRTLEPSDPSSSSSSSSSSSSDRHPRRTYYRRQPTAPSAXDLWQQFVANFKGTYKRHAIEDDLHALTQNPGESLRDYVQRFNECRNTIPEITDASVIRAFKSGVRDRYTTQELATRRVTTTRRLFEIVDRCAHADDALRRKNDKLKTREEKKPTKYAPESSKKKNRKSGKRKAQAKVLATEYADPPKCPDPQGSDTKKTWCPIHKSDRHSLEDCLVFKKSLAKHMALEKGKRVRVVEKDAEAATQESDSAYPDFDLHVSHIFGGSTAYSSKREYKKVEREVCSTWQGAAPKMKWSEQKIEFSEEDHPKTAIILGRYPIVAEPTIRNIKVARVVIDGGSSINLLFASTLDVMGIPRSKLTPTDQPFHGITPQSSSKPLGKITLPVTFGQANNFRTEQITFGVAEFDTEYNTIIGRTALAKFMAASYYAYQVLKMPGPKETITIQGNAKLAVQCDKWSLDMVEHTPSPPATAEPPKKELTLITFLRDNADVFAWQPSDMPGVPREVIEHKLMVRPDAKPLANPVMVRKANGKWRMCVDFTDLNKACPKDHFPLPRIDQLMDSTAGCELLSFLDAYSGYHQISMAKEDEEKTAFITPFGVFCYVKMPFGLITAGDTFQRTVQGALCDQLGNNVEGYVDDIVVKTKTSDSLIDDLRETFDNLRRYRLMLNPEKYTFGVPSGKLLGFLVSGRGIEANPEEIKAIENMKSPTRLKEEAEEPFVALKRYLSNPPVLVAPQPNEELFLYIAATPYSVSTVIVVERERVQRPVYYVSEALHDVKTRYSQIQKLLYAVIMTSRRLRHYFQAHRVIVVSSFPLSEVMRNRDVVGRIVKWVVELSQFDVHFVPRTAIKSQVLADFVADWTMPNNRPDNQIDNETWTMAFDGALNSQGAGAGFILTSPSGDQFKHAIQLNFRATNNTAEYEGLLAGIRAIAALGVRRLVMKGDSKLVANQVHKDYKCSSPELFKYLAEVRKLEKRFDGIEVRQVYHKDNIEPDDLARRASKREPLEPGTFLDVLTRLSVKEASDEDSPVALNNSSGATEAECAVADIETTDDWRTPLIKFIGSEELPEDDAEAEKITRKAKIYCMIGNDLYKKAPNGVLLKCISSNDGRHLLLDIHEGIYGAHAAGRTLVGKAFRQGFFWPTALKDACDMVQRCEACQFHSXTHKATSASTPDYPSYLAVLVLGARHTRAIPTRTGRLQVPIXVAIDKFTKWIEAIPTGEIKADNAIKFIRGIFCRFGLPHRIITDNGSQFISADFQDYCIRLGVKICFASVSHPQSNGQVXRANGIVXTPTTSNKETFFFLVYGSEAMLPTEPNGKDRTRSHKFCGQAHSKSQTAMVASWQILLRYSETVSHSGIEPNMVGSIVFFTSAKQFLLAKDHFACSMSYDKMRGTWSLSLFCHSASDSFSPLSSSAGSI

SEQ ID NO: 155653 - protein, 592 aa, Oryza sativa
  Clone ID: PAT_MRT4530_55397C.1.pep
MAREQKRRPAAELAVWGGSLELKESLEDIDERIWAGSSPTSGNGGADGVAARQTRRLGGTARRWRGRESKEGREGLRWRRLAERRRTVANATPRRALRGRRGHGVERLGVGAAFLAVATKEAGAKRRSAGDSGVFVGDAKAATTWMHWAAKAVDRAAEIEPREREEQRRLARGELALGQGGGGELTAAVSGSAFERKRTVGPAVPPVSSSSYLSPADPNRHSRPRRRKIRRPPAPELASNDVGTIPSTRRALPRSPRAEPTHRRSPANSSSAAPPLPSAPHCAVALPGTAVAVRTPSTAPLRQSTAATPLPPPPRATFAFSRLHPLPAGERRLARPCFCLQRLRRVVPHPGIHSVLPFHPRSTIPTVHRATAAFRHLQSRATTAPVAAALRYHRHRHRRSSPHPGPYSVSPPCPWNAAAAFTISFRRQPPPCGRLAVAVLGENPHRPFSFFSSSAAPRARCRDAPLSPAVVWPHAAARYRSAEPVSCRARALAAPPRGRPIGFGPIWAIHVVDAHPRPRVDLVHRAPPLCAADVRGPPVGAGFPLLTSASRRIQARVGVMERGGPCDGLCRFRIHLGTRGDCPLPAGDGGET

SEQ ID NO: 155654 - protein, 87 aa, Oryza sativa
  Clone ID: PAT_MRT4530_55398C.1.pep
MALDHNCAGDRELGWAIRRHQHEEDDDANSPVQRTTTNDDKRRPATRLKRRRARLDGVRGAPAGFGFGRGVDGIELRKIRENSKDYN

SEQ ID NO: 155655 - protein, 698 aa, Oryza sativa
  unsure (1)..(698): unsure at all Xaa locations
  Clone ID: PAT_MRT4530_55399C.1.pep
MEPRSPRRFPSPPAALSHSQHYLSTPRASLLRFRPLPLSLPVGIELAPSSSLSAVAAELRFAAVVAPDLLPLRHRLLRLRRVLVDLVHPFVSPADRRNAAVLVDPSRAAASLRFGRRSRRRRRPRVSRGPPSRFPLPSPLSGAAPSRRRSPPATIGARARRLPSAVPARPPSGAPRGCHVGPGRQPPAPSSAANAWDPRRRPAQAACTRSTVDREAAAWAPLPWTRANEGYTSCGPVVEMSWHRAGVLLLGAQSCLPVPGVPAVGLSGEAVRHRVGQVMISGPTTASNVPVPLCEKGAAKRNAAINVVPLTDIIEPLADHQVAASLKEKVAKEVSDAAAVAATTSGGDVPTKGRKFSSVIGHRRKAPTPSASDASPPPPRRQRLVTLGEKAARAKAAQDESGGTSGAPPSVTSTDVVVVPGSREATPSGPASDLAAGRGPPAAVLTWEELQVEMGRLLEASARGIGHEIMEARSAAASANERADRLAHDLAEAREDLKKIRELVAGNERQRQGLEHRMSELGNNLSEIRGSLRVTYTGLHQLAGECGIKSTIPANPDEFLLTSSLAELAAVMEEIPSKHAASIGEETSNGIYTGACHVLACLRLTHPELDLREILDQGAASDTRKEVMEEVGDLGEYVLPLFKEDVDDEDVQQRGQPKSPAIIPALAFEPHAXRTMRTPTEIDHLAKSMAPLAEKLIV

SEQ ID NO: 155656 - protein, 78 aa, Oryza sativa
  Clone ID: PAT_MRT4530_5539C.1.pep
RDVYMHVFTEHMYLLQLHCCVVQEKNLSEHVSTIHVFARCVCMSQSNDARTRARESWSSTAPMSGAAAVAGAGGLRWL

SEQ ID NO: 155657 - protein, 477 aa, Oryza sativa
  Clone ID: PAT_MRT4530_553C.1.pep
MDAAAAAAGRGGPAPPRCARAETDSEDAVATTSSPHSAEAAGAAEQGNGAPAPVADAADVEGVDGIRIRRRPVTGPPVHYVGPFQFRLENEGNTPRNILERIVWDKEAEVSQARFMLFFFLLSEEQTMCDSMKERRPLYMLKGPLENAPPVRDFVGVLKASFDRTGLPALIAEVKKASPSRGVLREDFEPVQIAQTYEKNGAACLSVLTDAKYFQGSFDYLDAIRNAGVQCPLLCKEFIVDAWQLYYARLKGADAVLLIAAVLPDLDIKYMLKICKILGMAALVEVHDEREMDRVLGIDGVQLIGINNRNLETFQVDISNTKNLLEGERGQTIAQKGIIVVGESGLFTPDHISFVQNAGVKAVLVGESLIKQEDPGKAIAGLFGKDISPMSGVTSAPWRDTLDLDRADVRYLKLRDSAERFAALQLGVCPFRWDPAKSAFVAHPTQEEEALQKLYTLIIIMKHLHIQTLPRRKKMRH

SEQ ID NO: 155658 - protein, 232 aa, Oryza sativa
  Clone ID: PAT_MRT4530_55400C.1.pep
MKKITNYSRIVEEFHRYRYIIFIVPGVIGCLQALEAIKVATAVGKPLCGRMLDRHKRLHKLLIVKISRSSPTCKVCGENPVFTKEDFVNFDYESFTQSPMSKNSTTRSLNLLPENARVSCRDYKKVLDSGRPHLLVDVRPSHHFQIASMAHSINVPLSLLEEKLPLLRDSAREVSSRRDGRQHCPVYVICRRGNDSQVAVQILRENGFLYASDVAGGFESWAKEVDPSFLLY

SEQ ID NO: 155659 - protein, 440 aa, Oryza sativa
  Clone ID: PAT_MRT4530_55401C.1.pep
MDEVGCRWTFSRANEGYTSCGPMFNREKGKNVSGYASSNLSFQLNPPLASRELTRAHPWSIPSMLLSSQLSLVGSQDQNQYVFDRAFGTQVNELPMPEEQVPFCHDCREQGHYALNCPWVYVKEAPSLGLAGQTSLNQPPHTKSSLQPSVQSRELNGENPLNPRKCFPPSLSHHVGSRTKQAKGKKSKNQKRKAPMRTEEEVRKMTITSTEWPPAGITIPRRQRGNTFRGARQLTQHLLSHGGRVSDSEGSDQVSSDVEDESPRHLGEEGMESKACTRCGEIGHVASRCLTLCPHCEEDHPPGECPTRKVTCFLCEGTNHVPKDCQLSVLLTKTAEIQRTTLRLSHQLVSSNSNIDDIIPSTNAPPAPPDSAINHSNNTFSTNHSLHRQPQQRIVVDGRSCVSPRPTPGRAKGNQPPEGDTKQKTVIRLKQQSEGSFSCE

SEQ ID NO: 155660 - protein, 367 aa, Oryza sativa
  unsure (1)..(367): unsure at all Xaa locations
  Clone ID: PAT_MRT4530_55402C.1.pep
MEPSNRPCRSVSTPVGRAVAFPGVAAASSSPASPPFRRENIGATSSPTTSDVATTPPPPAGCATSPVRRLSSSPSSLDVATSPSTPACPRFRRNTAVPRRPLHPPRRNFPGRPFLHPCAVGRATTTSGIAAARSPSASPPLHPSLVGVRCRHLRSYSSTTPLVGXPPRWLVISLCHLRRVPRRPRLRAAAAGCPRRLLAGPGRRPHHRGVRPSVKPXLVFILGSASSSLVPAASRLRPRIAAEVSPHRSSPSFSSVSAAPVRRCRSHASSHGGKDPSPSLPRPRPFGVSXARCADVGPGTRVPVSVVVPVCVFACVLRVAFVVLEVPEAWFVVIAEVINKGTRMEMDEVGGRWTSLGQMKATRAAAR

SEQ ID NO: 155661 - protein, 2039 aa, Oryza sativa
  Clone ID: PAT_MRT4530_55403C.1.pep
METRNGSRDSNNASGSEEPINGARANSASDNSPSPPPENPTIAQVLDNQTQMMTMMMQQMQQQYHQVLQQVQQQAQQQQQNLQFGPPPPQSKLLEFLRVKPPTFSSTTNPIEAHDWLHAIEKKLNLLQCNEQEKVPEGIVAQKKREFRSLQQGTRTVIEYLHEFNRLARYAPEDVRTDDGRQEKFLSGLDDELTNQLISKDYEDFEKLVDKAIRQEEHCNKINRKRKAAQFRTPQGKSQKPRFTMGRHGGPSTMIIRQHRPYHPGSFNENHHSGSHNNSEQHSLNPTPSSLKIPAQSVQLALPEQPKRLGEKPELCFNCNKPGHTVGKCPKPRCAGPKFVQACVNHASAEEAQSAPEVILGTFPVNSTPAVILFDSGATHSFISKRFAGAHGLSLVKLKIPMRVHTPGGGMTTTHYCPSVTVEIQGLIFPTNLILLESKDLDVILGMDWLTRHRGVIDCASRTIKLTNAKGEVVTFQSPVPQKPGISLNQAAGEEQEVAVEKTTKKLEDIPIVREYPEVFPDDLTTMPPKRDTEFRIDLVPGTAPIHKRPYRMGANELAEVKKQVDEQLQKGYIRPSTSPWGAPVIFVEKKDKTKRMCVDYRALNEVTIKNKYPLPRIDDLFDQLKGATVFSKIDLRSGYHQLRIREEDIPKTTFITRYGLFECTVMSFGLTNAPVFFMNLMNKVFMEFLDKFVVVFIDDILIYSKSEEEHEQHLWLVLEKLKEHQLYAKFSKCDFWLKEVQFLGHIVNAQGVAVDPANMESVTKWTPPRTVTQVRSFLGLAGYYRRFIENFSKIAKPMTAIEEGRKVYLDGKVVSYASRQLRPHEGNYPTHDLELAAVVHALKIWRHYLIGNRCEVYTYHKSLKYIFTQPDLNLRQRRWLELIKDYDMRIHYHPGKANVVADALSRKSYCNVAWVEQLCCEVQRDLEHLNLGIVEHGFVVALEAQPTLVEQVRIAQASNPEIAELKKNMRVGKARGFVEDEQGTIWMGERLCVPENKELKDLILTEAHQTQYSIHPGSTKMYQDLKEKFWWVSMRREIAEFVALCDVCQRVKAEHQRPAEVLNEAEEKVRAIRERLRIAQSRQKSYADNRRRELAFETGDYVILERRGEVAYQLELPSNMLGIHNVFHVSQLKKCLRVPEEQASPDHIEIQEDLTQPVVNCDVYAICGPFTICNDNKDPFCDCMKGYSIRSPKDWELDDRTGGCMRNTPLSCGAGKDRTGLTDKFYPVQSIRLPHNAENLQAPTSREECSQQLSDASPNGDEGVLYIRLAAKELQNSQRKMSGKIIGVAIDFGMAKMLGREFSRAMTTMRGTIGYIAPEWISGTVVTSKVDVYSYGMVLFEIISGRRNRSHEHFMDGDYSFYFPMQVARKLLKGEIGCLVDANLEGDVNLMEVERACKIACWCIQDHEFDRPTMAEVVQSLEDRDKPIDDPTAVELTISRMNVRVIHRAEWGGLRDRLANHNTGHVFLLHHSSPVFIFCFPMLLPCHVLLGLLLLSLHTPASSAAATDTVSPGHSLAGSDRLVSNNSKFALGFFKPGNESSYTNHNSYLGIWFNKVSKLTPLWTANGENPVVDPTSPELAISGDGNLAILDHATKSIIWSTRANITTNDTIAVLLNNGNLVLRSSSNSSNIFWQSFDYPTDTLFAGAKIGWDKVTGMNRRLVSRKSSVDQAPGIFSLELGLNGEGHLLWNSTVAYWSSGDWNGRYFGLAPEMIGDVMPNFTFVHNDKEAYFTYTLYDDTAIVHAGLDVFGIGFVGMWLEGNQEWFKNYRQPVVHCDVYAVCGPFTICDDNKDLFCDCMKGFSVRSPKDWELDDQTGGCIRNTPLSCGSSKDRTSLTDKFYPMQNFGMAKILGREFSRAMTTMRGTIGYMAPEWISGTVVTSKVDVYSYGMVLFEIISGRRNSSHECFRDGDYSFFFPMQVARKLLNGDIGSLVDASLKGDMNLVEVERACKIACWCIQDNEFDRPTMAEVVQALEGLLELDMPPLPRLLSAITGDSHSVTPQYFDSVPIVFITVAEEAHHSPPNLRTTGQCRDRSSDT

SEQ ID NO: 155662 - protein, 1040 aa, Oryza sativa
  unsure (1)..(1040): unsure at all Xaa locations
  Clone ID: PAT_MRT4530_55404C.1.pep
LTNAPTIFMNLMNKVFMEYLDKFVVVFIDDILIYSRTKEEHEEHLRLALEKLREHQLYAKFSKCEFWLSEVKFLGHVISAGGVAVDPSNVEFITNWKQPKTVSEIRSFLGLTGYYRRFIENFSKIAKPMTRLLQKDVKYKWSEECEQSFQELKNRLISAPILILPDPKKGFQVYCDASKLGLGCVLMQDGKVVAYASRQLRPHEKNYPTHDLELAAVVHALKIWRHYLFGTRTEEFERLNLGIVSRDFIAALEAKPTLIDQVREAQINDPDIQEIKKNMRRGKAIGFLEDEHGTVWLGERICVPDNKDLKDAILKEAHDTLYSIHPGSIKMYQDLKERFWWASMKREIAEYVAVCDVCQRVKAEHQKPASLLQPLKIPEWKREEIGMDFITGLPRTSSGHDSIWVIVDRLTKVAHFIPVKTTYSGSRLAELYMARIVCLHGIPKKIVSDRGSQFTSNFWKKLQEEMGSKLNFSTAYHPQTDGQTERVNQILEDMLRACALDFGGSWDKNLPYAEFSYNNSYQASLQMAPYEALYGRKCRTPLLWDQTGERQVFGTDILREAEEKVKIIQERLRVAQSRHKSYADNRRRDLSFEEGDYVYLRVTPLRGVHRFHTKGKLAPRFVGPYKIVSRRGEVAYQLELPQSLAGVHNVFHVSQLKKCLRVPTEEANLEQIEVQEDLTYIEKPIRILEIDERRTRNRVIRFCKVQWSNHSEEESTWEREDELKVRFGSASFLRTPKFPSXSPAAVGFRRRLRAPLKGPPVSPLPAATLAFASRRRKSSSAPCATAVPDVVIAREDRRRGRQVTAVLVRPFAVAEDRRSTIAAVDPKTAAVSSSSPSSSVGLPPLLWSPRRRSPAGLRXPSRRAAAAGGDVIADVIVPVSHSVVSGESVFAGEEFEEFQGQXAKIAEYVALCDVCQRVKAEHRKPAGLLQPLKIPEWKWEEIGMDFITGLPRTSSGHDSIWVVVDRLTKVAHFIPVKTTYTGNKLAELYMARVTDGQTERVNQILEDMLRACVLDFGGSWYKNLPYAEFSYNNSYQASLQ

SEQ ID NO: 155663 - protein, 1112 aa, Oryza sativa
  Clone ID: PAT_MRT4530_55405C.1.pep
MEIRNGSRDSNNASGSEEPINGARANGASDNSPSPPPENPTIAQVLDNQTQMMTMMMQQMQQQYHQVLQQVQQQAQLQQQNLQFGPPPPQSKLLEFLRVKPPTFSSTTNPIEAYDWLHAIEKKLNLLQCNEQEKVAFATHQLQGPASIWWDNYMVTRPAGAKVTWTEFRHSFNKAQVPEGIVAQKKREFRSLQQGTRTVIEYLHEFNRLARYAPDDVRTDAERQEKFLSGLDDELTNQLISRDYEDFEKLVDKAIRQEEHANLILLESKDLDVILGMDWLTRHRGVIDCASRTIKLTNAKGEVVIFQSPVPQKPGISLNQAAGEEQEVAVEKTTKKLEDIPIVREYPEVFPDDLTTMPPKRDIEFRIDLVPGTAPIHKRPYRMGASELAEVKKQVDEQLQKGYIRPSTSPWGAPVIFVEKKDKTKRMCVDYRALNEVTIKNKYPLPRIDDLFDQLKGATVFSKIDLRSGYHQLRIREEDIPKTAFITRYGLFECTVMSFGLTNAPAFFMNLMNKVFMEFLDKFVVVFIDDILIYSKSEEEHEQHLRLVLEKLKEHQLYAKFSKCDFWLKEVQFLGHIVNAQGVAVDPANVESVTEWTPPRTVTQVRSFLGLAGYYRRFIENFSKIAKPMTQLLKKEEKFIWSAECNRSFEELKRRLVSAPVLTLPDQTKDFQVYCDASRQGLGCVLMKDGKVVSYASRQLRSHEGNYPTHDLELAAVVHALKIWRHYLIGNRCEVYTDHKSLKYIFTQPDLNLRQRRWLELIKDYDMGIHYHPGKANVVADALSRKSYCNVAWVEQLCCEVQRDLEHLNLGIVEHGFVAALEAQPTLVEQVRIAQASDPEIAELKKNMRVGKARGFIEDEQGTIWMGERLCVPENKELKDLILTEAHQTQYSIHPGSTKMYQDLKEKFWWVSMRREIAEFVALCDVCQRVKAEHQRPVGLLQPLQIPEWKWEEIGMDFITGLPRTSSGHDSIWVVVDRLTKVAHFIPVHTTYSGKKLAELYLARIMCLHGVPKKIVSDRGSQFTSKFWQKLQEELGTRLNFSTAYHPQTDGQTERVNQILEDMLRACALDFGGAWDKSLPYAEFSYNNSYQASLQMAPFEALYGRRCRTPLF

SEQ ID NO: 155664 - protein, 150 aa, Oryza sativa
  unsure (1)..(150): unsure at all Xaa locations
  Clone ID: PAT_MRT4530_55406C.1.pep
FESRAISKDVFGKNNFELLKGPTLFYPPKVYVWLEIXSPPFDGPMSVVFYQGLIPPVYFGGQTHSKVVEKNLEKLKKPFLVYXKGLCKFRYLVGDFLTLGGLSLFPTGGSLVAPPHVVMLDGFPFLKAWINGILARPFFKKVIKIMKAPP

SEQ ID NO: 155665 - protein, 489 aa, Oryza sativa
  unsure (1)..(489): unsure at all Xaa locations
  Clone ID: PAT_MRT4530_55407C.1.pep
MVLIVAPRPYKDRSSGLCCKALPYFHMSSGANEGYTSCGPVVEMSWHRAGVLLLGXSILPTCPGGSGRRXGVGSVLLFMARMGWELCHVFRPYTVVMFNREKGKNVSGYTSSNSSFQLNPPLASRELTRAHPWSIPSMLLSSQLPLVRSQDQNQYVFDRAFAPQVNELPMPEEDVPFCHDCREQGHYALNCPWVYAKEAPSFGLAVQTSLNQPPHTKSSLQPSVQSREPNGENPLNPGKCFPPSLSYHVGSRTKQAKGKKSKNQKRKAPMRTEEEVRKMTITSTEWPPAGITIPRRQRGNTFRGARQLTQHLLSHGGRVSDSEGSDQVSSDDEDESPRHLDEEEMESKACTRCGEIGHIASMCLTLCPYCEEDHPPGECPTRKVTCFLCEGTNHVPKDCQLSVLLTKTAEIQRTTLRLSHQLVSSNSNIDDIIHSTNAPPAAPDSAINHSNNTFSTNHSLHRQPQQRIVVDGRSCVSPRPPVRCRPKGD

SEQ ID NO: 155666 - protein, 107 aa, Oryza sativa
  Clone ID: PAT_MRT4530_55408C.1.pep
SGHDSIWVVVDRLTKVAHFIPVHTYRILERRGEAAYQLELPSNMLGIHNVFHVSKLKKCLRVPVKSSPSSSRPLHDGNRRRNRPRRRLLRSAPRPYSASPRRRPPRH

SEQ ID NO: 155667 - protein, 412 aa, Oryza sativa
  Clone ID: PAT_MRT4530_55409C.1.pep
MELEKNGNILLRRYEIGKLLGQGTFAKVYHGRNIVTSQSVAIKVIDKDKIFKVGLMDQIKREISVMKLVRHPNIVQLYEVMATKSKIYFVLEYVKGGELFNKVAKGRLKEDAARKYFQQLVSAVDFCHSRGVYHRDLKPENLLVDENGNLKITDFGLSALAESRRQDGLLHTTCGTPAYVAPEVISRKGYDGVKVDTWSCGVILFVLMAGYLPFQDSNLMEMYRKIGKAEFKCPAWFSSDVRKLVSRILDPNPRSRMPITKIMETYWFKKGLDSKLILKNVETNEPVTALADVNVVFSSMGFDLSGLFEETDKKKEARFTSSQSASAIISKLEDVASCSKLTVKKKEGGVLKMEGASEGRKGVLAIDAEIFEVTPSFHLVEIKKNNGDTLEYQHLWKEDMKPALKDIVWAWQ

SEQ ID NO: 155668 - protein, 401 aa, Oryza sativa
  Clone ID: PAT_MRT4530_5540C.1.pep
MEDLPDALIGEIVKRVSSTSDLSSLSLVSKRLYKIEAESRHTIHISCSLGPATDAIVSLCSRFHNLLKVDINYSGWTQDHGNQLDNHGLRILSSYCLSLSDITLSFCSYIDDTGLGYLAFCKKLITLRLNSATKITSSGLLAVAVGCKNLSALHLIDCNKISGAFEWLKYLGSDGSLEELKVKNCVGINQYSLLMFGPGWMKLQRFVFEFRNIYSIFESKDPSYVANCQYRYDFSCENLKQLSLRRIVTMEEIGLRSLLGKCKSLEKLCLHFVLGLTDSDMITLAQNCSNLRSISLQLEPVFCEGPEGRVCRTPLTDESLKALAGCHSPSLVNLTLRQSDGFSDVGVGEVVRARKLDSLIVEGCSRVSQKAVLGTAKSIRYERYYPGYGKLRRSSLSFGQD

SEQ ID NO: 155669 - protein, 1252 aa, Oryza sativa
  Clone ID: PAT_MRT4530_55410C.1.pep
DVGLYVNNCRLCTLAGRHGGPSTMIIRQHRPYHPGSFNKNHHSGSHNNSEQHSLNPTPSSLKIPAQSVQPALPEQPKRLGEKPELCFNCNKPGHTVGKCPKPRCAGPKFVQARVNHASAEEAQSAPEVILGTFPVNSTPAVILFDSGATHSFISKRFAGAHGLSLVKLKIPMRVHTPGGGMTTTHYCPSVTVEIQGLIFPANLILLESKDLDVILGMDWLTRHRGVIDCASRTIKLTNAKGEVVTFQSPVPQKPGISLNQAAGEEQEVAVEKTTKKLEDIPIVREYPKVFPDDLTTMPPKRDIEFRIDLVPGTAPIHKRPYRMGANELAEVKKQVDEQLQKGYIRLSTSPWGAPVIFVEKKDKTKRMCVDYRTLNEVTIKNEYPLPRIDDLFDQLKGATVFSKIDLQSGYHQLRIREEDIPKTAFITRYGLFECTVMSFGLTNAPDFFMNLMNKVFMEFLDKFVVVFIDDILIYSKSEEEHEQHLRLVLEKLKEHQLYAKFSKCDFWLKEVQFLGHIVNAQGVAVDPANVESVTKWTPPRTVTQVRSFLGLAGYYRRFIQNFSKIAKPMTQLLKKEEKFIWSAECNRSFEELKRWLVSAPVLILPDQTKDFQVYCDASRQGLGCVLMQDGKVVSYASRQLRSHEGNYPTHDLELAAVVHALKIWRHYLIGNRCEVYTDHKSLKYIFTQPDLNLRQQRWLELIKDYDMGIHYHPGKANVVADALSRKSYCNVAWVEQLCCEVQRDLEHLNLGIVEHGFVVALEAQPTLVEQVRIAQASDPEIAELKKNMRVGKARGFVEDEQGTIWMGERLCVPENKELKDLILTEAHQTQYSIHPGSTKMYQDLKEKFWWVSMRREIAEFVALCNVYQRVKAEHQRPAGLLQPLQIPEWKWEEIGMDFITGLPRTSSGHDSIWVVVDRLTKVAHFIPVHTTYSGKKLAELYLARIMCLHGVPKKIVSDRGSQFTSKFWQKLQEELGTRLNFSTTYHPQTDGQTERVNQILEDMLRACALDFGGAWDKSLPYAEFSYNNSYQASLQMAPFEALYGRRCPTPLFWDQTGERQLFGTEVLNEAEEKVRAVRERLRIAQSRQKSYADNRRRELAFETGDYVYLRVTPLRGVHRFQTKGKLAPRFVGPYRILERRGEVAYQLELPSNMLGIHNVFHVSQLKKCLRGPEEQASPDHIKIQEDLTYLEKPTRILETSERRTRNKVIRFCKVQWSHHSEEEATWEREDELKATHPHLFASTSESRGRDSV

SEQ ID NO: 155670 - protein, 457 aa, Oryza sativa
  Clone ID: PAT_MRT4530_55411C.1.pep
MMELEKNGNILLRRYEIGKLLGQGTFAKVYHGRNIVTSQSVAIKVIDKDKIFKVGLMDQIKREISVMKLVRHPNIVQLYEVMATKSKIYFVLEYVKGGELFNKVAKGRLKEDAARKYFQQLVSAVDFCHSRGVYHRDLKPENLLVDENGNLKITDFGLSALAESRRQDGLLHTTCGTPAYVAPEVISRKGYDGVKVDTWSCGVILFVLMAGYLPFQDSNLMEMYRKIGKAEFKCPAWFSSDVRKLVSRILDPNPRSRMPITKIMETYWFKKGLDSKLILKNVETNEPVTALADVNVVFSSMGSSSSKKTEEKQDAGKLTNLNAFDIISLSEGFDLSGLFEETDKKKEARFTSSQSASAIISKLEDVASCSKLTVKKKEGGVLKMEGASEGRKGVLAIDAEIFEVTPSFHLVEIKKNNGDTLEYQHLWKEDMKPALKDIVWAWQGERQDQQPEDHGQP

SEQ ID NO: 155671 - protein, 916 aa, Oryza sativa
  Clone ID: PAT_MRT4530_55412C.1.pep
MVSTDGMSSTRTRLDLCHIMRGLISSSPTWRSTDPRWGPPVGSSLTSRRLVPSPQVGNRRRSHVAVRVSCAHSASTRRTHVIRRLPPPPLEPPPRRAIASVALTEPVLLPPVRSSARRSSALPSSFAPAAVLAGEEPPLFLPLISPAAAAPLPLRPCAAAFASLAAALPRRRLPSPALDPFLGTGGEGGRDGVGSAGVSGCPAAGFTAAQEGTAHCLLRGGGHGDIAEDLPSGSCPAEVGFVAAVKGCLWSGVAPLLKSSFPMMKTRNGSHVSNDASGSEEQINGARASDASDNSPSPPPENPTIAQQQAQQQQQNLQFGLPPPQSKLLKFLRVKPPTFSSTTNPIEANDWLHAIEKKLNLLQCNEQEKVAFAIHQLHGPASVWWDNYMDPEEIVAQKKREFCSLRQGTRTVIEYLHEFNRLARYAHEDVRTDVERQEKFLSGLDDELTNQLISRDYEDFEKLVDKAIRQEEQCNKMNRKRKASPFRTFQGNSQKPRFMTGHQGGPSTMIIRQHRPYHLGNFNKNNNSGIHSNNDQHSLDPTPSPLMIPAQSVQPALPEQPKKFGEKPDLCFNCNELGHTVGKCPKPRRAGPKFVQARVNHASAEEAKSAPEVILGTFSVNSTPAVILFDSDATHSFISKHFAGAHGLSLVKLKIPMRVHTPGGGMSTTHYCPSVTVEIQGLIFPANLILLESKDLDVILGMDWLTRHRGVIDCASHTIKLTNAKGEVVTFQSLVPQKPGISLNPAAGEEQEVTVEKTGKKLEDIPIVREYPEVFPNDLTTMPPKRDIEFRIDLVPGTAQIHKRPYRMGANELVEVKKQLRPHEGNYLTHDLELAAVVHALKIWRHYLIDYDMGIHYHPSKANVVADALSRKSYCNVAWVEELCCEVQRDLEHLNLGIVEHGFVAALEAQPTLVEQ

SEQ ID NO: 155672 - protein, 143 aa, Oryza sativa
  unsure (1)..(143): unsure at all Xaa locations
  Clone ID: PAT_MRT4530_55413C.1.pep
SDVGKWFYLDHYGIEQGPSKLADLKKLVEDGYLLSDHLIKHADSNRWVTVENAASPLVPSEFPSVYSDVSTQLVSXXQKPQVIYLMKLERRHLVLTIEQMKAASAEEQEDFYIDDRVDALMDGSIMVDGQELEILGELLNAHF

SEQ ID NO: 155673 - protein, 1121 aa, Oryza sativa
  Clone ID: PAT_MRT4530_55414C.1.pep
MVTRPAGTEVTWSEFCQSFNKAQVPEGIVAQKKREFRSPQQGTRAVIEYLHEFNRLARYAPEDVRTDAERQEKFLSGLDDELTNQLICRDYEDFEKLVDKAIRQEEQCNKMNRKRKAAQLRTSQGISQKPCFTMGHQGGPSTMIIRQHRPYHPGSFNKNYNSEQHSLNPTPSLLMIPAQSFQPALPAQPEQPKKFGEKPELCFNCNESGYMVQEAQSAPEIILGTFPVNSTPAVILFDSGATHSFISKRFAGAHGLSLVKLKIPMRVHTPGGGMTTTHYCPSVTVEIQGLIFPANLILLESKDLDVILGMDWLTRHRGVIHCVSRTIKLTNAKGEVVTFQSPVPQKPGISLNQATGEVAVEKTSKKLEDIPIVREYPEVFPDDLTTMPPKRDIEFWIDLALGTAPIHKRPYRMGANELAEVKKQVDEQLQKGYIRPSTSPWGAPVIFVEKKDKTKRMCVDYRALNEVTIKNKYPLPRIDDLFDQLKGATMFSKIDLRSGYHQLRIREEDIPKTAFIIHYGLFECTVMSFGLTNAPAFFMNLMNKVFMEFLDKFVMVFIDDILIYSKSKEEHEQHLRLVLEKLKEHQLYAKFSKCDFWLKEVQFLGHIVNAQGVAVDPANVESVTKWTPPRTVTQVRSFLGLAGYYRRFIENFSKIAKPMTQLLKKEEKFIWSAECNRSFEELKRRLVSAPVLILPDQTKDFQVYCDASRQGLGCVVMQDGKVVAYASRQLRPHEGNYPTHDLKLAAVVHALKIWRHYLIGNRCEVYTDHKSLKYIFTQADLNLRQRRWLELIKDYDMGIHYYPGKANVVADALSRKSYCNVAWVEELCCEVQRDLEHLNLGIVEHGFVAALVAQPTLVDTKMYQDLKEKFWWVSMRREIAEFVALCDVCQRVKAEHQRPAAYHPQTDGQTERVNQILEDMLRACALDFGGAWDKSLPYAEFSYNNSYQASLQMALFEALYGRRCRTLLFWDQTGEHQLFGTEVLNEAEEKVRAVRERLRIAQSRQNSYADNRRRELAFEAGDYVYLRVTPLRGLKKCLRVPEEQTSPDHIEIQEDLTYVEKPVRILETSERRTRNKVIRFYKVQWSHHSEEEATWEREDELKAAYPHLFASSSESRGRDSV

SEQ ID NO: 155674 - protein, 122 aa, Oryza sativa
  Clone ID: PAT_MRT4530_55415C.1.pep
GTSEGQLGKVTCVVVDVGMSWALDAVKRRGLPGAALWAASAAVLAVLLGAQKLIRDGVIDDDGAPLKLNNSFRLSEFTPPMDATFLAWNFMGNRDAERMVFHYLTSARAAAAKADILLCNSF

SEQ ID NO: 155675 - protein, 476 aa, Oryza sativa
  Clone ID: PAT_MRT4530_55416C.1.pep
MEGGGEVGWYVLGPNQEHVGPYALSELREHFANGYISESSMLWAEGRSEWMPLSSIPDLLAVVTKKDQPDEGIEDDFDKFQKEVIEAEAEVEASTDKAADNDINQEHGADDPDDRPATPPDGEDEFTDDDGTVYKWDRVLRAWVPQDDLEGKNDNYEVEDMTFAHEEEVFQAPDIAGSTTLEENNVSAEIEIKEPTKVEKRADKKRKSSEKPADKKEANKPPDSWFDLKVNTHVYVTGLPDDVTAEEIVEVFSKCGIIKEDPETRKPRVKIYTDRETGRKKGDALVTYLKEPSVALAIQLLDGTSFRPGGKTLMSVSPAKFEQKGDVFISKKTDKQKKRKTKKVEDKILGWGGHDDKKVTITTTVILRHMFTPAELRADETLLPELEADVREECMKLGPVDNVKVCENHPEGVILVKFKDRKDGIKCIEKMNGRWFGGNQIQASEDDGSINHALIRDYDAEVSRLDRFGEELEEST

SEQ ID NO: 155676 - protein, 182 aa, Oryza sativa
  Clone ID: PAT_MRT4530_55417C.1.pep
MAAAAAAAADHDAAPRAHALILPYPAQGHVIPLMELAYCLIDRGFAVTFVNTEHNHRRVVAAAAGAGGVQAPGSRARRLRLVAVADGMGDGDDRDNLVRLNAVMEEAIPPQLEPILDGAGGEGQLGKVTCVVVDVGMSWALDAVKRRGLPGAALWAASAAVLAVLLGAQKLIRDGVIDDDVF

SEQ ID NO: 155677 - protein, 1461 aa, Oryza sativa
  Clone ID: PAT_MRT4530_55418C.1.pep
METRNGSRDSNNVSGSEEPVNGARANSASDNSPSPLPKNPTIAQVLDNQTQMMTMMMQQMQQQYHQVLQQVQQQAQQQQQNLQFGPPPPQSKLLEFLQVKPPTFSSTTNPIEAHDWLHAIEKKLNLLQCNEQEKWDNYMVTRPAGAEVTWTEFCHSFNKAQVPEGIVAQKKREFRSLQQGTRTVIEYLHEFNHLARYAPEDVRTDDGRQEKFLSGLDDELTNQLISRDYEDFEKLVDKAIRQEEHSNKINRKRKAAQFRTPQGKSQKPRFTMGHRPYHPGSFNKNHHSGSHNNSEQHSLNPTPSSLKIPAQSVQLALPEQPKRLGEKPELCFNCNKPGHTVGKCQKPRRAGPKFVQARVNHASAKEAQSAPEVILGTFPVNSTPAVILFDSGATHSFISKRFAGAHGLSLVKLKIPMRVHTPGGGMTTTHYCPSVTVEIQGLIFPANLILLESKDLDVILGMDWLTRHRGVIDCASRTIELTNAKGEVVTFQSPVPQKPGISLNQAVGEEQEVAVEKTTKKLEDIPIVREYPEVFLDDLTTMPPKRDIEFRIDLVPGTAPIHKRPYRMGANELAEVKKQVDEQLQKGYIHPSTSPWGAPVIFVEKKDKTKRMCVDYRALNELRIREEDIPKTAFITRYGLFECTVMSFGLTNAPAFFMNLMNKVFMEFLDKFVVVFIDDILIYSKSEEEHEQHLRLVLEKLKAHQLYAKFSKCDFWLKEVQFLGHIVNAQGVAVDPANVESVTKWTPPRTVTQVRSFLGLAGYYRRFVENFSKIAKPMTQLLKKEEKFIWSAECNRSFEELKRQLVSAPVLILPDQTKDFQVYCDASHQGLGCVLMQDGKVVSYASWQLRPHEGNYPTHDLELAAVVHALKIWRHYLIGNRCEVYTDHKSLKYIFTQPDLNLRQRRWLELIKDYDMGIHYHPGKANVVADALSRKSYCNVAWVEQLCCEVQRDLEHLNLGIVEHGFVVALEAQPTLVEQVRIAQASDPEIAELKKNMRVGKARGFVEDEQGTIWMGERLCVPENKELKDLILTEAHQTQYSIHPGSTKMYQDLKEKFWWVRMRREIAEFVALCDVCQRVKAEHQRPAGLLQLLQIPEWKWEEIGMDFITGLPRTSSGHDSIWVVVDRLTKVAHFIPVHTTYSGKKLAELYLARIMCLHGVPKKIVSDQGSQFTSKFWQKLQEELGTRLNFSTAYHPQTDGQTERVNQILEDMLRACALDFGGAWDKSLPYAEFSYNNSYQASLQMAPFEALYGRRCRTPLFWDQTGERQLFGTEVLNEAEEKVRAVRERLRIAQSRQKSYADNRRRELAFETGDYVYLRVTPLRGLHRFQTKGKLAPRSVGPYRILERRGEVAYQLELPSNMLGIDNVFHVSQLKKCLRVPEEQASTDHIEIQEDLTYVEKPTRILKTSERRTRNKVIRFCKVQWSHHSEEEATWEREDELKATHPHLFASSSESRGRDSV

SEQ ID NO: 155678 - protein, 46 aa, Oryza sativa
  Clone ID: PAT_MRT4530_55419C.1.pep
MDLVGGLYGQGLQGGSRAAKDTGFAKSRTSLEKGPTGHHALWGLHQ

SEQ ID NO: 155679 - protein, 120 aa, Oryza sativa
  unsure (1)..(120): unsure at all Xaa locations
  Clone ID: PAT_MRT4530_5541C.1.pep
MDAAAATAVNGVLEVEERKAQKSYXWEEHSKDLTVEAMMLDSRAADLDKEERPEILSLLPPYEGKSVLELGAGIGRFTGELVKTAGHVLAMDFIESVIKKNESINGHHKNASFMCADVTC

SEQ ID NO: 155680 - protein, 1413 aa, Oryza sativa
  Clone ID: PAT_MRT4530_55420C.1.pep
MEIRNGSRDSNNASGSEEPINGARANGASDNSPSPPPENPTIAQVLDNQTQMMTMMMQQMQQQYHQVMQQVQQQAQLQQQNLQFGPPPPQSKLLEFLRVKPPTFSSTTNPIEAHDWLHAIEKKLNLLQCNEQEKVAFATHQLQGPASIWFPRELWHKRREFRSLQQGTRTVIEYLHEFNRLARYAPEDVRTDAERQEKFLSGLDDELTNQLISRDYEDFEKLVDKAIRQEEHGNKINRKRKAAQFRTPQGKSQKPRFTMGRHGGPSTMIIRQHCPYHPGSFNKNHHSGSHNNSEQHSLNPTPSSLKIPAQSVQPALPEQPKRLGEKPELCFNCNKPGHTVGKCPKPRRAGPKFVQARVNHASAEEAQSAPEVILGTFPVNSTPAVILFDSGATHSFISKRFAGAHGLSLVKLKIPMRVHTPGGGMTTTHYCPSVTVEIQGLIFPANLILLESKDLDVILGMDWLARHRGVIDCASRTIKLTNAKGEVVTSQSLVPRKPGISLNQAAGEEQEVAVEKITKKLEDIPIVREYPEVFPDDLTTMPPKRDIEFRIDLVPGTAPIHKRPYRMGANELAEVKKQVDEQLQKGYIRPSTSPWGAPVIFVEKKDKTKRMCIDYRALNEVTIKNKYPLPRIDDLFDQLKGATVFSKIDLRSGYHQLRIREEDIPKTAFITRYGLFECTVMSFGLTNAPAFFMNLMNKVFMEFLDKFVVVFIDDILIYSKSEEEHEQHLRLVLEKLKEHQLYAKFSKCDFWLKEVQFLGHIVNAQGVAVDPANVESVTKWTPPRTVTQVRSFLGLAGYYRRFIENFSKIAKPMTQLLKKEEKFIWSAECNRSFEELKRRLVSAPVLILPDQTKDFQRRWLELIKDYDMGIHYHPGKANVVADALSRKSYCNVAWVEELCCEVQRDLEHLNLGIVERGFVAALEAQPTLMEQVRIAQASDPEIAELKKNMRVGKARGFVEDEQGTIWMGERLCVPENKELKDLILTEAHQTQYSIHPGSTRMYQDLKEKFWWVSMRREIAEFVALCDVCQRVKAEHQRPAGLLQPLQIPEWKWEEIGMDFITGLPRTSSGHDSIWVVVDRLTKVAYFIPVHTTYSGKKLAELYLARIMCLHGVPKKIVSDRGSQFTSKFWQKLQEELGTRLNFSTAYHPQTDGQTERVNQILEDMLRACALDFGGAWDKSLPYAEFSYNNSYQASLQMAPFEALYGRRCRTPLFWDQTGERQLFGTEVLNEAEEKVRAVRERLRIAQSRQKSYADNRRRELAFETGDYVYLRVTPLRGVHRFQTKGKLAPRFVGPYRILERRGEVAYQLELPSNMLGIHNVFHVSQLKKCLRVPEEQASPDHIEIQEDLTYVEKPTRILETSERRTRNKVIRFCKVQCSHHSEEEATWEREDELKATHPHLFASSSESRGRDSV

SEQ ID NO: 155681 - protein, 148 aa, Oryza sativa
  unsure (1)..(148): unsure at all Xaa locations
  Clone ID: PAT_MRT4530_55421C.1.pep
RHCTNSVNGASKVFLHLFICRNLILLNTECPLTVNPEHPAGPSKIHRGGGDHRVPGSRKKEEGRTKQEMGKRLKQGICPTHPRRCAERKRGVCSGTDTHGRRGGGGGGWGRXRRRRPLLPDQPHRQRGRVGHKGCLGGREERRGESGA

SEQ ID NO: 155682 - protein, 77 aa, Oryza sativa
  unsure (1)..(77): unsure at all Xaa locations
  Clone ID: PAT_MRT4530_55422C.1.pep
VXPSLXSFSSLXSQWFFCLVCKXPLVPGKYFXXPFVLXMCXFXILKXTTVYXFRXTXRLPFYLLVSSKKKKKKKKKK

SEQ ID NO: 155683 - protein, 66 aa, Oryza sativa
  unsure (1)..(66): unsure at all Xaa locations
  Clone ID: PAT_MRT4530_55423C.1.pep
YRITMLPHHIFLQNKEIKTRXKKKKRATLKPGGTRPRXWXRPRGGARYPIRPIVSRITRAQWAVVL

SEQ ID NO: 155684 - protein, 67 aa, Oryza sativa
  unsure (1)..(67): unsure at all Xaa locations
  Clone ID: PAT_MRT4530_55424C.1.pep
PNSNQFSHVTIEPEGVADPSEGQDTQDFEQGKSSLFLXLVDPNCEIILFANKIACNDKHPTCDYAMP

SEQ ID NO: 155685 - protein, 93 aa, Oryza sativa
  Clone ID: PAT_MRT4530_55425C.1.pep
GFFFFFFFFFFFFFFFFFFGSKHSKKACFSFLASRTLLMPTRQPITQKTCGWGYRRFPIITFWLGDQQIGPIPKPPWNPARFSAYLNTLSPPF

SEQ ID NO: 155686 - protein, 582 aa, Oryza sativa
  Clone ID: PAT_MRT4530_55426C.1.pep
MEGSGVEGIVIAGAGLAGLATALGLHRKGVRSLVLESSATLRASGFAFTTWTNAFRALDALGVGDKIREHHLLYERLLAFSASTGEPAAKLSLKMQGKSGPHEIRCVKRNFLLETLENELPEGTIRFSSKIVSIEEDGNVKLLHLSDGSTIRAKVLIGCDGVNSVVAKWLGLPKPILSGRSATRGLAEYPAGHGFGPEILQFIGQGFRSGVLPCSDTSVYWNYTWYPSPDDGDAEESVAKMRSYVVAKLRAARIPAEALDVIERSEMSDVVSSPLRFRSPLALVRGSISRGNVCVAGDAFHPTTPELGQGGCAALEDGVVLARCLSEAFLADGAEHDPGYEAVKAALEKYAEERRWRGIRLITAAYVVGFIQQSTNPVIKFLREKFFESPFVEHMDLSGPRWKKGKDGKDFLALAAANPMSVIVAELNASFISSKPVAILSGPGGGAILGVEPKQAVILNRAAFGHAVEIAAAQKHWFQLSPEEVFYLCHVLNCIRVESRDKKQMSEKQLWNHFRSMSESFPEMYKAYSHPRLSRPHGTNRVGLNHVSNAYVHGRDDSDKGTDKHEGKSCVVGGAYPDILRE

SEQ ID NO: 155687 - protein, 657 aa, Oryza sativa
  Clone ID: PAT_MRT4530_55427C.1.pep
MVNFGKRLMADQLEEWKEYYINYKMMKKKVKQYVQQTQNGGRNREQVLKEFSRMLDDQIEKIVLFLLQQQGHLASRIEKLGEERALLMEQADASQISELREAYREVGIDLMKLLRFVDMNATGIRKILKKFDKRFGYKFTDYYVSTRANHPCSQLQQIFKQVGIVAVVGALSRNLAFLQDHQGNFPSIYDHPSITLKDPIIEQINHSVQKLTHATNLLQFIGQHALIIPEDMHSGSEDLVDDQSYHFMSLLLNLANTFLYMVNTYIIVPTADDYSVSLGAAATVCGVIIGSMAVAQVFSSVYFSAWSNKSYFRPLVFSSIMLFLGNLLYALAYDVNSLTVLIVGRLLCGLGSARAVNRRYISDCVPLKTRLQASAGFVSASALGMACGPALAEPDHIVRENSVNTPSSDSGHRRNSNLEDGLAQPFLIDAKESLDENGEDNDENEEDPEDSHKPATSLAAAYRLLTPSVKVQLLIYFMLKFAMEILLSESSVVTTFYFNWSTSTVAMFLAVLGLTVLPVNVIVGSYVTNLFQDRQILVASEIMVLIGIAMSFRFTSHYSVPQYVSSALITFVFAEVLEGVNLSLLSRVMSSRLSRGTYNGGLLSTEAGTLARVAADMTITAAGYLGQNSLLNVTLLPSFVICVASIVATFCTYNSLY

SEQ ID NO: 155688 - protein, 97 aa, Oryza sativa
  Clone ID: PAT_MRT4530_55428C.1.pep
PPRRRTTVGATRTAPAQVQLLTGSGVTTNGKLLFPWWGEEKNRTSERTGEWNRIGPPPVRRGGGLSVVTCANQKINRGPRGHYGEERPRGRILLHFS

SEQ ID NO: 155689 - protein, 523 aa, Oryza sativa
  Clone ID: PAT_MRT4530_55429C.1.pep
MEGSGVEGIVIAGAGLAGLATALGLHRKGVRSLVLESSATLRASGFAFTTWTNAFRALDALGVGDKIREHHLLYERPSWAVLMNLILGPYAGSVCQCLAVGLLCIHGRACREVESKDAREKRNFLLETLENELPEGTIRFSSKIVSIEEDGNVKLLHLSDGSTIRAKVLIGCDGVNSVVAKWLGLPKPILSGRSATRGLAEYPAGHGFGPEILQFIGQGFRSGVLPCSDTSVYWNYTWYPSPDDGDAEESVAKMRSYVVAKLRAARIPAEALDVIERSEMSDVVSSPLRFRSPLALVRGSISRGNVCVAGDAFHPTTPELGQGGCAALEDGVVLARCLSEAFLADGAEHDPGYEAVKAALEKYAEERRWRGIRLITAAYVVGFIQQSTNPVIKFLREKFFESPFVEHMDLSGPRWKKGKDGKDFLALAAANPMSVIVAELNASFISSKPVAILSGPGGGAILGVEPKQAVILNRAAFGHAVEIAAAQKHWFQLSPEERCTRLTRIRDCHDLMAPTELGVNEKV

SEQ ID NO: 155690 - protein, 994 aa, Oryza sativa
  unsure (1)..(994): unsure at all Xaa locations
  Clone ID: PAT_MRT4530_55430C.1.pep
MTLQAQSSSPEVTPAVILIPKAHVKKRDEKTTLYNPTRRHNSRILKASQELKIDHRMGIGKPRGISAKKLNELVVLLDFGQCMNADTKLLSLRQKIEESGCHVFYVQETKKQNFTIPDIKTFAPKRFDAFAFSPSRGASGGILVVWVSNVFLGTPGEINSFSVTVNFVSRQSSEAWTLTCIYGPCSGPERSDFVAWLKNFSFGSVDNMILLGDFNFYRLVEDRNKPGADMNDIFIFNDIISSLGLLEIPLKERRFTWSNMQSSPLLERLDWVFTSPSWTLAFPNTTVHPLAHNXIPKSPIFRFENYWVEMEGFFELVSRVWSMDTSYEDPARCISFKLKFLRKSLLQLSKNLSQLTALLVNCNAVINFLDLIEEHRPLTMFEWNFREIVKSQTFKLLEFKKLYCEKRCTNRWMLLGEENTNFFKAIATXRFRSNSIAQVLDQNGXVVTLHNQKADMLFHSFKNRMGIFLLPQMDFNLMDLFPNPVNLDCLVDQFYTQEVDNLIKVIQPDKAPSPDGINGYFLKKCWPIISQEFYWLAAHFHACYTDLQPINKSFITLVPKKSSPETVNDYRPISLMGISLKVLTKLMVDSLXSVMPKLVHENQYGFIKGKTIXDCLAWSFEYIHQCQXSKREIILLKLDFEKAFDSIQHSALISIMKSMGFHDKWLQWVQMVFSSAHSSVLLNGVPGNSFKCMRGVRQGDPLSPFLFVLGAELLXRIVNXACSLGLLSKPINELDERGFPVIXYADDTLILLKTSXREVFCFKASLNSFAPSTGLKVNYHMSCLYPINLSHENAELFASLLGCTIGTMPFTYLRLPMGTTRPRVVDFAPLVDRVERRLTASSQFLPQGGRLTLINSVLSSIPTYYICSLQLPVSVVKAIDTARKNCLWRGNNPNSTXKISCFLGLXCRPKEKGGLGVINLRIQNTSLLLKYLVKFYEGQDLPWVQLIWNSYYDSKVPHLVWNKGSFWWKDIVALSDIFRGISKCFIRTGSSALF

SEQ ID NO: 155691 - protein, 319 aa, Oryza sativa
  unsure (1)..(319): unsure at all Xaa locations
  Clone ID: PAT_MRT4530_55431C.1.pep
MAPMLPLFLSFILLFFFVSCPLRPGVVAERRRRQDADARSPLGVQARGSLPAGGLLCITGKPAAKKSLRMKGKSGPHEIRRVKRNFLRETLENELPEGTIRFSSKIVSTGEDSNVKLLHLADGSTXVLIGCDGVNSVVAKWLGLPKPILSGRSATRGLAEYPXGDAEESVAKMRSYVLAKAARIPAPLRFRSPLALVRGSISRGNVCVAGDAFHPTTPELGQGGCAALEDGVVLARCLSEAFLADGAEHDPGYEAVTVALEKYAEERRWRGIRLITAAYVVGFIQQSTNPVIKFLREKFLSGLLAKTMIAMADYDCGKL

SEQ ID NO: 155692 - protein, 551 aa, Oryza sativa
  unsure (1)..(551): unsure at all Xaa locations
  Clone ID: PAT_MRT4530_55432C.1.pep
YSTPHKQLASNSNRWCMRHFCANFYTVEAAQDQMKYLERICQINKKVPFLSEIKRLMCFVEEGPKRXLEDNMPLKVKWARSFDIDGRRYSFMTSNMTESFNNVLRGIRKLPMTAIVVYAFSKCNTWFIDRHKVATAEIQSGHKWPKKKLGKSXEEQKKTNFGLTXCFDFPSTKYEVTEQGGRXLCVVARNNTCTRHFPELRHMPCSHMITVYRVRGLDMEVPPRMCFEVSNEVVQHTNSPSFEPYLDPSXWVSYGHVHLFCTCHPAVVAHAHTVVHAYENDTDYASTSSSRHPLSCYQPPTAPVRLGCGKCACIGSTSSTSATXCVEKRVNGRYLILLERLKTLRVRAHTTHIPFDDRYIPFLRRAKLLAFVTMTQWPMPMYNAAVLTTFVDRWRPEAHTFHLSSGELMNWXGRVVQYLGVEPLEAPDRQRLTKTSRVPLSWLRANFSHRPPDIDQAMVDQYCKAYVMYXLMWLPLLADWDKAGTYNWGSATLAWLYNHLCDAGRRTSADANFAECVWLLHVWMWILLSVGRPTWRVLSILPTLSIPICYG

SEQ ID NO: 155693 - protein, 118 aa, Oryza sativa
  unsure (1)..(118): unsure at all Xaa locations
  Clone ID: PAT_MRT4530_55433C.1.pep
HSPQCRTIVRAPQSVARGRPSPAGPTKFCQDCSRQLPXVDDGWSRSGALXDHILSGIYRELGPTEXGHPMAEVFPGCRRGDLERAGXDLPAFCNVDIPNGPGGVCYWLGYPRTPRTGH

SEQ ID NO: 155694 - protein, 234 aa, Oryza sativa
  Clone ID: PAT_MRT4530_55434C.1.pep
MASSSSPPPPPQIRCASFNQDNSLFYVGTKDGFRIFDAHTGKLHYQKNIGGIGNMEMYFRTNILAIVGTGEQPVLSPRCLRLIDTVAAVTKKDLNFKTSVLAIDAHESPLAAMAFSSNGTYLATASGKGTIIRVFLVAQATKVNSTNQTSKLLGSMIPGAITRALDPANHHIIHNVIPAGIKRTVVYIITHDGYFREYSINTTKSNESSWVLQRELNLLDTGCSTPQREEQHKD

SEQ ID NO: 155695 - protein, 85 aa, Oryza sativa
  Clone ID: PAT_MRT4530_55435C.1.pep
SPACQHAVPGTASRLIVPAHDNRRHPWSSPTAAFLVNPHRYPHRMHTVSSPLCHCSTTTLLHGLVPCQATLPSILTATAPLRPLT

SEQ ID NO: 155696 - protein, 619 aa, Oryza sativa
  Clone ID: PAT_MRT4530_55436C.1.pep
MAKAWEKVATAAGLGGSGERRKYPIRVEDYELYEEIGQGVSAIVYRSLCKPLDEIVAVKVLDFERTNSDLNNIMREAQTMILIDQPNVMKAHCSFTNNHSLWVVMPYMAGGSCLHIMKSVYPDGFEEAVIATVLREVLKGLEYLHHHGHIHRDVKAGNILVDSRGVVKLGDFGVSACLFDSGDRQRARNTFVGTPCWADIWSFGITALELAHGHAPFSKFPPMKTYHCSFYDEHDFLFVNNDYLLYQHFKQMVAMCLVKDPSKRPTAKKLLKQPFFKQARSSDFISRKLLEGLPGLGARYLALKEKDEVLLSQKKMPDGQKEEISQDEYKRGISSWNFDMDDLKSQASLITECDDSISCKDSDASCFYDLDTILPERATGPHMSRVFSIKYDTDTEYINAQDYKRGTCKWPGQETQLHRNSKHQINIHNRDKCNGGPLQVADEPSPEAVPKVPKSSAANVEDHDDRSKPPLIQQRGRFKVTPGHVELDKAHSPGLQKSHSMQAISHLPSLSIPSSIEAASTIIGGSLYMQLYNVLQTNMLQREQILHAMKQLSGCDMAMTSPACIAPASRASSPSSALSIDRSLLEAAHEKEKELVNEITELQWRLVCFQYELQRIKLP

SEQ ID NO: 155697 - protein, 61 aa, Oryza sativa
  Clone ID: PAT_MRT4530_55437C.1.pep
PLSLPTPEQATPPSPCDSAAATCRSDLPPLRARERPVAAFPARTLPPAGISSPTPQTPPPR

SEQ ID NO: 155698 - protein, 731 aa, Oryza sativa
  Clone ID: PAT_MRT4530_55438C.1.pep
MAAPPGEAPLTAATNIEPFYVLHKGGAAASSSSSSAPSLPSSGRARRRIDVSGLASPNPKPGKRSRDDDAAEDDDDDELYERLRLDAFHRVWSKIQSTINVQTQFPHIPSIRLLLTRLIPQQLQNLTSAISHLGIDPIFDCSCGQEVLRGISLKLFDQVLRWVQESFSAVRSIARPSAAEVRQPYPLLTDVICRKIPTAFVLTKNAEFVDDITTFRDLAEYLESNGCHLAKLSATELSEKNGVGCCFRSLLRQLLSDVPDVADIFALASWYSAAENYDQPIVVVIDDLEQCSGDVLGELVMMLSEWVIKIPIFFVMGIATTLDAPRKLLSSEDLQRLEPCKLTLGSPSDRMNALVEAILVKPCAGFCISHEVAVFLRNYFFKHDGTITSFISALKLACSKHFSVEPLSFLCMGMLEEDRENFWHDKFNALPQELRKYASGLPSCTREKDSTKSGDNMVDGLSELMNIQKDWSSVLLCLYEAGKHGKVQLLDIFCEAVNPDLHTQKAPNLPNEKSGTSRRFIDQVMDTIRYLPVETLFCLLEVWSIHLNGMDKITNKVKELQSTTISTDSVRITKDKWPRRSTNSTGNSTVALNDKVAMLLDDVTRKFLVSVECLPFHEIVCFKNVSILQSALIGNPRRMVQLDLVKSHKHLKCSCCRKNGIAVLASMHDTSIMCNLAQEYGDVINLHDWYISFDGIINSVHSKIKRKPHTSPSKKKSKPVAAESEAMIQYP

SEQ ID NO: 155699 - protein, 292 aa, Oryza sativa
  unsure (1)..(292): unsure at all Xaa locations
  Clone ID: PAT_MRT4530_55439C.1.pep
MTSAMTSPTAAAARRGRRLGRRTLAGERRREDENGKHQDEAGGTANSPATKTTAEDQRTATATRRKRRSSSGRRRRXRSGGLRRWRRGGRGRRRDGEHDVGLPERRRRLERRRRTTGATVTTAALGHTVLELFRRQEAKARVAAGRGDTGEPFKGTRRRRRRPTATATAKESSAWRERXDPIRTRIPRFPNRFSRXFHRRKGRGDPGDCFPSINFTGNGKERPDLERNGGGSSAAARXVSARGRXTGLTGGTHLSAIERARARGRLRTGPTWAGEREXGFGPTFGPKPKENF

SEQ ID NO: 155700 - protein, 69 aa, Oryza sativa
  Clone ID: PAT_MRT4530_5543C.1.pep
AYGERPPGKLMIWSSVAVGTRDGHLLAAPHPPRRDWQERRQARHHSRDAGQRMLHSTDGPSGRIRPPRL

SEQ ID NO: 155701 - protein, 346 aa, Oryza sativa
  unsure (1)..(346): unsure at all Xaa locations
  Clone ID: PAT_MRT4530_55440C.1.pep
SELVLSRVVLGSGSPSATASNPTGRLPRFPLRHQQLHVAILGSSHRPRSSPPLPTGARRHYRLRLLLCHPQLPPPLHPSLPRSRAAPPPPLQRDLSQPRLPAPSPLLLLLPFLLFLPITAGSPLSCLGESGSRIGRRRAHPNSITPTLAWMRRLEESYTTSPAVAHAGLWKWNSLTSSRGRGGAGKRAPPEPTARIGPKPIGRPRGGAAGARARHEAGSAETWRGGGKGEAARGRRRQGGGGKGEAAARGRRQGGGGNRLQQPATWNGGGRPEDSGAHGDGDAPQEAXELTGDRGRRSSGGFPAKRGGGRGPPRPCGAEGGNGASRRRPKRRRDAAGVGGGGGERW

SEQ ID NO: 155702 - protein, 774 aa, Oryza sativa
  unsure (1)..(774): unsure at all Xaa locations
  Clone ID: PAT_MRT4530_55441C.1.pep
MPGPKGTITIQGNAKLVVQCDKRSLNMVKHTPSPPATAEPPKKPSDMPGVPREVIEHKLMVRPDAKPVKQKLRRFALDRKQAIREELDKLLKVGFIREVLHPEWLANPVMVRNANEKWRMCVDFTDLNKACPKDHFPLPRIDQLVDSTAGCELLSFLDAYSGYHQISMAKEDEEKTAFITPFGVFCYVKMPFGLITAGNTFQRTVQGSLSDQLGNNVEAYVDDIVVKTKSSDSLIDDLRETFDSLRRYRLMLNPEKCTFRVPSGKLLGFLGSGRGIEANPEKIKAIENMKSPTRLKEVQKLTGCMAALSSTVIVVEREKVQRPVYYVSEALHDAKTRYQQIQKLLYAVIMTLRKLRHYFQAHRVTVVSSFPLGEVVRNKDVVGRITKWVVELSQFDVHFVPRTVIKSQVLADFVADWTMPDNRATNNTAEYEGLLAGIRAAAALGVRRLIMKGDSELVTNQVHKDYKCSNPELSVTPRSFPPKPKIEFTNDPKKMQAEAQPGSRLPASLLSGSPTDVDLNVNIVVCVPRLVLDGEFNAHSAWNSIREFLGVTLSKYLAEVRKLEKRFDGIEVRHVYRKDNIEPDDIARRASRREPLEPGTFLDVLTRPSVKDASGEDSPVSLNNSSGATEVERVVADIETTDDWRTPLIKFIGSKELPEDDAEAEKISCKAKVYYMIGNDLYKKASNGVLLKCVSSDDGRHLLLDIHEGICGSHAAXGRTLVGKAFRQGFFWPTALKDSCDMVQRTTASGWESRSASPRFLTLRAMDKSRGQTA

SEQ ID NO: 155703 - protein, 64 aa, Oryza sativa
  Clone ID: PAT_MRT4530_55442C.1.pep
HYTSANYNTLPSDKFISILTTLSPYILHNHLYFLHITYTLIISQNIPIFSIQTSLCFISHLNNL

SEQ ID NO: 155704 - protein, 857 aa, Oryza sativa
  unsure (1)..(857): unsure at all Xaa locations
  Clone ID: PAT_MRT4530_55443C.1.pep
MAEGWCPNAKGLSSALPVPGIPAVGRIGSVLLSKARMGWKLCHIFTTGSKAMDNIGNKGYGNDGSDDSRTQANGNEKSINETSPELIQIVVNQTNMLATAFQLLQNRNNPAGATNVQVPTVQQQCKLSEFLKTGPPTFAMAVDPMEASDWLRTVEKKLGLIQCTDQERVGFATHQLVGPASEWWDSYEASRPEGHTITWNEFSSVFKRSHVPTGMITLRKREFRYLKQGDLTVTEYLHEFYRLAHYAPEDVETDEDKQEKFLQGLKDELAVQLLLEDYEDFEKLVDKAMQLESEHNRMTNCKRRIVNIPVFPGGNQRQRTEPLQITGSPVVHQEFLPQEDECNADNNTSNTNNDDTTNNHGSCPISDHSNKACNVSSIHQDVNDSINVGTQNDNLSNFDTEKDSNGDSNYGTTDANVSKDFQPPIPTPSHNDHPQMDSSAKKTLICYNCKEPGHFSRDCPQPKRNLRHHSGHYARRRQVTRLVVTGANAVPVSLKGSRPKDLIATRSIHNSRSEEYLATKVDAKDMNYEKXSGTEVPSSSAIIQSKSARGATREKSAPSPSPASPSPRRKLAGTVPPPATSGIGATVLPPAGCCSSPVRRSTPPSPPSTPRHRLLPRHHLLLARISPERRXRAGLSFLLGGISSGCPFRHALHRSATPPSSSASQPRRRPRPRLPSDRTPPVSVVVFTVPSRRLVVSRRRLRHRHHSGVFHVILVPVQPLPAVLVASSPAPVVVALVLSSFPIVVAFVPPSSRSRPSSAFVKRVAAAPSSCSSSAPRRQASCRPRLAFAQGSPPKPSPRRSSPLCPSVSAAPVRRCRSHASSRGGKVSSPRCPVLALSVSPVLVVRSSTPVPVYRCR

SEQ ID NO: 155705 - protein, 391 aa, Oryza sativa
  Clone ID: PAT_MRT4530_55444C.1.pep
MEVDEVGGRWTFSRANEGYTSCGPVVEMSWQRVGALLLGGSVLPACPGCPGRRGIGSVLLFMARMGWELCHVFRPYTVVMFNREKGKNVSGYASSNSSFQFNPPLASRELTRAHPWSIPSMLLSSQLPLVGSQDQNQYVFDRAFATQVNELPMPEEDVPFCHDCREQGHYALNCPWVYVKEAPSFGLAGQTSLNQPPRTKSSLQPSVQSEEPNGDNPLNPRKCFPPSLSHHVGSRTKQAKGKKSKNQKRKAPMRTEEEVRKMTITSTEWPPAGITIPRRQRGNTFRGARQLTQHLLSHGGRVSDSEGSDQVSSDYEDESPRHLGEEEMESKACPRCGEIGHVASMCFTLCPHCEEDHPPGRAKGNQPQEGDTKQKTVICFKQQSEGSFSCE

SEQ ID NO: 155706 - protein, 411 aa, Oryza sativa
  Clone ID: PAT_MRT4530_55445C.1.pep
MAFCTPTATTPPHATPPPLTTSWKQLAFCNSSRLAAAAAGGGQRARPAGASVEARALAPASTAADAAAAAAAPAPPNVDYLAAEFAGHGVSFEAVGGSCAVKMELRNGSAAHVLLPGGLVTSYKPAMWHGAPTEVIHTTVAEGLGGRAVIRGGVSLDLRCGGAAGGGGDGMPPWSPSGAWSLRDVRGSPTGSIEVELASAAPPEASGVEARCVVTLHPEALATEFTARNAASPSPVALSAAVSTHLRVSTPDATYAVGLQGSDYRAIDPVLSEFAIVPPDFMSRSSSATTLARRWATKGFDAVLSGGGGGGAGAQEADGEEDDDYKRMTEEMCRIYSHAPRQFTIIDRGRRNSICVQRRGFEEVYVFSPGSKYQWYGKYAYVCVGPAMLEPIVLSPGATWSGAQYLRNPNL

SEQ ID NO: 155707 - protein, 1137 aa, Oryza sativa
  Clone ID: PAT_MRT4530_55446C.1.pep
MSGFVAAGAAGVGDDWQGASRTGVCELWLLEQPGSVNEWQGASRADENQLIQFHCSGRMAVNATHSSHGVGEGHHVDQLRDLAGFLGFSCPEYAGYSVDRFPPRCELSVYLYPRGGSAFRLIPQLPPGRADSRYPCPYRESHPALTRMVELSGAQATQHDLLLEAYRSLARRYAALEARLAEEGVTSVDTTSWDSGRLCHSNHLSFYSSRGSARTPSGPRSPSPRVPYSPVYSPYPHRASPSYTPGHTPVVSRRGLRLIRTAQKRVVGSSTVFRFDHPAPTPPAGRPAADPRQGGTRIGNRSTLNSLQATPLEMVPIVNEYPDVFPEELPGMPPDREIEFSIELAPGTAPIAKRPYRMAANELAEIKKQIEELQNKGYVRPSSSPWGAPVLLVKKKDGSERMVIDYRALNEVTIKNKYPLPRIDDLFDQLEGARVFSKIDLRSGYHQLKIRSEDIPKTAFSTRDEQDHANHLRKVMERLREHQLFTNYSKCEFWLDKLAFLGHVISTKGVEVDPSKVETVLAWNAPKTVSEIRSFLGLAGYYRRFIEGFSKLARPMTELLKKEKKFEWSEACERSFQELKKRLTTAPVLTLPDIRKDFEIFCDASRQGLGCVLMQDRKVVAYASRQLRPHEVNYPTHDLELAAVVHALKIWRHYLIGNRCEIYTDHKSLKYIFTQSELNMRQRRWLELIKDYNLGIHYHPGKANMVADALSRKTYCATALVWPTQDNLCREIEKLKLTMVPTGNLASLTVQPTLETQIREAQQEDEGMKEMKGKIRKKRLKGFTIDDQDTVWFGSRICVPARKELKDLILREAHESAYSIHPGSTKMYQDIKEYFWWAGMKRDVAEYVALCDICQRVKAEHQKPAGLLQPLRILEWKWEEIGMDFITGLPRTPSGCDSIWVIVDRLTKAAHFVPVKTTYDGKKLADLYMTHVVCRYGCPKKIVSDRGTQFTSRFWQQLHEAMGTNLNFSTAYHPQTDGQTERVNQILEDMLRACTLDFEGTWDRCLPYAEFSYNNSYQSSIQMSLNEALFGRKCRTPLCWNETEPQTKPYPLDMWKYGSALQQRPELNPYSGRGATSHNWHAPKPHRKQVLGVLKEEERENGLPNLRRRPRTTLWEPPERRKLREAHKQSFKPIKKQ

SEQ ID NO: 155708 - protein, 392 aa, Oryza sativa
  unsure (1)..(392): unsure at all Xaa locations
  Clone ID: PAT_MRT4530_55447C.1.pep
MESSASSSAAVAAEGAPATGEQLAVFWHEGMVAHDAGRGVFDSGRDPGFLDVLDQHPENADRVRNMVSILRRGPIARFISWHSGRPAHAAELLSFHSAEYIEELVQANAVGAKKLCEGTFLNPGSWGAALLAAGTTLSAMKHILDGHAKIAYALVRPPGHHAQPDRADGYCFLNNAGLAVKLALDSGRRKGAGVDIDVHYGNGTAEGFYHTDSVLTISLHMKHGSWGPSHPQSGSVDEIGEGXGSGYNLNIPLPNGSGDAGYEYAMNELVVPAIEKFRPELLVFVVGQDSSTFDPNGRQCLTMDGYRKIGQIMRGMADQHSNGQILIVQEGGYHISYSAYCLHATLEGVLNLQAPLLDDPIAYYPEDEKYTMKVVDIMKKCWKESIPFLKDI

SEQ ID NO: 155709 - protein, 86 aa, Oryza sativa
  Clone ID: PAT_MRT4530_55448C.1.pep
SCVSAAVSCGCVIIVVFTAAVKSDEFFWVRGAGDGCLLGSACPAGLHVGLRPRSRAHGAQDTRDGLLRRHCRSREALPHHEVPLLD

SEQ ID NO: 155710 - protein, 816 aa, Oryza sativa
  Clone ID: PAT_MRT4530_55449C.1.pep
MDPFGTLAVRFHFNGEFVNRGRQKLYCGGREAMSYIDRDKVSLPELFGHLKDHCKFVDDKVCGFMSDCISEGSVVEVYADEPIVIDVDEEEHSDYEAEMELDLDEESEEEGDEDKDGDRNVKVKDKGKAIVDKGKGKAVVGAGKGKAIEVDESASDRRIVIYRERSPLRENAPIREYSPSRDTSPINTILPSDSEDDSDYVGGDDCPSEDDEEAREIEGHYKELKRKMRAGKSARTAGGPKDGNDTPYADSDDEDSYDEVGSDGELVRRKGKFPRFQKQPGVPVFELGMKFSSKHQFKKTIIKYALAERKVINFIKDDHKRVRAKCDWASCPWVCLLSKTTRSDSWQIATYDSMHACPPRRDSRHVSSVRIAEKYGKFIVDNPGWPLSHMKATVQQEMFADASISKLKRAKRLVMQKAFDVTKGQYQKLYNYQQELLRTNRGSTVAINRVIGIEPPVFKRIYICLDGCKKGFMAGCRKGIINAVSKWAPEAEHRNCARHIYANWKRHFNDKVFQKKFWKCAKASCRMLFNLPRAKLAQLTPARAQAILNTHPEHWSRAWFRLGFNCDSVDNNICESFNKWILEARFFPIITMLETIRRKPVEGMTSWPDDPREPLNAPGYIQMPGRPKTERRREPNEPAKPTKASKFGTIMRCRSCKQPGHNSKGCHMHSGAGGSTSAAATSAPGNTVTANNNLVLSSTPSSIAQSRKRKAAELSTSTSACHTRKRTSPTKKSANTNSSLVKVAASARLATERGGSTSVKLQAIVPHSQCSSSASMRITSEKASVYVQAQEPATTKPKKTPTGPLMLIPPWETDKL

SEQ ID NO: 155711 - protein, 530 aa, Oryza sativa
  Clone ID: PAT_MRT4530_5544C.1.pep
MDAAAATAVNGVLEVEERKAQKSYWEEHSKDLTVEAMMLDSRAADLDKEERPEIWGACMHFLVLFPTKYSSYVVILSLLPPYEGKSVLELGAGIGRFTGELVKTAGHVLAMDFIESVIKKNESINGHHKNASFMCADVTCPDLMIEDNSIDLIFSNWLLMYLSDEEVEKLVKRMVRWLKVGGYIFFRESCFHQSGDSKRKVNPTHYREPRFYTKVFKECQALDQDGNSFELSVLTCKCVGAYVKSKKNQNQICWLWQKVDSTEDRGFQRFLDNVQYKASGILRYERIFGEGFVSTGGIVCLFFYLRSPETTKEFVDRLDLKPGQNVLDVGCGIGGGDFYMADKYDVHVVGIDLSINMVSFALERAIGRKCSVEFEVADCTKKTYPDNTFDVIYSRDTILHIQDKPSLFKSFFKWLKPGGKVLISDYCKCPGKPSEEFAAYIKQRGYDLHDVRAYGQMLENAGFHDVIAEDRTDQFLDVLERELAKVEKNKNEFVSDFSQEDYDAIVNGWKAKLQRSSAGEQRWGLFIATK

SEQ ID NO: 155712 - protein, 430 aa, Oryza sativa
  Clone ID: PAT_MRT4530_55450C.1.pep
MDEVGRRWTFSRANEDYTSCGPEWWPWVGLEQAGTPGRVPSSVQIMVGLGLRQMFNREKGKNVRGYASSNSSFQLNPPLVSRELTRAHPWSIPSMPLSSQLPLVGSQDQNQYVFDRAFATQVNELPMPEEDVPFCHDCREQGHYALNCPWVYAKEAPSFGLTVQTSLNQPPRTKSSLQPSVQSREPNGENPLNPGNCFPPSLSYHVGSRTKHAKGKKSKNQKRKAPMRTEEEVRKMTITSTEWPPAGITIPRRQRGNTFRGARQLTQHLLSHGGRVSDSEGSDQVSSDYEDESLRRLGEEEMESKACPRCGEIGHIASRCLTLCPHCEEDHPPGECPTRKVTCFLCEGTNHVPKDCQLSVLLTKTAEIQRTTLRLSRQLVSSNSNIDDIIHSTNAPLAAPDSAVNHSDNTFSTNHSLHRQPQQRISPESE

SEQ ID NO: 155713 - protein, 144 aa, Oryza sativa
  Clone ID: PAT_MRT4530_55451C.1.pep
GNENLNLTSSSANSDHSMRKGKSPMNEAGEEQLMGSELQNLKLHDNTETISAHNTSDIPDMNAEASRRKVNDFSTGGPSGESTSYQFNEDIWLSSDQTRNYLSRTSSSNGLVPTEWGKPNAPLWGGRVVRRQARCVRGSSSLSA

SEQ ID NO: 155714 - protein, 593 aa, Oryza sativa
  unsure (1)..(593): unsure at all Xaa locations
  Clone ID: PAT_MRT4530_55452C.1.pep
FARTMGSTPTYCSSQTMGVGALKQSPHMQFQQAYLYGLRFLQRDTLTAPINGHWAKRRRSSIPIVSTSGMSKIFIASSAGTTCKTGGLGGLPGGRAPALAAMVRGLVPLFPLLVHALPAVASHXVYDSDEGDSKAAVPFSRRXTTASARFFVYYHMFLEQVWGKTGTKLYADTTGRIYRDNXIEVWVLCLAALEGPRVLNLNNSEYFSGPYXKIGFCCTHSSTSALSRYLNNSXNKIDVCVCRITFCVHIISLMCSIWWSRVLNLPDSFLXSFDFIDGHFKPVVGRKINWMKAGITECDLVMTVSPHYVKELASGPDKGVELDGILRTKPLETGIVNGMDVYEWNPATDQYISVKYDATTVTEARALNKEMLQAEVGLPVDSSIPLIVFVGRLEEQKGSDILIAAIPEFVEGNVQIIVLGTGKKKMEEELILLEVKYPNNARGIAKFNVPLAHMMFAGADFIIVPSRFEPCGLIQLQGMRYGVVPICSSTGGLVDTVKEGVTGFHMGLFNVECETVDPVDVTAVASTVKRALKQYNTPAFQEMVQNCMAQDLSWKGPAKKWEEVLLGLGVEGSQPGIEGEELAPLAKENVATP

SEQ ID NO: 155715 - protein, 835 aa, Oryza sativa
  Clone ID: PAT_MRT4530_55453C.1.pep
MRLDPLERGLQKLSIKYSRAENGGRMQIRWPFEVSSVAGGRIGFRHLQDSNLISCCSSMISLQICGWDFTALVISWGRNRTGLQLLMDDKVCGFMSDCISEGGVAEVYAEEPIVIDVDEEEHNEYEAEMKLDLDEESEEDGDEDKDGDRKVKVKDKDKAIVDKGKGKAVVGAGEGKAMEVDESASDRRIVIYRERSPLRENAPMRENSPYRDTSPINTVLPSDSEDDSDYVGGDDCPSEDDEEAREIERHYKELKRNMRAGKVHELDEVVFEGFKSQSARTAGGPEDGNDTPYADSDDEDSYDEVGSDGELVRRKGKFPRFQKQPGVPVFELGMKFSSKHQFKKTIIKYALAERKVINFIKDDRVIGLAVLGMHACPPRRDSRHVSSVRIAKKYGKFIVANPGWPLSHMKATVQEEMFADASISKLKRAKRLVMQKAFDVTKGQYQKLYNYQQELLRTNRGSTVAINRVIGIEPPVFKRIYICLDGCKKGFMAGCRKGIINAVSKWAPEAEHRNCARHIYANWKRHFNDKVFQKKFWKCAKASCRMLFNLPRAKLAQLTPARAQAILNTHPEHWSRAWFRLGFNCDSVDNNICESFNKWILEARFFPIITMLETIRRKPVEGMTSWPDDPREPLNAPGYIQMPGRPKTERRREPNEPAKPTKASKFGTIMRCRSCKQPGHNSKGCHMHSGAGGSTSAAATSAPGNTVTANNNLVLSSTPSSIAQSRKRKAAELSTSTSACHTRKRTSPTKKSANTNSSLVKVAASARLATERGGSTSVKLQAIVPHSQCSSSASMRITSEKASVYVQAQEPATTKPKKTPTGPLMLIPPWETDKL

SEQ ID NO: 155716 - protein, 380 aa, Oryza sativa
  unsure (1)..(380): unsure at all Xaa locations
  Clone ID: PAT_MRT4530_55454C.1.pep
MSRVSTSWGFVYSRANKPGERSARTGSTGVGPTRQPLGPRWTGCTRLTPAGAVGPTRQPHPRARAADGRAPHGSRGARPKAASPAQPTGGGAPAPRWSPPATTGAAERRPREGREGGSETAVHGSPRVDGDDGNGDRSGGRRRRGSGRRGRRRSGGRRAKRRGGRGRRGCGEPEEGDAETGEGPGRRRRRTGARRRRRRERATARARFRRGERAARVGNGGGRHGERLYRVGRGRERPDEGESATEDPVAIDGAGEVXGRGFQTNPRERGREKWGERGRESREXISPPPTLLRAWTAGGGGIRGGGGARARARRRERREEGDDGWGXGGRARPSAARARGXEAEWAAGERRERERDGPSRPKRGXGGKRLFRFFLFIKPF

SEQ ID NO: 155717 - protein, 1422 aa, Oryza sativa
  Clone ID: PAT_MRT4530_55455C.1.pep
MAIKDRFTGNPGRLTVLTTSGSGFVACGLVSGRYHVSVMEIRNGSRDSNNVSGSEEPINGARANGASDYSLSPPPENPTIAQVLNNQTQMMTMMMQQMQQQYHQVLQQVQQQAQQQQQNLQFGPPPPQSKLLEFLRVKPPIFSSTTNPIEAHDWLHAIEKKLNLLQCNEQEKVAFAIHQLQGPASIWWDNYMVTRPAGAEVTWTEFCHSFNKAQVPEGIVAQKKREFRSLQQGTRTVIEYLHELNRLARYAPEDVRTDAERQEKFLSGLDDELTNQLISRDYEDFEKLVDKAIRQEEHYNEINRKRKAAQFRTPQGKSQKPRFTMGHQGGPSTMIIRQYRPYHPGSFNKTHHSGSHNNSEQHRLKPTPSPLMIPAQPALPAQPEQPKKFGEKPELCFNCNEPGHTVGRCPKPRRAGPKFVQARVNHASAEEAQSAPEVILGTFPVDSTPAKILFDSGATHSFISKRFAGAHGLSLVKLKIPMRVHTPGGGMTTTHYCPSVTVEIQGMIFPANLILLESKDLDVILGMDWLTRHRGVIDCASRTIKLTNAKGEVVTFQSQVPRKLGISLNQAAGEEQEVAVEKTTKKLEDIPIVREYPEVFPDDLTTMPPKRDIEFRIDLVPGTAPIHKRPYRMGASELAEVKKQVDEQLQKGYIRPSTSPWGAPVIFVEKKDKTKRMCVDYRALNEVTIKNKYPLPRIDDLFDQLKGATVFSKIDLRSGYHQLRIREEDIPKTAFITRYGLFECTVMSFGLTNAPAFFMNLMNKVFMEFLDKFVVVFIDDILIYSKSEEEHEQHLRLVLEKLKEHQLYAKFSKCDFWLKEVQFLGHIVNAQGVAVDPANVESVTKWTPPRTVTHVRSFLGLAGYYRRFIENFSKIAKPMTQLLKKEEKFIWSAECNRSFEELKRRLVSAPVLILPDQTKGFQIYCDASRQGLGCVLMQDGKVVSYASRQLRPHEGNYPTHDLELAAVVHALKIWRHYLIGNRCEVYTDHKSLKYIFTQPDLNLRQRRWLELIKDYDMGIHYHPGKANVVADALSRKSYCNVAWVEQLCCEVQRGLEHLNLGIVEHGFVVALEAQPTLVEQVRIAQASDPEIAELKKNMRVGKARGFVEDEQGTIWMGERLCVPENKELKDLILIEAHQTQYSIHPGSTKMYQDLKEKFWWVSMRREIAEFVALYDVCQRVKAEHQRPAGLLQPLQIPEWKWEEIGMDFITGLPRTSSGHDSIWVVVDRLTKVAHFIPFSYNNSYQASLQMAPFEALYGRRCRTPLFWDQTGERQLFGTEVLNEAEEKVRAVRERLRIAQSRQKSYADNRRRELAFETGDYVYLRVTPLRGVHRFQTKGKLAPRFVGPYRILERRGEVAYQLELPSNMLGIHNVFHVSQLKKCLRVPEEQASPDHIEIQEDLTYVEKPTRVLKTSERRTRNKV

SEQ ID NO: 155718 - protein, 610 aa, Oryza sativa
  Clone ID: PAT_MRT4530_55456C.1.pep
MPARSTGGGFPRPETISSAERRPREGREGGKEATVHNSPRGDGGDGGGGQSGGRRWQGSGRRGRQRSGGRRPKRRGGRGRQGCGEPEGGGSEVGGGPGRRRRRTGARRRWRRERATSRARIRRGGRAARGGNERRRCGKGLNRVGRGESGWGGRKPAREVRPPSMAAARFAGANPPPRNCAGHPGSTLNLGVEFRKKQQQVPQLNGYSDSDMAGDIDDRKSTTGVLFKLGDSLISWQSQKQKVVAISSCEAEYIAAATAAVQGVWLARPIGELEGQEPGCALIKVDNKSAISLLKNPVLHDRSKHIDTKFYFIWDCVDQKRVEVEYIRLEEQHADILTKPLAYLLPSLAAMTRLGSWDGALWLRLEPSRWSCRCPVDAAKPPKSIDDEALPTNACPHHHPMPTGEGHSQVAKGLVADTRRSLTYHPQAAMDPRCLLYPSPPSPSPLVVGIALAPCALALPSPPPLQPCAAVVSAVAVAREDHRRARQVVAVLVRLFAVAGDHRSSIAVVNPKVPAASSSSPSPSVGLPPPFRSPVSSPRCPLRLGALCLRPSIAVRRRACAVRAVSSAEPPPLSVMSPLTSSGSSAVSRRGPDRSRPSVLDQVDLGRPFV

SEQ ID NO: 155719 - protein, 1458 aa, Oryza sativa
  Clone ID: PAT_MRT4530_55457C.1.pep
METRNGSRDSNNASGSEEPINGARANGASDNSPSPPPENPTIAQVLDNQTRMMTMMMQQMQQQYHQVLQQVQQQAQLQQQNLQFGPPPPQSKLLEFLRVKPPTFSSTTNPIEAHDWLHAIEKKLNLLQYNEQEKVAFATHQLQGPASIWWDNYMVTRPTGAEVTWTEFCHSFNKAQVPEGIVAQKKREFRSLQQGTRTVIEYLHEFNRLAHYAPEDVRTDAERQEKFLSGLDDELTNQLVSRDYEDFEKLVDKAIRQEEQCNKMNRKRKAAQFRTPQGKCQKPRFTMGHHGGPSTMIIRQHRPYHPGNFNKNHHSDSHNNSKQHSLNPTPSSLKIPAQSVQPALPEQPKRLGEKPELCFNCNKPGHTVGKCPKPRRAGPKFVQARVNHASAEEAQSAPEVILGTFPVNSTPAVILFDSGATHSFISKRFAGAHGLSLVKLKIPMRVHTPGGGMTTTHYCPSVTVEIQGLIFPANLILLESKDLDVILGMDWLARHRGVIDCASRTIKLTNAKGEVVIFQSPVPQKPGISLNQAAGEEQEVAVEKTTKKLEDIPIVREYPEVFPDDLTTMPPKRDIEFRIDLVPGTAPIHKRPYRMGANELAEVKKQVDEQLQKGYIRPSTSPWGAPVIFVEKKDKTKRMCVDYRALNEVTIKNKYPLPRIDDLFDQLKGATVFSKIDLRSGYHQLRIREEDIPKTAFITRYGLFECTVMSFGLTNAPAFFMNLMNKVFMEFLDKFVVVFIDDILIYSKSEEEHEQHLRLVLEKLKEHQLYAKFSKCDFWLKEVQFLGHIVNAQGVAVDPANVESVTKWTPPRTVTQVRSFLGLAGYYRRFIENFSKIAKPMTQLLKKEEKFIWSAECNRSFEELKRRLVSAPVLILPDQTKDFQVYCDASRQGLGCVLMQDGKVVSYASRQLRPHEGNYPTHDLELAAVVHALKIWRHYLIGNRCEVQRDLEHLNLGIVEHGFVAALEAQPTLVEQVRIAQASDPEIAELKKNMRVGKARGFVEDEQGTIWMGERLCVPENKELKDLILTEAHQTQYSIHPGSTKMYQDLKEKFWWVSMRREIAEFVALCDVCQRVKAEHQRPAGLLQPLQIPEWKWEEIGMDFITGLPRTSSGHDSIWVVVDRLTKVAHFIPVHTTYSGKKLAELYLARIMCLHGVPKKIVSDRGSQFTSKFWQELQEELGTRLNFSTAYHPQTDGQTERVNQILEDMLRACALDFGGAWDKSLPYAEFSYNNSYQASLQMAPFEALYGRRCRTPLFWDQTGERQLFGTEVLNEAEEKVRAVRERLRIAQSRQKSYADNRRRELVFQVGDYVYLRVTPLRGVHRFQTKGKLAPRFVGPYRILERRGEVAYQLELPSNMLGIHNVFHVSQLKKCLRVPEEQASPDQIEIQEDLTYVEKPTRILETSERKTRNKVIRFCKVQWSHHSEEEATWEREDELKATHPHLFASSSESRGRDSV

SEQ ID NO: 155720 - protein, 55 aa, Oryza sativa
  Clone ID: PAT_MRT4530_55458C.1.pep
MSRRLPPPRYKILRHCTARAAARAMAQVQARRPRGGECQGHQVVQPDGGDGDAER

SEQ ID NO: 155721 - protein, 114 aa, Oryza sativa
  Clone ID: PAT_MRT4530_55459C.1.pep
HGMRSIIEYRIVYLDIVCFFLIYASFAGFILRRGETVQKPRESSRKKRTTLGRLQEKRREWKMKTEYREQAEKDYGLLMALFSLGFFCPTCYPYIDFIKNFGQLWNCKLLVLFL

SEQ ID NO: 155722 - protein, 95 aa, Oryza sativa
  unsure (1)..(95): unsure at all Xaa locations
  Clone ID: PAT_MRT4530_5545C.1.pep
MARGSAARTQRRREAATSGDRSAAEGGGVAATRAAIAASKRLGGGXDRRRRPRRSSPARGTDGVPAADCYGGGVDGTARTTANVMTSTARLGTAA

SEQ ID NO: 155723 - protein, 441 aa, Oryza sativa
  unsure (1)..(441): unsure at all Xaa locations
  Clone ID: PAT_MRT4530_55460C.1.pep
MDEVGCRWTFSRANEGYTSCGPVVEMSYXQRVGALLLGAQFCLPVPGIPAVGGIGSVLLSKARMGWKLCHVFRPYTVVVDCLTTKMWNGWPGLAWDELGPRXSGCQFGLNHRRPWVKAVLDGQVSEEEDIVSCLSKLQKAVGSVSAAKEAVKPAVKQDKRLRSVKVLSLVSNLSLPFVFPLSLSKSLQQMADNEKGNKVRSQDIGTLSSRVNEAPDTSCVTLVQHLINQNRLLIEILQQHQTPILNLSQIQPQVQLEAVQALTPQVSMPPASRRTHGDVPHVDPKEASNICFMCDEQGHYARERPQQKRKTPMRTEDEVRKMIITSTEWPPPGMTRRQRRNTFRGAPQLTEHLLANGGRVSDSEDSDQVSSDDEDEMECKACSRCGEIGHCRDTCGSTVVLCNRGPSLILIVPEVRLTKPNHAPRAQPKAILGVLNRGGER

SEQ ID NO: 155724 - protein, 188 aa, Oryza sativa
  unsure (1)..(188): unsure at all Xaa locations
  Clone ID: PAT_MRT4530_55461C.1.pep
HEGGIGSLTIMSPGQLKELALXGLEASGHPFLXXVVRPGLAGNLPTSFLDATMGQGKGIVVEWAPQEQVLAHPAVGCFVTHCGWNSTVESIRNGVPMLCWPYFTXDQFTNQIYICDIWRIGLKMVQTCGEGIVTKEIMVERLKELLLDEGIKERVQRLKEFAETNMSEEGESTSNLNAVVELMTRPMS

SEQ ID NO: 155725 - protein, 614 aa, Oryza sativa
  Clone ID: PAT_MRT4530_55462C.1.pep
MARTMGSTPTYCSYQTNGVGALKQSPHMQFQQSYNYGVRFLKRDTLSVRINKHMAKRIATSTGICTKPRRSHMPIVCSAGMTIIFIATECHPWCKTGGLGDVLGGLPPALAVNILCHAMGHRVMTIVPRYDQYKDAWDTNVLVEVNIGDRTETVRFFHCYKRGVDRVFVDHPMFLEKVWGKTGPKLYGPTTGDDYRDNQLRFCLLCLAALEAPRVLNLNNSEYFSGPYGENVVFVANDWHTGVLPCYLKSIYQAKGMYVNAKVAFCIHNIAYQGRFAREDFELLNLPDSFLPSFDFIDGHFKPVVGRKINWMKAGITECDLVMTVSPHYVKELASGPDKGVELDGILRTKPLETGIVNGMDVYEWNPATDQYISVKYDATTVTEARALNKEMLQAEVGLPVDSSIPLIVFVGRLEEQKGSDILIAAIPEFVEGNVQIIVLGTGKKKMEEELILLEVKYPNNARGIAKFNVPLAHMMFAGADFIIVPSRFEPCGLIQLQGMRYGVVPICSSTGGLVDTVKEGVTGFHMGLFNVECETVDPVDVTAVASTVKRALKQYNTPAFQEMVQNCMAQDLSWKGPAKKWEEVLLGLGVEGSQPGIEGEELAPLAKENVATP

SEQ ID NO: 155726 - protein, 1441 aa, Oryza sativa
  Clone ID: PAT_MRT4530_55463C.1.pep
METRNGSRDSNNASGSEKPINGARANSASDNSPSPPPENPTIAQVLDNQTQMMTMMMQQMQQQYHQVLQQVQQQAQLQQQNLQFGPPPPQSKLLEFLRVKPPTFSSTTNPIEAHDWLHAIEKKLNLLQCNEQEKVAFATHQLQGPASIWWDNYMVTRPAGAEVTWTEFRHSFNKAQVPEGIVAQKKREFRSLQQGTRTVIEYLHEFNRLARYAPEDVRTDAERQEKFLSGLDDELTNQLISRDYEDFEKLVDKAIRQEEQCNKMNRKRKAAQFRTPQGKCQKPRFTMGHQGGPSTMIIRQHRPYHPGNFNKNNNSGSHSSLNPTPSPLMIPAQSDQSDQLAQPALPEQPKRLGEKPELCFNCNKPGHTVGKCPKPRRAGPKFVQARVNHASAEEAQSAPEVILGTFPVNSTPAVILFDSGATHSFISKRFAGAHGLSLVKLKIPMRVHTPGGGMTTTHYCPSVTVEIQGLIFPANLILLESKDLDVILGMDWLTRHRGVIDCASRTIKLTNAKGEVVTFQSLVPRKPGISLNQVAGEEQEVAVEKTTKKLEDIPIVREYPEVFPDDLTTMPPKRDIEFRIDLVPGTAPIHKRPYRMGASELAEVKKQVDEQLQKGYIRPSTSPWGAPVIFVEKKDKTKRMCVDYRALNEVTIKNKYPLPRIDDLFDQLKGATVFSKIDLRSGYHQLRIREEDIPKTAFITRYGLFECTVMSFGLTNAPAFFMNLMNKVFMEFLDKFVVVFIDDILIYSKSEEEHEQHLRLVLEKLKEHQLYAKFSKCDFWLKEVQFLGHIVNAQGVAVDPANVESVTKWTPPRTVTQDGKVVSYASRQLRPHEGNYPTHDLELAAVVHALKIWRHYLIGNRCEVYTDHKSLKYIFTQPDLNLRQRRWLELIKDYDMGIHYHPGKANVVADALSRKSYCNVAWVEQLCCEVQRDLEHLNLGIVEHGFVAALEAQPTLVEQVRIAQASDPEIAELKKNMRVGKARGFVEDEQGTIWMGERLCVPENKELKDLILTEAHQTQYSIHPGSTKMYQDLKEKFWWVSMRREIAEFVALCDVCQRVKAEHQRPAGLLQPLQIPEWKWEEIGMDFITGLPRTSSGHDSIWVVVDRLTKVAHFIPVHTTYSGKKLAELYLSRIMCLHGVPKKIVSDRGSQFTSKFWQKLQEELGTRLNFSTAYHPQTDGQTERVNQILEDMLRACALDFGGAWDKSLPYAEFSYNNSYQASLQMAPFEALYGRRCRTPLFWDQTGERQLFGTEVLNEAEEKVRAVRERLRIAQSRQKSYADNRRRELVFQVGDYVYLRVTPLRGVHRFQTKGKLAPRFVGPYRILERRGEVAYQLELPSNMLGIHNVFHVSQLKKCLRVPEEQASPDQIEIQEDLTYVEKPTRILETSERKTRNKVIRFCKVQWSHHSEEEATWEREDELKATHPHLFASSSESRGRDSV

SEQ ID NO: 155727 - protein, 1466 aa, Oryza sativa
  unsure (1)..(1466): unsure at all Xaa locations
  Clone ID: PAT_MRT4530_55464C.1.pep
METRNGSRDSNNASGSEEPIDGARANGASDNNPSPPPKNPTIAQVLDNQTQMMTMMMQQMQQQYHQVLQQVQQQAQQQQQNLQFGPPPPQSKLLEFLRVKPPTFSSTTNPIEAHDWLHAIEKKLNLLQCNEQEKVAFATHQLQGPASIWWDNYMVTRPTGAEVTWTEFCHSFNKAQVPEGIVAQKKREFRSLQQGTRTVIEYLHEFNRLARYAPEDVRTDAKRQEKFLSGLDDELINQLISRDYEDFEKLGKSQKPRSTMGHHGGPSTMIIRQYRPYHPGSFNKNHHSGSHNNREQHSLNPTPSSLKIPAQSVQPALPEQPKRLGEKPELCFNCNKPGHTVGKCSKPRRAGPKFVQARVNHASAEEAQSAPEVILGTFPVNSTPAVILFDSGATHSFISKRFAGAHGLSLVKLKIPMRVHTPGGGMTTTHYCPSVTVEIQGLIFPANLILLESKDLDVILGMDWLTRHRGVIDCASRTIKLTNAKGEVVTFQSPVPQKSGISLNQAAGEEQEVAVEKTTKKLEDIPIVREYPEVFPDDLTTMPPKRDIEFRIDLVPGTAPIHKRPYRMGANELAEVKKQVDEQLQKGYIRPSTSPWGAPVIFVEKKDKTKRMCVDYRALNEVTIKNKYPLPRIDDLFDQLKGATVFSKIDLRSDYHQLRIREEDIPKTAFITRYGLFECTVMSFGLTNAPAFFMNLMNKVFMEFLDKFVVVFIDDILIYSKSEEEHEQHLRLVLEKLKEHQLYAKFSKCDFWLKEVQFLGHIVNAQGVAVDPANVESVTKWTPPRTVTQVRSFLXLAGYYRLFIENFSKIAKPMTQLLKKEEKFIWSAECNRSFEELKRRLVSAPVLILPDQTKDFQVYCDASRQGLGCVLMHDGKVVSYASRQLRPHEGNYPTHDLELAAVVHALKIWRHYLIGNRCEMAPFEALYGRRCRTPLFWDQTGERQLFGTEVLNEAEEKVRAVRERLRIAQSRQKSYADNRRRELVFQAGDYVYLRVTPLRGVHRFQTKGKLAPRFVGPYRILERRGEVAYQLELPSNMLGIHNVFHVSQLKKCLRVPEEQASPDQIEIQEDLTVSPLPVRASASPVIAAVFILRAGRRAHSEELLSSILPSVPHALPLPALAIAFVRRRRSVRRPPPPPTPLVAVTGDRMPPPFAMLAGRLEAEAEPGTGGEGGRDGVGSAGVSGCPAAGFTAAQEGTAHCLLRGGASHGLLVHQMNVKTAFLNGELEEEIYMDQPDGYVLEGQEGMVCKLLKSLYGLKQAPKQWHEKFDNTLTYVGFVVNEADKCVYYRYGGGEGVILCLYVDDILIFGSSLNVIEEVKDFLSKSFEMKDLGVADVILHIKLLRGDEGGITLVQSHYVDKVLSRFGYSDCKAAPTPFDPTRLLCIIFTNMLTTGDNNNTRDKEKELPVNTNGGNTVSNSSGGPFSGQQQLRWRGSVWGGGATGKAAEQVVGGPGEVGEEEAAWMVG

SEQ ID NO: 155728 - protein, 1658 aa, Oryza sativa
  unsure (1)..(1658): unsure at all Xaa locations
  Clone ID: PAT_MRT4530_55465C.1.pep
MAKVVVTTTGGEVEDDGEAEDLSLGFFSFKVIGSYVSPREGGKYMPRRANVIFTEAQEAHGGGLMGHFGAKKTEDVLAMHFFWPRMRKDVERTKRGRDSIFVVVDRFSKMAHFIPCHKSDDAVHIADLFFHEIVRLHGMPCTIVSDRDAKFLSHFWCTLWNKLGTKLLFSTTCHPQTDGQTKIVNRTLDTMLRAILKKNLKMWEECLPHVEFAYNRATHSTTKVSPFQVVYGFNPRAPIDILPLPTSERIHNDAKARAEFILKMHESTKFNIEKMTEKYRIAGSKGRQEVKFEPGDLVWLHLRKDRFPELRKSKLMPRVDGPFKIVEKINDNAYKLELPPEFGVSPTFNISDLKPYLGEKDELESRTTSIQEGEDDADITTSDTHSNPPTVIQGPITRARARQLNLEGTRRHLEKDLEPWRIIGEVQVKVEAQTKSTSGAIRSPGPVCTKTGTQGIAFSARSSAFRHGTFRKIGNPSAHHLHNMFPFERYMGVLKKYVCNRARPEASISMGYGIEEMVKTRNGSRESNNASGSEEQISGARASDASSSSSSPPPENPTIAQVLDNQTQMMTMMMQQMQRQHHQPPIFSSTTNPIEANDWLHAIEKKLNLLQCNDREKVAFATHQLQGPASVWWDNYMVTSPAGTKVTWSEFCQNFNKAHVPEGIVAQKKREFRSLQQGTRTVIEYLHEFNRLARYAPEDVRTDAEKQEKFLFGLDDELTNQLISRDYEDFEKLVDKAIHQEEQCNKMNRKRKISQFSQLCQXQPEQPQRFGGKPKLCFNCNKPGHXLESVNHAYAEEAQSAPEVILGTFPINSTPAVILFDSGATHSFISKRFAGAHGLSLVKLKIPMRVHTPGGGMTTTHYCPSVTVEIQGLIFPANLIFLESKDLDVILGMDWLTRHRGVIDCASRTIKLTNAKGEVAAGEEQEVAVEKTTKKLEDIPIDREYPEVFPDDLTTMPPKRDIEFRIDLAPGTAPIHKRPYRMGANELAEVKKQVDEQLQKGYIRPSTLPWGAPVIFVEKKDKTKRMCVDYRALNVVTVKNKYPLPRIDDLFDQLKGATVFSKIDLRSGYHQLRIREEDIPKTAFITRYDKFVVVFIDDILIYSKSEEEHKQHLRLVLEKLKEHQLYAKFSKCDFWLKEVQFLGHIVNAQGVAVDPANVESVTKWTPPRTVTQVRSFLRLAGYYRRFIENFSKIAKPMTQLLKKEEKFIWSAECNRSFEELKGRLVSAPVLILPNQTKDFQDGKVVSYASRQLRPHEGSYPTHDLELAAVVHALKIWRHYLIGNRCERRWLELIKDYDMGIHYHPGKANVVADALSRKSYCNVTWVEQLCCEVQRDLEHLNLGIVEHGFVVALEAQPTLVEQRVKAEHQRPAGLLQPLQIPEWKWEEIGMDFIMGLPRTLSGHDSIWVVIDRLTKVAHFIPVHTIYSGKKLAELYLARIMCLHGVPKKIVSDRGSQFTSKFWQKLQEELGTRLKFSTAYHPQTDGQTERVNQILEDMLRACALDFGGAWDKSLPYAEFSYNNSYQASLQMEPFEALYGRKCRTLLFWDQTEERQLFGTEVLNEAEEKVRAVRESLRIAQSRQKSYVDNRRRELVFETGDYVYLRVTPLXGVHRFQTKGKLEPRFVGPYRILERRGEVAYQLELPSNMLGIHNVFHVSQL

SEQ ID NO: 155729 - protein, 1535 aa, Oryza sativa
  unsure (1)..(1535): unsure at all Xaa locations
  Clone ID: PAT_MRT4530_55466C.1.pep
METRNGSRDSNNASGSEEPINGARANGASDNSPSPPPENPTIAQVLDNQTQMMTMMMQQMQRQYHQVLQQVQQQAQQQQQNPQFGPPPPQSKLLEFLRVKPPTFSSTTNPIEAHDWLHAIEKKLNLLQCNEQEKVAFATHQLQGPASIWWDNYMVTRPTGAEVTWTEFRHSFNKAQVPEGIVGQKKREFRSLQQGTKTVIEYLHEFNRLARYAPEDVRTDAEKQEKFMSGLDDELTNQLISRDYEDFEKLVDKAIRQEEQCNKMNRKRKAAQFRTPQGKCQKPRYTMGRHGHQGGPSTMIIRQHRPYHPGSFNKTYNSGSHNYSEQHSLNPTPSPLMTPAQSDQSDQLAQPALPEQPKRLGEKPELCFNCNKPGHTVGKCPKPRRAGPKFVQARVNHASAEEAQSAPEVILGTFPVNSTPAVILFDSGATHSFISKRFAGAHGLSLVKLKIPMRVHTPGGGMTTTHYCPSVTVEIQGLIFPANLILLESKDLDVILGMDWLTRHRGVIDCASRTIKLTNAKGEVVTFQSQVPQKPGISLNQAAGEEQEVAVEKTTKKLEDIPIVREYPEVFPDDLTTMPPKRDIEFRIDLVPGTAPIHKRPYRMGANELAEVKKQVDEQLQKGYIRPSTSPWGAPVIFVEKKDKTKRMCVDYRALNEVTIKNKYPLPRIDDLFDQLKGATVFSXKIDLRLGYHXLRIREKDIPKTTFITRYGLFECTVMSFGLTNAPAFFMNLMNKVFMEFLDKFVVVFIDDILIYSKSEEEHEQHLRLVLEKLKEHQLYAKFSKCDFWLKEVQFLGHIVNAQGVAMDPANVESVTKWTPPRTVTQVRSFLGLAGYYRRFIENFSKIAKPMTQLLKKEENFIWSAECNRSFEELKRRLVSAPVLILPDQTKDFQVYCDASRQGLGCVLMQDGKVVSYASRQLRPHEGNYPTHDLELAAVVHALKIWRHYLIGNRCEVYTDHKSLKYIFTQPDLNLRQRRWLELIKDYDMGIHYHPGKANVVADALSRKSHCNVAWVEELCCEVQRDLEHLNLGIVEHGFVAALEAQPTLVEQQVRIAQASDPEIAELKKNMRVGKARGFVEDEQGTIWMGERLCVPKNKELKDLILTEAHQTQYSIHPGSTKMYQDLKEKFWWVSKRREIAEFVALCDVCQRVKAEHQRPAGLLQPLQIPEWKWEEIGMDFITGLPRTSSGHDSIWVVVDRLTKVAHFIPVHTTYSGKKLAELYLARIMSLHGVPMKIVSDRGSQFTSKFWQKLQDELGTHLNFSTAYHPQTDGQTERVNKILEDMLRACALDFGGAWDKSLPYAKFSYNNSYQASLQMAPFEALYGQRCRTPLFWDQTGECQLFGTEVLNEAEEKVRAVRERLRIAQSRQKSYADNRRRELVFQAGDYVYLRVTPLRGVHRFQTKGKLAPRFVGPYRILERRGEVAYQLELPSNMLGIHNVFHVSQLKKCLRVPEEQASPDQIEIQEDLTYVEKPTRILETSERRTRNKVIRFCKVQWSHLSKEEATWEREDELKAAHPHLFASSSQSRGRDSV

SEQ ID NO: 155730 - protein, 39 aa, Oryza sativa
  Clone ID: PAT_MRT4530_55467C.1.pep
ADEGSSVISDFAEYVFKEEDYPVVDYVLVFHVVKSTTTR

SEQ ID NO: 155731 - protein, 141 aa, Oryza sativa
  unsure (1)..(141): unsure at all Xaa locations
  Clone ID: PAT_MRT4530_55468C.1.pep
MPEVVVARPTAHGWRKGRLGKFRQGGWRGRRGTAVFRRNRGQAGVEGDAAMSTKDTATSADARARRSGRLKAVQWRQRHCFAGEDASPGVSARNGGQAGGEEAAVTTGKATAQPAGALTRRXGRLEAAGAGEREGRPRGGV

SEQ ID NO: 155732 - protein, 72 aa, Oryza sativa
  unsure (1)..(72): unsure at all Xaa locations
  Clone ID: PAT_MRT4530_55469C.1.pep
FMTHXYHSHPIPPCRRQHRPDPLFGQYVSAGECLHGLSGHPTMIGMMIRLIYLDKAAYTADAKYLIDEESIL

SEQ ID NO: 155733 - protein, 205 aa, Oryza sativa
  unsure (1)..(205): unsure at all Xaa locations
  Clone ID: PAT_MRT4530_5546C.1.pep
MTVGTAGSPSPWGSATSGDLQAFMTRHFESRCRFAICRREGSQTNNRLGPRPYCARKPRGXPDTTPANPHVSRHQGSRGGIGRGRPVPSSAELAPTWRLRGGHVGWQEVDDXPAANERRATAASGRAGHGDTGEGEHAGRXYGTRGDEPTARIRRRLLGGGGLRRRQPAAGEEGNGDEATRGRSPAVRAFRSSGGDGSEHMASNG

SEQ ID NO: 155734 - protein, 58 aa, Oryza sativa
  Clone ID: PAT_MRT4530_55470C.1.pep
KRGFHIFNSHIPHQTAYCNIIFHSYIYYYRVQVIHMHKQTMPLRNKDQSQSYNTQNKL

SEQ ID NO: 155735 - protein, 135 aa, Oryza sativa
  unsure (1)..(135): unsure at all Xaa locations
  Clone ID: PAT_MRT4530_55471C.1.pep
MKPWLRRRAQSIVVLGHVDCGKATTKGHLIYKLGGINKRVIERFEKDTADXMNNKSFKHAWVLXDKLKAERERGMTINIALWKVETTKDYWTVIDAPENGDFIKNMITGTSHADCAVLMIDSTNGGFEAGISKDS

SEQ ID NO: 155736 - protein, 48 aa, Oryza sativa
  Clone ID: PAT_MRT4530_55472C.1.pep
MEKRLSSEKPEKGQQYSLLLQLPLVGDIPDLGLIDGDVDLSGTFLAWG

SEQ ID NO: 155737 - protein, 77 aa, Oryza sativa
  Clone ID: PAT_MRT4530_55473C.1.pep
SDDRQRSGLDAISDIYSILRDEAARTNSMDVRYAHALNLISRKGYSEAQLKECLEEYASLNVWQIHPNTFDIHFIDA

SEQ ID NO: 155738 - protein, 381 aa, Oryza sativa
  Clone ID: PAT_MRT4530_55474C.1.pep
MASWEEMASWEEQLRDELAARDLAVASVPGKGRGLFAARSFFPGEVVISQEPYASTPNKISVGSNCDNCFASRNLRKCSVCRVAWYCGSACQREEWKLHQLECRAIAALTEDRKKMLTPTIRLMVRLVLRRKLQDDKMANLVQLILPSFELDLKEITHTFSKFACNAHTICDPELRPLGTGLYPVLSIINHSCVPNAVLIFEGRTAYVRALQPISKNEEDSEEDALLEGYRCNDQKCDGFLLPNAVDNSEVGSMYKTIEELERKLYHPLSITLLHTRETLLKIYMELQDWQTALMYCRLTIPVYERIYPPFHPMIGLQFYTCGKLEWLLEYTEDALMSLTRAADILRITHGTKSEFMKELLGKLEEVRAEASFRLSAGDEQ

SEQ ID NO: 155739 - protein, 597 aa, Oryza sativa
  Clone ID: PAT_MRT4530_55475C.1.pep
MSQPAAVAAGAAAGQQPQGRAQAARQAGGGLGQTIAGIVRMAVFWYFAAKFFGPKRPPAEPGMLMSNLFQKGEPLDMWMYLSENEKFNDFSNEDALVWHEANIPYAVWGPTSTRTHTLTYYPSEAIKNNGSLYAHVYFARSGYPVDPTDPEYEQSSAFGRTHPVVAYLRKPKDGKKKSLLGDSSESNEQPPPKENKDSVDKDEGPVEYISYWKPNVTINLVDDFTRNTDLNVDPSSNNYYPTVFFNEFWLLRDKLIALNETVEELPLNLEVGPISMTKWQIFLQMEQSFQVHRSYGSMLEGEADELKRVFLEGNPYFLGLTMIVSLFHSLFDFLAFKNDIQFWNKNKSMEGLSAKSVVLNFVCQLIIFLYLLDNETSWMILGSSGIGVCIEFWKIGKAMHVEIDRSGKIPMLRFRDRESYAQNKTKEYDAIAMKYLTYVLLFLVFCFSIYSLKYEKHKSWYSWILSSLTSCVYMFGFIMMCPQLFINYKLKSVAHMPWRQMTYKFLNTIIDDLFAFVIKMPMLHRLSVFRDDVIFLIYLYQRWVYPVDKKRVNEYGFGGEDEPQAPQTLEGSDPAAASQQAGAEAEAETSTEDKKTK

SEQ ID NO: 155740 - protein, 150 aa, Oryza sativa
  unsure (1)..(150): unsure at all Xaa locations
  Clone ID: PAT_MRT4530_55476C.1.pep
DAWVVAYLRKPKDGKKKSLLGDSSESNEQPPPKENKDSVDKDEGPVEYISYWKPNVTINLVDDFTRYPHNNVPPNVAPYLNVDPSSNNYYPTVFFNEFWLLRDKLIALNETVEELPLNLXEVGPISMTKWQIFLXMEQSFQVHRSYGKIV

SEQ ID NO: 155741 - protein, 130 aa, Oryza sativa
  unsure (1)..(130): unsure at all Xaa locations
  Clone ID: PAT_MRT4530_55477C.1.pep
NSRIEFQEKRALKPLSRSGQGILDSTDEAYSSEKPPSEAYLNSEGWEIEQDSVLPTVLSKSYQNGGNFDDYLETLAMSAQGGAYMRAPHVIGSGTPXSTVDRVHGIGRGDRHVAHTWRRRGGHVGLPRGR

SEQ ID NO: 155742 - protein, 170 aa, Oryza sativa
  unsure (1)..(170): unsure at all Xaa locations
  Clone ID: PAT_MRT4530_55478C.1.pep
SISHLSHSFRHGRLPPPLPERPRPPPTAAAAVLRLLPALQRLLPPLLLLLLPXPPTATSPPRAPAALRPTATGGSRSTXTAPPPPLPPPPRLALPPPPGRRDGYLGGGGAGGGGGGGGSGGMWCFSDPEMKRRRRVASYKAYSVEGKMKASLRRGLRWFRXKCSEIFHGW

SEQ ID NO: 155743 - protein, 179 aa, Oryza sativa
  Clone ID: PAT_MRT4530_55479C.1.pep
MSKKIVVKLNVHDKAEKQKAMKAVSALIGIDELSMDMASQKMTVIGMVDPVNVVSKLRKSWAATIESVGPAKEPEKKEEKKDGGGDGKKDGGGDGKKEGEAGDKKDGDAAKKDGDKDGEAKKEDGDKKPAAPTEQQLFAELMNQYYHRPAAYGYNPYMSVPPHYVVQSMEENPNSCAIC

SEQ ID NO: 155744 - protein, 360 aa, Oryza sativa
  Clone ID: PAT_MRT4530_5547C.1.pep
MASTSQARGWSSLPTDVLVLILGSLRWSSHPSVALVCRHWRSAASLCPFYPAWITPLLLNTAEVGTANIRYYSPYYDKNFEVDDTLKVPGAKICCSTGRHLKMCADKALVYDIDLVTGALVEVLPQEPYMLFNFVVSDRDDERLFGVKATITIKVASSIRHTSDEWEGWKSTENHLYCPRLRASPVTNPVLHNGLLYLLAQDGKLVVYNPCRPDEGFEILNKPNGFGFKCEDSYLVESNKDALTAGDRPLVASSPFPSSPAAGCRRRNPPPPSNLRRIRAVGSSPLVPYYRPACSPSPVSPWPALPLAAVARRSFAAGRRLPPASPRGRHVGATSAPARLSSGRADPGRSLPVRAFHRKP

SEQ ID NO: 155745 - protein, 607 aa, Oryza sativa
  Clone ID: PAT_MRT4530_55480C.1.pep
MENGAGAGDDEYTRDGSVDLRGNPVLRSKRGGWKACSFIVVYELFERMAYYGIASNLVIYLTEKLHQGTVEAANNVTNWSGTVFITPLIGAVVADAWLGRYWTFVAGSAVYLMGMLLLTLAVSVPALKPPPCDGGGGAACPRASALQLGVYFGGLYTIPPADGGPTPSFLSLAADQLDDLPRSEARYRYKVESYGDDRHSPVILFSTTVLVYLQDNVSWTVGYGIPTLGLMVSVAVFLSGTPLYRHKVPQGSPLATMGRVVAAAVWKWRVPLPADSKELHELELEHYTTRRGFRMDATVSMAFLNKAAVKPGEGGGGSVARLPGWTLCTVTQVEETKQIVKLVPLLATMVVPCTLVAQAGTLFVKQGVTLDRRIGKFHVPPASLGAFVTATMLICIVLYDRFLVPAVRRRTKNPRGITLLQRISLGMLLQIVTMVVTSVVESQRLGYARRHGLVATGGQLPVTIFILLPQFVLLGVADAFLVVGQIEFFYDQAPESMKSLGTAMSLTAYGAGNLLSSAILAAVERVTGGGKGRTPWVTNNLNASRLDYYYAFLATLAAANLLAFVVLSCKYSYRVESTETIDVDVAMDDVAQGGGVVTVKSEAAPMA

SEQ ID NO: 155746 - protein, 260 aa, Oryza sativa
  Clone ID: PAT_MRT4530_55481C.1.pep
FFIELINKSMIQRIEDTYYLGTISGCHIHDMVLDLIRMSAKEENFVKILDRAHEEHNSSSHCRSVRRLALHKSWNQHKNNNPAMGMEQQLRSFNAIECPISMIPLPARFQVLRVLALEGCDVTGGCKLKHLGKLLQLRYLGLRNTRVVELPSKTLRDLVHLQVLDVRDTDLVALPATVSELSQLMALRSNGSTRMLASVGKLTFLQQLQLSLSAESLRSFALELCKLTDLRMLELDIDVFGIEMVERTASLGALVESIHT

SEQ ID NO: 155747 - protein, 616 aa, Oryza sativa
  unsure (1)..(616): unsure at all Xaa locations
  Clone ID: PAT_MRT4530_55482C.1.pep
MDEVGRRWTFSRANEGYTSCGPVVEMSYGGGLVPNARGSVLPACPGXIPAVGRIGSVLLSKARMGWKLCHIFTTGSKAMECGVKMCLVGWPGLAWDELGPRSGCQFGPNHRRPWVKAVLDGQVSEEEDIVSCLPKLRKTAGSASEMEEVVKPAVHNSXRRLRSVKVLSLVSNLSLPFVFPLSLSKPLQQMADNEKGNKVRSQDIGTSSSRVNEAPDTSCVTLVQHLVNQNRLLIEILQQHQTPILNLSQIQPQVQLEAVQALTPQVSAPPTSQKAPHAMPHVDPKEASIICFMCDEQGHYARNCPQQKRKAPMRTEDEVRKMIITSTEWPPPGMTRRQRRNTFRGATQLTEHLLANGGRVSGSEDSDQVSSDDEDEKSPQGFNQNKIELKACSRCGEIGHVASSCASTCVHCEEDHPPDRCPTSRITCFFCEGTDHVPKDCQFSFLLTKKMANQPASSNGEKHQGNTNPRQDYSFSLTPVPGQRNRNEKRKCRVREDICCFNCQGMGHFADKCPKPRNIAASTSVHATPCNQKLAPQRIVIHASRSSPIARVATAPTPASALPQGVNAQFQPQPSVDKTEASIGIVPLDVPAQQPRNQVQDEEPKRKKVIYNGSTC

SEQ ID NO: 155748 - protein, 98 aa, Oryza sativa
  Clone ID: PAT_MRT4530_55483C.1.pep
MANHGAAALAIIASLLVAVTLADARLTAHHGYVVVEDVKAPVPALTCNKVHGVQASETCFSVSQSAGLTQDQFLAFNPNINCAKVFVGQWVCLDAAAA

SEQ ID NO: 155749 - protein, 419 aa, Oryza sativa
  Clone ID: PAT_MRT4530_55484C.1.pep
MWGPAVSRPRPRVRLTRGTHGAGRRKPRAPGPPWTHLGHIRTGLRASVAKHYRTSTCLVGKAYFVAQSGRGQKYTDRDGQSWGPMDISRANEGYTSCGPVVEMSWHRAGVLLLGAQSCLPVSEVPAVGGVGSVLLSMARMGWKLCHVFRPYAVVVHGYVGTYLANMVVEASGGTTDHACQEAAYLMMARLWERHNYIFCNTAYRFHPRRASGDDVSTFRPTAGENDTTFGHMCAVMRVMDRMHSDLRKASKALNDGKLVRIIALKDEIARLKKENAQLKGLPIPGGVRIRNTPRKSTTAPVRIQLVPRNPPPPAVPAVPTVPAAPAAPAPVPAPVPVSAPASALSFAPASAVRGPASGNGGWLPATPSGNRDHSSSSSSGSELCSGETYLPDSRSRSEGPGDEQEDAFDSTDRRSRSEH

SEQ ID NO: 155750 - protein, 519 aa, Oryza sativa
  Clone ID: PAT_MRT4530_55485C.1.pep
MEMEDVGGRWTSVPGVPAVGGIGSVLLSMARMGWKLCHVFRPYTVVLKCGMVGLGWLGTSWDPGSGCQFGLNHRRPWVKAGLPFSSFFKFQLVLDGQMFNREKGKNVSGYASSNSSFQLNPPLASRELTRAHPWSIPSMLLGSQLPLVGSQDQNQYVFDRAFATQVDELPMPEEDVPFCHDCREQGHYALNCPWVYAKEAPSFGLAGQASLNQPPRTKSSLQPSVPSREPNGENPLNPENCFPPSLSYHVGSRTKQAKGKKSKNQKRKAPMRTEEEVRKMTITSTEWPPAGITIPRHQRGNTFRGARQLTQHLLSHGGRVSDSEGSDQVSSDDEDESPRHLGEEEMESKACTRCGEIGHVASMCLTLCPHCEEDHPPGECPTRKVTCFLCEGTNHVPKDCQLSVLLTKTAEIQRTTLRLSHQLVSSNSNIDNIIHNTNAPPAPPDSAINHSNNTFSTNHSLHRQPQQRIVVDGRSCVSPRPTPGRAKGNQSQEGDTKQKTVLLASNSRSSWHSESRKAW

SEQ ID NO: 155751 - protein, 1804 aa, Oryza sativa
  unsure (1)..(1804): unsure at all Xaa locations
  Clone ID: PAT_MRT4530_55486C.1.pep
VRRVALYVVRRRACAPEPPPEVTSPLTSSGPSAIPTFPESPFSQEKNLKSSXASKATPGLEWYIPDLEIDLYSRXGCSEWLGLYNRMPRYKPEYLFGVEGFVQELRTMSFVIGFGTAPFYAQIPHDRHEEKCRVKVTLNSNSEDIPSVMFEAGGRNYIHACQEVARIAIGELRDRYSDRLADTEYRYHPRQPQGSDRGSYLKTEGIENDATTRHLVEMLWAMDESRAETVLAAQDREDRNRGKICKLEDKVDRLEKELAALKGEAPLQKARVRLTARKRALFVPRYQLAPKMVLTRSNRNGPNNNNNNNNGENPTLAQVLAQQAQLMNMMMQQLQNQQNQLNQGNNHAPPQNKLAEFLRVRPPIFSSTTNPVEAGDWLHAIEKKLDLLQCTDQEKVSFASHQLHGPASEWWDHFRLNRTTAEPITWLEFTAAFRKTHIPSGVVSLKKKEFRSLTQGSRSVTEYLHEFNRLARYAPEDVRTDEERQEKFLEGLNDELSYPLMTGDYPDFQKLVDKAIRQEDKYNRMEQKKRRIAQFKTQQENNQKPRLTLGPQSMPQGGSSSVVRPQRQFFNNNAGNNIHNQAPRPVAASTQQQPVKREQGSKPVVCFNCGDPGHYADKCLKPRRVKVVPAQSNSTAPASKARVNHVAAAEAQDAPNVILGTFFVNSVPATVLFDSGATHSFLSMSFAGNHGMEVEDLRRPLMVSTPSNQALSLQRSPSVRIEIQGVPFLANLILLESKDLDVILGMDWLARHKGVIDCANRKVTLTSNDGRVVTVHALSSESLRSRLNQITLKEIPIVREYPDVFPDDLPGMPPKRDIEFRIDLVPGTTPIHKRPCRMAANELAEVKRQVDDLLQKGYIRPSSSPWGARVIFVEKKDHTQRMCVDYRALNDVTIKNKYPLPRIDDLFDQLKGATVFSKIDLRSGYHQLRIKEEDIPKTAFTTRYGLFECTVMSFGLTNAPAFFMNLMNKAFMEYLDKFVVVFIDDILIYSRTKEEHEEHLCLALEKLREHQLYAKFSKCEFWLSEVKFLGHVISAGGVAVDPSNVESVTNXKQPKTVSEIRSFLGLAGYYRRFIENFSKIAKPMTRLLQKDVKYKWSEECEQSFQELKNRLISAPILILPDPKKGFQVYCDASKLGLGCVLMQDGKVVAYASHQLRPHEKNYPTHDLELAAVVHALKIWRHYLFGTRTEVYTDHKRLKYIFTQPDLNMRQRRXWELIKDYDRGIHYSPEKANVVAHTLSRKGYCNATEXRQLPLELCKEFERLNLGIVSRGFVAALEAKPTLIDQVREAQINDSDIQEIKKNMRRGKAIGFLEDEQGTVWLGERICVPDNKDLKDAILKEAHDTLYSIHPGSTKMYQDLKERFXWASMKREIAEYVAVCDVCQQVKAEHQKTAGLLQPLKIPEWKWEEIGMDFITGLPRTSSGHDSIWVIVDRLTKVAHFIPVKTTYSGSRLAELYMARIVCLHGIPKKIVSDRGSQFTSNFWKKLQEEMGSKLNFSTAYHPQTDGQTERVNQILEDMLRACALDFGGSWDKNLPYAEFSYNNSYQASLQMAPYEALYGRKCRTPLLWDQTGERQVFGTDILREAEEKVKIIQERLRVAHSRHKSYAXNRRRDLSFEEGDYVYLRVTPFRGVHRCHTKGKLAPRFXGPYKIVSRRGEVAYQLELPQSLAGVHNVFHVSQLKKCLRVPTEEANLEQIEVQEDLTYVEKPIRILETSERRTRNRVIRFCKVQWSNHSEEESTWEREDELNVGIKFDSDRVPSLRAASFLRRCRRRGPPPSPPSPFKRIPVLFSFRRHPRLRLSSPE

SEQ ID NO: 155752 - protein, 1661 aa, Oryza sativa
  unsure (1)..(1661): unsure at all Xaa locations
  Clone ID: PAT_MRT4530_55487C.1.pep
GLVGFFRDERPYKIWSYIQRLPGRPTPIHRLEDFLRQRRHRLRQSSSAVQPSAAVAAVAPAVRRRRSGRRRRSGRPPSGSPSRHRPRPPLRSRRRTPEHRRRRQPEDRRRFFFVAVAVRSSSAVALVAGRCAAVDCVMQGVLSQLLSXAPGLEWYIPGLEIDLYSRMPRYKPEYLFGVEGFVQELRTMSIAIGFGTAPFYAQIPHDRHEEKCRVKVTLNSNSEDIPSVMFEAGGKNYIHACQKVARIAIGELRDRYSDQLADTEYRYHPRQPQGKTVLAAQDREDRNRGKICKLEDKVDHLEKELAALKGEAPPQKARIRLTARKRALFVPRYQLAPKVRVVEKEVTPALADPPVVNMVLTRSNGNGPNNNNNNNNNNNGENPTLAQVLAQQAQLMNMMMQQLQNQQNQGNNHAPPQNKLAEFLRVRPPIFSSTTNPVEAGDWLHVIEKKLDLLQCTDQEKVSFASHQLHGPASEWWDHFRLHRTTAEPITWLEFTAAFRKTHIPSGVVSLKKREFRSLTQGSRSVTEYLHEFNRLAHYAPEEKLVDKAIRQEDKYNRMEQKKRRIAQFKTQQGNNQKPRLTLGPQSMPQGGSSSVVRPQRQFFNNNAGNNIRNQAPCPVAASTQQQPAKREQGSKPVVCFNCGDPGHYADKCPKPRRVKVVPTQGNSTAPASKARVNHVAAAEAQDAPDVILGTFLVNLVPATVLFDSGATHSFLSMSFAGNHGMEVEDLRRPMMVSTPSNQALSLQRSPSVRIEIQGVPFLANLILLESKDLDVILGMDWLARYKGVIDCANRKVTLTSNDGRVVTVYALSSESLRSRLNQITLEEIPIVREYPDVFPDDLPGMPPKRDIEFRIDLVPGTTPIHKRPYRMAANELAEVKRQVDDLLRKGYIRPSSSPWGAPVIXCGKERSYPKDVCGLSXLNDVTIKNKYPLPRIDDLFDQLKEEHEQHLRLALEKLREHQLYAKFSKCEFWLSEVKFLGHVISAGGVAVDPSNVESVTNWKQPKTVSEIRNFLGLAGYYRRFIKNFSKIAKPMTRLLQKDVKYKWSEECEQSFQELKNRLISAPILILPDPKKGFQVYCDASKFGLGCVLMQDEKVVAYASRQLRPHEKNYPTHDLELAAVVHALKIWRHYLFGTRTEVYTDHKSLKYIFTQPDLNMRQRRWLELIKDYDMGIHYHPGKANVVADALSRKGYCNATEGRQLPLELCKEFERLNLGIVSRGFVAALEAKPTLIDQVREAQINDPDIQEIKKNMRRGKAIGFLKDEQGTVWLGERICVPDNKDLKDAILKEAHDTLYSIHPGSTKMYQDLNEGFWWASMKREIAEYVAVCDVCQRVKAEHQKPAGLLQPLKIPEWKWEEIGMDFITGLPRTSSGHDSIWVIVDRLTKVAHFIPTDGQTERVNQILEDMLRACALDFGGSWDKNLPYAEFSYNNSYQASLQMAPYEALYGRKCRTPLLWDQTGERQVFGTDILREAEEKVKIIQERLRVAQSRHKSYADNRRRDLSFGEGDYVYLRITPFRGVHRFHTKEKLAPRFVGPYKIVNRRGEVAYQLELPQSLAGVHNVFHVSQLKKCLRVPTEETNLEQIEVQEDLTYIEKPIGILEIDERRTRNRVIRFCNVQWSNHSEEESTWEREDELKSAHPHLFASSSESRGRDSVKGG

SEQ ID NO: 155753 - protein, 60 aa, Oryza sativa
  unsure (1)..(60): unsure at all Xaa locations
  Clone ID: PAT_MRT4530_55488C.1.pep
MADLGRSTSDLAMLAKLSTDGALPLEQTMAREEGGTXPSPALVRMVVVEDFVRSGFLPPP

SEQ ID NO: 155754 - protein, 163 aa, Oryza sativa
  Clone ID: PAT_MRT4530_55489C.1.pep
MHPQVPSSFGLSHTNAPQHMLQRSMFHPGGNPQTSFLTGQPPLPNQPPPLPNQPPPQLYQCSSHAASHYNSQSMQMDRSTPWGRGNAEASSAGPHFPGHLPGLPGQMTQGIGGIHSARPEAPLTPEMEKMLVQQVLSMSPDQINMLPPEQRQQVLQLRDMLRQ

SEQ ID NO: 155755 - protein, 29 aa, Oryza sativa
  Clone ID: PAT_MRT4530_5548C.1.pep
WAAAHNERRTACFPMTDQFQSLQCFFTLQ

SEQ ID NO: 155756 - protein, 618 aa, Oryza sativa
  Clone ID: PAT_MRT4530_55490C.1.pep
MDISRTNEGYTSCGPVVEMSWHRAGVLLLGAQSCLPVPEVPAVGGIGSVLLSMARMGWELCHVFRPYTVVNKPNIHHNSKRLRSVKVLFLVSNLSLPFVFPLSLSKPLQQMADNEKGNKVRSQDIGTSSSRVNEAPDTICVTLVQHLINQNRLLIEILQQHQTPILNLSQIQPQVQLEAVQALTPRVSMPPASRRTHGDVPHVDSKEASIICFMCDEQGHYARECPQQKRKTPMRTEDEVRMTKRQRRNTFRGAPQLTEHLLANGGRVSDSEDSDQVSSDDEDEMERKACSCCGEIGHVASSCATTCVHCEEDHPPDRCPTSRITCFFCEGTDHVLKDCQFSFLLTKKMANQPASSNGEKHQGNTNPRQDYSFSLTPVPGQRNQNEKRKCRVREDICCFNCQGMGHFADKCPKPRNIAASTSVHATPCNQKLAPQRIVIHASRSSPIARVATAPTPASALPQGVNAQFQPQPSVDKTEASIGIVPLDVPAQQPRNQVQDEEPEPPTILCTDSLSKELSSMEEVVSLPDLLQAEQRAINLRRAIPSRRPLFASTSNQKEASPVNDSNMQSYHIITEPIKDDAVTRTMPAIPLQNQNEQPRLWFSVRYLSLRNRKFAAIM

SEQ ID NO: 155757 - protein, 469 aa, Oryza sativa
  unsure (1)..(469): unsure at all Xaa locations
  Clone ID: PAT_MRT4530_55491C.1.pep
MDEVGLRWTFSRANEGYTSCGPVVEMSWHRAGVLLLGGSILPACPGGSGRRXGVGSVLLFMARMGWELCHVFRPYTVVMFNREKGKNVSGYASSNSSFQLNPPLASRELTRAHPWSIPSMPLSSQLPLVGSQDQNQYVFDRAFATQVNELPMPEEDVPFCHDCREQGHYALNCPWVYAKEAPSFGLAGQTSLNQPPHTKTSLQPSVQSREPNGENPWNPGNCFPPSLSYHVGSRTKQAKGKKSKNQKRKAPMRTEEEVRKMAISSTEWPSAGITIPRRQRGNTFRGARQLTQHLLSHGGRVSDSEGSDQVSSDDEDESPRHLGEEEMESKACTRCGEIGHVASMCLTLCAYCEEDHPPGECPTRKVTCFVCEGTNHVPKDCQLSVLLTKTAEIQRTTLRLSRQLVSSNSNIDDIIHNTNAPPAPPNSAINHSNNIFSTNHSLHRQPQQRIVVDGRSCVSPRRHEVDNLC

SEQ ID NO: 155758 - protein, 1683 aa, Oryza sativa
  unsure (1)..(1683): unsure at all Xaa locations
  Clone ID: PAT_MRT4530_55492C.1.pep
RVGPTCHPQPRAAPAAARALAPPPPRIPPHPAVPARIKERGITPRVSLSRFPLFSLSLSLGFVRIHPAKFAGVFNGARDLRARFPLSPAALSPSRCYKIVPRASLFRFRRSPLALAVGFVPAPCSSLSAVAAELRFAAVVAPVLLPTRRHLHRLRRVVADPVRRSASPADRRSTVDIGIPNRAAAFLHSGRRFRRPRCPGVSRGPSLXFPLLSALSGAAPPRRWSPAVTIGARARRSRRPCRRGRLRARPAAARWGPAVSRPRPRVRLTRGTHGADRRQPRAPGPPWTERLTRGPHFPWTRANEGYTSCGPMADNEKGNKVRSQDIGTSSSRVNEAPDTSCVAVVQHLINQNKLLIEILQQHRMPILNPSQMQPQVQLEAVQALTPQVSAPPTSQKAPHAMPHVDPKEASIICFMCDEQGHYARNCPQQKRKAPMRTEDEVRKMIITSTEWPPPGMTKHQRRNSFRGAQQLTEHLLANGGRVSDSEDSDQVSSDDEDEKSPQGFNQNKMERKACSRCGEIGHVASSCATTCFHCEEDRPPGECPMSRITCFFCEGTDHVPKDCQFSFLLTKKMANQPTSSNGEKHQGNTNPRQDYRFSLTPVPGQRNRNEKRKCRVREDICCFNCQGMGHFADKCPKPRNIAASTSVHATPCNQKLAPQRIVIHASQSSPIARVATAPTPASALPQGVNAQFQPQPSVDKTEASIGIVPLDVPAQQPRNQNWNNPAGATNVQVPTVQQQCKLSEFLKTETPTFAIAVEPMEASDWLRTVEKKLGLIQCTDQERVVFATHQLVGLASELWDSYEASRPEGHTITWDEFSLVFKRSHVPAGMITLRKREFRYLKQEDLTVTEYLHEFHRLAHYAPEDVENDEDKQEKYLQGLKDEIAVQLLLEEYEDFEKLNCKRRIVSIPVFPCGNQRQRTEPLQITGSSVAHQEFPPQEDGHNADNNISNTNDDDTTNNHASCPISDHSNQACNVNIIHQGVDDSINDGTQNDNPSNCDSKKDSNGDSNYGTTDANVSKDFQPPIPTPSQNDRPQTDSSAKKTLICYNCKEPGHYSRDCLQPRQSRPPHYRQFTRSRHPNRIVVTGANAVPVSLKDSTPKDLIAPEASSTPGAKSTWLRKVESAGHPPARVGTPPGRAVASPSPACPRFRRNAVARAGLTLRLAGVPSATPSAVPVRRGMFHAVLASVQLLPAALVASSPAPVVVVVHLLLSSFPVVMAFVPPSSRSRSPPVVRQVSCCSPIVVFILSSTSSSLVPAASRIRPRIAAEVVPSPFVSVVPGRLRRARSSLSFPRLVAWCRRRQQGYGKLLAEIRDDFISNFQGTFERPGTYFDLYNVIQKPSEYLQDYIRRFSEQRNKISDITDDVIIAAFTKGVHHELLVGKFGRKPPRTVKQMFENTNEYAKADDAVTASELSGSNWKPKKDAPAVGGSGSTNHKDCKRKPEDLVASTTPSSQQRSHINTFDKIMNAQCSHHPNSNHAAKDCFIYQQFAEQYAKKGRKPTDGEQSTSKKMDDEDDGPTGFQDSRKELNHIFGGPQAYESKRKQKLTDREINAVQPNTPQYLRWSETAIKFDRSDHPDRVVHLGRYPLVLDPVVRNVKLRRSLIDGGSALNILFAKTLDDMHIPHTELKLSSAPFHGVIPWLSSTPLGQITLPVTFGTWENFCTENICFQVADFEMAYHTTPT

SEQ ID NO: 155759 - protein, 304 aa, Oryza sativa
  Clone ID: PAT_MRT4530_55493C.1.pep
MFAPTFAVAAALAPPPPRGGGGGGGEFDHFVVVDFEATCERGRRIYPQEIIEFPAVLVDAATGRLVSAFRAYVRPRHHPRLTDFCRELTGIAQGDVDAGVGLAEALLRHDEWLRAAGVVEGGGRFAVVTWGDADCRTMLEQECRFKGIAKPAYFDRWVDLRVHFEAAFGGGGQRVKLQEAVRAAGLEWVGRLHCGLDDACNTARLLVELLRRGVPISITGSLPAAPPPLEQARKQQQQQEMQQLLVPCGAAVCCYCGVASTGGVMAMPGSTQRRCFYGCGNWTAVSGATCPFFLMGGVVDCPIN

SEQ ID NO: 155760 - protein, 742 aa, Oryza sativa
  unsure (1)..(742): unsure at all Xaa locations
  Clone ID: PAT_MRT4530_55494C.1.pep
MTELVAPHRETAQAPLCRFGRGLRVRSQALAVCGKIACQEETRDTDDVYRFGPLGSDEAWHISIGANVPSPGCNTLAPAEDECLEALVLTGWGEACVRPPCKPHKGSGHLGPRGRGRSNPTPPRGNQEEGGYLTLGPDVPEGARPRGRFHLPQASGRNTPGPISPTEREHHSTGILDGTDEAYSSEKPSSDAYPHSPTTRFRAPTCHHDIPERGRDRTLRITPSSQAHHTSGFTPVPSGQRAXPLSCLGESGXRQRPSQGPPRSITPTLAWMRRLEESYQGAAGADTRAPHVSXVKGAAHGGPSPHVASGRXSTTWMAQIGPKPIGRPRGGAARAQARHETGSAERXRGGVRPDDRRRQRRVAAAGTGSGGGGKREKGRWGFLPRTATARRPQGGGWRRKGMVNAAAAXSRGREGKRSRGRGAARNGDADGGGSAARQRRERWWRATGGDERRLWLGARWEWCCGGGRGGRSGCRGVARRGEAVGGKSTAGRXALARRGADGGGXRRRWLGVAVEAALRRWIGEEERWTGCARRLWCRGGRRRSAGLARMAARGGRSSPESGDGSILRGEGGGECGEYGKIGEKGEGGTGIIFIGSGRRNRGRTGGNGRRSGEVKWSSWGGQTGAVSCGVSGGDGGGRGXRGVDRAHTRAGTGRRAGXAATWAARAAMAGKERGGDGWGDDDRWXRVHLSARGGGRRLGVKWTWRRGSRAGPAHAEKGGKEERENGPSPKTKRGSLFCFLFI

SEQ ID NO: 155761 - protein, 608 aa, Oryza sativa
  Clone ID: PAT_MRT4530_55495C.1.pep
MTSSSRPLPWPDPQLCQGNGGVVVKLLQPWSSPIQEGVRAEIEALNLHGEHPEISLNYSVAQFMSRTITSTKGLLQNLVVGWCICYELHSSGTCWTAYQHMQYSIYGWSFDDPDQEAQKVLVNGRNLQGVLIPTELKIPWPPPNLTVQIYGVLTTITLCNGDNFSINYTIGGIHNEMVWGESLEDSSHISNCFTMLQSAELVQYKVDFAGSSLLENLALQGDDSLSFLLPEGVTVEDQEMVTRIKMTEQSVSKDEMDGPKLGVAKFSLDKLPNHSVGSIMAMALLLVQSSAQIVPSSILEMGLFRCNQVRLQIENSIFSASCFMSMHFQMRNDSSSFQGMKEKQTVDIVETSAIQEAIVIELEKNWPWDPGVSSSASPQCRQGYHPLDRLGDKSNFKCVRDNMVSEQSIRGVLGVEMKWKSAGGQRNSQQPGGGVFGGDAHHLFNEMPSCPRGDSAAVLCVTVSQIIYPVTSEVLHQVYDTYGAVAVQVLAVSTWQVKALVSFMSSHDAERARSTTHGHDIYDEGCLLDMQHVQMFPGDGATATHTTCSTMVPSSATARPVAKSTAAAPERVFPATTASSVPSITSAAMVTSVPFNETKKADADMDKA

SEQ ID NO: 155762 - protein, 878 aa, Oryza sativa
  unsure (1)..(878): unsure at all Xaa locations
  Clone ID: PAT_MRT4530_55496C.1.pep
HSQHWKWVCQQWENPSLAQVLAQQTQLMNLMMQQLQNQQNQGNNHAPPQNKLAEFLRVRPPTFSSTTNPVEADDWLHAIEKKPDMLQCTDQEKVSFASHQLHGSASEWWDHFRLNRATAELIIWLEFTAAFKKTHKPSGVVALKKKEFRALTQGSRSVTEYLHEFNRLARYALEDVHTDKERQEKLTEGLNDELSYPLMTGDYADFQKLVDKIICQEDKYNRMEXKKRRITHFKAQQGNSQRPRLTLGPQAALQGGSSSAVHPQRQFYNNNTGSGNGNRNLAPRPAAAPAQHQPVKKEXGNKPGVCFKCGDPGHYADKCPKLRGVRTAHVXNNSNAPTSKARVNHVAAAEAQSAPDVILGTYPVNSVPATVLFDSGATHSFLSKSFAGSHGMEIEELRCPLMFSTPSNQALSSYRSPSVRIEIQGVPFLANLILLESKDFDVILGMDXLTKNRGMIDCANRKVKLTNSYGQVVTVHALPPASSQVSLNQVTVEEILIVCEYPDLFPDDLPGMPPKRDIEFRIDLVPGTAPIHKRPYRMAANELVEVKKQVDDLLQKGYIRPSSSPWGAPVIFVEKKDHTQRMCVDYRALNDVTIKNKYPLPRIDDLFDQLKGATVFSKIDLRSGYHQLSFREYGLFECTVMSFGLTNAPAFFMNLMNKVFMEYLDKFVVVFIDDILNYSXTKEEHEVHLRLALEKLREHQMYAKFSKCDFWLSEVKFLGHVISAGGVAVNPSNVESVTNWKQPKTISEIRXFLGLAGYYRWFIENFSKIAKPMTCLLQKDVKYKWSAECEQSFQELKKRLVSAPILILPNPKKGLQVYCDASQLGLGCVLMQDGKVVAYASRQLRPHEKNYLTQDLELAAVVHALKIWRHYLFGTRPE

SEQ ID NO: 155763 - protein, 686 aa, Oryza sativa
  Clone ID: PAT_MRT4530_55497C.1.pep
MACGLGTGKSPPRRPRRWRWRRRSRGEETSAPERYEGEESDAASVAPNAAKLYLHVGGASASARWVPAERRATYAFVDKATAAGDSDCGGPRWVLEVGPGPRVSAPVGPALQLKALPAQRRADFAAGGSVWALRLPTDAAFRRFRQEYDRCLFENTYGVEATDEGRKEVFGADFAAWARPGESDDAVWADAEDSFTPPVATPARDLLEEFEEEAGDGSIQSLALGALDNSFLVGGSGIQVVKNFRHGVHGKGVSVRISDGRGGGNAYMTPQKALLMRGETNMLLMSPGETGTRHSNGVHHVDIETGKVVAQWRFEKDGTDITMRDIANDSKGAQLEPSGSTFLGLDDNRLCRWDMRDSRGRVQTIGSSSESPVLQWSQGHQFSRGTNFQCFASTGDGSIVVGSVDGKIRLYSKSSMRMAKTAFPGLGSPITHVDVTYDGKWILGTTDTYLILICTIFKDKDGKEKTGFSGRMGNRIAAPRLLKLSPLDSILAGSENKFHGGQFSWVKDSNHECYRDQEGLKSCYCYKVVLKDESIVDSRFMHEKFATTDSPEAPLVVATPMKLTAVPFVVRESTGWRGRRGQGAMGGGTAVQVAGWRGDTDGVAMGNASEEAATPVDLQWGRHGRRPDGGGASTPAISSTSEGAAAPAVGAAQAESGWWRRAAEEQFRGARIYRFTAVPYWVHLIT

SEQ ID NO: 155764 - protein, 628 aa, Oryza sativa
  Clone ID: PAT_MRT4530_55498C.1.pep
MRMRWWAAPLAAVLAVILLPSSTATLSPAGINYEVVALMAIKTELQDPYNVLDNWDINSVDPCSWRMVTCSADGYVSALGLPSQSLSGKLSPGIGNLTRLQSVLLQNNAISGTIPASIGRLGMLQTLDMSDNQITGSIPSSIGDLKNLNYLKLNNNSLSGVLPDSLAAINGLALVDLSFNNLSGPLPKISSRTFNIVGNPMICGVKSGDNCSSVSMDPLSYPPDDLKTQPQQGIARSHRIAIICGVTVGSVAFATIIVSMLLWWRHRRNQQIFFDVNDQYDPEVCLGHLKRYAFKELRAATNNFNSKNILGEGGYGIVYKGFLRDGAIVAVKRLKDYNAVGGEVQFQTEVEVISLAVHRNLLRLIGFCTTENERLLVYPYMPNGSVASQLRELVNGKPALDWSRRKRIALGTARGLLYLHEQCDPKIIHRDVKASNVLLDEYFEAIVGDFGLAKLLDHRESHVTTAVRGTVGHIAPEYLSTGQSSEKTDVFGFGVLLVELITGQKALDFGRLANQKGGVLDWVKKLHQEKQLSMMVDKDLGSNYDRVELEEMVQVALLCTQYYPSHRPRMSEVIRMLEGDGLAEKWEASQNVDTPKSVSSELLPPKFMDFAADESSLGLEAMELSGPR

SEQ ID NO: 155765 - protein, 287 aa, Oryza sativa
  unsure (1)..(287): unsure at all Xaa locations
  Clone ID: PAT_MRT4530_55499C.1.pep
MSVIDILTRVDSICKKYDKYDVERLNGANVAGEDPFARLYGSIDADINECVEKAEAAKQEKNRATVVALNAEIRRTKAKLVEEDLASISRRGRAEGSCSASRIHSPFLVWVNHXLDLRILWPEDSVSPCLLIYLLDLEWKLIYVGSAEDENYDQQLESVLVGPVNVGTYRFVLQADPPDPSKIREEDIIGVTVLLLTCSYMGQEFMRVGYYVNNDYDDEQLREEPPAKLLIDRVQRNILADKPRVTKFPINFHPEPSTSAGQQQQEPQTASPENHTGGEGSKPAADQ

SEQ ID NO: 155766 - protein, 131 aa, Oryza sativa
  Clone ID: PAT_MRT4530_5549C.1.pep
QTGSDRGGMNLKYQPSYGRYRRDRVSKLAWVWSRVDYCHGIQTNEVEMHTVAEQMRLHYSSEKLSGRVHSTTVAICTGAIEQKWWGSTGHSKCIDVSLTAATVCTFCVKKNWRKKKKGMRGAERPARAGAS

SEQ ID NO: 155767 - protein, 116 aa, Oryza sativa
  Clone ID: PAT_MRT4530_554C.1.pep
RAAGIGTRDSSSHTDREYMDPDIVEEIWEDGCAFLSKRLDSEYPVRNMFKLFICAICQVELKPSQGISVHEDSSQPGNLRRWDGPFLCQGCQEKKEAMEGKRRSRDSSSRNSGSSE

SEQ ID NO: 155768 - protein, 508 aa, Oryza sativa
  Clone ID: PAT_MRT4530_55500C.1.pep
MKWESAGGQRNSQQLGGGVFGGDAHHLFDEMSSCPRADSAAVLRVTVSQIIYPVTSEVLHQVYDTYGAVAVQVLAVSTWQVKALVSFMSSHDAERARSATHGRDIYDGGCLLDVQHVQMFPGDGATATHTTCSTMVPSSATARPVAKSTAAAPERVFPATTASSVPSITSAAMVTSVPFNETKKAETDMDKVVENLDKTIQDLCTKIDRMLERHFATPRDPFLIINAIPPRNWSWCLSRAYFGVVGLSFVSSKLEVLYGCFDRSLEYTASPPPVPPWRAAIPWNKAEMTSGSRPLPWPDPQLCQGSGGVVVQSKNNGVIGDTSWTQFRSNNGDAVLLVPQPWPQPILFPVHIMVELEVSLKGIIVSTKKLVNLQSLAPPSLWRNEVFNLCATGGQGLNFSWKCIYEELQQLQCTFEFTLWNQHGQTYKLLLQKEQLKLGAVYLSLEVKSSETCFTCRTYEEDMFLQITNFVGHNYEGSNTCSTHQFSHGWPKYLVRAKFVQFQRGKIL

SEQ ID NO: 155769 - protein, 358 aa, Oryza sativa
  Clone ID: PAT_MRT4530_55501C.1.pep
MPVETKDRRSFAFAHLFPLLYSFGIVLGHMDSFTNDQYLLQHLRSQRYFLVTWYGENLAETDFLQYQLVRSESTLAELSEQLEALRERCDSQALRIVELEHALTTRGRSVAPTLATLAASSTTTLRPIPVPASAFAPLWATGSASASLSIGATGTVASGSPTLRPVTPAEGAGLSATSGTTMIFATAPAPVSTPTPALPRSGTVLGAAPPLPLPLPLPPAPVFPRVSTVLGVAPPPPLPSPPPSTQHVSPTVPAAEAFTTLGGGTLGSGTRTSAIEVEPMVEEEEDPEERVMELVKQIPPLTQPPPVEHFGGRGRRCSGDPEPSGKRRRGRPHRDSTPVLIGNPNAPTTAYRSRSRSP

SEQ ID NO: 155770 - protein, 242 aa, Oryza sativa
  Clone ID: PAT_MRT4530_55502C.1.pep
KGGGGGATTPSSHKNPKINRNNDIIITYTNNKYTTNNNGGSGRGDVGGVRQIPLAGSPVGATNVVAATGSKGEAAAAAGGSAGEAWGRGGVTSLGAEGEDEGVENRWIHPPEKPPPNPPARNNTAAASAGFASGSRRCHSHRRIQPTGAVNAIAAASSATDKGETRRVGAGMRGSDREGERGTGERRRRVDKDAFIHSRCSLSADAWWVGEEMGRAALTLVVEKRHDGGEGGGVPERESVVG

SEQ ID NO: 155771 - protein, 544 aa, Oryza sativa
  Clone ID: PAT_MRT4530_55503C.1.pep
MKWESAGGQRNSQQLGGGVFGGDAHHLFDEMSSCPRADSAAVLRVTVSQIIYPVTSEVLHQVYDTYGAVAVQVLAVSTWQVKALVSFMSSHDAERARSATHGRDIYDGGCLLDVQHVQMFPGDGATATHTTCSTMVPSSATARPVAKSTAAAPERVFPATTASSVPSITSAAMVTSVPFNETKKAETDMDKVSTEAGSTNLVDTAKLGMGTTIECSMKCENQLADDDDGKDMAKEEWMELMEVDTMFTAMYLCFRDPFLIINAIPPRNWSWCLSRAYFGVVGLSFVSSKLEVLYGCFDRSLEYTASPPPVPPWRAAIPWNKAEMTSGSRPLPWPDPQLCQGSGGVVVQSKNNGVIGDTSWTQFRSNNGDAVLLVPQPWPQPILFPVHIMVELEVSLKGIIVSTKKLVNLQSLAPPSLWRNEVFNLCATGGQGLNFSWKCIYEELQQLQCTFEFTLWNQHGQTYKLLLQKEQLKLGAVYLSLEVKSSETCFTCRTYEEDMFLQITNFVGHNYEGSNTCSTHQFSHGWPKYLVRAKFVQFQRGKIL

SEQ ID NO: 155772 - protein, 195 aa, Oryza sativa
  unsure (1)..(195): unsure at all Xaa locations
  Clone ID: PAT_MRT4530_55504C.1.pep
TLETSNLAIHEEGGDKVVAATGSKGEAAAAAGGSAGEAWGRGGVTSLGAEGEDEGVENRWIHPPEKPPPNPPARNNTAAASAGFASGSRRCHSHRRIQPTGAVNAIAAASSATDKGETRRVGAGMRGSDREGERGTGERRRRVDKDAFIHLRCSLSADAWWVGEEMGRAALTLVVEKRHDGXEGGGVPERESVVG

SEQ ID NO: 155773 - protein, 440 aa, Oryza sativa
  Clone ID: PAT_MRT4530_55505C.1.pep
MKWESAGGQRNCQQLGGGVFGGDAHHLFDEISSCPRGDSAAVLHVTVSQIIYPVTYEVLHQVYDTYGAVAVQVLAAFRHTKVDLSLSKDSTRDVAALSANTDPTSIALEVSTEAGSTNHVDTAKLGMGTTIECSMKCENQLADDDGGKDMAKEEWMELMEVDTKFTTMYLCFRDPLLIINAIPPRNWSWCLSRDYFGVVCLSFVSLKLQVLYGCFDRSSEYTASPPPVPPWRAAIPWNKAEMTSGSRPLPWPDPQLCQGSGGMVVQSNNNDVLDDTSWTQFGSNNVCEDNIVLHTWAYRVVKLVAARLVGDQGSHGVYADSSGEEGVKAWWLRQQKHGRECGCNAQVLCMLDKWIQQWAGSTSDGSKVIKQLFWDSAQQDISLQEARQVGWLWAHSAREKETRKEAKQPAARVIDESITRTPQATASSSLLLLPLSIPIL

SEQ ID NO: 155774 - protein, 353 aa, Oryza sativa
  Clone ID: PAT_MRT4530_55506C.1.pep
MEGQDKQAVADLQERRRPRRRSWWYMVQIDVKRWLHRRTMLFLRDNCGLNSLCEDRYIKLTRLGTHRILIHYARLMQCLYYNILMNEVGMKSWEEYTEKDREKVRALIDNIVELCRSSIPRSPHDVVRERRRLEEDLLVVRAFTRQATSPSYKAAQPWPEPTQRFIVVGERMIEALVESGGHALGRDMMFKFIATSRYMDFVASSLERVPDYNNTNPIRADIPFGETMGLKTSLAQALPLERRRESYESTCGMPLARRPFRTPPLMLTQSHSRSLTVQSISTTTPSQNSQRRRILWIAYSMLVLGTERDPEDFGQKFLEISFVGEDELRQLMLSPLTACRLQLIEPGDKNLNL

SEQ ID NO: 155775 - protein, 800 aa, Oryza sativa
  Clone ID: PAT_MRT4530_55507C.1.pep
MECVRDNMVSEQSIRGVLGVEMKWKSAGGQRNSQQPGGGVFGGDAHHLFNEMPSCPRGDSAAVLCVTVSQIIYPVTSEVLHQVYDTYGAVAVQVLAVSTWQVKALVSFMSSHDAERARSTTHGHDIYDEGCLLDMQHVQMFPGDGATATHTTCSTMVPSSATARPVAKSTAAAPERVFPATTASSVPSITSAAMVTSVPFNETKKADADMDKAVENSDKTIQDLCTKIDRMLEAFRDTKEDLPLSKDSTRDVAALSANTDPTSISLELADDDDGKYMANKEWMELMEVDTKFTAMYLCFRDPMLVLNAIPPRNWSWCLIRDFGVVSLSFVSSKLEVIYGCFDRSSEYTVRSPPVPPWRAVIPWNKAKMTSSSRPLPWPDPQLCQGNGGVVVKLLQPWSSPIQEGVRAEIEALNLHGEHPEISLNYSVAQFMSRTITSTKGLLQNLVVGWCICYELHSSGTCWTAYQHMQYSIYGWSFDDPGMFVQLKLISWPMHDTWGECLFNCANEDQEAQKVLVNGRNLQGVLIPTELKIPWPPPNLTVQIYGVLTTITLCNGDNFSINYTIGGIHNEMVWGESLEDSSHISNCFTMLQSAELVQYKVDFAGSSLLENLALQGDDSLSFLLPEGVTVEDQEMVTRIKMTEQSVSKDEMDGPKLGVAKFSLDKLPNHSVGSIMAMALLLVQSSAQIVPSSILEMGLFRCNQVRLQIENSIFSASCFMSMHFQMRNDSSSFQGMKEKQTVDIVETSAIQEAIVIELEKNWPWDPGVSSSASPQCRQGYHPLDRLGDKSNFKEWSGFVTGV

SEQ ID NO: 155776 - protein, 69 aa, Oryza sativa
  Clone ID: PAT_MRT4530_55508C.1.pep
DRMHGDLLGNHVISLLVNDIDRHTLGSFPVERSGLITSGHAVSSFHWVHTCSVTSVMSHPCCIILVLID

SEQ ID NO: 155777 - protein, 820 aa, Oryza sativa
  Clone ID: PAT_MRT4530_55509C.1.pep
MGGGTAVQVAGWRGDTDGVAMGNASEEAATPVDLQWGRHGRRPDGGGASTPAISSTSEGAAAPAVGAAQAESGWWRRAAEEQWREQWGGADGGASTPAISNCRPEQSIRGVSGVEMKWESAGGQRNCQQLGGGVFGGDAHHLFDEMSTCPRGDSAAVLRVTVSQIIYPVTSEVLHQVYNTYGAVAVQVLAVSTWQVKALVSFMSSHDAERARSATHGRDIYDGGCLMDVQHVQMFPGDGATTTHTTCLTMVPSSATARPAAKSTAATPERVFPATTASSIPSITSAAMVTSVPFNETKKAETDMDKAVENLDKTIQDLCTKIDRMLEAFRHTKVDLSLSKDSTRDVAALSANTDPTSIALEVSTEAGSTNHVDTAKLGMGTTIECSMKCENQLADDDGGKDMAKEEWMELMEVDTKFTTMYLCFRDPLLIINAIPPRNWSWCLSRDYFGVVGLSFVSLKLEVLYGCFDRSSEYTASPPPVPPWRAAIPRNKAEMTSGSRPLPWLDPQLCQGSGGVVVQSNNNDVLDDTSWTQFGSNNGEAFRVSTRKLVNLQPWPPPSQWRSETHELLLQREQLKLGAVHLSLEASTFSKNSRGIELVKCSERCLICLVCEDSIVLHTWAYRVVKLVDARLVGDQGKTIQFLAIWEFANKEVALIQTKKHMHVSQPTDLNICMLHLGSHGVYADSSGEEGVKAWWLRQQKHGRECGCNAQVLCMLDKWIQQWAGSTSDGSKVIKQLFWDSAQQGISLQVPWDLGGINLASQLHRLGDKPILNGGRMSCTWPAVMSFQEARQVGWLWAHSAREKETRKEAKQPAASSQGHR

SEQ ID NO: 155778 - protein, 137 aa, Oryza sativa
  Clone ID: PAT_MRT4530_5550C.1.pep
MSPASIPTSCKSGEVDFGVEEVGGVEELANLESARRRSGVCRWRRLQYEATSASFLPMGGRFDERAARPVLLFTDLLVYILVNSDELMNQGIQIAMPNILSLFDDATSFFNFKFQDINYVIQIPHCCCYEVGISITK

SEQ ID NO: 155779 - protein, 80 aa, Oryza sativa
  Clone ID: PAT_MRT4530_55510C.1.pep
PSTIEYHLANSYVFSESAPKHSPTMADEANHATIAALLVGMIYTTGTLMHPQTQMRSTGGDKMHAHLTLEELRLLERIHT

SEQ ID NO: 155780 - protein, 74 aa, Oryza sativa
  Clone ID: PAT_MRT4530_55511C.1.pep
LEASPPSSRYPRSLCALSMLRILPLYSTSKVNSSYGPDPVGSNRVGAHTRPTPRSRRPRGVTRTGRVGRPCSSG

SEQ ID NO: 155781 - protein, 617 aa, Oryza sativa
  Clone ID: PAT_MRT4530_55512C.1.pep
MGGAHSREDLDLTSSDDEDDDEEYDAQTATSAASREDILRTSTPSSLEFLDAKLKALDLKYQAPNAAKLYLHVGGASASARWVPAERRATYAFVDKATAAGDSDCGGPRWVLEVGPGPRVSAPVGPALQLKALPAQRRADFAAGGSVWALRLPTDAAFRRFRQEYDRCLFENTYGVEATDEGRKEVFGADFAAWARPGESDDAVWADAEDSFTPPVATPARDLLEEFEEEAGDGSIQSLALGALDNSFLVGGSGIQVVKNFRHGVHGKGVSVRISDGRGGGNAYMTPQKALLMRGETNMLLMSPGETGTRHSNGVHHVDIETGKVVAQWRFEKDGTDITMRDIANDSKGAQLEPSGSTFLGLDDNRLCRWDMRDSRGRVQTIGSSSESPVLQWSQGHQFSRGTNFQCFASTGDGSIVVGSVDGKIRLYSKSSMRMAKTAFPGLGSPITHVDVTYDGKWILGTTDTYLILICTIFKDKDGKEKTGFSGRMGNRIAAPRLLKLSPLDSILAGSENKFHGGQFSWVTENGKQEKHLVATVGKFSVIWNFQQVKDSNHECYRDQEGLKSCYCYKVVLKDESIVDSRFMHEKFATTDSPEAPLVVATPMKVSSFSLANRRLH

SEQ ID NO: 155782 - protein, 101 aa, Oryza sativa
  Clone ID: PAT_MRT4530_55513C.1.pep
AGLLQHLRQTGHGDSRPATSSALSTSPHSFESGESHPRRSRGGPGRQPRPQPSGSQPAQPASAPGQTTSSRLEQPVGRPRPAHAPRGRSRGSKLIRVHATS

SEQ ID NO: 155783 - protein, 85 aa, Oryza sativa
  Clone ID: PAT_MRT4530_55514C.1.pep
KASSNRSRAYRGLIVDAIFGSITSSEHLCIGVRTSTSALMIKTAYAQDAEKMDKLNTICFTLMTHGPDADVSDVSEKEQAEQHHS

SEQ ID NO: 155784 - protein, 102 aa, Oryza sativa
  Clone ID: PAT_MRT4530_55515C.1.pep
SWGMPVQFLDGTRTREKRRSIITTGMKTKGRPGGGSGGNTNGSHRRITAAAAINIIRTLLSILASPAAVDWTASSGRRLTGCSTLRCSCVFCDEEVLYGCFQ

SEQ ID NO: 155785 - protein, 559 aa, Oryza sativa
  unsure (1)..(559): unsure at all Xaa locations
  Clone ID: PAT_MRT4530_55516C.1.pep
MSQQHGRGHIAHCLGGALAGRDTVAVSGNRRLTGAGLADGARRLAAALSNLGVRRGHVVAVVAFNSIEYIELFLAVTYIGGIIAPLNYRWSFEEASQALELVQPTVFIFDGSYSSWALRLKESNSLTSVNLYLFLGNLCSISQAANFVSVVSVEQIKRSSGGTTRAVEPVSAPNDVALICFTSGTTGRPKGVAISHTSLIIQSLAKIAIVGYGEDDIYLHTAPLCHIGGISSCLAILMAGGCHVLIPKFDVKSAFDAILEHRVTSFITVPAIMADLLSYARKQKILNHGMTVTKILNGGGGLSSELITGASHLFPNATIFSAYGMTEACSSLTFMVLTRPKIQEPKDQLGSSSEGVCVGKPAPHIEIQINRNGSNSSSSSPIGNILTRGLHTMSGYWVNNSIDTSDSVRNGWLDTGDIGWVDKTGNLWLMGRQKGRIKTGGENVYPEEVQAALALLPGLAKAVVIGMPDSRLGEKIVACVSIRDGWNWVDARAVHKGEGREVSAQMLQDHCRTNKFAXVKVPRIYYQWSKPFPVTTTGKIRREQLKAEILASMKLHSNL

SEQ ID NO: 155786 - protein, 91 aa, Oryza sativa
  unsure (1)..(91): unsure at all Xaa locations
  Clone ID: PAT_MRT4530_55517C.1.pep
QAAHAIAVSSSSPASKNPSRAPAMPPPEPDKDKPLPKPKPPKPKPKPPKPEPEPNTRSAPEXTRRPPRTARCPPTPCPAPPTARRTACSTT

SEQ ID NO: 155787 - protein, 116 aa, Oryza sativa
  unsure (1)..(116): unsure at all Xaa locations
  Clone ID: PAT_MRT4530_55518C.1.pep
CASACHWGTQQFNGGDGPGGHRGCXDARHCRRRTWRWRDVGRRCAVLPXPSLVVPPRHAGGGAGRGRLRGGGTSVSSPALLPASERMLTYVRGLAAXSSTDVLRVQCEVVTAGEKA

SEQ ID NO: 155788 - protein, 315 aa, Oryza sativa
  Clone ID: PAT_MRT4530_55519C.1.pep
GTSRVRATGGKDRHSKVYTAKGIRDRRVRLSVATAIQFYDLQDRLGFDQPSKAIEWLINAASPAIDTLPSLDPAAFAAIPHAAADAAPTRRRSQQQQQQLSNKSGCSSTSETSKGSDKEVTVASAPAQAASFTELLIAGVAASSAGGGAIGNGADCVGIAHPGKGGAEGASTYGFSAASSFGDAPPIGMVPAPPFNFSAPGADMAAHYSLAQDQLAAPPPPAGGDYNLNFSMSSGFLGANRGTLQSNSPSNMSGHHHHHHQQQLQRLDGSTISFLLGHAAAAAHPAASEGQITSTAALQLWDGFRHSGMKEKSKN

SEQ ID NO: 155789 - protein, 315 aa, Oryza sativa
  Clone ID: PAT_MRT4530_5551C.1.pep
MPRLARSDSSISMPPPSLAPTGAITFRWLATRPMRRLALLIALNVAYSATELAIGLLTARVGLVSDAFHLTFGCGILTFSLFAMAASRTKPDHLYTYGYKRLEVLAAFTNALFLLFLSFSLAVEALHAFMQDESEHKHYLIVSAVTNLLVNLLGVWFFRSYARVNIVYRKAEDMNYHSVCLHVLADSVRSAGLILASWFLSLGVENAEVLCLGIVSVAVFMLVLPLFKATGNILLQIAPGNVPPSALTKCFRQITACEDVSEVCQGRFWELVPGHAVGSLDIRVKNGGDCQSVLDYVHGLYQDLGIQDLTIQTDE

SEQ ID NO: 155790 - protein, 164 aa, Oryza sativa
  Clone ID: PAT_MRT4530_55520C.1.pep
MEAKQSDWLTSEGDRGASGGGEPPKTRKKPSPAPAAREPLERPGGGVGALWCHVMPLGPLHRFAPRPSPSRHLAGGASEEGAQAELPLMRATPQLPPVVFNAVRQTAVPRVRRGTALAPLKGKLWLSFRAKARVEPGLPERFQRGKGVGREGSDGLLKVAAIIH

SEQ ID NO: 155791 - protein, 275 aa, Oryza sativa
  Clone ID: PAT_MRT4530_55521C.1.pep
MHSSTRARLLLAAAVLLLSAAPAARAQETDDERKFGYVPGTENGPGNWSRLDPRWAKCNTGNMQSPIDLSHERLMRNLGYLDYSYLPAEASMVNRGHDIEVKFMGNAGRVVINGKAYKLKQLHWHTPSEHTVNGRRYDMELHLVHDDGNSNTAVIGNLYQIGNPDPFLLMLEPFIRRIADTKDKSEPIGVVDPQLAKSPDAVYYRYMGSLTTPPCTEGVIWTVFKRVFLLAQTVAQYQLDLLREAVADGYENNARPLQKVNNRNISIFIPDPKKD

SEQ ID NO: 155792 - protein, 270 aa, Oryza sativa
  unsure (1)..(270): unsure at all Xaa locations
  Clone ID: PAT_MRT4530_55522C.1.pep
LLCPLKFMTWPHVFYGVNFPYWCEKKSYIMSESYDIWQKVANPYKIPAXINTVVLKTDFKNNCKARNILLNGIPCSDFDRVSHLQTAHEIWKPLSDFHQGTSNINEVRKDLFKXDYVKFEMQPEETLDDYLARFNKVLSNLRSVDSSYDTYYTQSEISRHFLNGLDMSIWEMKVTSIXESVNMSALTLDSLYTKLKTHEVNILSRKIDPXISALISSEDLVXVTNKLSQGFEKVKNRKRGGSVQCFQCGKLNHIKFNCPNRQEDKSWRRK

SEQ ID NO: 155793 - protein, 191 aa, Oryza sativa
  Clone ID: PAT_MRT4530_55523C.1.pep
MAVVLLLRLVQLLGYLGYLLLRAIRAAVEGAVAAAFAAAGDAVAAAADAAAGWRDAASSNSTAAVAFVQAAMGRPEALLAKMLAIFGLVALLRADHHPGTSFFRRRMEAPAGGGYLLGGQPARCYGGHSTGSNGEGFGGHPATSPPSSSWVSLPREHRDRCKGMTYWIDEKFVFLLAYTMKCASSADGREH

SEQ ID NO: 155794 - protein, 58 aa, Oryza sativa
  Clone ID: PAT_MRT4530_55524C.1.pep
ILAGTHIAEEYGSIWKGMGAHVDSFYRKELTLRGFDDETRTVAASNLEGLGHLLTCNY

SEQ ID NO: 155795 - protein, 135 aa, Oryza sativa
  Clone ID: PAT_MRT4530_55525C.1.pep
VGLGDAVTKEALEWAESSTAIVAVGKIMRFMNDIAAFKHGKNKGDVTSTMECYMNEHKVISDVAFMKLTSLIEHEYRTINQARFELHKSLPAAQRVVILAVVSLMFFYDNRKDVYTLCSDLRETIRSLYVEHAPM

SEQ ID NO: 155796 - protein, 32 aa, Oryza sativa
  Clone ID: PAT_MRT4530_55526C.1.pep
KLVDPRGCSEFCARGNNQSRELHEVNVSFSVS

SEQ ID NO: 155797 - protein, 63 aa, Oryza sativa
  Clone ID: PAT_MRT4530_55527C.1.pep
MVYQGSPRFWTSPMLADIPDEVFPERIPMRKGVPRLVVSNRDTPLQRRLALPQCITNLPTVSC

SEQ ID NO: 155798 - protein, 505 aa, Oryza sativa
  Clone ID: PAT_MRT4530_55528C.1.pep
MDMDDMLGGLRVAGVPTKSAIYLWGYNHSGQTARKGKECHLRIPKSLPPKLFKWQDGKNLRWIDVACGRGHTAAVASDGSLYTWGANDFGQLGDGTEESAKEPQKVKALETEFVKSVSCGAHCTAAVAEPRENNGTISRSRLWVWGQNQGSDYPRLFWGAFAPNTASGATEQSTITCASSQFLSLRCLSLEVIHQVSCGAVHVMALSEDGLLQAWGYNEYGQLGRGCTSEGLQGARVLNAYARFLDEAPELVKIVRVSCGEYHTAAISENGEVYTWGLGSMGQLGHCSLQSGDKELIPRRVVALDRTVIRDVSCGGVHSCAVTEDGALYAWGGGHVGQLGLGPQSGFFSCALNGSDMLLRNIPVLVIPSGVQLVTCGHSHTLVSMKDSRIYGWGYNSYGQAANEKSTYAWFPSPVDWCVGEVRRLAAGGGHSAVLTDACSLKELCEFKLAETVNMSNALLIEDVASRTGGDALARLCEKLREHLVEQGECELLENQMIEEVEAKA

SEQ ID NO: 155799 - protein, 1157 aa, Oryza sativa
  Clone ID: PAT_MRT4530_55529C.1.pep
MAMPTVAAAAAVVPGVACGSSTRRVGVGNGNASAHAGGGCLAGGRRGAAAWVARARVAEAPPVAAEGSRQEAPAAPMVEIPVTCYQILGVTEKAEKDEIVKAAMELKNAEIEDGYMAEALLVDVRDKLLFEQEYAGSIKEKLPPRSSLHIPWSWLPAALCVLQEVGEEKLVLEIGHAALRRPDSRPYVHDVLLAMALAECSIAKASFEKSKVSLGFEALARAQYLLRRKPSLEKLSLLEQIEESLEELAPACTLELLSLPQTPENAERRQGAIAALCELLRQGLDVESSCRVHDWPCFLGQAMNKLLATEIVDLLSWDTLATTRKNKKSLESQSQRAVVDFNCFHVAMLAHFALGFSTRQADLISKAKTICDCLVASENTDLKFEESFCLYLLGEESGTTVFEKLQQLQSNGNSNSRNYGLPKKKDGNDKVTICQSLELWLKDVALSRFADTRDCSPSLANFFGAPKRILSTSKQKLGATRMVRLSSQPSSSVSPCNRALGEQTPRLNSTSHLGEAVKQLAPNNLGVHSSMDRPANGSTTTSVPLKRNLVLHPARTLESWGLTGDIVGKLAYSALIGFALFGTLKLLRFQFGHMKPASASRGSAATQSLNEESTLEDSFITSSVRKHFEKLPKMLWLNNRLYSRSEESDLSSVANAVAATVCKQSMALQEAETLVKQWQDIKSEALGPDYQIDMLPEILDGSMLSKWQELALSAKDQSCYWRFVLLNLSVVRAEILLDESGTGEVAEIGAVLEEAAELVDESQPKKPSYYSMYEVQYILRRQSDGSWKICEASASSMARAPMLGFGILTVYKFSFFSEIPEAADILAKILSQLPINDAIRTSVLSRKWKYFWCSHTNLTLNKGTMRKPYVKTLTPYRWRWLRDYEFITRVDAVLRQHSGMGVQRMEIKFRLHSKHADHIDRWVNFAIASKTKELVVDLSGQDKGSFFTDLTHSNCIRIIKEPPYNLPPQLLGLNYGSYLRCLELTTVSLQLPADFKGFLDLKILSLVDMSITDEDVQLQQHFKYSGTMVPLIFASTSRLTNISIVFINYQSALSYIITGFPSTLPRLETLTLHCGERERTIVPEGPFKFTYLRNLRLELALCGHGNIRKTDALDYAYILKIAPFMETLELSVEVKSWWLRKQISGELLNNQSSFFLG

SEQ ID NO: 155800 - protein, 123 aa, Oryza sativa
  Clone ID: PAT_MRT4530_5552C.1.pep
MVNDRAYHVTIDNDNGNDSDATFTQGNDEEEMCDASLISMPQLVNEHVNSMLEPPYIEFKHVIHIFRENEELKSLSSSNTWGYIQFENLCQLNCLEKNLVARSELPQPSNMIFNVIGNYDSKG

SEQ ID NO: 155801 - protein, 37 aa, Oryza sativa
  Clone ID: PAT_MRT4530_55530C.1.pep
MVHKTARSFLFELCAANYWKPPEFKLCKEEGPSHLRK

SEQ ID NO: 155802 - protein, 47 aa, Oryza sativa
  Clone ID: PAT_MRT4530_55531C.1.pep
MSLISPDADSRRKSRVRGLWAIYMEVISRVTKVYKSRKAVKRKPIGF

SEQ ID NO: 155803 - protein, 530 aa, Oryza sativa
  Clone ID: PAT_MRT4530_55532C.1.pep
MAGGFGGGGGEAIAGRAEQYEGKITGYFILACIVGSFGGSLFGYDLGVSSGVTAMDDFLIKFFPEVYARKSAHLHETDYCKYDNQVLTLFTSSLYFAGLVSTFAASHLTRRRGRRATIMVGAVSFFLGGAVNAAAANVAMLIAGRLLLGVGIGFGNQAVPLYLSEIAPYNIRGAVNQLFQLTTCLGILVADVINYFTDKIHPWGWRLSLGLAMGPATAIFVGALFLPETPNSLVEMGRLEEARRVLEKVRGTRKVDAEFEDLREASEAARAVRGTFRSLLAARNRPQLIIGALGIPAFQQLSGMNSILFYSPVIFQSLGFGNSAALYSSIITGSMLVVGALVSMVVVDRLGRRFLFIEAGIQMISSMVVVAVILALKFGHGEELSKGVGTVLVVAICLFVVAYGWSWGPLGWLVPSELFPLEMRSAGQSVVVCVNLFWTAAVAQCFLAAMCHLRWGVFILFAALIVVMSIFVILLLPETKQVPIEEIWMLFDKHWYWKRIVRKDPKYQGHHHHQMAAMPTAAAKSGSSEV

SEQ ID NO: 155804 - protein, 107 aa, Oryza sativa
  Clone ID: PAT_MRT4530_55533C.1.pep
GGIQALAEAAEKGIFKRSLTAMKTMKDVLPVSYRSSASCRYCSAGGSPSGRGTCSGRTPSRSNEERLFELVAGDEGWPGSCASYFRKLNMINKELVFFMYQICFCCC

SEQ ID NO: 155805 - protein, 201 aa, Oryza sativa
  unsure (1)..(201): unsure at all Xaa locations
  Clone ID: PAT_MRT4530_55534C.1.pep
MVITGRLRPAASSERRLRCLDVVGGGRGTPPATRRDGPLSGCAGSPKSPRASSPSSGSGSTQWKATADSQCSHVSFREKSSYQDPTSSIIYVSDYGFISTGANHNISSAYIKPSLAQRNYNVRFFPDGTRNCYTLRSLQEGNKYFVRAVFYYANYDSLNKLPVFDLYLXANYWHEVKFSNADAVNWMDIIVVAPADYLPVC

SEQ ID NO: 155806 - protein, 74 aa, Oryza sativa
  Clone ID: PAT_MRT4530_55535C.1.pep
LSNCCQLSGLKYHHVVDNRVVFLLESVPDEIRDSARFLSLVPVGTIWGFPRLISDVDIWQLALVYVGLYVDLVS

SEQ ID NO: 155807 - protein, 884 aa, Oryza sativa
  Clone ID: PAT_MRT4530_55536C.1.pep
MECQELSWTWNGISFCSGSGSTQWKATADSQCSHVSFRGFISIDCGIPEKSSYQDPTSSIIYVSDYGFISTGANHNISSAYIKPSLAQRNYNVRFFPDGTRNCYTLRSLQEGNKYFVRAVFYYANYDSLNKLPVFDLYLGANYWHEVKFSNADAVNWMDIIVVAPADYLQVCLVNKGTGTPFISGLDLRPLKSTLYPEANTTQSLVLINSNRFNMGPTDNSITRYPLDPHDRLWSTYDTIPDWTEISATSVVQNYLTDVYDVPSAVMQSAATVNSSRINFTWDPSDPSVNISSKYFFVLYFSELQSVPSNGLRQFDIIVNNNTWNTQPYTPPFLFADSLSGTVQGLASYSVSLVATKNATLPPILNAMEMYLVKPLTEFATDPRDARAMMEVQQNYDVKKNWMGDPCAPKAFAWEGLNCSYPPADSSKITSLNLSSSGLAGSIATYFGDLKSLQYLDLSSNDLSGPIPYNLLQKSQNGSLSLRVGYNAKLCGNDTECGSGQKKIKGSLLSAIIITIVATVALIVVLFLLLRRMLKAKDKRRAAGPTYESALLENREFSYRELKHITNNFSQQVGKGGFGAVFLGYLENGNPVAVKVRSESSSQGGKEFLAEAQHLTRIHHKNLVSLIGYCKDKNHLALVYEYMPEGNLQDHLRATTNKPLTWEQRLHIALDAAQGLEYLHVACKPALIHRDVKSRNILLTTNLGAKIADFGLTKFYQVTELPCHILPILFRYYRNYHISEKSDVYSFGVVLLELITGRPPVIPIDESVSIHIGEFVHQSLDHGSIESIVDARMGGGGGYDINSVWKVADLALHCKREVSRERPTMTEVVAQLKESLELESHGDRKHLVTGDDDVSVSNLGEETALEVEEQSGEISRVSPGPAVR

SEQ ID NO: 155808 - protein, 63 aa, Oryza sativa
  Clone ID: PAT_MRT4530_55537C.1.pep
TTIDYYVRMLHSVGSFPLQRPPPFFFFFPRNFTTFHLIGGGYKGGCIIHNLITVQNLLNLSFT

SEQ ID NO: 155809 - protein, 121 aa, Oryza sativa
  unsure (1)..(121): unsure at all Xaa locations
  Clone ID: PAT_MRT4530_55538C.1.pep
TXESGAXXPLXXXXXKEXRGMSQXXXPRXXXKGXGAXXXTXXXXSPSXGXXREGWXSXXXXGGNPVXXPLXRXANXGNXXXXSGXSVPHXLLLHSLTHSPKVTVFAESRCSCRIRHELGQS

SEQ ID NO: 155810 - protein, 162 aa, Oryza sativa
  Clone ID: PAT_MRT4530_55539C.1.pep
MSRPARSDAHLSPEGEAAMEAEVREYYDEAAPKRHSKPSRSEPSAVYTDALVPDDSHPELDRFQQLEAHTEKLVCEGGKAGDEFVETEYYKDLGCVGKQHHTTGTGFIKMDKPSADASFHLSDDPDASERHASCKGNPATNEWIPSADTVYPASDKPNRSDS

SEQ ID NO: 155811 - protein, 42 aa, Oryza sativa
  Clone ID: PAT_MRT4530_5553C.1.pep
ATFSKSSRCFSHPERLQANLSSSWGMRGYPTCETPSWEREER

SEQ ID NO: 155812 - protein, 71 aa, Oryza sativa
  Clone ID: PAT_MRT4530_55540C.1.pep
NIIMLFLFPVILAAPKHKSVIEAQVLGSTTRLTPQETPCRTVKMHVSYVNNQVWLLYMLVECIHLAVRVVM

SEQ ID NO: 155813 - protein, 64 aa, Oryza sativa
  Clone ID: PAT_MRT4530_55541C.1.pep
HMPMYNYCYMPFGTQQFIFRSSLYSGIPLVLLMTAFFYVLSTSQTTSCENSLRNPKIYQLLHSE

SEQ ID NO: 155814 - protein, 148 aa, Oryza sativa
  Clone ID: PAT_MRT4530_55542C.1.pep
MGGKELSEEQVASMREAFSLFDTDGDGRIAPSELGVLMRSLGGNPTQAQLRDIAAQEKLTAPFDFPRFLDLMRAHLRPEPFDRPLRDAFRVLDKDASGTVSVADLRHVLTSIGEKLEPHEFDEWIREVDVAPDGTIRYDDFIRRIVAK

SEQ ID NO: 155815 - protein, 175 aa, Oryza sativa
  Clone ID: PAT_MRT4530_55543C.1.pep
MILRIRSRDGTDRITVPDPAAATVGDLQRLIAARVTVPVPLQRLSLDPALLLPSSASAALLADPAAPLSSLRLSNGSFVYLSYPPDARSSQPPPPKALSAAGSFGKKMTMDDLIARQIRVTRQEAPLCAAASFDRDSANAFQLHVAESLAFATKRAGFLYGRVDADTKEGFVDFI

SEQ ID NO: 155816 - protein, 152 aa, Oryza sativa
  unsure (1)..(152): unsure at all Xaa locations
  Clone ID: PAT_MRT4530_55544C.1.pep
FVSRCNSFEDAALLLEQLRLFDNFVYGVAYGLLVGSREVWSQAQSLFNQLGRMDSPTSSAFYNALTDVLWHFGQRRKAQQVVFEGINRRVWDNTWGEFCLXDLHLMSCGAAYAMVHAWLLNVRSIVFEGRAMPXFLSILTGWGKHSMIAGAS

SEQ ID NO: 155817 - protein, 306 aa, Oryza sativa
  Clone ID: PAT_MRT4530_55545C.1.pep
MADNFYHNFVKILMTRFRGMMGQTLFLGLQVHEGNAEMISTVNRMCRVPVQEIRACFALVEWMMIVMHNIFDYELQICRLVMRDEIKILASFVSKNSTLWFRMSVEFLTKALTALFGYAMPALECFKAIEQRPGRTDHLRIILVILVIFDDIAGVLTSKIPMYSELRLAFLVYLWYPQTRGTDIVYDTFLRPLVMQYQPNIEERLRYLRANAGDILIFYLKNFTDRGYDLFLRGMEYIRSQTSRGSRTRDSGNVTVQSKNSGYVTVQRWFSFGGDRAERSSYVDDYVAGGGDRRSTARHRRPRDDY

SEQ ID NO: 155818 - protein, 103 aa, Oryza sativa
  Clone ID: PAT_MRT4530_55546C.1.pep
SCHINIILPVMSNKHYNTRDVKNQKALLFQAIRILNLLCTPSLDWDRMELEGFICISNQPACMFVLCTLDICVGRNVSEMCIEYTMKMYGSDILVTRQGFDDT

SEQ ID NO: 155819 - protein, 665 aa, Oryza sativa
  Clone ID: PAT_MRT4530_55547C.1.pep
MLHGPAHSPPPAAAAVAVAGGGGGEPLVVTLNCLEDPSMEQEVLAGAAAVEHAPLSALSSGRVEAAAAVLLTSLAFLPRAAQRRLRPWQLILCLGSPDRAADAAVAAELGLRLVHVDANRAEEVADTVMALFLGLLRRTHLLSRHASSYSAPPAGWLGSVQPLCRGMRRCRGLVLGIVGVNAAARCLATRSLAFSMSVLYFDPLHEANGKTKRPSILFPSAARRMDTLNDLLTASDLVSLHCALTNDTTHILNAERLQHIKPGAFIVNTGSCQLIDDCALKQLLIDGTIAGCALDGAEGPQWMEAWRMINVIDYTFTAHSQVREMPNVLILPRSADYSEEVWIEIREKALAILQSFFYDGVVPNNALSDDEEEITEAGCEDDQLAKQAKEQVCDGGQQTDESQLTLECDKRRAISHSEEPQASGQSQNRENVVPRSEGRRSRSGKKGKKRPARRKSQQKRDELLSTLEGGSNYSSRMDDDTVTSGKDQVLSSSSRFASPEDCKTKLRSSAEFPMEIISENKLTAGLSIKPLERLKDGFVVALRTRDNSGFHVARERVAGVGWYLDVVSKATKRDPAAQFLITFRNKDTMGLRSFVAGGKLLQVNKTMELVFASYSFDVWESWTLEGSLLDCCKLVNRKIPSVVLEVYIEILAAVSEEDGVTRWLD

SEQ ID NO: 155820 - protein, 160 aa, Oryza sativa
  unsure (1)..(160): unsure at all Xaa locations
  Clone ID: PAT_MRT4530_55548C.1.pep
LXHLGMVXIVXXCCXRXEQXXATQSTAXIXSGSSTRSXTNNXXRKXSIISHQXIXSSTVNDTLSXYRARGGXXSSHLXXAAGCXIRXRAXXPRXXXGHCSSRGRSQGPXXRWRLIRXFPYKLALLLSXQXXGXXXMSVEFEGVIPXXSSPAEXXSPXXXP

SEQ ID NO: 155821 - protein, 49 aa, Oryza sativa
  Clone ID: PAT_MRT4530_55549C.1.pep
PHTNKKALLFIKSVFTSTIQPNYHATFPYATKTSKGVHINLFPHKTYFP

SEQ ID NO: 155822 - protein, 105 aa, Oryza sativa
  Clone ID: PAT_MRT4530_5554C.1.pep
MAPEAPAKTGLGLHPPSRHLPIESCAPLLQPPSILRRAWAPLHRRPPPANLHAASHSLHRTVVRPSPSPTAGLCRSVTHACHKPSAYVARARRKPLASVAVSSGL

SEQ ID NO: 155823 - protein, 340 aa, Oryza sativa
  Clone ID: PAT_MRT4530_55550C.1.pep
MQQRRGGGGVPRLAMAVAVLVLAASSAGRCRAQLASGYYAGKCVNGGGGNSSVAVDVESIIHDAVQARLAWDKRMVAGLLHLIFHDCFVAGCDASILLDGPNTEKTAPQNNGIFGYDLIDDIKDTLEKACPGVVSCADIIVAATRDAVGMCGGPRYEVQLGRLDGTVSQAWMAADLPGPDVDIPTAIDMFAKKGLNSFDMAILMGAHTVGVTHCSVIKDRLYNFNGTGEADPSMDPIYVWILTTFACPKSQAFDNIVYLDDPSSILTVDKSYYSQILHRRGVLAVDQKLGDHAATAWMVNFLGTTDFFSSMFPYALNKLAAVDVKTGAAGEIRANCRRTN

SEQ ID NO: 155824 - protein, 126 aa, Oryza sativa
  Clone ID: PAT_MRT4530_55551C.1.pep
VTFYWGHVPNKEPIIPLSEGSSNSSSYCPLSINPDELDGNAGLCGGVLPPCFGLCSMLPRTRAVIAVKKLWRPAAAQAPTPAAAVVVDKDKPVFSTTPDSESPTTGWQNNGQRPLYRGEDETAFHL

SEQ ID NO: 155825 - protein, 59 aa, Oryza sativa
  Clone ID: PAT_MRT4530_55552C.1.pep
LIPRRDERVMLLLGCSLVCLFIHSSRVVDRSHLLVIHSSRVVDRSRLLVLVVIHSSRVV

SEQ ID NO: 155826 - protein, 94 aa, Oryza sativa
  Clone ID: PAT_MRT4530_55553C.1.pep
GFKAQRGPPLEPPGATGAKRPFPQQKVGTALIRGGLKAKPFSLNFGGGGVFPPSLLKLFPPQRSFFIQTGFLGTPPRPIFFKSLFKVQNMGTFV

SEQ ID NO: 155827 - protein, 205 aa, Oryza sativa
  unsure (1)..(205): unsure at all Xaa locations
  Clone ID: PAT_MRT4530_55554C.1.pep
PRVRADVLLGSERRVLISASALPPPETLLGRLDQLDLRLRQLEEQRRANAGDGDGGPAAHHQHSKSLPAAALHHVQAKGSLMDRLNLLESRIRQLSCELDVAAAAGGSSVPAVARPAEDRAWSEPPLPEPCKHQXAPVCXXPXXAAGSWSGAHFLYKGARQLHRTKPNTSTMKNLKEAKCACEKEKRKAEERWKPARRRWFNVGC

SEQ ID NO: 155828 - protein, 132 aa, Oryza sativa
  unsure (1)..(132): unsure at all Xaa locations
  Clone ID: PAT_MRT4530_55555C.1.pep
TSQKFPPVGPSPNLPXNKMTAXESAGRRQXEKELCLKLNXXARPPAPNGGXITNAISFNASSSEXDVDXXXHCXGDXAGXXKAVVVAXXTXFNLXAALLNDKFLXXXVHXXRSPDVXXFXXXNXSXXGPEXI

SEQ ID NO: 155829 - protein, 77 aa, Oryza sativa
  Clone ID: PAT_MRT4530_55556C.1.pep
VLRGRVNCGSVGFNWGSFGGGPSKNPGPPLFRGVCVHKRGAPKNLWIWDGNSPKVFFLVQLVGTQFLIWGDKTPCFF

SEQ ID NO: 155830 - protein, 594 aa, Oryza sativa
  Clone ID: PAT_MRT4530_55557C.1.pep
MDARGGHHRDEEEEAAAAPLLAGAAPLGYSGHRRSHAGDLHVLSAAFLFVFSAYCAAQNLESSVNTEGDLGTVSMGILYTSFTLFSVAASPVVTWLGSKRALVVGTSGYVIFILANLVPTWYTMVPASLYLGFTASIIWVGQGTYLTSAALSHARDNNLPEGQTLGNFNGEFWGMFASTQVIGNLISLALLRDGKDGGSVTGKSLLFVVFLGCMIVGIILMCLLSKRDEKGNNAPTHSSFVAMMKYIVAPLKDRRMILIIPLIAYSGLQQAFVWAVFTKNIVTPVLGISGVGGAMAIYGAADVVAVVLFCPMGGLLGAAVPLFIGALWGVGDGVLNTQLSALLGLLFEDVKEAAFAQLKVWQSGAIAVIFFLSPNITLQAMLILMATALIISFGAFLLLTLVVEKPSTVRSFRLRRRGPWTREEATTATTKAMRRRPAGAGADGGATAPLLAGVAPLGYSGHRWSHAGDLHVLSAAFLFIFSAYCAAQNLQSSVNTEGDLGTVSMGILYTSFTLFAVTASPVVTWLGSKRALVVGTSGYVIFILANLVPTWYTMVPASLYLGFSASIIWVGQGTYFTFAAIHHAPDLEWSESQC

SEQ ID NO: 155831 - protein, 68 aa, Oryza sativa
  Clone ID: PAT_MRT4530_55558C.1.pep
GLLFKNVKKPALAQLKVWQSGAIAVIFFLSPNITLQAMLILMAIALIISFGAFLLLTLVVEKPSTVRS

SEQ ID NO: 155832 - protein, 179 aa, Oryza sativa
  Clone ID: PAT_MRT4530_55559C.1.pep
MARSSPHPPPLTTKRRRRPGVALRCWIRATTVADEEEEEATWSGTALPMRGGGGSGGGGCGRRWIRRLEWPDPEMVTTRTMEYSFDEINFILRIMGLCILVSERQYAGNVLQDVTLESTAQHYHSVQEVEWDPVTSRSEVRGVQFRDFGGPRRRRAPGNTAAEWTARTAEWLGTILDLF

SEQ ID NO: 155833 - protein, 940 aa, Oryza sativa
  Clone ID: PAT_MRT4530_5555C.1.pep
MVEATRQRRKPLVLASTQALLDSLPGDRRGSALPPPPPPEPVRIRAGVLRFPNSSSSSSSAGGGEFGEAASFVALPSSALRRLAVVTGTPVLVKNADNNVGRIAKAVVLDHPCLDDSLTEHTEPVDAASPLDNAMGILPCRSFPTNGFPPLDEEVAYVSPLLAFNLGVHVSCLKLLVQKGEKPFKFCSKVEDSDLAAGEESNPILHLEILPSPQVPKHALHLRVSVVRIPECGVFASLKANSAIGGSDYQDMIDQALNEHFKFDRFLARGDVFCIRNNWNCGATSCLACNREDNRLHPHDMIYFKVTGMEPSDEPVHRVNCNQTALVLGGGASASIPPYSLFASPGASVPLHSEIVEHLASIIAPALCPSNILPKVKFSTFLYGPSGCGKRTVVKHVANHFGLHVVECSCHDLMTSSDSGAPAALVAAFKEAHKYSPCIILLRHFDAIGNTSSNEGTQSAQSGTAANIESVIKQYIGQHWVATESLPARDINGNPYLVEPECVSPLQVILVATADRAEGMPQSIRRCFRHEINMKSINEEQRRNLISETLHCVSTSADESINDKFVKDLAVQTSGFMPRDILALVADAGISFAHKVETDKNNSEGDKLKGILPTSSSSSQNEEKTFCKEYILSSLERAKKRNRAALGTPKVPNVKWEDVGGLEEVKKVILDTIQLPLLYKHLFSSKLGKRSGVLLYGPPGTGKTLLAKAVATECSLNFLSVKGPELINMYVGESEKNVRDIFEKARSARPCVIFFDELDSLAPARGSSSDSAGVMDRVVSQLLVEIDGLSDNSQDLFIIGATNRPDLLDSALLRPGRFDKLLYVGVNSDASYRERILKAQTRKYKLHENVSLLSIAQQCPPNFTGADIYALCADAWYHAAKNLAKTLEADPSRTSEASADDVIVEINDFMTVLGDITPSLSIEELQNYEQLRKKIEGPSR

SEQ ID NO: 155834 - protein, 110 aa, Oryza sativa
  Clone ID: PAT_MRT4530_55560C.1.pep
MTMNSCCLFLGQVQIEGMILVLELSKLFIDGSRCGQHGGKMTNMETLSPIRGDEDVGCGDEVAHQQRWRTPPTMQKKKPIGDGRRPMIMTTGGSRDGRLCRRSCPSTAVE

SEQ ID NO: 155835 - protein, 57 aa, Oryza sativa
  Clone ID: PAT_MRT4530_55561C.1.pep
TPLSLARFSAVGLRWSTSGATPDTAQLVRPPVPVSAFSGRTQCVRTRVRPCVTTKSP

SEQ ID NO: 155836 - protein, 213 aa, Oryza sativa
  Clone ID: PAT_MRT4530_55562C.1.pep
MLQAKTQNPLYYGTEGVSIRMQKSCCSRVHQLPSWFWNITSLQYLDLSSNRLYGQIPHKLMMTSLQFLDLSLNKISGEIPATLSNLTFLSYLDLSYNNLTGGIPSGTQLNSLYAANPFMYIGNIGLCGHPLQNNCSRDNASKQGRHQGGTKEGHGIDFFYLGLGCGFITGTWMAFGVLLFKRRWRIAFFQLPDKLYDKVYVLVATWARRTQTD

SEQ ID NO: 155837 - protein, 90 aa, Oryza sativa
  Clone ID: PAT_MRT4530_55563C.1.pep
MIIAGGPLCGPPVITDLRRRTANSSPVLVFTGEVFAQKPPTTVKRMRGKVRHQPGPRGEASMNHDAGGCTGREGRSASCVAHRAFLHAPT

SEQ ID NO: 155838 - protein, 622 aa, Oryza sativa
  Clone ID: PAT_MRT4530_55564C.1.pep
MPPSPPLRHLLSFRRRPLAPRFLLLPRRFSASASASALQAATPPPSSSSAARLAAAVHGSAASGDFAHAIRLTKHLVRASSSPSHRPGAAGAAAAAALASTSASPAPALGVLVIALSQMALPDEALSVFGRLRELPALPACNAILDGLVKAHMLARVWELFDEMLGRGMVPSVVTYNTLINACRHQGDVAKAWEVWDQMVARRIDPNVVTYTTMICALCEEDCIGDAEGLFLEMKEAGMRPNLYTYNALMSSHFKRDNIKHALVFYYDLLKCGLVPNDVIFTTLIDGLCQANRITEAKNIFLDMPRYEVAPTVPVYNSLIHGAFRSGYAQEALAFFQEIIRKGLRPDEFTCSIVVRGLCDGGQMQVATRFLEVMQQSGIALNAAAYNVLIDEYCKSGNLDEALVTCTRMSEVGVEPNVVTYSSLIDGHSKNGEMEIAMAIYTEMVAKGVEPNVVTYTALIHGHAKNGDMDAAFWLQKEMEEKGIYSNAITVSVLVDGLCRENRVQDAVRFIMEYSGQKKSEKNPSIANSVTYMTLIYGLYIDGQYNEACHFFSCMRDSGMVPDRFTYTLVIRGLCMLGYVLNAMMLYADMVKLDMRCVRSWEMGGVAEHERLVGQTVDCPSC

SEQ ID NO: 155839 - protein, 321 aa, Oryza sativa
  Clone ID: PAT_MRT4530_55565C.1.pep
MNDEAPGRRRRRRWSRGGGRRRGAMNMTKHLWSGAVAAMVSRTVVAPLERLKLEYIVRAEQRNLFELIHAIATTQGLKGFWKGNFVNILRTAPFKAVNFYAYDTYRKQLLKWSGNDETTNFERFIAGAAAGVTATILCIPMDTIRTRMVAPGGEALGGVIGVARHMIQTEGFFSLYKGLVPSLISMAPSGAVFYGVYDILKMGYLHSPEGKRRVSTMKQQGQEANALDQLELGTVRTLLYGAIAGCCAEAATYPFEVVRRQLQMQVKATRMNAFATCLKIVDQGGVPALYAGLIPSLLQVLPSASISYFVYELMKIVLKVE

SEQ ID NO: 155840 - protein, 104 aa, Oryza sativa
  unsure (1)..(104): unsure at all Xaa locations
  Clone ID: PAT_MRT4530_55566C.1.pep
IYIYIYIYIYIYIYIYIYIYIYIXIYIYIHTYIYIYIHIYIYTYIYIYIHTYIYIYIYTYIYIYIYIYIYIYIYIYIYIYIYIYIYIYMVSLFAITEVPNWSLS

SEQ ID NO: 155841 - protein, 489 aa, Oryza sativa
  Clone ID: PAT_MRT4530_55567C.1.pep
MAVSLKSSGSFCSTPPQWLHSTRDRILYGYSHSNAKECTCKKTKRPAPLCVKATSTKVELDFNDPSWKQKFQEDWDKRFNLPRITDIYDLKPRPTTFSLKKNRSPAGDENGTPMDKWNGYVNSDDRALLKVIKYSSPNSAGAECIDPDCSWVEQWVHRAGPRKEIYYEPEEVKAAIVTCGGLCPGLNDVIRQIVFTLETYGVKNIVGIPFGYRGFFEKGLKEMPLSRHLVENINLAGGSFLGVSRGGAKTSEIVDSIQARRIDMLFVLGGNGTHAGANAIHEECRKRKLKVSVVAVPKTIDNDILLMDKTFGFDTAVEEAQRAINSAYIEVPFTLDGEYGVLRHLEHLLKTKGFCVVCVAEAAGQIQLEARATDASGNVILSDIGVHMQQKIKMHFKDIGVPADVKYIDPTYMVRACRANASDAILCTVLGQNAVHGAFAGFSGITSCICNTHYVYLPITEVITVPKRVNPNSRMWHRCLTSTGQPDFH

SEQ ID NO: 155842 - protein, 70 aa, Oryza sativa
  Clone ID: PAT_MRT4530_55568C.1.pep
LFYVHYRSLQKSGATDASGNVILSDIGVHMQQKIKMHFKDIGVPADVKYIDPTYMVRACRANASDAILCT

SEQ ID NO: 155843 - protein, 207 aa, Oryza sativa
  Clone ID: PAT_MRT4530_55569C.1.pep
MKVKVKERLTREEVERLLSFVPRPFPPRDRPRCDDPDVNEMEDLLAHTVLLLNSNNQVILRAQARAREELRTKGYVERWTSIASSARVHQFTKSIPIPNKATPSEEEELKGREEDRCVAMTNELKRCSKEATPSEEKAAKKMKKEEAVKKKRMPMERVHHLLSMVPRAPVPLPVIRDDSPELKEIDQRRAGSQHQLSTHPPDAGQRP

SEQ ID NO: 155844 - protein, 943 aa, Oryza sativa
  unsure (1)..(943): unsure at all Xaa locations
  Clone ID: PAT_MRT4530_5556C.1.pep
QKAKSHQLPYSRSSSVSSHPLELVFSDVWGPAPDFVGNKKYYVSFIDDYSKFTSVYFLKHKSEVFQKFHEYQALVERLTGQKIIAMQTNWGGEYEKLHPLFEKIGISYHVSCPHTHQQNGSTERKHHHVIEVGLALLANAYMPLKFWDKAFLTAAYLINRTPSKVINLEMPLELLFHQTPNYQFLRIFGCACWPNLCPYNNHKLQFRSKQCVFLGYSNLHKGFKCLDIPTGRVYISRDVIFDENVFPFSSLHSNAGARLRTEISLLPPSLXLPVLITGVXQRSDYVFNVPANSISAEENNAQGTQAGGDVAADRGGXDAKSAEVMSPATSPVSTCPTHSSQQKQSPAASDQQQQQQSSQESSQQQQSPAPSTADIDQLTQGEETEVEATEPLHYQVNTGADVQQGRPKTQSEICKEKVXTDGKIKWXCFTASGEPQNLHEAFTNKNWKDAMDAEYDALMKNETWHLVPLEKGRSVIDCKWVYKIKRKADGSLDRYKARLVAKGFKQRYGIDYEDTFSPIVKAATIRTILSIAVSRGWSLRXLDVQNALLHGVLEEEVYMRQPPGYESEKVPNYVCKLDKALYGLKQAPRAWYSRLSTKFHELGFKSSKADTSLFLYNKGNVTMFVLIYVDDIIVASSMASATSAFLQDLTKAFSLKDLGDLHYFLGIEVXKVNSGIILTQEKYANDILRRVXMQDCKPVSTPLLTSKKLSAHEGTPLGQNDATQYRSIVGALQYLTLTRPDIAYPVNKVCQYLHTPTVTHXTLVKRILRYIKHTVNYGLRISKSPSLFFSGFTDADWAGCIDDRRSTGGFAIFLGCNLVSWSSRKQATVSRSSTEAEYKALANVTAEIMWIXTLLQELGVNAPKAAKVWCDNIGAQYMSANPGVHAXIKHIEVDYHFLRERVARKLLEIEYVSSKDQVADGFTKPLAVRQFEEFKHNLNIRSL

SEQ ID NO: 155845 - protein, 52 aa, Oryza sativa
  Clone ID: PAT_MRT4530_55570C.1.pep
MEGMAEGGRSRLCVHRVMESRVPTMGPMGTVVTMEVEENGGVHMLLTRRKDE

SEQ ID NO: 155846 - protein, 166 aa, Oryza sativa
  Clone ID: PAT_MRT4530_55571C.1.pep
MSSVKRIHCCSVKETIERYKKANSDTSNASTVAEINAQHYQQEAAKLKQQITNLQNSNRTLVGDNITTMNHRELKQLEGRLDKGLGKIRARKETELQNDNMYLKSKVAESERGLQTVNMMGSASTSEYVQNMIHYDPRNFLQFNIMHQPQYYPEQEDRKAFMSDER

SEQ ID NO: 155847 - protein, 39 aa, Oryza sativa
  unsure (1)..(39): unsure at all Xaa locations
  Clone ID: PAT_MRT4530_55572C.1.pep
DRNVAQDQALLAFNFPXTYGIYPRFYSAPGNITTLGGVL

SEQ ID NO: 155848 - protein, 346 aa, Oryza sativa
  unsure (1)..(346): unsure at all Xaa locations
  Clone ID: PAT_MRT4530_55573C.1.pep
MVQCHEVGQPRGERRKVQEEEKHQGQYIDGLSPHRPGLHLISSFPNHSLLLEHTPLFLIIISSLIREELANMHIYKEQEAEPSTGLMMPEPAPVASPGSGGSGGSGSVGAEKIGSRGKIEIKRIENTTNRQVTFCKRRSGLLKKAYELSVLCDAEVALVVFSSRGRLYEYSNNSVKETIERYKKANSDTSNASTVAEINAQHYQQEAAKLKQQITNLQNSNRTLVGDNITTMNHRELKQLEGRLDKGLGKIRARKNELLCAEIEYMQRRETELQNDNMYLKSKVAESERGLQTVNMMGSASTSEYVQNMIHYDPRNFLQFNIMQQLAXPQYYPEQEDRKAFMSDER

SEQ ID NO: 155849 - protein, 463 aa, Oryza sativa
  Clone ID: PAT_MRT4530_55574C.1.pep
MTSLSSSAAAARATFVMPSSVRGGMSRGRRMARLVTRAAASSPKLPSGRRLRVAVVGGGPAGGAAAEALAKGGVETVLIERKLDNCKPCGGAIPLCMVSEFDLPLDLVDRKVRKMKMISPSNVAVDIGGTLAPHEYIGMVRREVLDAYLRSRAEGAGAEVVNGLFLRYEAPKEPNGSYVVHYNHYDSSNGKAGGEKRTFEVDAIVGADGANSRVAKDMGAGDYEYAIAFQERVKIPDDKMKYYEERAEMYVGDDVSPDFYGWVFPKCDHVAVGTGTVTHKPDIKKFQAATRLRAKDRIEGGKIIRVEAHPIPEHPRPKRVAGRVTLVGDAAGYVTKCSGEGIYFAAKSGRMCAEAIVAGSANGTRMVEESDLRRYLAEFDRLYWPTYKVLDVLQKVFYRSNAAREAFVEMCADDYVQRMTFDSYLYKRVVPGNPLDDIKLAVNTIGSLVRATALRREMEKVTL

SEQ ID NO: 155850 - protein, 99 aa, Oryza sativa
  Clone ID: PAT_MRT4530_55575C.1.pep
MVAIDDEFGSFVVTVVSSSASVCGRPGRLVFSWQPLRCHFYSHDEDVEHLFLRCPKPVTVKLGTGDEERRNVHGLVATNGMAPSVFVAAVFGISVVGAA

SEQ ID NO: 155851 - protein, 723 aa, Oryza sativa
  unsure (1)..(723): unsure at all Xaa locations
  Clone ID: PAT_MRT4530_55576C.1.pep
MKKQGGGGGVAAAAVAAAGMVKAELEDVGIKAAGGAVAALSPLSETLWREKAAAEFLGDVSARLAWRDLTVTVVLGGGGGGGGGGXTQDVLQGLTGHAEPGTITALMGPSGSGKSTLLDALAGRLAANAFLDGTVLLNGRKANLSFGAAAYVTQDDNLIGTLTVRETISYSARLRLPDKMPMEEKRALVEGTIVEMGLQDCADTVVGNWHLRGISGGEKRRVSIALEILMRPRLLFLDEPTSGLDSASAFFVTQTLRGLARDGRTVIASIHQPSSEVFELFDRLYLLSGGKTVYFGLASEACQFFAQAGFPCPPLRNPSDHFLRCINADFDKVKATLKGSMKRRFERSDDPLDRIMTSEAIRRLITYYKNSQYYFAAQQKVNEMARVKGTVLDAGGSQASFWMQAFTLTKRSFINMSRDFGYYWLRLIIYIVVTVCIGTIYLNVGTRYSSILARGACASFVFGFVTFMSIGGFPSFVEDMKVFQRERLNGHYGVLAFVISNTISAMPFLILITFISGTMCYFMVRLHPGFTHYLFFVLCLYASVTVVESLMMAIASVIPNFLMGIIIGAGIQGIFMLVSGYFRLPHDIPKPFWRYPMSYISFHYWALQGQYQNDLKGLVFDNQDDELPKIPGEYILENVFQIDVSRSKWLDLAVLFSMIFIYRLLFFAMIKVSEDVTPWVRGYVARRRVQGKGARGRRADLSAARSPSLRAYVVDAADDLPPA

SEQ ID NO: 155852 - protein, 565 aa, Oryza sativa
  Clone ID: PAT_MRT4530_55577C.1.pep
MGGEPRARAEAAWAAALPAALVALVRDTATYTRMMHRLRMETPRGPTCQLDPCCCCCTAHVIPPPPPVSRTHATRRDAEASVPPPPASAAVSSRSDGTGQMAAGVTLACAAPPPLRAPRASDGGRRRGVVKGGAGTDTCRSPQRLNVRPRERERVRACVRARAKNHEHGQRRREAAVDPAMSGEYQFQDELAPLFARPGGGAGEMQMLPSSWFADYLQAGTPMQMDYDLMCRALELPVGEDVKREVGVVDVVAAGGGGAPPLTPNTTSSMSTSSSEGVGGGGGGGAGAGAGEEESPARCKKEEDENKEEGKGEEDEGHKNKKGSAAKGGKAGKGEKRARQPRFAFMTKSEVDHLEDGYRWRKYGQKAVKNSPYPRSYYRCTTQKCPVKKRVERSYQDPAVVITTYEGKHTHPIPATLRGSTHLLAAHAQAAAAAAAAHQLHHHHGHHGHHGMAPPLPLGSGAAAQFGRSSGIDVLSSFLPRAAAAHHGMTTMGGAAATTTTSHGLNSAISGGGGVSSETTSAVTVAASAQPSSPAALQMQHFMAQDLGLLQDMLLPSFIHGTNQP

SEQ ID NO: 155853 - protein, 56 aa, Oryza sativa
  Clone ID: PAT_MRT4530_55578C.1.pep
QRQHNVHFSHMHKDWTNCCQQCLQKKIGDNSMAYFRLLFMKHNMFASGILKFWQPH

SEQ ID NO: 155854 - protein, 63 aa, Oryza sativa
  unsure (1)..(63): unsure at all Xaa locations
  Clone ID: PAT_MRT4530_55579C.1.pep
RSMADTTVVAGMHADQIVSCMXFLRNMDVVEVSTFLFIRECEHCGXRYVGSVSRELTAEIFRS

SEQ ID NO: 155855 - protein, 107 aa, Oryza sativa
  unsure (1)..(107): unsure at all Xaa locations
  Clone ID: PAT_MRT4530_5557C.1.pep
NHTHSRILGMKTPYXFGKNEFIILPKVFSRTFFVRDNKSCVGKLDPRTVKCTYRQFIWPFVQNDXTFVSMDVAFRESVPFHVEMTKLSCLFINLNESTSDDHDHQHV

SEQ ID NO: 155856 - protein, 102 aa, Oryza sativa
  Clone ID: PAT_MRT4530_55580C.1.pep
MARCKSSCDNRSHSRIDRWCPVDLQNTEAESCPQMKYKGSSTWQWQCLLSGHLAFVAAVYHKRIVVTFPSPIPSVDRLFFSGAGGFAADPLTALALLAPVRW

SEQ ID NO: 155857 - protein, 335 aa, Oryza sativa
  unsure (1)..(335): unsure at all Xaa locations
  Clone ID: PAT_MRT4530_55581C.1.pep
SAPPARIHRRETGDDELRRRSPAARKGANGGGATRIQFEAVEASPGFKESVSGVGWGGRAPRRAGDEQRPPRAGGNGGEAIPGGGGXEKRRFGRGNRHRAVKAATGSGARARLVATGGRRRQRQRPGKGKKGEEKGTLLLAQNWMRDKGRESGGKEGEELCLHCLEGRGLEQRTGGDAGGDHGGLCLPVLDASGVQRQSGSVRCSWSQGSRPPRRSARAERGRGFKLRQREFWRRAERYRPQAHRHLASISDPCCKLATELHTSPRKGVAGLASSMGQWVIYGDGNGGCESSEGGSDNNDGLARSGRLVVSSADSMGKKRGGCGIESEEMMGGST

SEQ ID NO: 155858 - protein, 161 aa, Oryza sativa
  Clone ID: PAT_MRT4530_55582C.1.pep
MAWDYLASEPYDFRTIQAKLSPVQNFVLREGGGGLGTRGTLSTTGDGDLDGLRDIGTTIGRSIAYGNTEGEDLEIHFGNILKWKVVKTHYLHYMYKESQQEANQNLRALKERIALDCIQLQLADFSSDGWVEGKAVQIELAIFNNELTLGECKSPNPTVCS

SEQ ID NO: 155859 - protein, 146 aa, Oryza sativa
  Clone ID: PAT_MRT4530_55583C.1.pep
MALRNLLNLEKPLPPSLPTAGSGTVKTPHHRIHHRQGSLPLDPPPPSLPTVAAAIPAHHRQIRLPYHRRCRICPSRGQSAADLRGRRRGPSTVAMVDLIRRHHRTTSHHRRQEREERSGRSKEMSRAEKWRRGEERGCGGPDRYFF

SEQ ID NO: 155860 - protein, 143 aa, Oryza sativa
  Clone ID: PAT_MRT4530_55584C.1.pep
LNNYALAPAAIHREPDNLALVSSIAKQGGGGRKGQSPFSRAGHSITGDLLPSKATLPICITGDQILKSLLPTQTQAYPAHQIKNHNPLFPTSTGGSCVSLNTGELYIGMLHLSVSGFSKMVRWGSLIGAPAPSLPFDIAPSLL

SEQ ID NO: 155861 - protein, 60 aa, Oryza sativa
  Clone ID: PAT_MRT4530_55585C.1.pep
MDVRKIYARERSFERGGMKVALVDGISGISVLADGVRLKVVKVSAVSLLALFKEKKKQRS

SEQ ID NO: 155862 - protein, 136 aa, Oryza sativa
  unsure (1)..(136): unsure at all Xaa locations
  Clone ID: PAT_MRT4530_55586C.1.pep
ECLVSTYLNVSTYPIVGVNQPIKGYXQRIAHYCEEHKKTAVSPTIFSLQHWWADIQRDTSRFCGFFAQVERRTHSGVNESDKVGLWLGYSIQLXSAFNFMHCWLMLKDEMKWTTQLVGRQLFVSPTRQQVRKPCTE

SEQ ID NO: 155863 - protein, 817 aa, Oryza sativa
  Clone ID: PAT_MRT4530_55587C.1.pep
MSGAPKRSHEEGSHSTPAKRPLDDSSLYSSPSGKIIQPGSSDFHGSFEHDGRFAKVQRIEPRDDKRPSLAHRMPIGPSNFVDHSISSDGRLESKQNKDPWDTKVDVREAKADTRDVYSDPRVEFPSNKVETDVKTDNRADDNDIRADRRIHADYKGDAKLDKDGHPTAISNIAWKDNKEHRGKRNIEQPSDNADWRFPRPGLQGTDESSKGPVPADERSKDAHESTGENKTEPKTEDKFRDKDRKKKDEKHRDFGTRDNDRNDRRIGIQLGGNSVERRENQREDRDAEKWDRERKDSQKDKEGNDREKDSAKESSVATEKENAILEKTASDGAVKSAEHENKTVEQKTLKDDAWKSHDRDPKDKKREKDMDAGERHDQRSKYNDKESDDTCPEGDIEKDKEALGSVQRKRMARSRGGSQASQREPRFRSRMRDGEGSQGKSEASAIVYKAGECMQELLKSWKEFEATPEAKSAESVQNGPTLEIRIPAEFVTSTNRQVKGAQLWGTDIYTNDSDLVAVLMHTGYCSPTSSPPPSAIQELRATVRVLPPQDSYTSTLRNNVRSRAWGAGIGCSFRIERCCIVKKGGGTIDLEPRLSHTSAVEPTLAPNALRQQRFVREVTIQYNLCNEPWLKYSISIVADKGLKKSLYTSARLKKGEVIYLETHYNRYELLPLTIWPSPEVIFLTSVEHSSFISPPPVTASFHRYELCFSGEKARLVGSSSNAADAETEKHQNSSHHHSQNGDRASSEHELRDLFRWSRCKKAMPESSMRSIGIPLPADQLEVLQDNLEWEDVQWSQTGVWVAGKEYPLARVHFLSSN

SEQ ID NO: 155864 - protein, 57 aa, Oryza sativa
  unsure (1)..(57): unsure at all Xaa locations
  Clone ID: PAT_MRT4530_55588C.1.pep
RFLSFQYLDLYLHIFISTNMLLSCAFFKRIETPKXFTSTFAWILSKECXCICLDNRI

SEQ ID NO: 155865 - protein, 520 aa, Oryza sativa
  Clone ID: PAT_MRT4530_55589C.1.pep
CSSSTNPVAENELLTSEFSEEEVKNAIFQMEHNKAPGPDGFPAEFYQMFWEVIKDDLMAVFRDFHRGNLSLNNLNFGIITLLPKNKEARQIQQYRPICLLNVSFKVFTKIMTNRIALVAQKVIRPSQTAFLKGRNIMEGAIILHETLHEMHRKKLDGVILKLDFEKTYDKVDWKFLQQTMRMKGFSERWCKWIEQIVTGGSVAVKVNDEIGNFFQTKKGLRQGDPLSPILFNLVADMLAILINRSTERGMTRGVIPNLVDNGLSILQYADDTIIFMENDVEEAKNLKMVLSAYEKLSGLKINFHKSEMFCYGKAKEVENAFSFLFGCKIECGGLGIQNLEIQNKCMLSKWIFKLINEEGIWQNLLRKKYLAKKTILQVQKQQGDSNFWASLMTAKESFQLLGHFKVRNGKQVRFWEDCWMGNKSLEKEFPNLYNLVQNKNTVVAKVLETILLNMSFRRAIVGKNLEDWYVIVSKVANVNLTSHLDQFIWKTNKQGLFTVNSMYKLLMFDGVIPRNRRGLR

SEQ ID NO: 155866 - protein, 60 aa, Oryza sativa
  Clone ID: PAT_MRT4530_5558C.1.pep
KAQERLRRAGLLKDSDELKQKSNKSVAFEPEKELKCDCHPTSAYQSTYPKHNSWGLFAAS

SEQ ID NO: 155867 - protein, 871 aa, Oryza sativa
  Clone ID: PAT_MRT4530_55590C.1.pep
MGSLLGATQLVDTKTTRKNEFGRFFVAVLNPKLIPKMIDVVIGDHYFELKFEVEKKGVDENGEEVEFNLEDWDGDEEDGNSEGEEYKENNEGKERESKRTKNDDMAIDDNKENSERKENEVQEGGDQGREDVILEMAENVLDVAVERVLGEEYERVEREEEKIDGAVMQQEKVEQLANIEEVLVTPKRASERLMGSSGRHSLEKEKSRKVWMNLDLLSGDSSNLVSDSVLILKETEFLRSEELGDKVSPSIEKLNDSCNDEEEEYVDSDLLNHLCGDTMDEVMDDEDFHLSCEIDDILIKSYPKKSRKGEQKLDFIALLETSKNKYTDSWLKSIYGGREFLWHWTRPKGRSEGILLGVNLEYFKVSSIDEGDFYVKFHVRNKEDAFQWILVAVYGATQEEYKEAFLTELVNSCRKEALPMVIGGDFNIIRKPQEKNNANFNVKWSFLFNAVINSLNLREIILSGRKFTWANAMPNPTYEKLDRVLFLRGWAKNTSGAYKKEKVKLMAKADELDKLAETRLLTSQELELKNSVKHALAKMLREEEIKWYQRAKTRQIVGDRNTKYYQMIANGKHRKTKIFQLDQEEGIIKGNEQLKKYISNYYKNLFGAPEKNNFSMCENQKDDIPQISVAENELLTSEFSEEEVKNAIFQMEHNKAPGPDGFPAEFYQVFWEVIKDDLMAVFRDFHRGNLSLNNLNFGIITLLPKNKEARQIQQYRPICLLNVSFKVFTKVMTNRIALVAQKVIRPSQTAFLKGRNIMEGAIILYETLHEMHRKKLDGVILKLDFEKAYDKVQMQQGDSHFWASLMTAKESFQLLGHFKVIFKATHWARLWSLLLKKVEGEKAQVKCRILEKRVMEFFSTFGWNFRRRIEV

SEQ ID NO: 155868 - protein, 101 aa, Oryza sativa
  Clone ID: PAT_MRT4530_55591C.1.pep
DKPEGVIEKIVPNKRQCVTVVKGLELIGVQLSDASKKLGKKFGPGASVVKGPTEKEQIDVQGDISSKVESQGPRARRKSYGPPELDILFYNTNLENCDLEV

SEQ ID NO: 155869 - protein, 400 aa, Oryza sativa
  unsure (1)..(400): unsure at all Xaa locations
  Clone ID: PAT_MRT4530_55592C.1.pep
WKMVLSAYEKLSGLKINFHKSEMFCYGKAKEVENAFSFLFGCKIGSYPFRYLGLPMHYKRLANKDWKELEDRFEKKLSSWKGKFLSTRGRLLLINSVLSSLAMYMLSFFEIPKGILKKLDYYRSRFFWQCDEHKKKYRLAKWSVLCKPKECGGLGIQDLEIQNKCMLSKWIFKLINEEEIWQNFLRKKYLAKKKPFYRFKSNXGDSHFWASLMTAKESFQLLGHFKVRNGKQVRFWEDCWMGNKSLEKEFPNLYNLVQNKNTVVAKVLETIPLNVSFRRAIVGKNLKDWYVIVSKVANVNLTSHLDQFIWKTNKQGLFTVNSMYKLLMFDDVIPRKSLIWKLRIPLKIKIFLXYLNKGVILTKDNLAKRRWKGSLLCSFCNSKESIQHLFFDCIMARYIW

SEQ ID NO: 155870 - protein, 205 aa, Oryza sativa
  unsure (1)..(205): unsure at all Xaa locations
  Clone ID: PAT_MRT4530_55593C.1.pep
GGGXPREXXKXGGGGFXXPKXGNXGXGGFPPXXXQXGGAXGAXXXXLKKDFFFLKXXGFXVXGSXPPXGNXKRGGXRXFWXXKVNXRXXGGXPXXMXARGGEXXXAGRXRKXXEFXPRWXPRREKXXXRAXXXGRXWRRWLXRSXXLXXEKHRNPQNKFICLNVGXSSXNLSIYLSIYLSIYLSIYLSIIIIIIIIIIIIIIIII

SEQ ID NO: 155871 - protein, 239 aa, Oryza sativa
  Clone ID: PAT_MRT4530_55594C.1.pep
MSREEDEKLLFPSFAFPAECFPEAATSGGEQKKARQRRRRKVKPEAAAALAGESGGDEQAKKRRLSDEQARFLEMSFKKERKLETPRKVQLAAELGLDAKQVAVWFQNRRARHKSKLMEEEFAKLRSAHDAVVLQNCHLETELLKLKERLADVEEEKAKLAAVAAATTGGGGGGGGGSSSPTSSSFSTVTYHPALAGQFGVEAAAEEADLTYMSEYAYNSYMLELAAAGYCGGVYDQFS

SEQ ID NO: 155872 - protein, 128 aa, Oryza sativa
  Clone ID: PAT_MRT4530_55595C.1.pep
HLAHHLVELAGRPGAFLYNREHAVEQVLADTLFLGSQKRSFFSLGEGALVKLGTEVVEAASVLTYSEHSMKQIESEFTIMRAFISQVSAEKVGDKTFDAWLDQVRDVAHDVEDIVDEYAYLAAQAIDT

SEQ ID NO: 155873 - protein, 114 aa, Oryza sativa
  unsure (1)..(114): unsure at all Xaa locations
  Clone ID: PAT_MRT4530_55596C.1.pep
WGVVKKEIGKFCKAYSRDRSTXSSGYYDDMIMEKAHIIFKSENNXKKPFTLVYMWRELKDQPKWRRFLEEDKKNKSTKISKSGAYTSXSNQAYISSSNQDTEEETIRKEKRHEG

SEQ ID NO: 155874 - protein, 159 aa, Oryza sativa
  Clone ID: PAT_MRT4530_55597C.1.pep
MTTEQEAEDEVVLESPAHFRIYKSGKIDRLNRPPVLPAGLDEATGVTSKDVVLDADTGVSVRLFLPKLQEPSKKLPVVVFFHGGAFFIESAGSETYHNYVNSLAAAAGVLVVSVDYRLAPEHPLPAGYDDSWAALQWAASAQDGWIAEHGDTARLFVAG

SEQ ID NO: 155875 - protein, 91 aa, Oryza sativa
  unsure (1)..(91): unsure at all Xaa locations
  Clone ID: PAT_MRT4530_55598C.1.pep
MKRTGTWRYLGHSRPFKAHHLDRHACSTARIRADXELCSGPDRRDILPPFSMHTLVLLEGAAPDHYWWYTDWLCEDPVALAWDRALEVIHG

SEQ ID NO: 155876 - protein, 492 aa, Oryza sativa
  unsure (1)..(492): unsure at all Xaa locations
  Clone ID: PAT_MRT4530_55599C.1.pep
MPDELPIPGPMPSKLLNTGTYGTFAFLGDTSAPSSSSSNPAESTDPSDGLGRNQLEVDEGTNEASHTTKYMEDLVPKIGMKFSSEQEAYDFYNAYALKKGFSIRRSSYHYMGNTKIIXKNKTFCCSCQGSRGIDKRAEASGYGDSFSWPETRCKCQACMKISIIDGLYSIYHFVPEHNHNLATRSQAHQLRSQRKINEAQIASVEVAKSVGISTKAAIDLMAKQACGFENLGFTRVDMKNKLYSKRSLQTKQGDTGGVLEYMEKKASEDVKFFYSIQVDEDVLITNIFWADSKMVADYEDFGDVVCFDTTYRKLDDGHPFGLLVGVNNHKKTTVFGAALLYDETANSFVWLFNTFLNVISGKKPKTILPNEDAAMAKAIKIVLPETHHRICVWHMNQNACKHLTGCVKDYKKFNADFQNCIYDQEEEEEFLRAWGQLLEKYELQQNTWLQRIFKKREQWALHFDRLVGDKRYEEVKCDFRATQSTLKFKINF

SEQ ID NO: 155877 - protein, 182 aa, Oryza sativa
  unsure (1)..(182): unsure at all Xaa locations
  Clone ID: PAT_MRT4530_5559C.1.pep
MAIHTDPGVWGPNAERFLPERHRAHDADGEQQHEHDGFALVPFGIGRRSCPGVHFAAAAAELLLANLLFCFDWRALPGREVDVEEENGLADWVKTVQEAAASVVRTGRLQGTDKRMVVPVADRHWFSRRAVSGWLGAALVLDRQRPTSTCRIRPEFVEDACETRXARTIDARVRQSGGSVWN

SEQ ID NO: 155878 - protein, 161 aa, Oryza sativa
  unsure (1)..(161): unsure at all Xaa locations
  Clone ID: PAT_MRT4530_555C.1.pep
MATASSTPAPYVVEDCGPNLQLLSDGTVVRFEDXEHPPSGTGVAPPPLSAVQWKDVVYDAGRGLKLRAYKPQAAVAGEKQNLPVLVYFHGSGYIRASRRRPLXPIYRLPAAHGDAATVMSLVRDQVVATGDPWLSESSADFGRVFISGDQAWPNIFHHVTS

SEQ ID NO: 155879 - protein, 79 aa, Oryza sativa
  Clone ID: PAT_MRT4530_55600C.1.pep
MAPSPDRYTPTPSRLPLALKAAAQAETPTFADNYTPPPSRVDEAHALMEQRMLMEANVVIWGTLLGACERHENVRVGHN

SEQ ID NO: 155880 - protein, 52 aa, Oryza sativa
  unsure (1)..(52): unsure at all Xaa locations
  Clone ID: PAT_MRT4530_55601C.1.pep
VRVCLCLCXVVXSHCLFLLSXLGVISSTTAXCLXILTLSFCISFSMXCSSAL

SEQ ID NO: 155881 - protein, 54 aa, Oryza sativa
  Clone ID: PAT_MRT4530_55602C.1.pep
HKSDSSRSQRLSLKALAFGSHGDMVQIPRVSQGGVDTAAESTEQNRNSLCRRFQ

SEQ ID NO: 155882 - protein, 62 aa, Oryza sativa
  Clone ID: PAT_MRT4530_55603C.1.pep
MAKQTNKQGFAKSPNRGAHQQQRTGVSSDPTVAAQHTGSNSGGSRNEKLGVGGGLNILGTPA

SEQ ID NO: 155883 - protein, 148 aa, Oryza sativa
  unsure (1)..(148): unsure at all Xaa locations
  Clone ID: PAT_MRT4530_55604C.1.pep
DSESFVSLEGLVSPYGYXNIYTRGHCKISQQSIQLLSTHRHPLYRGFYLSSGGTWHLTRGHIGSVRSPVKGXVLRSAGPGNCIGFIGVVQGCIXVHSNSWIALVRLIYLPTXSYASVNLILAYRFSSIGCFSLXGFCQYRLNRVAILD

SEQ ID NO: 155884 - protein, 53 aa, Oryza sativa
  Clone ID: PAT_MRT4530_55605C.1.pep
ITHGVHHSNIELKLLTAGPIIPSLICLSILCVCTVSIKLRTHSTLGSSIKGAG

SEQ ID NO: 155885 - protein, 119 aa, Oryza sativa
  Clone ID: PAT_MRT4530_55606C.1.pep
AAAGRGSPPPPLPLDLADGRVRPPPPPPRRAEGSPSPPTSSRPRRRLQSPPPRLPPDLAEGRAQLPPPPPPLQAAAGRGSPPPTRCGSGREGGERRQLSSHSPRASALPVASATAFLAS

SEQ ID NO: 155886 - protein, 373 aa, Oryza sativa
  Clone ID: PAT_MRT4530_55607C.1.pep
MPPGATSPAPPASLTTLAVIAAWRGRRPGAPHLPSLGSCRTWKPAASPPAGSGGWEGAATSATAVSPGNRRSWEHAAYDCSPPPPGSCDHGSPSAAAYECSHRERERREAEGGGEPVAAYEFSPPPPAAEPTASPPAGSSGGEGTAASTTAASPGSRRSWEPASYEVWIWKGGRGASPALLPLATCLRAAGGLCHRLPSILICEGGRGGESQWLVARSPSAVATALRAAGGGSKGSISDRYLKRSALKNKGIFAEPDSPPLLRRSFLALFPVAPAFHEPMAGTARHEVPIGPCRPDGCTRTSCTFEFLQKTESTHFEIADVTTGVSLSIAGHCPRRSGTGCPRRARLTPTRQVTCAYNVAVASTCHFDRAGSR

SEQ ID NO: 155887 - protein, 46 aa, Oryza sativa
  Clone ID: PAT_MRT4530_55608C.1.pep
MTGLSPVSGEGRHWAPLEDKLWLSFQAKARVEFWRTLLTEKKENAE

SEQ ID NO: 155888 - protein, 124 aa, Oryza sativa
  Clone ID: PAT_MRT4530_55609C.1.pep
ASPPPPITEARHRSSVSTIDLCRRYRSGNTDPLQLRLLFGDEPPPPPPSQRRLGFGKDVRWAIPSLSDRPDSLKAYPPSFHVILATLCFSLSSLFLARRRPEQATSGVGDGREHRATASELLRP

SEQ ID NO: 155889 - protein, 249 aa, Oryza sativa
  Clone ID: PAT_MRT4530_5560C.1.pep
VDHLRRLPQHREAVADAHPREALTTARIDSGGRCHWRLPIWEAEALENFGFYQISKMKTIKIDKYLISALVERWRPETNSFHLPIGEMTITLQNISCLWGLSIQGKPIVGQSDGNWGDMIERYLGIPPEHQEMKNSINLSKLRDHFHVMPNNPTQREIDWHSRAIILEILGSIIFTDASGDSVPAMYLQFMDNLAVQTEYNWGAAALAMLYRQLSIGAEKARSEIFGPLVLLQLWSWSRLLLGRPKQTI

SEQ ID NO: 155890 - protein, 383 aa, Oryza sativa
  Clone ID: PAT_MRT4530_55610C.1.pep
MSSSLFLLPLLSLSFSFCSLSYGRPRGARAGANKLRVGAKNRFDRRIPPDLTNCTSLQFLDMSTNTLGGNMQEILGKFVALKYLVLHHNDYTGSIVSSNVLRLPLLARLDLSFNQFSGELPLEVVNMKSLKYVMLLANNFSGGIPATYPPFNFVYTVMMRENCRSIWVRLLKGYGIIPICTNSSSPVRSNTISGYVQLSGNKLSGEIPSQIGAMRNLSLLHLDNNQLTGHLPPEISQLPLVVLNVSSNIISGRIITGMVMFIMANLRVRFPVDQDPNPESLSCENPKCGGGGGKCGAFHMSATSSPPSGCSSSCVTGCSRLLPPRTRYSAAAGGSIHAGRTLQRLHASPPAPPRPLLGLSSLPLPVDCSTREKVKRRGGEKER

SEQ ID NO: 155891 - protein, 477 aa, Oryza sativa
  Clone ID: PAT_MRT4530_55611C.1.pep
MAVAAPARRLTPLTLRDFLEQSSSEGFRAYPRFPVADEGVAGGDLAPPVRLLIEAGLRRSPSRLPSFYNFFHKSPGTLAKISRLSRSLSRRFRDGLWRRRGEDDGEEDDDIAVDERDSLGLPSPVVSSCSSSECEYMAESEAELATTEEEKCASASSASEYEKTSQSSTGSVAFHGAADAGGDGHKEDVGDEPVGRKLEMEDKQQLSPVSVLDFPFDDDDGEEGSDAGMCSPSFQQCLAELQRSKAELLHKIRRLEGLTQVVVPVDLEAQFTESDSSERTHLNANSTSSSDDTATTAPTTPRQCTDDQDVVNHGEEEEEEHSLLARLLESVVVTDEVSEWLLLDFFAEGVDRLRSSASSCPLNDCEEAALLRAAGDWARGAGQRWGVGDVVFSGWAAVADMERSRRWMCVAEEERDVGAEVDGLVMDALVDELVADLALGGATTGLRRIVQKQDVYDARAGAFSHGLYDFLRMNQYI

SEQ ID NO: 155892 - protein, 1109 aa, Oryza sativa
  Clone ID: PAT_MRT4530_55612C.1.pep
MSPLLLGFLCLLLFAGQVAVVASDDDREVLVELKRFLQANNRFNRGEYDRWPESDASPCRWAGVTCDGRGRVTALDLSGSAISGAAFGNFSRLTALTWLDLSDNGIGGELPAGDLAQCRGLVHLNLSHNLIAGGLDVSGLTKLRTLDVSGNRFVGGAAASFVPAACGDLAVLNVSGNGFTGDITGLFDGCPKLEYIDLSTNNFTGELWPGIARFTQFNVAENNLTGGVPAATFPGGCKLRSLDLSANHFAGEFPDSIASCSNLTYLSLWGNGFAGKISAGIGELAGLETLILGKNRFDRRIPPELTNCTSLQFLDMSTNAFGGDMQGILGEFVTLKYLVLHHNNYTGGIVSSGVLRLPLLARLDLSFNQFSGELPLEVADMKSLKYLMLPANSFSGGIPPEYGRLAELQALDLSYNGLTGRIPASIGNLTSLLWLMLAGNQLSGEIPPEIGNCSSLLWLNLADNRLTGRIPPEMAEIGRNPAPTFEKNRKDVSVLAGSGECQAMRRWIPATYPPFNFVYTVMTRENCRSIWDRLLKGYGIIPICTNSSSPVRSNTISGYVQLSGNKLSGEIPSQIGAMRNLSLLHLDNNQLTGRLPPAISHLPLVVLNVSNNSISGGIPPEIGHILCLEILDLAYNNFSGELPASLGNLTGLNKFNVSYNPLLSGDVPTTGQLGTFDELSFLGDPLITLQDRGPRRQRAPQAAIRGRGMSPRTIALWFVFSLIIAFIAGTVVFIMANLRARFPVDQDPDPESLSCENPKCGGGGGGGGKCGAFHMSATSSPPSGCSSSCVTGCSSSSEGVKVFRLDKTAFTYRDIVAATSGFSDDRVVGRGGYGVVYRGVLPDGRDVAVKKLARLRDCGGGGGGEDSGEREFRAEMEVLADRMGFTWPHPNLVTLYGWCLAGSAKILVYEYLDGGNLESLIGDHAAFGRRRRLDAAIGVARALVFLHHECRPAVVHRDVKASNVLLGRDGGVKVTDFGLARVVRPGDTHVSTMVAGTVGYVAPEYGQTWRATTKGDVYSYGVLLMELATGRRAVDGGEEECLVEWSRRMAQEGWPAREAAASSGAVLWDMLMLGMRCTADSPQERPDMPDVLAALLDIAGSGGGGDPNS

SEQ ID NO: 155893 - protein, 106 aa, Oryza sativa
  unsure (1)..(106): unsure at all Xaa locations
  Clone ID: PAT_MRT4530_55613C.1.pep
SVFHAVIVHATTRLVDTRSTGRHLLGRGMITERSGSVGTSGLXPLKWRARPAMQHPEYPDAEVLEGSKCELSSLPSMVFASVALXLAERVVDTAMGRALLLPGCDC

SEQ ID NO: 155894 - protein, 84 aa, Oryza sativa
  Clone ID: PAT_MRT4530_55614C.1.pep
SPRSSSDLHAKLADIDLFLDNNTSGVIREGSMLKLRHKQKQCTPLLSNKTRYQSRKVNAECRPRVKGKYVSQASLLQQASEKER

SEQ ID NO: 155895 - protein, 49 aa, Oryza sativa
  Clone ID: PAT_MRT4530_55615C.1.pep
IATTPGSASPSEYSHHQLNYHLLQLNLPFSTQTHRTRVPQIHPTTINHS

SEQ ID NO: 155896 - protein, 118 aa, Oryza sativa
  unsure (1)..(118): unsure at all Xaa locations
  Clone ID: PAT_MRT4530_55616C.1.pep
RRPPRARAASATGTGALPVPDPFRRHPPPPPRPPPRTGNPPRPTTXAAPPPPPPRPSRASSSSPPPPCAPAAPAADDPCTLLDDQDEKRRSIDRCYISLEEDVRGYGGRRDSGAVRCA

SEQ ID NO: 155897 - protein, 71 aa, Oryza sativa
  Clone ID: PAT_MRT4530_55617C.1.pep
MPLPELTRPFAYITQIASALENTRCHQPQTPKYSHRAQRKSPDPDLTPDLEPAAALLSPTHVAAGVLAGRR

SEQ ID NO: 155898 - protein, 802 aa, Oryza sativa
  Clone ID: PAT_MRT4530_55618C.1.pep
MDADFRFDPDGSDDDGAAASAAAGRRKPAQSPWEFSSYAESVAAEHARRRTTSIDEKISQALSGSRRGGKPSIPDGDSEGDEDDSEVEDDSEEDDKEVVEGEIDDEEDEVEESEDDDEGVEVSDEEVEELEEGKGEEKSDEVEEGEEGQDGEEEEKEEGDEEAAEEEEETDKKSGVVDPSKFFASSEGASFHANSFLELNLSRPLLRACEALGYQKPTPIQAACIPLALTGRDICGSAITGSGKTAAFSLPVLERLLFRPKRVPAIRVLILTPTRELAAQVHSMIEKLAQFTDIRCCLIVGGLSTKVQEVALRSMPDIVVATPGRIIDHLRNSLSVGLEDLAILILDEADRLLELGFSAEIQELIRMCPRRRQTMLFSATMTEEINELVTLSLNKPVRLEADPSLKRPATLTEEVVRIRRAREANQEAVLLALCLKTFKDKVIIFSGTKHSAHRLKIIFGLSGMKAAELHGNLTQAQRLEALELFKKQEVDFLIATDVAARGIDIVGVRTVINFSCPRDARTYLHRVGRTARAGREGYAVTFVTDDDRSLLKAIAKKAGSQLKSRIVAEKPVAECAKLIEELEDQISTIIQEEREERILRKAEMEATKAENMIAHKDEIYSRPKRTWFATEKEKKLLAKAAKESTSQGKSNSGVISAQQAEDLRLKEKKRREREKNLPRKKRRRLEAEREMLEDESEDEEEAKESKGGKKEKKGQSLVDVAYRRAKSMKASGKRGAGTGKGKNDKKAKQHSGKGPTRQEEMQELFQNDMSEWKQGRSLKKNNVMRKKSKNSFKSKSRYNRRK

SEQ ID NO: 155899 - protein, 36 aa, Oryza sativa
  Clone ID: PAT_MRT4530_55619C.1.pep
MAMATSDIRVQCIIAFERADSAGGNRTSQNIESLNN

SEQ ID NO: 155900 - protein, 478 aa, Oryza sativa
  Clone ID: PAT_MRT4530_5561C.1.pep
MGEGRSGVGQAETSASSGDTSMAQGPVERQRRLSMVTSSVLPKVVDDAGEGEANPRRAKWWYATFHSVTAMVGAGVLSLPYAMAHLGWGPGTAALVVSWGMTLYTLRLLIELHECVPGVRFDRYRDLGAHALGPRLGPWLVVPQQLIVQLGCDVVYMVIGGKCLMKFAESVSSWSRAPQLHHQSYWICIFGASQFLLSQLPSLDSITAVSLAAAAMSVGYSTISWAACLARGTPAAAEGGGGGVSYAYKDGTAADSVFRVCSALGQVAFAYAGHGVVLEIQATIPSTPTKPSRGAMWKGAVAAYLVTALCYFPVAIAGYWAFGRDVSDNVLVALRRPPWLVAAANMMVVVHVLGSYQVYAMPIFETLETILITRIRLPPGALLRLVARSAYVAFTLFVAVTFPFFGDLLGFFGGFGFTPTSYFLPCILWLKIKKPPRFSASWFANWGCIVVGVLLMIASTIGGLRSIIQDASTFQFYS

SEQ ID NO: 155901 - protein, 109 aa, Oryza sativa
  Clone ID: PAT_MRT4530_55620C.1.pep
AQEQLLRAARRQGGDKFSRNNRNPTVHHLGCLGRQGRLLLGCERRPGPGPRETIAQAGRSGRSKQPTRKTEPRHGRRRREIAHGRGPLIRSRCKPLAPAARRCAHAEAG

SEQ ID NO: 155902 - protein, 110 aa, Oryza sativa
  Clone ID: PAT_MRT4530_55621C.1.pep
MAMLTAVVAASTSLLHAADGGHHLVTALANKPRNTNSKSAAKWEVRRRERTKERWVGGEVLGVLGVLVGGGVNVVGRLAATTRGGGGSGAGHGLLGEAHPLVADTPRCQG

SEQ ID NO: 155903 - protein, 185 aa, Oryza sativa
  Clone ID: PAT_MRT4530_55622C.1.pep
MEREDSDNKRVEEDDSSGDEENDINPAEWATEDFSGLVVSEEDSVRWEYNEVIQEAIYANGEYMKEAAKYFAVSLHREFWLPSSTGYNMKLETFKYTISYAKAWRAKQKKIIEMRFGTYEASHDNLPCLLGTSSQGPPTMNHARTSSEYGWGSALHFDISDFDFQHSIEDVIGPSLLGGAPPVQT

SEQ ID NO: 155904 - protein, 65 aa, Oryza sativa
  Clone ID: PAT_MRT4530_55623C.1.pep
MRYQKFNVNFSTSWYLTVPRSLVGQPRGQGIRIYDSSCNFEQIYVYDKGVDRILCYYQSLADLSM

SEQ ID NO: 155905 - protein, 77 aa, Oryza sativa
  Clone ID: PAT_MRT4530_55624C.1.pep
PPLPGKSPPPGAPANSQGHPWGGWFPQFCFFPFLSRVRTRVFSCVFWKPPRFFFYPVALGVVFFVKSPSPANFFFRC

SEQ ID NO: 155906 - protein, 87 aa, Oryza sativa
  Clone ID: PAT_MRT4530_55625C.1.pep
GGWIGFRRVSAQSPAFSHPHRRPLLPSHIDSPRFYFYRAAEEGDPVIPRGGGAAAPALVVGREAGGGSGPLLVGGGGGGGGRHRADA

SEQ ID NO: 155907 - protein, 105 aa, Oryza sativa
  Clone ID: PAT_MRT4530_55626C.1.pep
EIMWMNKQKPHIVRVPCCSSGLRIQCCHCCGSGYCCGAGLIPDQGTSTCHGSSQIIAPMVDQAPILTYTSQVLNLMSHNRSCKKPATLCLSFGLEDRTTCFVCLV

SEQ ID NO: 155908 - protein, 56 aa, Oryza sativa
  Clone ID: PAT_MRT4530_55627C.1.pep
RGNMVSKPYTRIVITHVRRLGRTQTKFMLVGDTSQLKYGETFFFHFNNRNPCCTYH

SEQ ID NO: 155909 - protein, 50 aa, Oryza sativa
  Clone ID: PAT_MRT4530_55628C.1.pep
KKILNSFTNLGVSLKRERVTLYNRVTKNKKTLQYCQYKTTYRQPNITQNL

SEQ ID NO: 155910 - protein, 1364 aa, Oryza sativa
  Clone ID: PAT_MRT4530_55629C.1.pep
MSSLVERLRVRSEKRPLYTLDESDDDLPPRGGGGKGRDRHSDGPTERIEREDAVSPLTEMEKILDCEETKPDASEETSSSESGSKKKPVKRYLIKWKGISHLHCTWVSESEYLETAKIYPRLKTRLNNFHKQMDSTDKSDDDYSAIRPEWTTVDRILATRKSSTGEREYYVKWKELTYDECTWENDSDIAVFQPQIERFNEIQSRRKKSTDKCKSVTREIRQYKESPKFLSGGTLHPYQLEGLNFLRYSWYHNKRVILGDEMGLGKTIQSIAFLGSLFVDKLGPHLVVAPLSTLRNWEREFATWAPQMNVVMYFGSAASREIIRKYEFYYPKEKPKKLKKKKSSPSNEDKKQSRIKFDVLLTSYEMINMDSTVLKTIEWECMIVDEGHRLKNKDSKLFGQLKEYHTKHRVLLTGTPVQNNLDELFMLMHFLEGDSFGSIADLQEEFKDINQDKQVEKLHGMLKPHLLRRFKKDVMKELPPKKELILRVELTSKQKEYYKAILTKNYEVLTRRSGGHVSLINVVMELRKLCCHAFMTDEPEEPANSEEALRFSDVINILIPLPAFYYFQTHIDAEVLEFSDISCCYLFISRLNKHNAIFEVVDIWRLLESSGKMELLDKMMVKLKEQGHRVLIYSQFQHMLDLLEDYLSYRKWSYERIDGKIGGAERQIRIDRFNAKNSTRFCFLLSTRAGGLGINLATADTVIIYDSDWNPHADLQAMARAHRLGQTSKVMIYRLVSRGTIEERMMQLTKKKMVLEHLVVGRLTKGTNIVQEELDDIIRHGSKELFDDENDEAGKSCQIHYDDAAIDRLLDRDQADGEEPVEDEEEDEFLKGFKVANFEYIDEAKALAAKEEEARKKAEAEAANSDRANFWDKLLKDRYDVQKVEEHTTMGKGKRSRKQMAAADEDDITGLHDMSSEDDDYSYDDDVSDNDTSLQSGLAGRRGPYSKKKQRSNVDSLPFMEGEGRALRVYGFNQIQRTQFLQTLMRYGFQNYDWKEFTPRLKGKSVEEIQRYAELVMIHLLEDINDSGYYADGVPKEMRTDETLVRLANISLVEEKVAAMEQGKITKLFPSYLLYEFPSLVGGRVWKAEQDLLLLKALIKHGYARWQYISDDRDNGIFEAARQELRLPTANELISSHSNNETNGNLESTQEGQSNPTSMIHYRDTQRKIVEFIRKRYHLLERCLNLEYAVIKTKTPVPDDLAEQDFPGGHRPAVPDYSEMLRELPVLEPISKEVAPEGTTDQSQVSHLYNKMCFVLEDSAVPALNSHFGDKAASSGLANSLHKFEAVCEDVSRILRSHENGTTPKEEVMLDASSKETTSPKDPATEVPSSASKEATPPVQDPVIEAVKEEPPTVKAEDKMEIDS

SEQ ID NO: 155911 - protein, 131 aa, Oryza sativa
  unsure (1)..(131): unsure at all Xaa locations
  Clone ID: PAT_MRT4530_5562C.1.pep
GPFLVCSLGFGRPVRPLGRPFCGLSFFLSCVLRRGVXLPSALWSLPVASVFLGLVCVVSSVSCGVFPRLCSGLSPGLWWVPVPSLFFPAWWSLPRPLPVLPGALXLACAFPGGCRCASLAGSCRAXRPPLL

SEQ ID NO: 155912 - protein, 108 aa, Oryza sativa
  Clone ID: PAT_MRT4530_55630C.1.pep
MAFGGAAVAATLGSHGRGHRLRTFPQPRRGHDGGGEDESAQHLEGRHERVVHHGVIGRDAQGTQGRARWPGGVEEDEPSVLKEDTSGWSTAALAAARRAPRGPISSQG

SEQ ID NO: 155913 - protein, 137 aa, Oryza sativa
  Clone ID: PAT_MRT4530_55631C.1.pep
HEARTHAPPSPRRPPDSPPPARRGQRRSRPPARVLLQDARLVFFNAARPPCPPLRSLPQCRCLSSKPGPPSIRRQESPSNRRWPSPIQTSARSGEPTRERREGALASRGGEEAACAGERWHRIRSFATCASRPMTPR

SEQ ID NO: 155914 - protein, 290 aa, Oryza sativa
  unsure (1)..(290): unsure at all Xaa locations
  Clone ID: PAT_MRT4530_55632C.1.pep
KGKGGLLRQRLGFAVDRVHGSGSREWTAEIDXSKTDSRDQTVHDRLTGNGNXDVSDDVSTGGGSATQAHRRTTARRRERKAPTGRGRRGELTGDQRRSGGGLRVDGDDGAPTVFNDGEGADEDGDDLAIPTVXSRVMTTTETTAAHGXSGGDDGDARLHEARALQTTASKGEGGGGCKEAAAKAHGDRRREGXLRVRERERNPIRSRIHELPKRDRRXFQKRKGRGDPEDHFPSIXSAGEGKDRWDPPVSDGEGARAAADWXRLGRGREREVLGRLSAQSQKRLLKTFFN

SEQ ID NO: 155915 - protein, 256 aa, Oryza sativa
  Clone ID: PAT_MRT4530_55633C.1.pep
MPFPLSSQLSLLFSIVATTRANKRTPLAPPLPPRGASTRRPRREAPPPLPRHQPPRPRGRGMEAAEAAAGSSHAHREHIGDGARSRRRGRRKRRRRHTKEESAAQIDAAAQQEESAAVGPRSCSSGRYSLLSCLPSAATCRSSAIDRREGKKRESREVAGGSAVPAEREVDSSAEREGVSSSGRPTGRRKKSGGARRAGERAADGSAARDEASSSGRPAGEERRLAGAGWRGGRVRRPTGGRQRAATSRATAALHL

SEQ ID NO: 155916 - protein, 111 aa, Oryza sativa
  unsure (1)..(111): unsure at all Xaa locations
  Clone ID: PAT_MRT4530_55634C.1.pep
ATAESNTAFLKGEINTSMRIGRLMARVDLQSDLHKHRGHLDPFITTFFTTYIVTYDTVHLHWEDHEVHVTDSKTVPIGMQDDTELGCEYRYEIPXGETGAVTDAEHTGVFT

SEQ ID NO: 155917 - protein, 286 aa, Oryza sativa
  Clone ID: PAT_MRT4530_55635C.1.pep
MANPSPMGCAVGVADGGAHHGGLWNIKEPFKLQNGWLLWAGVGLFGAIISIALVGVAMTYLNGEPPERETDSLVLLLPLIGSSSASTAFLVGITGVLAPILEETVFRGFLMVSLTKWFPTPVCILVSAALFAFAHLTPGQFPQLFILGVALGFSYAQTHNLLTPITIHAFWNSGVILLLTFLQRPIYSSEGTKCISLKKSLVFYKGRAAKGFKTDWMMHEFRLPSLTEPSLSKIPIDKKPAKDIWAICKIFKKPNSMAQRALSHPWGPQSTATTSSQFASGSSSCT

SEQ ID NO: 155918 - protein, 60 aa, Oryza sativa
  unsure (1)..(60): unsure at all Xaa locations
  Clone ID: PAT_MRT4530_55636C.1.pep
HARFMLLHDXRSEDGIKSFFQEVHELLYQDIPSIPSICLDLGITSSHFDTKVRALARRYL

SEQ ID NO: 155919 - protein, 75 aa, Oryza sativa
  Clone ID: PAT_MRT4530_55637C.1.pep
QMIIHQRRQFTLFSQSKWKQHMTTWNATKHKATVNLFTEGYIATTKQPEGRNAGCLSSFFPRVLEELEPVTSSAC

SEQ ID NO: 155920 - protein, 96 aa, Oryza sativa
  Clone ID: PAT_MRT4530_55638C.1.pep
MAKGVPAVWEGEGVNSGTGRAYGDGDGAGADCGNAVADALKLRASVCCRCSVAAGSQNITPFPDLKFELRTRQEAKNTLNTCTPLQESEPKTTGEK

SEQ ID NO: 155921 - protein, 109 aa, Oryza sativa
  Clone ID: PAT_MRT4530_55639C.1.pep
MLRTSLKMVFLFLCSRSNVLLVSSWRFINMRKQRMDNPPLKKKKKKKKKKKKKKKKKRKTKKCKKKKKKKKKKKKEKKKKERKKKKKKKKKKKGGAVLKGPTLKGGAWR

SEQ ID NO: 155922 - protein, 98 aa, Oryza sativa
  unsure (1)..(98): unsure at all Xaa locations
  Clone ID: PAT_MRT4530_5563C.1.pep
MIMDKTYILSYDLWNIRIRVHSLXFYLETKVIHGIKGIPPRGSNXSNHSANTTTIVYNPENVKPTRREISSKPSRXGSHRSSYQXRTPIPYSSGIWVS

SEQ ID NO: 155923 - protein, 66 aa, Oryza sativa
  Clone ID: PAT_MRT4530_55640C.1.pep
RTHPQYSNRSTCYQMHFMIESNCLLLRWIARIILLWLSTLPFAFCMFNLTLLTHSLLIWNASYSDK

SEQ ID NO: 155924 - protein, 140 aa, Oryza sativa
  unsure (1)..(140): unsure at all Xaa locations
  Clone ID: PAT_MRT4530_55641C.1.pep
NADISGGWLFGTSQXGXMXGRVDAEHXVXEPXXPVSXGGGGGGTXAXRSXXYGGGXYVXGGGGGDYAQXXEGXTPVPVXTVAXVVAXXTXVVTAXAAXAIXTGXGGXXRXAXXAQXIYXXXXXXXIXIXSXXSLVXXGXX

SEQ ID NO: 155925 - protein, 83 aa, Oryza sativa
  Clone ID: PAT_MRT4530_55642C.1.pep
MRTNVSRPGLRRRDVTASTAPARARARGEAPAVAATTQARRLRLSPLPFGPRTPPLPLRPRPLLQRSKGGEKGKERMVVGPTC

SEQ ID NO: 155926 - protein, 77 aa, Oryza sativa
  Clone ID: PAT_MRT4530_55643C.1.pep
MGSGHFPEEGFGKATYSRAIQVVDSSNHPMPPNGVGLIASLPNCYNIMTGSSSTTSWGTYIYYGGPGCPQNSQIEVM

SEQ ID NO: 155927 - protein, 102 aa, Oryza sativa
  unsure (1)..(102): unsure at all Xaa locations
  Clone ID: PAT_MRT4530_55644C.1.pep
LARRPRRSGVCRGVVAPRRAEAGAPLVLALGLGVTVVPAAACRFCAFGMDAGSPRRPWYQGLIPRYHPVPXAPGIRYRSIPRRASSTPSSAVAALPLPRLPH

SEQ ID NO: 155928 - protein, 87 aa, Oryza sativa
  unsure (1)..(87): unsure at all Xaa locations
  Clone ID: PAT_MRT4530_55645C.1.pep
TDGMNHFGDMSSHHSTWPVAVIIYNHLLGSINRXYLKHKYIMMSLLFQVHKXPSNDIDVYFEPLVEDLVILWMDGARIXDAYKREYF

SEQ ID NO: 155929 - protein, 73 aa, Oryza sativa
  Clone ID: PAT_MRT4530_55646C.1.pep
IVSHAIVPLFKHITRYPGEVATASFHVLYFCSPFIYHSLPWQFDLHTLEFAFVICLKLSLCLNPRQILLSRCD

SEQ ID NO: 155930 - protein, 71 aa, Oryza sativa
  Clone ID: PAT_MRT4530_55647C.1.pep
MSTSRVKKTQSTLPRRGDKLDLGDGHAVDPGQEGPRHAAVAPPAAGHRAAPPRSSPAEASFASVSGFRRPE

SEQ ID NO: 155931 - protein, 105 aa, Oryza sativa
  Clone ID: PAT_MRT4530_55648C.1.pep
WFQTRCTGRWKRAGSSLSWSVCWDHQRAAHAVLLGAHKGSCGHSQRRHLSFPFASALWSFDRWISTSSFRQQRSARPGSGSCSALPVWIETRVSLHLFSPPFSVP

SEQ ID NO: 155932 - protein, 592 aa, Oryza sativa
  Clone ID: PAT_MRT4530_55649C.1.pep
MVSAGVHGGDDGVVVDFRGNPVDKDRTGGWLGAGLILGTELAERVCVVGISMNLVTYLVGDLHLSNARSANIVTNFLGTLNLLALLGGFLADAVLGRYLTVAVSATIAAIGVSLLAASTVVPGMRPPPCGDAVAAAAAAESGGCVAASGGQMAMLYAALYTAAAGAGGLKANVSGFGSDQFDGRDRREGKAMLFFFNRFYFCISLGSVLAVTALVYVQEDVGRGWGYGASAAAMVAAVAVFAAGTPRYRYRRPQGSPLTAIGRVLWAAWRKRRMPFPADAGELHGFHKAKVPHTNRLRCLDKAAIVEADLAAATPPEQPVAALTVTEVEEAKMVVKLLPIWSTSILFWTVYSQMTTFSVEQASHMDRRAGGFAVPAGSFSVFLFLSILLFTSASERLLVPLARRLMITRRPQGLTSLQRVGAGLVLATLAMAVSALVEKKRRDASGGAGGGGVAMISAFWLVPQFFLVGAGEAFAYVGQLEFFIREAPERMKSMSTGLFLATLAMGFFLSSLLVSAVDAATRGAWIRDGLDDGRLDLFYWMLAALGVANFAAFLVFASRHQYRPAILPAADSPPDDEGAVREAATTVKGMDF

SEQ ID NO: 155933 - protein, 36 aa, Oryza sativa
  Clone ID: PAT_MRT4530_5564C.1.pep
SAGWRSQSCAMLACPGRCFPVRLRLHFPHIYAVRGP

SEQ ID NO: 155934 - protein, 55 aa, Oryza sativa
  Clone ID: PAT_MRT4530_55650C.1.pep
ALVKNDFPLEIEAAHIFVDHQGMILIVVQIPPEPIKTNLPIFRRLQMQNIQIFSS

SEQ ID NO: 155935 - protein, 517 aa, Oryza sativa
  Clone ID: PAT_MRT4530_55651C.1.pep
MASLALVFLALLLPTISWLWDYIIVPHIWRPYIAAKRLREQGIRGPPYKFLKGCNEDVKKMKDAADDLVLDVHDHNYLPRITNVDGEPFVYWFGAKPRICIFNYEWARQILSSKSGHFLKNDTTPTVLALLGKGLVLVEGIDWERHRRVINPAFTMDKIKMMTKTMVACAQNMVKELEDQASSNKNGETQVELDKQFQELTADIISHTAFGSSYKLGIEAFHAQKELQEIAVKSLLNVQIPGFSYLPTKGNWRKLTLEKKLRGTLMQIIQSRLSSKGSGYGSDLLGLMLEACIATDQGREQHQLSLSIDEIIHECKTFFFAGHETTSLLLTWTVFLLSVYPEWQARLRLEALRECGKENPNGDNLSKLKEARKLMSMVFLETLRLYGPALFLQRKPLTDITVGETKIPKDHAIIIPSAIMHRDKEIWGDDTDEFNPLRFQNGVTRAAKVPHALLAFSIGPRSCIGQNFAMLEAKSVMAMILKKFSFTLSPNYVHAPVDLLTLQPKFGLPVVLRLLDA

SEQ ID NO: 155936 - protein, 135 aa, Oryza sativa
  unsure (1)..(135): unsure at all Xaa locations
  Clone ID: PAT_MRT4530_55652C.1.pep
IPKRYSLKFDGTKKGEPKNGEFFIKTTVGNFGVPCAHPGREKDRRRRSTLPPTGTGXQPXRXRTGPVTXTQPPWTRTGPAPRTRIGXGMKKGEGGGELEXDPRRXLGHAAAXXVGGGGEGAGDGDAXSQTCPMDR

SEQ ID NO: 155937 - protein, 122 aa, Oryza sativa
  unsure (1)..(122): unsure at all Xaa locations
  Clone ID: PAT_MRT4530_55653C.1.pep
EEHWGXXARRFWXLAVDEQXPFLSRREKILRLPRGVFDDHWQQAEAGGRVPRRCAAAVYGMGDDEKYARGAGAATASPPQRGPRRRAGLRPGLGGEGGERRGEARWARAEGFHGCRCRIRIG

SEQ ID NO: 155938 - protein, 170 aa, Oryza sativa
  Clone ID: PAT_MRT4530_55654C.1.pep
VDPPGCRLVTGEGEYNMVSLRKTIRAYLLEMGSPFLPCRSRSGRFVVKAYSLKMWLKDSPFCLDLELKDAPALPKTNSMKLTEGYFMRAGLVPVFKDIHERLGEVWPKKFSRLALLSEESRDEVIKADIKGRKEKLEKMKKQGLAIAKRSKRGPRRGKFVKQQSTQEVLK

SEQ ID NO: 155939 - protein, 72 aa, Oryza sativa
  Clone ID: PAT_MRT4530_55655C.1.pep
ERERYMIQGSAKNCSKSATFDDLSGLIGGQEEPRFASLPTARAWLTQRDDWTAQARGYIQQAGYARSTITAE

SEQ ID NO: 155940 - protein, 42 aa, Oryza sativa
  Clone ID: PAT_MRT4530_55656C.1.pep
GNLPVSLYCPYSNPHLFSCGYLQHMSIDSFILPTQLKHPLKL

SEQ ID NO: 155941 - protein, 70 aa, Oryza sativa
  Clone ID: PAT_MRT4530_55657C.1.pep
MDDDERRPATRSDGSSARINVGDDAPAVFGSCNGADGVLLLLANPTVATEGGSDDHSSDNPDMWAPHVGG

SEQ ID NO: 155942 - protein, 63 aa, Oryza sativa
  Clone ID: PAT_MRT4530_55658C.1.pep
LYYLCCHKGPKARTIPLQDQSSERNRCLQGQKKKKRTRGAEITHRLEPDAANKSKTNKSTCPT

SEQ ID NO: 155943 - protein, 68 aa, Oryza sativa
  unsure (1)..(68): unsure at all Xaa locations
  Clone ID: PAT_MRT4530_55659C.1.pep
LHLPRLXRAGRHHQQRAPRTMGHPPQXTXSTPPSSTPSPHPLNLXLFRAQFKRGSMXWCXFXXRXLLL

SEQ ID NO: 155944 - protein, 56 aa, Oryza sativa
  Clone ID: PAT_MRT4530_5565C.1.pep
IRKTKTSIISGDIKYNYAIKLYQMVSPFRYVRLNIIYLLIYIYIYIYIYIYIYIYI

SEQ ID NO: 155945 - protein, 180 aa, Oryza sativa
  Clone ID: PAT_MRT4530_55660C.1.pep
KECQRLGLTKAIGVSNFSCKKLETLLSFATISPAANQVEVHPYCRQNKLREFCKEKGIQLCAYSPLGGKGTPWSNNAVMDCPLLKQIAMERGKTIAQVCLRWVYEQGDCVIVKSFNKSRLRENLGIFDWELTNDDRHKISTLPEWRGTLDIFVHKTGPYKTVDEFWHGEITGDKTFSNGP

SEQ ID NO: 155946 - protein, 93 aa, Oryza sativa
  Clone ID: PAT_MRT4530_55661C.1.pep
MCCACAWSWTKPSQANARQSAAQQEEEEEQSLLELVGIAARARARARDGRSYPASIPHRNGARDVLKSRSNGGVTIARFFNWLSLACRAHICD

SEQ ID NO: 155947 - protein, 334 aa, Oryza sativa
  Clone ID: PAT_MRT4530_55662C.1.pep
MMPEAALSSGKPMPRVGMGTASFPLGATDPSTVKDVVLRAIEAGYRHFDTAAVYQTEAILGDAVAEAVRAGLVASRDELYITSKLWVAHAHPGHVLPSLRRALRKMQMEYLDLYLIHFPVSMRLAEDPESMTYSKDDLVMMDMEGVWKEMEECQRLGLTKAIGVSNFSCKKLETLLSFATISPAANQLKVRLFQIVEVEVHPYCRQNKLREFCKEKGIQLCAYSPLGGKGTPWSNNAVMDCPLLKQIAMERGKTIAQVCLRWVYEQGDCVIVKSFNKSRLRENLGIFDWELTNDDRHKISTLPEWRGTLDIFVHKTGPYKTVDEFWDGEITGDK

SEQ ID NO: 155948 - protein, 84 aa, Oryza sativa
  Clone ID: PAT_MRT4530_55663C.1.pep
FTLLCQCLLYIQVTQLYIYTCILFLIFHHVPSQVTACNSLCYTAGFHCAFHYLLDRVQFQGYWLMLPTEVKTSLQAAHHTLCRL

SEQ ID NO: 155949 - protein, 73 aa, Oryza sativa
  Clone ID: PAT_MRT4530_55664C.1.pep
TAIQPISVRYRQSREVNPRMGQGFTKTDTGSPPRVRSCLMVALLYSCEATVVKHHPKTPQSSLTLDTSQWAVV

SEQ ID NO: 155950 - protein, 185 aa, Oryza sativa
  Clone ID: PAT_MRT4530_55665C.1.pep
LPRLGEADRVAANRVMGCVAQVWLVGRCDGAGRMRFAADSDSELSRGYCACLVSALDGARPEEVLDVDPADLAPLGGAAAGTGARSRASTWHNVLIGMQKRARAAIAAREGRPAGEPFPSLIIGRDGAIRAQGTYAEAQVIFCSFVYYVHSVAFIGYSFRSLYFIPVYCHVPCSPSFVQASLRKG

SEQ ID NO: 155951 - protein, 63 aa, Oryza sativa
  Clone ID: PAT_MRT4530_55666C.1.pep
AELRAGPRRNSVAVLSGFAASVGLGAYTSSRLTSETDNHLVIGATLGTENIVAAGRRRRRRRA

SEQ ID NO: 155952 - protein, 92 aa, Oryza sativa
  Clone ID: PAT_MRT4530_55667C.1.pep
HPHHHPFFFFTTNLFPFHQKKGPHKKFFTPPKDPKTRNCKSIPQLRKGEKIQHFFSSLIGEKNGIGLLYCRGAPFFQTMSLAPPNPLFVRCF

SEQ ID NO: 155953 - protein, 85 aa, Oryza sativa
  Clone ID: PAT_MRT4530_55668C.1.pep
MARRRAASSVYLPAVVVAAVVLWVAARSASPVVVIAVVVYKVGEIMAEELLQYDRSNPEKPLLMAIKGRIYDVFQSRSRMTMAML

SEQ ID NO: 155954 - protein, 110 aa, Oryza sativa
  Clone ID: PAT_MRT4530_55669C.1.pep
MGLLFVESLPGPKVFKCKFCGVDSASPDAIVSKEFRGRHGRAYLFDSVVNVSLGPREDRLLMTGLHTVNDIYCSCCQRLLGWRYEKAYSEDQKYKEGKYILEKHMMLKEG

SEQ ID NO: 155955 - protein, 177 aa, Oryza sativa
  Clone ID: PAT_MRT4530_5566C.1.pep
MPTPTTIICLLAFLAVLAAATGDGTTTTTHLHFYIHETFAGDNATTASLAPSPLAVAGSNSSFGSVGALDDELREGSDAASRYLGRVEGLVVQADLGNPAAAWTLLTLAFAGGDYNGSTLVLDGRVDFGAAGDMERAVVGGTGRFRRARGYSLMTKFGNPTPNTGVFEMDVYVTTMA

SEQ ID NO: 155956 - protein, 161 aa, Oryza sativa
  unsure (1)..(161): unsure at all Xaa locations
  Clone ID: PAT_MRT4530_55670C.1.pep
LENLTVAVVVAAVVLWVAARSASPVVVIAVVVYKVRSSLLVLPPPPPPARPXEEPSEEVLPPPEPVQVGEIMAEELLQYDRSNPEKPLLMAIKGRIYDVFQSRSLPLTMLLLLSLVITMLFLLLWPCLVSKTKIFTLLHQMVWTHAWSIKYKKKTNYIDCV

SEQ ID NO: 155957 - protein, 214 aa, Oryza sativa
  unsure (1)..(214): unsure at all Xaa locations
  Clone ID: PAT_MRT4530_55671C.1.pep
KETNPPPRTHTPHPRPRGGEPPKGGKGPPKRAPPPPKKQRREPRPAQPKKPRQKANPRXPSAPGKAGDPGQEKRQDQRGGTGPHRAANPHAPTARRTTHNPPQREAPPTGRGPTPPNRAAPPKGTTERNPPQKPPGTPGEKREGKAPPPPPRKKKRPKPPHASEKQPRQPPKKNPPTKQAPTPSALHAYVMSPPPFFLFFFSPPFFPFFFFFFL

SEQ ID NO: 155958 - protein, 122 aa, Oryza sativa
  unsure (1)..(122): unsure at all Xaa locations
  Clone ID: PAT_MRT4530_55672C.1.pep
VLRLRGGMQIFAKTLTGRTITLKVECCDTIINVKVKIQVKEVIXQTSRSIIFAARQLXDCRTLADYNIQDEXTAYLVLRITGGMQMLEKTLTMKTITLEVESSDTIDNVKAKIQDKEGIPPD

SEQ ID NO: 155959 - protein, 59 aa, Oryza sativa
  Clone ID: PAT_MRT4530_55673C.1.pep
GRGRRLSCGSRAASPELRQSELVWCRRRRSLSSSSALPGEWGVEEEFRRPCRAPTRCCA

SEQ ID NO: 155960 - protein, 286 aa, Oryza sativa
  Clone ID: PAT_MRT4530_55674C.1.pep
MALVQVGMGLGRVVLLVGAGMAGSVVIRDGRFADFVAGLQEALRDNDGGGSGSGGGVIDQIEEAVKKATMEVNQMISQPVTVITVDPAVVTTLIAPAAAAGALTYGYMRWKGISIASLMYVTKQNMANAVASMTKHLEQVQSSLAAAKRHLTQRIQHLDDKLDQQKQISGQIKEEVTGARLKLQDIGSEMQKIKQVAHGLGGKLDSIEAKQNYSLAGVMYLVEFIEQNGGRLPRSVEHLQRTARLSGITGDQKQLQGLGQLLAIESATPVGSGLHCTSARLFKAVA

SEQ ID NO: 155961 - protein, 94 aa, Oryza sativa
  unsure (1)..(94): unsure at all Xaa locations
  Clone ID: PAT_MRT4530_55675C.1.pep
MLTTVPPFQGLKCTGDMPDARRSVDCSLRILSSGGRIRCMHVCPIEGIKKFXTMYYLTPFTVEDLLKQIECLLRCKWVPCLAFSMVXFFYRENH

SEQ ID NO: 155962 - protein, 53 aa, Oryza sativa
  Clone ID: PAT_MRT4530_55676C.1.pep
MSVTFFPSSEPTAELHEQAATDGGGSASSGEVAGLADPGKALFDLNGIEKDWR

SEQ ID NO: 155963 - protein, 54 aa, Oryza sativa
  unsure (1)..(54): unsure at all Xaa locations
  Clone ID: PAT_MRT4530_55677C.1.pep
MARAHLVLVAXVXXLLLAAPHAAVAITCGQVNSAVGPCLXYARXGAGXXXASKG

SEQ ID NO: 155964 - protein, 141 aa, Oryza sativa
  Clone ID: PAT_MRT4530_55678C.1.pep
MERIDGMEQLASGAGKLFVDQTTVQIFRDHITSSSTLPSYPRSKYLTKLLDRCGLFFVQLNGGLFVAAAIPNVRARLRLGPLDIAYRIILIPVRCNRQFHPKGTLLQQIKVLFTCCMQGGLRELTEEHLSYRVLSVEFKLT

SEQ ID NO: 155965 - protein, 224 aa, Oryza sativa
  unsure (1)..(224): unsure at all Xaa locations
  Clone ID: PAT_MRT4530_55679C.1.pep
MEEGKDAGRRRQPWRCSPAHDAEWVPAVDSDGGGVDGTVRTTVNATASMARLGTATSGGRSDGGGSGEEGDGARVVEGTGAGGCKTKKREEEAGTLYIDPRGSIVAGMAAISPAKCGEVGRRERRDSXFESRASRARTRAXKEREWVRGLRRKVVTWATWPERRESEGDGGCGIRRRRPEVGDGPNRWAPPVGDLRTHVYGMSRCLRNSVRLRTCTGRRAIKFG

SEQ ID NO: 155966 - protein, 22 aa, Oryza sativa
  unsure (1)..(22): unsure at all Xaa locations
  Clone ID: PAT_MRT4530_5567C.1.pep
IHIVNIXTFSLLIYYQFSELGV

SEQ ID NO: 155967 - protein, 156 aa, Oryza sativa
  Clone ID: PAT_MRT4530_55680C.1.pep
TPSARRRRRPSPPSPSRERRRHLPHHPPQPPPPPPLSPLSLAIARRRPRRRRSRRRRPPPRRRPHGPRWRARAPQAVATAARSSPSPSPLSLSRSRLGFLPTAVGLLPAMRSRVEGEIAGAVAVSTSAPSPQRSDSPRKAGKARRETRPPAEGRVP

SEQ ID NO: 155968 - protein, 180 aa, Oryza sativa
  unsure (1)..(180): unsure at all Xaa locations
  Clone ID: PAT_MRT4530_55681C.1.pep
GLTKFFLTLALRVPPPMFLSCRILPRFCSPACTGVRDEQVPXNSVRLRTCTGRRAIKFLGSASSVAAPVLCSSXQRCIFLYFCFTMASTGENRGDNINGGNTNASTSSAPFSGYKILTLFDFLLDVYTYFTLSMLIFMFSLITRLLLIVYVMFIVLIFWIKIYRIMTKFPTGQILLPFFC

SEQ ID NO: 155969 - protein, 144 aa, Oryza sativa
  Clone ID: PAT_MRT4530_55682C.1.pep
RRALELRYFPPNFSLLISIESTVEASLDPHAPPPLISLAHQTPPSPHRIAAHQTLPPSPRIAEPPSLPLPPTPSPDRIPCPSPISFKMLTLDRRESARALSATGMPSPRLAALLRQRDAAAASSTSASDPYSRCRCRIGGNRAR

SEQ ID NO: 155970 - protein, 80 aa, Oryza sativa
  Clone ID: PAT_MRT4530_55683C.1.pep
SRPWCYLRQVLAKSASATHEAPMGWSFSTPKDMLLYIMLHRERLQGPLPCTAHPHTRDQSWADTKHLRAAPKAAMLLGLA

SEQ ID NO: 155971 - protein, 132 aa, Oryza sativa
  Clone ID: PAT_MRT4530_55684C.1.pep
LLLGAGKGSSFQASDPSARRVLRTYITCRPAGRSIDAAPCCTTRDVPRAYGYERPSPAMEHTLSLKKSAKYYYGKRFFMAYVTLKFSLTAVCETVGNNVKRVWGYGPPAKTDLAKMLQFLLAAHFKTPLAKI

SEQ ID NO: 155972 - protein, 67 aa, Oryza sativa
  Clone ID: PAT_MRT4530_55685C.1.pep
RTHAFEVPSTFVQHNTMSLRFLIRGKRRKGRQKNIAHQKMSPLLVITSWLQNGHIETRIQKFNLYRT

SEQ ID NO: 155973 - protein, 53 aa, Oryza sativa
  Clone ID: PAT_MRT4530_55686C.1.pep
GLSNSNFISISLLQGQMQRKHHIRLFEVGRYKQTTPMNYTHYAGVITDHALFR

SEQ ID NO: 155974 - protein, 522 aa, Oryza sativa
  Clone ID: PAT_MRT4530_55687C.1.pep
MAISLITSLLFSLPQQWQPVVLTGLLPVIVSLVLLARKGRLKMPPGPEQVPLLGNLHQLAGPQPHRALRDLARVHGPVMRLRLGKASAVVLTSAEAAWEALRGHDLDCCTRPVSAGTRRVTYGMKNVAFAPYGAYWREVRKLLMVELLSARRVKAAWYARHEQVEKLLSTLRRAEGKPVALDEHILSLSDGIIGTVAFGNIYGSDKFSQNKNFQHALDDVMEMLSGEGSSAEDLQLPAAVGRLVDRLTGFAARRERIFRQLDSFFEMVIEQHLDPNRAPPENGGDLVDVLIGHWKKNEPRGTFSFTKDNVKAIIFSTFVAGIDTNAATILWAMSELARKPRVLKKVQAEIRAAVGVNGRVQPDDITKLSYLRKVVKETLRLHPPTPLLLPRETMRHIQISGYDVPAKTRIYVNAWAIGRDPASWPDEPEEFNPERFEANEIDFKGEHPELMPFGTGRRICPGMAMAMANVEFTLANLLFAFQWSLPEGTTPDNVCLEEEGRLVCHRKTPLVLVPTVYRHGLE

SEQ ID NO: 155975 - protein, 64 aa, Oryza sativa
  Clone ID: PAT_MRT4530_55688C.1.pep
THPSDGRVSGKHFDALARLPELVPETACLLTFHKDGNAISETEISPHVLQRNDVIRIVHGEKEP

SEQ ID NO: 155976 - protein, 164 aa, Oryza sativa
  Clone ID: PAT_MRT4530_55689C.1.pep
MAVKDRMVEHKGFSALMKWMNNNYEFIGKKSINNERMKFYGSEKDQLIKRLREAESIRLTIDMWTSNQNRQHMFLVAHYINAVWVLQYRVLNFVEVDPPHTNIVIAHAIFDWLVKWKIEDKEDGDVDIETMEFPNYVVASNYGFDGVAHEPNVLSQAFKRVEPS

SEQ ID NO: 155977 - protein, 58 aa, Oryza sativa
  unsure (1)..(58): unsure at all Xaa locations
  Clone ID: PAT_MRT4530_5568C.1.pep
MTKECHAARFAAKPGCANHRAIMETNQKYVQPPVHHLEEPGXLSKKLFYTRLASLPGR

SEQ ID NO: 155978 - protein, 451 aa, Oryza sativa
  unsure (1)..(451): unsure at all Xaa locations
  Clone ID: PAT_MRT4530_55690C.1.pep
MLLRSLLRRAAVAATATAAGGGVGVGARATTGRADPPAALASLLVASRSYAKAKGGGKPAGATSNRGKVRAKDPRGVASEEGAAGEFEGGGGGAGGGDDLDVEFELPTDPLPPTYDTALDVGPGGRPLFAFTDTFASFSRRDANAYVDFTLDEWKAMLPEGLPAGMDXEFQETRRCAVMVRESFLVLRDNFRTIVDPAIAANRKDATRQIVLDGPRSCGKSIALAMLVHWARTEGWLVFYVPQGKDWSHGGFFYRNTYNDLFDTPIQAAKILQDFLKYNENRLQQLPCQIFEPIPLGEGAGVGMMKGADTVEMPEGSTLYDLIQTGITHSHASVGVVVRLRKELSLVKDVPVLFAIDQVNVYRPMLHNDMMVGAFSHSTAVGKLRQDLPDVPSDARVMFPRYTVNEAETVCHYYMRQKIIKRENFSEEKWKKIYYLSNGNGSEMRWLAAFI

SEQ ID NO: 155979 - protein, 47 aa, Oryza sativa
  Clone ID: PAT_MRT4530_55691C.1.pep
RCKEKRENIHTYFRKGKESGKNRTEHAKTCRYCDELNRLYFRYVYCS

SEQ ID NO: 155980 - protein, 451 aa, Oryza sativa
  Clone ID: PAT_MRT4530_55692C.1.pep
MAKTLDRLKPKKKQGSDTTCRIKTQELSQPEEGSMVAMPKNPNLLRNKKLPSNSTKIGLTEIDLALDDFLNLVATPTVPATLSPSPDGLKGGPASNNGLNTTMGTQQASSSSSSAAAAAGEERACVILYNPVQSPSIPGLARLMVSRLIGLAKTEDDNSGCGSSLKQLLRKENYLHETALQDAVRSGNKEIITEILEFDPELASSPMDGTGTSPMYIAVLLGRVDIAKLLHEMSKGNNPSYSGPEGQNALHAAALQGKDSKLAVAYLIKERPEIAGFRDSKGRTFLHVAVERKKSDIVAHASSIPSLAWILNLQDNDGSTAMHVVVQLAHIKSFCSLLRNTEVKLNIPNNKGQSPLDVSQSNIPRGTFYDSKNNPELQIARALIACNASTGRRMDLFLEQRQKQSDEKTESEKMTYSTQTLGVGSVLIVTVTLGAIFAIPGGYKGDDCYIS

SEQ ID NO: 155981 - protein, 215 aa, Oryza sativa
  unsure (1)..(215): unsure at all Xaa locations
  Clone ID: PAT_MRT4530_55693C.1.pep
QAAKILQDFLKYNENRLQQLPCQIFEPIPLGEGAGVGMMKGADTVEMPEGSTLYDLIQTGITHSHASVGVVVRLRKELSLVKDVPVLFAIDQYNSWFTFSEFQEPVTVRSCRPIHAKELTMVNVYRPMLHNDMMVGAFSHSTAVGKLRQDLPDVPSDARVMFPRYTVNEAGRLSALYYMRQKXIKRENFSEEKWKRFIICQNGKGXEMRWLAPFI

SEQ ID NO: 155982 - protein, 48 aa, Oryza sativa
  Clone ID: PAT_MRT4530_55694C.1.pep
SRWLHVNQMKNVSVQPFQNNEWIVAACMLVNHLNGLKLLVNFGMTLPC

SEQ ID NO: 155983 - protein, 114 aa, Oryza sativa
  Clone ID: PAT_MRT4530_55695C.1.pep
ARGAKAATRAGAAVPPPPVRRATTGTLPPARRISPSPLSPPLILLGFPFSSSRVFASVRSHLSHRRHRNAAVTQRRLGSTGAQHRRRTGGRSKVARRTGGGGVEAQIQVLGINK

SEQ ID NO: 155984 - protein, 85 aa, Oryza sativa
  Clone ID: PAT_MRT4530_55696C.1.pep
MGRDCLRIFLLMVNTSVFLACQISQATVFMGSNNVAAKTLFFTNVIIDSLFAQNEYGLCCNFLRKFSFCDILGNPLIVSLVKFFT

SEQ ID NO: 155985 - protein, 49 aa, Oryza sativa
  Clone ID: PAT_MRT4530_55697C.1.pep
GVYKRINTVAVSDIRFVLTRSSFYYEHLRASWMREIWPSSAALLDAVSW

SEQ ID NO: 155986 - protein, 65 aa, Oryza sativa
  Clone ID: PAT_MRT4530_55698C.1.pep
FVGQTNTDSSCKSRKLHTYREWVMRAYNYTKISAPNWQRLPGTYWSRTCAYILKLLFLVPSTGFS

SEQ ID NO: 155987 - protein, 279 aa, Oryza sativa
  unsure (1)..(279): unsure at all Xaa locations
  Clone ID: PAT_MRT4530_55699C.1.pep
LKVFSRRFFWQCDEHKKKYRVAKWSILCKPKEYGGLGIQNLDIQNKCLLSKWLYKLFNEGSMWQNLFKRKYLANXTITQVEKRSGDLHFRAGLMMVKKDFLQLGSMVVGHGEQVRFWEDRWVGXNSFDKLYPSLYLLTINKHARVSDVLGNVPLNVPFSRALVGDNLXRDTSWYAKWSXFNLSNSPDIFRWEANGKRVFPVSSMYKALMYHNVVPRKSIIWKLRIPLRIKIFLWYIKGVVLTKDNLVKRRRKGKCCFCNSEESIEHLFFIVMLHIQFGI

SEQ ID NO: 155988 - protein, 72 aa, Oryza sativa
  Clone ID: PAT_MRT4530_5569C.1.pep
TSTHARKRVDSRARPPFFFFFYFFFFFILFILGHIYFVSFFIYNASCFLSKKKKKGPFTDRGGDPKILNRAL

SEQ ID NO: 155989 - protein, 77 aa, Oryza sativa
  unsure (1)..(77): unsure at all Xaa locations
  Clone ID: PAT_MRT4530_556C.1.pep
RVPTTAAGSDRRRRRRGAISLSGAPFFGVLEGRWRGGXGEDAGATAWPGLVQISGNVDDVAAAVRKARSRAPVGTTA

SEQ ID NO: 155990 - protein, 406 aa, Oryza sativa
  Clone ID: PAT_MRT4530_55700C.1.pep
MAGRKETVIKMAKELSVLCDVPVALVCAVGGAVEVWESEEGVLDRYRALPPEVRATRAHTHRGYLERELRARRAKLAKVREEGAFKSWGRDALSGIITAEEAPALLESIDAAIAAATARQEALALLDGGGLHLQHVPASASDAVAPVVGGHGVQVQYIGGSGGGGGSQQEMTPAADGDGARNADQYDDILPWDGNTFEAHNAHVMLPACGFQCTGDYRVDMDGYVWGAPDDANAYHGWPDEAMWCTDESCSCNAATATAVPAMYHPPTLDTVHGSFLAAPAQPLAFSTGADFINAPNDFLTVGVGGSFINVGDYSAQSLADEFHHLSDATNQLDQTHYPPFGGTGGAEPGDTQSHSWGDYYLAQSSANECQLLGVDGGDIHLDQTHCLGGAGGAEPGDTKSHNWGG

SEQ ID NO: 155991 - protein, 281 aa, Oryza sativa
  Clone ID: PAT_MRT4530_55701C.1.pep
MAAAALLRRSPAARALLSPALSSRLVASKPHSSSPAPPPPPSKAGANTKTFSIYRWDPDSPSTKPHLKDYKVDLSDCGPMVLDVLLKIKNEQDPSLTFRRSCREGICGSCAMNIDGDNGLACLTKISSASSASTISPLPHMFVIKDLVVDMTNFYNQYKSVEPWLKRKDAPPQPGKEIPQTKADRAKLDGMYECILCACCSTSCPSYWWNPEEYLGPAALLHANRWIQDSRDQFTKERLDSINDEFKLYRCHTIKNCTHACPKGLNPAKHIDTIKKLQLEA

SEQ ID NO: 155992 - protein, 95 aa, Oryza sativa
  Clone ID: PAT_MRT4530_55702C.1.pep
KRPPRHVLHLGFFSSPSGRQWPHPEPFWPLSHNPVAPKGRAPPTNLVPGQYAQGHGGHRANQRTRSTLVGPRHPPFSSRYIMACYACALIVCVCV

SEQ ID NO: 155993 - protein, 350 aa, Oryza sativa
  Clone ID: PAT_MRT4530_55703C.1.pep
MAAAALLRRSPAARALLSPALSSRLVASKPHSSSPAPPPPPSKAGANTKTFSIYRWDPDSPSTKPHLKDYKVDLSDCGPMVLDVLLKIKNEQDPSLTFRRSCREGICGSCAMNIDGDNGLACLTKISSASSASTISPLPHMFVIKDLVVDMTNFYNQYKSVEPWLKRKDAPPQPGKEIPQTKADRAKLDGMYECILCACCSTSCPSYWWNPEEYLGPAALLHANRLPLLGTLIKPKPNMFMHIQARGYHGVSEKRNLLDHKRRLLAAKYELKGKLYKAVCRDPDLPADMQDQFRYKLSKLPRNSSMTRLRNRCIFTGRSRAVYKKFRMSRIVFRSLANKGELLGVKKASW

SEQ ID NO: 155994 - protein, 62 aa, Oryza sativa
  Clone ID: PAT_MRT4530_55704C.1.pep
FGALGWTLSNQESAILAFQGTIVQSGNRIPSRKVVIYSEFFVCIGSARTSFTYIHYDLHIHS

SEQ ID NO: 155995 - protein, 41 aa, Oryza sativa
  Clone ID: PAT_MRT4530_55705C.1.pep
GPISGSIIHRGPGCIVPQHNQLVMSLPDTCWLLYQDIQNCN

SEQ ID NO: 155996 - protein, 766 aa, Oryza sativa
  Clone ID: PAT_MRT4530_55706C.1.pep
MSSVHPNLVTTSNHSTPSRDESFHYFEPDATMEAINRLDVRDNSDIYSNDDITSPVIEDDNTSTPKKISRIPLNCSVFTPECDDKIRPAVGMTFEDIASVEKFYKSYAHQVGFSVRIGQQKKLDGVVQCKHFVCSRQGWKHVNDKEIVDPSKKKKIKLKETRCGCDAHIYVKLCSDNKYTIASLVEHHSHGLVSPDKLHLIRSNREVSERAKTTLFTCSRASIGTSQAYRLLHVSDGGFQNVGCTKRDLQNYYRDLRKKIKNADAQMFVAQLCRKNEVNSSFFYDFDVDEHGRLKYVFWADATSRKNYSHFGDIVSFDSTYTTNQYDMIFAPFTGVNHHLQSVFYGAAFLANEKIPAYVWLFKTFLRAMGGKAPTLIITDEDASMKAAIEKVFPTTVHRLCMWHIMEKMSDKIGPLWREDCDLREMMKSCVWRSETATEFESQWKSIILDFHLEDNEWLSNRFDIRKSWIPAYFMDISLAGILKTTSRSESANSFFNRFIHRKLALVEFWLRFVTSLECQRQEELKADNTSIHTTYKPVTPWAMETQGSIMFTHEVFDKLREEIIAARDLCCVKDIAQCDGLKIVTISDGSHKLRVVRCNTTTMIANCSCKLFESDGIPCHHIILVLRGENQNELPTAYIMKRWEKRVKRENVYDEQGNLIEEKPIDSSEAAMRKKISIARNKFEDLIQKAKHSDEGIDFLTSSVFNLEAPLDQMVSNVKHTRHEEFESFLGCTIPTEIDIHPPTDIHSRGRSKRIRRSKDDNTVD

SEQ ID NO: 155997 - protein, 41 aa, Oryza sativa
  Clone ID: PAT_MRT4530_55707C.1.pep
MATAQEKAVRESPVGAIRRQPSPVYLPGQCSIPNLQANTRK

SEQ ID NO: 155998 - protein, 99 aa, Oryza sativa
  unsure (1)..(99): unsure at all Xaa locations
  Clone ID: PAT_MRT4530_55708C.1.pep
NRRHTRXNTNNSSSSGTNGLTPNTTGDGWEPRRNPNLHFTSSSTSDGVHFTHTTLLTRITQPVXRSATSGDLKAFMTRHFENRYRVAICQREGSQTNNR

SEQ ID NO: 155999 - protein, 825 aa, Oryza sativa
  unsure (1)..(825): unsure at all Xaa locations
  Clone ID: PAT_MRT4530_55709C.1.pep
MTDDLVLQQPFAYRAGPSTAQWSCRAVPPVVPVVQAQARLTYGPCRPSPFTGRVGPCFLSYRAIMPWAGLIKHGPSPSSKQGRPKTVPIRYTDTFASGTIALEKELEKEFERAFEQSDIANVTKTLEEKWAEXSQEKETANPSKEEAGKTTTSEVELAEMAQAQGAVMISKEQYEGLXRELQRLQALHSQAIGASGSGDQLETXEADGKQPNLAENTHQGDTLAGDPQVVKLAEEIPQAQIIKIQVPTQQILQMQNPTQQIPQMQNPTQIQNTQTXLSTQAQISQNRIPIQHPNQIHFSTQIHPSQIPYQIYQNQTQNPQNHTTHAQISQAYTHIPQIQNTQTQIPQVQIPQIHIPQIQTSQVNFPHTHAIQNQATQNSSQHIQTFSPFLTQXDATNEQVYIPQMPNHMQYTGTLPNQTFPFQTTQSYFQPSKRWTPKPSDQNLQMAPWPLSLKLSNITKYEGDTXPHEYLRVYERAVEAAGGDDTTKAKILSTMLEGVALSWYTTILPMSIYSWEHMRDTFXAGFIGAYEEPKEADDLYAMRQTQGETIRSFILKFSRVRCQIRQVDDEMLIAAAKRALLPGPLRFDLARNRPKTAKDLFERMESFARGEEDGLRMQAEEAALLGKKISKNKQAFQAEEQKGENTSKPXKKYKQDNYMNEQKKQDNLIRDEGNNGEYFDQEEKGKGQWNNFHKGKNQWNQQGRGKGQRWNSGRGRNMWWNNGRGKGGENGGQKFCHTHGLRGHSTEEGYSNSXKIHGPCNHAKEECRQMGSLDGETCRAYEGNMKGSKEDKHAGRKKVMKNEALEEXPKEGDNALTGGSFLGVN

SEQ ID NO: 156000 - protein, 100 aa, Oryza sativa
  Clone ID: PAT_MRT4530_5570C.1.pep
MEQLDPPPPRLQVLNQGVQLQDHKPGVLAAVGLRTTGEVVDLQIDKLCVYVHLKSKSFCSICLICNSNSTNVHTSRRAAYSSRAKRASSSFQTSRAELAF

SEQ ID NO: 156001 - protein, 222 aa, Oryza sativa
  Clone ID: PAT_MRT4530_55710C.1.pep
MAAKVHPNVAAAPQPPCISSIVSQQQEEEEPPVVLTVWRKSLLFNCHGFTVFDAKGNLAFRLDCYDSTSSRRADLVLMDAAGKPLLTIRRKRMSLSDSWIIYDGDGAATSTATPLLSVRRRRVGLRASKSKAIAHVTPLSSSLPLPEAYVVEGSYGRRSCAVRDARGDAVAEVRRKESVGDDVFRLVAQPRLGAPLAMAIVIAIDEMLRGGSSSLLRRTCSA

SEQ ID NO: 156002 - protein, 101 aa, Oryza sativa
  unsure (1)..(101): unsure at all Xaa locations
  Clone ID: PAT_MRT4530_55711C.1.pep
NKKLQINVHHTHSQNSQIKSPPPTTECPPPRLPRAPPASRAPPAAARGPPPPAAAXRXAPPXDAXPPAAAEVXXPPPTAIDASGLPPPTDAAPSTRLRRRH

SEQ ID NO: 156003 - protein, 116 aa, Oryza sativa
  Clone ID: PAT_MRT4530_55712C.1.pep
MARSLLLLVLLLASVLAAAVSASSSEESSSKPSILIPVADTPLGSYEGADGPIADDALEDMEAAPLGSPIGTTMTEPEPELPANAPPSSAGATASSTPTTLLAAAVMAAVAGVFAF

SEQ ID NO: 156004 - protein, 53 aa, Oryza sativa
  Clone ID: PAT_MRT4530_55713C.1.pep
MGKLSAGAQACAYYAQDGYWRYGVACKCDHPSGTLGYQPGALALSDMPIAPYS

SEQ ID NO: 156005 - protein, 467 aa, Oryza sativa
  Clone ID: PAT_MRT4530_55714C.1.pep
MDLDKSTSTSASLKKLQADGALPGRGTMEREARGIEPQPVLGRMVAIEDYILCGFLPPPSEFLLLVLNFYGLSLLHLSPNSIAFLSIFSHLCLSSEAVGRRVGQLMISGPTTASNVPVPLCEKEAAERDAAINAQPLIDIIGPLVDHKVAASLKEKIAKEASDAAAAAATTSGVDVPKKGEEILLCNRTSSEATHPLAFHRAARARAAQDGSGGTSSASPAVASTDVVVVPRSHEATPSGLANDLVAGHGSPAAVLTWEELQVEMGRLLEAGARSIGREIAEARTAAVSSANERADWLAYDLAEDRRIQYWKTKFEVAELERTMLEVKKEQAVETLRGREVWFNSYLKSCCTSMARVCRELRVPRGDPEESAAGYISWLNGACTQLEGIDQRIDEALKQECHRSSRYAGGHVLACIRDHRPQLHLEFLCDGFSHSRRTPMEIDGLAKSMAPLAEKVFQSMDWRWPSW

SEQ ID NO: 156006 - protein, 91 aa, Oryza sativa
  unsure (1)..(91): unsure at all Xaa locations
  Clone ID: PAT_MRT4530_55715C.1.pep
FVGQSYTILGGAPPLAADYIQDYSLEINTXNPLALQGELVAACADXLKKLWADGPTYITPLAFKTKVARDTTQITGYDEDDSQESLRFLLD

SEQ ID NO: 156007 - protein, 1022 aa, Oryza sativa
  Clone ID: PAT_MRT4530_55716C.1.pep
MSRREPAVSSPFRDLSNLRTPNPRAPPNPKSSASKEEPLPSATPTTRRRRGPPPPPRPGAATATPLARRLRALELDQSRSARRAESGRDGALRAFASSATSWLSLLLRDPSACGCAPSAAAARVTRDAPAHGVQGKRDAVDGERARGRSPKRHRGGEDRGGPGPRRKTMTPAMAASLRDSLREVCSLDDVTERMGSHMSREACEEVLVMMCQICKNIDNGRLKMKEHCPLVSDLRLRDKAIRIFMCYNPKWLRIGLHIVLGGDSWIQNESQKKDKEVAFLKFVLEKQLFVHMNTQPSALNKAPEGHRRACYAEAASNSILKRLFLLVAALDRAKIESGLPSESGIDGLDGGSPLLFCRQTEIKSSRQIVQESLGEVMHGEGDLLMHLNIMGYKLNYQQLALSEYDFTVGNLFEDLQDGIILCRIIQLLTSDASIILKVIAPSDTYKKRLHNCTMAIQYIKQAGFPLSDADGLSISAEDIVNGDKELILALLWNMFIYMQLPVLVNETSVAQEISRLKAPVSEQSISEMKSQTGLLYDWIQETLSDCRKELFSCHKTDMIADITTYQFNNIGKVLAQFLQDLPGWNILANDVLFVEKSAIILLAFLSSHLTNVRRLEQLKNLIDSKLDHQSLVTEVSPRRRSRGTTDMKCHFPQTEETDGSRSTREWAATVIQTQARRLNAMSKYCKLKNATQPCNKGHDPASSSPLKSIADSSCIDSATKLVCEDDVDCSSNSCQVLFYHDPVSTKVDFLFCRKAMAARKIQFAYRRFAHRIRSRISAAIKIQSHWRCFSVRIRFKRQIQNITTIQAVARLLVTGIWKRSVIVIQAHVRGWIARQTAVRNKKRITIIQSYVKAYLLRKRSKQEITDDIMCLINRLIAAVSQRSISTIRQICATLSTATEHSEKCCQTIVNAGAVEILLKQINLLNRGVPDQEVLKQVLFTLRNIARFRNLQPVLANTPQAVEIVFQELLRSKTEGFFVACDILKRLCESEEGHKIARALKRHIRRLGCLVQELEKKVDLDKR

SEQ ID NO: 156008 - protein, 76 aa, Oryza sativa
  Clone ID: PAT_MRT4530_55717C.1.pep
MSGEWSVKLFDCFGDSGTCCLTCWCPCITFGRIAEIVDKGSTCRHINLSLRALVQAQKTINLDGKVATRWLGVYKA

SEQ ID NO: 156009 - protein, 530 aa, Oryza sativa
  Clone ID: PAT_MRT4530_55718C.1.pep
MAAQRRLLAEAPPHQPHPSRHQQGAPSSVWSAGYLNGWLSQRTAVFGLRLWVLIGIAVGAAIVLVLVLVFVCLSRRRRRRDDLASNLYPADTKILKQHLQQPTPPKDIQEIVRRQQRQQQTPTPTPPQPPPPAAQHGVQLAKAETPPPPQRTQPPVLPAGSTRSTAASGMSATTSGGSERDGATPRSTASGSAGPEVSHLGWGHWFTLRELEEATDGLAEENVIGEGGYGIVYKGTLQNSAMVAVKNLLNNRGQAEKEFKVEVEAIGRVRHKNLVRLLGYCVEGAYRMLVYEYVDNGNLDQWLHGDVGEVSPLTWEVRMNIILGTAKGLAYLHEGLEPKVVHRDIKSSNILLDQQWNAKVSDFGLAKLLCSERSYVTTRVMGTFGYVAPEYASTGMLNERSDVYSFGVLIMEIITGRSPVDYTRAPGEVNLVEWLKTMVAERKAEEVVDPKLPEKPSPKALKRALLVALRCVDPDGHKRPKMGHVIHMLEMDDLLCRDDKKPGRDAPQTSDRHSSRDGGNFSKRENQRYR

SEQ ID NO: 156010 - protein, 299 aa, Oryza sativa
  Clone ID: PAT_MRT4530_55719C.1.pep
MSRLRTVRIFWDDPDLTDSSGEDEGCGGRRVGSMVRELPPAQMPVAQAGFAPAAAAAAAALPEQCSGGDGDMGRRVVGGGCTVGVGRRRLTKDGGPGAPSTKFRGVRRRPWGKFAAEIRDPWRGVRVWLGTFDTAEEAARVYDNAAIQLRGPSATTNFSASTNSAGAQDPVAVGYESGAESSPAVSSPTSVLRKVPSLCSLAEDKDDYEAGPCEPATAAGSNLTVLEEEELGEFVPFEDAPVYGGSSFWDFEPESGFLYAEPSSPETPWDAGATSSGEAQDYFQDLRDLFPLNPLPAIF

SEQ ID NO: 156011 - protein, 66 aa, Oryza sativa
  Clone ID: PAT_MRT4530_5571C.1.pep
GGLDPLVFLGQENQTQLEGGSPSSRRVYLACVFWLLISSSTSTRPAGALASSKLCLFSRSMILLAS

SEQ ID NO: 156012 - protein, 91 aa, Oryza sativa
  Clone ID: PAT_MRT4530_55720C.1.pep
LIQAVTVGHPSSLSWDKVQFLLHSAFLLFDGTSHSQCDRNLCQSPFCANFWAWFQSSIHISVYMLLVLMFTNLLICYSSQIEMTVLQIPLR

SEQ ID NO: 156013 - protein, 355 aa, Oryza sativa
  Clone ID: PAT_MRT4530_55721C.1.pep
MAPELSSPSSSPRYTVGYALLPEKVSSVVRPSLVALAADRGVRLVAVDVSRPLAEQGPFDLLVHKMYDRGWRAQLEELAARHPGVTVVVDSPGAIDRLLDRATMLDVVSGLRTPVSVPPQVVVSDAAADADELLARAALRFPLIAKPLAVDGSAESHDMRLVYRRDGVLPLLRAPLVLQEFVNHGGVLFKVYVVGDRATCVRRSSLPDVPARRLLDLDAEPSVPFANISNQPLPPPDDDGGAADDDTPAAGFVDEVARGLRRGLGLHLFNFDMIRERSEEHGDRYFIIDINYFPGYAKMPGYEAALTDFFLEMLRGTRPVPEQLGPGSGLDMEARKLEPGLGIGLRELESGRAQA

SEQ ID NO: 156014 - protein, 42 aa, Oryza sativa
  Clone ID: PAT_MRT4530_55722C.1.pep
AAQSWSFVTVTPCSRATVVARLACPSPFSCFCCSNRRNLPGP

SEQ ID NO: 156015 - protein, 69 aa, Oryza sativa
  Clone ID: PAT_MRT4530_55723C.1.pep
MRSLFHPSIIFVVSPELLLKIVARSDATTLVRSQTDDATKERTSSPSAGNTDGDGGGGQAGEAGGGIAR

SEQ ID NO: 156016 - protein, 850 aa, Oryza sativa
  Clone ID: PAT_MRT4530_55724C.1.pep
MADAAVELPGRLAILPFRNKVLLPGAIVRIRCTNPSSVKLVEQELWQREEKGLIGVLPVHDSEAAGSLLSPGVGSDSGEGGSKAPGGSAGESTKQDTKNGKETIHWHSRGVAARALHLSRGVEKPSGRVTYIVVLEGLCRFSVQELSARGSYHVARVSRLDMTKTELEHAEQDPDLIALSRQFKATAMELISVLEQKQKTVGRTKVLLETVPVYRLADIFVASFEIGFEEQLSMLDSVDLKVRLSKATELVDRHLQSILVAEKITQKVEGQLSKSQKEFLLRQQMRAIKEELGDNDDDEDDVAALERKMQNAGMPANIWKHAQRELRRLRKMQPQQPGYSSSRTYLELLAELPWQKVSEERELDLRAAKESLDRDHYGLTKVMQRIIEYLAVRKLKPDARGPVLCFVGPPGVGKTSLASSIAKALNRKFIRISLGGVKDEADIRGHRRTYIGSMPGRLIDGLKRVSVKTFNDLHVNVPFDLSKVIFVATANRMQPIPPPLLDRMEVIELPGYTPEEKLKIAMKHLIPRVLEQHGLSSTYLQIPEAMVRLIIERYTREAGVRNLERNLAALARAAAVKVAEQDSALRLGKEIQPITTTLLDSRLADGGEVEMEVIPMGQDISNTYENPSPMIVDEAMLEKVLGPPRFDDSEAADRVASPGVSVGLVWTSFGGEVQFVEATAMVGKGDLHLTGQLGDVIKESAQLALTWVRARAADLNLSPTSDINLLESRDIHIHFPAGAVPKDGPSAGVTLVTSLVSLFSHRKVRADTAMTGEMTLRGLVLPVGGVKDKVLAAHRYGIKRVILPERNMKDLAEVPAPILSGLEILLVKRIEEVLDHAFEGGCPLRPHSKL

SEQ ID NO: 156017 - protein, 130 aa, Oryza sativa
  Clone ID: PAT_MRT4530_55725C.1.pep
SLDLGTFFSPFYCPMLIHIFNPAIQFPCSFQFQHPLAGQLRAPCLVLTEPGVVTEDLAARHVDVGTEGSPHNHIVRGEHQVAARLDPPDAGVGAIGLLVEALVLGHRVVLVHETGHLFRFVRSGVVVSGR

SEQ ID NO: 156018 - protein, 161 aa, Oryza sativa
  Clone ID: PAT_MRT4530_55726C.1.pep
MQQRPRRKEAPASVTVASPNTRLSPVVSYSPTSLSTALTPRRWPAIKAGSRPPERSKSIYVGGLERERVREKNGSPLRRTSPSNMAILLRQAIVAKGLMPGEELAAAFNTHLARVHNGPPGHLAVASVLPPRSAIAHGLLVATHCSDIAIQPPTPASRFKH

SEQ ID NO: 156019 - protein, 689 aa, Oryza sativa
  Clone ID: PAT_MRT4530_55727C.1.pep
MATTTFPTSTPFFAHHGRRRPSPSVSVRTAAAVYGRGGGRRWRPLRVACEKVVGIDLGTTNSAVAAMEGGKPTIVTNAEGARTTPSVVAYTKSGDRLVGQIAKRQAVVNPENTFFSVKRFIGRKMNEVDEESKQVSYRVIRDDNGNVKLDCPAIGKQFAAEEISAQVLRKLVDDASKFLNDKVTKAVITVPAYFNDSQRTATKDAGRIAGLEVLRIINEPTAASLAYGFEKKNNETILVFDLGGGTFDVSVLEVGDGVFEVLSTSGDTHLGGDDFDKRVVDWLAGNFKNDEGIDLLKDKQALQRLTEAAEKAKMELSSLTQTNISLPFITATADGPKHIETTLTRAKFEELCSDLLDRLRPPVDNALRDAKLSFKDIDEVILVGGSTRIPAVQDLVKKMTGKDPNVTVNPDEVVALGAAVQAGVLSGDVSDIVLLDVTPLSLGLETLGGVMTKIIPRNTTLPTSKSEVFSTAADGQTSVEINVLQGEREFVRDNKSLGSFRLDGIPPAPRGVPQIEVKFDIDANGILSVSAVDKGTGKKQDITITGASTLPKDEVEKMVEEAEKFAKEDKEKRDAIDTKNQAESVIYQTEKQLKELGDKVPGDVKGKVEAKLTELKDAVAGGSTQTMKDALAALNQEVMQLGQALYSQQGAPGAGPTPGADAAAGSAGPSEKPGGEEGDVIDADFTDSQ

SEQ ID NO: 156020 - protein, 92 aa, Oryza sativa
  Clone ID: PAT_MRT4530_55728C.1.pep
MGRVYRERPWPMGPSGKRVGVSACAGEGEVRLFVWVSEATANRAAPYRVVALSTRDGGMWHMPSIAYWISLGGLVWEPMLMLCHFAISASME

SEQ ID NO: 156021 - protein, 321 aa, Oryza sativa
  Clone ID: PAT_MRT4530_55729C.1.pep
MACCFMFGNDTKQTSEGEQGEKAVRIFSYNELRRATHDFSGANKIGEGGFGSVFRGRLRDGTIVAVKVLSATSRQGVRSGRSNIQFNWRARVKITVGVARGLAFLHEEVRPHIIHRDIKASNILLDKDMTPKISDFGLARLLPPNATHVSTRVAGTIGYLAPEYALRGQVTKKSDIYSFGVLILEIVSGRCNYNSRLPYEEQFLLERTWTCYEQGHLEEIIDADIEDDVDVEEACRFLKVGLLCTQDAMKLRPNMINIVQMLTGEKDVNTERITKPSVVGDLGDLRGSSQQRPIDPQSLLMRSFATTDPSTSSDTTTRSSL

SEQ ID NO: 156022 - protein, 75 aa, Oryza sativa
  Clone ID: PAT_MRT4530_5572C.1.pep
TGSTIIAGTGQFDDNLIEWKILWSYEKQRSTLVPCFDNNSSNCPACTISFLRISLRKHYNVVTFCIVNKCLQKCV

SEQ ID NO: 156023 - protein, 85 aa, Oryza sativa
  Clone ID: PAT_MRT4530_55730C.1.pep
MESLAHIAGHTPRRRGEAESPPAESGPPVAAAEIAGGLAFLGSRDWWRRSQFESAAGGRDAAASWGGRGHGALQLQSIATSGEVI

SEQ ID NO: 156024 - protein, 86 aa, Oryza sativa
  unsure (1)..(86): unsure at all Xaa locations
  Clone ID: PAT_MRT4530_55731C.1.pep
LRXXXXGGXSQGDXXGXXQGFPXXXDVKRRPVNXXXTQXRAXWXPGPPXSXFILXXXLXXFFLTEXKLXXISXXSTHNXXDHHIVH

SEQ ID NO: 156025 - protein, 150 aa, Oryza sativa
  Clone ID: PAT_MRT4530_55732C.1.pep
TGKAHSIKFKAPSNAQNRGWEGSEYFPFCYRGQTGRGWEKSDVFPRPSEKTRGEFIKGGKTIAKRGGKQGGGREILALSQITEKKLRGPHGQQIYPREGPVIFSPAPARPGVCFFQTIRGTNKRPKSHWVPAKEGGFSPLGIPFMGKNLG

SEQ ID NO: 156026 - protein, 46 aa, Oryza sativa
  unsure (1)..(46): unsure at all Xaa locations
  Clone ID: PAT_MRT4530_55733C.1.pep
SEKSFXVELATGAAVTXFRVKXRIXIEXXNAXAXKXXLTXLEDRXE

SEQ ID NO: 156027 - protein, 152 aa, Oryza sativa
  unsure (1)..(152): unsure at all Xaa locations
  Clone ID: PAT_MRT4530_55734C.1.pep
DSYMAGFQGIPSSTMTSENGFNNITTQYIRTDQGVVKGNVPLPQDVVSLKVTSDSPNPSFANNRCVVAYATSSFAPIQYAYNAXGSTGVYTADYTRIGYMQNRADGMTGRDTGLTASFAGQTVPTMAGQTVYCTGQTVPTIAGQTVPYPGQI

SEQ ID NO: 156028 - protein, 142 aa, Oryza sativa
  Clone ID: PAT_MRT4530_55735C.1.pep
MVGGQVSGVGGDSPEWLGGSGDPAGQAAGDGKELRLLQHKLAKQQLRRLEVEAVRGPRRSCSSTYGGNAKYAKFEENVRRVEEIEISNVVLAIPPRKAHTARRARQRRYGVKPDRSPAPHACAPRGASSGAWRHPSMRGQPL

SEQ ID NO: 156029 - protein, 133 aa, Oryza sativa
  unsure (1)..(133): unsure at all Xaa locations
  Clone ID: PAT_MRT4530_55736C.1.pep
GCRIEFFMNWYXQMLLEXXEXILXXXSGVFXXHPXXKISXXVXGIHWXYGTRSXPXEXXGGFXXTKDXXXFXXXRIXGPXXAXXXFXFXXXRHXQQXXXTQFPPKXXVQQXXGXXXEXXXGVPRXKXXXXVKK

SEQ ID NO: 156030 - protein, 157 aa, Oryza sativa
  Clone ID: PAT_MRT4530_55737C.1.pep
MACCRALALRSLLVPDHPRAAAAAAARPAAGRRAPRRRSRHLRCCSGGGDPGQPPQEAVLEAISKVARSKGRVALTTNMVLGGTVTDDASDEWLVLDQKVNSYPTNRGFTAIGTGGDDFVQSMVVAVESVLQEPIPKGQVQAVYRAMRSDNRMKYFL

SEQ ID NO: 156031 - protein, 102 aa, Oryza sativa
  Clone ID: PAT_MRT4530_55738C.1.pep
MAWTMDTMIDATNAYATTSASHVTKIPFSPSLSFPSSPGIVAAGAARVGHSSSGTGRVTRRQCAAAPLPCQLLGGASKESMVERAGPPAEQRRTNLRTTSVG

SEQ ID NO: 156032 - protein, 215 aa, Oryza sativa
  Clone ID: PAT_MRT4530_55739C.1.pep
GREAQQQQRTRTPVFRRNRENIRPTRRRGGERRHRRPPAEIPTTQQSCDGVLPGPRAPLAPRPRPPPRRRSRHLRCCSGGGDPGQPPQEAVLEAISKVARSKGRVALTTNMVLGGTVTDDASDEWLVLDQKVNSYPTNRGFTAIGTGGDDFVQSMVVAVESVLQEPIPKGQVSHKLSSRGKYVSVKIGPIRVVSSEQVQAVYRAMRSDNRMKYFL

SEQ ID NO: 156033 - protein, 352 aa, Oryza sativa
  unsure (1)..(352): unsure at all Xaa locations
  Clone ID: PAT_MRT4530_5573C.1.pep
MPPPSSRESLSVAMAARSQSQPHLDFPSLFSDLTSLLLQHPPPPSSSSSPGPVFSSSSLSIPAPAPASAAVAATAPPTPLARAAIGACAGAAAGAFTYAALLPIDAVKTRIQAGAAAGGSWQVFLDIFRTDGPLGLYPGLSAVILGSASSSAVYFGTCELAKSLLRPHLPPFLVPPLAGASGNVSSSAXQVLLQILQTDGFFGLYAGYAATLLRNLPAGVLSYSSFEYLKAFTLKQRNKESLTPGESVLCGALAGAISAALTTPLDVVKTRLMTRVGTEGSRTVVGTMREVVAEEGLMGLSRXIGPRVLHSACFAALXYCAFETGRLAILKWYIEDCERKAAAEMKAGVSAA

SEQ ID NO: 156034 - protein, 138 aa, Oryza sativa
  Clone ID: PAT_MRT4530_55740C.1.pep
GIQTKNNRHHATVDAQRDAELLAAGVVVAVRILRRRPRGVEQRRQPVARLQEPEQGPAQPGEEPDQGEEGVDEGEGGDGLREAPQRAPQRDGDGDRPEGGCHARGARPDGQVHAGYTVVPAEIVVTHDIRYSDAYFDG

SEQ ID NO: 156035 - protein, 199 aa, Oryza sativa
  Clone ID: PAT_MRT4530_55741C.1.pep
MDMDAHATELQLIGHGLTATTSSSSCFSSGGSGDNGMVIVTTTPKSAAASGSQKRARTPSSPSQGAELLEYSKKQRANNMETQSSTAKSQHERKEMRERISERKETLLIVAGFTLCGMLSVVGFSSVLGPTVVGSVGVDMAGLKNGMVDRSSMVVSFQGVDGGMAGKEALEGLKSLQAGQRPQDIREYCKEVLCSKVVE

SEQ ID NO: 156036 - protein, 84 aa, Oryza sativa
  Clone ID: PAT_MRT4530_55742C.1.pep
MPRFVHWLISSNSSGLPFFSSAGDTSTPAGLRGMAVGGGGPAVGGGLRRAEAAAGGGGSGGGEPPETGKTAGRGHLVVAAMRRK

SEQ ID NO: 156037 - protein, 74 aa, Oryza sativa
  Clone ID: PAT_MRT4530_55743C.1.pep
PVHSRSRRKSRSIRIQNSEVNQMKISLQCIGVLANGCRLSIFIRPITIRRILYVRVIRRHGLCQKYQYIDILLV

SEQ ID NO: 156038 - protein, 527 aa, Oryza sativa
  unsure (1)..(527): unsure at all Xaa locations
  Clone ID: PAT_MRT4530_55744C.1.pep
MRSCLSWTRRARTSGNRSVGGSNFRIKLPAGFGEVPIALFGAGGLTGRAVASPACFALREAVLVEAPASDVALELTLGQWRSPLMDPASLNGYLAXQDSVRIFALADLAAEMSDSKCASVKGAPRRHGSAMAPSRWTSLLDAVRCLRSMASAEAWLDDEPPGKVEHFHVAAVAAHCCNXGSGYGEMFEAYRCRXPRHPSIPSKKIQPIGIGTQRPHQAQKRSARGGPSPSRRXSGGEDIIXRSGFTNFPYLPRAXASLTWLRVAKLFNSSCLAVEPCVFIVHGKNLLKYKRKSPAPYGRPEVISGAATLACTRKRNHKALHLDLTSLMALXSYPSLFIVNIQMPTLPATVFGENDGDGISLVLYFKLSDSFDKEISPQLKESIKKLMGDEMERVKGFPVDSNVPYTERLKILAGLVNPDDLQLSAAERKLVQTYNQKPVLSRPQHKFFKGPNYFEIDLDVHRFSFISRKGLEAFRERLKHGVLDLGLTIQAQKAEELPEHVLCCMRLNKIDFADSGQIPTLIMSSDE

SEQ ID NO: 156039 - protein, 181 aa, Oryza sativa
  Clone ID: PAT_MRT4530_55745C.1.pep
MPSPGTVAAAPALGEAAAATSADMAKVWFRCAQAIRSGEAEQRQHRRAEEEEHQREKASERVLIGLAASLYSRSDIRQLPHAPLRRQSWDRARAITEAIVGSWLSAVTEAIVGSCTRHYGGNRGIVVKRGGSTGARRRKNTSERKQARVLIGLAASLYSRSDIRQLRGGGRTPARESKREF

SEQ ID NO: 156040 - protein, 62 aa, Oryza sativa
  Clone ID: PAT_MRT4530_55746C.1.pep
DMVHTREDRCKCREHWMPSSFHMVGVPLGDKLGAYSRVESCPRRELTASCTACRCNRGDMAS

SEQ ID NO: 156041 - protein, 77 aa, Oryza sativa
  Clone ID: PAT_MRT4530_55747C.1.pep
MAAAAAAAKRKPVFVKVDQLKPGTGGHTLVAKVLSSKTVVQKGRAAAGAGPAARPTRIAECLIGDETGCILFTARNE

SEQ ID NO: 156042 - protein, 242 aa, Oryza sativa
  Clone ID: PAT_MRT4530_55748C.1.pep
MAMTVVRQMNSEHEGPHAELLGDDGQPPNLVEVRDLREDDLHDAKEDHVVCLLQPAALVHRFSTGLQLMVAVLHDPTVITHKSGAAVFGVLEAFESLRLIGCQSDVVELHLLTNRWLWDAQFFPDLPIQSMSEGFMFLNRCSDALESELLACVEGISLVIQWTMLPIEVEMDCLTAAQLMQSKEPDRSSLAFIVRQIKGLIDGEREFIIRKVIFRTTYWLRYWTQLQRCDEDCELIKFSYVF

SEQ ID NO: 156043 - protein, 210 aa, Oryza sativa
  Clone ID: PAT_MRT4530_55749C.1.pep
MARACAYNPRKRERERSLGEEERWMKLARTVPAILMRIGTSRKAIKSTMKGMKAMKAAKRGDGGVFSDQMRHASEHLDGAHGRIARLIATHAEAGHLFVHCAAHIGGLKGGGGGAPAWQAWEGHRADAVLHARDARWWLCRAGGAVEAALDVFRVVEGRSGSGSHRPREAKRLRRRARDDVSKALHALTDMRHAIVLEFFDAWMVLNQNR

SEQ ID NO: 156044 - protein, 1169 aa, Oryza sativa
  Clone ID: PAT_MRT4530_5574C.1.pep
MQDFSILNQPCYSFNSSSWRSDVINMHTKGASSDVIRVSTSSAPSTSSHGSAQDDCDSSGDVYVWGEVICDNSVRTGSDTVVRSTVRTDVLRPKPLESNLVLDAYHVDCGVKHSALVTKNGEVFTWGEESGGRLGHGSREDSIHPRLIESLAVCNVDIVACGEFHTCAVTTAGELYTWGDGTHNVGLLGHGKDVSHWIPKRIAGALEGLAVAYVSCGTWHTALITTMGQLFTFGDGTFGVLGHGNRESISCPKEVESLSGLKTISVACGVWHTAAIVEVIVTQSSSSISSGKLFTWGDGDKHRLGHGDKEPRLKPTCVASLIDYDFHRIACGHSLTVGLTTSGKVLSMGNTVYGQLGNPRSDGKIPCLVEEIVGENVVQVACGSYHVAVLTIKSEVFTWGKGANGRVGHGDIEDRKIPTLVEALRDRSVRHIACGANFTAAICQHKWVSGAEQSQCASCRQPFGFTRKRHNCHNCGLVHCNACTSRKAVRAALAPNPAKPYRVCDSCFLKLNNAVDSSAISKKKENVLRESNSDGRLTKAIIPSNLDMIRSLDSKAAKQGKKTDALSFLRTPQMNSLLQLRDIALSGGLDLNRPVPRAVRTTAVRSVNTSRAVSPFSRKPSPPRSTTPVPTTHGLSIGKGAADNLAKTNEMLNQEVERLRAQVDNLRHRCEVQELELQKSAKKVQEAMTLVAEESSKSKAAKEVIKSLTAQLKDMAERLPPDQGAYDGNESKQMHFPNGTELHAAIYSSTNGIHQLQNESISALNTPSLNTGRSLHANGISSQHKSLGSISEHSEVSTHSHRVSSPHDTELSNRRARISSDELFSASGKSDDSNNRDARSLQNGEDGYKPRGTVSLSSNQVQAEWIEQYEPGVYITLTTLRDGTRDLKRVRFSRRRFGEHQAENWWNENREKVYERYNVFLDILRTDGPLGLYRGLSVVILGSASSSAVYFGTCELAKSLLRPHLPPFLVPPLAGASGNVSSSAIMVPKELITQRLQSGAAKGRSWQVLLQILQTDGFFGLYAGYAATLLRNLPAGVLSYSSFEYLKAFTLKQRNKESLTPGESVLCGALAGAISAALTTPLDVVKTRLMTRVGTEGSRTVVGTMREVVAEEGLMGLSRGIGPRVLHSACFAALGYCAFETARLAILKWYIEDCERKAAAEMKAGVGAA

SEQ ID NO: 156045 - protein, 169 aa, Oryza sativa
  Clone ID: PAT_MRT4530_55750C.1.pep
MTKQKIVIKVSMPCEKSRSKAMALVARASGVNSMEVTGDGKDRLQVVGDGVDPVCLVACLRRKIGYAEIVQVEEVKDKKPEEKQPEPPKPVPCYYPAPPCYYPPATVVCSDEPSPCSIIATSTCELEKEARDKSTGSGGEQSFMLGSVPMPCKLADWICRCSPRRLQSI

SEQ ID NO: 156046 - protein, 500 aa, Oryza sativa
  Clone ID: PAT_MRT4530_55751C.1.pep
MATARVSLILLVVVLAASACAEGLRLPRDAKFPAAQAERLIRSLNLLPKEAGPTGAGDVPSVAPGELLERRVTLPGLPQGVGDLGHHAGYYRLPNTHDARMFYFLFESRGKKEDPVVIWLTGGPGCSSELAVFYENGPFTISNNMSLAWNKFGWDTISNIIFVDQPTGTGFSYSSDDRDTRHDETGVSNDLYSFLQVFFKKHPEFAKNDFFITGESYAGHYIPAFASRVHQGNKANEGIHINLKGFAIGNGLTDPAIQYKAYTDYALDMNLIKKSDYDRINKFIPPCEFAIKLCGTNGKASCMAAYMVCNSIFSSIMKLVGTKNYYDVRKECEGKLCYDFSNLEKFFGDKAVKEAIGVGDLEFVSCSTTVYQAMLTDWMRNLEVGIPALLEDGINVLIYAGEYDLICNWLGNSRWVHSMEWSGQKDFVSSHESPFVVDGAEAGVLKSHGPLSFLKVHNAGHMVPMDQPKASLEMLRRFTQGKLKEEWLAELPEQPMYAAM

SEQ ID NO: 156047 - protein, 133 aa, Oryza sativa
  Clone ID: PAT_MRT4530_55752C.1.pep
MEHEGHAPLLAGCRRRRREEVEDVRREGEAREVGEEGGEGAVKERAERWRRRTTGSEMARRWRDWERLGQGQREQGGEAGQGRVEEPVGRGEDGGEDKTASKTDRGVDLQRFSELGDGLYPVLQLRDAIHTRP

SEQ ID NO: 156048 - protein, 149 aa, Oryza sativa
  Clone ID: PAT_MRT4530_55753C.1.pep
MGTTATLPAAVQPSCAWRTPAPRHVHTRRTPLASASTGGRCRLPPLVGRPRAGRSSSPTSPPSSPRPTGSSTLPCPASPPCSRCPCPSRSQSRHLLAISLPVVLRLHRSARSLTAPSPPSSPTSLASPSRRTSSTSSRLRRRQPARRGA

SEQ ID NO: 156049 - protein, 89 aa, Oryza sativa
  Clone ID: PAT_MRT4530_55754C.1.pep
MDSPHPNVCDQRHYGHTGEPRRSGLHRLRIPKLSPQPQFLGIPDLVSHSVIQLDVQNQGGCGLRRAKFQESGIAQAEEVPGTAAKAPET

SEQ ID NO: 156050 - protein, 53 aa, Oryza sativa
  Clone ID: PAT_MRT4530_55755C.1.pep
SIRSKFLKKVQDKTRNLKTTQIQDECTVDNARKKFTRDHQRVYMHFPCTIRVL

SEQ ID NO: 156051 - protein, 47 aa, Oryza sativa
  Clone ID: PAT_MRT4530_55756C.1.pep
MKNKLMDRGSLEIQLYNFGKRQYVQPGIFKGAEPIIRTRAIDIPRGL

SEQ ID NO: 156052 - protein, 55 aa, Oryza sativa
  Clone ID: PAT_MRT4530_55757C.1.pep
PHTATAHASGAVLNRYGRGPNTLARGYSKGSGLTADIIGTILTRYTVIYMTQPKR

SEQ ID NO: 156053 - protein, 542 aa, Oryza sativa
  Clone ID: PAT_MRT4530_55758C.1.pep
METLRKQASKLREHVAKQQQAVRKQFSARYNQDPSLVDEAELECHQNLQRLYNSTRAAKVFEPLREMIMSAPLEDARLLTYRYQRIRQDMESQIADVMRKQLKSKESSGNADNSVKLQHAESKLSELRTTLSALGREATAAMEAVEVQQQQVDAERAYHQNAADILNKLHDEMVQAKHHDEPENHYDETSSDPKTAATHEHSRSTSEDHIFTNTSEPTRTETSEPTRTETSEPTRNGQEVHYVGEVAPNGWSEGECKGKAGWFPSAYVEQRDKAPAKWLAPSSNGTVPASLAPSSCHRGAREPTWQEEGASMAGAAASIPVSLYGVATAGRQAQVKTLPPLPVLAPDLPPIRAAAVSPCVASACVLLSGELVMPRQRALKTGEALLAFKKAVTTSDGIFLNWREQDVDPCNWKGSSIVMFHGDLPYSTKEILKKLETMDDENIIGVGGFGTVYKLAMDDGNVFALKRIMKTNEGLGQFFDRELEILGSVKHRYLIETLDALLSLAKQCVSSLPEERPTMHRVVQMLESDVITPCPSDFYDSE

SEQ ID NO: 156054 - protein, 88 aa, Oryza sativa
  Clone ID: PAT_MRT4530_55759C.1.pep
LDITGDQKSRGFQLLSINSITQQHYLHKNLLIFQGYFKLTKTITYLYSNKYHVLLQAHTYSAAHSLSKKFFIFLQIYANYSSHADTFS

SEQ ID NO: 156055 - protein, 96 aa, Oryza sativa
  Clone ID: PAT_MRT4530_5575C.1.pep
SKCCKASLQGYVCLSATGGTKLPDDAEHATSYLCWDSASKQDGWKMRDGKMAIHGGKHGHPWCKLPNCCLHCGLLLIKRGLHVLSNKVLHTIVQNN

SEQ ID NO: 156056 - protein, 441 aa, Oryza sativa
  Clone ID: PAT_MRT4530_55760C.1.pep
METLRKQASKLREHVAKQQQAVRKQFSARYNQDPSLVDEAELECHQNLQRLYNSTRAAKHFQRSIVRGVEGFIAVSTKQMEIVKKLAEDCCRYGNDNQNFGFILARASVEFGNSHSQMEKERENLLKFLGEQVFEPLREMIMSAPLEDARLLTYRYQRIRQDMESQIADVMRKQLKSKESSGNADNSVKLQHAESKLSELRTTLSALGREATAAMEAVEVQQQQVTFDRLLAMVDAERAYHQNAADILNKLHDEMVQAKHHDEPENHYDETSSDPKTAATHEHSRSTSEDHIFTNTSEPTRTETSEPTRTETSEPTRNGQEVHYVGEVIHPFDAQADGELSISVGDYVVVRQVAPNGWSEGECKGKAGWFPSAYVEQRDKAPASKQSKGRIAAFGMSDWVEEEGMVAGFLDPTLSETLNLNGNRSTCLIAPLLSSFHCPQS

SEQ ID NO: 156057 - protein, 119 aa, Oryza sativa
  Clone ID: PAT_MRT4530_55762C.1.pep
MNNDFTFFFYDYESFGINPATDRPAQFAGIRTDREFNIIGEPVMFYCKQTNDYLPSAEAVMVTGIAPQLCNEKGLSEPEFAQRIHHEFSQPNTCIIGYNNIRYDDEMTRYTFFRNFYDP

SEQ ID NO: 156058 - protein, 70 aa, Oryza sativa
  Clone ID: PAT_MRT4530_55763C.1.pep
MSSSASSSAAPSAEYAEVSSHRLDPLSQHQTDLPTPHLVFPFLVLLDLQHLSNLVAIPNLRKVGSHGSSA

SEQ ID NO: 156059 - protein, 617 aa, Oryza sativa
  Clone ID: PAT_MRT4530_55764C.1.pep
MHRFLVTALLFSLLNYGAVMATESDEADFFRNCPPSRCSSDGPDIKFPFRLESSSSSCGAPGMQLSCSGQDTLLLHHVLGLSKVTGIDYIYGVINIVPLAESWSQCALQKIISANYSTSVYKQYGFQYASLVSCSEEFIWDSTDSIFGPISCLSNASQSLYLVAPYAFVSILPLYCKVVSTEIMIPYTSNQGRKDYNASASTEFNESAKRITTFSEITFTWSAPNITDVCIDCERQQRLCGFSSQRRTAFCKPHGSKSPAKVIIVAVSVPTIVVLTLVVASALYLSLKTKNDDEIQLKVEMFLKTYGTSKPTRYTFSEVKRITRRFKHKLGTGGFGSVYKGELSKGVPVAVKMLENSKGEGEEFINEVATIGRIHHVNVVRLLGFCSEGTRHALIYEFMPNNSLEKYIFSRDYISSQEVLVPDKMLKIALGIAQGIEYLHQGCSQRILHFDIKPHNILLDHSFSPKISDFGLAKLCARDQSIVTLTAARGTMGYIAPELYSRNFGAVSYKSDVFSFGMLVLEMLSGKRNSDPSINSQNEVFVPEWIYETIVSAQESEFAKDMTQEEKEKLRKLAIVALWCVQWNPANRPSMRKVVNMLTGSLQNLKNPPRPFVSSLS

SEQ ID NO: 156060 - protein, 152 aa, Oryza sativa
  Clone ID: PAT_MRT4530_55765C.1.pep
MMKLGKAESARGKVAPAGSGGRARMLVTVTVLGSAGPLRFLIDEGETVAGLIRAALRCYAREGRMPLLGADAAGFLLYTANGGSDALSADEKIYFNGCRSFLLWQKAARDTMAKGGRPELANVATCNPCKKRGGGGWKGGLNKFLLSFSFKV

SEQ ID NO: 156061 - protein, 170 aa, Oryza sativa
  Clone ID: PAT_MRT4530_55766C.1.pep
MDQIMGKVGGYWFKQNAGKEINNIGDDINSISSSIGDGAKWMVNKIKGKMQKPLPEFLKEYDLPVGLFPQDATNYEFNEETKKLTVYISSACEVGYKDSSVLRFSTTVTGYLEKGKLSEVEGLKTKILIWTKVMAVRTEATKVHFAAGMNKARNRDAYEVVRDGVGIDKF

SEQ ID NO: 156062 - protein, 58 aa, Oryza sativa
  Clone ID: PAT_MRT4530_55767C.1.pep
FLRRTISQRCEIKRDLSLLALYVCDISPISRCRHFDRPGPCHNIGEERERGTRESALA

SEQ ID NO: 156063 - protein, 95 aa, Oryza sativa
  Clone ID: PAT_MRT4530_55768C.1.pep
TGGQEERQPPLVMNGQSTPQLPMRQMLKKVFTREREHDQEEDTDFMAPGCHVKSAAADKARQDHTKHKLSEQEPEDEVEEEDEDEYEDDVEDEDE

SEQ ID NO: 156064 - protein, 74 aa, Oryza sativa
  Clone ID: PAT_MRT4530_55769C.1.pep
LNIGLPLIRHHTVVLVCHMPLVESHRSFHPTFQKGKNNRLTKSYNDSSNFEVDFKRNIHSSHWNNRIWHVLGNQ

SEQ ID NO: 156065 - protein, 433 aa, Oryza sativa
  Clone ID: PAT_MRT4530_5576C.1.pep
MAIRNFWSMAAAAVGFRLVLVLFGGDLHLASRPEVSTPLTSIRRLAEGYWLKQASMSPYSGLLDIMIIYIADFIAAMLIRATGRRLQIARNRNLKSLELTEALLIVLIDTVPAVNLLRTKFFFQIILLLGYGPDAPPTKVFRIKSSSASKTDVSDNDKSSSSRDVQQFLWKPVFHFILWMLFWTFYVLLLSSIVLNKVGGLQEMFEKSFFLIVFNMNIVFMVLPLAIRLKHRPCFLAFIYTAIVAILKSYPSVGDSALYLGLLGLFANELAEMQFTFFLFFGYIGVSLLSPVMHNLWIWRGTGNANFYFATGLAYTCLQTVLVVESGFLPFNSFTEIYSLLGPRGSQVHRYHYRANNKCTELHSWSHQQNLCSCCRYIEGYRVRKIWGMSHGSCGYPNYYPYPTETWYHIRIHIREKTFVFVSELSKNYPIRK

SEQ ID NO: 156066 - protein, 58 aa, Oryza sativa
  Clone ID: PAT_MRT4530_55770C.1.pep
YLESSLAPARYVFSILGILGNMSRTVKWRAHATSGQIGSSSESSTNSSELSTNSYTPA

SEQ ID NO: 156067 - protein, 41 aa, Oryza sativa
  Clone ID: PAT_MRT4530_55771C.1.pep
ETCKHISACNKQSRFSETEAANREPETHGVIVLYAIVRPKA

SEQ ID NO: 156068 - protein, 778 aa, Oryza sativa
  Clone ID: PAT_MRT4530_55772C.1.pep
MTTSSWGGGGGGGGGAVRLWCCGLLLMLLSGGGGGGGAAAQRPPAYKTLSGNAPIVIAEGGFSGVFPDSSKNAYVFALSSTSGDTVLWCNVQLTKDGVGICLRDLLMDNCTSISQAYRAGKKAYLVNGEEKKGWFPIDYTMSSLQSVICHTVQKLPFVVRWDQLHDIFYRQHGLNMTKYILSIPKGGSVQYISSPELGFLQSISGRVNRKTKLVFRFLDATSSDPSSNQTYGSLLSNLTFIKTVASGIMVPKEYIWPVTTNNYIQPAKSIVRDAHSAGLEIYASDFANDRIIPYNYSYDPLEEYLHFVGSDNFSVDGVLSEFPLTAAAAIGCFTNLNVSSKTDHGSPLIISHNGASGDYPDCTDLAYQKAVDDGADVIDCSIQMTSDGVPVCMSSINLFETTNVQRTPFSNRASIFKDIQPTPGIFTFNLTWADISSSDLRPKISSPESIYYLVRNPVHKNAGNFFRLSDFLTFAKDKDLSGIMIIIKNAVFMANSLGFDVVDSVTKALSDAGYNNQTTKAKEVMIQSEDSAVLVNLKQLETKYKLVYTLPSTIGDASASSLVDVKKFADAVIVDRESIFPESQGFIMKETNLVKDLRSAGLAIYAQVFRNEFVSPPWDFFSDVTVEINSYVQSVNIDGIITDFPKTVRRYKIIYPGHIMVSLTVAACTHDIRFAVNSCTGLGVNMPSYMNPAEIGGLAQLLNGSQAQPPALAPMPVLNSSDVTEPPFPSAAPKNAPGGAANGSTPAPGASPSGSQAAAVMRAGILPMVTALFASLLI

SEQ ID NO: 156069 - protein, 60 aa, Oryza sativa
  unsure (1)..(60): unsure at all Xaa locations
  Clone ID: PAT_MRT4530_55773C.1.pep
MPVQWSHMPAEVERWWSIGASAIDSQVMSSGXRSVTLSGGWSGASLLPDLCVGAGGADAA

SEQ ID NO: 156070 - protein, 725 aa, Oryza sativa
  Clone ID: PAT_MRT4530_55774C.1.pep
MEKYVPVLLSFAMQVVLFFAGRFHVHITDKFTRVLISSTYLGADIIAIYALGGLSRQEGNPQSIAFFWAPFLLIHLGGQDTITAFKMEDKNAWLTRSGKLLFYAVLAVFVFFNSIGRHKELLLAGIFMFATGFIKYFTRSWSLKWGSFESIENSTIRHMYEIQLPEASNGSNMTYYDYVLTALNSMLQIHDIFAARSLRSTANSESEDEEIVESEEAARSVREDEEAVELEKATRSVDIDQEIVEQKEYKILIKDDEVVEPKENKISTENDEAIQSTGNNTPIEGDEEVQLEGDEISIENRKAELEKIIIETIIKPELSLVQLQLGMMYDDLYTKALLLRKKGGIALRFIAISTSIVAFALFLSTEKRRYSKVDIAVTMSLFIGELLLEVCAVLIFMMSPWTWAWLKVRKYNWLACFSWYLFSSRIGWPENRPRWSNSMGQYNCVNRLVGISPPTSCTPKIMTYLRNIANKVGAKEISWINKLIHTGYVKTDRDTMERVVFGLYGLMNEVDGQDTEYLEWRYVGSFLEQIQDVLTADFGTALLMMHMVTEVFLRQYPGNHSLVDVCRKLSNYMIYLLVNHPSMLPLNTSAISSIKTAERMFQRRTNDISDVEHYKNIHDSLLVGDQPEGDGVLDELVEMWVRVLLYSAGKSRAELHVEQLASGGELITFAWLLMAKNDCGDSRMKRIQITNFSPRDESDDCYDLPMKEGHAFHIVHRSEVDIQRD

SEQ ID NO: 156071 - protein, 410 aa, Oryza sativa
  Clone ID: PAT_MRT4530_55775C.1.pep
MGSLAGGGGGGKVGLPALDVALAFPQATTASQFPPAVSDYYQFDDLLTDEEKTLRKKVRGIMEREIAPIMTEYWEKAEFPFHAIPKLATLGLAGGTTKTDQDNYFLSSLFLSFQFSVQIALCGSEAQKQKYLPSLTQFRTIGCWALTEPDYGSDASSLRTAATKVPGGWHLDGQKRWIGNGTFADVLIILARNSDTNQLNGFIVKKGAPGLKCTKIENKIGLRMVQNADIVLNKVFVPDEDRLTGINSFQDINKVLAMSRIMVAWQPIGISMGVFDMCHRYLKERKQFGVPLAAFQLNQEKLVRMLGNIQAMLLVGWRLCKLYESGKMTPGHASLGKAWTSKKAREVVSLGRELLGGNGILADFLVAKAFCDLEPIFSYEGTYDINSLVTGREITGIASFKPAALTKSRL

SEQ ID NO: 156072 - protein, 386 aa, Oryza sativa
  Clone ID: PAT_MRT4530_55776C.1.pep
MAPAAPFPRRLLLSLLLGVLVVAVVAAADVESSAGGGGGRRHSPRRTRYSRVFSFGDSLTDTGNAAILPATAGGPFTRPPYGMTFYHHPTGRASDGRLVIDFLVKALGLPEPTPYLAGKTAADFRRGVNFAVGGATALDPAFLKSRGMTSSVPVSLSNETRWFQDVLQLLGASAHEKHTIAASSIFYFGEIGFNDYSFALSAGNGTVDVAASLVPDIIAVIRSAVTAVIAAGARTVVVAGMIPIGCEPEMLALFPGGAGNYYDPASGCITRFNDLAELHNRELQRALHELRRAHPGATAVRYADLYGPVAAAVASPKEYGFGSSPLAACCGSGGEPYNFNANFTGFCATPGSTVCADGPSSSVSWDGIHYTEATNKLVARAILTRP

SEQ ID NO: 156073 - protein, 128 aa, Oryza sativa
  Clone ID: PAT_MRT4530_55777C.1.pep
STRAPTHHTSLHPSEIAREKDKRKTKAEPGMGCYHLGKFVSKALGKCNVRERGWREERLDYTMDYPPGPPTETYYMRPVARTDTFSAANFVYVIPTAEPAHQQSPEPHSQTPPATAQQQQHGPEHEHH

SEQ ID NO: 156074 - protein, 96 aa, Oryza sativa
  unsure (1)..(96): unsure at all Xaa locations
  Clone ID: PAT_MRT4530_55778C.1.pep
VLXLGTPGQPLDVPVXXGGXXXXIPFHTGNXXDXXTPGXXXXSLXGNKRGXSTGGSAXXXTSESPGHPRIRQEGSWXXRQXAXXIXSTXSXXVHXM

SEQ ID NO: 156075 - protein, 87 aa, Oryza sativa
  Clone ID: PAT_MRT4530_55779C.1.pep
MRRPMEDEGGGEKRRQWREMDAPLRLRSSRPSLGFRGCLRALQWLDVEGERGRGRGRELWRVVNEEAERETGGELRGNRRMESENSA

SEQ ID NO: 156076 - protein, 118 aa, Oryza sativa
  Clone ID: PAT_MRT4530_5577C.1.pep
MRLNHSERNPIGLTDDELSGVGVADWAEKVVVFMRQAGLVFSINSAASLRCSTAVGSALAAPKKLLNGRVSIEEPRAGDVGEECDMFDPLYVGFRCSENGRPDDPYTKWRWRSLRCFH

SEQ ID NO: 156077 - protein, 101 aa, Oryza sativa
  Clone ID: PAT_MRT4530_55780C.1.pep
SDRGDGEQEDEFAGASARTAPQRQHDGGRGPRRSCLAAACRLPGPIFAAAELRRAIAVLPHYGRRHRPPPLPPHPIDAHARPHLPINARAVPASLPPVTSC

SEQ ID NO: 156078 - protein, 84 aa, Oryza sativa
  Clone ID: PAT_MRT4530_55781C.1.pep
SGRGRCCPGPGVVPATHDEHLAIARQIVKETACLSTSHSRSGCFDLQPLWIVYLLETGIDGDGKHKMSFYSLFFLFNAQLFALV

SEQ ID NO: 156079 - protein, 71 aa, Oryza sativa
  Clone ID: PAT_MRT4530_55782C.1.pep
FCSSVKKKKNKPPEKLLQIATLRRKNSPRIRGRHYHLSTQRTLDWRRNATKVKKERKGFSFSFSWCSWVRD

SEQ ID NO: 156080 - protein, 91 aa, Oryza sativa
  Clone ID: PAT_MRT4530_55783C.1.pep
IEIQYELNSDRDPDRSPTGLGGPSDGSYIFVRGVTGGGIASLWEYGEENARGGEGRAGAIDYFLYIDARYFARVPSTSQRFLLLHSASSGN

SEQ ID NO: 156081 - protein, 111 aa, Oryza sativa
  Clone ID: PAT_MRT4530_55784C.1.pep
EEKESEQENVYIFLFPLCATPCAEPSHSLPGPTALTRLSIPSNLKPPLFAPLPNVPNNDPIIITIIMCALSLIPPLHPHHHIILIVAIIQNNQKQDNHIVDHPSSYHDPRR

SEQ ID NO: 156082 - protein, 510 aa, Oryza sativa
  Clone ID: PAT_MRT4530_55785C.1.pep
MAAASLLPLLLLLLAAAAAASASARHVITFTPARGVSPASLAWDPTAQHFVVAGGGEAVLSVSDAGVTESIASHRGASAVAVDDRRRRLLVASPGSVSAYDLRTPRPHARLFSATLPDPAAPPGGVAVDPHSGAAFLTVGARIYKVSPDGDLAALPPSPAYGGPDPLASLAAHVSRGFLLVGQPSTGRLLRVDMEDGAARAVSGALTPPSPAAVAVRSDGTVAVGGGATLRLVGSNDGWSSCAERDEAEPDGGAAAAVAAVAVRERRRVYALVAAADAEKAAAWRIEEVSWKKEGEGEMVVGFVFVGVALAIFMFWRTSSAQPFPVGSIKRKWRFGRKLGLKYRRVVPQCNLFLLGEVPTPAEADGAAGRSPPTSMAGGLLSKASSAVAACARRVSRATRRLLRARLLRRGGGGGGGETGKPDGGGGGGGEGLWRRAILMGERCEPLSFPGAIHYDSRGRRLSQPRRAKAKPAAATAALLCRSSDAVDEAVAAANNSKAARYVAVSLLRD

SEQ ID NO: 156083 - protein, 89 aa, Oryza sativa
  Clone ID: PAT_MRT4530_55786C.1.pep
ILCLLYVEVSPAHLETLGLGSWHCHHLPVHGWRTEICSPARRPESMCPAQRFVREGAVARSTIFNRRKSAPSLSRFVFSARGSNRSMTR

SEQ ID NO: 156084 - protein, 59 aa, Oryza sativa
  Clone ID: PAT_MRT4530_55787C.1.pep
LQKDSFKQFLTFWALAPKSFVGGAQQFVKFFWDQRGNYHRHSARVHLPEEHKVFLQLNL

SEQ ID NO: 156085 - protein, 203 aa, Oryza sativa
  unsure (1)..(203): unsure at all Xaa locations
  Clone ID: PAT_MRT4530_55788C.1.pep
MAKAVMMLPVLLSFLLLPFSSMALTQDFCVADLTCSDTPAGYPCKASVGAGDFAYHGLAAAGNTSNLIKAAVTPAFVGQFPGVNGLGISAARLDIXVGGVVPLHTHPAASELLFVTQGTVAAGFITSSSNTVYTRTXGLLHYQYNAGQSAAVALVAFSGPNPGLQITDYALFANNLPSAIVEKVTFLDDAQVKKLKSVLGGSG

SEQ ID NO: 156086 - protein, 95 aa, Oryza sativa
  unsure (1)..(95): unsure at all Xaa locations
  Clone ID: PAT_MRT4530_55789C.1.pep
MLRKSAAHLATVAPEIGWLRHGARTCMATDRVGGARMLRLRVYPGLGRPVFLRNTRKSIIASDQKGSSQAGRPSACKPTIMKIADLRRXGGRPPV

SEQ ID NO: 156087 - protein, 1027 aa, Oryza sativa
  unsure (1)..(1027): unsure at all Xaa locations
  Clone ID: PAT_MRT4530_5578C.1.pep
MAQDAGDAVLPASRITADRHLSLPHKIKPEDAAVRTGESRPRPRYPERSMHLLSFAMAGLIPPFSGFFHEVLDFYEIHVLHLAPNAVMTLAIFVHLCEMFIGVRPTMRLFQSFFVPQLLHGALVGGCYFQPRPGTAGQYIESYLRKKWEDWKKDWFYTALPDHPGLRSLGLTGAMVFGDYFRRRIAPLQDQARGAWEYTGPNDPMRTHVGERWDWGEEDMKTVIRRVLGLDTAEQTLIPDGILPLCSDRDRESILAVMSAVGASRGQSRRGGADGGVVGVGSGGAAAGGSRTSGPGGGGSSRAPGPSRGPGVDSASDPKGKRKMSESRPPPPPRGGGAERVADRPPAGHKRPAAPEAGRKKKRLWKIGQTEPCRGSFIEPPKWTFNRPPRSMIPSQGISGSDPSQGTKSERPERPGLGRSRAAGPSQHPGGAHGPHTGSALGSPQPGLDXAASDSGGNVSPGGDSEAQVHAERHPGAGAEGGRGPEAEAGGGPEPEAEAETGGGPEPEPEAESTRGPEAGGARXADSTVREGLNSQVQALAEEQAALEAEWAQLAADRARVDEGRRAMDDMVKVGRKMRQAQLDEIQAREQTRDSVMQETEEERQAALIASSVLDEALGDIRFVTHGNSLGVTRLQYEAYAEDLAKRVKDARGVLDAAAAQERRVSEANTSLQARTVAFESERKALDKRARSAQEFEATIRRRIEVLDRNQREQDARSQEQAQRAQELEWRAQALKERARLLDQREFTLAGGVEELRLREAACRERDAALAKREAEVNRRVVASRRLGEQLAKREEAVAGREAWHLESARAERAVMAARASELEAREKDLAAGGQPGGAELVSQLTTAQSTLADLERLVQDQAGERAALRLTNEIGPGQLSDAVDRLERAGRPVGISVRRDSKLPPTQPADLERLEEEVGETVKSSSASLARAAVELVLASHQARDPDFVPWRALEDFPPGTEAKAREQVREAADAIVSNFEGSAPRFTFGIASDEESGSGDDGDDVGGKDWDDVVSGAGLGGPGTP

SEQ ID NO: 156088 - protein, 213 aa, Oryza sativa
  Clone ID: PAT_MRT4530_55790C.1.pep
MAKAVMMLPVLLSFLLLPFSSMALTQDFCVADLTCSDTPAGYPCKASVGAGDFAYHGLAAAGNTSNLIKAAVTPAFVGQFPGVNGLGISAARLDIAVGGVVPLHTHPAASELLFVTQGTVAAGFITSSSNTVYTRTLYAGDIMVFPQGLLHYQYNAGQSAAVALVAFSGPNPGLQITDYALFANNLPSAIVEKVTFLDDAQVKKLKSVLGGSG

SEQ ID NO: 156089 - protein, 217 aa, Oryza sativa
  Clone ID: PAT_MRT4530_55791C.1.pep
MVYALCVLAPTWMDNAAAKILIKNSRAPTIAVRPNFRVKRRLRQPSKSPFLLPFFPSLPSRSNRISRRDQRHTRIEQRTYTHQADEYQRCLYNREIARRSRRGSGRDDIFHGRGGDRDAVQKGDLGTRTLHPISAVHRAVPDVPGPDSGCCAAPSARDRKATREAAVAVERRRPHTQEQNPSYVPQETGPANRIGLSASSYYLFASSRPRFVGEFSD

SEQ ID NO: 156090 - protein, 57 aa, Oryza sativa
  Clone ID: PAT_MRT4530_55792C.1.pep
RPFLTSCSRRASSGCSSGILDWGVEKRRAIRALIPPQLLASDRVRAAGGHQLAKELS

SEQ ID NO: 156091 - protein, 59 aa, Oryza sativa
  Clone ID: PAT_MRT4530_55793C.1.pep
SSPEAPRRLRVVLLVVIAINACKNTTYSLALNPFTFSPYVAHRDLPPFATGELENELGH

SEQ ID NO: 156092 - protein, 72 aa, Oryza sativa
  Clone ID: PAT_MRT4530_55794C.1.pep
MATIDELLLPSSSPSPFHSELKIKDDSVAVEFYSQQEQDGNYRSIVQHGTIYLHFQSCMAPSRRYEVTFGWN

SEQ ID NO: 156093 - protein, 146 aa, Oryza sativa
  Clone ID: PAT_MRT4530_55795C.1.pep
LAFSCWLMQGKSCTRIPSPHGRTARSREPHSAGRKRGLGSPSAAVGGERRERGRFADSRAAVPRIPNYPFSASPSSTTGSLYSPRAESAPREIPDEGMAGPAASAVPLHAGSTPLPRRNPAAVRGLMRPPLLMVAKAQPCVLRRFT

SEQ ID NO: 156094 - protein, 471 aa, Oryza sativa
  unsure (1)..(471): unsure at all Xaa locations
  Clone ID: PAT_MRT4530_55796C.1.pep
MRLLPRLCMATGDXAAAAGEGDSSNSXSKQQAAAVSSSSSTVSTSSSAAAAAVSEXASSSMSLPSLPSLSDVTGSTSASLAASFAHVTTLCPLSTAAAAASAAAVAAADYSVHGGGGLVVVVARPAAVVLHDVFTMEATSTSDMADDTSAAGSVKCVAHLHGGKAAVTGHQDGRLRLWRMSSRAPDRLRLAAALPTVSDRLRRFPVPSNHVTVRRHHRRLWIEHADAVSGVAASADGRLLFSVSWDKTLKVWAVPSLRCLQSLPAHDDAVNAVAVAHDGTVYTASADRRVRVWAPRAPAAGPDRASRRPGKKPAYHLVATLSRHAAAVNAVAVGCGGQVLYSGGNDRCVVVWEREDSASHMVAVGALRGHRRAVLSVACAAGDAADGALVVSGAADQTVRAWRRGADGRGYYCVAVIDGHGSAVRSVAAALVTAQKKRRADDDGGDEEWRVCSASFDGEVRLWSLRVAAAS

SEQ ID NO: 156095 - protein, 72 aa, Oryza sativa
  Clone ID: PAT_MRT4530_55797C.1.pep
MTRCNGCVAVVYGGSTRGPSGDDKLNGKLTEMMSDGETGRCQWHQNLEFLGRLGHLQSLHLSGNRLDSKTPS

SEQ ID NO: 156096 - protein, 147 aa, Oryza sativa
  unsure (1)..(147): unsure at all Xaa locations
  Clone ID: PAT_MRT4530_55798C.1.pep
LVQSHDQRPRFGRKRLGPWMTSAVLAAWSGGAAARQGTTQAAPGLDAAATGRLRGAGAAGLTAATTGRSATRERGKERRRWRVLGGDGGKRRRREREKTREXRERQRKRGRGRESERTSERGKGERDSALSLSLXVVTCGARGVGGS

SEQ ID NO: 156097 - protein, 50 aa, Oryza sativa
  Clone ID: PAT_MRT4530_55799C.1.pep
SFGCKKFFRFFVPGALMQCGLYWLILGILKGFPCLGKSKKFPPGCWAFYP

SEQ ID NO: 156098 - protein, 453 aa, Oryza sativa
  Clone ID: PAT_MRT4530_5579C.1.pep
MAIRNFWSMAAAAVGFRLVLVLFGGDLHLASRPEVSTPLTSIRRLAEGYWLKQASMSPYSGSMYHGSPLLLLVLGPLTNKRSVGHHDHIYCSLIFVAVDFIAAMLIRATGRRLQIARNRNLKSLELTEAVSNSVNVSAGDIASLIYLWNPWAIVTCVGSCTSPIENLMVVIMIYGACSRLAPLAAFGYVMATHLSLYPAILIVPIILLLGYGPDAPPTKVFRIKSSSASKTDVSDNDKSSSSRDVQQFLWKPVFHFILWMLFWTFYVLLLSSIVLNKVGGLQEMFEKTYGFILTVKDLSPNIGVLWYFFAEVFDFFRSFFLIVFNMNIVFMVLPLAIRLKHRPCFLAFIYTAIVAILKSYPSVGDSALYLGLLGLFANELAEMQFTFFLFFGYIGVSLLSPVMHNLWIWRGTGNANFYFATGLAYTCLQTVLVVESVSSMIKHDRKLRLLVTA

SEQ ID NO: 156099 - protein, 49 aa, Oryza sativa
  Clone ID: PAT_MRT4530_557C.1.pep
KISHHEGGVFFLVLRIGCDGIRPARGKKMWVRSLSVPRNSSPVGFAHLF

SEQ ID NO: 156100 - protein, 128 aa, Oryza sativa
  Clone ID: PAT_MRT4530_55800C.1.pep
VQGLRQGARLRDGVPGLGHQRPPVEPARAEKSRRGHLRHVQQAEIHGGAAPVITPYIYFFYITISVSVIGHLASSSHLLINDSFSISLNGQAAFGTAISLLVAIAVIIQTVVLFFRFGFGFIQDMIFS

SEQ ID NO: 156101 - protein, 154 aa, Oryza sativa
  Clone ID: PAT_MRT4530_55801C.1.pep
MPRAANHAGAENIWNLQRAKDADEKVRRKLGPIKTGGRRIDKEQIGPLIGGNKPAMGRPNDVAGTERRVRHGYIVVLPRGEAVQGDHARITVAGREHEAGPRVTGANAKAAGLQKAGMPGAANHTGAEDIRDLQHAEDADEQVRRKLGPIDTGD

SEQ ID NO: 156102 - protein, 78 aa, Oryza sativa
  Clone ID: PAT_MRT4530_55802C.1.pep
SGLPVKEVRSPGGAWLQAARLLLSARFSSVGSGASAMADWRADVAVHTAVNVVAAARPSRRRAARPLLTRLGFARFGN

SEQ ID NO: 156103 - protein, 870 aa, Oryza sativa
  Clone ID: PAT_MRT4530_55803C.1.pep
MEEASVTGELLEQEAPSSSISGVDWSQLPADLLVCIFGVLEVPDVFSSGVVCRAWHASFLEARRLGICSSNPGPCLVFSSGDRDPSVVTLHSLTTGKNYYVTMPDPPFRTRYIVGSSHGWLITADERSNLLLVNPATQAQIPMPPPETIANVRIRCNGEGVPHGYDLFKLDMSSQDFDTETEPDDLSWEEGRFYFYTRVVLSADPSSGNCTVMILHLLRNLLFFARVGDTHWTWINVNELCWNYHDVLYNDDDRLFYAIRGNGDVHAINTNGPSPILRVVLDAKSSLVDCAKYIVLSELGGLLQVWRYHHYVNNNKERRTSELVVYKVDLVEHKLVELKDFEGHALFIGFNSSFFLREEDFPMLTPNSVYCTDDTVTYICHSRFGFREVSSSVTGELLEHEAPPSTPGLDWSQLPADLLICILGTLEIPDIFSSGVVCRSWHASYLEACRLGICSNNPGPCLVFSSSDRDPSITTLHSLTTGKDHYVTMPDPPFRTRYIVGSSHGAAQITMPPPETIANVRIRCNGEGVPDGYDLFTMDMSSRDFDTETEPNDLSWEEGRFYFYKRVVLTADPSSRNCTVMILHLLDDFLSYARVGDNHWTWIDVDELCCCYHDVLYKDDDRLFSAIRATGDVHAIDTNGPSPMLRVVLDTKNSLINNTKYIVLSESGDLQVWRYYKHVNNDRRTRELIVYKVDLGEQKLAELKDFDGRALFIGFNSSFFLRVEDFPMLAPNSVYCTDDSMEYIYCVRFGFREVGAFHLDDSSFTDQLIGSRLNWPSPIWFWPSFTKNWKEVENNSNTLAAESKVNTSDDTTSAAMLVISGWGLMKSDTNFTKVDKATQSMHMVFGCETTGNWVDHCHCLVKIAEGKFMA

SEQ ID NO: 156104 - protein, 120 aa, Oryza sativa
  unsure (1)..(120): unsure at all Xaa locations
  Clone ID: PAT_MRT4530_55804C.1.pep
MAAWWHPWLQISSSPFPNVFEDLETANHILLDYMFARQVWFRVLSPPSWAALSPPWQLVPELXPFSRAFLPEHLRAGLYSLVLLVSWQLWKERNSRVFDSALSFVSVVLESIRSESHMWF

SEQ ID NO: 156105 - protein, 47 aa, Oryza sativa
  Clone ID: PAT_MRT4530_55805C.1.pep
SIKPVTDFFFFLMNWHRCVNFIEYSGKKEGKNYTKPIIRKISCNLLI

SEQ ID NO: 156106 - protein, 453 aa, Oryza sativa
  Clone ID: PAT_MRT4530_55806C.1.pep
MRVVVEEEEAEVMYPSTPGKVKVEQRSSAAMSRQVHRCFASTGTMFLWALFLVAMTATYLSFRSLAGDAAASSSRYFPAASWGGLHWERQIRASASPRRPPGSAEGAGLSVLVTGAAGFVGAHCSLALRKRGDGVVGIDNYNSYYDPSLKKARRALLGSHGVFVVDGDINDGRLLAKLFDVVPFTHVLHLAAQAGVRYAMENPSSYVRSNVAGLVSLLESCKDADPQPAVVWASSSSVYGLNDAVPFSEAHRTDKPASLYAATKKAGEAITHTYNHIYGLSITGLRFFTVYGPWGRPDMAYFFFTRNILQGKPVTVYRGRDHVDIARDFTYIDDIVRGCLAALDTAGRSTGGGGRKRGAAPYRIFNLGNTSPVTVPALVAMLERCLMVKARRHVVEMPGNGDVPFTHANISLAREQLGYKPTTSLEMGLKKFVRWYLSYYGYNRGTHAFRSRL

SEQ ID NO: 156107 - protein, 869 aa, Oryza sativa
  unsure (1)..(869): unsure at all Xaa locations
  Clone ID: PAT_MRT4530_55807C.1.pep
TRRDTWIKFAXCWKSGRISQAKSTLVKLLQLDPESSPELTLYHGHPQVVMASLKYQYAVGDELKRRDAFCRLQDLSVQLATATNSYSGTLASQVATSNAGVPLIARVYLTLASWKRALSPGLDDDSIQEILVSYKNATLNAKDWGKAWHLWALFNTEVMSRYTLRGRPDIAGKYVVAAVTGYFYSIACASTTKGVDDSLQDILRLLTLWFNHGATSEVQMALQKGFSLVNIEMWLVVLPQIIARIHSNNKIVRELIQSLLVRIGKDHPQALMYPLLVACKSISILRQRAAQEVVDKIRQHSGGLVDQAQLVSKELIRVAILWHEMWHEALEEASRMYFGEHNIEGMLAVLEPLHAMLERGPETIKENTFIQAYGHELLEAHECCLKYRATGEDAELTKAWDLYYHVFRRIDKQLPSLTTLDLHSVSPELLXCRKLELAVPGTYSADAPLVTIEYFVPQLIVITSKQRPTKPWVHGSDGNDYAFLLKGHEDLRQDERVMQLFGLVNTLLENSRKTSEKDLSIQRYAVIPLSPNSGLIGWVPNCDTLHALIREYRDARKIFLNQEHRCMLSFAPDYDHLPLIAKVEVFQHALENSEGNDLAKVLWLKSRTSEVWLERRTNYTRSLAVMSMVGYLLGLGDRHPSNLMLDRYSGKILHIDFGDCFEASMNREKFPEKVPFRLTRMLVKAMEVSGIEGTFRTTCENVMQVLRTNKDSVMAMMEAFVHDPLINWRLFNFNEVPQVTNYGNAHSHTVVNSEEAANRELMQPPRGARERELLQAVNQLGDANEVLNERAVAVMARMSHKLTGRDFSSGSSLSGAGSSTQHGNEHLASGDTREVEPGLSVKVQVQRLILQATSHENLCQNYVGWCPFW

SEQ ID NO: 156108 - protein, 109 aa, Oryza sativa
  Clone ID: PAT_MRT4530_55808C.1.pep
MFQKSVPTVLQDVAGDPTLPRTKSVRCAACGHGEAVFFQVQYITRNVLIVFLAAGDAVADVGIEIVRKCGCLPLAIKVIARVVYPEDANIYRDDLTRMWIAEGFIEDHG

SEQ ID NO: 156109 - protein, 195 aa, Oryza sativa
  Clone ID: PAT_MRT4530_55809C.1.pep
MLLVNLYSRLTASTGVGVGVDDDDDDGSGGYGVLDGACGGTLAVFCALAVSVVVWKACAFVAMAAALLAIGWRVVAPRRSVGRAGAGAPTPAECGLTAAAIDALPASEYERPRGGGGDPACSVCLEDVRGGETVRWLPACGHLYHAACIDAWLRSRTTCPLCRSDLSSRRGGTASGRPRPRLVTHESLLPPLPSV

SEQ ID NO: 156110 - protein, 771 aa, Oryza sativa
  Clone ID: PAT_MRT4530_5580C.1.pep
MAQDAGDAVLPASRITVDRHLSLPRKIMPEGAAVRAGESRPRPRYLERSVHLLSFAMAGLIPPFFGFFHEVLDFYEIHALHLAPNVVMTLAIFAHLCEMFIGVRPTMRLFQSFFVPDRDRESILAVMSAIGAGRGRSRRGGTGSGAVGVGSGGATVGGSRTGGPGGGGSSRAPGPSRGPRVDSASDPKGKRKMSESRPPSPPRGGGAERVADRPPAGHKRPATPEVGRKKKRLRKIGQTEPCRGSFVEPPKWTFNRPPHSEIPSHGISGSDPLQGAKSERPKRPGLCRSRAAGPSQPPGGAHGPHTGSDPGFTTAETRPAASDSGGVSPGGDSEARIHAERHPGAGGEGGRGPKAEAGGGPEPEAEAETRGGPELEAEAESTRGPEAGSERSSRSSLHLGRPQGWPRRRRAESGPQSRRGSSSTPPSGRGSTPKFKPWRKSERPWRQSGHSSLRTARGLTRGAAPWTTCVLDEALGDIRLQYEVHAEDLTKRVKDARGVLDAAAAQEQRESTLAAHERMAAEAEPSLRLREEAAAKRDRTTLTAKASVARHAEELRLREEACRERDAALAEREAEVNRREVASCRLGEQLAKREEAVAGREAQHLESARAVHAAMAARASELEAREKDLAAGGQPGGAELVSQLTAAHSTLADLERLVQDQAREIAALRLTNEIGPGQLSNAVDRLERAGRRVSISVRRDSKLPPTQPALVLRLDGLVADLERLEEEVGETMKSSSASLARAAVELVLASHQARNPDFVPWPGLEDFPPGT

SEQ ID NO: 156111 - protein, 57 aa, Oryza sativa
  Clone ID: PAT_MRT4530_55810C.1.pep
MPSLSRKTERPGSLDMSGGCGGDLGPGVGCIKSLELLAGSIINELLADGLINVIGVI

SEQ ID NO: 156112 - protein, 54 aa, Oryza sativa
  Clone ID: PAT_MRT4530_55811C.1.pep
YLLSRMIMHDFIFNILSIIVLQFCLIHHHRCECSSQQCSSHDRYYIWMSSLRSA

SEQ ID NO: 156113 - protein, 284 aa, Oryza sativa
  Clone ID: PAT_MRT4530_55812C.1.pep
MAGGPAAVSFLTNIAKAAAGLGAAASLLSASLYTVDGGERAVIFDRFRGVLPETVGEGTHFLVPWLQKPFVFDIRTRPHNFSSNSGTKDLQMVNLTLRLLSRPDVVHLPTIFTSLGLEYDDKVLPSIGNEVLKAVVAQFNADQLLTERPHVSALVRDALIRRAREFNIILDDVAITHLSYGIEFSQAVEKKQVAQQEAERSKFLVAKAEQERRAAIVRAEGESESARLISEATAAAGTGLIELRRIEAAREIAAELARSPNVAYVPAGDNGRMLLGLNAAGFGR

SEQ ID NO: 156114 - protein, 146 aa, Oryza sativa
  unsure (1)..(146): unsure at all Xaa locations
  Clone ID: PAT_MRT4530_55813C.1.pep
MGEGGGVLGEAAYLETAAQAVVVQGGGGEAAAKRSRQSVVVGDPSVVDPGVGEVGVGEVGEVRRQRGRPAARATVERAEMVERVSXGGGGGEGGGEGGGEGGDGGREGGGDGGAEGGGEVEAARRTVERRAADLDRESEERRRSSE

SEQ ID NO: 156115 - protein, 168 aa, Oryza sativa
  Clone ID: PAT_MRT4530_55814C.1.pep
MERGVAAARVGRRSRAGERRPIADGESFFSQQGLVSTHGYNMYTRGHCKRSHRSIQLLSAHHHSLYRGFYLSFGGTWHLTRGCIGFRSPAKGSALRSAGPGNCIGYVDIVQGCIVSTSWIALVRLIYLPTNLSYIYVNLVLAYRSTSIGCFSLYGICRYRLNRLARLD

SEQ ID NO: 156116 - protein, 69 aa, Oryza sativa
  Clone ID: PAT_MRT4530_55815C.1.pep
TNPPPWENNLLIKLWLAPKRLPLFFSLGAFKNFKAFFCGAPKVFFYTSFYKNFGFKKKRVFCLGPCGFF

SEQ ID NO: 156117 - protein, 75 aa, Oryza sativa
  Clone ID: PAT_MRT4530_55816C.1.pep
ASGTTYREYRGDTHGARTEHSTVYTNSHLAHKPALAHGPEQFTANGREHPIHILLRLARMARHGTWQHRMRPVHT

SEQ ID NO: 156118 - protein, 53 aa, Oryza sativa
  Clone ID: PAT_MRT4530_55817C.1.pep
FFFGSSEFCPSLSSEFFRVCLPYDRDQVSEFSLFITTMQSLILPVTITKSLFS

SEQ ID NO: 156119 - protein, 303 aa, Oryza sativa
  Clone ID: PAT_MRT4530_55818C.1.pep
MGSASLATQPSPAACLPSLPAGGRVRLRLAPPPRAPPRLCKRAGKLRVATIRSAHSGVSNVSVETPPDNEASVTGAAYGFRGATTSLTNEMLTLPKKITLVRHGLSTWNAESRVQGSSNLSVLTETGAKQAEKCRDALANMKFDVCFSSPISRAKSTAEIIWKGKEEPLIFLDSLKEAHLFFLEGMTNADAKKEYPELYTRWREDPSNFKVNGIYPVRKLWGTAREAWKEILLTPGENMLVVTHKSILRALICTALGLPPERFRSIDVNNGGMCVFTVNKRGEAMLQALNMTAHMYSDHTYQY

SEQ ID NO: 156120 - protein, 100 aa, Oryza sativa
  Clone ID: PAT_MRT4530_55819C.1.pep
VCEIQLLLVIRCVIPTLIFLRIIFCVSLRSVVGHIASNLILLATLVSNRLILIHIEGPMVGVSVSLSLNSKTQGMSIVVKSILLHQRITIWHSVLLPRVK

SEQ ID NO: 156121 - protein, 818 aa, Oryza sativa
  unsure (1)..(818): unsure at all Xaa locations
  Clone ID: PAT_MRT4530_5581C.1.pep
MAQDAGDAVLSASRITADRHLSLPRKIMPEDAAVRAGESWPRPRYPERSVHLLSFAMAGLIPPFSGLFHEVLDFYEIHALHLAPNAVMTLAIFAHLCEMFIGVRPTMRLFQSFFVPQLLQGAVVGGCYFQPWPGTAGQYIESHLRKKWEDWKKDWFYTALPDHPQLRLPAGPLERSATWLAVSELGEEYDAVRDRLRGLRSLGLTGAMVFGDYFCRRIAPLQDKSRGAWEYTGPNDPMRTHVGKRWDWGEEDAKTVIRRVLGLDTAEQTLILDGILPLCSDRDRESILXMSTVSTGRSRSRRGGTGGGAVGPGLDPPRAIAAAASLPGATPRPGSMRSATREQGAREVAARKPRLEAALSPRPRPKLGAGPSLRTRPNLPEGPKWGARGTAALPXHLGSPRGWPRRNGAERSPQSRGGSSSTLSSHGLTATFSSPTLASMKPLLQVDEGRRAVDDMVNMGRKMRQAQLAEIQVREETLDSVMRETEEERQAALIASSVLNEELGDIRLRYEAHAEDLAKRVKDARGVLDAAAARERWVSEANASLRARTAALEAERKALDERARSAQEFEATIRRRIEVLDQSQREQDARSQEQAQRAQELERRAKALEERARLLDQRESTLASHERTAAEAEASLRLCEEAAAERDRTTLAVKASAARRAKELWLREEACRERDAALAECKAEVNRREVASRQLGEQLAKHEEAVAGREARHLESARAECAAMAARASELEAREKDLAVGGQPGGAELARALEQVPEAADAIVSNFEGSAPQFTFGLASDEENGSEDGGDDAGGDDADGEDWDDVVSGADLGGPGTP

SEQ ID NO: 156122 - protein, 710 aa, Oryza sativa
  Clone ID: PAT_MRT4530_55820C.1.pep
MRHRLRLLLVVLVAAAYAAGDVASSYSQPTLPAVPPVQAVRPPPAAVGGGSHSQPTFPPRAPVRAVPPPATLVSTATPGALLAAFLAKADPSAHLRFPLAVSPCSHPAVSCSADGQITRLVLESSGLNGTFAPATLSRLVELRVLSLKSNALHGPIPDLSPLENLKALFLAGNRFSGPFPASVASLRRLRSIDLAGNRLSGALPPGIEVAFPHLTFLRLDANHFNGSLPAWNQSSLKLLNVSYNNFSGPVPVTPVMAQMGAAAFAGNPELCGEVLRRECRGSHLLFFHGPGNNGSAAPPVQSAAATGDGPQRDDISLPDSSTPRSRKLRRRAAIAVAATAAAFVAVLLLCAMIAMKRGKKRRRPSSAAYPSPKKSAAMSEVSRDNTDLGYVECVPDEETAAMMMPEEKARRLERSGCLTFCAGEGASYSLEQLMRASAEVLGRGSVGTTYKAVLDGRLVVIVKRLDAAKIGAAALEAEAFEQNMDAVGRLRHPNLVSLRAFFQAKEERLLVYDYQPNGSLYSLIHGSRSSRAKPLHWTSCLKIAEDIGQGLAYIHQASRLVHGNIKSSNVLLGSDFEACLTDNCLAFLLESSEVKDDAAYRAPENMKSNRRLTPKSDIYAFGILLLELISGKPPLQHSVLVATNLQTYVQSARDDGVDVERLSMIVDIASACVRSSPESRPTAWQVLKMIQEVKEADTAGDNDSDLTSNS

SEQ ID NO: 156123 - protein, 111 aa, Oryza sativa
  Clone ID: PAT_MRT4530_55821C.1.pep
MSMIHENILVPSTVYNIVQERKHNFEENKNEPPKLAEQSVSERFRIYEEQMMLLNVCSFAISSCDLSYDDNCNKKPRTVSRQEGEDDMTIKYMHTTKHEKYKSLPKNTSDE

SEQ ID NO: 156124 - protein, 319 aa, Oryza sativa
  Clone ID: PAT_MRT4530_55822C.1.pep
MESGVYTVLFSDKEKEGMESFTNGDVRLLKHERSIIAEDDLDNRWQAATGEAVSEVIFLSKHTAVSNRPALTVHPIGVPHLREDETPPQGGRPGWAALPNPRIGPWLRLMQKIAVDQGLVPEFEITLEATHHGPVTNTPTMFVEIGSTEEYWCRQDAAQAIALVESFSLFSSTVYMFFVLDFQEELKVLWKGLGLDEGNTVGSWQGNSEKVLLGIGGGHYAPRHMDIVIKDGIWVGHLLSGYSLPMEVSPQGNGKSYSDVGGMWKHSIKVSYDATKAAFPGGQVIAHLDQKSFKGWQKNAIMSYLQELNIRIGKPNDFI

SEQ ID NO: 156125 - protein, 76 aa, Oryza sativa
  unsure (1)..(76): unsure at all Xaa locations
  Clone ID: PAT_MRT4530_55823C.1.pep
LLKHERSIIAEDDLDNRWQAATGEAVSEVIFLSKHTAVSNRPEKVLXGVPHLREDETPPQGGRPGWAALPNPRIGP

SEQ ID NO: 156126 - protein, 93 aa, Oryza sativa
  unsure (1)..(93): unsure at all Xaa locations
  Clone ID: PAT_MRT4530_55824C.1.pep
PLIXPHFYTLGIIFQRRMTPQRXHHTIYFYTHSSCIHISSIFINPNSFFYNTFYIKHKPYSYCYHLILYYFKFFIIXPRRSVRLLRELHFCRT

SEQ ID NO: 156127 - protein, 54 aa, Oryza sativa
  unsure (1)..(54): unsure at all Xaa locations
  Clone ID: PAT_MRT4530_55825C.1.pep
TGGDFSGHPPQXRERDFQPRCGALTNQSTXLLLVGECLSRLAFISPSSLQNSLL

SEQ ID NO: 156128 - protein, 595 aa, Oryza sativa
  Clone ID: PAT_MRT4530_55826C.1.pep
MVEHGKQLAIPAKVMPLDNAVFTEVEADELSCHGTPAHCAEHGQASLVLKDDQECSASHVHGNGPVEESNGCMPNQRIDEHGQIDFGHSLQLVLFSRQWGLAESLVALADHQLMLDYGLSVALDAIWFLRTEQDLQGLNHLIGKIVESGAKDFARAILRTSLLASCVVACQSKALTLGDSKEIIAQRLHDRLQDCPGGERLQIEAGAKVQKFIEWALQCIHLHRCSEDTECYKANCSTHQEVQFHLSAFKAFLDIAGDNLSGKIFTEAFDAACFPLTLFSTLFEPGWSSGSSAVAIQGLLSLLVEGGAENVNQCFLEASRFGSTELVRILLKIAHQNSLAVDVDLALVYASHYCKFETMACLVDEGHATSFLCPLVKASERGCLQVVQWFVNRHVSDIEMCLAVTTAASCGHFAVATYLLAHIPRHVLEALSPQILKAARGQGSGSFEGVSFLLRSNFLNDAAATYAVADSIATTSTMDIPQDLVDFLKEQWSQAAFAEGVEAGEDHFVNITRVLRRGASPIRLHDLPEPMALAIAYLPLYRACASARGQLLPQRLRGELVEAVGRLGVPVNMENNRRDFLAVLEHYFPSFITGA

SEQ ID NO: 156129 - protein, 62 aa, Oryza sativa
  Clone ID: PAT_MRT4530_55827C.1.pep
MADALSVAVTSGGQAVASGGKARQQAMQDPISPPICLSLWSPESAACSVYRAEKGCKSTKVK

SEQ ID NO: 156130 - protein, 67 aa, Oryza sativa
  Clone ID: PAT_MRT4530_55828C.1.pep
KKYSRDERESLPSCTDGPLRDGTAKHHIPSVTGSDIQRWTAGPKPVTGFMVKPSQEEANDNEDAEPN

SEQ ID NO: 156131 - protein, 914 aa, Oryza sativa
  unsure (1)..(914): unsure at all Xaa locations
  Clone ID: PAT_MRT4530_55829C.1.pep
MDMPTPSNRAGCNGNTGGTMGPSDDPSGAAATNIDCSSEIYSPSVADQLFSLPNDSAAHRMFAMWPSMGSSPCAAGTSEDMPLDAYSGVGEAVEEPAQIMSVNPTEAETTGKSSGELGTDDGAHXGSSMVPVESLGSGALAEVWTPLKQEVHVVLRTCAQPFLLDQVLARDREVCMQLVFLVKEEHRLETGTPGKNSISGSAEWASDDLYYNRPEYLRMEHALHHEIRGSLAMPIYDPSKDSCCAVFELVTRKEKPDFSAEMDNAVNLKATKGSSNQKFYTENQKFAFTEILDVLRAICHAHMLPLALTWVPTSNGIDGGYVVGKDGASFSQSGKTIIRIHESACYVNDGKMQGFLQACARRHLEKGQGIAGRALKSNLPFFSPDIREYSIEDYPLAHHARKFSLHAAVAIRLRSTYTGNDDYILEFFLPVSCKGDLEPRXEQMLLNNLSSTMQRICKSLRTVYEAEVDNVNAGTAAVFRKNNESCLPTGHTESSSHGDQSITGASFEDTSLANKPGVMEPELAEQVQPSSIGHAEKKRSTAEKNISLDVLRKYFSGSLKDAAKSLGVCPTTLKRICRHHGISRWPSRKINKVNRSLKKIQTVINSVHGVDRSLQYDPATGSLVPVVSLPEKLTFPSCDGLPTPSVGKTVEENSDLKSEEGCSLPDGSQRQSCQLQISDVKKSNEDEFHIGSGNSDFYGANATAKSNSEVTQGPLCPTGAFSALHLKGTDCTNPSSSLRPSSESTRNQIVGRNSPSIQQEDLDMLDNHEAEDKDHMHPSTSGMTDSSSGSASSHPTFKQNTRSALKDAASPALTVKATYNGDTVRFKFLPSMGWYHLLEEIAKRFKLPTGAYQLKYKDDEDEWVILANDSDLQECVDVLDSIGSRIVKLQVRDLPCIVSSSGSSTCLQLAAHSS

SEQ ID NO: 156132 - protein, 67 aa, Oryza sativa
  Clone ID: PAT_MRT4530_5582C.1.pep
MRRLSGAEDEPAMNEQILSTWLGWTLYTRHLERRVVRARGVIKEVCLMKRMARMMNQGLLGSGARLL

SEQ ID NO: 156133 - protein, 83 aa, Oryza sativa
  Clone ID: PAT_MRT4530_55830C.1.pep
FYFLGPQKVNPRGAVFPAPPLVSLFWGLFFPKRGQSFPPAFLLSIFFIPPPSYLLLPVVFPCDFGPLCSVFSNLIRGLMGGPA

SEQ ID NO: 156134 - protein, 204 aa, Oryza sativa
  Clone ID: PAT_MRT4530_55831C.1.pep
LTKVKMPLPDLVSAALALDQSTLDVDQVENLIKFCPTKEEMELLKNYTGDKENLGKCEQFFLELMKVPRMESKLRVFSFKIQFGSQVADLRKSLNTIDSSCDEIRSSLKLKEIMKKILLLGNTLNQGTARGAAVGFRLDSLLKLTDTRATNNKMTLMHYLCKVLAAKSSQLLDFYMDLASLEATSKIQLKMLAEEMQAVSKGLE

SEQ ID NO: 156135 - protein, 1405 aa, Oryza sativa
  unsure (1)..(1405): unsure at all Xaa locations
  Clone ID: PAT_MRT4530_55832C.1.pep
IGADRWPREASEQLARRGGRRRGGGGGGGGGEGGTHVSVFDCCFSTDSMGEDEYRDYLSGIVAQLQDYFPDASFMVSNFWSGDKRSRISDILSEYDMTVMDYPQQYEGCPLLQLEMIHHFLKSCENWLSVEGQHNMLLMHCERGGWPVLAFMLAGLLLYRKTYTGEQKTLEMVYKQARRDFIQQFFPLNPQSSHMRYLHYITRQGSGPEKPPISRPLILDSIVLHVVPRFDAEGGCRPYLRVHGQDSSSSNKSAKVLYEMPKTKKHLQRYGQVMLTPIKVGAFCRVQGDVVLECIHIGDNLDHEEIMFRVMFNTAFIQSNILGLNRDDIDVSWNSNNQFPRDFRAEVINSAASGFSSPRTLSSVDEDTRLGTIPNVALQNADVKIITESTVIVDNELVIYEEKTIVDNGNLTQEVKNVVNEESTTPKLDRSVIESVDSQDNKNHKMEVAKAADTTDSKMEQTKLKSGMHTNNKFNVGKDAPLVSSGAQAVPKIQAAPPPPPPPPPPYASSSSLSMHMGSATKQQPPPPPPPPPLPPPPPPPASSGLSSIPPPPPPPPLMSFGAQTRTFVPPPPPPPPPPRSGVGGNTPPAPPPPPLRSTVPAISPPPPPPPPPLKPSSGAPCPPPPPPPPPPPPPSAPSSRAFSSAPPPPPPPPLLRSVPPPPPPPPISHSNAPPPPPLPAARFNAPPPPPPPPTTHFNAPPPPPPPPITRSGAPPSPPPPPSPPPPPPPPGARPGPPPPPPPPGARPGPPPPPPPPGGRPSAPPLPPPGGRASAPPPPPPPSTRLGAPPPPPPPGAGGRAPPPPPAPGGRLGGPPPPPRKSTLKPLHWIKVTRALQGSLWEELQRNDDSQSVSEFDLSELESLFPAAVPKPNDSSKSDSRRKSLGSKPEKVHLIELRRANNTEIMLTKVKMPLPDLVSAALALDQSTLDVDQVENLIKFCPTKEEMELLKVIQCLAFQNYTGDKENLGKCEQFFLELMKVPRMESKLRVFSFKIQFGSQVADLRKSLNTIDSSCDEVHLXIGISFLAINIASYVIYTXVEFLFSKKYLHHQIRSSLKLKEIMKKILLLGNTLNQGTARGAAVGFRLDSLLKLTDTRATNNKMTLMHYLCKVLAAKSSQLLDFYMDLVSLEATSKIQLKMLAEEMQAVSKGLEKVQLEYNASESDGPVSEIFREKLKEFTDNAGADVQSLSSLFSEVGKKADALIKYFGEDPVRCPFEQVISTLLTFVTMFRKAHEENRKQAELDKKRAEKEAEAEKSKAQLASKNQLRDEEGLEQPHRRSHPNEHLAQMREDGQRHHGIGCEMQGMNFVEIQNLMEKSGERWNQARHGEGQEVHGSLRISRPRPRLSRPHDGTVRHDLAGKAKVPVCCDAGGREHCVTGVLGHGNRRRGGGEHGARDGMGWREC

SEQ ID NO: 156136 - protein, 105 aa, Oryza sativa
  Clone ID: PAT_MRT4530_55833C.1.pep
MDPSSSAAAVLAAISSAGATVAGLRWLGDRVESHLVEVHGVCVLVWFIEARDMDEGPMMNVVFDTGDGDLVVLAFNARARKCAGMQQSDPFLPIVKWDGKPVGDE

SEQ ID NO: 156137 - protein, 210 aa, Oryza sativa
  Clone ID: PAT_MRT4530_55834C.1.pep
MDGTTRWRFSVFAIESAIRCSNKVKQVWIVAGVRDLLCEGEGGAMRWSHVDRRRDSTLRQGRLVAQWFFYGADCYSMRWMHGNGNDNILNHLTLIFPLTFLSIGSTPGRRRLFAARLVLAPGTPPSNSTTSYNITMTLSLRNPNLYPGISYEPVAVAFSFNGTRFVESATMPAFYRTISRGRRLRSTSRWAALTSPSASSPQRGWWHLAG

SEQ ID NO: 156138 - protein, 167 aa, Oryza sativa
  Clone ID: PAT_MRT4530_55835C.1.pep
MSMSCIELSARDQCPYDDGPFFWMTIEYDTNLKSDNLMTHEPIYRRARPAGQFNAYAATGVRGLRPARASGSSELATVDNNNTTCRQLQEYVLVRLFTISLHQRCALVRPPPRTGVLLRCYGTEQQYVMPVVTLICGTQSRKRFTYSPVLNSRGTEYTYPSDSKVFP

SEQ ID NO: 156139 - protein, 189 aa, Oryza sativa
  Clone ID: PAT_MRT4530_55836C.1.pep
MESAAALALVLAVLLLSSTLAASDFCVCRSEQPTALLQKAIDYSCGQGADCTSILSSGGCYNPNTVAAHCSWAANSYFQKFRASGATCDFGGAATLSSSDPSFSGCTFPSSASAAGTTGLSPGVGTGTGTLSPGGGIGTGTNGTGMGSALSPPGTSNFDGAAALEYPSRGHKLTRTSFLVQSVPIVSRI

SEQ ID NO: 156140 - protein, 170 aa, Oryza sativa
  Clone ID: PAT_MRT4530_55837C.1.pep
MLMEVPRGAVDAAGKARQLRDFSTRIGSSRVARSSPQARTLPSSSGPCQLRRRKDSTAYEERGPEERLVVGAASSPSRDQHYVLSPPHHCVGATKELCAELATSTTPSRISSGGSTMGSVGSLAHGGIRPCLIPRTIGVRDTSSPASLLCNRSSTSQAGTWYQYGTSCMV

SEQ ID NO: 156141 - protein, 190 aa, Oryza sativa
  Clone ID: PAT_MRT4530_55838C.1.pep
MSLAPSIPSIKVKVGGVAAVAVSPPRHRACRSSFAVIRSSKAEGAPRRPAAPPLSPPPKTPTLSTPPTLSQPPTPVKPAAPSSSPPPSQDPEPKQAAAPVAVAAPAAAGAVTLEYQRKVAKDLQDYFKQKKLDEADQGPFFGFLGKNEISNGRWAMFGFAVGMLTEYATGSDFVQQVKILLSNFGIVDLD

SEQ ID NO: 156142 - protein, 1025 aa, Oryza sativa
  Clone ID: PAT_MRT4530_55839C.1.pep
MSASSLASSSYRRRIVQSRDAVSSPAYWSRLPARARPPAHTPLGAGVLPAATSVHGVESSIITVLAMQRWETLSQMAYKSGKLDKAHGKLALRMLDSIVQQSGLDRITHIYCMAVHILVQAQMPSQAMSVLRHLALTGFSCSAIFSSLLRTISRCDPTNLFSVDLLVNAYVKEGKVLDAAAAIFFMDECGFKASLFSCNNILNALVGINKSEYVWLFLKESLDRKFPLDVTTCNIVLNSLCTQGKLSKAESMLQKMKNCRLPNAVTYNTILNWYVKKGRCKSALRILDDMEKNGIEADLYTYNIMIDKLCKLKRSARAYLLLKRMREVNLTPDECSYNTLIHGFFGEGKINLAIYIFNQMLRQSLKPSVATYTALIDGYCRNGRTDEARRVLYEMQITGVRPREVSKAKQILKCMLADGIDPDVITYSALINEGMIAEAEQFKQYMSRMKISFDVASFNCIIDSYCQRGNVLEAFSVYDNMVRHGWPPDICTYGSLLRGLCQGGHLVQAKEFMVYLLEKACAIDEKTLNTLLVGICKHGTLDEALDLCEKMVTRNILPDTYTYTILLDGFCKRGKVVPALILLQMMLEKGLVPDTIAYTCLLNGLVNEGQVKAASYMFQEIICKEGLYADCIAYNSMMNGYLKGGQINEIERLMRNMHENEVYPSSASYNILMHGYIKKGQLSRTLYLYRDMVKEGIKPDNVTYRLLIFGLCEYGLIEIAVKFLEKMVLEGVFPDNLAFDILIKAFSEKSKMSNALQLFSYMKWLHMSPSSKTYVAMVNGLIRKNWLQQSYEILHDMVESGLQPKHTHYIALINAKCRVGDIDGAFELKEDMKALGVVPSEVAESSIVRGLCKCGKVEEAIIVFSSIMRAGMVPTIATFTTLMHGLCKEFKIDDAFHLKQLMESCGLKVDVVTYNVLITGLCNKKCICDALDLYEEMKSKGLLPNITTYITLTGAMYATGTMQDGEKLLKDIEDRGIVPSYKHPESLEWRMENAIKRLNTIRNCRKGISFKNEVELLPVDHEAAN

SEQ ID NO: 156143 - protein, 902 aa, Oryza sativa
  unsure (1)..(902): unsure at all Xaa locations
  Clone ID: PAT_MRT4530_5583C.1.pep
MAQDASDAVLPASRIMTDRHLSLPRKIMPEDAAVRAGESRPRPRYPERSVHLMSFAMAGLIPPFSGFFHEVLDFYEIHALQLAPNVVMTLAIFAHLCEMFIGPRPGTAGQYIESHLRKKWEDWKKDWFYTALPDHRRLRLPGGPPERSAAWLAVSELGEKYDAVRDHLRGLRSLGLTGAMVFSDYFRHRIAPLQDRSHGAWEYSGPNDPMRTHVGERWDGARRTRRRDRDRESIMAVMSAVGAGRGRSRRGGAGDGAVGVGSGGATVGGSRTSGSGGGGSSRAPGPSRGPGIDSASDPKGKRKMSKSRPPSPPREGGAERVADRPPAGHKHPAAPEAGWKKKRLRKIGQTEPCRGSFIEPPKWTFNRPPRRGQSPNAIARGGSVSPGGDFEARIHAERHPGAGAEGGRGPEAKAGGGPKPEAEAETRGGPEPEPEAESTRGPEAGGERNSHSPLHLGRPRGWPRRRWAXEQPPISRGIQQHSVVPGVDRNFFFSDSGKYGATPAGARRRRFHRPGXLNAQVQALAEERAALEAEWAQLAADRARVDEGRRAVDDMVKVGRKMCQAQLAEIQAREETLDIVMRETEEERQAALIASSVLDEALGDIRLXRESTLAAHERTAAETEASLGLREEATAERDRTTLAAKASEARRAEELRLREEACRXEAEVNRREVALRRLGEQLAKREEAVAGREARHLESARAECAAMAARASELEAQEKDLVAGGQPGWGDRGLRLTNEIGPGQLSDAVDRLEHAGRRVGISVRWDSKLPPTQPALALWLDGLAADLERLEEEVGETVKSSSASLARAAVELVLASHQARDPDFVPWRALEDFPPGTEAKAREQVREAADAIVSNFEGSAPRFTFGLASDEESRNGDGGDDIDGEDWDDVVSSAGLGGPGTP

SEQ ID NO: 156144 - protein, 60 aa, Oryza sativa
  unsure (1)..(60): unsure at all Xaa locations
  Clone ID: PAT_MRT4530_55840C.1.pep
PGGPLLSPVTPPPKFTGQRQTSVLGRFRGATPRGFTVCPTDCPSFXAQGNSRLGFPPDPC

SEQ ID NO: 156145 - protein, 58 aa, Oryza sativa
  Clone ID: PAT_MRT4530_55841C.1.pep
LGYEYGKYSEQNKSIYLLQLHNVQKYHLKLKPEAIRTYLHSPSIICDSGYRWRRGEWG

SEQ ID NO: 156146 - protein, 180 aa, Oryza sativa
  unsure (1)..(180): unsure at all Xaa locations
  Clone ID: PAT_MRT4530_55842C.1.pep
WRKRNTIKVGRETMRSFMISKVLPAIRPCWPQEDARRTIFIQQDNARTLVPIDDEQFGAVAQMGLDIRLVNQPPNXPDMNSLNLGFFASLQSLTSTRVSTNIKELRENIHKEYNDYNPNTLNRVFVTLRSCYMDVMKTSGGNKXKIPHMNKEKLEACSILPKALCCDHQLYERAIQLIVD

SEQ ID NO: 156147 - protein, 144 aa, Oryza sativa
  Clone ID: PAT_MRT4530_55843C.1.pep
MCSGDDIDGDMRVEATQHRDIRRYKCEFCTVVRSKICLIRAHMVAHHKEELDKSEIYKSNGEKVVHEGDHTCQECGASFQKPAHLKQHMQSHSDERSFICPLEDCPFSYIRKDHLNRHMLKHQGKLFTCSMDGCGRKFSIKANM

SEQ ID NO: 156148 - protein, 123 aa, Oryza sativa
  Clone ID: PAT_MRT4530_55844C.1.pep
VFFVSLEPDDDAPCRLSLIARRSPRKATTPRHVTRPSISTPVQAYVYQSQEGSVTGLQISSGDAQVLHEKVKSQEKSPENPGTRCYMSGNIQTDSNYLAENDGGARQRTPGKSISRRVRLNPD

SEQ ID NO: 156149 - protein, 396 aa, Oryza sativa
  Clone ID: PAT_MRT4530_55845C.1.pep
MCSGDDIDGDMRVEATQHRDIRRYKCEFCTVVRSKKCLIRAHMVAHHKEELDKSEIYKSNGEKVVHEGDHTCQECGASFQKPAHLKQHMQITGWDDHLVKLQQDCLLTLFQERSYICPLEDWPFSYIRKDHLNRHMLKHQGKLFTCSMDGCGRKFSIKANMQRHVKEIHEDETATKSNRQFVCKEEGCSKVFKYASKMKKHEESHVKLDYVEVVCCEPGCMKTFTNVECLRAHNQACHQYVQCDICGEKHLKKNIKRHLRAHEEVPSTERIKCSLEGCECSFSNKSNLTKHIKASHDQVKPFACRFTGCEKVFPYKHVRDNHEKSSAHVYTQANFTEMDEQLLSCPRGGRKRKAVTVETLTRKRVTMHGDASSLDNGTEYLRWLLSGGDDDSSQTH

SEQ ID NO: 156150 - protein, 134 aa, Oryza sativa
  unsure (1)..(134): unsure at all Xaa locations
  Clone ID: PAT_MRT4530_55846C.1.pep
LQGFXXVWGXXLXNSXPISSXXXSXXXLXPXSXLKXPSXDXXRXLTDXXXRXSLXXMVGVWDXXTAXXGRXLLGWEXXLDYLXAXXGHLGVXRXDXXXLXRPXXGXXLIYLRXXPXDGRVXFLFXXXVPSXXNM

SEQ ID NO: 156151 - protein, 510 aa, Oryza sativa
  unsure (1)..(510): unsure at all Xaa locations
  Clone ID: PAT_MRT4530_55847C.1.pep
MPRTAAAAAAAPPPLLLLSAAAAAAIAIAVAVAAPDGHLVASLPGFHGAFPSNSYSGYVTVDEGSGRPLFYVRETSERDAAADPLVLWLNGGPGCSSLDGFVYENGPFNFERGSDPGGLPNLELNPYSWSKVSNVVYLDSPAGVGMSYSLNKSDYTTGDLKTAADAHTFLLKWFELYPEFQSNPFYMSGESFAGIYIPTLADEVVKGIEKDLKPRINFKGYLIGNGATDQDYDFNSFVPFAHGMGLISTELFEELKDLNKYNILAPCYHHPEIQELEFKNSSLPSSFRKLVNKYNILAPCYHHPEIQELEFKNSSLPSSFRKLGETEKRFPVRKRMAGRSWPLRAPVTRGRMTMWPELGGRSLPCTSDELANAWLDDEDVRAAIHAEPESLIGSWELYTAGIEYYHDTGDSMVKYXKKFTAMGYRALIYSGDHDLCIPYVGTEAWVRSMGYRVIDHWRPWYFGGQVAGYTQGYEHNLTFLTIKGAGHTVPEYKPKETLAFYSHWLSGKKI

SEQ ID NO: 156152 - protein, 113 aa, Oryza sativa
  Clone ID: PAT_MRT4530_55848C.1.pep
GQVILGREVAVVFAEENRKKPSEMRSRDRISGSRGRSYDQRYSRSPRYSPPPRGRSPYRSPSYSRSPSPRYARRRMRERSYSPVESRSRSRSPVEEGYGGGSTRRERSLSVSE

SEQ ID NO: 156153 - protein, 280 aa, Oryza sativa
  unsure (1)..(280): unsure at all Xaa locations
  Clone ID: PAT_MRT4530_55849C.1.pep
SDSLAIDMGRGYSYSPSPPPRSYRRRASSPIPRDRYGGRGRDLPTSLLVRNLRRDCRPEDLRRPFGQFGRLKDIYIPRDYYSGEPRGFGFVQYYDPDDAADAKYYMDGQVILGREVAVVFAEENRKKPSEMRSRDRISGSRGRSYDQRYSRSPRYSPPPRGRSPYRSPSYSSLPASNXLSPSPRYARRRMRERSYSPVESRSRSRSPVEEGYGGGSTRRERSRSPTRRRSPSTTTSSASCPGLSVRVPAAPSPRWCPRPTLACSRSTYFTRISGDGHPPR

SEQ ID NO: 156154 - protein, 62 aa, Oryza sativa
  Clone ID: PAT_MRT4530_5584C.1.pep
MATTMVGARLDGGGDVNGASDPAAERLEALLSAAVTAASMAAGDGNGGCGSRDSACGGGGGD

SEQ ID NO: 156155 - protein, 179 aa, Oryza sativa
  Clone ID: PAT_MRT4530_55850C.1.pep
MGAGEGDAAAGNKEKGGGGGVDRTSLDGVRDKNVMQLKKLNTALFPVRYNEKYYHDTIASKEFSKLAYYSDICVGAIACRLEKKEGGAVCVYIMTLGVLAPYRSLGIGSKLLNHVIDLCEKQNIPEIYLHVQTNNDDAIAFYKKFGFEITKTIEKYYKNITPPDCYVLTKFIGQAATKK

SEQ ID NO: 156156 - protein, 51 aa, Oryza sativa
  Clone ID: PAT_MRT4530_55851C.1.pep
SSSCPRSCRPRLSGCCRLHLCGCYSWYLSSRNSSCQHSRSGCACHTWSKSS

SEQ ID NO: 156157 - protein, 157 aa, Oryza sativa
  Clone ID: PAT_MRT4530_55852C.1.pep
MGTAVDDGGERPLRPSPFCSPPLADPAEGRDGGGGSGGGSNRAIAGVHVGAGPLPPLADPAEGRHGGGGSGGGRRWWRVAPPSLSLWLPSPSLPPLADPAEGRDEGGGSGGGRRRRRRRKRTRGTKKDTRRDRKGNYGRKGRGHWEDAKKKSGGGSP

SEQ ID NO: 156158 - protein, 29 aa, Oryza sativa
  Clone ID: PAT_MRT4530_55853C.1.pep
KEVMMEFVRVKWASRPYLSQGRNVIVFDR

SEQ ID NO: 156159 - protein, 574 aa, Oryza sativa
  unsure (1)..(574): unsure at all Xaa locations
  Clone ID: PAT_MRT4530_55854C.1.pep
MAITAATAAAAATPHPWQADASPRRHAACPALRGRRRLPVVRCQSSSVDDKPKSKRGLLDNASNLLTNLLSGGSLGAMPVAEGAVTDLFGRPLFFSLYDWFLEHGSVYKLAFGPKAFVVVSDPIVARHILRENAFCYDKGVLAEILKPIMGKGLIPADLDTWKQRRKGXKVITPGFHALFIDAMVGVFTKCSERTIFKLEELIERGEHGEKYTIVDLEAEFSNLALDIIGLGVFNFDFDSVTKESPVIKAVYGTLFEAEHRSTFYIPYWNLPLTRWIVPRQRKFHSDLKVINDCLDSLIKNAKETRQEADVEKLQQRDYSSLKDASLLRFLVDMRGADVDDRQLRDDLMTMLIAGHETTAAVLTWSVFLLAQNPSKMRKAQAEVDSVLSNETINVDQLKKLEYIRLIIVEALRLYPQPPLLIRRALRPDKLPGGYNGAKEGYEIPAGTDIFLSIYNLHRSPYFWDRPDEFEPERFSVPKKDESIEGWAGFDPDRSPGAMYPNEILADFAFLPFGGGPRKCVGDQFALLESTVALALLLQKFDVELRGSPDEVEMVTGATIHTKSGLWCRVRRRT

SEQ ID NO: 156160 - protein, 77 aa, Oryza sativa
  Clone ID: PAT_MRT4530_55855C.1.pep
TRRHDLQSGVLACAMFRYAQAEEPLPAVLRYPVDVDGGRRGDHAPPPMSRRTFAHIAALRLLHIHQTKSAPAIVLLD

SEQ ID NO: 156161 - protein, 94 aa, Oryza sativa
  Clone ID: PAT_MRT4530_55856C.1.pep
YISQIHIWLRSSTPNGQPKWLLSFVPDYPLLNFMLTTAIYLLLSYRVFEITGVLKGAFIPSRDNNRLYQNFIAGIAISACLYFCSLILVKITIV

SEQ ID NO: 156162 - protein, 155 aa, Oryza sativa
  Clone ID: PAT_MRT4530_55857C.1.pep
QGTPQTNQNQKKKKTSRDLLPIRLPHQVTHQEPSLLARIRVENTQHPLRSEPEHCTRDSLQSSNRRIAQNQKQKRAGHELPLLKSGSFSITCRNQRGRAARANRGWANPETGIKIEPFCRRKSRGSRRSLPPPSLPPFPLSLRWPFLGLFFCLVF

SEQ ID NO: 156163 - protein, 81 aa, Oryza sativa
  Clone ID: PAT_MRT4530_55858C.1.pep
GPQKKGWGFIAFKTNPNFMVNPIAGKSSIFRGFPKNVLTKGNWISKKKGQRVQQNKGNELGGFTPIQNKRSQKVYNWGETF

SEQ ID NO: 156164 - protein, 376 aa, Oryza sativa
  Clone ID: PAT_MRT4530_55859C.1.pep
MASLDLNQPFNWDEVEDLEGEIPDLNYDYIWYLESEDEEGGHEDVNNAAASCGNDDGGGGRGGDNDDGDGGGGGGAGGNNDDDGGGGGRAHAGMDAGSGTHDVDQNDSVIGINIKKRRHYPPDIKRTIYAKLLEKSNPGMMEGVTKSVANEMGVPLRVVQRVWRHGLEAFESKKKNYIIEKMLPAIKEKWPIEEHGLPIYIQQDNAKTHIAIDDLEFLALQSLFHKSSPSSIEEIETNENFAHDRQFNRVVITGFCIHRCPRIVDEMAWTRSDHAQPNSISACCRMRCQLPTFVLPLAGHSAIFSAISIALLAGARRCVTTKAKGREVRVDETRIGNGGGGTYDGEGVVGCIGDSIGGTNDIECEGGMDSGFKDFR

SEQ ID NO: 156165 - protein, 829 aa, Oryza sativa
  Clone ID: PAT_MRT4530_5585C.1.pep
MAQDAGDTVLPAARITVDRHLNLPRKIMPDGAVVRARELRPRPRYPERSVHLLSFAMAGLIPPFSGFFHEVLDFYEIHTLHLAPNAVMTLAIFAHLCEMFIGVRLTMRLFQSFFIPQLLQGAVVGGCYFQPRPGTAGQYIESHLRKKWEDWFYTALPDHPRLRIPASPLERSAAWLAVSELGEEYDAVWDRLRGLRSLGLTGAMVFGDYFRRRIAPLQDRSRGAWEYTGPNDPIRTHVGERWDWGKEDAKMVIRRVLGLDSAEQTLIPDGILPLCCDRDRESILAVMSVVGAGRSRSSRGGTNGSAAGVGGSGATTGGSRTSGPGGGGSSRAPGPSRGPGDDSTSDPKGKRKMPESRLPSPPRGGGAERVADRPPAGHKRPAGPEAGRKKKRLRKKDKWSRVGGASLSPRSGLSIALPAGAESSPQSRGGSSSTPSSQGQTTTFSSPTPANMEPLLQVLAAADSTVREGLNAQVQALAEERAALEAEWAQLAADRARVDEGRRAVDDMVKVGRKMRQAQLAEIQAREETLDSVMRETEEERQAALIASSVLDEALGDIRLQYESHAEDLVKRVKDARSILDAAAAQERRVSEADTSLRARTAALEAEHRALDERSRSAQEFETTIHRRIERESTLAAHERMAAEVEASLRLREEAAAKRDRVTLVAKASADRLAEELRLREEACRERDVALAEREADVNRDEVASHRLGEQLAKREEAVAGRAAIAARASELEAREKDLAAGGQPGSAELVSQPTTAQSTLADLERLVQDQAGEIAALRLTNEIGPGQLSDAVDQLERAGRRVHSQHSRSGWTGWQWIWRGWRRRLARP

SEQ ID NO: 156166 - protein, 91 aa, Oryza sativa
  Clone ID: PAT_MRT4530_55860C.1.pep
VGCPPFLPLGRPVSGPFRAPSLLIVHVFVAAPLRAPRPLRACAAVSSRVAHLVRPAFQPCGCTGRLVFFASIRVASGPYHQRRSNFQVGRL

SEQ ID NO: 156167 - protein, 255 aa, Oryza sativa
  Clone ID: PAT_MRT4530_55861C.1.pep
MAGLDLNQPFNWDEVEDLEGEILDLNYDYVCYLENEDEEGGHEDVDNTAARGDNDDGGGGGDNDDGSRGGNNDDGSDDGGGSGGGDGDNDDGGGGGGGAHAGTGTLELKAMISVTRDAIRSYLIEKILPAIKEKWPIEERGLPIYIQQDNAKTHIAVDDLEFLALQSLFHKSSPSSIEDIETNVIKAYEEYPVDKSNRVFLTQQGCVREIMRAKGGQHYAIPHLKKGTLESNGLLPIRLQCDKQIYLDALDFINA

SEQ ID NO: 156168 - protein, 723 aa, Oryza sativa
  Clone ID: PAT_MRT4530_55862C.1.pep
MLPPAPTRNPGACRFIPLLPPKPLLSPAAAAASSRGGLCVAAASRRDFLLLVPSIAAASTVLQSLPLSASAADDEKQAASPAPGPAAAPAPTSAGEPEAEALSRVYDATVIGEPQAVGKDARRRVWEKLMAARVVYLGEAELVPDRDDRVLELEVVRKLAARCAEAGRSISLALEAFPCNLQEQLNQFMDRRIDGNNLRLYTSHWAPERWQEYEPLLNYCRDNGVKLVACGTPLEVSRTVQAEGIRGLSKAQRKLYAPPAGSGFISGFTSISGRSLIDKISAIHGSPFGPSSYLSAQARVVDDYTMSQKIMKEITNGYPSGMLVVVTGSSHVIYGSRGIGVPARISKKMQKKKQVVVLLNPERQGIRREGEIPVADFLWYSAAKPCSRNCFDRAEIARVMNAAGRRREALPQDLQKGIDLGVVSPEILQNFFDLEKYPVMAELIHRFQGFRERLLADPKFLHRLAIEEGISITTTLIAQYEKRKGRFLEEIDYVLTDTIRGSVVDFFTVWLPAPTISLLSLGDNGSGESLELLKGLLGSLPDNAFQKGIMGQSWNTNQRFASVLMGGIKLAGVGFISSIGAGVASDVLYAARRVLRPSTSVETARRRTPIWKSATVYSCFLGTSANLRYQVIAGLVEHRLGEYLMAYYNQPLLANLLSFVSRTINSYWGTQQWIDLARATGLQTSKKELPSPEISNLPDMPLLECGTTEVQNMDDSNKQQPMK

SEQ ID NO: 156169 - protein, 606 aa, Oryza sativa
  Clone ID: PAT_MRT4530_55863C.1.pep
MGIAEVALHSMPGAFAAHSPASNLPLAADAARGRRRRSANSLHSSRALQGPVRFPGLRAAVECQCQRIDDLARVTEGNGAWVKDAVDKASHALGDVRVPGQAVGGNGSVNGSAAKPPPQRRKASSVEDEAWELLRESVVYYCGSPVGTIAANDPNDANPMNYDQVFIRDFIPSGIAFLLKGEYEIVRNFILHTLQLQSWEKTMDCHSPGQGLMPASFKVRTIPLDGDEDATEEVLDPDFGEAAIGRVAPVDSGLWWIILLRAYGKCSGDLTVQERIDVQTGIKMILKLCLADGFDMFPTLLVTDGSCMIDRRMGIHGHPLEIQALFYSALLCAREMLTPEDGSADLIRALNNRLIALSFHIREYYWVDMQKLNEIYRYKTEEYSYDAVNKFNIYPDQVSPWLVEWIPPKGGYFIGNLQPAHMDFRFFSLGNLWSIVSSLATTHQSHAILDLIESKWSDLVAEMPLKICYPALENQEWKIITGSDPKNTPWSYHNGGSWPTLLWQLTVASIKMNRPEIAAKAVEVAERRIAIDKWPEYYDTKRARFIGKQSRLYQTWSIAGYLVAKQLLDKPDAARILSNDEDSEILNALSTNRKRGKKVLKKTFIV

SEQ ID NO: 156170 - protein, 70 aa, Oryza sativa
  unsure (1)..(70): unsure at all Xaa locations
  Clone ID: PAT_MRT4530_55864C.1.pep
PNPGRHAPLFIHFKLKLQEPDIKCLREVHCGLRXACXERLPDLLRDHHHHTTAPLSRCCTEKGTLRXCRH

SEQ ID NO: 156171 - protein, 67 aa, Oryza sativa
  Clone ID: PAT_MRT4530_55865C.1.pep
RTRWQRQWRYACYSSWRLSWVLLFQNCCLLDACPKYKKVSSGLFMGYPPPLYKLPLLLKCSRIFFFK

SEQ ID NO: 156172 - protein, 149 aa, Oryza sativa
  unsure (1)..(149): unsure at all Xaa locations
  Clone ID: PAT_MRT4530_55866C.1.pep
MNEPGAVEELASMLTKGTSRGKKDAVMALFNLSTHPESSARMLESCAVVALIQSLRNDTVSEEAAGALALLMKQPSIVHLVGSXETVITSLVGLMRRGTPKGKXNAVSALYEICRRGGSSLVQKVAKIPGLNTVIQTITLNGXKRAKKK

SEQ ID NO: 156173 - protein, 103 aa, Oryza sativa
  Clone ID: PAT_MRT4530_55867C.1.pep
TRITRRRALSPPVAVPGRRRRRRRRRRSSREWRPRRSSSPLPPQGRGAPAPPPRVPLTWSPSARHRRASPSRSDTAAAVAAGGPLIHRHKRSWGREKLWLFFK

SEQ ID NO: 156174 - protein, 109 aa, Oryza sativa
  Clone ID: PAT_MRT4530_55868C.1.pep
MSTEIGSICSRTIMCSSVPGLALLNTSISKSWSDEELVRFLAERKAADSLPENVVVGMNFSLIDPWNSDTVQADHVLRFWGFSSLLALKCAHKRSGSSSRRIGDVMRQE

SEQ ID NO: 156175 - protein, 74 aa, Oryza sativa
  Clone ID: PAT_MRT4530_55869C.1.pep
MVSHASITHTIIGLAVRPSSQIYVSYPSAGFLQPPPCCPRGPLGHRTPLWDVMTMEIDRGWELVVRMRLSAEEE

SEQ ID NO: 156176 - protein, 526 aa, Oryza sativa
  unsure (1)..(526): unsure at all Xaa locations
  Clone ID: PAT_MRT4530_5586C.1.pep
MTLAIFAHLCEMFIGVRLTMRLFQSFFIPQLLQGAVVGGCYFQPRPGTAGQYIESHLRKKWEDWKKDWFYTVLPDHPRLRLPAGPPERSADRSRGAWEYTGPNNPMRTHVGERWDWEEEDAKMVIRRVLGLDSAEQTLIPDGILSLWCDRDRESILAVSVVGTGRSRSSRDGTGGSAADVAGGGATAGGSRTSGPGGGGSSRSPGPNRGPGDDSASDPKGKRKMSESRPPSPPRGGGAERVDRPLAGHKSPAGTEAGRKKKRLRKIGQMEPCRGSFIEPPKWTFNRPPRRLGRSKAAGPSQPLGRAHGPHTGSGPERTPAGTRPAAGDSGGDVPPGGDSETRVHAERHPGSGGEGGRGSDAEAGGGLELEVKAEIGGGPEPEAESEIGGGPKPEAEAESTRGPEAGGERDGRSPLHLGRPQGWSCXKGGREHPPVSRGIQRHSVVPGAGRNFFFSDSGKYGAAPAGARCRRFHRSGXLNAQVQALAEERAALEAAWAQLAXRVDEGRRAVDDMCSRRARGDSGEGF

SEQ ID NO: 156177 - protein, 117 aa, Oryza sativa
  unsure (1)..(117): unsure at all Xaa locations
  Clone ID: PAT_MRT4530_55870C.1.pep
RVCILDKLRLTTMLSKPSLMALGGVAVGMAVYEPLRTFMVTHWFVSLLLVGALVALLQYNEWXGGVASILNHTDAXNMVDVNGDVNSYEXLYXNDXRTGGTSTRVCWASAXRSTLRW

SEQ ID NO: 156178 - protein, 561 aa, Oryza sativa
  Clone ID: PAT_MRT4530_55871C.1.pep
MLDAFFKGAGGGGGGFRGAKCKTLLKLSIPRIKLLRNRRELQLRQMRRDIAKLLEAGQEATARIRVEHIIREENMMAAQEILELFCELIAVRLPIIETQKECPIDLKEAISSICFAAPRCADLPELMQVQMMFATKYGKEFVAAATELMPDCGVNRQIIELLSIRAPPVDVKMKLLKEIAEEHEIDWDPSATETEYLKPHEDLLNGPTYFNGSTLPLPKEKHEETLAASAAEHPDEDYESDTGLESLDLPEVPKAAIRPPSDTPATPDIDTHVQSSQPTSHEFSNMPSSQPTSHEFLNMPSSQPSSHEFSNIKSSQTTSHEFSNVQTSQLASHEFSNPSDLEENPTANAAFMTQPKGSEHIPTPFAQPSMPVSPNEKKHFVPFASPPPFAVPSLVEKNESIPSPSPSPPVKPTDPGMFRTIDEVTPPPTATDYLFSKQPEQLHSTSAENIANIDLDDVLSAAQTAAETAERAASAARAAANLAQLRIADLKKNSKAYENYSDSVRKESHPQSEVTQKPVFDHQDSFSSDTQGYVPSHLPQRSPLMEDDPYFSYPNLFSSKP

SEQ ID NO: 156179 - protein, 512 aa, Oryza sativa
  Clone ID: PAT_MRT4530_55872C.1.pep
MAEAIFSAIVGDVIGRVISLVVSNFNGDHSTEVKLQRICRMLIKIHSVVEEAKGRQITNHGTLEWLSELIDGAYQGRYLLDTIGCGEPDLDDKNRDEVDPKPFSLSKFNPAKRVRVAAFTVRNILSRHDIGVDEIDRVVESLQSMCGDLKEFMMLLQACQPIHRPLATNIFIEGQMFGRHVKKEMIINFLLHEDDLPRGKLGVLPILGDIGVGKTTLVQHACDDARVRSHFTTILLFNFSHTYKMEMCEPKPVLRPKHVIGDVGNSDDPLHELEQSFFNKRFLIVFEDVDIHKKNMLEELLKSLSCGKQGSKIIVTTSNKHVTTIGTVQPIKLKFLPCPEYWFFFKAHAFAGTDVQENPRLVAAGKSIAAKLNGSFFGAKIIGAILKENPDPKFWCTVLQRDIGGLSLLGDGLGYIADLVEILLPSRLSVKEVFVSKNPLSSETELARLQGLCLPCPSSAPLATHSSELSLAKATSYERVLLCKAVLPFYSLYYTAKCAVDSENCYSKFSVV

SEQ ID NO: 156180 - protein, 236 aa, Oryza sativa
  Clone ID: PAT_MRT4530_55873C.1.pep
MVRMKPGIYLTRTNMPSLGGGERSGRASVADEFDVVPPADSRVAATHIAYHFAAAGGAAAAEHGGGQSNPVLVVLLPFIGSERKAKQIAPQQRKASGRSRGSCAGIVMPSQESELTITNPGDVIASTYYMRARECDAGALREELWSVKAKLELAETKAVAAGALAEKAREVYERDREDMRCVVLYRYQHLNLARIVVTLSGDEAGTSAGAPLVELERTGGASRSDGLTLPLPRSHT

SEQ ID NO: 156181 - protein, 51 aa, Oryza sativa
  Clone ID: PAT_MRT4530_55874C.1.pep
LVACKNLVVLDVGNNQIGGSFPCWMHLLPKLQVLVLKSNKFYGQLGPVQCS

SEQ ID NO: 156182 - protein, 142 aa, Oryza sativa
  unsure (1)..(142): unsure at all Xaa locations
  Clone ID: PAT_MRT4530_55875C.1.pep
MNANFTLYSCYTDYTASLSKRCFGTGIVFACAITLCHDDDIRVVSGSLGVVSRLWDIIIWSYMLRMRGGSLMVTGQYGYSSTRVYSSKLISWGGYSSVFSPGCMVMTGCRKVLGSXGWLLEVLEGYRIEEISKISPMRSIRD

SEQ ID NO: 156183 - protein, 211 aa, Oryza sativa
  Clone ID: PAT_MRT4530_55876C.1.pep
MAGAGRTRSTAMAAWSYSSLLLQLLLLSMVAVLDGAATTGGGGAGAPAPAADCTDALLSLAGCLSYVQEGSTVAKPDAPCCSGLKGVVKKEVACLCQAFQGSQNFGVTLNMTKALQLPAACKVKTPPFSKCHLSIPGVTGGAPAPAPFSGAPFFGGSSPSASPAGTGSDSAAATVRAPAPSPSAAVRPKETKAALFSAAVIAAATLLAHRA

SEQ ID NO: 156184 - protein, 84 aa, Oryza sativa
  unsure (1)..(84): unsure at all Xaa locations
  Clone ID: PAT_MRT4530_55877C.1.pep
QKVQTYGKDSILPCASVQADEDATTWWPKCLSGHACILDQASADRLTVVSLSSLSXTTWXXPKCXXSGHXXCNTXXXRRQLXXA

SEQ ID NO: 156185 - protein, 151 aa, Oryza sativa
  Clone ID: PAT_MRT4530_55878C.1.pep
MVLLNLVLNSRLHDKFNTRFMDPRKVNTLMLQRYEKQTEDNIIHFLVQQHYKTFILLPYNTSFHCVILLFDLDKCKIHVYDSMDKPESNLAKIFEVIYVRENTTHDDFIRVVQEQMMGFINEQILAPTGKFYYDGKPIHQAGPSSSDLTKL

SEQ ID NO: 156186 - protein, 355 aa, Oryza sativa
  Clone ID: PAT_MRT4530_55879C.1.pep
MSRVIALPRREFTWNRGACRLRHDLLCSRTVTPFPPLPSNPRDRRLAGSEARRLAGGSGLQATGPGDGAGAKWEHNKCRLPFPIPFCGRLETGTELAKFCSHALLALDVLVHPREHCLQYDPKIPLRRAAHGDQGSLSIASDNEVLDSGRCKNLHSACKNQATENSGDEVNEWLFSTDDAPIDAFVEDNTAENHEVKEMSRDHLVQKDTVIGEHQEIVLNKFHGELLVPTSSRIDADVAIAGTKGGTYNSPADYMVGYPTHFFNVDSARISITPPDTQDLGGATFSNNKDDQHGRTISGAASSSQNVARHTAPICDASGVSGTEWDSLDPFLDIGNFGTETTFSLDMANLDPGSN

SEQ ID NO: 156187 - protein, 284 aa, Oryza sativa
  Clone ID: PAT_MRT4530_5587C.1.pep
MAQDAGDTVLPASRITADRHLNLPRKIMPEGAVVRAGESRPRPRYPERSVYLLSFAMAGLIPPFSGFFHEPRPGTAGQYIESHLRKKWEDWKKDWFYIALPDHPRLRLPAGPPERSAAWLAVSELGEEYDAVWDRLRGLRSLGLTGVMVFGDYFRRRIAPLQDRPHGAWEYTGPNDLMRTHVGERWDWGEEDAKMVIRWVLGLDSAEPTLIPDGILPLCCDRDRESILAVMSAVSTGRSRSCRGGAEGGTAGASGGGSSRAPGPSRGPEPEAEAESTRGPEARG

SEQ ID NO: 156188 - protein, 50 aa, Oryza sativa
  Clone ID: PAT_MRT4530_55880C.1.pep
LSMKMSYKLNNHYLDGEEAVAEHLVYRNKVRLVPIPVQHQTTTCDLSRQT

SEQ ID NO: 156189 - protein, 129 aa, Oryza sativa
  Clone ID: PAT_MRT4530_55881C.1.pep
MRAGSTVAVWTVAAPARESGGGARDDGLLGCWALEFARPYHEERWHGVVRRVLQREARRGARGSCSLHVSRQSVDMFWFFLLVHLDLDLRNPICIFVRNDSRYRPFMLNFSIILTGLQKKKKKKKKKKK

SEQ ID NO: 156190 - protein, 46 aa, Oryza sativa
  Clone ID: PAT_MRT4530_55882C.1.pep
QSTLLPVCPTSLSSVFVISLPSISCCPHDLYQYKADERVICRYQEN

SEQ ID NO: 156191 - protein, 515 aa, Oryza sativa
  Clone ID: PAT_MRT4530_55883C.1.pep
MDFGYVGVGQGSSSSSSSASCRAADVAAWGSSTQQQQKRQRCQVADALAKRLASASHGELGIVCDGGSVDWGKGSSDDQVGLSTSNSLQMSEPEPRDFDNGENEEEDYYLDEDDCIYDDGDGYDYEFDGGDYFNQRLADKFDDLDLPPGVEATVPWLQKIITNEEQSSSKLTVEDESANKSANKSQLFKQFDTVKNFSDHHYAATSGDVTKRDWVKRIQHDWKLLEKDLPASIYVRVAEDRMDLLRAAIIGPKGTPYHDGLFFFDIQFSNSYPANPPSVYYHSGGLRINPNLYNNGKVCLSLLGTWAGSGCETWNPSQSTMLQVLVSIQALILNEKPYFNEPGYASYANSVSGERIAMEYNDNTFLHSCRTMLYSLRRPPEHFADLVTSHFRERGHTILAACRYYMEGHKVGSVVPEEKEPEYGDAGASTSSASASAAAAALKPRPDKVDSVSRRPTFNDNLKTLFEELLMEFNVKGADTAKFLAEKVKKSSGATTTAPVGGARYAAEVVDEWMD

SEQ ID NO: 156192 - protein, 1258 aa, Oryza sativa
  Clone ID: PAT_MRT4530_55884C.1.pep
MDDDAGDGAASGGTKRKVTAASSSAAAKGKAAGKGKAASKASALATAKESSLLKQKSPAEFFAENKNIAGFDNVLIDTKNAGQPGKSLYTTMRELVENALDSAESISELPDIEIIIEEITKSKFNTMIGLVDRQRIDEELYDDFESAKAREKRLAKEARFQETQAKNAALGKKVKEAPAARGKGRGEAAFFRVTCKDNGRGMPHDDIPNMLGRVLSGTKYGLRQTRGKFGLGAKMALIWSKMSTGLPIEIKSSMKGQNFISFCLLDIDIHNKNLTIQFARRTDVMPPIPLQTKHHPSAVDLLLIKRLISETTKQNLLQFLQHEFVNISKSHAERLIGEMGPDFSAKTTVKSLTSQQLVRIHQLFRQAKFDDPSGNCLSPAGEYNLRLGIIKELHPDLVATHASSPQVFEGHPFIVEAGISIGGKDVKHGLNIFRYANRIPLLFEQGADVITRTALKRINWSSYKINQQQDKIGVFVSIVSTKIPFKGTGKEYIGDDITEIASAVQSALKQCCLQLKSKIVKKLQARERQDRKRNLNRYIPDVARAIMETLGEIADESPPKRPRYDKEDEELLEKVNSEEVTEMTFRDCLTQHVEQVDYEMALEYAMQSGLRKERNQPMETYPEETEVKKKLWHADFLAEWTECQEDMPEEKMEYWTMYFDGSKRLIGTGPGVVLISPTGERLSYVLWIHFSASHNVAEYEALLHGLRIAISLSIRRLIVRGDSQLVVNQVMKEWSCLDDNMTAYRQEVRKLEDKFDGLELTHVFRHNNEATDRLANFGSKHEAAPSDVFVEHLYEPTVPKRETAEAADTQDIAMVEADWREPLIRFQTSQELPQDKDEAERISRRSRLYIIHEANLYKKSPSRILQRCVSVNNRIWIKSTGTLTHPKISQASCFLSTVSLEEGRQLLKDIHSGICGNHAATRTIGGKAYRQGFFWPTAVSDADKIVRTCEGCQFFARQTHLPAQELQTIPLSWPFAVWGLDMVGPFKKAVGGYTHLFVAIDKFSKWIEAKPVITITADKARDFFINIVHRFGVPNQIITDNGTQLTDGVFKDFCEDFGIKICYASVAHPTSNGQVEQANGMVLQGIKARVFDRLNPYAGKWVEQLPSVLWSLRTTPSRATGQSPFFLVYGAEAMLPSEVEFESLRFRNFREERYGEDRVDDLHRLEETREAALIQSARYLQGLRRCHNRNVRSRAFLVGDLVLRKIRTTRDRHKLSPLWEGPFIISEVTRPGSYRLKREDGTPIDNSWNIEHLRCFYA

SEQ ID NO: 156193 - protein, 237 aa, Oryza sativa
  Clone ID: PAT_MRT4530_55885C.1.pep
SPQFRNVPHVHLHEKRENKDRWHGAELQVIIEGNWTTHRSKILHYMRQMAVITPYAQFLFRFLSDSPDKNLTIQFARRTDVMPPIPLQTKHHPSAVDLLLIKRLISETTKQNLLQFLQHEFVNISKSHAERLIGEMGPDFSAKTTVKSLTSQQLVRIHQLFRQAKFDDPSGNCLSPAGEYNLRLGIIKELHPDLVATHASSPQVFEGHPFIVEAGISIGGKDVKHGLNIFRYANRIP

SEQ ID NO: 156194 - protein, 82 aa, Oryza sativa
  unsure (1)..(82): unsure at all Xaa locations
  Clone ID: PAT_MRT4530_55886C.1.pep
LEAYXCNXHGIXXVYXQQXXPGXXLXWXXXXXXCXXXXXDFXXLXCXCXLXXXXXXXXPXXCPDDXWXESHXGXXSXFFXXF

SEQ ID NO: 156195 - protein, 69 aa, Oryza sativa
  unsure (1)..(69): unsure at all Xaa locations
  Clone ID: PAT_MRT4530_55887C.1.pep
NKGKTIGWQNVHGSKKKNPTPYRYQEQEPFPNFCQNLLMGXGFKSASLKITCGSPRGETPGGSPTRWPI

SEQ ID NO: 156196 - protein, 333 aa, Oryza sativa
  unsure (1)..(333): unsure at all Xaa locations
  Clone ID: PAT_MRT4530_55888C.1.pep
MASTSAAEPGVRFSDRAARRSSLGLRSMVLLMHVVFVGAVFLLDPTLDRRIREEPWYIGAYGALVLIALVQYFYTAGSSPGYVLDAMKAGSTMHATYINTATLSKQSSPNNGSLNSPLSLPQQQKLNPTTSTSTWLQRVAELYPPGSSSRDWTCTYCRVIQPPRTRHCHDCDKCVLQFDHHCVWLGTCIGKKNHCRFWWYIFEETILSIWTVALYLTRYXDVDKXWWKDFIGVILLAVLIFILIFLLLLLIFHTYIALTNQTTYEVARRKRIFYMRGIPDKVHPFSKGICRNIYVFCFSRQKGYDLEEVPPLEELEARAAPYTCRDIICCRCC

SEQ ID NO: 156197 - protein, 690 aa, Oryza sativa
  Clone ID: PAT_MRT4530_55889C.1.pep
MARWWGGEGRGGSGTPVVVKMESPEWAISEVEAGAAAPGSPAAGGKAGRGKNARQITWVLLLKAHRAAGKLTGAASAALSVAAAARRRVAAGRTDSDDAAAAPPGESPALRARFHGFLRAFLLLSVLLLAVDVAAHAQGWHAVVPDLLAVEGLFAAAYASWLRVRLEYLAPGLQFLANACVVLFLIQSADRLILCLGCLWIKLKGIKPVPKASGGGGGGKGSDDVEAGADEFPMVLVQIPMCNEKEVYQQSIGAVCNLDWPRSNFLVQVLDDSDDAATSALIKEEVEKWQREGVRILYRHRVIRDGYKAGNLKSAMNCSYVKDYEFVVIFDADFQPQADFLKRTVPHFKGNEDVGLVQARWSFVNKDENLLTRLQNINLCFHFEVEQQVNGVFLNFFGFNGTAGVWRIKALEDSGGWMERTTVEDMDIAVRAHLKGWKFLYINDVECQCELPESYEAYRKQQHRWHSGPMQLFRLCFVDIIKSKIGVWKKFNLIFLFFLLRKLILPFYSFTLFCIILPMTMFVPEAELPAWVVCYIPATMSLLNILPAPKSFPFIVPYLLFENTMSVTKFNAMISGLFQLGSAYEWVVTKKSGRSSEGDLVSLVEKQPKQQRVGSAPNLDSLAKESHPKKDSKKKKHNRIYQKELALSFLLLTAAARSLLSVQGIHFYFLLFQGVSFLVVGLDLIGEQVE

SEQ ID NO: 156198 - protein, 147 aa, Oryza sativa
  unsure (1)..(147): unsure at all Xaa locations
  Clone ID: PAT_MRT4530_5588C.1.pep
TARRGSEDGRPIKRTAXILPAPNKSHARGNRRLSHPGERASSGPAXRRRTRAAASAAAASSRPAGGRTXGWRQAVCHGIDGPARRRASDGERRCGRSSSGGXGRSSKASAKLTLPVPGEGXVWRDKLQDGCARGTRHDREKLRCGGA

SEQ ID NO: 156199 - protein, 133 aa, Oryza sativa
  Clone ID: PAT_MRT4530_55890C.1.pep
RGEEEEEGSAEERVVFSKASEKSLRSLASHSTSYSSYSCPRPRIGYAGYFRTKVSLDSTGGLTGGNLKHFGSLWGASRGKRSDFFYRIGRPFDSRIVKLGVRVSLACARLRVEGCGSCSAKFGLILKSEGVGS

SEQ ID NO: 156200 - protein, 355 aa, Oryza sativa
  unsure (1)..(355): unsure at all Xaa locations
  Clone ID: PAT_MRT4530_55891C.1.pep
MSSSSSAARTLLSPAAPPVPRRGVVRPARCSGGGGAAAVETAASGAKVCTVSNRGDSLAICRVLNGMWQTSGGWGRIDRDAAVDAMLAYADAGLSTFDMADHYGPAEDLYGLFINRVRRERPPELLEEIKGLTKWVPPPVKMTRSYVEDNINRSRKRMDVSALDMLQFHWWDYANPGYLDALKHITDLKEEGKIKTVALTNFDTDRLQIILENGIPIVSNQVQHSIVDMRPQRRMAELCQLTGVKLITYGTXMGGLLSEKFLDTNVSIPFAXGPPLEYPIFAASISGMVDAWGGWSLVYALFHTLKIVSLKHGVFTSSIQKKTFALDCLYRKVRFCQRLMCEYCSNLIFCYLPQL

SEQ ID NO: 156201 - protein, 119 aa, Oryza sativa
  Clone ID: PAT_MRT4530_55892C.1.pep
MAGPTEATANEQIQYCFCTVVVVIARQIRFSLDRSEPATASVKEGMQTCPRVPHSDPGYIYRTMLERLVNLVVKPFNLPVKKKKRGRLETKEDSATYPWFQSGACGREHVPVLHMRYII

SEQ ID NO: 156202 - protein, 90 aa, Oryza sativa
  Clone ID: PAT_MRT4530_55893C.1.pep
LLQLYWNVCDSSRKLSTGQTENNSPKEFSKIIYMHPWKYTHLFWTGSRESILLRNNRIQTLRQHQSSRLGLSWLLTATFLYPMATILFKP

SEQ ID NO: 156203 - protein, 125 aa, Oryza sativa
  Clone ID: PAT_MRT4530_55894C.1.pep
MAAPQGNNNQAAAPAAPPPLPPQPPRPPLRRQPLLDQLPRRLEHEISRIDGRIRELEDECYRLVSEGHGSTLVIRFRIEKMEALRAKLISRYLQQQQNDDGGDSNGGDSPPPPPPPAAGGAAAVN

SEQ ID NO: 156204 - protein, 198 aa, Oryza sativa
  Clone ID: PAT_MRT4530_55895C.1.pep
MKSSYSSAAVSFSRRAGEGVTGAAELEAGEANSRCSARSCGIRESDLVPRRSGLPAVGDDAARLARASPRRALLLKCHRRCTTSSRLLASPWALQDHATTSLGVATNCFSLLLLGVVVVVSYVPVVQFEFVYEASEDHFSLSKAIGVLAPLPPVATPPPPVATVVIAFASPASSSIVVVILAGLPSLPFPSPSPLFSR

SEQ ID NO: 156205 - protein, 145 aa, Oryza sativa
  unsure (1)..(145): unsure at all Xaa locations
  Clone ID: PAT_MRT4530_55896C.1.pep
AERLEVPTRISRSAPPARLVGRSPPLCLPGCLLKLYAGPTKARSRICGRRRGPIALAAQTFLFTSEPVNXGHPYKPCDQLSDAVLDACLVQDPDSQVACETCTKTNMVMALRXSTTQAPGYYEKIVRDTCRGIGFLXDDAGLDPH

SEQ ID NO: 156206 - protein, 92 aa, Oryza sativa
  Clone ID: PAT_MRT4530_55897C.1.pep
HLNNSVLKTEFQTTHHVNAKLLQLLEKSKSCCNPTIKHIAKSSFGYYNLRNNHFKTSKSLNQLNRISHHSSHYNKACTFSLSNFTSYFFSSP

SEQ ID NO: 156207 - protein, 135 aa, Oryza sativa
  Clone ID: PAT_MRT4530_55898C.1.pep
MASTACFVIVSKNDIPIYEAEVGSAPKREDQAYQHQFILHAALDVVQDLAWATNTMFLKSVDRFDDLVVSVYVTAGHTRFMLLHDSRSEDGIKSFFQEVHELYIKIFLNPLYLPGSRITSSHFDTKVRALARKYL

SEQ ID NO: 156208 - protein, 102 aa, Oryza sativa
  unsure (1)..(102): unsure at all Xaa locations
  Clone ID: PAT_MRT4530_55899C.1.pep
GGIVGPKVVKVCSGKFHPLSPFFQFRIXESLPGDPLEPPRFKPKEARYVAPTSGFGXTLQKKFXQAKKFMVGSGALGCEILKNLALKGLFCDQNGKLAVTQL

SEQ ID NO: 156209 - protein, 323 aa, Oryza sativa
  Clone ID: PAT_MRT4530_5589C.1.pep
MGSRGSTLCRGQSPNAIARGGSVSPGGDFEARIHAERHPGAGAEGGRGPEAKAGGGPKPEAEAETRGGPEPEPEAESTRGPEAGGERNSHSPLHLGRPRGWPRRRWAESSPQSRGGSSSTPSSRGWTATFSSPTPASMEPLLQVLAAADSTVREGLNAQVQALAEERAALEAEWAQLAADRARVDEGRRAVDDMVKVGRKMCQAQLAEIQAREETLDIVMRETEEERQAALAKRVKDARVVLDAAAAQEQRVLEADASLRARTAALEASPRKLRRPVARRSYGSGKRRAEREAEVNRREVALRRLGEQLAKREEAVAGREARH

SEQ ID NO: 156210 - protein, 87 aa, Oryza sativa
  Clone ID: PAT_MRT4530_558C.1.pep
MAGCLEHVARQGLTKDGCQVNMAQGKQRKEAGRERRGSPSGADEGQRRKELGSGAPAMTGEYGGMVEHLLDLAKGTAAVGSRAPAWF

SEQ ID NO: 156211 - protein, 277 aa, Oryza sativa
  Clone ID: PAT_MRT4530_55900C.1.pep
TRPEWYMKLSDFGLCKPIDCSKLSTLNEDEPMGDDNLRESMDIDSSFSETTNGRRWRSQHEQLQHWQMNRRKLAFSTVGTPDYIAPEVLLKKGYGMECDWWSLGAIMYEMLVGYPPFYSDDPITTCRKIVHWRNHLKFPEDSKVSPEARDLICRLLCDVDHRIGSAGADQIKAHPWFRGVAWEKLYEMEAAFKPQVNDELDTQNFMKFEEMDNAPTRTGSGPSRKMMLNSKDLSFVGYTYKNFDAVKGLKHSDQQRNQSLIRPSIGSIFGPAEYGSI

SEQ ID NO: 156212 - protein, 642 aa, Oryza sativa
  Clone ID: PAT_MRT4530_55901C.1.pep
MESEMADAAPAPAVAAAATAEPLAAVAEEGEEGGEAAVGSTLTMERVAAAKKFIENHYRSQMKNIQERKERFSVEKCAVNVVWMRRLCLSLSAVDNTLVAYHLFVLSGWRFRLERQLESSQVPREQQINLLKDLERKETEYMRLKRHKICVDDFELLTIIGRGAFGEVRLCREKTSSNIYAMKKLKKSDMVVRGQVEHVRAERNLLAEVASHCIVKLYYSFQDSEYLYLIMEYLPGGDIMTLLMREDTLTEHVARFYIAETILAIESIHKHNYIHRDIKPDNLLLDKNGHMKLSDFGLCKPIDCSKLSTLNEDEPMGDDNLRESMDIDSSFSETTNGRRWRSQHEQLQHWQMNRRKLAFSTVGTPDYIAPEVLLKKGYGMECDWWSLGAIMYEMLVGYPPFYSDDPITTCRKIVHWRNHLKFPEDSKVSPEARDLICRLLCDVDHRIGSAGADQIKAHPWFRGVAWEKLYEMEAAFKPQVNDELDTQNFMKFEEIHYIQIESLGVAEVRDAERSESTTMGGPGRAFVRQSRGGLGRAARLNAEGGLGWVARTRTTAGEMDNAPTRTGSGPSRKMMLNSKDLSFVGYTYKNFDAVKGLKHSDHKGTISNKALYGSILVQQIWIHLENQMEGTSTCTQFLLVIR

SEQ ID NO: 156213 - protein, 156 aa, Oryza sativa
  unsure (1)..(156): unsure at all Xaa locations
  Clone ID: PAT_MRT4530_55902C.1.pep
MGIKLCFASPTHPKSNGQVERANAEIFKGLKTKTYNVLKKHGDSWLEELPAGLWANRTTRSRAPGETPFFLVHGTEAVLPSELSLGLPRVTLYDEANQDDLCHDDLDYLEERRRCAALRAVRYQQSLWRYHXRHVRARSLQVGDLVLRRVQSRLGL

SEQ ID NO: 156214 - protein, 40 aa, Oryza sativa
  Clone ID: PAT_MRT4530_55903C.1.pep
MKMFNIPRVVDMSTVFTLESSVEIIYSVFSVALLAEVTKS

SEQ ID NO: 156215 - protein, 315 aa, Oryza sativa
  Clone ID: PAT_MRT4530_55904C.1.pep
MDNHAVAVQQRDTAPRPRARARASVSSIQGGGGPGWADHVALPRPPRCHPRRPPTPCRRPLAFASSSIHPHRAVLPSGAPPHVSAGARDTGGAAGLARPHHSFPQEKKPKPRHAGVASPRLALAPLRNSARMDRREATVFLPPPPPPQPTQPQQQPAAAAVRAPVGGRGGGGGRQYRGVRMRKWGKWVAEIREPNKRSRIWLGSYSTAVAAARAYDTAVFYLRGRSARLNFPDQLDGAGGGGAGAGGAEDHRELTAAVIRKKAAEVGARVDAQHSVVGAAAPVPLQPPQPPPPQRRRTKNPDLNREPTPDTSDDE

SEQ ID NO: 156216 - protein, 203 aa, Oryza sativa
  Clone ID: PAT_MRT4530_55905C.1.pep
GFEWRWGEVELSSFFCRRGGGGGGGAGCYAARLLVPDVVGASPRRLRWSRNCFGCAKPTPIIAVDEPSKGLRIQGRSIKQRSLSEDFWSSSPPGMENSAMQSQRSMSSISTAAQSSDQHGAGSSTNPNEFVNQGLLLWNQTRQQWVGNRRHNSQRQQPREPKISWNATYESLLGSTKPFPQAIPLGEMVDFLVDGWEQEGLYD

SEQ ID NO: 156217 - protein, 85 aa, Oryza sativa
  Clone ID: PAT_MRT4530_55906C.1.pep
MSLAFRARHAHGVARDKATQRRWQVFVAANRTPQFRYFVVASHNSGSLLEFTALASLSGLPLTTHPRAIPFAPTARRRSTYACAR

SEQ ID NO: 156218 - protein, 72 aa, Oryza sativa
  Clone ID: PAT_MRT4530_55907C.1.pep
MGEGVAIATAARDEEGSRCPASVARSPAAAEEDGDRGREVAIAIAAVAAVARGQVVEDIRPILMGLIEFYLF

SEQ ID NO: 156219 - protein, 37 aa, Oryza sativa
  Clone ID: PAT_MRT4530_55908C.1.pep
GECSTRWRSPLARHKSEYTVHTENAARDGDPLLLVTN

SEQ ID NO: 156220 - protein, 538 aa, Oryza sativa
  unsure (1)..(538): unsure at all Xaa locations
  Clone ID: PAT_MRT4530_55909C.1.pep
RRGRRSGGSRWRSTPGRRSRGRRRRPPRPCSPSCSAGSPGTGEKKRKEGGRGIRLPTGGXGAAREKGAARQTLMGRPAQEGGPRHAHGXGGKRGSRWAGSTLRGPGWDPLVGDSAHRFGEXGAAHARGSRRTRXAAGPRAASWLTADHAHGGGGKRRERLAGSADPVVPRWLRRGAYVAATRAGWRKTKAPASNGRRAATVSPGRRATTRGDGAYTGMTRENERERANGLDSPEGVRRRRIAAAATGGEKRGKRRRGHEGPIPGGESIYAATGTHPLRRIRRKRIEGGRRRETLPSSGGDGGEHTASDGSSRGDAREEMDRGGRMGECTTEMRRGAVTRXDGXGSDLSGLVPGKRKKRARPESPXRVLARAGSSDTRDGEWRTEHGRRRQWSGGDGTKREEKEEERATQQRGXELCLCPLEASARXVAGLGCDDGDDGGXVWSGAATRTAGXGQARQRLTAAATRRSATTAXARGKQRAARRFGRRRREAAARVEGARLGAAHAHACAAHGQSGGEGEREREMGREGEMGREEFGPSN

SEQ ID NO: 156221 - protein, 890 aa, Oryza sativa
  unsure (1)..(890): unsure at all Xaa locations
  Clone ID: PAT_MRT4530_5590C.1.pep
MAQDAGDAVLSASRITADRHLSLPRKIMPEDAAVRAGESWPRPRYPERSVHLLSFAMAGLIPPFSGLFHEVLDFYEIHALHLAPNAVMTLAIFAHLCEMFIGVRPTMRLFQSFFVPQLLQGAVVGGCYFQPWPGTAGQYIESHLRKKWEDWKKDWFYTALPDHPQLRLPAGPLERSATWLAVSELGEEYDAVRDRLRGLRSLGLTGAMVFGDYFCRRIAPLQDKSRGAWEYTGPNDPMRTHVGKRWDWGEEDAKTVIRRVLGLDTAEQTLILDGILPLCSDRDRESILXMSTVSTGRSRSRRGGTGGGAVGVGGCGGGAKRVADQPPAGHKRPAAPEAGRKKKRLRKIGQTEPCRESFIEPPKWTFNRPPRRGSRGPTLCRGQSPNDRSGPGLADPGPRGLHSLPVLAAADSTVREGLNAQVQALAEERAALEAEXAQLAADRTQVDEGRRAVDDMVNMGRKMRQAQLAEIQVREETLDSVMRETEEERQAALIASSVLNEELGDIRLARTAALEAERKALDERARSAQEFEATIRRRIEVLDQSQREQDARSQEQAQRAQELERRAKALEERARLLDQRESTLASHERTAAEAEASLRLCEEAAAERDRTTLAVKASAARRAKELWLREEACRERDAALAECKAEVNRREVASRQLGEQLAKHEEAVAGREARHLESARAECAAMAARASELEAREKDLAVGGQPGGAELVSQLTAAXSTLTDLELLVQDQAREVATLRLTNEIGPGQLSDAVDRLERAGRRVGISVRRDRKLPPTQPALALRLDGLAADLERLEEEAGDIVKTSSASMARATVELVLTSHQARDPDFVPWRALEXFPPGTEARALEQVPEAADAIVSNFEGSAPQFTFGLASDEENGSEDGGDDAGGD

SEQ ID NO: 156222 - protein, 440 aa, Oryza sativa
  unsure (1)..(440): unsure at all Xaa locations
  Clone ID: PAT_MRT4530_55910C.1.pep
MRAVRGGRGXAAGPRAASWLTADHAHGGGGERRERXPGRAEVAPTWRLCGCHVGRLEEDEGVGRNGRRTAAASSGANHGDTGESEHTGRLHETRGDESTARICRRESVGGGLRRRQPAERKGGNGDEVMRGRFPAVRASTRLREPTPCAGLGGNASREAGDERXLLSSGGDGGEHTASDGSXMGRRQLATGVLLERQLKAKGRRWNEEGERRNALPRXSAHRLLRHTRRRLSAGETEGXAMARARNGEDWEGKKEGRAPGFIGRQCRXGDRPWAVXGASWRSALAAKTATEADDAGGGEKRKKEGRKGACPLPLWEKKEGERAARQRGGGNSASVPWRLARGVDDDSDDGGXAVWSGAATRAAGXGQARQRLTAAATRRSANTARAXGGAAIWATPAGTAARAESEGSARLTGRAGREREREXRWGGRGRWAERNSAHRT

SEQ ID NO: 156223 - protein, 100 aa, Oryza sativa
  unsure (1)..(100): unsure at all Xaa locations
  Clone ID: PAT_MRT4530_55911C.1.pep
SILGGQGASWRSALAAKTATXRMTPAGKXKEKGREKGGLPLASLGKEGGREGDEEEPCLLSLEARAGRGGAESMTTAMTVGAVXNGAATRTAGADRRGIG

SEQ ID NO: 156224 - protein, 99 aa, Oryza sativa
  Clone ID: PAT_MRT4530_55912C.1.pep
MVQWRRDLAGAGEEKERCRVNDMSIVNWYKPGSKSPLRGGCWSLPRRKVVSSDHRLHARSHKVSKKVHRRDQDQEQQLQRDHAVAETYDIDGNQPPTDY

SEQ ID NO: 156225 - protein, 36 aa, Oryza sativa
  Clone ID: PAT_MRT4530_55913C.1.pep
ILALILNLGSLSNKMCSVQTVCIQEGAFHSTCCFSP

SEQ ID NO: 156226 - protein, 47 aa, Oryza sativa
  Clone ID: PAT_MRT4530_55914C.1.pep
MGMHYPVGNSQFPFLAVIGQQVEELNISQHENGLRMGKRRIWAVNDR

SEQ ID NO: 156227 - protein, 71 aa, Oryza sativa
  Clone ID: PAT_MRT4530_55915C.1.pep
MCDRHSEEQQGTGSRRVRCTAVLGSTLRLTGEERSCMALVLARCVRQACPRTVAAHESDKADTALKPGRLG

SEQ ID NO: 156228 - protein, 196 aa, Oryza sativa
  unsure (1)..(196): unsure at all Xaa locations
  Clone ID: PAT_MRT4530_55916C.1.pep
MVCSVGDGKLVLFWEDCWLQGSSIRSLAPAVYAAVPARFRNRRTVVEALQDKRWTRDISAALGIQAILEYLKLWDLLRSVQLGEGLDTISWRWESSGIYSARSAYRLLFLGRTNLKHKPIWKSLAPPRYRYFLWLVALNRCWTADRLRSXGLSHPAHCLLCDQCDETIDHLLDACPKSRWLWWIALSAIGHXECLP

SEQ ID NO: 156229 - protein, 377 aa, Oryza sativa
  Clone ID: PAT_MRT4530_55917C.1.pep
MAGGGGQAAGGAARGRGRRGRAWRRPAGKLLAAAVPSQRSMCCTGDEVAGPGEQRRRPLDADAGGDKGAVATTSSSLLAAPMLSRRRQAEEMAAMVSALASVVAGGGGTSLPAKRPAEREPEEGAAVEGVWWSYCSELAAAAAAPSPAAPFPAGYVPSPGQHSPASAAAGDEEELPSPSSADSSGGTARKRYRGVRQRPWGKWAAEIRDPHKAARVWLGTFDTAEDAARAYDGAALRFRGSRAKLNFPEHATLPPPPTTTTAAAHRCPPPPRTDALLESQELSPGAGGGDPYSQYARFLQGSGGDGGEAAARPGGGASQRTPPATTLLYSFEGDAASAACLWQPESGGGGMGWPATSPAAWLEYGFYPPPERRDTDT

SEQ ID NO: 156230 - protein, 836 aa, Oryza sativa
  Clone ID: PAT_MRT4530_55918C.1.pep
MDAFGWSAPAAPCQPSCGPGGDDDDDVLLAAVLGASFELHSLVDGGGNGAAGAVRSDDAYGLDVDLPSHQMSLLRCQDGLSALHGDASPTAAAAAFLDSVDVLPVPAIAGATHDDGGLLDRFAFPNVAETTTVQAAASNTAFSGYSSNTTGGGNISSGESNTYTEVASTPCAVSTTTTTTALPPSKRKLPEKYPVVGTSPTTKTTTTSETAAERRSTKRGAGGSSSITFGGGCHGAGAAAALLGYGRGYEPDTEAIAQVKEMIYRAAAMRPVTLGGAASASDPDPQTVAARLRRERVSERLRVLQRLVPGGSKMDTATMLDEAASYLKFLKSQLEALETLGNGNGNGNLLHHGYYTGSRNATATAATEPVYEDSGYAALLGAHRGLILLPYRLAVAARHRRRSRPLDPPNHRRQSLGGLASYLPPPMAPLDSGGVTASSPLPPDPQSHPSNRVRIMRAPNPTPPRDSAMARRRKGSSYRRRRRRRRRAPAACGDNRIDDLTDDLLLIILRRLDTRSALATAALSRRWSGLARAGLEALDFMVGDILPPRYHRCIQLHESASGVFDGADELRTIVASIRRHERLAMRNMVASINNFLDADDGFAHGDGGGGAPRRRISRLRVEFIATHYHDCINRLVAKAVDTWGVEDLEVLGVPSSHQAGPARLAGLHTRGSLRSSVFSSCLQLQEVHLKSCPCKRGSSVFVDAPRSMIRQLVLECCGVPGFELHALPMLESIVVMQTWVRYKLGSFPRLVRLNLKRDGLRHKLNFCLPANLDLKPHLGFTPDITDQPSKLQHKRLKELVIIGFEGTERQIYFVNFVIEVSMVLELVSLSMAVFRK

SEQ ID NO: 156231 - protein, 112 aa, Oryza sativa
  Clone ID: PAT_MRT4530_55919C.1.pep
QKSARSTASRSERREPGSTVDGDEVDAALPVAWRWRIRPPRGPAEADPASPPGPKCRHPRPRAAARRPRLPGPARRRRLTSTTVDPAWERSKTSWVTTPPQRQWIWWWRRCG

SEQ ID NO: 156232 - protein, 84 aa, Oryza sativa
  Clone ID: PAT_MRT4530_5591C.1.pep
MSKRCTIATIDGKRNKEGDSHDYMMNKDIKEQLHATAMREKRQTSTMKRPQPSMTNNSHDEGNGLRPQLSQQARDGQRMCNKVR

SEQ ID NO: 156233 - protein, 91 aa, Oryza sativa
  unsure (1)..(91): unsure at all Xaa locations
  Clone ID: PAT_MRT4530_55920C.1.pep
RAAAGGEAVAAGYTLPSARSSGRGGSGSGGAPRAAAAMGSLPPDPTGGEAMAAMAAXPIGDSGRRRRAPMGDGGGFPSARSSGLPCVVVGC

SEQ ID NO: 156234 - protein, 251 aa, Oryza sativa
  unsure (1)..(251): unsure at all Xaa locations
  Clone ID: PAT_MRT4530_55921C.1.pep
MQLNPKARTHXNKTKXKRTESVCGNPYEAHXLSPMTYTESHCLIQLNRLPXSDSNSADXVVADLDFSRILLFFWNDLPLXFRFGFIFISDTEITKFGRXIICTSGSDADIVGEASLTRMMTRTRGRLVEEPCLSNDDLVLDLDRERETGCRYXPVWYKRVSASKQVHWDELGIGQALALTIENSAKDEPLMASAAYFWSNTLNAFMFNQGPMTHTLLDITMITGLDITSSANPMTLNSKNQFEFKTKTIGG

SEQ ID NO: 156235 - protein, 44 aa, Oryza sativa
  Clone ID: PAT_MRT4530_55922C.1.pep
SLANRRRLCNSRPRPRRREGRRQGQCRGAPGQRAHGEPKATASR

SEQ ID NO: 156236 - protein, 141 aa, Oryza sativa
  Clone ID: PAT_MRT4530_55923C.1.pep
MESGGLNQRAPRNRPTQSPPAASSHTVVVVGVRAATCRHAAEEGIGEAESEETSAAEGQRRETGSAMPVDAAAVGTRQSSPRRRGGAAEVEREVRDLEEGGKPDRRRRVMPVEATIVGDAAAEREARSERGGASAIFFFLS

SEQ ID NO: 156237 - protein, 172 aa, Oryza sativa
  unsure (1)..(172): unsure at all Xaa locations
  Clone ID: PAT_MRT4530_55924C.1.pep
MNRLWMYTTDRRSKELINGSHYFFXVANAHKPKGFIYCPCEKCXNQMEYSISRILHMHLFXSGFMPSYNCWISHEELEVAMEEDXEEDDNIPDWAQYDGLPXNTTGEADGAVEENDGADDLGEMLCDVKKDCEIKKEVXKLEHMLADHKTXPGCEHVHKKLGTMLEFLQWKA

SEQ ID NO: 156238 - protein, 333 aa, Oryza sativa
  Clone ID: PAT_MRT4530_55925C.1.pep
MEPEVSAQMLGLGEDARREGLEDAQARRQWPVPRRHPMWLNSQEQNPYNSSMVIATLNTQTASQSKLHHAGSNLESIQFHVGYVPSGGRVVGLSKLSRVADVFAKRLQNPQRLASEVCGALHASIQPAGVAVALQCWHIPLPENLKCKTLQGWISTSHSSRSGVFEGESSSFWNDFSALLKLRGIDMERDSHSASIAWCPLRSHDVPVCNGHCKKATTNGAISPKSVPAPSNMVSAVSSMLLSLGEDPFRKELVGTPQRYVQWLMKFRACNLDVKLNGFTLNNLSVYQSPAGDAADHRAIHSELHLPFGAQCEHGSFLWMQASGSRENDKADS

SEQ ID NO: 156239 - protein, 83 aa, Oryza sativa
  unsure (1)..(83): unsure at all Xaa locations
  Clone ID: PAT_MRT4530_55926C.1.pep
KLIKSLEMLKADGDTLGATHHMHHFQSPLNITSYTHTHTHXGXXXGKXKKQTSPVIREKYNFKKKIXNKKILIFXPIXHXVXC

SEQ ID NO: 156240 - protein, 548 aa, Oryza sativa
  Clone ID: PAT_MRT4530_55927C.1.pep
MGALEEAHLAAAISACECECYEEEEEDDLVEGDGKAAAADAMEPAVRALLLGLGEDARREGLRRTPKRVAKAFRDGTRVCNTGNSCSNHNGCPLFISLLLPYGLQQQDNAVPCAWWLNSQEQNPYNSSMHPNPSYIMLGLILKGYKQKVKDIVQGALFPEVGVDKRTGSAGGTGGQVVVRDIDLFSYCESCLLPFSIQFHVGYVPSGGRVVGLSKLSRVADVFAKRLQNPQRLASEVCGALHASIQPAGVAVALQCWHIPLPENLKCKTLQGWISTSHSSRSGVFEGESSSFWNDFSALLKLRGIDMERDSHSASIAWCPLRSHDVPVCNGHCKKATTNGAISPKSVPAPSNMVSAVSSMLLSLGEDPFRKELVGTPQRYVQWLMKFRACNLDVKLNGFTLNNLSVYQSPAGDAADHRAIHSELHLPFCAQCEHHLLPFYGVVHIGYLDGGDGEVIDRSHFQALVHFYGCKLQVQERMTRQIAEAVYSVSHCGAIVVVEANHICMISRGIEKIRSSTATIAVLGQFLTDPSAKARFLQNVVDTTGLAV

SEQ ID NO: 156241 - protein, 225 aa, Oryza sativa
  Clone ID: PAT_MRT4530_55928C.1.pep
MASSSLFLLASLLVLASWQQAIAFDPSPLQDFCVADMASPVRVNGFPCKNPMNVTSDDFFNAAKFDMPRNTMNKVGSNVTNLNVINFPGLNTLGISLARIDYAPMGVNPPHVHPRATELLTVLEGTLYVGFVTSNPNRLFSKVVHKGDVFVFPKAMIHFQMNLDHNKPAVAQSALSSQNPGVITIASAIFGSTPPISDDVLVKAFQVEKKVIDWLKSQFSENNHY

SEQ ID NO: 156242 - protein, 78 aa, Oryza sativa
  Clone ID: PAT_MRT4530_55929C.1.pep
TRPRSRRGWRRRRRASCVLLRRRRRLVMKRTAAKPQAAARAPPPPPRGRSTPRLPRERGRRRRRRRRGRARRPRTLVP

SEQ ID NO: 156243 - protein, 86 aa, Oryza sativa
  Clone ID: PAT_MRT4530_5592C.1.pep
MPASRRRRRRRRERVKPPHAKRAKPHPPPLPHPPHARLVAAARGELERAAGRAAAKEAVVPVEGRRNVLVTSALPYVNNVPHLGNI

SEQ ID NO: 156244 - protein, 76 aa, Oryza sativa
  Clone ID: PAT_MRT4530_55930C.1.pep
LSAVYRKCNGLRANREHVLGTGACGDRLMRSNISAGKTSFRLVLLAYHAHPHALPLYLILLDLCLLKSRWTKAGPR

SEQ ID NO: 156245 - protein, 64 aa, Oryza sativa
  Clone ID: PAT_MRT4530_55931C.1.pep
MSWACPSMQRLSYLVPLFPTGIWPESPSFRDHGMPPVPTRWRGQCQRGEANSPSNFTSEDDFRF

SEQ ID NO: 156246 - protein, 66 aa, Oryza sativa
  Clone ID: PAT_MRT4530_55932C.1.pep
DLLHSYNAYETRVLLCVPPDMYYFSEHLILYICMYMSTSILPLTVYICTGSCVHNQQSDYIGLESS

SEQ ID NO: 156247 - protein, 731 aa, Oryza sativa
  Clone ID: PAT_MRT4530_55933C.1.pep
METRATECRTMQLLRELQTNKLDTSSKIIYAPRQQDDIYAGIMPELPLDKLPEDILHHVYSLMPLKDAARAACVSHGFLRCWRRYPILVLNSKTIGLAKRKLSLYAEDVPLYEPALKVDDMESYAISKIDHIINNHSGIGVKVFKLQLFACPNIDAAVLDKWFVHVIKAGIKELSLEMSLCKKRTEYNFPCSILSSKAGGGTIQSLFLSSCSFHPTVALGCNISLTSLHLYEVHISGEEIGQFLSNSFALERLVISDCNDIIQFKVPCLMQQLKYLQVTKCEMLEVISIDAPKLSSFIYGDVGIQISLGDPLQVKDIRLMGYNQPNTVCFARTELPSIMPNVESLIVSSTDEMISTPMVPIKFLHLKLLEIYLAELLAFPPNYDFFSLVSFLDGSPALETFILHVKQRCERRDSILDGEHTNLRQILHPRHANLQNVTITGFNSTKSMIELTSHILENAPSLKCITLDTANFYDKNLLTMGECLPMRKGGILEARKAFDAAKRYIAGKVPAHVEYKFLEPCRKCHIGENGCSSEKSLYSVLLFERKILENYYKRKCEKKNGKKQNKNPCYRCRFWGWFYNKWYQSLQEIHGRGAREVLHAATTTQDVQGRTWTQGGGLNRLMAAINREMTRRGAQVDGGGSDWRFNRWVGHFRRVARTFWCRRVRRGPAPGGGGGYRRKGWAAPASGGGSVGVGILTSGKPTAAAVAAFSSAVVPGRWRKGRPAPVRGSIF

SEQ ID NO: 156248 - protein, 75 aa, Oryza sativa
  Clone ID: PAT_MRT4530_55934C.1.pep
CRPYYGKPLTAARGGLFIPMIIAAQCFFQIFEVGSNYWMASACHPRTGSKSKMESTQFMVYVFISVGSALCILIR

SEQ ID NO: 156249 - protein, 748 aa, Oryza sativa
  Clone ID: PAT_MRT4530_55935C.1.pep
METRATECRTMQLLRELQTNKLDTSSKIIYAPRQQDDIYAGIMPELPLDKLPEDILHHVYSLMPLKDAARAACVSHGFLRCWRRYPILVLNSKTIGLAKRKLSLYAEDVPLYEPALKVDDMESYAISKIDHIINNHSGIGVKVFKLQLFACPNIDAAVLDKWFVHVIKAGIKELSLEMSLCKKRTEYNFPCSILSSKAGGGTIQSLFLSSCSFHPTVALGCNISLTSLHLYEVHISGEEIGQFLSNSFALERLVISDCNDIIQFKVPCLMQQLKYLQVTKCEMLEVISIDAPKLSSFIYGDVGIQISLGDPLQVKDIRLMGYNQPNTVCFARTELPSIMPNVESLIVSSTDEVHMKHMINPKSSLLFFQMISTPMVPIKFLHLKLLEIYLAELLAFPPNYDFFSLVSFLDGSPALETFILHVKQRCERRDSILDGEHTNLRQILHPRHANLQNVTITGFNSTKSMIELTSHILENAPSLKCITLDTANFYDKNLLTMGECLPMRKGGILEARKAFDAAKRYIAGKVPAHVEYKFLEPCRKCHIGENGCSSEKSLYSVLLFERKILENYYKRKCEKKNGKKQNKNPCYRCRFWGWFYNKWYQSLQEIHGRGAREVLHAATTTQDVQGRTWTQGGGLNRLMAAINREMTRRGAQVDGGGSDWRFNRWVGHFRRVARTFWCRRVRRGPAPGGGGGYRRKGWAAPASGGGSVGVGILTSGKPTAAAVAAFSSAVVPGRWRKGRPAPVRGSIF

SEQ ID NO: 156250 - protein, 110 aa, Oryza sativa
  Clone ID: PAT_MRT4530_55936C.1.pep
MAKDAEEEKKTGEKEGERAVPVITGAAALELPGRAPSCCYRQEKETGEKGRVRAILITIGAAALELPAELRPVAATVHHWSPPRTPSLSPALRSGGSGTTTGSSGGEDGV

SEQ ID NO: 156251 - protein, 203 aa, Oryza sativa
  unsure (1)..(203): unsure at all Xaa locations
  Clone ID: PAT_MRT4530_55937C.1.pep
MASDGDGAAAVAALGISGGGGDDWAPPLRRNLPLLAPHEVKLAKLLLSEGQSHLFEHWPEPGVDDDKKRNFFDQVCRLNSSYPGGLASYIQNARKLLADSKAGKNPYDGFSPSRYHNYXVPSGEVLTFGDDNFVSLEEAGVKEARHAAFVLVAGGLGERLGYKGIKVALPRETTTGKCFLQHYIESILALQGASCKLVEGECN

SEQ ID NO: 156252 - protein, 148 aa, Oryza sativa
  Clone ID: PAT_MRT4530_55938C.1.pep
RKIAHQQRACDQILDVGVRCRRRQEERKRVGRRRLRSGVGRLGTVRVGQATVGDAVEKVLRRRRGRRRRGGGRCNGAVGADGRRRLIATGNCVGLLRVQIACRMRRFELFDVGVDAFRVQAESCEHELARRFGEHVADVLPRVALRVV

SEQ ID NO: 156253 - protein, 76 aa, Oryza sativa
  Clone ID: PAT_MRT4530_55939C.1.pep
LEPVIIELERQRAPVVVISDQAVLRALYAYFADKPLEELPNIEIPLHTIIEIQMGVAGVQEKRYKLMDAVNSTAGI

SEQ ID NO: 156254 - protein, 316 aa, Oryza sativa
  Clone ID: PAT_MRT4530_5593C.1.pep
MAAAVAVAGPSMEVEQDLPGFRFHPTEEELLDFYLSRVVLGKKLHFNIIGTLNIYRHDPWDLPGMAKIGEREWYFFVPRDRKAGNGGRPNRTTERGFWKATGSDRAIRSSGDPKRVIGLKKTLVFYQGRAPRGTKTDWVMNEYRLPDYGAARAAAPPPKEDMVLCKIYRKATPLKELEQRASAMEEMQRGSSHGDYTATRASLVHDASASTGDDYFSSDDVHDSGFLIQSSSSSAAPSGSSSKNGGAGAPREAKKEEADVTVTVASATSLQLPAVSQLPSLQLPAMDWLQDPFLTQLRSPWQDQHCLSPYAHLLYY

SEQ ID NO: 156255 - protein, 87 aa, Oryza sativa
  Clone ID: PAT_MRT4530_55940C.1.pep
TGAAALELPGRAPSCCYRQEKETGEKGRVRAILITIGAAALELPAELRPVAATVHHWSPPRTPSLSPALRSGGSGTTTGSSGGEDGV

SEQ ID NO: 156256 - protein, 105 aa, Oryza sativa
  Clone ID: PAT_MRT4530_55941C.1.pep
LSASFRGLGFIGKARAYHKGVPKNKVTAKTNYSGKGSEHQSGSRSANELLPPSASFVKLSDMGSDEWSAFLDKFQELLPSAFRARKHAAADGPRPLQRLGTSCQF

SEQ ID NO: 156257 - protein, 130 aa, Oryza sativa
  Clone ID: PAT_MRT4530_55942C.1.pep
HKLDSCRFWMILRQSAQLIHPIWMSCGINSSNIAILVSSNYGVFAAFYINLTCSCLGSSSSVSRIEEFLQKRWCDSQWTSYWISIRIKPCSFLLHFKAFGPIYRGLMILVPIFHFVNWLCSVGYFSFIPS

SEQ ID NO: 156258 - protein, 241 aa, Oryza sativa
  Clone ID: PAT_MRT4530_55943C.1.pep
MSIFEDWAGKSFEIDEVTTCASLSTVLLFSLCISANAAMTDTISMGNALGRKDKLVSKNGRAKLGWDKVTGLNRRIISWKNSKDLAADFGMAKLLGRDFSRVLTMVRGTAGYLAPKWISGVPITLKVDVYSYGMVLLEIISGRRNSRTSCSCGGDHDVYFPVLVARKLLDGDMGGLVDYRLDGEIDIKEAEIACKLGHNVRSFLMMAIGEWKLEFRRNPSEADKNDLIELLDVRHDGESVR

SEQ ID NO: 156259 - protein, 81 aa, Oryza sativa
  Clone ID: PAT_MRT4530_55944C.1.pep
RIRVPWANVIFCTHIKVEHSPFILIQVIVSGKLRAQRAKSMKFKDGYMISSGQPVNEYIDSAVRHVLLRQVCLVQLKHRSI

SEQ ID NO: 156260 - protein, 655 aa, Oryza sativa
  Clone ID: PAT_MRT4530_55945C.1.pep
MADTFFPGAKLGWNKITGLNRRIISKKNLVDPATGMYCEELDPTGVNQVFLALVNSSTPYWSSGAWNGEYLSSIPKMASHNFFIPSFVNNDQEKYFTYNLANENIVSRQILDVGGQSKTFLWLEGSKDWVMVNAQPKAQCDVYSICGPFTVCTDNELPNCNCIKGFTITSLEDWVLEDRTGGCSRNTPIDCISNKTITRSSDKFYSMPCVRLPPNAQNVGSVDSSSECAQVCLNNCSCTAYSFSNGGCSVWHNELLNIRKNQCTGSSNTDGETFHIRLAAQELYSQEVNKRGMVIGVLSACFALFGLLLVILLLVKWRNKTKLSGGTRKDYQFCNGIIPFGYIDLQRATNNFTEKLGGGSFGSVFKGFLSDYTIVAVKRLDHACQGEKQFRAEVSSIGIIQHINLVKLIGFCCEGGRRLLVYEHMPNRSLDHQLFQTNTTLTWNIRYEIAIGIARGLAYLHENCQDCIIHCDIKPENILLDHSFSPKIADFGMAKLLGRDFSRVLTTTRGTAGYLAPEWISGVPITTKVDVYSYGMVLLEIISGKRNSYASCPCGGDHDVYFPVLVACKLLDGDMGGLVDYKLHGGIDKKEVEKAFKVACWCIQDDEFSRPTMGGVVQILEGLVEVDMPPMPRRLQAIAGSSNSTCSLYSLPANI

SEQ ID NO: 156261 - protein, 135 aa, Oryza sativa
  Clone ID: PAT_MRT4530_55946C.1.pep
DALTSPFTLWKPFTPASLREWATHREKAITYWATLSVTLLLTYFGSTALTQASGICVSLTEAIRCPPNIGVTAGKTLLPKGAEKGTEPRIRPLCCFFSLASTPLPTLPKSTLQEQGGKPPQAFNNPGLFPLKIPF

SEQ ID NO: 156262 - protein, 237 aa, Oryza sativa
  Clone ID: PAT_MRT4530_55947C.1.pep
MARGAAKTEGGLQVVVVVSQLRRRWGLIRPPLGRIWRPSRWIQTEETGSVRDGGRRCDGNADGATGRPAAPGEVVAGVVVGGMQGGGRPRPGRRSTTTGRPAARAEAVAGVVAATRRPRRRQLLPLLPSTSLKLGLLSQVRWPGRRRGAQREVRRWPTWVVGKEAGGEVGAASLGAMKLGNNNTLQFLRSVGVSCVQEVVLWRLGLMFKVDNRCLARFCDVFGNDDLIAVELELLCR

SEQ ID NO: 156263 - protein, 174 aa, Oryza sativa
  unsure (1)..(174): unsure at all Xaa locations
  Clone ID: PAT_MRT4530_55948C.1.pep
PVRPAAAGTPPPRERDSRRRIKSKTHSAPQERNDENGARNAPGPLQHLTAPLHRPGGEKSRRARIINSAKQGKDVAGSRRGLREAGGEGRRXPPPSSPDRRERPLVSTERQRAASPTAPPLGRRKLCPSSPGRHAPLRPPPLFTPPLAVLNHLSHKRHVGRGPSQREPRRQNEI

SEQ ID NO: 156264 - protein, 132 aa, Oryza sativa
  Clone ID: PAT_MRT4530_55949C.1.pep
MEAASKDQIGRGGGTGDADGGDGAKRKEDALASSRLLDPDFKPSKLSQDRLDKFKELHKKRLQIKEKPKCKGKSRGSTKKNTKVTSDCSIVDKDESIGNVAIDVQHTASAAGTQVDLASSLPSRNKRKLHWA

SEQ ID NO: 156265 - protein, 57 aa, Oryza sativa
  Clone ID: PAT_MRT4530_5594C.1.pep
PVSKQPTVIRAADAVLIFLGLGEAQLLSRKPFRSIGWIRAARSPTACCRLPEHSSWS

SEQ ID NO: 156266 - protein, 143 aa, Oryza sativa
  unsure (1)..(143): unsure at all Xaa locations
  Clone ID: PAT_MRT4530_55950C.1.pep
AAYVVTPMWPEGEPAGDXVQAILRWNRLTVEIMYGIVTKAIDDAGXRGQAHPCDYLNFFCLGNREAPRPGEYSPPETPDVDTDYWRAQVNRRFPIYVHAKLMIVDDEYVMVGSANLNERSLAGNRDSEIAQGSYQPAHLNGGP

SEQ ID NO: 156267 - protein, 180 aa, Oryza sativa
  Clone ID: PAT_MRT4530_55951C.1.pep
MEAASKDQIGRGGGTGDADGGDGAKRKEDALASSRLLDPDFKPSKLSQDRLDKFKGNASLVLMEFGVCRLYARILVGTENIHTLSVTGARDLESSQELHKKRLQIKEKPKCKGKSRGSTKKNTKVTSDCSIVDKDESIGNVAIDVQHTASAAGTQVDLASSFPSRNKRKLHWGYNSIIIL

SEQ ID NO: 156268 - protein, 62 aa, Oryza sativa
  Clone ID: PAT_MRT4530_55952C.1.pep
MMYINSVHYLRLGVDYNATYMQQQRNIRQSFRLPHSITNHFIGLGGVSLFGWIINPRAEFLQ

SEQ ID NO: 156269 - protein, 165 aa, Oryza sativa
  Clone ID: PAT_MRT4530_55953C.1.pep
ALSPFFPNFVAKRSVARLPMVGLISKCLGCIFVQRESKTSDFKGVSEGTTTNGDYLLPFKTGAFLAKAPVKPVILRYPYKRFSPAWDSMSGARHVFLLLCQFVNNLEVIHLPVYYPSEQEKEDPKLYANNVRKLMAVEGNLILSDLGLAEKRVYHAALNGLLCQS

SEQ ID NO: 156270 - protein, 82 aa, Oryza sativa
  Clone ID: PAT_MRT4530_55954C.1.pep
YSWCCPKRKSVPATNHTREAGGLQNLVSATGLSLFTNRTPLSTRQCASVHVVADVLPNLTLSVFLWCSTLFFPPFLSRIAVL

SEQ ID NO: 156271 - protein, 119 aa, Oryza sativa
  Clone ID: PAT_MRT4530_55955C.1.pep
GCCFEVSDASLSRAIGTVRILPFVSIKGNPGSGSFPNLKTMVLKHMPDVNQLVVAGGALPVIEGLYIVSLPELERVPQGIETLCSLKKLWLLNLHKYFKSHWTDGEMHQKMQHVPDLRV

SEQ ID NO: 156272 - protein, 236 aa, Oryza sativa
  Clone ID: PAT_MRT4530_55956C.1.pep
MRRLPLRLLRSAASSPRRRPAPSPPPSPNPAAPPALLSRWGWGWAPPRRGYSRFATGFTPLQPKPLASILDVERASGLSPDHLVAAWDDYHLGRGHIGASMSAKLYHLMEQRSATCRHFVIPLWKGTGYTTMFMQVQMPHMIFTGLEDYKARGTQASPYYTITHYTEFAETKDTVLIRGDVVFTSKLTDSEAKCLLESAHSFYLNDVRYRLVERFNKEPHEFEFKDVLQVLEMPTM

SEQ ID NO: 156273 - protein, 753 aa, Oryza sativa
  Clone ID: PAT_MRT4530_55957C.1.pep
MGKPSSSWFRAASGSGMASVGFTGVVAMLLMATAFLGVTADTSSDDVTALNTFYTSLNSPSQLTNWVAQNGDPCGQSWLGITCSGSRVITIKLPGMGLKGTLGYNMNVMTALVELDASNNNLGGGDIPYNLPPNLERLNLENNSFTGTLPYSISQMASLKYLNLGHNQLSSINVMFNQLTNLATLDLSDNTFSGTLPDSFSNLTSLTMLHLQDNRFTGTIDVLSDLPLTDLNVQNNQLSGAIPDKLKGISNLQISGNSFSNSPVSPAPSSPPSTTSQSPPRQPSTRNPRNRNRNPPIGSNGDNGGNGDGSGGDGGGRSSKIGGGAVAGIVISLVVLGAMVGFFVFKRKSTRHQHGGDPEKNEPLTLRPIASGKFNQLRTISIISPTAKEGLQKTVSMNLKPPSKIDLHKSFDENDLTNKPVLAKNVDLSSIRATAYTVADLQMATESFSADNLIGEGSFGRVYRAEISDESDHKVLAVKKINVSAFPSKPSDFFIDLVAKISKLNHPNLSELDGYCLEHGQYLLAYEFYRNGSLHDFLHLSDGYSKPLSWNSRVKIALGSARALEYMHETCSPSIIHKNFKSSNILLDNELNPHVSDCGFAELIPNQELQESDENSGYRAPEVTMSGQYSQKSDVYSFGVVMLELLTGRKAFDRSQPWPQQSLVRWASPQLHDIDALDQMVDPALEGLYPAKSLSRFADAIALCVQPEPEFRPPMSEVVQSLVRLVQRSSMGSVLSGGESISRRYDNSGDYTF

SEQ ID NO: 156274 - protein, 181 aa, Oryza sativa
  unsure (1)..(181): unsure at all Xaa locations
  Clone ID: PAT_MRT4530_55958C.1.pep
AGILGCTTKSRVVDCGPLIDRTDRRLSSIEIYLSHGQXLTVVILFFSSLPTYHMCTLKVPKKSCXHKDRARRCCLPRKWYATDGGSGSLAAXDRVXKPKQKGXLRIINLEHHNIALLMKXLDKLYNRRDLRWVKLVWTENYQSQQPPHACSEKGSFGGKTSSXLLPLYRAISKITFGIGIQ

SEQ ID NO: 156275 - protein, 367 aa, Oryza sativa
  Clone ID: PAT_MRT4530_55959C.1.pep
MERELLETFEAAKKAADAAAGADDSPEADRCLDAMRRLRGLRVTTDVLVSTQVGKRLRYLTKHPHSDIQSMATDLLGYWKKVVIEEGKKNGTTENVGSTNSAARAEKAQPMKVDKSSASGSVKPEKREVNVRGQKPESIKVEKITNNDSKNQQVKVERAPKEATRTPDTKKPSSVPNGPPKLTSLVKCNDPTRDKIRELLADAFSRVHGETSKDDREEVRNILDEVDARDPFRVAVTVESALFERLGRSTGAHKAKYRSIMFNLRADNNTDFRRRVLLGQVRPERLVDISPEEMASDARKLENKQIKEKALFDCERGGAPKATTDQFKCGRCGQRKTTYYQLQTRSADEPMTTFVTCVNCNNHWKFC

SEQ ID NO: 156276 - protein, 496 aa, Oryza sativa
  Clone ID: PAT_MRT4530_5595C.1.pep
MARKMLKDEEVEVAVTDGGSYDYDLFVIGAGSGGVRGSRTSASFGAKVAICELPFHPISSDWQGGHGGTCVIRGCVPKKILVYGSSFRGEFEDAKNFGWEINGDINFNWKRLLENKTQEIVRLNGVYQRILGNSGVTMIEGAGSLVDAHTVEVTKPDGSKQRYTAKHILIATGSRAQRVNIPGKELAITSDEALSLEELPKRAVILGGGYIAVEFASIWKGMGAHVDLFYRKELPLRGFDDEMRTVVASNLEGRGIRLHPGTNLSELSKTADGIKVVTDKGEEIIADVVLFATGRTPNSQRLNLEAAGVEVDNIGAIKVDDYSRTSVPNIWAVGDVTNRINLTPVALMEATCFSKTVFGGQPTKPDYRDVPCAVFSIPPLSVVGLSEQQALEEAKSDVLVYTSSFNPMKNSISKRQEKTVMKLVVDSETDKVLGASMCGPDAPEIIQGMAVALKCGATKATFDSTVGIHPSAAEEFVTMRTLTRRVSPSSKPKTNL

SEQ ID NO: 156277 - protein, 55 aa, Oryza sativa
  unsure (1)..(55): unsure at all Xaa locations
  Clone ID: PAT_MRT4530_55960C.1.pep
NKIXPCTLQYMGMNFTTVRYLFNQHXFRCTHSXCXXHINRSGAXGGHGEAALAGQ

SEQ ID NO: 156278 - protein, 130 aa, Oryza sativa
  Clone ID: PAT_MRT4530_55961C.1.pep
MWATNGPQSLGMHLGVKLALRRPNGSVPPPPRYLLRPSGRRRGVVMARLMSSALIRGLDIKENPVLIYMKGYPDAPRCGFSALAVRVLKQYDVPISARDILGDLKLKESVKAHTESIDHNKRMTGGGIGG

SEQ ID NO: 156279 - protein, 126 aa, Oryza sativa
  Clone ID: PAT_MRT4530_55962C.1.pep
MGARRKPTVGLVSSPDAVVEVGISRILLEGEEREMEMEMEENEGLINRWALYFCSVHEKWIKPTISYVLSVTKEACIFVVATQEEMNQMAGTICEVNFYFQLEASYEDRNQTIKWSELSRAMGLKW

SEQ ID NO: 156280 - protein, 322 aa, Oryza sativa
  Clone ID: PAT_MRT4530_55963C.1.pep
MPAFKAPAPGFSVRFSPFHEQRLLAAASQHFGLVGNGHLLVLDLSAAAAPGGAPAPPPVFAFPTSDALFDCAWSESHESLCAAASGDGSVRLFDVALPPAQNPVRLLREHAREVHGLDWNPVRRDAFLSASWDDTLKLWSPDRPASVRTFRGHEYCVYAAAWSARHPDVFASASGDRTARVWDVREPAPTLVIPAHDHEVLSLDWDKYDPSILATGSVDKSIRVWDVRAPRAPLAQLAGHGYAVKRVKFSPHRQGMLMSCSYDMTVCMWDYRKEDALLARYGHHTEFVAGIDMSVLVEGLLASTGWDEMIYVWPFGSDPRAM

SEQ ID NO: 156281 - protein, 89 aa, Oryza sativa
  Clone ID: PAT_MRT4530_55964C.1.pep
TSPTPRPTPWSQDDRRHPRADRRGHAACQARPLRRRRWRRPRRRGAPDDVGWLDGVPLRESLQILPAVPELQPHQALLLINLLPPGLIN

SEQ ID NO: 156282 - protein, 159 aa, Oryza sativa
  unsure (1)..(159): unsure at all Xaa locations
  Clone ID: PAT_MRT4530_55965C.1.pep
GRHDSDDGGDRRRGSSGRSRCGRAAREGRCAGGGGRSGTRAPPPAAAHEAHNAAAGEGAAGGRRGRSGGXADGGAARGRRERRKARQPHADTNDHHARRHLHRLHHYRLLARASTRQSSPSGGASRGCGSPPGPSSSASSPPTSRSSSPSCASPEAAPT

SEQ ID NO: 156283 - protein, 164 aa, Oryza sativa
  Clone ID: PAT_MRT4530_55966C.1.pep
MAGSVVTRSPLCSILFYVLATAAAATATATLVGNITADEEYWAKRSEVARSFNRAAYVSDPVAVLNRFNEDVLNTTTATAAAARRSLMRRYRRRGPCTVTNPIDLCWRCRKNWASRRKRLAKCAMGFGHKATGGLAGKIYIVTDAGDEHLVIPRRGTLRHAVIQ

SEQ ID NO: 156284 - protein, 48 aa, Oryza sativa
  Clone ID: PAT_MRT4530_55967C.1.pep
MLGSSRIRHRPFSSALGSGQIQCLLPLLYGVAYGQRDFSITVSVGYFT

SEQ ID NO: 156285 - protein, 169 aa, Oryza sativa
  Clone ID: PAT_MRT4530_55968C.1.pep
MGPNGTQTQQQVRGDMHAPAGSHLFHFSNSWKKRQETNTSSSSQCNSTPQKGLPNDTAHIITPATHLHKVSVTATADDESLFIRMIYDSHEEQKLQRIQDSDWMMMMETQYYIFRGLSFGVRDNYKSRTMKKIAQKTEILGSSTSTKVEILYRSTSNQAELQSRHAPIQ

SEQ ID NO: 156286 - protein, 135 aa, Oryza sativa
  unsure (1)..(135): unsure at all Xaa locations
  Clone ID: PAT_MRT4530_55969C.1.pep
LAVAGTTWRXGTTWRRRRRGGRGPCGGDSDGEGVEVLAAASATARGGATSGRSRRWRGRLGGGDNGDGDLAQIIACGRLKGPHGKMIFPCGRHKPAACENYLSMRAVKPAACEKDISVRAVKTAACKKDLSIRLT

SEQ ID NO: 156287 - protein, 51 aa, Oryza sativa
  Clone ID: PAT_MRT4530_5596C.1.pep
MAEGQDGYFDSSTDSLRVEPIYESFLCPLSKQVMRDPVTIESGATFEREAI

SEQ ID NO: 156288 - protein, 155 aa, Oryza sativa
  Clone ID: PAT_MRT4530_55970C.1.pep
HEGQISPPLFLCCAFLSAGDTLPLPLPAALLPLLLPTLVTPLPYPSARRPLPRQWLRLQAADLASARGASGGSTSGKAWGGAVKPQEVEIGRVLRAADSVAARVAGGGSGVSSGHGRRRRSSHGRRYRRQTSGRWVKALEVELGRGLYAADLASA

SEQ ID NO: 156289 - protein, 595 aa, Oryza sativa
  unsure (1)..(595): unsure at all Xaa locations
  Clone ID: PAT_MRT4530_55971C.1.pep
MIMTREFYTKYLKLNKLFSFIIARHGLTMEIDDEIAADGNDKEGLQEIVNNSKLSEGYLTLARDIEVMEAKSPEDIYKVHLIDGRGASSSLDSARQNLAATFVNAFVNAGFGQDKLMTAPSDSSSSGASGNWLFKNKEHGKASAAASLGMILLWDTDSGLAQLDKYLHSNDAHVVAGALLGIGIVTCGVKNDCDPALAILMEYINKDDTNIRIGAILGLGIAYAGSQKEELKSYLSTVLGDSEKSTLEVLIFSAIALGLVFVGSCNEEIAQSIIFALMERSEAELAEPIIRLLPVALGLLYLGKQESVEATAEVSKTFDEKIRKYCDVTLMSLAYAGTGNVLKVQKLLGICSQHLEKGETHQGPAVLGIALIAMAEELGAEMAVRSLERLLQYGEQNIRRAVPLALGILCISNPKVNVMDTLSRLSHDADADVSMAAIISLGFIGAGTNNARIAGMLRNLSSYYYKEAAHLFCVRIAQGLVHLGKGLLTLXMKSIILGKYHYMLYILALAMQPRMLLTVDEDLKPLSVPVCVGQAVDVVGQAGRPKTITGFQTHSTPVLLAAGERAELATEKYLPLTPVLEGFVILRNNPEYHED

SEQ ID NO: 156290 - protein, 302 aa, Oryza sativa
  Clone ID: PAT_MRT4530_55972C.1.pep
LILGWRYTIFLLLYCAAFNPRMLFLVKPDPIVLKDHHGVVLSGNVTVNVLYYGRFTPAQRAVVAGFVRSASAAQHPRVPSVAAWWSTTSLYRGGGARLRLGMQVMDERMSLGRSLSLDNVTALTRAAGHHRGAVTAVLTAPDVLVAPFCMSRCGVHGHGGGVGAHGRARYAYLWAGNPAQQCPGQCAWPFHQPVYGPQAPPLVPPNGDVGVDGMVISLAALLAGTVTNPFGDGYYQGDAGAGMEAATACAGVFGSGAFPGYPGKLLKDPVTGASYNAVGLAGRKYLLPALWDPTTSQCKTLV

SEQ ID NO: 156291 - protein, 869 aa, Oryza sativa
  Clone ID: PAT_MRT4530_55973C.1.pep
MPPREDPNGDASSASPSDPVPPPPQQPQPQPAKGKGKKKDEKKDDDLSEEDQALKEQLELYVVRAQDTDPGVQKLALESMRQEIRSATSSMTSVPKPLKFLRPHYGTLKAYFETMPESDLKKYMADILSVLALTMSAEGERESLNYRMIGSEGDIGSWGHEYVRNLAGEIAQEFQKRQDDGMPTDSLKELVEQIVSFHMKHNAEPEAVDLLMEVEKLDLLVKHVDSTNYKRTCLYLTSSSKYLPAPDDMSALKIAFEIYMKFGDFANALRIALLLYDKSLELKPIFTATDDFQLKKQFAFIIARHGLSIEIDDDIAADENEKEALQDIISNIKLSEGYLTLARDIEVMEPKSPEDIYKVHLIDGRGATSSSLDSARQNLAATFVNAFVNAGFGQDKLMTTPSDSSSSGSSGNWLFKNKEHGKASAAASLGMILLWDSDSGLAQLDKYLHSNDIHVVAGALLGIGIVSCGVKSDCDPAFALISEYFSRDESIIRIGAILGLGIAYAGSQKEEVRENLTAFLTDSQVPLEVLVFSAISLGLVFVGSCNEEVAQTIICVLMERSEPELAEPIMRLLPVALGLLYLGKQESVEATAEVSKTFDEKIRNYCDVTLMSLAYAGTGNVLKVQKLLGICSEHLEKGETHQGPAVLGISLIAMAEELGAEMAVRSLERLLQYGEQNIRRAVPLALGLLCISNPKVNVMDTMSRLSHDADAEVSMAAIISLGLIGAGTNNARIAGMLRNLSSYYYKEAGHLFCVRIAQGLVHLGKGLLTLSPYHSDRFLLSPIALAGLVTVLHACLDMKSIILGKYHYMLYILTLAMQPRMLLTVDEDLKPLSVPLIFAYAYAYALSMCRYLPLTPVLEGFVILRKNPE

SEQ ID NO: 156292 - protein, 316 aa, Oryza sativa
  Clone ID: PAT_MRT4530_55974C.1.pep
ESVEATAEVSKTFDEKIRNYCDVTLMSLAYAGTGNVLKVQKLLGICSEHLEKGETHQGPAVLGISLISMAEELGAEMAVRSLERLLQYGEQNIRRAVPLALGLLCISNPKVNVMDTMSRLSHDADAEVSMAAIISLGLIGAGTNNARIAGMLRNLSSYYYKEAGHLFCVRIAQGLVHLGKGLLTLSPYHSDRFLLSPIALAGLVTVLHACLDMKSIILGKYHYMLYILALAMQPRMLLTVDEDLKPLSVPVRVGQAVDVVGQAGRPKTITGFQTHSTPVLLAAGERAELATEKYLPLTPVLEGFVILRKNPEYHED

SEQ ID NO: 156293 - protein, 42 aa, Oryza sativa
  Clone ID: PAT_MRT4530_55975C.1.pep
GCCAYSLMLWKQGQQESSFLCSCTRTAFALTVPTFKKKRGRV

SEQ ID NO: 156294 - protein, 277 aa, Oryza sativa
  Clone ID: PAT_MRT4530_55976C.1.pep
MACRGFFEWVLKLLNLVVMVVGLAMMGYGAYLLVAWLQLLPSPPLPPAPAVAPGGGGGSEMVRLGRPLLLLLDVSSLPDGTAEKLSAAWFIYTFIGVGVILFITSIFGCAGASRGGCCLSFYSFLIILFILVELAAGGFIFFNHSWKDVIPVDKTGNFDMMYSFLKENWRIAKWVALGAVLFEAVLFTVALIVQSGNQADYDSDDEYIAPRSSTRQPLVNKQPVADPRVPNLDYRPIRNDAWSQRMREKYGVDTFDPNRFQQATISPAEQRNRCAIL

SEQ ID NO: 156295 - protein, 595 aa, Oryza sativa
  Clone ID: PAT_MRT4530_55977C.1.pep
MPPRKDPNGGAFPSEPAPPQPAKAKGKKKDENKDDDLSEEDQALKEQLELYVVRAQDPDPGVQKLALESMRQEIRSATSSMTSVPKPLKFLRPHYGILKAYFETMPESELKKYMADILSVLALTMSAEGERESLKYRMIGSEGDIGSWGHEYVRLYLEITLEFSVFLFPLFVIENKIGFSNNVNVSLARNLAGEIAQEFQKRQDDGMTTDSLKELVEQIVSFHMKHNAEPEAVDLLMEVEKLDLLVKHVDSTNYKRTCLYLTSSSKYLPAPDDMSALKIAFEIYMKFGDFANALRIALLLDDKGLSTDIDDDIAADENEKEAFQHIISNIKLSEGYLTLARNIEVMEPKSPEDIYKVHLIDGRGATSSSLDSARQNLAATFVNAFVNAGFGQVSYANFIKDSSGSGSSGNWLFKNKEHGKASAAASLGMILLWDSDSGLAQLDKYLHSNDIHVVAGALLGIGIVSCGVKSDCDPAFALISEYFSRDESIIRIGAILGLGIAYAGSQKEEVKILALGLAIPLVRENLTAFLSDSQVPLEVLVFAAISLGLVFVGSCNEEIAQTIICVLMEHSEPELAEPIIRLLPVALGLLYLGKQ

SEQ ID NO: 156296 - protein, 185 aa, Oryza sativa
  Clone ID: PAT_MRT4530_55978C.1.pep
ESEADQQRICGLSQNQSDWAPSLSAAWSSCFCPSPTCRLLASRCCRGTRHVCCGPSRSSAPSMVPTASGIATKNIDGVAFPFSSSRASGSSTADHSAAVADRQATTPGPLQRRRSSRLGLESPSSTWVPLQGSDGRHPPRLWMHEGDNELLEGGEEDSNLASLHANAILNLVDRVLAVEVGQQAK

SEQ ID NO: 156297 - protein, 124 aa, Oryza sativa
  Clone ID: PAT_MRT4530_55979C.1.pep
RTRGRTRGRTRGRTRGRTRGRTRGILGKYHYMLYILALAMQPRMLLTVDEDLKPLSVPVCVGQAVDVVGQSGRPKTITGFQTHSTPVLLAAGERAELATEKYLPLTPVLEGFVILRNNPEYHED

SEQ ID NO: 156298 - protein, 104 aa, Oryza sativa
  Clone ID: PAT_MRT4530_5597C.1.pep
MEAAAGGAREVHVMKKTCKNLKTKEDAAGGNVAVRKEQVMKTTKGLKKSPPPPSSSPEQVKMPCRSYSAENIKHRLTKTVKEHRARFYIIRRCIQMLICWRDEY

SEQ ID NO: 156299 - protein, 78 aa, Oryza sativa
  Clone ID: PAT_MRT4530_55980C.1.pep
MAPPSRHVHAPPSSSAAAHEARQQGGERPEELHPGAELRDVKYKWNMCTSSRNASNGWSHRPANLGSRIDSSENSIKF
